United States Patent Application Publication US 2017/0009304 A1 - sequence listing, part 36

SEQ ID NO: 755520 - DNA, 51 bp, Homo sapiens
agcgagtcgacttcccatcctgagttggtaccaccctcgggtgctctacat

SEQ ID NO: 755521 - DNA, 75 bp, Homo sapiens
acttaaatgaagccactgattagcaatttaaagatcctctccaagtaacaaatgtggcaattattttggatctat

SEQ ID NO: 755522 - DNA, 97 bp, Homo sapiens
cgggaggagcctgttcccctgagggatgatatcgctgatttagtagaagctaaaaagttgcttaaggaagccgtagtgttaccaatgtggatgcccg

SEQ ID NO: 755523 - DNA, 51 bp, Homo sapiens
gttacagctgctcatgaaccacttggcaaatcttcccaagggattgttgaa

SEQ ID NO: 755524 - DNA, 51 bp, Homo sapiens
gtggcagaatcacagctggtgttaacgagggtttgtggatgcacttagatg

SEQ ID NO: 755525 - DNA, 98 bp, Homo sapiens
gaagtcaattcaaaggacctgcccccagagagagagatattaaaggctattcaggatgtgacaataaagcgggaagaaacaaagaagaagatagagaa

SEQ ID NO: 755526 - DNA, 101 bp, Homo sapiens
aagttatgaagctctttaccctgtacctcagcatgaactgcagcaaggacaaaaacctgatttgtgcatcatttctggcatggcttcaggaagcattgtgc

SEQ ID NO: 755527 - DNA, 50 bp, Homo sapiens
cgccgcgccaggccgggcggcagcctcctgacaaggtgatccgggcgggc

SEQ ID NO: 755528 - DNA, 82 bp, Homo sapiens
gttttatcaacaacaagctggaggattggaatctgatgcatcatctgcatcaggtccaggtgcaggtacagcagtctccgca

SEQ ID NO: 755529 - DNA, 100 bp, Homo sapiens
agacagaagccaaacaggaggaggaagtggagggctgagtcatcactagagagtgggaagggcagcagcagcagagaatccaaaccctaaagctgatatc

SEQ ID NO: 755530 - DNA, 90 bp, Homo sapiens
caggcagttggttgggacccgctccaaccctcggttcggctttccagtttggcagcagcactacaaatttcaacttcacaaacaacagtc

SEQ ID NO: 755531 - DNA, 75 bp, Homo sapiens
cgagatcttccgccactacgattctagcgactgcgaagatagctcgctgagctggaaccccacagatcaccaaca

SEQ ID NO: 755532 - DNA, 100 bp, Homo sapiens
tcgtggaggagatgaaggcagtggacacacagcatggagaaatccttcgcaatgtcaccatcctacgagatttcagaagaaagtggtagcttcctttcca

SEQ ID NO: 755533 - DNA, 75 bp, Homo sapiens
caacaggagacaagggcggcagagttgttatttttcagcgtgaacaagagttcacaagattcctttgcagttcac

SEQ ID NO: 755534 - DNA, 100 bp, Homo sapiens
ccgtggggcctctgtgcagctggtgtttggctttgagatgcaagtgctgctggaccaggcgggctgctgtatcgtgggtcagagtgagcagctggttcct

SEQ ID NO: 755535 - DNA, 100 bp, Homo sapiens
agagaatgagccagagggacacgctggtgcatctgtttgccggaggggccagactttggcagcgtgtaaggtctgaggacaggggcaccggaggccgagg

SEQ ID NO: 755536 - DNA, 100 bp, Homo sapiens
agatttcgttcggcgtgttgagcagcgaaagatcctactggacatgtcagtgtcctttcacacccatgtgaaagagcctaccgtatgtgaacgggagctg

SEQ ID NO: 755537 - DNA, 100 bp, Homo sapiens
cggccagcgcgcattcggccccggacgaaggtactcgcagcacttggagcgcagaaccggccgcgcccggttggtcaaagaaaaagtgatgtatgaaaaa

SEQ ID NO: 755538 - DNA, 75 bp, Homo sapiens
cctttatgaaccagtgtatcccaaattaacttcatctaccttgccaagagcacaaaaaaaaccatgctaacttta

SEQ ID NO: 755539 - DNA, 90 bp, Homo sapiens
atgtgtgatttcagtggaataaatggcgtccaaagtcacagatgctatagtctggtatcaaaagaagttgcctagacctggagcagtgtt

SEQ ID NO: 755540 - DNA, 83 bp, Homo sapiens
aagaggtttagtgccctcctgagtgactgcgtcaggcatctcaatcatgtttcccaggcaaggcttgcagcagacccagcagc

SEQ ID NO: 755541 - DNA, 100 bp, Homo sapiens
ctatgccaaggcaagaaccgcaaatagtcatctctctaatcttgttcttcacggtgatattccacaaggattggcacagctgcactggccgttcaggttg

SEQ ID NO: 755542 - DNA, 100 bp, Homo sapiens
caagcgcgacgccaggctgagaccgtccagactagagtacaagtactccaagctggtgatgaatgctactctcaaggactgtgacctgccagcagctgac

SEQ ID NO: 755543 - DNA, 96 bp, Homo sapiens
agccagaaggacgacgtccacgtctgtattatgtgcctacgcgccatcatgaactaccagataccccagaatcttccatgctccgtcacactgcag

SEQ ID NO: 755544 - DNA, 75 bp, Homo sapiens
tatctttaagagcagcttattccaagctttgctagggtaagcttgatgattaccaggaacgaatgaacaaagggg

SEQ ID NO: 755545 - DNA, 82 bp, Homo sapiens
gcttaggagttggtttggaaacaaagactttcaggccctacctatactagctaggttttacttgtaatggacacaaggacag

SEQ ID NO: 755546 - DNA, 83 bp, Homo sapiens
cccaggcctatgccaatcagcatttcacattcctcatggttggttcaaagttgctggatttgtgcgactcggtgaaggatgat

SEQ ID NO: 755547 - DNA, 75 bp, Homo sapiens
caggaagatttccagtcccgcccgatttttttcggagcaacatcccctgtcacctggttgatatctcttgcggat

SEQ ID NO: 755548 - DNA, 98 bp, Homo sapiens
aaccaatgtggaatacattcaaactgatgcagctattgatctttaagagcaggaagtgtggggatgcctttgcagaagccctctccaggagcttgccg

SEQ ID NO: 755549 - DNA, 82 bp, Homo sapiens
gaaaaggaatcgtatcgtatgtccgctatccagaacctccactctttcggagaacatttcaggataggaataggccaagtgc

SEQ ID NO: 755550 - DNA, 100 bp, Homo sapiens
agggtcgatatttgggcctttggacttgttttgtgggaagtggccaggcggatggtgagcaatgatgatggtggtgctaccccagtacaggatgaacggg

SEQ ID NO: 755551 - DNA, 76 bp, Homo sapiens
ttggaccttccggagcttctcagaagacagagggttttcttttgaggtatactgcaacatccagatggcacagttt

SEQ ID NO: 755552 - DNA, 96 bp, Homo sapiens
ggcgttccaccagcaaccatgagtggttccatgatgggaagtgacatgaattgtctatttcacagcaatattaccagtgacttgaaagcatttaca

SEQ ID NO: 755553 - DNA, 124 bp, Homo sapiens
cagagccaggccactgcctggttttaaattctgggtggaaatgcaacgtgccggtcaacatggtgtgctgtcaggtcaattcagtgaagatatgatacccacagtgggcttcaacatgaggaag

SEQ ID NO: 755554 - DNA, 97 bp, Homo sapiens
ttcatgggcagcaccatcgagccagaagcagtatttgtcctggctggacgtaaagaaagaagtgatgcactcaattctgcaatagataaaatgacca

SEQ ID NO: 755555 - DNA, 90 bp, Homo sapiens
cgtgctgtcggtctgctggtctccgctcctgaaatatggctacacacacctttctgcaggagagctgcttcgtgatgaaaggaagaaccc

SEQ ID NO: 755556 - DNA, 82 bp, Homo sapiens
ttggactgagtcctgcaggacacaggtatggctttgtaattgctgtcaccaccattgacaatattggtgctggtgtgatcca

SEQ ID NO: 755557 - DNA, 95 bp, Homo sapiens
gcaaggccggagaaggccgccgggcccgggcatggtggtctggggcaacgcggaaggagccaaggaggtcctgctgctggcccggtagacggacc

SEQ ID NO: 755558 - DNA, 102 bp, Homo sapiens
ccatggctcacctccggggatttgccaaccaggtctgagttcactgacaccatcctgtccgtgcacccctctgatgtgctggacatgcccgtggacccaaac

SEQ ID NO: 755559 - DNA, 100 bp, Homo sapiens
acaccaaggaagatgtatttgtacaccagatggtcagtaggacagaaggtaacattgatgactcgctcattggtggaaatgcctccgctgaaggccccga

SEQ ID NO: 755560 - DNA, 103 bp, Homo sapiens
gtggctccagcatgtatcagccgaggtggagctgcggggccctggcatgaaaggtgagaagccctaccactgcaactgggacggctgcggctggaagtttgcg

SEQ ID NO: 755561 - DNA, 75 bp, Homo sapiens
gatggaagatagcttgaacagggctgacaacatttttccttttccgattctggatgaaattgaagaacataacat

SEQ ID NO: 755562 - DNA, 100 bp, Homo sapiens
ggcaactattgtgcacaaatgaagatgtttccagccctgcctcggcggaccaaaggatggccgccctgctcccccaatgaaaggccagcttcgaagaaaa

SEQ ID NO: 755563 - DNA, 73 bp, Homo sapiens
ttttagctgatgatatgggtttggaagatgagaatgtgcctactgctcctgatcctccaagtcaacatttacg

SEQ ID NO: 755564 - DNA, 75 bp, Homo sapiens
gtcaggacctgctgcgctgtaagatcctgatgaagatacagaaggtggtcatggcactaggagactacatgggcg

SEQ ID NO: 755565 - DNA, 75 bp, Homo sapiens
gcgcgctcctgctcctgctgctgctcagtcctttgccagaggctgaggggatctggcggtggagcgctaggatca

SEQ ID NO: 755566 - DNA, 75 bp, Homo sapiens
acagaagcagagttacaggacatgattaatgaagtagatgctgatgaacccagtgacttgattgtaaaaatttac

SEQ ID NO: 755567 - DNA, 73 bp, Homo sapiens
agaaccgtcccaaaatatggcaaagaaacctattctgagtgtgtactgtaagcacggtcacctgtgtcccatc

SEQ ID NO: 755568 - DNA, 75 bp, Homo sapiens
tcaatcaattctttgtgactcctcgatcttcagttgagagggtcctccgcggaagggcagctgaatggactccag

SEQ ID NO: 755569 - DNA, 74 bp, Homo sapiens
ctgcagatgaaaaagtgtgacttggcagctgctggtggagctgtctaaggctcaagatatagaagcaggagatg

SEQ ID NO: 755570 - DNA, 75 bp, Homo sapiens
agtttgcatatgagtgctgctgcagcttcccgagacatcaccttgttttctggatatgccgcagaaggatccgtg

SEQ ID NO: 755571 - DNA, 89 bp, Homo sapiens
cttcagagacactgccaagcagccttagccctagtgtagagtgaggattctacacgtagattgttcaaatttccttttctgtaagtata

SEQ ID NO: 755572 - DNA, 75 bp, Homo sapiens
tcagggggactgcaaaggccaatgttggtgctggcaaaaaggatgagtctgctccagctgacaaacagtgtaaac

SEQ ID NO: 755573 - DNA, 74 bp, Homo sapiens
aacttccaggttcccatcctgcgcaaccatgaagttgaaggacacaaaatcaaggccaaagcagtcaagctgtg

SEQ ID NO: 755574 - DNA, 83 bp, Homo sapiens
ccctcacaccagacctacggagggagctggaaattcctgacgttcattgatctggacagacccacgaagtcaagcatgcggag

SEQ ID NO: 755575 - DNA, 75 bp, Homo sapiens
gcatcttcaaagaatgatatttccaaagtttgcagaaaagaatatgaggataccatacttgcagagctccttcag

SEQ ID NO: 755576 - DNA, 100 bp, Homo sapiens
ttgatgaattgcaagtttgtgccccatagctgcacagaactgtcaagtaatccacctctggctaccatccttattcctcctcatgctcggattcaagcag

SEQ ID NO: 755577 - DNA, 102 bp, Homo sapiens
aagggataaccctacacccagaccccaggctgacagataaggcagtgaaggactattccgcttaccgttcttcccttctcttttgggccctcgtcgatctca

SEQ ID NO: 755578 - DNA, 82 bp, Homo sapiens
aagaatccccaggataagatcctcttcaccaaggctgaggacaagaggaggacttcatccaacccagcagccgagaagaggc

SEQ ID NO: 755579 - DNA, 76 bp, Homo sapiens
cctgtctgtggtctccagcgttaagcacagtcattagctcagacattcttcttttggccgatgaaaaatttgactt

SEQ ID NO: 755580 - DNA, 101 bp, Homo sapiens
gtcaagatctcgttccagttccagagaacgttcgagatctcgtgggtcgaaatcaagtacgaattggagcaatgttggcttatacacctctggatgagaag

SEQ ID NO: 755581 - DNA, 74 bp, Homo sapiens
caaagagtcaactaatccagagaaggcccatgagacacctgaaagaccccgccgtggcatcccagggcttcctg

SEQ ID NO: 755582 - DNA, 99 bp, Homo sapiens
cacggactggaagatcaaaagaggatggactcaccctgtcacccaggttggactgcactggcctcaacctcctgagttcaagtgatcgtcccacctcag

SEQ ID NO: 755583 - DNA, 80 bp, Homo sapiens
aattgtcagatttcgctttgatgaatcaggtcccgaaagtgctaaaaagctcctgggcaacgtgctggtctgtgtgctgg

SEQ ID NO: 755584 - DNA, 100 bp, Homo sapiens
tctccctgtacgccgagggctccgtcaatggcttcatcagcactttgggatcatggaagggaagtggttgctgtgtatgttactggtgcttggaactgct

SEQ ID NO: 755585 - DNA, 74 bp, Homo sapiens
catggaatcccttgcatggctctcattggatggattatgataaagaagatgctaccaatgaaatagaaaaccaa

SEQ ID NO: 755586 - DNA, 50 bp, Homo sapiens
ccgctgagcctggcgcagatcgggtattgcaggttccgacggtcttcctg

SEQ ID NO: 755587 - DNA, 100 bp, Homo sapiens
aagcgcagtacaatgcgggcttgtgtcatgagcatggcagaggcacccccagggacattagcaaggttgaatttcaggcaggatctgaaggccaacttct

SEQ ID NO: 755588 - DNA, 100 bp, Homo sapiens
ttccttccccctcggaaaatggttcccactgccgggcgaggtactaggttttgacaagcttgcatcatgcgtgagtataagctagtcgttcttggctcag

SEQ ID NO: 755589 - DNA, 90 bp, Homo sapiens
tggggccgtaccatggcggagaagactcaaaagagagactgacttgcataccaaatgtgtggtggatgtggatgcaaacaaggttattct

SEQ ID NO: 755590 - DNA, 88 bp, Homo sapiens
cattattacatgaagtatcatgtttctgcccggattgcatttctacaaggcgaaagaaaaggtcaagagaacctgaagaaggacttag

SEQ ID NO: 755591 - DNA, 100 bp, Homo sapiens
tgcacggcaggcaatggaaacagcgacagcaacctcactacctacagtcgcccaggtttttgtaaggccagcttccttcctttactggaatttgcctata

SEQ ID NO: 755592 - DNA, 90 bp, Homo sapiens
gtcggcggagcttcgccaaggctggcgcagtcgtgtgtgttttaatagaaaagttgtcactttccaaaatgccctttagaggtgacaccg

SEQ ID NO: 755593 - DNA, 75 bp, Homo sapiens
ttacgaatgcttttcaagcgaaatcctgcaaacagattagatggtggatgcttccaaaagcatcgaagctgtcca

SEQ ID NO: 755594 - DNA, 82 bp, Homo sapiens
gggctctgaggatgagctggaggaggggacccaacatgagtgaagtttcctgcaagaaacgggacgactatttggaatggcc

SEQ ID NO: 755595 - DNA, 100 bp, Homo sapiens
aaccttccctgcgaacttcagaggaacttccagctgatgcgagagctggaccagaggacggaagtccctcctcctatgtctccatcctccaaatctgtga

SEQ ID NO: 755596 - DNA, 75 bp, Homo sapiens
gtcctcgggggcggcggccacgccaaggacggactgtggatattcataaggagaaagtggcacgaagagagattg

SEQ ID NO: 755597 - DNA, 100 bp, Homo sapiens
tggagcctcagttggaagcagccgatccagcctgcggagcctgtggggcagatgagttttgatcatcctgagaaaaatgggccttggcctgcagacccaa

SEQ ID NO: 755598 - DNA, 101 bp, Homo sapiens
cacctcctggatatatcagtgaagatggagaaacaagtgaccaacagttgaatcaaagtatggacacagagtacatcaagatggcggatcattacgtcccc

SEQ ID NO: 755599 - DNA, 89 bp, Homo sapiens
gcaggaaacatggcggcggcgggtgttgtgagcgggaaggtgacagagctgaatgaacctctctccaatgaagatcgaaatctcctctc

SEQ ID NO: 755600 - DNA, 75 bp, Homo sapiens
gacgcccgcaggtcctcgcggtgcgcaccgtttgcgacttggtatttaacatgaagtcgctccagattgtgttac

SEQ ID NO: 755601 - DNA, 74 bp, Homo sapiens
gcaaacgtccgcggcctctcaggtcccccagcctcctgccaccatcattcagcagctccctcagcagccactca

SEQ ID NO: 755602 - DNA, 100 bp, Homo sapiens
gcgatggcttcagacagcatatttgagtcatttccttcgtacccacagtgcttcatgagagctgcatatccccaccgtttgaatctcttttaccttgcca

SEQ ID NO: 755603 - DNA, 76 bp, Homo sapiens
catgcacttacggatttactggaccccagtgtgaaagaggtgaaaagagatttgaatgcccggaatgttctaaaag

SEQ ID NO: 755604 - DNA, 98 bp, Homo sapiens
cagcagcatcaagaaaatcgcagactttctcaactcgttcgggacagtatgatttggtgaaatgcctggctcctattcgagaccccaagaccgagcag

SEQ ID NO: 755605 - DNA, 100 bp, Homo sapiens
cgctcacgctgggagctgtagaccagagctgttcctattcggccatcttggctcctccacagagcgagttactggaggtgaactgtttgaagacatagtg

SEQ ID NO: 755606 - DNA, 75 bp, Homo sapiens
tggagttgaaaggtgacattgagaaatgcctcacagctatcgatgaccgtcgtgatgtgagtaggtatggagaag

SEQ ID NO: 755607 - DNA, 100 bp, Homo sapiens
acggaggtgtttcacaagtagcaaatgagatgaaccatcttcctgcacacagccaaagtctgcaaagattgtgcttgagaacagtagtcgagaagacaag

SEQ ID NO: 755608 - DNA, 75 bp, Homo sapiens
tcaagtgggcagagacgcatccgagtgaccaccattgctaggaatgacttttttgaacgaaccattctgtgcaac

SEQ ID NO: 755609 - DNA, 75 bp, Homo sapiens
aatacctccggatactcagtttgtaaaaacatggcggatccagaattctgccaccctgaagggtcccttcccaag

SEQ ID NO: 755610 - DNA, 83 bp, Homo sapiens
cccgggacaccgcacagccgggaaatgtgtggacgaatgtggaacctcgctctgtggctgtgttcccttggcactccttagtc

SEQ ID NO: 755611 - DNA, 83 bp, Homo sapiens
aactctaatatgagcagcatggtagttacagacaaagaaacagccttggtataatagcacgttagcatcaagacgaaaacgac

SEQ ID NO: 755612 - DNA, 75 bp, Homo sapiens
cggagcccccctcaacacggaccgcgcccgccgggcacacaagaatggtcactcgtatctggtgcaggccgtgag

SEQ ID NO: 755613 - DNA, 100 bp, Homo sapiens
gctggccaaagcctgcccagacggctcacctgtgcgggatggaacaaaaggtacaaaatgaggccaagacacccttgaagaagttcttgttgaagctggc

SEQ ID NO: 755614 - DNA, 76 bp, Homo sapiens
atcactcgtgacttcactcagccgcattatattgtacttctagcaagtgcaccaacagaaaaacaacgcctggaat

SEQ ID NO: 755615 - DNA, 100 bp, Homo sapiens
cctaaacatcgttgtccacgtccagcattatgagaacatggacacgagaacccccataaataatcttcccagcacaggccagccagaagatgacactgag

SEQ ID NO: 755616 - DNA, 75 bp, Homo sapiens
ggaaggtggatcccgccgggaggtactttgctgagcacaaagttatcattgttgggctggataatgcagggaaaa

SEQ ID NO: 755617 - DNA, 100 bp, Homo sapiens
gggaacgaggggtgaagcggcccaggtgagggagctcgcccgtcagcgaggagtcctggagcgcacagagaagatggtggacaagatggaccaagatttg

SEQ ID NO: 755618 - DNA, 100 bp, Homo sapiens
gattgagacccggaaggcttcaaaggctgtcgcaaggaggaaggtaaaggcgacacaggaggagaaccgggagctgaggagcaggtgtgaggagctccac

SEQ ID NO: 755619 - DNA, 89 bp, Homo sapiens
tttgtttggtctttctggaatcaatgcaagttcggttcccactgatggctcaggaaatctactttcttcaatgtgttaaccaatagtca

SEQ ID NO: 755620 - DNA, 100 bp, Homo sapiens
aggggcccagatgccctgacactgcttgaatacactgagacccggaatcagttccttgatgagctcatggaggttaaagaattgcccacccttaaggata

SEQ ID NO: 755621 - DNA, 85 bp, Homo sapiens
atgcactgactagaactgaacttgaaacacttcaaactcagaggatgaaacaggaaactgagtcataaaacactactacaaacaa

SEQ ID NO: 755622 - DNA, 82 bp, Homo sapiens
caagaatacaaaacgtgtggcccagcacaagggagcgtcccacaagctgctggagccagttctgcttctcggcaaggagcga

SEQ ID NO: 755623 - DNA, 100 bp, Homo sapiens
gtcaggagtcttcagacagtctagctgcagagattgttacacctgaaatcaggcatctccttggaaacaatgccatctttgaatgtgagagataaaccta

SEQ ID NO: 755624 - DNA, 75 bp, Homo sapiens
caccaaccaaattgtcgccattaagaaagttcaggtgtgggacacagcaggtcaggaacgtttccgcaaaagcat

SEQ ID NO: 755625 - DNA, 82 bp, Homo sapiens
gaatgaacagacctagtgggcgttgcctttagacccagatcctgtggtattgtggaaattcccagaggactttggagaccag

SEQ ID NO: 755626 - DNA, 100 bp, Homo sapiens
gtgttgcttgtgtgaagaaagcctcctaccttgattgcatcagggccattgcgctggagaatgctggaggagaccttaaggatggccaccaccactatga

SEQ ID NO: 755627 - DNA, 75 bp, Homo sapiens
ccatcatcatgaaggacgtgcccgactggaagaacaccttccaccatgaccacctcagcaagttcccacttaaat

SEQ ID NO: 755628 - DNA, 74 bp, Homo sapiens
cagtctctcccagattgtgcaagaaccatgggaggggcgtcagtttctggaacattcaaattcagtgtttctac

SEQ ID NO: 755629 - DNA, 50 bp, Homo sapiens
gggacacggctcaccgtgctaggggcgtctgccttggatataaaatcata

SEQ ID NO: 755630 - DNA, 75 bp, Homo sapiens
aagccattttgtaattgcaggaggaatggtagtgctattggccttccagtcccacctatcacagccttaatcacc

SEQ ID NO: 755631 - DNA, 74 bp, Homo sapiens
aggatgtgagcacatcttctgtaggatttggtgctatggagaaatttttggtagaatataagagtgcagtggag

SEQ ID NO: 755632 - DNA, 100 bp, Homo sapiens
taaggtgttaagtgtaaggatcttcatgatgaaatttctgtaaatggtgaaagtcaatataataggagaagtggttgaccagggaagtaccaatttgaaa

SEQ ID NO: 755633 - DNA, 100 bp, Homo sapiens
gatataagaaggaatcaaagtcaggccttgtgaaaccagttgtctatcaacgtctatgactacaactgccatgtggacttgatcagactgctcaggctgg

SEQ ID NO: 755634 - DNA, 141 bp, Homo sapiens
ccctacttcaagaaatggttaatgtaatctgccaactaatagtaatggcccggaaccgtgaagatagaagagtgatggatgtcatttctcgttcacagctttacttggatgatcttttttctgactactatgacaaacctc

SEQ ID NO: 755635 - DNA, 74 bp, Homo sapiens
gctcccttcgccttcgccctttccacctcgcggcagttcgaattctgcttggtcagaatcgtgatggcattgtg

SEQ ID NO: 755636 - DNA, 98 bp, Homo sapiens
tcactttcatggctgtggttcagtcaaccgtgttaccatactgtgtgacaaatttagtggccatcccaaagggtaccccaagaagctagtgcagactt

SEQ ID NO: 755637 - DNA, 100 bp, Homo sapiens
aaatagtcaatagtgctcagactggtagcttcaaacagctcacagttaagtaccatgcggagaccatcaagaatgtgcgcacagccacggaaagctttgc

SEQ ID NO: 755638 - DNA, 120 bp, Homo sapiens
gctgctgatgaagacgttatttaccatatccagtatgatgagatgctggaaaaggctgatcctcacctcgagttccagcagtttccccagagcccctgatctgcctggaccagaagacag

SEQ ID NO: 755639 - DNA, 75 bp, Homo sapiens
ctggtcttgctcggccgatgaagtgcagaggtttttttctggctttcttcgagagtcacccagctccttcagctg

SEQ ID NO: 755640 - DNA, 100 bp, Homo sapiens
aaactctggaaaaaaacttggggacacttggcattcagggacgtggccatagaattccctcaggaggagtggaaatgtctggaccctgctcagaggactt

SEQ ID NO: 755641 - DNA, 51 bp, Homo sapiens
ctttcttggggaagaggaccccaaaggagatgctgaagttccgaacagtcc

SEQ ID NO: 755642 - DNA, 100 bp, Homo sapiens
atgagcgatgttaccattgtgaaagaaggttgggttcagaagagggggatgacttgtcaagctcgaacatcatatactgaagatgaagttctttggggtc

SEQ ID NO: 755643 - DNA, 90 bp, Homo sapiens
acgggtaacttggcaatgaatgacagcactgtagaacagctttatgaaacagcttgcttcctacagcaagctatagtcagcagactggac

SEQ ID NO: 755644 - DNA, 75 bp, Homo sapiens
cgggatggtgccacaggaggctgtgcgggccccgctccgcttcgaatggccatgaaccagagaatcagtcagagt

SEQ ID NO: 755645 - DNA, 107 bp, Homo sapiens
ctgacgtattcctgctgttcccagaagcgaagtggagagcgccagagtaatggaacccctgaacagtgcccaagtgttgtctctttgttgtcagagagttacaaccc

SEQ ID NO: 755646 - DNA, 98 bp, Homo sapiens
taggaaacctaccctatgatgttacagaagagtcaattaaggaattctttcgaggattaaatgtttgggtacccagaccccacctacctgacccgggt

SEQ ID NO: 755647 - DNA, 108 bp, Homo sapiens
cgccggttcgcgtctctctgctgcggcgcggggaccgctgtgctctcgaaacacctggattcttatctagctgactgctacgatgccattgctgtttttctctgtatc

SEQ ID NO: 755648 - DNA, 100 bp, Homo sapiens
gcctcccgggctccgggaaaactacactggccaggtctcctctgagcctccggcctccataagacccaaaacagatgacacctcttcccagtcccccgcg

SEQ ID NO: 755649 - DNA, 92 bp, Homo sapiens
gggcatgccaagaagatgagaccgggggaggcgacgctaagttgctgatcgtggcgacaatgcagatcttcgtgaagactctgactggtaag

SEQ ID NO: 755650 - DNA, 51 bp, Homo sapiens
ggagagcgggcagccttccaggtggacaggggcatggtctagtggcccagt

SEQ ID NO: 755651 - DNA, 90 bp, Homo sapiens
caccgctgccgctgccgctgccggctccagggagccccgtgtcaagcaagctggattgccttttgcaattcttacttcaaggcatacccc

SEQ ID NO: 755652 - DNA, 100 bp, Homo sapiens
caggaccctacagaagatgctgaagctgaggacacacccaggaaaagactcaggacggacaagcacagtcttcggaagggtgataaaagaaaatgtggct

SEQ ID NO: 755653 - DNA, 136 bp, Homo sapiens
tagagcccagctcagcgcccggcagccttcgacgcgatgttccgccggagcttgaatcgttttatatttggagtctgggagtgatccttttcatgttggtgtgtgggcagccgccctttcaagaagccaatgacag

SEQ ID NO: 755654 - DNA, 82 bp, Homo sapiens
actttcgccagcccgtgccgcgagcgcggcctgcaggagatgtcacacaccaagccctacatcaggaagaaggctgtgctga

SEQ ID NO: 755655 - DNA, 101 bp, Homo sapiens
gccgcctgcggcatcgtcctcagcgcctggggagtgatcatgttgcgctagtcctgctgatgggcaaagaaggtgtccacggtggtttgatcaacaagaaa

SEQ ID NO: 755656 - DNA, 96 bp, Homo sapiens
aacttcagcggggggaagatcaccaaggtctccagaaatgctttgggttcatctttcattgctgcaaggaacttccatgcctctaacactcatctt

SEQ ID NO: 755657 - DNA, 95 bp, Homo sapiens
tggacacacctggccggtgcttcagtttggaaattttagcattcaggtgccaggaatgcagatgggacagccagtgccagaaacaggcccagcta

SEQ ID NO: 755658 - DNA, 74 bp, Homo sapiens
ctgctggtacaagtacctccttttcagctacaacatcatcttctggcacccatttgtcaggagtgccaaaggag

SEQ ID NO: 755659 - DNA, 100 bp, Homo sapiens
cctggaggactctattgtggacccacagaatcagaccatgactaccttcacctggaacatcaaccacgcccggctgatgaagctggaggatcaggagcag

SEQ ID NO: 755660 - DNA, 50 bp, Homo sapiens
ccaagaacgggcacctggctgtgctcctgaaactgggcactggtctcctg

SEQ ID NO: 755661 - DNA, 90 bp, Homo sapiens
tccgtagcgtcttggtcacgaccgtgctcaacctcgagccgctggacgaggatctcttcagaataattgcagtgagttatgaagctcgtg

SEQ ID NO: 755662 - DNA, 83 bp, Homo sapiens
gcagtccacccaccgccgccgcctcccagagatagagtttcaccatgttgtccagggtggtctcaaaactcctgagctcaagc

SEQ ID NO: 755663 - DNA, 75 bp, Homo sapiens
gtggtgctgcctctttgtccgttcgcagcacgttcacgtccatgttcttcccaggaaggctggagactttcacag

SEQ ID NO: 755664 - DNA, 99 bp, Homo sapiens
gctccctcagaagcatcgtgaaaagcctccttctggttccaaatgctgccactgcagagccccgccatggaagacacgccgttggtgatatcgaagcag

SEQ ID NO: 755665 - DNA, 50 bp, Homo sapiens
gcccttccagatacagctaccaggacgaaaggaccgtggcagcaccacca

SEQ ID NO: 755666 - DNA, 75 bp, Homo sapiens
ttttaacctggagacttgccggcttatggtttcaatgctggatctctgtgacctgcctgctgcctccctcaacga

SEQ ID NO: 755667 - DNA, 75 bp, Homo sapiens
aaactgcagaaggaatttaaacgtcatagtgaggccgcagcgtttgatgacgagtggcggcgggagacctcccga

SEQ ID NO: 755668 - DNA, 100 bp, Homo sapiens
gacccaatcatgagcactgctttaatagggcacaggggcagagccagggtcagccatcctcaagtagcttaacaggggtttcatcttcccaacccataca

SEQ ID NO: 755669 - DNA, 74 bp, Homo sapiens
gcaagacgctcagcaagctcaagaggagcgtggtcagagcccagtttctccacagtcgaactcctctaggccca

SEQ ID NO: 755670 - DNA, 88 bp, Homo sapiens
gtcctagtgatccacgcgcagttcctcaaagaaggaaccccatgggccgcacaggactgcgtgggcgcgggagcctcagctgcttcgg

SEQ ID NO: 755671 - DNA, 75 bp, Homo sapiens
cgggagcggagacctcgctgcgctcatggcgtcgcccgggacgagattgaggagctgcgggccgagatgctggag

SEQ ID NO: 755672 - DNA, 50 bp, Homo sapiens
tttccagacaatccagagaaaagccgggagcatcctgatctgccgctgtg

SEQ ID NO: 755673 - DNA, 100 bp, Homo sapiens
ggctaagaagcccgatggtgcaatccatacacgtcagcctctggggccagagtgggatgaaaaaaggcctgttacatgaacagaatatggcaaaaatgag

SEQ ID NO: 755674 - DNA, 82 bp, Homo sapiens
tgtagctgccgtggttgccaggagagctgcgccggcgagaagcggccgagccagcagcagctacttgaaggaaattttgcca

SEQ ID NO: 755675 - DNA, 139 bp, Homo sapiens
caagttcaacgatgtggtgtggcatgtgagctggtccatcacagccaacatcctggctgtctctggtggagacaataagacagagtgggaagctttggagctgacggatcaccagtgggcactagatgatgtcgaagaa

SEQ ID NO: 755676 - DNA, 83 bp, Homo sapiens
gtaggagaccgaggaaagtgtgtgggaggcgttgacctgccccttgtcctggccccgggacccagacatggagctgcgggaag

SEQ ID NO: 755677 - DNA, 100 bp, Homo sapiens
gcggcctggcaggggaaggatcgagcgtttagtgggctacagatggcatggcatctaaaaccttacaatgcttgattttcatacagaagacactttggcc

SEQ ID NO: 755678 - DNA, 90 bp, Homo sapiens
aagaagaaggatctttccctggaggaaattcagaagaaattagaagctgcagaagaaagacgcaagcgatgtgcattttgtaagcacttt

SEQ ID NO: 755679 - DNA, 100 bp, Homo sapiens
aagcgcccgccgccctggaagaagaggacgctgatcaggctgccaaggtagagaagatgcgccagagcgtcctcgaggggctcagcttctccaggcagag

SEQ ID NO: 755680 - DNA, 80 bp, Homo sapiens
tggtccggacccgcatgcaggcacaagggtgagaaaattcatgaagacatctttgacatcatagaccgagaagcagatgg

SEQ ID NO: 755681 - DNA, 98 bp, Homo sapiens
acgctggtcgaagtgactgaagaggaggtcgagaactcagtcaaacacattcccagcttggcaaccgtgattgatgactcttccgcgtctatttctct

SEQ ID NO: 755682 - DNA, 100 bp, Homo sapiens
ggcagtctctgcatatcatggggagatagacgctgctgcctgagccgtgtaaagccagtggaatatagtcagatgtacagttatagctacaaccagtatt

SEQ ID NO: 755683 - DNA, 74 bp, Homo sapiens
ccagatctgccagtgagcctcaggctttaggaactgaagagaaactggcgatggaatatgagaggagccctctg

SEQ ID NO: 755684 - DNA, 100 bp, Homo sapiens
tgcgtcaatcagagcgtcctgtgcggctggctgctggctctaccaggttctgtgctggcatcctgagcactgccaggcacttgaccattgagcagaagat

SEQ ID NO: 755685 - DNA, 90 bp, Homo sapiens
acacctccggagacttcctgaaggccttgctggctctctgtggtggatatccgacatgaagccagtgacttcccatgtagagtggccaag

SEQ ID NO: 755686 - DNA, 100 bp, Homo sapiens
caagggtcctaaaacaggatcagtaaagaaggaaaaagcagtaaagccagaggaaggttttgccagtcagtcagatgatgatcaggtgaatgtaatgggt

SEQ ID NO: 755687 - DNA, 98 bp, Homo sapiens
aggaaatagtggcaggtgacagtctgcatgtgcagttttcagctaaacccacagttcagccctccccttctacaacttccaagacagttactacatca

SEQ ID NO: 755688 - DNA, 100 bp, Homo sapiens
acaccgagtggtgcttcgggctggtcatctttgcagccagggtgtcggcgccgagctgatggggctgcaggtggactactggacggcagcacagcctgcg

SEQ ID NO: 755689 - DNA, 83 bp, Homo sapiens
gctgaggactgcctgtttgcagtgtaaacaggaacatcgataagtagtgtaaaaacttgcacaatgaaatccgaagccaagga

SEQ ID NO: 755690 - DNA, 82 bp, Homo sapiens
tcgctcctgtttgtcttctgctttggcccagaactggagaaccaggagtctcgggtctctgaaatccacagccttgttcatc

SEQ ID NO: 755691 - DNA, 90 bp, Homo sapiens
gtggaggcagaggtggcatggggctaagtcctatcagccatggaaacaccattgctctcttcttccggtcactgttgccaaactatacca

SEQ ID NO: 755692 - DNA, 83 bp, Homo sapiens
ccaggcctcattggacagcattcgagcttaccgactggaagacacgtttggcccagacccaactatgattagagccaactgcc

SEQ ID NO: 755693 - DNA, 100 bp, Homo sapiens
gtctgcccgcacccgggcccgcaggccagttaacccagtatccactccagttgcacttcccacaccagctctttctccaagtttgatggctgatcttgaa

SEQ ID NO: 755694 - DNA, 100 bp, Homo sapiens
ttcctgtacagcctgcagaactaatcctcactatggatgggctcattgaggacattaagcatcggcggtattatgagaagccatgccgccggcgacagag

SEQ ID NO: 755695 - DNA, 74 bp, Homo sapiens
gcccaagtggcggggactactggtgcctgcgctgaaaaagaaactccaagaggaggaggaggagagcaacacca

SEQ ID NO: 755696 - DNA, 75 bp, Homo sapiens
cgagatctccgaccagtctgggggcgctggcggcctgcgcagccacctcaaggtccagtccaggtgcagcagcaa

SEQ ID NO: 755697 - DNA, 83 bp, Homo sapiens
ggaatgcctgaaccaactgttttgagttgccgaggtactgtctgaatgccgcctgctcgcctacatatcccaggtgcccacgc

SEQ ID NO: 755698 - DNA, 128 bp, Homo sapiens
aaagaattcagaaggaacttgcagaaatcacattggaccctcctcccaactgtagggagtactacatcaccatggtgaagtgggccaccagcaccaaggtcgccgtgacctggctgaaccgggcgcag

SEQ ID NO: 755699 - DNA, 101 bp, Homo sapiens
aattcagaaggatatcgacgtcgtgatccagaagtccagagctgaggactgcctgtttgcagacctgcgaccgcatcaagcagtccgccagcggaaccaag

SEQ ID NO: 755700 - DNA, 100 bp, Homo sapiens
ctctgattgaattttttgacagaaaaggtgctggagaatctggtaaaagcaccattgtgaagcagatgaggatcctgcatgttaatgggtttaatggaga

SEQ ID NO: 755701 - DNA, 90 bp, Homo sapiens
gagaattgcagccctcaccaaggctgatctactggctgacctttgccgtgggccgctccttccgaggcttcggctacggcctgacgtttc

SEQ ID NO: 755702 - DNA, 100 bp, Homo sapiens
cccggtcgcgaggaggaggaggatgtggcgcgcggaggggaaatggctgccgaaaacaagccggaagacctgcctagagctggaacgttacctccagagc

SEQ ID NO: 755703 - DNA, 100 bp, Homo sapiens
gacgctggaaagtcggccaagaaagacaaagacccagtgaacaaatccgggggcaaggccaaaaagaaggcctgcgtaagtgaggaaacagctgatcctg

SEQ ID NO: 755704 - DNA, 82 bp, Homo sapiens
caactttgtctttgacgggtcctccctgcctgccgatgtgcatcggtacatgaagatggggatatgagactttctactcgga

SEQ ID NO: 755705 - DNA, 100 bp, Homo sapiens
gccgcctcactgtttctagccttcagtatcctgtggagcacccagacaaattcctgaagtttggcatgacaccttccaagggagttctgttctatggacc

SEQ ID NO: 755706 - DNA, 97 bp, Homo sapiens
tgagcagtccagaaagcggcttatcgaacagagccgggagttcaagaagaacactccagagctccctcgtgaaagatgcttctgttcctctgattga

SEQ ID NO: 755707 - DNA, 100 bp, Homo sapiens
cgctgtttttcactgagctgccataccccgaaagggagaaacaaaggcagcgctgccctcgggggagcattggccctggcggaacgcagcagccgcgaag

SEQ ID NO: 755708 - DNA, 83 bp, Homo sapiens
gaattcagatgatgctccatggagtcctaaaggtgtcttcagtgccctgggtttgcctgtgacccaatgcccactgggactga

SEQ ID NO: 755709 - DNA, 97 bp, Homo sapiens
aacccccaatgctgaccaaggaggagcctgttccagaactgctggaagctgagtctctgctggatgaaccgaatcctaacagtccagccaatagcca

SEQ ID NO: 755710 - DNA, 74 bp, Homo sapiens
gaagatgaagattttaaagagcagactagacttctcaagggctacttctacaagtccgaacagccagtccagca

SEQ ID NO: 755711 - DNA, 98 bp, Homo sapiens
gggcctgccaggtggcgctcgatggcccactgcgtgaccttggttcagctgtccatttcctgtgaccatctcattgacaaggacatcggctccaagtc

SEQ ID NO: 755712 - DNA, 90 bp, Homo sapiens
ttccagtcctcctaggcatcttattgatcctccagtcgagtctgcgctcctcagaccaccggcaggtgaacagcctgatgcagaccgagg

SEQ ID NO: 755713 - DNA, 99 bp, Homo sapiens
caccatacatggtacagccagagtaccgaatctatgagatgaacaagagactgcagtctcgcacagaggattctgagtaacaataagatatccgagctg

SEQ ID NO: 755714 - DNA, 88 bp, Homo sapiens
tttgaccacaacaagggccggattctcacccaggcctccccatggccacccatggaccagtcggcattcacttcctcccttctgcggc

SEQ ID NO: 755715 - DNA, 90 bp, Homo sapiens
gagatgaaggcactccaggcccaccagggcccagaggagctcgtggcccacaagggtgagccaggttctccaggtccccctggattttca

SEQ ID NO: 755716 - DNA, 83 bp, Homo sapiens
ctcagttggaagcagccgatccagcctgcggagcctgtggggcaggcaagaagctcttctggctgccattagtgaaaaagacg

SEQ ID NO: 755717 - DNA, 100 bp, Homo sapiens
ggtcacagccacactctgcaccgctaggccgtccccgaccttgcctgaacaaggcccgatgagagaaagggaaagttaaggatgctggagcagaacaatg

SEQ ID NO: 755718 - DNA, 83 bp, Homo sapiens
ctcctttttctccatcttcacctgggtcttgccccagaagctgcgggcacatccacgcctgaaatgcggcgctcagtcctggt

SEQ ID NO: 755719 - DNA, 83 bp, Homo sapiens
cacaggagagggccccagcagggccaccgggcggcaagcaattctgtggtgttcttggtcacacatttatggagtttctgaag

SEQ ID NO: 755720 - DNA, 75 bp, Homo sapiens
gttcacccagccctgcccttcgccagagcttcagcaagtgtcaacattggtcagttagagcatcaacttatattg

SEQ ID NO: 755721 - DNA, 98 bp, Homo sapiens
agcggagtaccagcacttcatccagcagtgcacaggaggacagtcagtgacccacaccggcctgcccatcatggcctccctggccaacacagctatct

SEQ ID NO: 755722 - DNA, 75 bp, Homo sapiens
tatcgttggacccagaattgagggcaaacttgaagataaatcttttgactccagctctttagaggatctaaagtg

SEQ ID NO: 755723 - DNA, 75 bp, Homo sapiens
tttgtccgacacttacactgttgagaaagtggaagttcatcgtctgattagctttcctgctgccccttaatcagg

SEQ ID NO: 755724 - DNA, 83 bp, Homo sapiens
tacacattctgtcagtgctgttctccaagaggcccagagacatgctgaaacatcgaaggtttggtgcacctcgatttggagga

SEQ ID NO: 755725 - DNA, 74 bp, Homo sapiens
ctccttcggcagtccacccaccgccgccgcctcccagtgtctttggtgcaacactaacaaggcttgtctggact

SEQ ID NO: 755726 - DNA, 100 bp, Homo sapiens
gccgaggcgtgcacatgctcgcccagccacccccaggacgccttctgcaactccgacatcgagtcgcctcaagaaaggccgggctctcggcgcagcctgc

SEQ ID NO: 755727 - DNA, 100 bp, Homo sapiens
gtttccagccccggcgggagcggcggcaagaaaaatgccagccagaagaggcgttcgctgcgcgtgcacattccgcaacaacgaactgtctacagactga

SEQ ID NO: 755728 - DNA, 100 bp, Homo sapiens
cctggctatggatcacagggaattaaacagagagagatcatcattgcctgaatttagctttgtgactgcaagagcaagaccagttcctgtctggagacga

SEQ ID NO: 755729 - DNA, 82 bp, Homo sapiens
aacctctataagtccatgctggagaagtcctcttcctcctctcagcacggaactgtggctgcaccatctgtcttcatcttcc

SEQ ID NO: 755730 - DNA, 75 bp, Homo sapiens
ctcagcctcccgagtggctgggattacaggcctggtctccaagtcctctcctaagaagcctcgtggacgtaacat

SEQ ID NO: 755731 - DNA, 50 bp, Homo sapiens
ggctacccagcctacatctcatggagtttcgctcttgtcgcccaggctgg

SEQ ID NO: 755732 - DNA, 98 bp, Homo sapiens
cgtcagcgctcccatgggggtatcgatgtgaaggctgtctacctggtctccagaatggacggccctgtggcagagcatgccaagcaggagccctttca

SEQ ID NO: 755733 - DNA, 75 bp, Homo sapiens
cagagttcaaggaggccttccagctgtttgaccgaacaggtggacctgcccatgggtggagtgaaggctttaacc

SEQ ID NO: 755734 - DNA, 82 bp, Homo sapiens
cgcgaggaggcgcgggaggtgttcgagaacgaccccgagacgggacccagacatggagctgcgggaagaagcctggtctccg

SEQ ID NO: 755735 - DNA, 83 bp, Homo sapiens
ccagtggagccggagtgcgggcgcgccccaccaccgccctcaccatggttgtgaccgagattcccgacgagagagactgaggg

SEQ ID NO: 755736 - DNA, 75 bp, Homo sapiens
catacaagattgatataggcgcagtatattctcacagaggtcatcacactgaaacggtgttcaaccgggttttgc

SEQ ID NO: 755737 - DNA, 100 bp, Homo sapiens
gtgcatcgcccactccagaagtagcatggaaatggagggcatcttcaaccacaaaggatgcctaaatcaaaggaacttgtttcttcaagctcttctggca

SEQ ID NO: 755738 - DNA, 100 bp, Homo sapiens
gcggatgccctgcagtacctgcagaaggtctctggagacatcttcagcaggcataatcaccagcaacacccgggacaataatacgggggccacctacccc

SEQ ID NO: 755739 - DNA, 97 bp, Homo sapiens
tgatttacgagtcaacaaatgcggagcgcagcgcgtaaacaacaacctgcaggtcctggtgcttgatggtcgaggccatctcctgggccgcctggcg

SEQ ID NO: 755740 - DNA, 73 bp, Homo sapiens
agaaaacctttgaccatgaagagaaatgagatgatagccaaaccctcaggtttgggccccatggtatccctgt

SEQ ID NO: 755741 - DNA, 88 bp, Homo sapiens
cgggatcaactcttccaggaccaccaaaaataactttggctggcagcaacatgaagcgagcagcctccttgaactatctgaaccaacc

SEQ ID NO: 755742 - DNA, 74 bp, Homo sapiens
attgaaccagacactgatgctcctcaagaaatgggagatgaaaatgcggaggacttgattattcttagaaatgc

SEQ ID NO: 755743 - DNA, 90 bp, Homo sapiens
tgttatggacacggtctttcttattcagtgcaacaggtgatcgagaaccacatcctcaagctcttccagagcaacctggtgcccgctgac

SEQ ID NO: 755744 - DNA, 49 bp, Homo sapiens
gtccagacaaagactgaatcagttacatagcaaacttctggagacagag

SEQ ID NO: 755745 - DNA, 83 bp, Homo sapiens
aggtagccatgatgccccacttggtgaatggagatgcagctcagcagctcttggataagcacaagaatacagagagcatggtg

SEQ ID NO: 755746 - DNA, 100 bp, Homo sapiens
cagacatggacaccaaacatttcctgccgctcgagtgcctggtgaagaatgtgatgggatcactagcatgtctgcggagagcggccctgggacgagattg

SEQ ID NO: 755747 - DNA, 73 bp, Homo sapiens
ggtccctgtgacctgtggagacacggccagatctgccctccagacgccaggaaagcatgtgcagatgcaactc

SEQ ID NO: 755748 - DNA, 100 bp, Homo sapiens
ccgacacctactggtgcatgagcaagctgctggatggcattcagatgctcttcccgagggagatgctagccctttgggtccttacctcctgccctcagga

SEQ ID NO: 755749 - DNA, 74 bp, Homo sapiens
ctggattcaagtcccaggagtcctgaccagagagcagcggaggaggcgatgactcggctggtcaacattctgat

SEQ ID NO: 755750 - DNA, 98 bp, Homo sapiens
ttattttggagaaagatggagacgataatcctgtctgtcgactgccagcttcagctttagctgcagctgcctctgttcagccacttgcaacacaatgt

SEQ ID NO: 755751 - DNA, 75 bp, Homo sapiens
caacatctgtaacttcttggagggtggaagagctgttgcgcagccattggtacctgtattggggaaacatagcat

SEQ ID NO: 755752 - DNA, 50 bp, Homo sapiens
cctcctgattagctgggattacaggaggaaaattcttccagcgatggtct

SEQ ID NO: 755753 - DNA, 89 bp, Homo sapiens
gtccgggctcctggacttcgcctttcccgagccctggaggtggggagaaaaggaaaatgtttataggaggccttagctgggacactaca

SEQ ID NO: 755754 - DNA, 50 bp, Homo sapiens
gaaaaaggccctcttcaagcctgctggagcagttcaagaaggacaacgag

SEQ ID NO: 755755 - DNA, 75 bp, Homo sapiens
ccaccctgggcacagcaggcatcggagctctggattaatcgaattacagctgctagccaggaacatggactgaag

SEQ ID NO: 755756 - DNA, 82 bp, Homo sapiens
cgacaagccgctggcagccgcggatctcaccgccgctcagggaaccatcactgttgctggaggcacctgacaaatcctagcg

SEQ ID NO: 755757 - DNA, 74 bp, Homo sapiens
gaggaggacagttcgctacacagcaatgcatcgaggtcaatgagtggtcattgaagataagaaaggaaatgaga

SEQ ID NO: 755758 - DNA, 83 bp, Homo sapiens
ctcttctggggcaggggccagggccagacaatgcagatcttcgtgaagactctgactggtaagaccatcaccctcgaggttga

SEQ ID NO: 755759 - DNA, 75 bp, Homo sapiens
actacaagggtagcagtcgtggacgttctaagaggtatgaaattgaaggctgtgaagtgatttgggccattaaag

SEQ ID NO: 755760 - DNA, 50 bp, Homo sapiens
ctgcatccacattgcacataaagttggccacggcgtatgcctccgaggac

SEQ ID NO: 755761 - DNA, 100 bp, Homo sapiens
gcggcttatcgaacagagccgggagttcaagaagaacactccagaggtgtcagcatttgcaggtatacaggaacagtcctagtgatgcactatttaatca

SEQ ID NO: 755762 - DNA, 143 bp, Homo sapiens
accctcgctcctcgatcgaggacgacttcaactatggcagcagcgtggcctccgccaccgtgcacatccgaatggggtgacacggccccactcccttggcacattcgaatcggtatattaataggaatatccaaagccattca

SEQ ID NO: 755763 - DNA, 75 bp, Homo sapiens
cccagtgctgatggtgattaaagacagtgatggacaggttcaaaccttgtactactcagctgatcacaagctgct

SEQ ID NO: 755764 - DNA, 90 bp, Homo sapiens
aattttctgagatttctcatcaggcacaccaaccagcaggaccaggtatttaacatgaagtcgctccagattgtgttacctgcccgagca

SEQ ID NO: 755765 - DNA, 101 bp, Homo sapiens
aggagaagcccaatatgctgtggtccactgtacaggatacatcaaggcctggccaccagcagacttaattcagtgcacaaatgagatgaatgtgaacatcc

SEQ ID NO: 755766 - DNA, 83 bp, Homo sapiens
gcgttcccagcccgggtccccgcgttcacagccccagcgcaggtgtgggcaagagcagtttactgttgcgttttgcagacaac

SEQ ID NO: 755767 - DNA, 75 bp, Homo sapiens
cagtacaagcccaagggagattacagggacaaactctgcctgggcgagtccttttcctgcgttatgtcgttcaga

SEQ ID NO: 755768 - DNA, 98 bp, Homo sapiens
gccggcagggctgcggcgcagggcgaggcggaggcgcccaccctctatctgtggaagactggaggtatgaggagaccagtgagaatgaggcagtagcc

SEQ ID NO: 755769 - DNA, 101 bp, Homo sapiens
agatgcttctcaactaggaatctctgcagactatattggaggaagtcattatgttatacagcctcatgatggcgtcccgtggactctgcacacgtggctgg

SEQ ID NO: 755770 - DNA, 100 bp, Homo sapiens
cacaggcagagcaagctgcacaggaaggaatgcagctcatttcagaaaagcctgagacggaagctgtggtgaaggagaaactcactggtttacataaaat

SEQ ID NO: 755771 - DNA, 133 bp, Homo sapiens
gcaaacagccttcatccaaaatggaggagccaggcccccgcttcagtcaagacctgcctagaaaaaggtgttcgaaatccgcaccactgatgacctcactgaggcctggctccaagaaaagttgtctttcttt

SEQ ID NO: 755772 - DNA, 97 bp, Homo sapiens
aacatccacagccggaccgtcacccgctatcctgccaactctatcgtggtcgtaggaggctgtcctgtctgcagctacgagttccagggagctctgt

SEQ ID NO: 755773 - DNA, 50 bp, Homo sapiens
gcaggagctggatccggcttccggaaggttacactcctcttcctgggtcc

SEQ ID NO: 755774 - DNA, 83 bp, Homo sapiens
gtccggcttcggagcgggagtgttcgttgtgccagcgactaaaaagaggaaggcaacagcccccaggggagcaaccagggagt

SEQ ID NO: 755775 - DNA, 74 bp, Homo sapiens
ttctaattcttctgagaaacacatgtcacgagcctctcaaagagaaggtgttgacttcaaaatcaaaactgtag

SEQ ID NO: 755776 - DNA, 75 bp, Homo sapiens
aaggaataagaagcagcaacccacccaagcagcggaaatgatttgcagctgagtgaatcaggaagtgacagtgat

SEQ ID NO: 755777 - DNA, 100 bp, Homo sapiens
tcatcgaaggctaccgggcccagcacagccagcaccgcacgccctgcaagggagaaatgggcaagttcatgaaacctgggaaggtggtgcttgtcctggc

SEQ ID NO: 755778 - DNA, 100 bp, Homo sapiens
aaacaatggcatttacagaaagagtcaacagcagtggcaacagactgacatcaatttgccctatcttacaatggattcttctggacccaagcatttgaat

SEQ ID NO: 755779 - DNA, 82 bp, Homo sapiens
cttgcggcagggtttgcagtgtaaagtttccatagcaaggcgtgtacaagatccattagctgagctagtgaaaattgagcca

SEQ ID NO: 755780 - DNA, 97 bp, Homo sapiens
tgaaagaaataagtctccttccagataatcttctcaggacaccatccgttcaattggtacaaagctggatgctggaaaaggctgatcctcacctcga

SEQ ID NO: 755781 - DNA, 100 bp, Homo sapiens
cagcaaagccaagccaacctcctacagtcgcagccaagcatcaccctcacctcccagacatcacttagtgctcttacccagctgatgaaaaagatgcccc

SEQ ID NO: 755782 - DNA, 100 bp, Homo sapiens
tcagagatccaagtgcgcgccctggcgggtccggaccaagccctggtacctgacagtgtaaagaaggagctcctacaaagaataagaacattccttgctc

SEQ ID NO: 755783 - DNA, 100 bp, Homo sapiens
atttcttctttgagaaaaacctgaaagatgtctcagttggtgttcgaggaagagacattgttgttcttggtgtggagaagaagtcagtggccaaactgca

SEQ ID NO: 755784 - DNA, 101 bp, Homo sapiens
atttcggctcagctggaggaggccagctctacaggcggtacccactgatggtaatgctggcctgctggctgaaccccagattgccatgttctgtggcagac

SEQ ID NO: 755785 - DNA, 100 bp, Homo sapiens
aggctcctcgaggtgctctcgggagagatactgaatgtttggaatggttttggaaaaaattattattcctgaaattcagaaggtatctggaaatgtagag

SEQ ID NO: 755786 - DNA, 100 bp, Homo sapiens
ctgtgatggaatgggaagtggatgaagtgctgaactggacaaatacactgaactttgatgagacagtcattttgtttactcattcagccctgttgcaggt

SEQ ID NO: 755787 - DNA, 100 bp, Homo sapiens
cttttgggaccatgcgcggaggaggctttggggaccgggaccgggatcgtgaccgtggaggtctgttcggcacttgaagtactccttgtttaagaaatca

SEQ ID NO: 755788 - DNA, 72 bp, Homo sapiens
acagcaacagctctgccggctggaagaatgtgacagtgatgataacatgggtgccaaaaatacttcaatagg

SEQ ID NO: 755789 - DNA, 100 bp, Homo sapiens
tccagctctcaatcgctccccctgaagccgagggagtcgtcttgagcgacagagcacctactgtgccaccatggtccagcactgtgaagccctcaaccgg

SEQ ID NO: 755790 - DNA, 97 bp, Homo sapiens
caggactgcgccgcgtcttcctcaaggctccttcgagagcagtggatccgggccaagtacgagcgacaggagttcatctacccggagaagcaggagc

SEQ ID NO: 755791 - DNA, 100 bp, Homo sapiens
aaggaatgttttgctagctgctaaaaccacctttgtcaccagaatgaatgaagtgcttcagatttaaataaaaagaggcacagttagatgaagaaggaca

SEQ ID NO: 755792 - DNA, 82 bp, Homo sapiens
gggcctgggccgccgctgctacctgcagcgccgtgtggcacgacacaaaaatcagaaatgcatcttctgcagacaccgggtt

SEQ ID NO: 755793 - DNA, 75 bp, Homo sapiens
tcgaggagtgcgtcaaggactccccgcgcttcagggtggctgttgcaccacgccctccctcctgcccctgaggcc

SEQ ID NO: 755794 - DNA, 90 bp, Homo sapiens
cgatgtgtcagcagagcatgcagaagtcctcgctggagtttcataaggtcttagtggtgcaatggctagtataagcgtgcgttcgagtac

SEQ ID NO: 755795 - DNA, 97 bp, Homo sapiens
gcgggccggacgctgagcggagcagctgcgccacgagttttgcggcctccaggtggtggatccaatttttcattaggttttgatgaaccaacagaac

SEQ ID NO: 755796 - DNA, 100 bp, Homo sapiens
cggcggcagggacagcaggagcagtggtgctgtcagcgcggccgtcggagacatgggagacccggggtcggaggtcacgagaagagaatgccttctagat

SEQ ID NO: 755797 - DNA, 75 bp, Homo sapiens
cagatgccaggaatgaacactgtgtgccctgagcaggacccaatgttgtcttccagttgtgaaagcaccccagag

SEQ ID NO: 755798 - DNA, 81 bp, Homo sapiens
cgcggcagagtccccgtacgcctacagtaacggccagcactccttgcccgaggacagagatggcgagcgcccggattgggg

SEQ ID NO: 755799 - DNA, 74 bp, Homo sapiens
ctcaggatcacatcaagagccttcattgcatgataccagggccggcagacattccaccgctttgacaagttcaa

SEQ ID NO: 755800 - DNA, 74 bp, Homo sapiens
cccaatccccggcagctctctcaggctgcaagaaagcgtaagattgccattcgaaaagcccaggggaaaaatgt

SEQ ID NO: 755801 - DNA, 98 bp, Homo sapiens
tgcgctattgtgtcctactgcctctgaggagcgcctggaccatgctgctgagcgcctactggcacggcctccacccgggctactacctgagcttcctg

SEQ ID NO: 755802 - DNA, 82 bp, Homo sapiens
cgctcgcgcaccacgcgccccgcgcggcccgcccggatcgtggcctctcgagagcaagctgagctgactgctgcccactttg

SEQ ID NO: 755803 - DNA, 82 bp, Homo sapiens
ccaccgctgccctcagctccgagtccagggcgagagtattggaacagttgtgctgctgccagcgatccgtgggagctgtgta

SEQ ID NO: 755804 - DNA, 99 bp, Homo sapiens
cttgaggctcttctactgacagcctctgaaagaattctgcttggtcagaatcgtgatggcattgtgttcagcactgatgactattttcaccatcaagat

SEQ ID NO: 755805 - DNA, 90 bp, Homo sapiens
gccagccgctgttttgccggaggagcccctcaggccgtattttgaaggtggcgtctcatctgtctacctctgggatctggatcatggctt

SEQ ID NO: 755806 - DNA, 110 bp, Homo sapiens
tctgtcttcggtggactccttcggcagtccacccaccgccgccgcctcccaggcaagtatatcgcgtcaacacagcgacctgacgggacctggcgcaagcagcggagggt

SEQ ID NO: 755807 - DNA, 100 bp, Homo sapiens
attatatcgcatcctatggctcaaagaaagatgattatgaaggcagcaacaactcatctccagtggattttgtaaataacaagaggacagacttatcttc

SEQ ID NO: 755808 - DNA, 100 bp, Homo sapiens
ttgcaaagcgaactacatatggaggagtgtctgtgagacgctgcccaactctgaaacctccgcagcacggctacctcacctgcacctcagcgggggacaa

SEQ ID NO: 755809 - DNA, 100 bp, Homo sapiens
aaggcgacccaagacacccagagagggacaggaactgaagaggagtttggaggtcttgtatcagctaatcttatacttttgaggaacagacttctggata

SEQ ID NO: 755810 - DNA, 50 bp, Homo sapiens
ggactgtgtattttaaatgcaggtcttgggcgtctttggtactggctttt

SEQ ID NO: 755811 - DNA, 86 bp, Homo sapiens
acaggaagtggctgtgcgctagatgctgtcaccagaggcctactgaacttgacgcactggtatttggccatctatacaccattctt

SEQ ID NO: 755812 - DNA, 115 bp, Homo sapiens
tgtccgccgagatgtccggctgcagcagcaagtcccatcggaggacctccctgccctgtataccgagggaacagctggtaagcgggcccctcagtgctaccccagttccgtcaac

SEQ ID NO: 755813 - DNA, 83 bp, Homo sapiens
cgggctgtgagcaagaggaagctgcagcccacccgggcagccctcaccctggttacaggaggttccagtggcatcgggaagtg

SEQ ID NO: 755814 - DNA, 74 bp, Homo sapiens
tgtgaaaaactctttggatgattctgccaaaaagatttgaggcttaagcaacttcttccggggaagagtgccag

SEQ ID NO: 755815 - DNA, 100 bp, Homo sapiens
tacaagaacatgagatttcttattacacacaatccaaccaatgcgaccttaaacaaatttatagaggatacagattataaaccagtgccactgaaaacag

SEQ ID NO: 755816 - DNA, 99 bp, Homo sapiens
tcgcgccagccacgagggagcgtccgcggcccgcgcgcccgcgcggcggaggagaggccctgaagaggaaagtgaggatgactctcatctcgaaggcag

SEQ ID NO: 755817 - DNA, 51 bp, Homo sapiens
agggtctttgcagtcccatcatgttttttgaagaggcgcagtctactgaag

SEQ ID NO: 755818 - DNA, 99 bp, Homo sapiens
gaggccacagcccaggtcacagtgaaagggcccaggagacaccagcgggggctgccgctgcagggtaaatgggattccttgccacccaagctgtcagaa

SEQ ID NO: 755819 - DNA, 98 bp, Homo sapiens
ctgaggcctggaatttgattaactcattcaaggttacccagttggccaacagagattttgagaaacacattgaaggatctgttaacacttgatatacc

SEQ ID NO: 755820 - DNA, 100 bp, Homo sapiens
actcgcccgtcagtggttataataaggtaatacgaggaaatagtatcatcatgttagaagccttggaacgagtataaataatggctgttcagcagagaaa

SEQ ID NO: 755821 - DNA, 74 bp, Homo sapiens
tccagtagacggtacagcgaaggcagagagttcaggactcctcctattttgaggacttctccaacatctccatc

SEQ ID NO: 755822 - DNA, 75 bp, Homo sapiens
atgccaaagcagctcattcacatacagcacatttttacaggaaggaatgcctacttctgcacgatgtgatgattt

SEQ ID NO: 755823 - DNA, 101 bp, Homo sapiens
gcaacttacccgagaacgtgcgggaagagaagatcatcgagcatttcaaacggtaagtaaggaggtctctgtaccatggctcgtacaaagcagactgcccg

SEQ ID NO: 755824 - DNA, 119 bp, Homo sapiens
cacgcgtttcccgcaacccgataccatcggacaggatttctccgcctcagcccaacggggagacaatgcagatcttcgtgaagactctgactggtaagaccatcaccctcgaggttgag

SEQ ID NO: 755825 - DNA, 100 bp, Homo sapiens
ctctgcctttgctggtgcagtgagagcagcttcaggatcttatggttggtgatgaggcaagtgaattacgatcaatgttagaagttaactaccctatgga

SEQ ID NO: 755826 - DNA, 90 bp, Homo sapiens
gcccgggcccaggccccggcagcgcctgggacaagactgattcttgctattccaaatcctcttccacgttgacagcccttcagatatttc

SEQ ID NO: 755827 - DNA, 50 bp, Homo sapiens
cagcaatattgtccagatgaaggacgggcacctgtgctggttgcacttgc

SEQ ID NO: 755828 - DNA, 74 bp, Homo sapiens
ctgcgttgaattgctcaacagcatcttggaagtccttagctaccaggatgcgtccgggaccatgtctggagaac

SEQ ID NO: 755829 - DNA, 100 bp, Homo sapiens
tgacatgcatcctgtgaaaacactctttaagattccaaggcgacagaaggctagagagaggcagcagaaattgcttgcggagtttgcttcacgacagaaa

SEQ ID NO: 755830 - DNA, 80 bp, Homo sapiens
atttgtttctctctgcctgatttctcctgaatttggaaactatttccattatgcagatgtagatcctgaaaaccagaact

SEQ ID NO: 755831 - DNA, 51 bp, Homo sapiens
gaaacatctcaccaatttcaaatctggagcccatggaggagaggcaccaac

SEQ ID NO: 755832 - DNA, 74 bp, Homo sapiens
gcttgtcctggctcttgccctcatcctggttctggaatcctcagttcaaggaggagaaagtgcaggccatgcca

SEQ ID NO: 755833 - DNA, 100 bp, Homo sapiens
cgcgggtagaggcgggcggcgcgcggcggcggcgctcggcgatggtaggcgtccctggagcggccgccttccagcgtatccgttacagcactgatgtgag

SEQ ID NO: 755834 - DNA, 98 bp, Homo sapiens
caaatccaggtcgcgatcgaagagtccccccaagtctcctgaagaggaaggagcggtgtcctcttaagaaaatgatactgaagtactctttcccagtg

SEQ ID NO: 755835 - DNA, 82 bp, Homo sapiens
gacaaagagcccctcatcgagctcttcgtcaagcttgttctaaagacgaaggggaactccctagtgctacaggctgtttcag

SEQ ID NO: 755836 - DNA, 88 bp, Homo sapiens
caggacctctccactgcctcctccacccctgtatttcacttggctctccaaattgactcaactccagagaatggtgacttcttggccc

SEQ ID NO: 755837 - DNA, 100 bp, Homo sapiens
cccggcagacggctcagggaatggatgagaaagatcagtctaaagaaaaggagaagaaagtgaaaaaaacaattccttcctgggctaccctttctgccag

SEQ ID NO: 755838 - DNA, 100 bp, Homo sapiens
tcgatggcagcgacacaattgtctgtgacagtaacagtacttgggatcccccagttccaaagtgtcttaaaggaaataaattttccactgcaattccaac

SEQ ID NO: 755839 - DNA, 75 bp, Homo sapiens
ctggaattgagcaagggagtgatgccggttatctctgtgaatctcaggttgccaaggaaagtgtactgcagtttt

SEQ ID NO: 755840 - DNA, 100 bp, Homo sapiens
agatgacgattcagagactgaaaaacctgaggctgatgacccaaaggagaactacgatgacccgcacaaaacccctgcctccccagttgtccacatcagg

SEQ ID NO: 755841 - DNA, 83 bp, Homo sapiens
tggagatgggcagacggattcatttagagctgcggaacaggacgccctctgatgagatggcagcagaaaaggccaaagcagca

SEQ ID NO: 755842 - DNA, 50 bp, Homo sapiens
gctgaagatacaactgttagtccaagaaaaagcttgtggtgaaggggggc

SEQ ID NO: 755843 - DNA, 98 bp, Homo sapiens
agagaggcaccgggatcgtgaccgagaccgtgaccgagagcgtgaccgagagcgcgaatatcgtcatcgttagaagtaattcaactgagaagcaagaa

SEQ ID NO: 755844 - DNA, 100 bp, Homo sapiens
cgtagcaaggtgctcttctgggacaacgcgtacgagttcaacctcagcgctctgaagtagatataatctgtggtgatcacctgttggagcagtatcaaac

SEQ ID NO: 755845 - DNA, 100 bp, Homo sapiens
accggatgatggagaggtcaatgaggtgctgatgtatggacagccgtatcgtgttaccttagagcttgagctgccagagtcccctgtgaatcaagatttg

SEQ ID NO: 755846 - DNA, 100 bp, Homo sapiens
ctgcgtccgagtctccgccgctgcgggcccgctccgacgcggaagcatcaacaacagcaacttgtgattggcggtgaccggatattcagttgcacatccc

SEQ ID NO: 755847 - DNA, 50 bp, Homo sapiens
ccggctccgggatgagcgcacggacggatgggcttaggtcacgagcaagg

SEQ ID NO: 755848 - DNA, 100 bp, Homo sapiens
ctggcttttaaggaggacacccggacacctggaagctgggaaatggtgaatgaaaactttgccattgatttgatagcagagcagcccgtgagcgaggtgg

SEQ ID NO: 755849 - DNA, 50 bp, Homo sapiens
gctctcagtagactggccagaaagtagagacggggttccactgtgttagc

SEQ ID NO: 755850 - DNA, 83 bp, Homo sapiens
tgctcaacagaagatttgctctatgatcgtgataaaggcctgctatttaccctgggttatccttggattcaactatatcatcg

SEQ ID NO: 755851 - DNA, 59 bp, Homo sapiens
tttccacgacggtgacacgcttccctggattggctgcatatccccaccgtttgaatctc

SEQ ID NO: 755852 - DNA, 100 bp, Homo sapiens
ttgcagatcgggagcgcaaggtcgccctcaaggccatgatcaaaacgtatcagaacaaggtttaatagaaatccttaaaaaagtaagccaacaaacagaa

SEQ ID NO: 755853 - DNA, 82 bp, Homo sapiens
cgctccgtggccttagctgtgctcgcgctactctctctttctggcctggaggctatccagcctgggaggctgtggcgtgctg

SEQ ID NO: 755854 - DNA, 85 bp, Homo sapiens
cgcgtggcggcggccgaggagagcaccgggaaagcctctgctcatcggaacctgtcccagctccctaattttgccttctctgttc

SEQ ID NO: 755855 - DNA, 75 bp, Homo sapiens
gaggggttcacgcggtcccgccggatcccgaagacgagggcctggaggaaacagctacagcctccgcttggcgtc

SEQ ID NO: 755856 - DNA, 99 bp, Homo sapiens
ctctcccaggacccgcctggctgcgagatatcatcatggcagaacaggatgtggaaaacgatcttttggattacgatgaagaggaagagccccaggctc

SEQ ID NO: 755857 - DNA, 50 bp, Homo sapiens
ctcgtccaacgtcggggaagttgtctgatacagtttatgtaacttgatgg

SEQ ID NO: 755858 - DNA, 90 bp, Homo sapiens
tgagactgacatcaaaatccgggtcaacaagttctacaggacctgggatccagttggaggacggcggtgatggcagggaggatgccccgt

SEQ ID NO: 755859 - DNA, 75 bp, Homo sapiens
gctgatagcttttacagtgctcattcctaacagtggatttacttgtctgcggatcaatggagagctaatcactgc

SEQ ID NO: 755860 - DNA, 82 bp, Homo sapiens
cccttgccttgagtcagtgcgccgctctccagcccgcttgaacgacccctctgccatgaaccagtccatcccagtggctccc

SEQ ID NO: 755861 - DNA, 80 bp, Homo sapiens
actaccagccgcttcctggcatgtcagagaacccctccgtctatgtgcctggatgggagtcccagcttctggagacgggg

SEQ ID NO: 755862 - DNA, 75 bp, Homo sapiens
gaagagcgctcccaggagaaacaagaaggagcagcagagagagcggcgttttggtgctcagggaacagactgacg

SEQ ID NO: 755863 - DNA, 100 bp, Homo sapiens
aaggaagctatctgtgataatgctttgtggtgtatggattcatctcactgactgaaacctgagttttgattcaccagggttcttttcctatgactccatc

SEQ ID NO: 755864 - DNA, 94 bp, Homo sapiens
gcagacgttagcgtgagtgatcactctcaatcccggacaatgcagatcttcgtgaagactctgactggtaagaccatcaccctcgaggttgagc

SEQ ID NO: 755865 - DNA, 97 bp, Homo sapiens
agcgacaacatggaggccgtgaagaccttcaatagcgagctgtccgtacctggcggtgaaaatcacccctgccatccctgcagtcgctggcatcctg

SEQ ID NO: 755866 - DNA, 76 bp, Homo sapiens
gtgaggcaactgaaaactgttcttggacctgcggtgctatagagcaggccgtacacctggtccctggctccaagcg

SEQ ID NO: 755867 - DNA, 100 bp, Homo sapiens
ctcaggacagggctgaggaaccatgtctccatccccgaccgccctcttctgtcttgattgtcactgctgttccaagggcacacgcagagggatttggaat

SEQ ID NO: 755868 - DNA, 100 bp, Homo sapiens
gccgaggtggacctgcgggatctgcaccgcgaccagggccgcaggaagacgcaaaatcgagctatagcagattatcttcgttcaaatggctatgaagagg

SEQ ID NO: 755869 - DNA, 132 bp, Homo sapiens
ctcggaacagcgcatcaaccggatcatgggctttcacaggcccgggagcggcgcgggctttctcctgtttctcagaggatttatcaattatgcaaaagttcggaagatgccagaaactttctcaaatctccc

SEQ ID NO: 755870 - DNA, 75 bp, Homo sapiens
agggaagacgccctggtgctcaccaagcaagcattatgccagtacatacaggcttctaaagccagggatggtgcc

SEQ ID NO: 755871 - DNA, 75 bp, Homo sapiens
taagcactgctgcactttatgagcatgggtggtaaagtaccacctgctactcagaaagctaaatcagaagaaaat

SEQ ID NO: 755872 - DNA, 75 bp, Homo sapiens
tcaaagcccgagtcttccacttcggcgagtacaagggcgatcagcaggcctcttcttcttcactctcctcttcta

SEQ ID NO: 755873 - DNA, 90 bp, Homo sapiens
ggagaccaaacctgtgataacctgtctcaaaaccctcctcatcatctactccttcgtcttctgggctaaccggcctcctgcaaagctcaa

SEQ ID NO: 755874 - DNA, 100 bp, Homo sapiens
gaagagggtcctggtactactgcttgctgtggcatttggacatgctttagagagaggttctgccattactgcaatagccacatctgtgtgtcacggccca

SEQ ID NO: 755875 - DNA, 100 bp, Homo sapiens
caggaatcaatgtgcactatacacagctggcaaccagtcacatgcttgaactcagcatacaggatgtacagatcctgcaaaagttccaggtgcccacact

SEQ ID NO: 755876 - DNA, 88 bp, Homo sapiens
gcagcagcggcgggaggagcctccggggatctgccagagcatcttttggagatcgaaaggtagaactttccagttcatcccagcacgg

SEQ ID NO: 755877 - DNA, 102 bp, Homo sapiens
cagcaactatgagaatggagaaataggggaaagtcaagtgaaaggtggtgaagagccaattgagctaatggcagcattagccgctgttgggcctcctaatcc

SEQ ID NO: 755878 - DNA, 100 bp, Homo sapiens
cagtggacgtggatttggggatggctataatgggtatggaggaggacctggagaacttaaaccagtcagtagcccatgactggacatcaggtttacaaag

SEQ ID NO: 755879 - DNA, 76 bp, Homo sapiens
agtattcctctccaaagagctgcaggccttcaacagccttattaggtgacttcatggtcatgacgattttcttcaa

SEQ ID NO: 755880 - DNA, 50 bp, Homo sapiens
ggtagccatggcacaagaatataggcaccatgccggtggaaaggatgcgc

SEQ ID NO: 755881 - DNA, 75 bp, Homo sapiens
gctgcaggagataagagaaacgggtgggtcttcaaacaactctatgataaaggccttgtttatagaggtgtgaaa

SEQ ID NO: 755882 - DNA, 83 bp, Homo sapiens
tagcaacatctataagtgaaaccttggaagagaaggtgagccagccatgagagggtatcttgtggccatattcctgagtgctg

SEQ ID NO: 755883 - DNA, 90 bp, Homo sapiens
ggtccggacagcttctatttgggtccatgtgaaatctgaggtccttgctgtcaagttgtcacaagaaataaactacgcaaagagcctcta

SEQ ID NO: 755884 - DNA, 90 bp, Homo sapiens
ggcatttacagaaagagtcaacagcagtggcaacaggcccagcttcccgatcagtggagacgttgaaggagatgattaagtctggaatga

SEQ ID NO: 755885 - DNA, 97 bp, Homo sapiens
tgagagcattttggaagaggaaccacaagaaaatcaaaagaaacttttgcccttatcagtaacacctgaggtccttttccatgtgatatatgtggtc

SEQ ID NO: 755886 - DNA, 86 bp, Homo sapiens
gatgtcaagtacatcttcttgatgacaggaagctggaactcctagtacagttttcaggtgagaatgcagaacgtttaaagaagaca

SEQ ID NO: 755887 - DNA, 74 bp, Homo sapiens
ctgcgcgcgccgggagagatgctgagctcttgaatgtcgtctctcaactagccaaacggaatctgcgactgctg

SEQ ID NO: 755888 - DNA, 98 bp, Homo sapiens
gcagaactacctgtacaacgtgctggagagaccccgcggctgggcgttcatctaccacgctttcgtatcctcggttggtttgtacagatttctctagg

SEQ ID NO: 755889 - DNA, 74 bp, Homo sapiens
tgcagaaggtggacagggtaaaagaaagagacttttttctaaagaatactgacgacaacagtggagacttggac

SEQ ID NO: 755890 - DNA, 100 bp, Homo sapiens
cagccttggaaagtcaggaccgcgacggcagcagagcaagagattggaacaattatcaggtcattaggatgctgtcctacggaaggagagctgcatgatc

SEQ ID NO: 755891 - DNA, 75 bp, Homo sapiens
ggaggctgatcgcgcccagaaggtgaaatgacaatggatgctctgttggctcgattgaaacttctgaatccagat

SEQ ID NO: 755892 - DNA, 100 bp, Homo sapiens
gtgactggattcacgggtagagattggcttcgggctgagctagcagtgagcaccttttggcccaatgaatatcagacccatcctcatgccaacaaactac

SEQ ID NO: 755893 - DNA, 100 bp, Homo sapiens
caaaacagatccttccccgaagagggaagcacctactatgattctttttaatgtggtgtttgcactgaggaatggcaggaccctgagttgatgagagacg

SEQ ID NO: 755894 - DNA, 100 bp, Homo sapiens
tagaactctccacagccatcactcatgtccataaggagagtgatcagcagctggactgtgccttggacctaatgaggcgcctgcctccccagcaaatcga

SEQ ID NO: 755895 - DNA, 83 bp, Homo sapiens
caaaatacgatcttatttcaatatggttatcaatactctggctgaccatcatcatcgtgggactgactttggtggaagtcctt

SEQ ID NO: 755896 - DNA, 50 bp, Homo sapiens
ccaggagaagtccatggccacctagtctcagtgctgtgccccccccagag

SEQ ID NO: 755897 - DNA, 76 bp, Homo sapiens
gaaagctgcggcctgtatcaccagaggagattagacgtagcagattagctgtagcaccagttgtacccgatttaag

SEQ ID NO: 755898 - DNA, 100 bp, Homo sapiens
gcaccatgagccaaggcccccccacaggggagagcagcgagcccgaagcaaaagtcctccacactaagcggctttaccgacaaatttacatgtattggag

SEQ ID NO: 755899 - DNA, 82 bp, Homo sapiens
ccctcctgaggaggacccagagcaggacagcggcccggaggacctgcctctcgtcaggtacactgaggaggggacggctccg

SEQ ID NO: 755900 - DNA, 98 bp, Homo sapiens
ttcagccaagccctgagcaggtgccagctccagcaggcagccgccctcaatgcccaggccacggcgtatgcctccgaggacggggtcctgaccgaggc

SEQ ID NO: 755901 - DNA, 75 bp, Homo sapiens
gccatagtacctacagcagcactccagaacctgtctccagagaagattttccacgtcattgtggccccttgttat

SEQ ID NO: 755902 - DNA, 100 bp, Homo sapiens
tggcgattcactggagacttcacggcacctgacctggtttgccgagtggtccgctatttgcagaaaaggacagatgaagctgctttccagaagctgatga

SEQ ID NO: 755903 - DNA, 98 bp, Homo sapiens
caatatatacgtcttggatagactgttggtgcatgctacaaaaagagagctgcggtgcaaccctgggcagtttgcgtgtcgcagcggcaccatccagt

SEQ ID NO: 755904 - DNA, 75 bp, Homo sapiens
gattgctggatgttatgaaaagaatcttttatggggggctagggagacgtggtgggcggtccttcctgtgacacg

SEQ ID NO: 755905 - DNA, 74 bp, Homo sapiens
ttcctataaatctcgcccaaacaggaaagatagtaaagaatatggtcatactttccgcagtgacctgagagaag

SEQ ID NO: 755906 - DNA, 75 bp, Homo sapiens
acctgataaattatatagacgttgcccagatccatatcatagattttgacgatgaaaacaacattataaataaaa

SEQ ID NO: 755907 - DNA, 89 bp, Homo sapiens
gcatcaacaagatgttgtcctgtgctggggctgacagaagttcagttctgcaagcaagtatgctgctctctctgttgatggtgaagatg

SEQ ID NO: 755908 - DNA, 82 bp, Homo sapiens
attattcagttgaaacagttacactgcttgtagctcttaaggaacgaatgcaggaatttgggaactgagctgtgcaagtgct

SEQ ID NO: 755909 - DNA, 99 bp, Homo sapiens
ccagggtctgcagggcctgggccgccgctgctacctgcagcgccgtgtggcacgacacaaaaatcaggctgcagtgcacctgccagcacaacacctgcg

SEQ ID NO: 755910 - DNA, 99 bp, Homo sapiens
agattcatgaagagaaactcctctactggaacatggctgttcgagacttcagtatcctcatcaacttgataaaggttgctacgatttctgcaaacggag

SEQ ID NO: 755911 - DNA, 60 bp, Homo sapiens
catctccatattctcaggcacagagaaaggtcctgctcaggttccaatgatgtccccaaa

SEQ ID NO: 755912 - DNA, 75 bp, Homo sapiens
gcccggctggaccaggagaccgcccagtggctgcgctgggacaaggttgcaaaacttcctcaagttgttcaacag

SEQ ID NO: 755913 - DNA, 83 bp, Homo sapiens
acgaggacgaggagtcggaggagccgcgggcggcgcggcccagctcgttccaggattttttatcaagcagaaatgcatcgaac

SEQ ID NO: 755914 - DNA, 50 bp, Homo sapiens
ctcgcggaggccgagaggcttaaggagacatgggatgtagagctggaaag

SEQ ID NO: 755915 - DNA, 100 bp, Homo sapiens
agaagctgctcctggagacagctgccccgagggtctcctccagtagacggtacagcgaaggcagagagttcaggccaacgcagacccgtcagtgataaac

SEQ ID NO: 755916 - DNA, 82 bp, Homo sapiens
atcctccaggcatgccccgctacgagctggctttaatcctgaaagccatgcagcgggagccttcacgtaaatgggtccagtc

SEQ ID NO: 755917 - DNA, 49 bp, Homo sapiens
tgacaacgtggatcgttgttttgaaacaataactgaagtgaagtgatgg

SEQ ID NO: 755918 - DNA, 51 bp, Homo sapiens
tgacagtaaagagaaccggccaatcaggacattcactgaacaatgccaggg

SEQ ID NO: 755919 - DNA, 74 bp, Homo sapiens
ggaaaacaagctcagggcttccactgattctacattatgctgccagctggttgtggctaaggagagacatacat

SEQ ID NO: 755920 - DNA, 98 bp, Homo sapiens
gtcgccgccgccaccatgcccaagagaaaggctgaagccgacgtagcttctctgaacagacgcatccagctggttgaggaagagttggatcgtgccca

SEQ ID NO: 755921 - DNA, 100 bp, Homo sapiens
cttctgcaaggtccggctgctggatggaggggattttgtcagcttgtcgtcaagggcaccgcgtccgtgctgcagcgccggtcccccaatgaggagtacg

SEQ ID NO: 755922 - DNA, 74 bp, Homo sapiens
cccagcgcgggcggcggcggctgggcgggagccccagagatactagagtaaaaggatggtttcttctggacaat

SEQ ID NO: 755923 - DNA, 75 bp, Homo sapiens
taaatgactgtgtccagcaagttgtggaacttctacaggaacgggggctatctgatgggttagagtgcctttgag

SEQ ID NO: 755924 - DNA, 95 bp, Homo sapiens
tgacactcaacaggattcccggcttgttagcagtggcacaagatcttacagaggatgaagaaacagtagaagattccataattgaggatgaagat

SEQ ID NO: 755925 - DNA, 87 bp, Homo sapiens
ctgtgcagagatcagagtactaagagacagcatccttcggaaagctctggacaagatcgcggaaatcaagtctctgttggaagagag

SEQ ID NO: 755926 - DNA, 97 bp, Homo sapiens
ctgcggcagacggcgacagtggcggcggcgccatggcagggcttgcagatctcacattcttgaaggtggcattgaagagcactaagatcggaagatg

SEQ ID NO: 755927 - DNA, 101 bp, Homo sapiens
ctcggttaagggaaagcgccgagatgacgggctttctgctgccgcccgcaagcagagttaactctgctgtttgctgcatgctgcatgagacccagggtcct

SEQ ID NO: 755928 - DNA, 89 bp, Homo sapiens
tacgcggccgcggagacctacctgcggcgtcggcagctgctgctccgaggtctcggcgcggaagatggccggcggcgtggacggcccca

SEQ ID NO: 755929 - DNA, 100 bp, Homo sapiens
gcccacagagatctacaaccttggagcccagagccacgtcaaagtctgccatcatggatgttctcgcagaagcaaatggcacctttgccttaaacctttt

SEQ ID NO: 755930 - DNA, 83 bp, Homo sapiens
tatgtgtggatggaactccttgcaccaggcttcttttcaggtggaagaagagcccgaagaagaacctgaagagacagcagaag

SEQ ID NO: 755931 - DNA, 100 bp, Homo sapiens
gctgcgtcgtccctgggcccgaataactgtcgcccgcttccctcagcgtgagcaactgagccagttttggtatagtcaggaaactgctctgcagctggca

SEQ ID NO: 755932 - DNA, 80 bp, Homo sapiens
gatacaccttttccacagggaattgagttgatcaaagttttgacattccagacagaacttttcattctacaaatacaact

SEQ ID NO: 755933 - DNA, 98 bp, Homo sapiens
ggggggccctccccgcggggcagatgcggacaaggcaaaatctcagcaagttcggacctctagtacaataaggcgaacctcctctttggatacaataa

SEQ ID NO: 755934 - DNA, 101 bp, Homo sapiens
gcctgctttgattcattgaaagtattatagctgcaaatgtccttgtattctgtttatggagagtaccttctctgcagcggacaatgatcagatatttcaca

SEQ ID NO: 755935 - DNA, 83 bp, Homo sapiens
tgtcttcggtggactccttcggcagtccacccaccgccgccgcctcccaggtgctgactgggttacttttttaaacactagga

SEQ ID NO: 755936 - DNA, 100 bp, Homo sapiens
cagcacagacgcatgggctgctgggtcagaatggcggcagtggagcatcgtcattcttcaggattgccctactggccctacctcacagctgaaactttaa

SEQ ID NO: 755937 - DNA, 75 bp, Homo sapiens
ggggagtatgtggaaccgcaggactgcagggtctctccagaacgatgccaacgggactgcaaagccgccttttct

SEQ ID NO: 755938 - DNA, 90 bp, Homo sapiens
gggaaaaggaggattcatgggaaaatctccatatgggtctctggacagaggtattcacagttttatatggaagatagcttttgccattat

SEQ ID NO: 755939 - DNA, 100 bp, Homo sapiens
cttggtgactggtctattcaagttcaagtgaattggccctcagattctcagcttgattctaaggaactttcagctggttctcaatttgtaggactcatgg

SEQ ID NO: 755940 - DNA, 51 bp, Homo sapiens
tgacaagccttcaaggagcccaggggtcctggtccgcgccagagcccagcg

SEQ ID NO: 755941 - DNA, 100 bp, Homo sapiens
tcatttgggccctgggcgcaggctgcagagagatcgtctccctccaagtggcaccacttcacccctggttccccttctactttgaactgaagatcgcctt

SEQ ID NO: 755942 - DNA, 100 bp, Homo sapiens
gagcgccaggcttcgggcccgggaatcgccgccgccgccgccgcagagctgcagctcggggccgagggaccccctcccaggcctcagctccgggcgacgt

SEQ ID NO: 755943 - DNA, 88 bp, Homo sapiens
tccgatttaaagctgagctgcgaggaaaatggcggcgggagagtgttgaatttcatgaaagaggaaagaatcataaggaaaatgtggc

SEQ ID NO: 755944 - DNA, 130 bp, Homo sapiens
tgccgcaccaggctcatcctgtccatcgtgtgcctgatgatcacgcagctggctggcttcagtggaccaggctgcaaagtatgccaggggagtatgtagcccggggtggtccaatgggtgtgagtatggg

SEQ ID NO: 755945 - DNA, 100 bp, Homo sapiens
gaagctatctagagctggccaacacaatggaatcttgctctcttgctcagactggagtgcagtggcatgaccttggctcactgcaacctcacctctcggg

SEQ ID NO: 755946 - DNA, 100 bp, Homo sapiens
caacttcagattttgtggaaagctattaactgtcctgaagtgattcgcctttgccagtctcatctcgtgtctgctttgttaagttccatgatccagactc

SEQ ID NO: 755947 - DNA, 101 bp, Homo sapiens
ttggcagcttctgtaagaaaggctgaggatgaacaggaagaggggcagcctgtgaggatggccacctttccaggcccagctatcagttgagggatttgcag

SEQ ID NO: 755948 - DNA, 83 bp, Homo sapiens
ctcggatcgaatccctcacgcgggcgcggatcgaccggagcagagagctggcgagcaaggttgtgaccgagattcccgacgag

SEQ ID NO: 755949 - DNA, 80 bp, Homo sapiens
agaagacactccccagggcagaaatagcgaccatggcgagaatgagtctgcaggtcttaaacgacaaaaatgtcagcaat

SEQ ID NO: 755950 - DNA, 74 bp, Homo sapiens
ctgggaattgctgaattagaactgcagaggttcctctacagcaaggttttaaaatcaaagatgggaaaatcgga

SEQ ID NO: 755951 - DNA, 80 bp, Homo sapiens
gccctcagtgtctacctcacccccaagaccagtacaggtttgcagattccgccagcagcacagcaagctctacagatgag

SEQ ID NO: 755952 - DNA, 100 bp, Homo sapiens
aacaatttcacctttgaattcagccagtggtcacagctggatgtttgcgacatcccagagagcttccagagttttgcactgattgcaaaaataaagtcct

SEQ ID NO: 755953 - DNA, 100 bp, Homo sapiens
gactctgctttctcatcctaggcctcaggtgattatcctgaaccatccaggccaaataagcgccggctatgcccctgtattggattgccacacggctcac

SEQ ID NO: 755954 - DNA, 75 bp, Homo sapiens
ccttccggagcttctcagaagacagagggttttcttttgagatgccaattctcggaagcaagaagcagagtggaa

SEQ ID NO: 755955 - DNA, 90 bp, Homo sapiens
aaacccaaactgttcagaggactgcaaatcaagtgtgaggtcgtgagctccctgaaggccgtgcacaaatttgttgacagctgccagctg

SEQ ID NO: 755956 - DNA, 98 bp, Homo sapiens
ccgaaacaccggtaggagcggggagatcctacatggctttccaccaacctgggcatcctgacctgcatcgagtgttccggaatccaccgagagctggg

SEQ ID NO: 755957 - DNA, 90 bp, Homo sapiens
cacatgtgctgtgctgtttgtctcctcgacagggagcctgtccaccagcaggctgcggtcccagcgggtcgagtctatgctgtcttgtca

SEQ ID NO: 755958 - DNA, 101 bp, Homo sapiens
tgattcatcttgtggttggactgtcatcagtcatgagggctctctaaatacgtacagattctgcgataatgtgtggacttttgtactgaatgatgttgaat

SEQ ID NO: 755959 - DNA, 138 bp, Homo sapiens
tgagaacttgcccattgaagatagagagaccataattatgaatcaaattctgccttatataaagtgcaccaattccagctggacatcactgtgaaaatgggacgggataaagtccgagaaatgtttatgaagaatgcc

SEQ ID NO: 755960 - DNA, 90 bp, Homo sapiens
tagtagatagagccaaacaatcttttcaagtgcaactgcagatagaagacctgactcgtaaactgcgcacaggagacctgggcatccccc

SEQ ID NO: 755961 - DNA, 100 bp, Homo sapiens
ctgtgagaaaaaggattttttatcagcgcctcaatctctactcgaagaagaaagagaagaaacgttttctcagggattttatattggaagacatggatct

SEQ ID NO: 755962 - DNA, 80 bp, Homo sapiens
agcagctgcagcagcagcagcacagcgacaagacgattttgcaagaacgaggctcaaggatgtgagggacacagtattga

SEQ ID NO: 755963 - DNA, 75 bp, Homo sapiens
tgcacatcaacctttcaggcacaaaactgtctcctgagcccttaaattctctacagaaagaaccaatgaacccaa

SEQ ID NO: 755964 - DNA, 50 bp, Homo sapiens
ccgggacctctccttcctgcggtcagcagataagcagagagccctagaag

SEQ ID NO: 755965 - DNA, 75 bp, Homo sapiens
ggagagccatgcgtactttctaaaaactgatggtgaggaagaggatggagatgaagatgaggaagctgagtcagc

SEQ ID NO: 755966 - DNA, 100 bp, Homo sapiens
cacatggccatacagcggcaggacagcaagagcgcactcttcctgctggagcaccaggcagatataaatgtcaggaggagctggctctgtgtggctccag

SEQ ID NO: 755967 - DNA, 75 bp, Homo sapiens
gagcggatccctgagctcgtcaagcagctgtcggccaagctcatcgccaacggtccatattcaagcctttcatct

SEQ ID NO: 755968 - DNA, 100 bp, Homo sapiens
agatggcagccagtcagtggtggaggctcgtgaagctgtggaaatgcgtgcccaagtagagagaaaaatggctcagaaagaaaaggaaaaacatgaagag

SEQ ID NO: 755969 - DNA, 101 bp, Homo sapiens
ttggtaaaagagttggatgcctttccgaaggttcctgagagctatgtagagacttcagccagtggaggtacagctgaataccactagaaacatacctgtaa

SEQ ID NO: 755970 - DNA, 74 bp, Homo sapiens
agaaaaagaaattgtttgcaagtgtcacaagtgtgccatgcggagctgaatgccatcatgaacaaaaattcgac

SEQ ID NO: 755971 - DNA, 101 bp, Homo sapiens
tggatgaacatgtgcttggtgtcgtttttccttgagctgaacgtcttgcaacagtggccgcacgcatagataatcctgatttgctgagccatgtcacagtg

SEQ ID NO: 755972 - DNA, 83 bp, Homo sapiens
aagaagaaaaagcagctcatgaaaaagaaggaattaatagaggatgactttgagacctaatctgggagcctgcaagtgacaac

SEQ ID NO: 755973 - DNA, 100 bp, Homo sapiens
tggagaactacagaaacctggtctccctaggagaacgcccatataaatgtgaactttgtccttactcaagttctcagaagactcatctaactagacatat

SEQ ID NO: 755974 - DNA, 82 bp, Homo sapiens
cagctcgcccagcgtccgccgcgcctcggccaagggcatgacgtccttgatgaaggccgcgctggacctcacctaccccatc

SEQ ID NO: 755975 - DNA, 90 bp, Homo sapiens
ggtgaagctgaatttggtacgctggaccctcggacagaccatctgcctgtgggacatcagtgccgttccaaaggagggaaaagtggtaga

SEQ ID NO: 755976 - DNA, 100 bp, Homo sapiens
cgaaggccgggacccggttccccggcccacagtgggggtgtgcaaacccgagagaactgggatcaaaaccattcaagtgcaagatatgccattttgcaac

SEQ ID NO: 755977 - DNA, 48 bp, Homo sapiens
aagcctggagcaggacttgaagttccatgccattgcagtgtcaactag

SEQ ID NO: 755978 - DNA, 83 bp, Homo sapiens
attactgcagagaaacacggaaactaggaagaggaaattaactatctgtacttataagaaaactctctgcagaggaattagag

SEQ ID NO: 755979 - DNA, 95 bp, Homo sapiens
ggaaaatgagaagaatgacaaagataagaagatagctgagttggaaaggatcagattttattaagacctctactggaaaagaaacagtaaatgcc

SEQ ID NO: 755980 - DNA, 90 bp, Homo sapiens
ggcgctggaattacatgaacataccaccctagtaaaggtgattgaattactcagatatgaagatcatcatctaggttttgtgtaaaaggc

SEQ ID NO: 755981 - DNA, 98 bp, Homo sapiens
ctgcagaagaaggaggaggtggaggcacaggtggagcagctgcgccaggccattgaagaactgtactactttgaatttgtggtagatgacttgccaat

SEQ ID NO: 755982 - DNA, 100 bp, Homo sapiens
cgacctaccaccgagccatcaaggtgaccgtggacggaccccgggagcccagacgcacgtgacacaagctgacctcaagagctccacgttttggcttcga

SEQ ID NO: 755983 - DNA, 100 bp, Homo sapiens
ggaggaagcaatacatccagtatgagggtacaagttgaattctatatgaatgaaaatacatttaaagaaagactaaaattatttttcataaaaaaccaga

SEQ ID NO: 755984 - DNA, 98 bp, Homo sapiens
gggcctcctggacaggaaagaggtgctgggagggcacagactccatcaagatggagaacgggcagagcacagccgccaagctggggctgcctcccctg

SEQ ID NO: 755985 - DNA, 100 bp, Homo sapiens
ttcagctgccctgtccacagtgggctctgccatcagcaggaagcttggagacatgaggacccgtgcatctcttccgactctcgggcaagtgcttcagcct

SEQ ID NO: 755986 - DNA, 101 bp, Homo sapiens
gccctgcctgaccaccatggacaccaacgggaagcccctctacatcctcacttacgctgggaaaactcttcagatttttaacattgaaatgaaaagtaaaa

SEQ ID NO: 755987 - DNA, 100 bp, Homo sapiens
ggcctgtccggcactgctgaagtttcctctttggtcctgagctggttaaaaggaacactggttgcctgaacagtcacacttgcaaccatgatgcctaaac

SEQ ID NO: 755988 - DNA, 100 bp, Homo sapiens
aaaaattattatgtctgtgttcccttgggactcattggaaattgtacagtgacatcttctgggatttagtctggtgtgtggaggtcattgcaaaggaagg

SEQ ID NO: 755989 - DNA, 100 bp, Homo sapiens
gcaagctattgtcacacctttgaaaccagacattgtggatatcaagcctgccaatatggaagagctaacagaggtgattacagcagcagaatttcatcca

SEQ ID NO: 755990 - DNA, 75 bp, Homo sapiens
ggattgagtccagctcttgggatggtgtcctgcagctaaggagtacttcaaggagaattcccaccactggagctg

SEQ ID NO: 755991 - DNA, 98 bp, Homo sapiens
agataaaagagaaagatagatgccctctctcttcatcttcacttgaaataccggatgattttggaggcggatgtagctgttttagttgtagatgccag

SEQ ID NO: 755992 - DNA, 88 bp, Homo sapiens
atcctcagtggagctggtcgcagatcctgagacccggacagtggcagtgaaacaggtcctgctggttggggcagacaacttcacgctg

SEQ ID NO: 755993 - DNA, 100 bp, Homo sapiens
gtttttactaagaagtatgaaaaaggaacccctttcttctacagcaaaaaaggaaagagagcttgaggcaaacaaaaaagaaaaaatgaaagaagcacaa

SEQ ID NO: 755994 - DNA, 75 bp, Homo sapiens
gcgagattaatcaccaggacaatgagaatatcctccgaatcctaaatctagagctccaaggatgctggtcattaa

SEQ ID NO: 755995 - DNA, 75 bp, Homo sapiens
tcctagtccgaggtgccaccgtggaaggacagaatgtgatatttctgggggtaaacccctagaagtggagatggc

SEQ ID NO: 755996 - DNA, 100 bp, Homo sapiens
aagcctgtataaagatgtcatgatggagaattatggaaacctggtctcactgggtaagccgtaactttgagctggttggacgggttaacttggatcagct

SEQ ID NO: 755997 - DNA, 75 bp, Homo sapiens
gatttggaaatgtcatccgatggcacaatcagccaagttctatagaaattttagagtattcatcagatagtgaaa

SEQ ID NO: 755998 - DNA, 50 bp, Homo sapiens
tggaactcattattgcacatggacgcttatcacaccacatgggcttttta

SEQ ID NO: 755999 - DNA, 98 bp, Homo sapiens
ccagtgctggacaatagatgctcacttttgaagaccctgatagtgccgtcgatgaccgagatagtgactatcgcagtgagaccagcaacagcttccca

SEQ ID NO: 756000 - DNA, 100 bp, Homo sapiens
cgcccctcggccccggagcccctcggcggcgccaccatgtactcgggagccggccccgaccctggaagctgtcctgaatttcaaatactctggaggcccg

SEQ ID NO: 756001 - DNA, 112 bp, Homo sapiens
atgcggttcatgcagataagtgaggattctaccaggatgtttaaaaagagtgacatcactgcctctcttcctgtgcgctggctttgacataagccagatggccaccgtggtt

SEQ ID NO: 756002 - DNA, 80 bp, Homo sapiens
ctccgtatcctgggttcaagcaactctcctgctgcagccacgagttaaagaggattgcactgcctccatggaaccttcag

SEQ ID NO: 756003 - DNA, 98 bp, Homo sapiens
aaaagagcttctctccagagtagaaagatttggattcctagacttgcccaagcacttctgtctgctgtagcagatgtgagactttactcattaatgaa

SEQ ID NO: 756004 - DNA, 100 bp, Homo sapiens
tccatcacgcccatcaccactaccaccacgggtggttcgtcatgattgcaactgggtgggtcaaagggtaaaggagctggaagtgcgaaaattgatgcat

SEQ ID NO: 756005 - DNA, 75 bp, Homo sapiens
cccacagtgggggtgtgcaaacccgagagaactggctatgcccttgggtagtgctgtggatatcctggccacaga

SEQ ID NO: 756006 - DNA, 83 bp, Homo sapiens
caaccatataacaatcagtcacactcaggagtggattagaacaagatgacatgagaattttatacaaataccttaccacctcc

SEQ ID NO: 756007 - DNA, 82 bp, Homo sapiens
tgggaggacccgggacaccgcacagccgggaaatggtcagcccaaggccaaccccactgtcactctgttcccgccctcctct

SEQ ID NO: 756008 - DNA, 74 bp, Homo sapiens
catattctacggggctttcagcaaatcaaagccagctaaacgagtgaatgaggtgatcgtggggaatgaccagc

SEQ ID NO: 756009 - DNA, 75 bp, Homo sapiens
tctgaggatccctatggcatcttctgcctcgtcctgacacccaccaggaacacatgacagctggaggcaattgcc

SEQ ID NO: 756010 - DNA, 80 bp, Homo sapiens
acaaaaacgaactttcacaaaatggatcaactctcatctggccaagatcaaaggtccatcatcaaaacaccaaagactca

SEQ ID NO: 756011 - DNA, 101 bp, Homo sapiens
tcctgtatctccaagagatagaaagggattgaaagaaggtggcaagaggaagaagcagaagcagagagaggagtcgaagaagaagaagtcgaccaaaggca

SEQ ID NO: 756012 - DNA, 100 bp, Homo sapiens
tgcgcttccccatggggctggcctgcggcgcctgggcgctctgaggaaaaccaattctgtgtcctcggaggaccacagcccagttgggccccaggcgaaa

SEQ ID NO: 756013 - DNA, 100 bp, Homo sapiens
gtgaagaaagctggtaatagatgtctgacaaactaaagaaagacttgtgttaccacgtcagctaactgttcagatgatgcaaaatcctcagattcttgca

SEQ ID NO: 756014 - DNA, 100 bp, Homo sapiens
cccgggatttcaggggtctaccggctctcttatggcgaatgcaacccgaagagagagtgagctgtgttctcatttcacccaagacctttggctagatcag

SEQ ID NO: 756015 - DNA, 75 bp, Homo sapiens
ggaaaagatccctggaatatgaagggacacagtacggtagtcaaacccccaggcatccgtgtcattctggacctt

SEQ ID NO: 756016 - DNA, 83 bp, Homo sapiens
gctaaagcagcgtgcgttcagccctggggttcgagactataagaggcttacccccatttctgtgctggaccatgcactagaat

SEQ ID NO: 756017 - DNA, 100 bp, Homo sapiens
gcgagtgggagcaccaggatctcgggctcggaacgagactgcacggtttgatctgtggatgaaatgaatcatgattttcaagctcttgcattagaatctc

SEQ ID NO: 756018 - DNA, 100 bp, Homo sapiens
ctcatcactggagccaccagcccaaccgtgttgtatgtgagtggaggaaatacgcagcaaaaatcaccatcagagtcgtttattggtcgagagaagaggt

SEQ ID NO: 756019 - DNA, 75 bp, Homo sapiens
agaagatcaaaacccaccatgccccagcaacccaccctgctggggcttcctggaggactacgccttcgtggtgcg

SEQ ID NO: 756020 - DNA, 100 bp, Homo sapiens
gcaagggagcattccaggagagaaagggaggcatgcatctccccatgtgctatgatgctggctctggtgtacattgaacggctccggcaccgaaacccag

SEQ ID NO: 756021 - DNA, 100 bp, Homo sapiens
gccggaccgaccccaggcggcgactggcacagcctccaggttggcgggctcatctgcgctggggttctgtgcgccatgggcatcatcatcgtcatgagtg

SEQ ID NO: 756022 - DNA, 75 bp, Homo sapiens
tctagcttgttgaaacccaaaactagtgaccctggcagcaaccccaacaaacgccagaggcagccccctctcctg

SEQ ID NO: 756023 - DNA, 91 bp, Homo sapiens
gcagccgatccagcctgcggagcctgtggggcaggcagttgtgaaaaacttcaggacaaaaatgtttcatttaaggacttgtgctgctaag

SEQ ID NO: 756024 - DNA, 98 bp, Homo sapiens
ctccgtttagtctcctcctcggcgggagccctcgcgacgcgcccggcccggagcccccagcgcagcggccgcgatggagtcccctgtttccacaccag

SEQ ID NO: 756025 - DNA, 75 bp, Homo sapiens
ttcccggttgatcgtggattatttgagggatgtgctttgtggttaccttttgtgtaccaatattggcaatatccc

SEQ ID NO: 756026 - DNA, 100 bp, Homo sapiens
gcgagagtgaacgattcaacccgggggagctcagctggagagatttaccagcatgagaattaagaaggagaaggaaaagcccaattctgctcatagaaat

SEQ ID NO: 756027 - DNA, 100 bp, Homo sapiens
ggatgactgagtacctgaaccggcacctgcacacctggatccaggataacggaggctgggttatacattggctcttcaaagacgttcacctcatcagaga

SEQ ID NO: 756028 - DNA, 90 bp, Homo sapiens
gccatggcatctaagaaatttgctgttaaaatatgaggccccaggattcctggcgaggtcctcctccccttttccagcagcaaaggtttg

SEQ ID NO: 756029 - DNA, 75 bp, Homo sapiens
atccaggctgccattgacctcacagcgggggctgcagttgaagcttcttgtcatgacggggatgaaacaattgaa

SEQ ID NO: 756030 - DNA, 100 bp, Homo sapiens
tgcttggtggcggggaggctgatgatgattggcaggaagcacatgagcgcctggctgaattggaagaaaagctaccagtggcagttaatgaacaaacagg

SEQ ID NO: 756031 - DNA, 112 bp, Homo sapiens
ctgggattcgcgctgctgggcacccacggagcctccggggctgggtggatgtgaacactgaccggaagatcagtgccaaggagatgcagcgctggatcatggagaagacggc

SEQ ID NO: 756032 - DNA, 100 bp, Homo sapiens
cccgctggatgcacactgctgcgtggaggagccaggaggaactctctcccagtccgcctttgttgaatccatccacgccacagtccacagagagtcagcc

SEQ ID NO: 756033 - DNA, 75 bp, Homo sapiens
aagaaagtggtgaatcccctgtttgagaaaaggcctaagaattttggcattgcaacaattgagtcacttcaaaag

SEQ ID NO: 756034 - DNA, 96 bp, Homo sapiens
attgcagcttgcagagcaggggctcccttctctgtaattggaaacacaatcagaacaagttgaaatcatcgcagaaggataaagttcgtcagttta

SEQ ID NO: 756035 - DNA, 100 bp, Homo sapiens
tgcagccctcggccaaacggccagacgccgacgtcgaccagcagagactggtgccgacgccaccgccgagcccatgatcctggaacagtacgtggtggtg

SEQ ID NO: 756036 - DNA, 80 bp, Homo sapiens
cagctgctcccttcgccttcgccctttccacctcgcggcagttcgtaatctatgccagcaattatgacaatgttagcaga

SEQ ID NO: 756037 - DNA, 74 bp, Homo sapiens
taattatgactactctcacacggttaaatatacacccacccaacaggataatttccagcagtgttataagcgag

SEQ ID NO: 756038 - DNA, 100 bp, Homo sapiens
aagagttttctgatgttaatgaaggagagaaagaagtgatgaaactctggaatctccatgtcatgaagcatgggccctgggaggagcggggacactgagg

SEQ ID NO: 756039 - DNA, 100 bp, Homo sapiens
ctctggacccgcctgccagaggccagaggatgaggaagtggaggctttcctgaagaattttgtagccaccttggctaatgggatgagcctccagccgcct

SEQ ID NO: 756040 - DNA, 74 bp, Homo sapiens
acaaaggataataaactagttgagaagcagaacccagctgaaggactgcctgtggacatctctacagcaatgag

SEQ ID NO: 756041 - DNA, 75 bp, Homo sapiens
caagagatgcaagagtgtacttttagaagaccaaactggacaatggactttgctcactatgatgacatgatctcc

SEQ ID NO: 756042 - DNA, 51 bp, Homo sapiens
ccttcccatcaccatcacagagagcgatgcctttttgcaaatgtgtaactt

SEQ ID NO: 756043 - DNA, 90 bp, Homo sapiens
ctcgaggccgagcatgggactggggacaagcccgcggcgccgcgggaacgcaccacgcggctggttaaacacagtgggaatatcactttt

SEQ ID NO: 756044 - DNA, 100 bp, Homo sapiens
gccaaaatggggattacagagtataacaatcagtgccgagcaattgtgatgagatattctgctgagtggaagtttctgccagtccctgagttgatgcctt

SEQ ID NO: 756045 - DNA, 95 bp, Homo sapiens
acagagtgctgttttagagctggcagcagcatctcagcccaagagaagaggctgcctaccacaaggactttagcttactttttaaagattgaaga

SEQ ID NO: 756046 - DNA, 100 bp, Homo sapiens
gaactgcacaaggacctgtcctaagacagcagccctctcgtgggcagcacgcccaccggttatgggaccctgacgatagggacatcaatagatcccctca

SEQ ID NO: 756047 - DNA, 83 bp, Homo sapiens
agaagattatgaggtggctggtttgcgatgagacagatcagttggaggaagaaaaagcagagctggagtcggagatcgccgag

SEQ ID NO: 756048 - DNA, 74 bp, Homo sapiens
cgtctgtagttcatttgaccaaacgactggaaatagcaaaggctatgcatttgtggagtttgagtctgaggatg

SEQ ID NO: 756049 - DNA, 100 bp, Homo sapiens
acaaatatacaacaaggccattttctcaaacgagagtcagcctttaacgaattcagaaggagctggcggacatcactttagaccctccacctaattgcag

SEQ ID NO: 756050 - DNA, 75 bp, Homo sapiens
gagagaagagcaaaggagactgcaccatccgtcaaactgaaaccgtgtcagttcagtcttcggtattggggaagg

SEQ ID NO: 756051 - DNA, 96 bp, Homo sapiens
tcatggatcaactgataagttgccttatgtcaccatggatacagaagtttacggtgagttttatcccgtgccacctccctatagcgttgctacctc

SEQ ID NO: 756052 - DNA, 75 bp, Homo sapiens
aggccgctcattttggtgacctggatataaagatgaagcgcagctgtataaagaagagcacctgaggaatcggca

SEQ ID NO: 756053 - DNA, 75 bp, Homo sapiens
ctcaggggaagaagctggacttcagccgtccaagagcagcccgacggccatggaggctgaagagacgatggaatg

SEQ ID NO: 756054 - DNA, 100 bp, Homo sapiens
ggagaacatccgcgtggttcgttgtggcggcagcgagttgaactttaggagagctgtgttctctgcagattctaagtagtaaacctattgatggcaattt

SEQ ID NO: 756055 - DNA, 142 bp, Homo sapiens
gcaggatgtccacatgcatgacccccggctgataccactaaaaaccatgacgtcggacattttaaagagagcgtgggccagcccgaggaggcaagcccggaggagcagccagaggaggcgagtgctgaggaggagcggccgg

SEQ ID NO: 756056 - DNA, 100 bp, Homo sapiens
tgcaacgcccgcctggtggagctcaagaggcaggccctgaggttgctcctcccggggcccttcccgggcaaggtgacagagttagtccttgataattgcc

SEQ ID NO: 756057 - DNA, 100 bp, Homo sapiens
gtttgtggaagatggcgcctgttgtgacagggtgctgactgggttacttttttaaacactaggaatggtaatttctactcttctggacttcaaactaaga

SEQ ID NO: 756058 - DNA, 113 bp, Homo sapiens
tgggcaacggaggcattctgaatgggtcccgccagggtcccaacatcgatgcccatgactatgtattcaggaaaatttctaccttgaaccgtatctgaaagaggttattcggg

SEQ ID NO: 756059 - DNA, 74 bp, Homo sapiens
gggaggctggcatcatcacgacaaaggctgttcggctcttgaatcccagcgatgaaaccaggaactcactttcc

SEQ ID NO: 756060 - DNA, 75 bp, Homo sapiens
agaggttaagagactccactgaggtcacacagccgctgcagaaccttggcctgaaaatgctacattatatcagca

SEQ ID NO: 756061 - DNA, 98 bp, Homo sapiens
tcgactgttactggatcacccgacgctttgtgaaccaattaaataccaagtaccgggattccttgccccagttggtggtcctggctctgccatatgac

SEQ ID NO: 756062 - DNA, 100 bp, Homo sapiens
tcgagcctctctagaaaatggtgttctgctgtgtgagaggaagaaggcacctacgatcaaactctggagttccgtaggggaggtgatggccagccaagac

SEQ ID NO: 756063 - DNA, 75 bp, Homo sapiens
tgactccatcttcttcctctcggtcgccatgcatcagatcatgcccaaaggcgacgactgtaagggcaagaggca

SEQ ID NO: 756064 - DNA, 100 bp, Homo sapiens
gatatttggagttcttacaacatggcagacattgacaaagagattggaacaattatcaggtcattaggatgctgtcctacggaaggagagctgcatgatc

SEQ ID NO: 756065 - DNA, 90 bp, Homo sapiens
ctgacccctatccagaggtctcggacgtggccatgaaagtactcaacagcatcgcctacaagagaaccatggagtctggcagtaccgccg

SEQ ID NO: 756066 - DNA, 98 bp, Homo sapiens
caaatacgggatacctatcggagcaaagcctaccagtgtgcagctggcaaaggactcctctggtgcaagtgtggtagctattgacaacaaaatcgagc

SEQ ID NO: 756067 - DNA, 75 bp, Homo sapiens
actaaagcttgaaatgctacatttccaagggactggtgattgcagctggaagtgcccatgaccgagctggcgtcc

SEQ ID NO: 756068 - DNA, 75 bp, Homo sapiens
ggcagcgcgcggtcgacgcgggcctgagctccctccagactggaacgtgagaaacgagcccgcatcaaagcacgg

SEQ ID NO: 756069 - DNA, 100 bp, Homo sapiens
gcgtacgccctcatggggaaaatctccccggtgactttcaggtcattacacctactctgagaatcgtgtggaaaaagacggcctgattcttacaagccgg

SEQ ID NO: 756070 - DNA, 75 bp, Homo sapiens
gggagaccttgaatttggtgtggaagaaataacatcagtagttcaggatctagtttgaagcactaagaagaataa

SEQ ID NO: 756071 - DNA, 82 bp, Homo sapiens
ccagtttcaatctcagggaacatgtccgtggtggatgactggattgaatcatataaacaagacagggacatcgcacttctgg

SEQ ID NO: 756072 - DNA, 90 bp, Homo sapiens
gcgggctctcctggagcccccagcccgtccagcttcactactgggcacctggcgagagaaaagaattatcccgaaaagttaacatgtcac

SEQ ID NO: 756073 - DNA, 99 bp, Homo sapiens
gaacggcgccagcgtgatcctccgtgacattgcgagagccagagagaacatccagaaatccctggctggagacggaagctcctgttttcttgtcagccg

SEQ ID NO: 756074 - DNA, 100 bp, Homo sapiens
ggaggagatcgccttctatgggggccatgagaagttaaagtctgacacggctgctgcagctgtgcgccaaatgaatccacatatccgggtgacaagccac

SEQ ID NO: 756075 - DNA, 75 bp, Homo sapiens
gacagaatcaccagcactggctgaagagaatggatcttggagaatgtctgaaagtccatgacctggctttaagag

SEQ ID NO: 756076 - DNA, 100 bp, Homo sapiens
atcgcttcctagcagagaagcacctgctactttccaacaccttcctgcagttcttcggccgggtattgttgcagcatctggcagtgagactgaggatgag

SEQ ID NO: 756077 - DNA, 75 bp, Homo sapiens
gaggcggcggagcgcgagagcttcgagcggactcagctctgctttcccagcacgctgcctcaccaagaaagaatc

SEQ ID NO: 756078 - DNA, 82 bp, Homo sapiens
tcgaggaggaacccacatcccccataggtcactgtgtggccatctaccactttgaaggatcagtgaatgcttgtgaaaagac

SEQ ID NO: 756079 - DNA, 75 bp, Homo sapiens
gcctccactccgtcccccgcgggtctgctctgtgtgccatggacggaggtacagccccgtggtggaggccggctc

SEQ ID NO: 756080 - DNA, 99 bp, Homo sapiens
gcgagctgaggtggaggcaggctgcggcagacggcgacagtggcggcggcgccatggcagggcttgcagctgctctgttaaaagcgaaaatgaaacaat

SEQ ID NO: 756081 - DNA, 98 bp, Homo sapiens
gaaaatgttttgccacgtggatgtgaagatttcctctaaaagaaaaggtggacaagtcctattttcaagagaagatgacttttaacagttttgaagga

SEQ ID NO: 756082 - DNA, 50 bp, Homo sapiens
ccgcggtgaccgaggcctgggccccggaacacacgcaggacttgaaagat

SEQ ID NO: 756083 - DNA, 92 bp, Homo sapiens
cgacaagccgctggcagccgcggatctcaccgccgctcagggtggcagtagagaagagcatcacagaagttgctcaggagctgacagagctg

SEQ ID NO: 756084 - DNA, 97 bp, Homo sapiens
tatctgcctaggcattttgctgtctcctcctaatacggacttctgtttcctgctctcgacaagggctggtggcctgggaatcaatttggcttcagcg

SEQ ID NO: 756085 - DNA, 100 bp, Homo sapiens
tgggacctctgaagtgaacactgcagggccatttggtcacagtaatgaaaggcagtaatagaaataaggatcattcagcagaaggagaaggggttggaaa

SEQ ID NO: 756086 - DNA, 75 bp, Homo sapiens
gcgttcggtgtgccgtgggtccgcgctgcttccacccaacttcctgttaggcgcatcccggggaaatggtggggg

SEQ ID NO: 756087 - DNA, 75 bp, Homo sapiens
cccgagaaaccgcagcactacaccatcctaatgtcctatgatcacgtggaactcacattcaatgacatgaagaac

SEQ ID NO: 756088 - DNA, 100 bp, Homo sapiens
tcaccaagtacgctgaggccgagaacaccattgaccagctacgcctcggggccaagctgcaccacctcgtgagcgatgacgtctgcctgaaggtggtgga

SEQ ID NO: 756089 - DNA, 113 bp, Homo sapiens
ccgcgcgcagggcctgcagcgggagctggacggcgagcgcgagcggcgcgagaaaggactggtgattgcagctggaagtgcccatgaccgagctggcgtcctccgggggcggg

SEQ ID NO: 756090 - DNA, 76 bp, Homo sapiens
ctgctctgcagcttctgttcaggagaaaatatggagaagtcttgtgcaagcaaggaagaagtcaaagaagtcagta

SEQ ID NO: 756091 - DNA, 100 bp, Homo sapiens
cccttgaacacacatgctgccgagctctggaaaaaccccacagcccgagatgatcggccactacctgggcgagttctccatcacctacaagcccgtaaag

SEQ ID NO: 756092 - DNA, 83 bp, Homo sapiens
gccaaggaccacgcatccatccagatgaacgtggccgaggggtcgggccccggctcagtggtcccaggcagctcgggtgtcgg

SEQ ID NO: 756093 - DNA, 78 bp, Homo sapiens
ccggccggtcggtttccggatgaaacgaggagccaggaaactttgagggaaattttgagtcactggaccttgcggaat

SEQ ID NO: 756094 - DNA, 75 bp, Homo sapiens
gcctttggcgacatcgtcttcacgggcctgagccagaaggtgaaaaaggttttgggatttgagattgacgcggtg

SEQ ID NO: 756095 - DNA, 100 bp, Homo sapiens
cttacgtctgcggaagtgcagctgcctcagttcttagcgcaggatacaagtgatgccttcaaatttgagctcagtttcttatggtcgtttaggagcatga

SEQ ID NO: 756096 - DNA, 75 bp, Homo sapiens
cggcagtgctgcaaccgctacagcagccgcaggaagcagctcaccttccaccgtgcacagccagagaacaacaca

SEQ ID NO: 756097 - DNA, 83 bp, Homo sapiens
ctctctgctgcggcgcggggaccgctgtgctctcggaccaagaatcgccttcagccctgtctggtgcatccttggcagaaagt

SEQ ID NO: 756098 - DNA, 100 bp, Homo sapiens
caacaaccactggttctccaggaaccgaaaaggcgaggagtatagtacggcaaaaaactgtcgttcttttccctggttcagcctgaactatataccaggc

SEQ ID NO: 756099 - DNA, 82 bp, Homo sapiens
agctgctcccttcgccttcgccctttccacctcgcggcagttcgtgtggacgaatgtggaacctcgctctgtggctgtgttc

SEQ ID NO: 756100 - DNA, 95 bp, Homo sapiens
agatcatcaagttgtatagctgtatcattggcaacatgatttcggaagagtctaacctgtctctgcaagctcttgagtcccgccaagatgatatt

SEQ ID NO: 756101 - DNA, 74 bp, Homo sapiens
ccatcatcgtgtcattgcccatgaccagcgttggggatgccagcaggccgtgaccccaccaacaactgaacgct

SEQ ID NO: 756102 - DNA, 100 bp, Homo sapiens
gtctttggttataaattatgatctacctaccaatcgtgaaaactatattcacagaaatgcactcggtgatggaaagagagccactattctgaagaacact

SEQ ID NO: 756103 - DNA, 80 bp, Homo sapiens
tccgctatccagaacctccactctttcggaacttgctactaccagcaccatgccctaccaatatccagcactgaccccgg

SEQ ID NO: 756104 - DNA, 100 bp, Homo sapiens
ggagtgattgcccggcagagcgcgaaactaatctggattcactccctctggttgatacccactcaaaaaggacacttctgattaagacggttgaaactag

SEQ ID NO: 756105 - DNA, 74 bp, Homo sapiens
attttctctggccagttgcataataactgcaaaatgaactgtggctgcaccatctgtcttcatcttcccgccat

SEQ ID NO: 756106 - DNA, 73 bp, Homo sapiens
tcctttccaacttggacgctgcagagcattgagatgttccacaagagcctggagagggccgaggccggagata

SEQ ID NO: 756107 - DNA, 100 bp, Homo sapiens
cagaggcgctggagctgggtcagtccgccgctcaccccgcggccgcaccttcccgccttctcaggtgaacggggtctgcatggaggggaagcagcatggg

SEQ ID NO: 756108 - DNA, 100 bp, Homo sapiens
tcaggcaccagtgccattaacgagctggcgaagatgggcgacccggatctcctggaagtgttggcggaggaagtagccggatcgagctgggagatgtgac

SEQ ID NO: 756109 - DNA, 82 bp, Homo sapiens
ggttatggtgcatacttggctcaggtggtgatcgtggcagaggtggccctggtggcatgcggggaggaagaggtggcctcat

SEQ ID NO: 756110 - DNA, 90 bp, Homo sapiens
acctggccgatgaggaagtactgagcctgttggaggaactggcccggaaacaggaggacatcatgatgctgccgccaccgccgccaccac

SEQ ID NO: 756111 - DNA, 50 bp, Homo sapiens
ccagctgttagtcgggtaggcataggccctcgggaccaaggatcacgtca

SEQ ID NO: 756112 - DNA, 100 bp, Homo sapiens
agtaaggtcttctatctgaaaatgaagggtgattacttccggtaccttgctgaagttgcgtgtggtgatgatcgaaaacctgcagaaccttggcctgaaa

SEQ ID NO: 756113 - DNA, 50 bp, Homo sapiens
cctgatcatcctgctgctccccggaaagagagcgctgtacagcatggaat

SEQ ID NO: 756114 - DNA, 50 bp, Homo sapiens
tttttctttaaagcctgaagaaaagggtcgaatggcaccacctgtagatg

SEQ ID NO: 756115 - DNA, 100 bp, Homo sapiens
agcgcctggacccagcacggagggacttctgcagagagagtgcgcagaaggattccgggagcacagttccgccgagattcacaagacagtgatgatgaaa

SEQ ID NO: 756116 - DNA, 90 bp, Homo sapiens
ctcgaggaggccgcgggagcccgccggcggtggcgcggcggagacccggctggctggacatcgtggagttcatcccctctctcctctact

SEQ ID NO: 756117 - DNA, 79 bp, Homo sapiens
gtatgcggaggacagctctgatgaggagtcaccttcaggccattcagaggaggaaagagaggggaatatgaagtcagcc

SEQ ID NO: 756118 - DNA, 83 bp, Homo sapiens
ctggaatgtcacccagacaagcatcctgaaaaccccaaagctggaacagcgtttacattttctaaagcaacaggagcgccgtc

SEQ ID NO: 756119 - DNA, 75 bp, Homo sapiens
ggactgatttttagaactccacatttgaggcagtgctcggaatgtgaccaggcagggagcagtgacatggaagca

SEQ ID NO: 756120 - DNA, 100 bp, Homo sapiens
ccgcatctccgcacactctctcctcacgcctcctgacagcactattcctgatcagagaactccagttgcttcaacacacagtatcagtagtgcagccacc

SEQ ID NO: 756121 - DNA, 75 bp, Homo sapiens
gctggtggaacagctacgcatagaagccgggattgagcgcatcaagttacagaatgtctgaaggggacagtgtgg

SEQ ID NO: 756122 - DNA, 74 bp, Homo sapiens
ccgagggcaactttggaggccccctggaaggctttaggatccagggtttccaggcctgaggtgcccgccctggc

SEQ ID NO: 756123 - DNA, 75 bp, Homo sapiens
ccttgatggtcaaaagattaagttgtctgagggaagtcaaaagcatgcaagcctacagaaaagcattgagaaagc

SEQ ID NO: 756124 - DNA, 50 bp, Homo sapiens
gaatgtaacttcaccgagtaaagaggagtccgccccgtggtgcctccttt

SEQ ID NO: 756125 - DNA, 83 bp, Homo sapiens
agccactacgccgggcaggatgccacggttaatttggagtggcccctggagtcagtttcctacaccatccgaggccccaccca

SEQ ID NO: 756126 - DNA, 90 bp, Homo sapiens
gtgtgacaggtgtggaaggacccagcaccaggcagcgatctctccagcgaacactgaatgagttaaaagagtatcaaaagcagcatgacc

SEQ ID NO: 756127 - DNA, 100 bp, Homo sapiens
gtggataggaactggaatgaagtggttacacagcagtacctctttgaccgccttgcccacgagacatttgaagacagtgatttgttccatttgattggtg

SEQ ID NO: 756128 - DNA, 75 bp, Homo sapiens
ggaacagattgttcctaaaccagaagaggaggttgcccagaagaaaaaggtgaacagccatataccaggaatagg

SEQ ID NO: 756129 - DNA, 90 bp, Homo sapiens
tgggaaccttggtggaggggtggtgaccatcgaaaggagcaagagcaagatcaccgtgacatccgaggaggctttcgtgaaggaatccaa

SEQ ID NO: 756130 - DNA, 88 bp, Homo sapiens
gccttggtcctagcacccactcgagaattggctcagcaggtcctcaaggtcctccaggctatggcaagatgggtgcaacaggaccaat

SEQ ID NO: 756131 - DNA, 98 bp, Homo sapiens
aacacttcccattatgcactgcatgtgagcctcacacctgccctgcagtggaggagtagatagtttacaggtggtgtaaattggtccaatgtaacttg

SEQ ID NO: 756132 - DNA, 90 bp, Homo sapiens
ctgatgagaatgctggcggaggacgagctccgggatgctgtactccttgtctttgcaaacaaacagattggtttatcttggaagctaaag

SEQ ID NO: 756133 - DNA, 100 bp, Homo sapiens
ctcaagactctcagcagagggcgtcgcatcctggacaggaaaattcagagcctgggagacagcaagaccattcccggtattatcaaaaccagtaccactg

SEQ ID NO: 756134 - DNA, 101 bp, Homo sapiens
tagaacttcaggagagaagcccatctattctgtagctctttcgacgtgtagcagcagctttgccgggaatggaaagcacacaggacagaagcagagaagat

SEQ ID NO: 756135 - DNA, 100 bp, Homo sapiens
ctttgtcaacgtcaagcggtggcttcacgaaatcaaccagaactgtgatgatgtgtgccgaatattagattggtgcatctttaatggatcccaataagtt

SEQ ID NO: 756136 - DNA, 100 bp, Homo sapiens
cacccccgcagcgctgaggacgctccggagcccggcgaccgcggtaccgcgcgccactaacagggactgtgcagagtgtggggccttcaggactggccca

SEQ ID NO: 756137 - DNA, 101 bp, Homo sapiens
agctcaactccccagaagtctgtcactttgactggatgttgaatttgttctctcagcacctatttctgaatggaatggcaaacagggacatatttcaccag

SEQ ID NO: 756138 - DNA, 80 bp, Homo sapiens
tggataaggaccagtacctgcccaggaaactgatgccatggacaatattaccaggcagaaccaattctacgatacccaag

SEQ ID NO: 756139 - DNA, 74 bp, Homo sapiens
acaatccagaaatgccttctaattcaggcaatttgcaaaagtgggctcgggatgagtttgaaggcctcttcaag

SEQ ID NO: 756140 - DNA, 97 bp, Homo sapiens
cagagatgattactctcgggatgattataggcgtgatgatagaggttgggggccgtcccgctcctaaggcaggaagatggtggccgcaaagaagacg

SEQ ID NO: 756141 - DNA, 88 bp, Homo sapiens
agaggtggaagtccaagtcaaacgcagaaggactgcctcactgagcaaccaagaacttaattcagtgcacaaatgagatgaatgtgaa

SEQ ID NO: 756142 - DNA, 100 bp, Homo sapiens
ggtgattctgggggcccacttgtctgtaatggtgtgcttcaaggtcacaatgcacgacacccggggccgcagtcccccataccagctggactcccagggg

SEQ ID NO: 756143 - DNA, 50 bp, Homo sapiens
cccgttcctggtcttctcccccagaatctacctgttactcgtattttgga

SEQ ID NO: 756144 - DNA, 90 bp, Homo sapiens
atcagaacgtgctcaggaacactgaagtcatgtgggtgtataacattctcgacaagaaggctgaagcggaccggattgttttcgagaacc

SEQ ID NO: 756145 - DNA, 100 bp, Homo sapiens
catattcagatcagtagaagcagatttcttttggatagtgatgggaaaagtgagctgaagagacgcctgaaagctgagaagaaagtagcagagaaggagg

SEQ ID NO: 756146 - DNA, 75 bp, Homo sapiens
agacacgggtcggaggaagcctacatcactgccagtgaaagatgtagaagataaacctgaacaacaaaccagaac

SEQ ID NO: 756147 - DNA, 50 bp, Homo sapiens
gaaaaatattccacgcatcacgtgtttgaagaacctgaagatcccagtaa

SEQ ID NO: 756148 - DNA, 100 bp, Homo sapiens
cttctccttcacagtaaagtggctgggagatgtcctttgcttctcagatgtaaatgcactttaagtttgttattcaacagtgaaaatgagtcatacagag

SEQ ID NO: 756149 - DNA, 49 bp, Homo sapiens
cgcggcgtgccctgcttgtcacaggtggctttctagaagatgaccatag

SEQ ID NO: 756150 - DNA, 95 bp, Homo sapiens
ggcgtgggcggcatgcaccacgcgctgagaggtatactgcaacatccagatggcacagttttgaaacagttacaaccacctccaaggggcccaag

SEQ ID NO: 756151 - DNA, 73 bp, Homo sapiens
tccagatggatccctctgtgcttctggaggcaagctgcgccagggccccgcggggctggggcccaaaaagcgt

SEQ ID NO: 756152 - DNA, 80 bp, Homo sapiens
ttgctttactttttgcttcaccgacatagtcattatgccgaagagaaaggttttcaaatggaacattttgatgcatcact

SEQ ID NO: 756153 - DNA, 82 bp, Homo sapiens
atttaaagctgagctgcgaggaaaatggcggcgggagtcccaggggcagccactggcctcccagcccccggtcgtcgacccc

SEQ ID NO: 756154 - DNA, 100 bp, Homo sapiens
gggaaaatggcggacgggaaggcgggagacgagaagcctgaaaagtcgcagcgagctggagccgccggagatcgaacggttggaagtaagcagccttgcc

SEQ ID NO: 756155 - DNA, 80 bp, Homo sapiens
gtgtattgatcaatggaagaacaaaatctggcctgaaataaaagtgtggcccagagttgctcagaattggagcagagcct

SEQ ID NO: 756156 - DNA, 75 bp, Homo sapiens
ccattatttgagatgagttacatcttggagatgtgttcagagcaacattgttttgttgacacaagcatttagaag

SEQ ID NO: 756157 - DNA, 100 bp, Homo sapiens
tcccaatcttgaggagtgatccctgtcccagcccctggaaaggggcaggaacgacaaactcaaagtccagatcaatgcttccagtgccacctgcagtggg

SEQ ID NO: 756158 - DNA, 87 bp, Homo sapiens
aagctggtgggcactcagcaccctctgcttaccacagccaggaagttggtgaaccatctaaagaagagaaggctgtggccaagtatc

SEQ ID NO: 756159 - DNA, 74 bp, Homo sapiens
caaagacaaaagacacagaagaaaaagtgggactgaagtacactgaagcagcaggaacgaatttcatatacacc

SEQ ID NO: 756160 - DNA, 50 bp, Homo sapiens
aaaattctgaactcaggacttggcaagattctgctggaagaagtaagagt

SEQ ID NO: 756161 - DNA, 96 bp, Homo sapiens
gcccagccgaggtaccgctgaagaggaatcaattttgatttatcagcgatgctggttagtattcaagaaagcttcaagcaaaggtccaaaaagact

SEQ ID NO: 756162 - DNA, 98 bp, Homo sapiens
cgcgggcgcccgaggggccgagcgaggtgaaagaacttgtcctggacaacagtcggtcgaatgaaggcaaactcgaaggcctcacagatgaatttgaa

SEQ ID NO: 756163 - DNA, 100 bp, Homo sapiens
cgatgcacccgagagcatccaccaaaagttttggaaggtctccatcaagaaaacaaaattattcatcaaaaaatgaaaactgtgtggaagaaacttttga

SEQ ID NO: 756164 - DNA, 51 bp, Homo sapiens
agcggctgtgccgaggcgcccaactcagaatgaattaagtgcagcaacaca

SEQ ID NO: 756165 - DNA, 83 bp, Homo sapiens
tccgacgtgtgctccgcccagggggtgcgaggataccccacacagtcagtcggatgcggagactgcagccgccgcgggcgaag

SEQ ID NO: 756166 - DNA, 100 bp, Homo sapiens
ttgtgtagcgtcagatccttgagtgataaaggagtagaggtctcaacatatgcactagtggaagtgccacctcatgtgaagaatgtctgctaatccaccc

SEQ ID NO: 756167 - DNA, 82 bp, Homo sapiens
aagaaacagttctctcaatacataaagaacagcgtaactccagacatggtcagcccaaggccaaccccactgtcactctgtt

SEQ ID NO: 756168 - DNA, 78 bp, Homo sapiens
ccggcctagcgtcctggaattacttcaatcaagtgaaaaaccatacaagtgtcaaatttgcaatcagtcttttagaat

SEQ ID NO: 756169 - DNA, 75 bp, Homo sapiens
gtctctgtcacctccatgggaccaggaccgtaggatgatgtttcctccgccagccctaccattgaccatgccctg

SEQ ID NO: 756170 - DNA, 74 bp, Homo sapiens
gagagtttttgcaatttgttcaacttgatgtctgatgcctggagggagggtcaagctggtacatagtgctctga

SEQ ID NO: 756171 - DNA, 75 bp, Homo sapiens
ggtgaaattctttccgcctgaccacacacaactccaagaagaactcacaaggtttatcatttaaaagtgcctgtg

SEQ ID NO: 756172 - DNA, 98 bp, Homo sapiens
cggtggagcagcagctgggggcgcagccgctgcccttccccggcatggacaggattgtcaatgaggcagatcagattccgatttgacgggcaaccaat

SEQ ID NO: 756173 - DNA, 76 bp, Homo sapiens
caactgcgggcacgtgtactgcgacgcctgcctcggcaaagaatgtagaagcgaggcctggaggtgaagcagccat

SEQ ID NO: 756174 - DNA, 82 bp, Homo sapiens
agccctgggaccgagaaatggaagtgttcagcggcggcggcgcgagcagcggcgagtcaggatggctaaaggtgaccccaag

SEQ ID NO: 756175 - DNA, 100 bp, Homo sapiens
ctccgcacctcggggacattattgcgcgtggaacggctgcttttggaagcagccattgtttgatgtcctgtgactgagaaaccaggctttaaactttatg

SEQ ID NO: 756176 - DNA, 75 bp, Homo sapiens
tgattgggatgaaccggcagtctccccacatcaacatgaacgattggatgcccatcgccaaggagtatgatccac

SEQ ID NO: 756177 - DNA, 90 bp, Homo sapiens
gaaactctttgggaaagccactcgaaaaggcatgtactggcattgaaaacattgacgaagctattacattgcttgaacaaaataattggg

SEQ ID NO: 756178 - DNA, 97 bp, Homo sapiens
agcaggatctgtaaaagcataattgaatttgtttcacccccgtggattccagtgggcccgacagcgcaacagaggcggggtttcaccatgttgccca

SEQ ID NO: 756179 - DNA, 82 bp, Homo sapiens
catcggaagttctgtacatgctgaaaaacgttcggtgtttcccattaaacactaccaggacaaaatcaggccttacatccag

SEQ ID NO: 756180 - DNA, 100 bp, Homo sapiens
tcaactgtgttttagaaacttttgccagcacattcttacgacagggagcccagaaggtaccaaaggcttagaatgttctccttcaactcccaccatgaat

SEQ ID NO: 756181 - DNA, 75 bp, Homo sapiens
gagcgcgaatatcgtcatcgttagaaggtgcttctggcccagtgtgtggtctactttgccagagccccaaagtcc

SEQ ID NO: 756182 - DNA, 82 bp, Homo sapiens
tattgtgaggcggttgtagaaggaactgccttctgttgaagaactcactattattctgcctgaagatattgagttaaagcct

SEQ ID NO: 756183 - DNA, 87 bp, Homo sapiens
gacctgctggcattgaatgatttatagctaagactccaggacacccctgaagccgagaaatgatcatgcatgccccgcggtccaggg

SEQ ID NO: 756184 - DNA, 99 bp, Homo sapiens
ccgtatcatattaggcgctgtatgacaatctccattcgctcttgcagccaatgccggaacaggatttgctgttgctgagcctcaaatcgcaatgttttg

SEQ ID NO: 756185 - DNA, 83 bp, Homo sapiens
aggcgctgcgccgcaacgccgagcgcaccgacatctgcctgctcaaaggttctggaggacacgtgccggcggcaggacttcaa

SEQ ID NO: 756186 - DNA, 99 bp, Homo sapiens
ctgcgatggtgacgcggactgtgatgaccagtctgatgagcgcaactgcatcgggaacatgccctgtgtgccgccgtcatttcccacctgcggttattg

SEQ ID NO: 756187 - DNA, 75 bp, Homo sapiens
caggcctgcggctgtcggctggtgcttggcggcagggacgatggcttccgagtggacctgccaatcaagtcggcc

SEQ ID NO: 756188 - DNA, 82 bp, Homo sapiens
cttggactgagtcctgcaggacacagcaaccatgtccaagggacctgcagttggtattgatcttggcaccacctactcttgt

SEQ ID NO: 756189 - DNA, 100 bp, Homo sapiens
tgaatgctggctttcagagagaacagcgtttcagttttggtcatcggaagtggtgccttcagcacagacccaacatgagtgaagtttcctgcaagaaacg

SEQ ID NO: 756190 - DNA, 100 bp, Homo sapiens
acagaataaagattatcaagactgtagcaaaaccacttcattgtgcgcaggaccctcaggtacctgcctggatgacagctggattcaccctcgaaacctg

SEQ ID NO: 756191 - DNA, 99 bp, Homo sapiens
agagagaacagctacgactagaattgcagcaattgaaccatcagattagccagcagacccagctacgtggactagagaaaactgcatcagcagtttgaa

SEQ ID NO: 756192 - DNA, 83 bp, Homo sapiens
cttcaagccacaggacttcctccggctgcaggcctatgaaggggtgctgcagctggtggaggctcgcgggcgctacgaggagc

SEQ ID NO: 756193 - DNA, 100 bp, Homo sapiens
gattggtgcagagatggcattacgaacctttggccacttggaacgggagtccctgaatgccagcattgtggatgccatcaaccaagctgctgactgctgg

SEQ ID NO: 756194 - DNA, 90 bp, Homo sapiens
cgcggagcgcgcgtgtggtccttgcgccgctgacttctccactggttcctgggcaccgaaagaaggacagaataacgggctcccagattc

SEQ ID NO: 756195 - DNA, 73 bp, Homo sapiens
ctgctgctactgctggcatcatttacagattcctcgaggtctgaacaagaaccactgacgcagaacgtgaaaa

SEQ ID NO: 756196 - DNA, 83 bp, Homo sapiens
ttctctgctgcaccgacctcgacgtcttgcctgtgtcccacttgttcgcggcctatagaaactggcgatggaatatgagagga

SEQ ID NO: 756197 - DNA, 97 bp, Homo sapiens
tgaggctgaaagaaacaaggggccagggcagagggcacctgagcggctggagagcctgttggagaaacacaaagagaaaagcacttggttctgcttc

SEQ ID NO: 756198 - DNA, 75 bp, Homo sapiens
cacccacttctacttctgttatcgctggttcctgctggattttaagagagcatatcagtgctttcatgccttaaa

SEQ ID NO: 756199 - DNA, 100 bp, Homo sapiens
ccagaagaggaaagcccccgacaaaagaacccattagccagcttcgggctcagaatcaggttctgaaaaaaggtgttgtggatgaacaagcaaattctgc

SEQ ID NO: 756200 - DNA, 100 bp, Homo sapiens
ctgcagatcggcgccgttacagacgtggctactatggaaggcgccgtggccctccccggaatcctcaatatcatcctaatatccatcccagccagccccg

SEQ ID NO: 756201 - DNA, 101 bp, Homo sapiens
gtgctgctcaccttgggccaggcctggcagggctggtgaaaggttgagccatgcagtaggctgtgcttttgcagcctgtttagagcgcaagcagaagcggg

SEQ ID NO: 756202 - DNA, 100 bp, Homo sapiens
ccaaatctttgggcatgtctggaggttatggaggttttgatgactatggtggctataataattacggctatgggaatgatggctttgatgacagaatgag

SEQ ID NO: 756203 - DNA, 75 bp, Homo sapiens
gacactggaaaactggatgctgcagacactgaacgaggagccagtggaggatttgatgaagatgttaaagcgaaa

SEQ ID NO: 756204 - DNA, 98 bp, Homo sapiens
gccgagcaggctgagcgatacgacggttgaaaggattgttgacaaaaggaaaaataaaaaagggaagacagagtatttggttcggtggaaaggctatg

SEQ ID NO: 756205 - DNA, 90 bp, Homo sapiens
cagagggtccaggccatgaagagtcctgaccacaatggggaggacaacttcgcccgggacttcatgactgaggctgatgtgaatccaaag

SEQ ID NO: 756206 - DNA, 98 bp, Homo sapiens
catcagcctctggtcttgacacatctgctctctctgttcaagggaattttgatctaaataggtgtacaaagataatcaatgctgattcggaggaccca

SEQ ID NO: 756207 - DNA, 100 bp, Homo sapiens
accatctacatcaggtcagctgtctcagtttggggcaagtttatacgggcaacaaagtaaaatctgtaaaaactgggtcagttttttggacaatgtgctg

SEQ ID NO: 756208 - DNA, 73 bp, Homo sapiens
taacatggataagcatgccctgaaaaagtatcgtcgagaagcctatcatcgacatatctgaagagatggatta

SEQ ID NO: 756209 - DNA, 90 bp, Homo sapiens
cctccattggatttaaaagacagtcctcgtcagcactgactttcagctatggaatcgttgttcagcacttctggtctcttcagttctgat

SEQ ID NO: 756210 - DNA, 88 bp, Homo sapiens
ggaaaaagggcaagctcctgagtggatctctcagggagccaccagacagggtggctttggatcagattattcacgaagctctagaaag

SEQ ID NO: 756211 - DNA, 82 bp, Homo sapiens
ctggatggtggcgttgctgctgctgctctcaggtctatgttaacaatgaatgggcaaccagtgttggggaaggagggagctt

SEQ ID NO: 756212 - DNA, 90 bp, Homo sapiens
gaaagcaacactgtaactcaaagtgcatctagtgagagtgaagctgaaaatcttgaagcacaaccccagtctactgtccgtccagaagag

SEQ ID NO: 756213 - DNA, 88 bp, Homo sapiens
cacaggagctgtagagaggaccccggtacatctgaaagccgggaaatgaactacgttacttttaacccaacaaataataaagaattgg

SEQ ID NO: 756214 - DNA, 75 bp, Homo sapiens
agaccagctggggcaacaaagtgtatgcaacagcgttattgcaacaggctaacgaaaacagacaaaattcaactg

SEQ ID NO: 756215 - DNA, 74 bp, Homo sapiens
cctgccaccgctgcccgagcccggatctggagtgggagagcaggatgggggactgatcggtgccgaagagaaag

SEQ ID NO: 756216 - DNA, 100 bp, Homo sapiens
caggcccggaggacgaggactccagcctggatgaatctgacctctatagcctggcccattcctacctcgaggagaattctgcctaagccaactcgaaaaa

SEQ ID NO: 756217 - DNA, 74 bp, Homo sapiens
gaaaaattgcagaagcacaagccaaactgacttatctaaaaacagactggttgaagttccaatggaattgtgcc

SEQ ID NO: 756218 - DNA, 75 bp, Homo sapiens
cagaatttcgttgttttcaccgacgagactggagggacccagacatggagctgcgggaagaagcctggtctccgg

SEQ ID NO: 756219 - DNA, 100 bp, Homo sapiens
ttggcggatggaagggaggagactcctgaccctcagaatgtgtaccatagagagcattttcccgggatttgcaagccaacatatgttaatgaggtcactg

SEQ ID NO: 756220 - DNA, 95 bp, Homo sapiens
acagctaacagcaacacagaaatttagaaagctgctttctaaagcccctgcctgacttctcacgagtccctggtctgacattgcccagtggagcc

SEQ ID NO: 756221 - DNA, 73 bp, Homo sapiens
ttgctgtggaagtgcaggacacggtaatcttcagcaagtactgcaactccagcgacatcatggacctgttctg

SEQ ID NO: 756222 - DNA, 90 bp, Homo sapiens
ctcggcgattatggacccggccgaggcggtgctgcaagagaaggcactcaagtttatgttttcggctttgtgagaaaccttaccatcaaa

SEQ ID NO: 756223 - DNA, 125 bp, Homo sapiens
caatgattgcggagcccgctcacttttacctgtttggattaatatgtctctgttcagtttctcttcagcaacgggtagcagaattggaaaaaattaatgcagaatttttacgtgcacaacagcag

SEQ ID NO: 756224 - DNA, 73 bp, Homo sapiens
gagttactggtacttgatttgcaagctacatcatggagaaagcagatcttgtcatagttggtgctgaaggagt

SEQ ID NO: 756225 - DNA, 57 bp, Homo sapiens
ctaaagattgggcagtcactggggagaacactcagcctgcctgcacccaggtgaaat

SEQ ID NO: 756226 - DNA, 50 bp, Homo sapiens
cgcagtggtcgcttcttctccttggggaaactgactctactctgtgatgc

SEQ ID NO: 756227 - DNA, 75 bp, Homo sapiens
aaaagcatgcccatacgattaaacctgcttcctaaggacggtctgaagagccaagagctatttgatgaaattaga

SEQ ID NO: 756228 - DNA, 100 bp, Homo sapiens
gttcttttgctgcaaatgaagttgatggaattacactgtgatacgactgacttcttcaggaaccagtattactgtggacatcgccgtcatgggcgaggcc

SEQ ID NO: 756229 - DNA, 145 bp, Homo sapiens
tgggagtctccgcgtcccgctcgctgggagagaggtacctctccttttccctctccctttccctaaggcatttggctttatgtcccgagttgccctacaagcagagaagatgaatcatcacccagaatggttcaatgtatacaac

SEQ ID NO: 756230 - DNA, 98 bp, Homo sapiens
tgttgcaaagaaattcgacttcagtaatttgagtagtaggctgcagagaaggaagcagcccttgtgcagcaagaagaagaaaaggctgaacaacggaa

SEQ ID NO: 756231 - DNA, 90 bp, Homo sapiens
aataaggctcggggcagtaacaaatcctttctggcggcagctaatgcggtgaacgggatcgtgcacgatgtggacgtgctgggcgcgggc

SEQ ID NO: 756232 - DNA, 100 bp, Homo sapiens
ggacctcaagtccatcaacagcagccaacatgcctgactctgagctattcgagctcatctctgagaaccgttccatgtctcggaagctggaagattacgg

SEQ ID NO: 756233 - DNA, 76 bp, Homo sapiens
ctgggagagaggtacctctccttttccctctccctttccctaaggaagactatgaccgtctgaggcctttatctta

SEQ ID NO: 756234 - DNA, 75 bp, Homo sapiens
gcggcaccgggaggccgggccgagcgtttgcctgagaatacagatcaacccacagaacaaagcggatttccaagg

SEQ ID NO: 756235 - DNA, 82 bp, Homo sapiens
cggtggactccttcggcagtccacccaccgccgccgcctcccaggacgtagacaagtttggcaacgagatcacccagctggc

SEQ ID NO: 756236 - DNA, 95 bp, Homo sapiens
agtttcctgtgtccagcgctgccggagccgcctgaggaacaagcacatcatgattgacttggggactggcaacaacaacaagattaactgggcca

SEQ ID NO: 756237 - DNA, 50 bp, Homo sapiens
aataatactgctatgaacacagatacactctgtgcagttttagagagaga

SEQ ID NO: 756238 - DNA, 100 bp, Homo sapiens
gaatatgaaatcaagactaatcatcctgattcagcaagtgagcccattgcagatgcaaaggctcctgagaagcgggcctcaccatccaagccagcttctg

SEQ ID NO: 756239 - DNA, 82 bp, Homo sapiens
gccgttgctgcgggggattgtgggagtctccgcgtcccgctcgctgggagagagggtggcaatgaccatgagatcttcacag

SEQ ID NO: 756240 - DNA, 74 bp, Homo sapiens
caagcccttgcgcctgcctctccaggatgtctacaaaattggtggagtgtgtcatgaacaatgtcacctgtact

SEQ ID NO: 756241 - DNA, 82 bp, Homo sapiens
caggctctgccggctccttcggcctcgccgcagaacatccagtcatggataaaaatgagctggttcagaaggccaaactggc

SEQ ID NO: 756242 - DNA, 75 bp, Homo sapiens
cggagcagagagctggcgagcaagactattgcagatatcatccgaacatgtttgggacccaagtccatgatgaag

SEQ ID NO: 756243 - DNA, 100 bp, Homo sapiens
ccaagcccaagttgatgacacctgacgccttcatgacacctagcgcctccttgcagcaggcccatccttgagtccggactccctccccaaccctgacggg

SEQ ID NO: 756244 - DNA, 101 bp, Homo sapiens
tgctgagtcacacacaacgcttgttatgttttcatcacttctctccagaagatggatcttcctgatgaagaacctgatcgattaagcaacaaactgttgca

SEQ ID NO: 756245 - DNA, 98 bp, Homo sapiens
gccggacccggtggtcgtccgcggctccggtcacgtcaccgtaatcatgtcaaccctgccatggacttcacgcagactccacctgggatgttggctct

SEQ ID NO: 756246 - DNA, 74 bp, Homo sapiens
cagcaacgtgcggtgggaccacgagagcgtctttgatttgcgtcagtgtcatcgacagatgcagcagcaggcgg

SEQ ID NO: 756247 - DNA, 130 bp, Homo sapiens
gtgagagcttgctcctgctccagttgcggtcatcatgactacgcccgcctcccgcagaccatgttccatgatctgtgactttggcctggcccgtgttgcagatccagaccatgatcacacagggttcctg

SEQ ID NO: 756248 - DNA, 96 bp, Homo sapiens
agggacctggagcttttccggaaaaaggtgctgtgactatctaagatgtcaaaatccacaggcaacttcctcactttgacccaagctattgacaaa

SEQ ID NO: 756249 - DNA, 75 bp, Homo sapiens
tttgaatcatctctacagagaactgaaatttcttcttaaggatgccctgcagtggtctcgccatccagctacagt

SEQ ID NO: 756250 - DNA, 50 bp, Homo sapiens
cgccttcttctgcaggagtcaggatttccatttaaacagggttaatttgg

SEQ ID NO: 756251 - DNA, 101 bp, Homo sapiens
gcttgtggcatctgcacagaagaagctgctagaggaaagactaaagcttgtctcagaactgtgggatgctgggatcaaggcagcagctaccaagaaaccag

SEQ ID NO: 756252 - DNA, 100 bp, Homo sapiens
cggcgactggccggcggggctgaccacttaccgcagcatccaagtcggccctgggctcccgggagccaggggagatgctacctcggaagctgaagcggat

SEQ ID NO: 756253 - DNA, 75 bp, Homo sapiens
gaggaacagaagaagaagaaccggaagaaactgtccgagaagcccaaagatgctccagaccttgtatgattactt

SEQ ID NO: 756254 - DNA, 75 bp, Homo sapiens
cgaggaagcctgccccttgcttgatgaacagtgctttgagacaaatgtcatatggtggaaaatttggttcttcac

SEQ ID NO: 756255 - DNA, 113 bp, Homo sapiens
gcggaccagtatgacgccatctgctgccacaccagcaccagcaagcggcattggctgcggctgctgaccctggggctgtccctcctgcatgccgatgtggttccaaatgcaac

SEQ ID NO: 756256 - DNA, 74 bp, Homo sapiens
cagcgacggcagcggcggcggctggactaaacaggtcacctgcaggcttctctacagtttagcctttaatgcca

SEQ ID NO: 756257 - DNA, 100 bp, Homo sapiens
caagggcatcgactcagacgcttcctatccctacaaagccatgtggtttgatgataagaacccaatttgggccgggcgcggttgctcacgcctgtaatcc

SEQ ID NO: 756258 - DNA, 88 bp, Homo sapiens
tgatttgaataaaaagaccctgtacaccctggtgaccaagagggattcaaagacacatcaactggatcattctgctcattacctgcgc

SEQ ID NO: 756259 - DNA, 100 bp, Homo sapiens
cgctacgcccaggcccactccaccatcgtcagcgagggttcccagcaccatgagggcctggatcttctttctcctttgcctggccgggagggccttggca

SEQ ID NO: 756260 - DNA, 97 bp, Homo sapiens
ccccaggatacagggtcaaaggagagcacaaccatcgcagttggaagcccatggggcagatgcttgtggttggtggcatcgaccgggtttatgaaat

SEQ ID NO: 756261 - DNA, 101 bp, Homo sapiens
cggcagcggtagcacgagtgcgggcagcagcagccccggggcccggagaggatataagtatccagtatatggtgtccagtggcatccagagaaagcacctt

SEQ ID NO: 756262 - DNA, 75 bp, Homo sapiens
ttggcattgacatttaattttagggtcctttatatagaagggagagtagggacctcatgtcttggatcaatggaa

SEQ ID NO: 756263 - DNA, 75 bp, Homo sapiens
aggggctccgggtcttccagagcgtgaagatcaagatcggtctacttccccagcaggacagcatcattctcctat

SEQ ID NO: 756264 - DNA, 75 bp, Homo sapiens
ccgaagctgctggataattttatcccagggtggctgaatcacggaatggaggatttgacagctaaggatattgaa

SEQ ID NO: 756265 - DNA, 75 bp, Homo sapiens
gaaaattttaaacttagacactcagctccaggcctgctttccatggcttttaaggataccggaaaaacacccgtg

SEQ ID NO: 756266 - DNA, 90 bp, Homo sapiens
atgagaaaaccgggaactcagagtcaaagaagaaaccgtgctcagaaactagccagattgaagcaccacctcaggacaccagcccgggcc

SEQ ID NO: 756267 - DNA, 75 bp, Homo sapiens
gtgccctgcctggagggagccctcctggctgggggcaaggttctccccatgacaccacctgaacgtctcttcctc

SEQ ID NO: 756268 - DNA, 100 bp, Homo sapiens
gtcgaagcgagggtctgaagttcacgactactagaaggggaggggagtggaaaggctctcagtgaaaaaggtgcaagaaagcctttgaggtgaaggtgta

SEQ ID NO: 756269 - DNA, 100 bp, Homo sapiens
tggagttgcaagtgggagcactggaagtacgggcagttgcagtgttggagctaaatcgcctgctgctgtcgtcgggaggtgggtgaggtgacgcaaacag

SEQ ID NO: 756270 - DNA, 75 bp, Homo sapiens
tagaatggccgggcgcctaccccaaactcatggaaattgatcagtaatgttgcaggtcagtggaatccagttttt

SEQ ID NO: 756271 - DNA, 100 bp, Homo sapiens
accaacagtactcggtctatagtattgtgcctcagtcttggtctccaaatcctacaccttactttgaaacaccactggatcagttccatgacaagacccc

SEQ ID NO: 756272 - DNA, 74 bp, Homo sapiens
actagctgcgatgcatgtgatcaagcgaggagaaggaagccaacatccttttggagccatgaatattgtccgaa

SEQ ID NO: 756273 - DNA, 96 bp, Homo sapiens
gacgacccagcagccgccatggctctgctccgaggagcggcctattgccaattcatggacatgctcttccctggctgcattagtttgaagaaagta

SEQ ID NO: 756274 - DNA, 100 bp, Homo sapiens
ctgactctagggacagagaagatcagctgcagacaactgaggaatcctttgcaaagactccaattccagggtttcagaaccgcatcgcagcatctttcct

SEQ ID NO: 756275 - DNA, 101 bp, Homo sapiens
acatcctttgactggttagccaggtactaggttttgacaagcttgcatcatgcgtgagtataagctagtcgttcttggctcaggaggcgttggaaagtctg

SEQ ID NO: 756276 - DNA, 82 bp, Homo sapiens
gaagtgtgaaagcattgatggaatgtgctttagaagttaaaaagcctctgtttctctaccttgctctccagtctgtgcatga

SEQ ID NO: 756277 - DNA, 75 bp, Homo sapiens
tagacctgaagccatacaaagtaagctggaaagcagatggtactcgtgttctaatcttaggcgcttcaggcggag

SEQ ID NO: 756278 - DNA, 75 bp, Homo sapiens
cacgacacatgcagtggcttctggactgcgcgatgactggacggcagcaattccatttccgtgagggcgtttcta

SEQ ID NO: 756279 - DNA, 100 bp, Homo sapiens
agatgcaagaccagtccatttggggaaatccttcggatggtgaactcattagaaggagaagatgtcaaccggacactagaaggtggaaggaaacctcttc

SEQ ID NO: 756280 - DNA, 100 bp, Homo sapiens
tttctccattctgttggttttatgcatctttatccaatcaagtgcccttggacaaagcctgaaaccaggaagcgttgttgacgaccatggacatcatcca

SEQ ID NO: 756281 - DNA, 83 bp, Homo sapiens
ggatttttagcccagcccatgaaggttaaacagtgcaccagttgagggatattcagaacatgttggaaataaaactactataa

SEQ ID NO: 756282 - DNA, 78 bp, Homo sapiens
cggttcttctccagcgccctggcctccctcaccttggacacctcgcttggtgttctagaacagatcagacattttgta

SEQ ID NO: 756283 - DNA, 98 bp, Homo sapiens
gccgccggagccgcgaggccaaaataccctctaccatctgctttggtcagggtgccgctcgaggatttaaaagcaacaagaagaaaaccaaacaatgc

SEQ ID NO: 756284 - DNA, 90 bp, Homo sapiens
gaagaagcaactgtacaaaccatgtgatgagacaaaccatgcttctgccacatcaacacaggactttctggatcaagtgacttctcagaa

SEQ ID NO: 756285 - DNA, 100 bp, Homo sapiens
cgacagcagcagcagcagccagtattcgggaaaggcagacagctgcattacaggcactaaagagaaagaagaggttcgagaaacagctcactcagattga

SEQ ID NO: 756286 - DNA, 98 bp, Homo sapiens
agaaagacttgaaggcgtatacaggaacaatattgatgatgtagtaaggaatccactgaagacctacatttcccggaaggttaacagcccccttctca

SEQ ID NO: 756287 - DNA, 100 bp, Homo sapiens
cttgccattctcacaggactaatagctggcaaatttctgttccatcagcgtttgtttggtatgttatgcataaaagtggataatttacatgataaatgaa

SEQ ID NO: 756288 - DNA, 100 bp, Homo sapiens
ttcaacctgaaagtggaggctgcgaaaatagcatttctggattaaaagtggtgggggagtccctttctccagcctttcacctacaactggaagagagcac

SEQ ID NO: 756289 - DNA, 51 bp, Homo sapiens
aaaacacccctggatggggcgaaggaacctggcttctgtatttaccatgta

SEQ ID NO: 756290 - DNA, 82 bp, Homo sapiens
cctccatcctgctggccatgctctacgggacaggacggggaggtttactgcatcgacgcgcggttctacgggaacgtcagcc

SEQ ID NO: 756291 - DNA, 82 bp, Homo sapiens
ctttccactcggctcctgtcgtccgttctctcaggctcccgttcagcgccatcatgaccgggtcctataacaacttcttcag

SEQ ID NO: 756292 - DNA, 96 bp, Homo sapiens
gaaaaaaccttggaggaactctatttagatgctaatcagattgaagagcttccaaaggtgctcagaattttgatgtcatacgactatcaacttaca

SEQ ID NO: 756293 - DNA, 90 bp, Homo sapiens
attcactaaaaccatgtgtctgaactgaagaagcttgggctcacttccacaaatcctccgcagcattcctagtgtctctctacataaagg

SEQ ID NO: 756294 - DNA, 114 bp, Homo sapiens
aggctgcggcagacggcgacagtggcggcggcgccatggcagggcttgcaggtgctggagaatctggtaaaagcaccattgtgaagcagatgaggatcctgcatgttaatgggt

SEQ ID NO: 756295 - DNA, 100 bp, Homo sapiens
ctcggggcgacgcggcgcttgttggcggcgctgcgaggccagagcctagggctagcggccatgaagcctggctacagataagggaccaaaatgactgact

SEQ ID NO: 756296 - DNA, 75 bp, Homo sapiens
agctgtctgggctctaggaaacattgcaggattatattccatcacaacaagatattctgcttgccagaagaccca

SEQ ID NO: 756297 - DNA, 75 bp, Homo sapiens
gcccaacaccttcccccactgataaaagaagccaatttctggggtgctaactttgtaatgagtggttctgactgt

SEQ ID NO: 756298 - DNA, 97 bp, Homo sapiens
atggcggatggccccaggtgtaagcgcagaaagcaggcgaacccgcggcgcaataacggtgtggccgacgacgatgccctcgctgaggagcgcatgc

SEQ ID NO: 756299 - DNA, 75 bp, Homo sapiens
tgaagatgtcccccttacggagcagaccgtgtctcagttccagggagtttggctccgttgactattgggagaagt

SEQ ID NO: 756300 - DNA, 75 bp, Homo sapiens
ctcggtcatgtacccggtggactcggtgaaggctcaagaccacctttaatcctacaatctcagtctctaccttgt

SEQ ID NO: 756301 - DNA, 75 bp, Homo sapiens
cgaagctggccgagcaggctgagcgatacgacggaatcttgtcgattggcctggctgctgcctactacagcggag

SEQ ID NO: 756302 - DNA, 73 bp, Homo sapiens
aggcttgttctggatccctatttattaaaggcccgccaagctgccccctgtgtgctattctttgatgagctgg

SEQ ID NO: 756303 - DNA, 96 bp, Homo sapiens
cgggacggcgggcgggctggccaccacgggacaggaagacgccgacgctttctccgtggaagacccagtgcggaaggtggggggcggcggcactgc

SEQ ID NO: 756304 - DNA, 100 bp, Homo sapiens
ggctctagttctgaatctgatctccaggtgcttggattcgccctcatagtcctgtgtacctccagcgtggctgtcgctctttggaaaatccaacagggaa

SEQ ID NO: 756305 - DNA, 100 bp, Homo sapiens
ttaaaggagaactgggtgatatgggagatcagggcaatattggcaagactgggcccattgggaagaaggacgcgcatcgggaattccttcacaggcctgc

SEQ ID NO: 756306 - DNA, 100 bp, Homo sapiens
ttgaaagtagggcatccttcacccatctgaagggaggaaatagtggcaggtgacagtctgcatgtgcagttttcaggttaatgttcgtgaagaaattgaa

SEQ ID NO: 756307 - DNA, 89 bp, Homo sapiens
ccatgccccttccgattgggagggacaaggaagtcggcttggccctgaggacattattggccactgtggatgagaccattcccctccta

SEQ ID NO: 756308 - DNA, 74 bp, Homo sapiens
agagctgataacaccttaaacctcctctggattcaagttaaaggtagaagatgacagattattgaggttgtccc

SEQ ID NO: 756309 - DNA, 83 bp, Homo sapiens
cagggcttcctcgattgtgccgcgagggctcagaaatcatgagtggaggatctcaagtccacattttttggggtgctccaatt

SEQ ID NO: 756310 - DNA, 98 bp, Homo sapiens
cattttacttcatcctccaaggagttcaatcacttggcgtgacttcactacttttaagcaaaagaggatcgcttacacctgagacgaactacagaaca

SEQ ID NO: 756311 - DNA, 100 bp, Homo sapiens
agcccgagtggatcggggacggagagaacacgagcccatcagtgagcgtcaccctggacccacagtcggccagtgggtacctgcagctgtcagaggactg

SEQ ID NO: 756312 - DNA, 74 bp, Homo sapiens
agagttatgaggcgcttccccagcacaaactgacctgcttcaggatgaagctggaggcagattcgtcgctttct

SEQ ID NO: 756313 - DNA, 100 bp, Homo sapiens
tggggagccaagaccatcgaggggtctggacgcacagaacacatcaagtcctggcattgatgtgcctgctccagacatgagcacaggtgagcgggagatg

SEQ ID NO: 756314 - DNA, 99 bp, Homo sapiens
cgccaggactgtgatggtacaggaagggaacgtggaaagcgcatacaggaccctaaacagggatcagtgtccttcagtgatgtggctgtgggcttcacc

SEQ ID NO: 756315 - DNA, 100 bp, Homo sapiens
agacagagcgagcaacgcaatctgaccgagcaggtcgtacgccgccgcctcctcctcctctctgctcttcgctacccagtgctgcttttgacacaaaaac

SEQ ID NO: 756316 - DNA, 75 bp, Homo sapiens
gacaccaaagaagagaaagacaaggatgaccaggaatgggaaagccccaggtgttactgcggaaatgcaaaactt

SEQ ID NO: 756317 - DNA, 75 bp, Homo sapiens
cagcgggggttccctcaccatctccctgcgggccaacaaggttgagaaatggagtgaagttttgtaaagtacaaa

SEQ ID NO: 756318 - DNA, 98 bp, Homo sapiens
gccgccgccgccgcccagagactgctgagcccgtccgtccgccgccaccacccactccggacacagccgagaaagccaagagccatctggaggtgccg

SEQ ID NO: 756319 - DNA, 49 bp, Homo sapiens
cggcgttttctgaaagctccacttggtggtcacatcaacccagctgtgt

SEQ ID NO: 756320 - DNA, 98 bp, Homo sapiens
agatattttatatcccatgttctggctttctttgcagcaagcgatggcatagtaaatgaaaacttgcgtgtgaaggcaaagaagaatgctgctccatt

SEQ ID NO: 756321 - DNA, 100 bp, Homo sapiens
atgtctggggccagccccaaagagtcaactaatccagagaaggcccatgaggaggaaaaggcttctcttttacatcgtactcaggaagaaagaagaaaga

SEQ ID NO: 756322 - DNA, 75 bp, Homo sapiens
ccttgcttctttggagaatgatatcaaaccatctttaggcccagtgggatttatgaaaagtgccatctctttagc

SEQ ID NO: 756323 - DNA, 96 bp, Homo sapiens
ctggccccggcctttgccccaatcttgtgtgggcactgaagggggactacaggttcgagagtaagaatgattgatgttggctgatattggagtgct

SEQ ID NO: 756324 - DNA, 51 bp, Homo sapiens
taaagcttgaaatgctacatttccaaggtgtagtcgccgccgccagccgcc

SEQ ID NO: 756325 - DNA, 75 bp, Homo sapiens
aagactgacccgtcctggttcctcttacttcaatttgaacccatttgagatccgctttatcctcatccagaaccg

SEQ ID NO: 756326 - DNA, 101 bp, Homo sapiens
cccaatcccccactctttccgccctaatggaggtctccagtttcggccaagtcctgtatctgccatgtctgtggcgtccacctcaacaggctgcattcctg

SEQ ID NO: 756327 - DNA, 100 bp, Homo sapiens
gcagccacagcgcccacttctttgagtttctcaccaaggagctagccctgggccaggaccggttgagttgttacaacaaaagttgagagaaaagttggat

SEQ ID NO: 756328 - DNA, 100 bp, Homo sapiens
aaaagtgtttggggaattggctattctttacaactgtacccggacagcgaccgtcaagatgtgcaacttgctttggtgtttgctgttttattgccacaga

SEQ ID NO: 756329 - DNA, 80 bp, Homo sapiens
ggaggaggggctccggctggtctgtggtgagaagggacttcctcgcccgaagagcgcgggcacagcaacgcagatgcggc

SEQ ID NO: 756330 - DNA, 74 bp, Homo sapiens
gcagagccgcccctccgtgagtctgcattcagcaactagttcctgaatataaggaaaaacagacacctgaaagt

SEQ ID NO: 756331 - DNA, 83 bp, Homo sapiens
cgaccgtccgccagtcgtcccgagatctgcttggctttgaggaagagtggcagtactgcctcactgcataagggatgggatca

SEQ ID NO: 756332 - DNA, 88 bp, Homo sapiens
tcgactgtgtaaacaactagagaagattggacagcaggtcgacagctgccagagctgctgagggggagagcagacagaagttcttcac

SEQ ID NO: 756333 - DNA, 82 bp, Homo sapiens
cattgatggtgaggcttgggtagcaaatgagagcttctatccaggtgaatgaaaactttgccattgatttgatagcagagca

SEQ ID NO: 756334 - DNA, 100 bp, Homo sapiens
agaagcgcaggagccgtgagagcctcaacgtggacgtggtcaagtacgagagtggccctgacggaggggaggaaccacaacaagttgttcagaagaagcc

SEQ ID NO: 756335 - DNA, 51 bp, Homo sapiens
cgcagagcaccaggcccaccgtgaaagattgaagagggcagtaaagccgcg

SEQ ID NO: 756336 - DNA, 100 bp, Homo sapiens
gtcagtcatcgttacccgcagcggcgccattttgcccaaaccggtgaaagtcagaagagatcaattctacagaaatttccagtggttctgttgaggcttt

SEQ ID NO: 756337 - DNA, 97 bp, Homo sapiens
ggatggacttgattctgatgagaggtgcaagtgaaagtgtaggaaaacatatgcttgaagcgtgcaacaataatctggaaatggcagtcactatgtt

SEQ ID NO: 756338 - DNA, 82 bp, Homo sapiens
tgagactttctccttcaagtacttggcagatcactctcttagcaggaattgcattttgtgaaaaaagaacaagaattttctg

SEQ ID NO: 756339 - DNA, 75 bp, Homo sapiens
gcggcagccgaggccgcgaactgcatcatggagatgccatggacaatattaccaggcagaaccaattctacgata

SEQ ID NO: 756340 - DNA, 100 bp, Homo sapiens
cgcagggcgatggacggccgaaccccgcgcccgcaggacgccccagccagaatgctatgaacctacctcctgacaaagccaggttactgcggcagtatga

SEQ ID NO: 756341 - DNA, 88 bp, Homo sapiens
cagaccacaggaaggagggtggaagtatggtttccaatatcacaatttctggctgtagtctctttattattttcacatcagctgtctt

SEQ ID NO: 756342 - DNA, 98 bp, Homo sapiens
ctcaggcctcactttatcttccaagcatttgacattgtgcagcaaagaaatggttatggagaagcccagtccgctgcttgtagggcgggagtttgtga

SEQ ID NO: 756343 - DNA, 75 bp, Homo sapiens
gaaagcggcttatcgaacagagccgggagttcaagaagaacactccagagattgagaggatccagaatccagatc

SEQ ID NO: 756344 - DNA, 95 bp, Homo sapiens
cttggtcgccgcgtccttggctggcgtttccagggtctccctccactgctgtagtaacccgggtccggggcctcggtggtgctcctgatgcccct

SEQ ID NO: 756345 - DNA, 82 bp, Homo sapiens
atcgaccggagcagagagctggcgagcaagtaagaagacatgttggataacaagaagaggtgtagagtttgcatatatcaac

SEQ ID NO: 756346 - DNA, 95 bp, Homo sapiens
cccaccttgtggccctgggctttaccatctttgtggctgtgcttgccaggcctggctccattgctgatcccacaccctttcatattcaagctgaa

SEQ ID NO: 756347 - DNA, 51 bp, Homo sapiens
cgaataaagtttatcacgccgggcggtgcacttgcaggactccactctgaa

SEQ ID NO: 756348 - DNA, 82 bp, Homo sapiens
cgtctggctcttggtcgggctcagcctcggtgtcccccagttcggcaaagccacgccgcaatgaagagcttcttacagtgaa

SEQ ID NO: 756349 - DNA, 113 bp, Homo sapiens
ttgttgatgtgatatgggttgcttcctctgaacttacttcggctgaagggtatgtgattggcagctgtattaaacacattccaatcgcaggacgagatataacatattttatt

SEQ ID NO: 756350 - DNA, 50 bp, Homo sapiens
ctggacacagaagtatttgtgacagattacatgaagcagatgacatttga

SEQ ID NO: 756351 - DNA, 154 bp, Homo sapiens
gaaggaggagctggaagccaagcggctgcagtgcccctttgagcaggagctgctgagacggcagcagaggctgaaccagacgccagcatgtctccggacgccaccaagccgagccactggtgcagcgtggcgtactgggagcaccggacgcgcg

SEQ ID NO: 756352 - DNA, 74 bp, Homo sapiens
cttcgacattgccgtcgacggcgagcccttgggccgcgtctcctttgagatgacaacggcaacacgacaagaag

SEQ ID NO: 756353 - DNA, 98 bp, Homo sapiens
gatgaacttaatgaaatcaatcagttcttgggacccgtggaaaaattcttcactgaagaggctcttcctcctcccagaaagacacgtgctgagctcat

SEQ ID NO: 756354 - DNA, 82 bp, Homo sapiens
tcgctgggtccctcctccggcttcccgcaatgaggagggcccttcacagaaccgggctgagctgactgctgcccactttgga

SEQ ID NO: 756355 - DNA, 90 bp, Homo sapiens
cagccatggtgcattgcagttgcgtgttgttcagaaagatgaagactggcccatttgcagagcactccaaccagctgtggaacatcagcg

SEQ ID NO: 756356 - DNA, 82 bp, Homo sapiens
cccccaagaaggaagtcatcatgggccggcctggaacagaattcggttccctcaaaattataaaggcaggaaagctcaagac

SEQ ID NO: 756357 - DNA, 83 bp, Homo sapiens
cgcaaggtcgccctcaaggccatgatcaaaacgcttcaccatcatcatcgagccctttgacgacagaaccccgaccattgcca

SEQ ID NO: 756358 - DNA, 101 bp, Homo sapiens
aaaggagttacattcttacccaggctgttgaagctcaaatccgaagttttggacagactccttctcaactactcatagagccccatcctcccagaggttct

SEQ ID NO: 756359 - DNA, 82 bp, Homo sapiens
gtcctcggcgctgaaggggttaattcaacagttcaccaccattaccgatgatatcatcaagttgaatcgaaaggaagggaag

SEQ ID NO: 756360 - DNA, 90 bp, Homo sapiens
ctcaatccaacagcccagtgcttctgtctcgactgcactttgagaagactctggctcctcctcctcctcagaagatgaacgacccaagag

SEQ ID NO: 756361 - DNA, 83 bp, Homo sapiens
aggagttccaccaggccgggaagcccatcggaggctgggaggcggcagaatgcagccagaggagggcacaggctggctgctgg

SEQ ID NO: 756362 - DNA, 100 bp, Homo sapiens
ccgggaccgggatcgtgaccgtggagggtaaatattgcagattttcaagagaatcagtgggtgacttgtttccaggagtctgctgaagctatccttggac

SEQ ID NO: 756363 - DNA, 100 bp, Homo sapiens
aagcctggaatcacgaagcacagctgtcacccggacatcaagtattcaccagttaatagcaccagctcgatgcattctatttctcatcatttggctcata

SEQ ID NO: 756364 - DNA, 100 bp, Homo sapiens
taccagagaaatcttagagtttcccgcaagggatgtttatgttccaaacactacttacagggggattcccgaagtcttccgttttctgagaatgtgagtg

SEQ ID NO: 756365 - DNA, 100 bp, Homo sapiens
gggttatcagcctgttgcaggggacccctggctgaaagacaaaaatgagacagaggcctgaagcaaagacatctgggtcagagaaaaagtatttaagggc

SEQ ID NO: 756366 - DNA, 59 bp, Homo sapiens
tgcctggtggaggcggatgcagaaggaggaagaaatagaatttctctacaatgagaaca

SEQ ID NO: 756367 - DNA, 75 bp, Homo sapiens
ttatcaagacgccaagccaagcaaattgtttcatcagcaaagacctggaatcatttttctgataatgaggcagag

SEQ ID NO: 756368 - DNA, 100 bp, Homo sapiens
ccgggccacctgggcccccgggttccgccggcactctcgccaccaccgcgtgggtttttcgttggaatatacgttgcacatttatggcgattctgagtgt

SEQ ID NO: 756369 - DNA, 74 bp, Homo sapiens
ctggagtaaacttcccctcaccagaaggtactggaggcgcaaagaaggcatcagaaggagaaatctggcatcat

SEQ ID NO: 756370 - DNA, 75 bp, Homo sapiens
ggatcgggggcggcggtggcgccggcggcgggacagccccgaacagcacagtgaatggatagggcagcagatgag

SEQ ID NO: 756371 - DNA, 100 bp, Homo sapiens
cggaaaccagatcggctgctgcttctgggacctggcactaagggagcacgccgcggtcaaccagtttagtcatccaacaagaagaaatatgaaattccag

SEQ ID NO: 756372 - DNA, 96 bp, Homo sapiens
ccccttcagcgtcgctgcccccagctcagctcttactgcgggccgctccgacggcggtccatcctggcactgggtgcaagttcctgtgaaatatgc

SEQ ID NO: 756373 - DNA, 90 bp, Homo sapiens
tgaatcagcccatggcttacgctgcacttccatcccacggtcagtgccggtggtggtgtgcacattgagccccggtatagacagttcccc

SEQ ID NO: 756374 - DNA, 100 bp, Homo sapiens
gctccgtggatgaggctctgcggctggtccaggccttccagtacacagacgagcatggggaaggagctttgcccaggtgctggaactctccgcagaggca

SEQ ID NO: 756375 - DNA, 98 bp, Homo sapiens
tatccagctttccccatattcatccctagattcatgaatcggcaccctagattatggttttctgatattcttactgattctccgggctctgcagctct

SEQ ID NO: 756376 - DNA, 100 bp, Homo sapiens
agaggatgtcaacaattttttggagctgaatttagatgtcagccaggccgatttcagtgtgggactggactctgtgctctaccagctttcatctgtgatg

SEQ ID NO: 756377 - DNA, 90 bp, Homo sapiens
aaccctgaacagctcaagaaattgcaagacaaaatagaaaagtgcaagcaagatgttcttaagcggcaacctttggcactgcatccatga

SEQ ID NO: 756378 - DNA, 75 bp, Homo sapiens
aacgcaagaacatatgccagttcctcgtagaggctggagcacagtggcgcgttctcggctcattgcaacctccac

SEQ ID NO: 756379 - DNA, 100 bp, Homo sapiens
tggttccatcagtcaggtcattgagcagttacctcagccaaacaggacaagcaggttacaggaatacttaaagatgctggagtaaacaatttaacaattc

SEQ ID NO: 756380 - DNA, 145 bp, Homo sapiens
aagccatgctcaatgaccgccgccgcctggccctggagaactacatcaccgctctgcaggctgttcctcctcgggtgaccaagaatatggcccaggtgaccaaagccctggacaaggccctgagcaccatggacctgcagaaggt

SEQ ID NO: 756381 - DNA, 100 bp, Homo sapiens
gtggtatgcggccttctatgccaagaagatggacaagcccatgctgaagcaggccggctctggcgtccacggtgtcatggagaaactccagctgggccca

SEQ ID NO: 756382 - DNA, 75 bp, Homo sapiens
ggaagtggttggaaatggcacctatggacaagtctataagattcacagtctgagaatgaggcttcaccagtaaaa

SEQ ID NO: 756383 - DNA, 75 bp, Homo sapiens
agggagtgcatcaaaggtgtgaacacaggcctcccagaagttcctgccgaatcgtcttcgtcacccccggggtcc

SEQ ID NO: 756384 - DNA, 74 bp, Homo sapiens
gaagaactgaagaagctggagttgctcagacaggaggagcacgtggtgtctgtgagccgggatgggaccttgaa

SEQ ID NO: 756385 - DNA, 74 bp, Homo sapiens
tttttcagctggaagaattgcccggggtctaaaattcccaggactccacagctttgcaccagataagcctggag

SEQ ID NO: 756386 - DNA, 100 bp, Homo sapiens
agcgatggccgggatcctggagcactcggtcatgtacccggtggactcggtgaagaatcttttagctgaaaaagtagagcagctgatggaatggagttcc

SEQ ID NO: 756387 - DNA, 82 bp, Homo sapiens
cttagctgtgctcgcgctactctctctttctggcctggaggctatccagcagttgagaattatggctgcaggaaaatttgca

SEQ ID NO: 756388 - DNA, 75 bp, Homo sapiens
gcctccccagaaaaagatgctgccatgcttcctgtacagcctgcagaacattattcaagcggagaaatgttgcta

SEQ ID NO: 756389 - DNA, 75 bp, Homo sapiens
ctttgagtctagcaagtgttattatttctgccctttgtacccttacaaggtagatgacattaatgctgataagaa

SEQ ID NO: 756390 - DNA, 100 bp, Homo sapiens
gtaggaagaggcactgctgagggggcgcgaggggaacggaggccagagctgcggtgtcatggagaaactccagctgggcccagagattctgcagcgggaa

SEQ ID NO: 756391 - DNA, 75 bp, Homo sapiens
ttcacggggttcgaggccttctatgcagccgaggacgctatgtccagcaaaggctccgtggttctggcctacagt

SEQ ID NO: 756392 - DNA, 100 bp, Homo sapiens
cccaccgtgattctgaggcctccccaaccatgtgcaattatgaatgatttcggaatcaagaatatggaccaggtagcccctgtggctaacagttacagag

SEQ ID NO: 756393 - DNA, 43 bp, Homo sapiens
gcttggagctgcacgtggacgtgagaaagatcagtctaaagaa

SEQ ID NO: 756394 - DNA, 90 bp, Homo sapiens
gtgatttattagagaaagttaaatgggctaagcagtggcatgtgtataatccagtgctgcagcttccttactatgaaatgacagctccac

SEQ ID NO: 756395 - DNA, 100 bp, Homo sapiens
atgggagatgctcctcagggaggaagccatgtgagggggccggctctgtggcagggctgaggggaacccatatggagaatgtgtatgacttctacaaacc

SEQ ID NO: 756396 - DNA, 83 bp, Homo sapiens
cgaagaggctggactcggattcgttgcctgaggacggcggctccctggaccaggtgctgaaagaggccaagaggattcccgag

SEQ ID NO: 756397 - DNA, 75 bp, Homo sapiens
gcttccactgtccgcggggtgagaatgcccctggaacagtccaggctctgcagacagcatcccacctgtcccagc

SEQ ID NO: 756398 - DNA, 100 bp, Homo sapiens
tgaacatgcaagaaacatatactgcttacctcattgaaacaagagttctatatgaagggaaagaacggcttattccaggatgtgaagtgatcctagccac

SEQ ID NO: 756399 - DNA, 98 bp, Homo sapiens
gggttcatcctacatttttgtgcaagagccccaggagatgggcactgagaaagtgattgaccgaaaagtggagcttgaaaaggaggatggtcttgtac

SEQ ID NO: 756400 - DNA, 100 bp, Homo sapiens
tcaactttgaagagatcgactacaaggagatcgaggtggaagaggaggacatgaaccttaacgaagagaaaaaagctcctttacgaaacaaagactttac

SEQ ID NO: 756401 - DNA, 100 bp, Homo sapiens
ggggacttgggcccagtttatggcttccagtggaggcattttggggcagaatacagagatatggaatcagtgggcaagttacggaagcaatggctaaagg

SEQ ID NO: 756402 - DNA, 116 bp, Homo sapiens
tgtcagagaaaaagcagccggtagacttaggtctgttagaggaagacgacgagtttgaagagttccctgccgaaggtttttcgttggaatatacgttgcacatttatggcgattct

SEQ ID NO: 756403 - DNA, 83 bp, Homo sapiens
ctgaaaagtgcctgcaatttgccatttatttgtaataagtgcatctgggggaggtgttgtagccattgacaacaaaatagaac

SEQ ID NO: 756404 - DNA, 82 bp, Homo sapiens
aaacccactgaagacgtctgcgtgagaatagagaccaccgagcaaaatgatgcttcaacacccaggccaggtctctgcctcg

SEQ ID NO: 756405 - DNA, 82 bp, Homo sapiens
ggcctgcaaagccttcttcaagaggaccatccaggttctttggggtgactttcaagatggactctactctaacagcaagtga

SEQ ID NO: 756406 - DNA, 90 bp, Homo sapiens
ctcgtctcaggccagttgcagccttctcagccaaacgccgaccaagatttgatgaggcgccaagaagaacttcggaggatggaagagctg

SEQ ID NO: 756407 - DNA, 82 bp, Homo sapiens
tctcagctgccacctgcctttgacctttttgaagcctttgcaaaagaaaaactggaggagtgcctaaagcagttaaaggaag

SEQ ID NO: 756408 - DNA, 75 bp, Homo sapiens
agcttgggccattaccttgccctggtctgcaggtggagtcttcatgtaagaaacctctgcgccatgagagccaag

SEQ ID NO: 756409 - DNA, 101 bp, Homo sapiens
cagcactgcttcatccgggaagtgcttggggatggagtgcctccaaaggttgctgaggtgctggagaatctggtaaaagcaccattgtgaagcagatgagg

SEQ ID NO: 756410 - DNA, 118 bp, Homo sapiens
ctttagcatggctgataaggtccttcctaccattccaaaagaacagaggaccagagttgcacactttttggaaaagcagcattggggctttccagctctcacagaaccttcagcatcc

SEQ ID NO: 756411 - DNA, 98 bp, Homo sapiens
tgagattcaataactccttgctgccaacagagccttctattgatatcagtaaatgccattatttagtggatttggacaccatgagagaaacaccccgg

SEQ ID NO: 756412 - DNA, 99 bp, Homo sapiens
ttgttaatttcttctgaacagatcaagcaaaagtagataatcagccagaagaattagtgcgtagtgctgaagatgggtaagcttgatgattaccaggaa

SEQ ID NO: 756413 - DNA, 75 bp, Homo sapiens
tggatccaggataacggaggctggctcttccttcaaaagttcctgccttttccgacaaggacagcctgggggatg

SEQ ID NO: 756414 - DNA, 74 bp, Homo sapiens
ataggacctatggcgtggtggcccagtactaccggcccctgcatagtgaagacatttccacctggacacctgac

SEQ ID NO: 756415 - DNA, 96 bp, Homo sapiens
gacttcttgaagaaagacagatcctgtgtcacccggcaactcagaaacatcaggtccaagcctccacagccacggggacaccctgcacctattccc

SEQ ID NO: 756416 - DNA, 75 bp, Homo sapiens
ggcggagcagaggaaccacacgctgatcatgttttttgtagcatcagatccaacagttaaaacagatcgactgtg

SEQ ID NO: 756417 - DNA, 111 bp, Homo sapiens
ggcacattggttgacctttgccagggcccccaccttcggcatactggacagattggaggactgaagctgctatcgtcccatgaagctgaggtcttgaagcagctggctgag

SEQ ID NO: 756418 - DNA, 101 bp, Homo sapiens
cgccgagccgggccgcggcgccgagtcgaacggggagccgagctggagctgccgcggcgcagccagcccaccttgggacaccttgactccaagcccagcag

SEQ ID NO: 756419 - DNA, 83 bp, Homo sapiens
ccccacctttcccacctgctccacctctatccccccaagcaggtgaagatcttcgaggaggacttccagagggagcgcagtga

SEQ ID NO: 756420 - DNA, 85 bp, Homo sapiens
gacaccgagtactcttatgcagtccccatggaggcagcacccagggtcattcctggagcataaacgatccctgcagaacatgggc

SEQ ID NO: 756421 - DNA, 100 bp, Homo sapiens
aaaagacccagcgctccgtttagaagcaacgtgtatcagccaactgagatggccgtcgtgctcaacggtgggaccgaagccatcttcgacaagagcacag

SEQ ID NO: 756422 - DNA, 88 bp, Homo sapiens
cttgcaacagtggccgcacgcataggattttttatcaagcagaaatgcatcgaacaacgagaatcaagatcactgagctaaatcccca

SEQ ID NO: 756423 - DNA, 75 bp, Homo sapiens
tttgcctctgcacagtttcccaatgctttccgcttggccctcatccagcttcagatttcttccatcaaatcagat

SEQ ID NO: 756424 - DNA, 100 bp, Homo sapiens
gcggggacagctgcagagcgcgcttctgatcctggggctccatggtccccttctcgatgcgcatcttgcacgcggagcttcagcagtacctggggaaccc

SEQ ID NO: 756425 - DNA, 87 bp, Homo sapiens
tggcgaatggggctcacgtcgaggaaatccctaagtcagccaacccctcctcccatgccaatcctttcacagtctgaagcaaaaaac

SEQ ID NO: 756426 - DNA, 100 bp, Homo sapiens
catttctggctctgaaggcgaacgcttcgctggccatttaggagctctgctcaaagccagacgactttgtgtggacagtaatgacctcacgtttccgatt

SEQ ID NO: 756427 - DNA, 100 bp, Homo sapiens
ccttcgtcccctttgatccctgtgtgctgaagaggttttctgtctcaactggtctctgacaagcctctgactgaatgtatccgtgctggccactatgcag

SEQ ID NO: 756428 - DNA, 50 bp, Homo sapiens
ccgtttgttcaggaaccaccagtgacagaagaacgtttgtctgcctgatg

SEQ ID NO: 756429 - DNA, 100 bp, Homo sapiens
tgagaaacttctgagcaacagatctaaagccctggtgaggtccagttccggccgtaccgcacagacgacttcatcacgcgcctgtactatgagacgccca

SEQ ID NO: 756430 - DNA, 75 bp, Homo sapiens
cctgcctttccttccccctcggaaaatggttcccactgccgggcgaggtgtcgtgaaaactacccctaaaagcca

SEQ ID NO: 756431 - DNA, 88 bp, Homo sapiens
agcccagcctcgccaggactaccttaagggactgagtatcattgggttagtaacaggagtatgggaaggcaaatacaacttcttctgt

SEQ ID NO: 756432 - DNA, 100 bp, Homo sapiens
cttggctcctccctgccagatagctcttattttgagaatcccaaggactgcagcaaagccaaaaagctggtgtgtaatatcaacaaaggctgtggctatg

SEQ ID NO: 756433 - DNA, 100 bp, Homo sapiens
cggcggcgagcgctcgcgagcggctgcgggacgcgaggtttccgggagggagccatggatttgctgcgggagctgaaggccatgcctatcacgctgcacc

SEQ ID NO: 756434 - DNA, 51 bp, Homo sapiens
caagcattggtgcacgatgtactgttgcctgctaataaagatgcctttcga

SEQ ID NO: 756435 - DNA, 111 bp, Homo sapiens
aggacagtgaggagctgggtggtcccagcctggagctgtgccagcctgacatgggaaaaatatattcagggggaagagatgtaatagatttcacattatggcagttactaa

SEQ ID NO: 756436 - DNA, 97 bp, Homo sapiens
gacattcaacatgattgcatttgaacggcgtcttcgacatcttcggaacattgctgcccggaacattgttaatagaaatggccatcagctccttgat

SEQ ID NO: 756437 - DNA, 75 bp, Homo sapiens
ccaaatccaagcgcgacaagaaaggcgggcaaaactgttccgatttgcctctgagaacgatctcccagaatggaa

SEQ ID NO: 756438 - DNA, 90 bp, Homo sapiens
gaatgggtggttgcccatctctgctatgaacaaggaactgattcatttggaagaaagattaggcaatgtcaatcgtggagcatcccaggg

SEQ ID NO: 756439 - DNA, 100 bp, Homo sapiens
ccgccaactctgacctggccaattctgacgccctcaaggtcgccaaggaggtggacccccagggtgcccagggtggctccgtggcccgcacactcctgga

SEQ ID NO: 756440 - DNA, 75 bp, Homo sapiens
cgaagctctctccagaaagacatcctgagaggacttggcaggtcccccacggcccttcaggatgaaagctgcggt

SEQ ID NO: 756441 - DNA, 98 bp, Homo sapiens
tgactctgcccagcccagcagcagcaccgaccctagcatcatggagcccacagcatcctcagggcagcctatgacattccccccagaggccctgtggg

SEQ ID NO: 756442 - DNA, 82 bp, Homo sapiens
ctctgaggcggcgagagatggtcaggtctggagctcgaccgggccaggaggttgtggctcactggattgctgaaagccgcat

SEQ ID NO: 756443 - DNA, 95 bp, Homo sapiens
ttctgcctacatcaagaattcaaacccagcactcaatgacagtgtggggatattcagctttgccaggtatggcagtgatttttatagcatgcact

SEQ ID NO: 756444 - DNA, 108 bp, Homo sapiens
cttcaagcttaggaccacccaccatgcctatccaggattgacttctaaagaatcttggtacgtgaggaagaaacccagaagaggaagaggaaagcaaaggagtcaggg

SEQ ID NO: 756445 - DNA, 100 bp, Homo sapiens
gtgctgccgccgccagggtctgcagggcctgggccgccgctgctacctgcagcgccgtgtggcacgacacaaaaatcagagcaaaatatgctgtgaattc

SEQ ID NO: 756446 - DNA, 100 bp, Homo sapiens
gcggcaggccaaggaccctgagtgcaagacagaggttccagagttctaaatctggaaagatctacctccatagagacgtacggctcctgttctctagaaa

SEQ ID NO: 756447 - DNA, 100 bp, Homo sapiens
gcaaagagccccgaagctaagagcccccttcagtcgcagcctcactctagtgccggggggccccctcctcaccagtacccaccccagggctggggcaata

SEQ ID NO: 756448 - DNA, 110 bp, Homo sapiens
tcaagagcatactttggaccctgttttcagaaagcagggaacaacctatcttcagcactcgagctcatgtcttccaaattgacccaaacacaaagaagaactgggtaccc

SEQ ID NO: 756449 - DNA, 83 bp, Homo sapiens
cttcccccgcgccgcctccccgcgccgctcgcgcagccatgtccgaggagaagcccaaggccggctggatcctgcaggcagct

SEQ ID NO: 756450 - DNA, 82 bp, Homo sapiens
gcagacacctctaacctccttaatctgtttctggacatggcaagacatgtgccactctatcgggcactgctggaattgcttc

SEQ ID NO: 756451 - DNA, 142 bp, Homo sapiens
gtgagaagtgggagctgatggagagagtgacccggctatacaaggatcagaaaggactccagcacctggggcctgcaccctagaataatagctgaaggatttgaagctgcaaagataaaagcacttgaagttttggaggaag

SEQ ID NO: 756452 - DNA, 98 bp, Homo sapiens
atcatcggtgccaaggaccacgcatccatccagatgaacgtggccgaggtatggacgacaaaggcgacccgagcaatgaggaggcacctaaggccatc

SEQ ID NO: 756453 - DNA, 75 bp, Homo sapiens
ttcatctcaaaaacaaaattctgaactcaggacttggcaaaaggaccctctattgtcccaggcctgtgttggctg

SEQ ID NO: 756454 - DNA, 75 bp, Homo sapiens
ctctcagtggtcctacctggggatattatcaaatctactactgttcatggcaggaaccagcacctatgacagaag

SEQ ID NO: 756455 - DNA, 100 bp, Homo sapiens
ccttccagctgtttgaccgaacagcctcctgtataagaagtaccgtattttctgcccatcatactttgtaataaaacttgaacatgtatagattgactga

SEQ ID NO: 756456 - DNA, 100 bp, Homo sapiens
ggcggcggccaggtccctgctgaatcacacgccgccatccgggaggcccagggaagatgcttgctttaaatcgagtaacagcatcgcacccatttatgac

SEQ ID NO: 756457 - DNA, 75 bp, Homo sapiens
atgcaccgagtccagcccaggaaaatggagagactctgttacggcatggtgcaaatccagatctgagagatgaag

SEQ ID NO: 756458 - DNA, 96 bp, Homo sapiens
tggcagactgacaactgtgagacatgcacttgctacgaaacagaaatttcatgttgcaccctgcaagaaaactgatcagtgattttgccattatct

SEQ ID NO: 756459 - DNA, 75 bp, Homo sapiens
cttacagtaaagtctttggtacaactgtgaaatcaaatacattgcccatctcgctgcagtctataagaagtagcc

SEQ ID NO: 756460 - DNA, 90 bp, Homo sapiens
taacagaaaagaagaggagaatgctaagcagagaattcctcctgatcagcagagactgatctttgctggcaagcagctggaagatggacg

SEQ ID NO: 756461 - DNA, 50 bp, Homo sapiens
gctgggaagtattattggatattcagatctgactgcagccatgagcagca

SEQ ID NO: 756462 - DNA, 98 bp, Homo sapiens
acaaatgctccttctcctggagacgcaactcaaggtgtcatggagaaactccagctgggcccagagattctgcagcgggaaaatccaaggcttattta

SEQ ID NO: 756463 - DNA, 50 bp, Homo sapiens
ctgctgtggaagaccagccccaaagtttgctgctttgtggtgcacaagcg

SEQ ID NO: 756464 - DNA, 83 bp, Homo sapiens
cggagctgtcgacccggcctggcgccggactaggtgtccctggccagtgtccttccacctgtccacaagcatggggaacatct

SEQ ID NO: 756465 - DNA, 50 bp, Homo sapiens
ctggcacataataggtgctgaaacacagatatgtagaactcttcttgaat

SEQ ID NO: 756466 - DNA, 101 bp, Homo sapiens
cccacatgcctctaccaatggacagctctcagtccacactcccaaaagggaaaggcactcctctttatgctgctcactttcgtccaggacagtatgtggat

SEQ ID NO: 756467 - DNA, 100 bp, Homo sapiens
ggtgtgagaatggagtgggcaggaaagcagcgggactttcaggagaaaattttgagcagacaccattgagaagaacattcaaatctaaggtccttgcacg

SEQ ID NO: 756468 - DNA, 74 bp, Homo sapiens
cttaagcttgcaactgaactccctgatgctgaacttaggaggactttatgggcagtagaagttgctggaaatta

SEQ ID NO: 756469 - DNA, 75 bp, Homo sapiens
gaccaagatgcccgagtgctacttctactccaagttcggtggctttcctgggggaatgcctggtaattttcccgg

SEQ ID NO: 756470 - DNA, 101 bp, Homo sapiens
aaagaacgcagggagattctgggaacttgcaaaatgctagggcagatgactgatcaagtggctgacctccgtgccaggttttctgtctcaactggtctctg

SEQ ID NO: 756471 - DNA, 97 bp, Homo sapiens
tactttagaattaagagttaaaactgtgaaatactttaaaggtggagccgccaccaaaatgcagattttcgtgaaaacccttacggggaagaccatc

SEQ ID NO: 756472 - DNA, 101 bp, Homo sapiens
tggaatgtcacacgacggggcagctggaagttcccagaaatgaatgctatgatcatgcgacggttcagtttgcctggagatgtagacagagctcgacagta

SEQ ID NO: 756473 - DNA, 97 bp, Homo sapiens
gccggaactggagccgaggcgcaggtggcgctggaggtggggctggtgtccgagcacttctcgcaggccccgcagaggctgtccttctacagctggt

SEQ ID NO: 756474 - DNA, 100 bp, Homo sapiens
accaaggagaagctatagactacttctactccaccaggaagttccatgccattgcagtgtcaactaggcctcagttacttttcagtttgcccaaattgag

SEQ ID NO: 756475 - DNA, 75 bp, Homo sapiens
cttgaactggtgctgtctgggcttcatagcattcgcctactccgtgaaggaatactcccccagttgcaagaggcg

SEQ ID NO: 756476 - DNA, 98 bp, Homo sapiens
aaggcgcctttgccactgaggagcatccttacgcggctcatggaccctggttacaaaaagtgactgagaccgaagatgatagtgatagtgacagcgat

SEQ ID NO: 756477 - DNA, 74 bp, Homo sapiens
cgagcgcgagcggcgcgagaaacccaagaggagagggtttgaccgcttcggaccagatggcacgggcaggaaac

SEQ ID NO: 756478 - DNA, 100 bp, Homo sapiens
gcaagaaaagaaagagaacaaatactccttcagcagcctgagggaactggcatgatagatgaagagttcactgttgcaagactctacattagcaaaatga

SEQ ID NO: 756479 - DNA, 90 bp, Homo sapiens
cgagactggaggctgagtgctaaactgtgtggggcgcggatgggatccagctgttagtcggaacaagcccctgagctggaaaacctcacc

SEQ ID NO: 756480 - DNA, 75 bp, Homo sapiens
gcctgttcccggggcagatccaggttcaggttgggcccgaaggcatcctgcagaacggggctgtggacgacagtg

SEQ ID NO: 756481 - DNA, 75 bp, Homo sapiens
cttgaatagaggaaatgggatatcatctgactctaaaatagagctcaagcttgagaagagagaaccactaaaggg

SEQ ID NO: 756482 - DNA, 98 bp, Homo sapiens
ccgaagcggctcaggaaggcagctgtcactgagcccctggaacagagcgagagtatctgtgagccactgccccatgttgtgttgatgccaatctgcca

SEQ ID NO: 756483 - DNA, 73 bp, Homo sapiens
gaaaatggcctggtctttgaggactcagaggaactggcagctcagctgcagctgggcctacacttcgtcgcac

SEQ ID NO: 756484 - DNA, 75 bp, Homo sapiens
tcctgcaagaactggctcaagaaatttgcctcgaaaaccaaaaagctcctgctgcttctgtaccccgcctgtccc

SEQ ID NO: 756485 - DNA, 51 bp, Homo sapiens
ctagtacaaacaggctgctggcattgagtaatggaacggcggtatcccaag

SEQ ID NO: 756486 - DNA, 74 bp, Homo sapiens
aaggagctaaagcagcgtgcgttcagccctggggtttgactatggagagcgcttctgggacatcaaaggcaagc

SEQ ID NO: 756487 - DNA, 98 bp, Homo sapiens
tctagatgtaaatgtcagtggaaaggagagctaccatcactaagtgtgtggaccagttgacaaagatccaaactgaattacaagagacagtgaaagat

SEQ ID NO: 756488 - DNA, 75 bp, Homo sapiens
ggagaactgggcgacggagcctttgggaaagtgtacaagggggccagtctttcttcagcaggaaggattccatcc

SEQ ID NO: 756489 - DNA, 76 bp, Homo sapiens
cgattactgcgagaacaactacatacagagatcctgagtcatgtgttccagtggcttgggttcacagtgcatatac

SEQ ID NO: 756490 - DNA, 75 bp, Homo sapiens
aagttgagcgcattgcatcacatgattttgaccccacagaccagcagaagtagacactgtggatgcattccaggg

SEQ ID NO: 756491 - DNA, 82 bp, Homo sapiens
gtctacgagctgtttctcatctttatactcttccaggccaccagcttgggctccccacggagggcagcaagtgggacttggg

SEQ ID NO: 756492 - DNA, 75 bp, Homo sapiens
cacgacaccatgcatctcctcggcccctggctcctgctcctggactttgagcaaagcatggtcctggttgcctgt

SEQ ID NO: 756493 - DNA, 74 bp, Homo sapiens
ccgcgtcctactgcgccaagctctgcgagccgcagaaagtttcctacactactgaggtttaggggcactgtgaa

SEQ ID NO: 756494 - DNA, 75 bp, Homo sapiens
agccgacaagcccgggagacacagtgtcagaattacaagtgtactaatggtcacttgatgtgcgctggctgtttt

SEQ ID NO: 756495 - DNA, 83 bp, Homo sapiens
ccagctccgaaatcaccaccaagctgcggttggatttctcacgatgtccagtgttatctccatgtctgcccctttcttcctgg

SEQ ID NO: 756496 - DNA, 90 bp, Homo sapiens
agcacctacactggcaacattagatccacctcatacagacttcagtattgatgctcctccatcctttaagccagctaagaagtattctga

SEQ ID NO: 756497 - DNA, 50 bp, Homo sapiens
gtgctgctgcctcccgaaacgagcgtccctcccctgatgtgaaggccgag

SEQ ID NO: 756498 - DNA, 90 bp, Homo sapiens
cacagccggggtcgggagccgcccggggcagggctcgggagagcggggtcatctcaggctggctgcatgcctcagctgaagatcccagct

SEQ ID NO: 756499 - DNA, 82 bp, Homo sapiens
cacactgctacatcgatgacagaggattcagggctgaaatctctttaatgatggagggaagcaggcagacgcgagtgtctcg

SEQ ID NO: 756500 - DNA, 83 bp, Homo sapiens
ccgggcgctcgagacttaccagagccacaagcatcacaggacatggccccctcagccacctagctggggcccatctaggagtg

SEQ ID NO: 756501 - DNA, 83 bp, Homo sapiens
gtgggagtctccgcgtcccgctcgctgggagagagggaaagcaggcaggatgggagagtcgccgatagaaccacctcttccct

SEQ ID NO: 756502 - DNA, 128 bp, Homo sapiens
gcgcgcagggcctgcagcgggagctggacggcgagcgcgagcggcgcgagaaaatgagcagcaccagcagtaagagggctccgaccacggcaacccagaggctgaagcaggactaccttcgcattaag

SEQ ID NO: 756503 - DNA, 100 bp, Homo sapiens
ttgctcttctacagcaatgatagccattctcactcaccagtttcctgaaatcatgggtatttttgctaaagctcaaatccagtttgctgatgacatgcag

SEQ ID NO: 756504 - DNA, 83 bp, Homo sapiens
agtgatgtggaggaaaacaacttcgagggcagagttatttggaaatagcggtgcttgcagcgcttgcggacagtcgattcctg

SEQ ID NO: 756505 - DNA, 95 bp, Homo sapiens
tgaacccaacctagtgggtgtaatacatcatgaactgcaggcattgcagtgtcgagatggctatgaaccctgtgtaaatgaaggaatgtgtgtta

SEQ ID NO: 756506 - DNA, 101 bp, Homo sapiens
gcggggcctggcggtcttcatctcggatatccgcaactgactcgctcagcagcagcctgaaaacttgctacaagtatctcaatcagaccagtcgcagtttc

SEQ ID NO: 756507 - DNA, 100 bp, Homo sapiens
aacagtcaaccttctgagctttcttcagagacctcaggacccagccttgatgcccacttgggaggcagaaagcaccggcacctggtagaactacgagctg

SEQ ID NO: 756508 - DNA, 100 bp, Homo sapiens
gatgagaaggacccacggcgtctgttcgaagtttcagtctgatggaagcaaacaagaagataaagaaaaaacggtaagagactagaaaaatccaataatg

SEQ ID NO: 756509 - DNA, 82 bp, Homo sapiens
gccagcccgtgccgcgagcgcggcctgcaggaggacacctgctccacttcaccttttgccatgagtaaaagctccctgaggc

SEQ ID NO: 756510 - DNA, 100 bp, Homo sapiens
gaattacctggaacttcatcatcatctacttcacaggaattgccatttcgggacgaccctgggacagtctccactggggcagatccagctgaccatccgg

SEQ ID NO: 756511 - DNA, 75 bp, Homo sapiens
cagatcttcacagcacagttcctgggaaggtggagccaccagcctctccctggtattgtcttctaagaactctga

SEQ ID NO: 756512 - DNA, 100 bp, Homo sapiens
cggtagacctggaggtgaagctgcggatcgcccaagagcgtcacggggttcggacgtcagatgatcgagaaaaccaagcagctggtggagtctaagtaca

SEQ ID NO: 756513 - DNA, 100 bp, Homo sapiens
gaagacaaacagtaggaggatttggattaagcataaaggcaacagatcccctaatttgtggctgaaagatgttctcaaggaagaaggtgtctcttttctc

SEQ ID NO: 756514 - DNA, 87 bp, Homo sapiens
aagctttctcgaatttgctgaagatgtaatacaagttccaaggaacttagtaggccgtcactatggggctgtcagttgtgaaggttg

SEQ ID NO: 756515 - DNA, 50 bp, Homo sapiens
caatctcctcagggaaggggcagcacagaggatgaaattttgaacagatc

SEQ ID NO: 756516 - DNA, 75 bp, Homo sapiens
tcttctgcttcaaggagctggaaggctgggagccagatgacgaccccatccccaggatgggtgagttcaacgaga

SEQ ID NO: 756517 - DNA, 99 bp, Homo sapiens
gaaaaacttccgtaacatccaggttgatgaagctaatttattgacttggcaagggcttattgttcctgttgggggccgtcccgctcctaaggcaggaag

SEQ ID NO: 756518 - DNA, 100 bp, Homo sapiens
cttcgtacccacagtgcttcatgagagtgttatagttttgccgctggactcttccctcccttcccccaccccatcaggatgatatgagacttgaaagaag

SEQ ID NO: 756519 - DNA, 75 bp, Homo sapiens
tcgtctgccttcgcttcacggcgccgagccgcggtccgacctgattacatcaaccccagagccgtgcagctgggc

SEQ ID NO: 756520 - DNA, 75 bp, Homo sapiens
taagcccacatatcaggaccgagtggccccgccagctgatgttctaatcatgtcagataaagatgatattgagac

SEQ ID NO: 756521 - DNA, 73 bp, Homo sapiens
tgcactcggggagcagcaatgatctgttcacaaccgagatgagatatgagtacagttgtgaatttggctccgc

SEQ ID NO: 756522 - DNA, 50 bp, Homo sapiens
tggctctggggctcagggcatagtttgaagattctagtgttccagaaact

SEQ ID NO: 756523 - DNA, 100 bp, Homo sapiens
ctacggaggagaccgaggtggctatggaggcaaaatgggaggaaggaagagcgttcgcggagcgaacacaacttagtgaacatccagaagacccatgagc

SEQ ID NO: 756524 - DNA, 100 bp, Homo sapiens
ttccccggcccacagtgggggtgtgcaaacccgagagaactggctccagggttccttgaaaagaaaacaggtagttaacctatctcctgccaacagcaag

SEQ ID NO: 756525 - DNA, 75 bp, Homo sapiens
tccacgccgagggcaggacgaacttcaccaggtgtaccttgaaagacttttaacatacgcagagatagatatctg

SEQ ID NO: 756526 - DNA, 80 bp, Homo sapiens
caatatctgtcttcggtggactccttcggcagtccacccaccgccgccgcctcccagcgtgaatgcatctcagtccacgt

SEQ ID NO: 756527 - DNA, 102 bp, Homo sapiens
gtgaagacctccgaaggaccatagacatccacgacagcgatggcagttccagcagcagccaccagagcctcaagagcacagccaaatgggcggcatccctgg

SEQ ID NO: 756528 - DNA, 74 bp, Homo sapiens
attgacagtcacaattttgtaataagggagaaggatggcatccggaaggcccgtgaggtcctgatgcggttggg

SEQ ID NO: 756529 - DNA, 75 bp, Homo sapiens
cgcgagtgggagcaccaggatctcgggctcggaacgagactgcacgaatgagtccctggaacgccagatgcgtga

SEQ ID NO: 756530 - DNA, 74 bp, Homo sapiens
cacagccattctggcgttcctggtcaatcatgacttcacccctctggaggccctgtctctgcccctggtggtca

SEQ ID NO: 756531 - DNA, 100 bp, Homo sapiens
agattgaccacattgatcacagttgaagtaaagccatatgtgctggatgatcagatgtgtgatgagtgccagggcacacgctgtggtgggaagtttgccc

SEQ ID NO: 756532 - DNA, 87 bp, Homo sapiens
ggctccctcctcccagggccaggcgccgctcagaacggttctttagaagattgggatatagctgttcagaaaactgaaacccgatta

SEQ ID NO: 756533 - DNA, 83 bp, Homo sapiens
agccgatccagcctgcggagcctgtggggcagggatatggagaaggtggagcggcaggctgtcccccaggccaaccacacaga

SEQ ID NO: 756534 - DNA, 100 bp, Homo sapiens
ctttgaggacgatagagatcagtgggctttgactgcccagcatgcagtctccattcttagagacagggtctcttgagaggccgaggcaggcggatcactt

SEQ ID NO: 756535 - DNA, 83 bp, Homo sapiens
aactctcagagtaactgtcccctctgactaccatttctaaggaactgtggctgcaccatctgtcttcatcttcccgccatctg

SEQ ID NO: 756536 - DNA, 100 bp, Homo sapiens
tgcatttagttgcgctttcctgcctgcttctagcaaagtgaagtcaccctgctgagaaatgaagtggcacagctgaaacagcttcttctggctcataaag

SEQ ID NO: 756537 - DNA, 75 bp, Homo sapiens
tgcaccgggacctcaagtccagcaacactccgacagttagttaatatgtgcatcaacccagatccagagaagcga

SEQ ID NO: 756538 - DNA, 106 bp, Homo sapiens
ggagatccttgttgccgtcccttcgcctccttcaccgccgcagaccccttcaagttctagtcatggttggtgttcgaggaagagacattgttgttcttggtgtgga

SEQ ID NO: 756539 - DNA, 58 bp, Homo sapiens
gttgactaccaccagtggagtccaggatgaggtagcattgcatgcttgtggagtggca

SEQ ID NO: 756540 - DNA, 100 bp, Homo sapiens
aacttatacagaatggttttacaagtcacatcgatcagacaacaacatggcaggaccccaggaaggccatgctgtcccagatgaacgtcacagcccccac

SEQ ID NO: 756541 - DNA, 82 bp, Homo sapiens
cgggaactcgactcttggcgccaccgcctcatgcactgtgtagtttggtgccctggttgtcagatgttggaaagcagtagga

SEQ ID NO: 756542 - DNA, 82 bp, Homo sapiens
actggaccaagatcgagcccagcgtcaacttcctcaagtcgcccaaaggctactgcagcactggggtgtcagttgttggtcc

SEQ ID NO: 756543 - DNA, 82 bp, Homo sapiens
cccgggtcctcctagaaattccccccgaagaagactcccccacatctggacttcccaagtaagaagcggaagaggagccgct

SEQ ID NO: 756544 - DNA, 74 bp, Homo sapiens
accagcaacatctgtacagctcaggtaaatgaattggtggatgccagagatgtcggccttggtgcttggtttga

SEQ ID NO: 756545 - DNA, 89 bp, Homo sapiens
gacaacagctgtcgtctctgggactgtgaaacagcctgaggacaaagttctgggagatcggcattgactatgtaagtaacaacaacggc

SEQ ID NO: 756546 - DNA, 74 bp, Homo sapiens
ttactcgggagctggctgaagatggctactctggagttgagaatcgaagctgtaaaactacaaatggagcccaa

SEQ ID NO: 756547 - DNA, 82 bp, Homo sapiens
tctgagctttcccacctaaaaaattttcgttatggaaacaaaggacatgctttacatcgtcactgaatttgctaaaaatgga

SEQ ID NO: 756548 - DNA, 100 bp, Homo sapiens
agcctctcaagtagctggaactacagctggcccccaagaggaccctttccaagtccccagctgggggccctgtgtagacctggagtggacacgcccctcc

SEQ ID NO: 756549 - DNA, 100 bp, Homo sapiens
ataaacccaaggaaagtttttgaacttatgggaagcattgtcactgagattgcttgtggacgcagtccagagcgtgagtccattcacatcctgagtgttg

SEQ ID NO: 756550 - DNA, 97 bp, Homo sapiens
cttccagctgtttgaccgaacagtctgcgctcctcagaccaccggcaggtgaacagcctgatgcagaccgaggagtgcccacctatgctagacgcca

SEQ ID NO: 756551 - DNA, 90 bp, Homo sapiens
cagatgcaaacggacgggccaacgccgtggccagctccactgagagaaccccagctgataccccaatgtccttctttgactttgtggttg

SEQ ID NO: 756552 - DNA, 75 bp, Homo sapiens
gggaaaagaaactacagtcatcacaatggtctggatggaagaggaggctgcaaaatgggcccgggaagaagaaga

SEQ ID NO: 756553 - DNA, 97 bp, Homo sapiens
gcagtggagaaagccatcaagaaatttggaggcagtggctctgccaatgatcctgtgagtattcaggaatcactgttgcccctggggatccttgtcc

SEQ ID NO: 756554 - DNA, 100 bp, Homo sapiens
tggctaatggcatttacaggagatggagtgaaggtacctgagcgcaggaaccatggtcttcattgctgcctcagcattagcggaagtgccacgggccggc

SEQ ID NO: 756555 - DNA, 95 bp, Homo sapiens
gtgtttgaatgccatccttatacatggagttgatattacaaccagtgacactgcagggtccacatatagcctcagttacattagctgcttatgaa

SEQ ID NO: 756556 - DNA, 100 bp, Homo sapiens
ctacagctatcgccagtcgtcggccacgtcgtccttcggaggcctgggccacctgatctcctgcatcctcattaatggtgcccagtacttcaggcgcatc

SEQ ID NO: 756557 - DNA, 75 bp, Homo sapiens
catcattgtccaggcctgcagaggtgggacgtgtcctcggagtcggacaataacatcagacagatcaaccaggag

SEQ ID NO: 756558 - DNA, 50 bp, Homo sapiens
cggagaaaaagttgaagcgttataccatggtgaatccgggcagcagctcg

SEQ ID NO: 756559 - DNA, 88 bp, Homo sapiens
ctgtgacctgcatgtactgggggattcgcagggaggatgtcgggacaccccggaagctgggaaatgagatgcccgagtggtaaaagac

SEQ ID NO: 756560 - DNA, 75 bp, Homo sapiens
ggctagggcacggaccgcctaggccgagatgtgttcagagcaacattgttttgttgacacaagcatttagaagaa

SEQ ID NO: 756561 - DNA, 95 bp, Homo sapiens
gatctcatcctgtcctgctgcctccactactgcaaagacaaggctaaggacttcatgcccgccagcaaagctgctgatgcaaggaatcccctggg

SEQ ID NO: 756562 - DNA, 101 bp, Homo sapiens
cgtggctggaagacatggccactccagtcggtgttgagcacggcgagcagtctcaggcctttagtgatgatggcctatgaaaggaggttccctacatgtcc

SEQ ID NO: 756563 - DNA, 100 bp, Homo sapiens
ctcccaccgactgcctgtttaagatgctctctgtgtgggtatgtgtgtagccatcctccttctttgaagtctcatatgtggaaacatgcaagtgaccaaa

SEQ ID NO: 756564 - DNA, 82 bp, Homo sapiens
gccgcggcggcagcagcagtgagagaagaagaaaggagggcgcgggctaatgaccgagaatacaatgagaaattccagtatg

SEQ ID NO: 756565 - DNA, 100 bp, Homo sapiens
tagaggatgccgaggagaaaacagcaggcacccaagcgggcggcagcttgcccagtttcgacaaagaaaagctcagtcggatgggcagagtccttccaag

SEQ ID NO: 756566 - DNA, 75 bp, Homo sapiens
ggagtcggaagtcactatctcccgggtgaacggagctttcgcagctggagaagacggagtcttgctctgctgccc

SEQ ID NO: 756567 - DNA, 83 bp, Homo sapiens
ccccttcatgcccaaatcccggaaactccagcgtgtctccagccgtgcagaaaggacccaggagcgataacagtaaatcaaat

SEQ ID NO: 756568 - DNA, 75 bp, Homo sapiens
aggcgcgggcaggagcctggcgaggatgcaccttcccctgccttggaaaggtgggtttgctgagttctctcgttg

SEQ ID NO: 756569 - DNA, 82 bp, Homo sapiens
cgagtgtgagcggaaaggggcccggcgtctgcctcgagactgaagaccggtatcgagaaccttccctgcgaacttcagagga

SEQ ID NO: 756570 - DNA, 100 bp, Homo sapiens
ccagatggaagaaccattgttagtgaacgtggacaaagctgttgtctcagggagcacagaagcatatctttttcttgcacatcaaggaggccctcttggc

SEQ ID NO: 756571 - DNA, 50 bp, Homo sapiens
caagatccaatcccttgtccttaaaagaattaaacaaccaccatgtcgag

SEQ ID NO: 756572 - DNA, 82 bp, Homo sapiens
attgaacatggagccatgccagaacagtgctgaagctgctgaaagatggcagaagaagtggtggtagtagccaaatttgatt

SEQ ID NO: 756573 - DNA, 75 bp, Homo sapiens
agaagtgcccacatccggccaaatgggggctcaccagctgcccgtggacggagtgccgcagcaatggcgctgagt

SEQ ID NO: 756574 - DNA, 100 bp, Homo sapiens
cgagagagtaaaagccgaggaaaagtagaaattgatcagcaacaactaactcagcagcaacttaatggaaactagcattcctctgaatattgatttgctg

SEQ ID NO: 756575 - DNA, 99 bp, Homo sapiens
agaaagtgttagaaacagtagtggagaatcaaggtatccgttacagcactgatgtgagtgtagatgaagtaaaagctttggcttctctgatgacataca

SEQ ID NO: 756576 - DNA, 80 bp, Homo sapiens
caaggatctctgggtcctgcatttggccaccaagacctgggaacaagtcaaaaagacatcctcatgcaccgatggcggta

SEQ ID NO: 756577 - DNA, 95 bp, Homo sapiens
gtcctgctggatccttcctgcagtggctcggaaggagcccagcgaagtgccaacacctaagagacctcggggccgaccaaagggaagcaaaaaca

SEQ ID NO: 756578 - DNA, 101 bp, Homo sapiens
gggaccggcggcgctggaggagcgaggcagctgtactaggactgggaacggttgcctttccccatcttcctggttctgctccttcgtggcctagtcttgtg

SEQ ID NO: 756579 - DNA, 90 bp, Homo sapiens
gcatccacgacctggaggacgacctggagatgtcgtccgatgccagtgatgccagtggtgaggaggttctcctgtgcctcctgttggctc

SEQ ID NO: 756580 - DNA, 75 bp, Homo sapiens
cgcaaaggggatgtcctgcacatgcactacacggtgtgatgaatgcagactctgctaccattttggctgtttgga

SEQ ID NO: 756581 - DNA, 101 bp, Homo sapiens
gggcagtgaaacaaggcttcttgtatcttcagcagcagcagacgtttggaaagctctagaggacaaaatcccagtccttggcacaaactcaggaaatggaa

SEQ ID NO: 756582 - DNA, 75 bp, Homo sapiens
ttcaatgagtaaacatattcctgccctgggaggagcggggacactgaggacctctctccaaattggcctctcaac

SEQ ID NO: 756583 - DNA, 75 bp, Homo sapiens
gaactggcagagctcaagaagaaagtcacagccaaaattgatcatgggaacagatttggattcctagacttgccc

SEQ ID NO: 756584 - DNA, 82 bp, Homo sapiens
cgagaggccgtgcgggacgcgggcgccaggaccggccgaacgcagaggtgtggacactgccagcggctgcagccgacttgga

SEQ ID NO: 756585 - DNA, 51 bp, Homo sapiens
tgcatcattttttcaaaatagggccatttgtgtaggaccagaaaacatgca

SEQ ID NO: 756586 - DNA, 90 bp, Homo sapiens
cagccaggaggactcttcggacggggacagagagctgatgaagctgccaccagcccgctcacggcagtcttcagcctctcccgcagcctg

SEQ ID NO: 756587 - DNA, 86 bp, Homo sapiens
ccacaaaactagcatcctcctggaggagctcggattgtgaagaggtctcttgaagtttggggtagtcaagaagcattagaagaagc

SEQ ID NO: 756588 - DNA, 100 bp, Homo sapiens
acctctcgtacatcggcgagggcgcctacggcatggtgtgcgagaaccctctgcccacagtggagattgccatccggaacacgggcgatgcggaccagtg

SEQ ID NO: 756589 - DNA, 75 bp, Homo sapiens
ctcgatccgcctgcctgcgcacctgcccgctgtacaaccagccctccgacacccggcagtatcatgagaacatca

SEQ ID NO: 756590 - DNA, 83 bp, Homo sapiens
agtctgtccaccatcatccttttgggcttgatcatcgcctaccacacacgtgaagtccaggaatactcccccagttgcaagag

SEQ ID NO: 756591 - DNA, 102 bp, Homo sapiens
tgggaatggagaagtagactttaaagctcagaggatgaaacaggaaactgagtcataaaacactactacaaacaagcccaaggattttatcccagattttca

SEQ ID NO: 756592 - DNA, 75 bp, Homo sapiens
ccaagaacccaccaattccggacacgagatactttgtgctcgaggacgggatccttcattatgcaacaacccggc

SEQ ID NO: 756593 - DNA, 100 bp, Homo sapiens
tgagacttcgagagccctgtcatcttctaaacagagcagcagcagcagagatgataacatgtttcagaatgcagtaatagtggccttgtcttcaaaatca

SEQ ID NO: 756594 - DNA, 76 bp, Homo sapiens
ggttgcttctggcggccatggtgttgctgctgtactccttctccgtatcagcagcgtcgccagcaggagaatatgc

SEQ ID NO: 756595 - DNA, 100 bp, Homo sapiens
gtctttctcagcaccttggcgaagccttgggtttctttcttaaaggactgatttttagaactccacatttgagaaatgaaagctcattagcatctacact

SEQ ID NO: 756596 - DNA, 101 bp, Homo sapiens
tcagcgtctgtcgcgctgggacccacactggcttttaaggaggacacccggacacctggaagctgggaaatgaaaagagtagttgaacagctacggaagaa

SEQ ID NO: 756597 - DNA, 100 bp, Homo sapiens
actctttagcaatgacaggttgaaagtgatgttgcacctgtaaccatctttttatgggtggagcagagagtcaatccctgcagccaccctgcagccagcc

SEQ ID NO: 756598 - DNA, 90 bp, Homo sapiens
cagtgtagcatctcttccacaatcagacaggtcctcatccagctcacaggaaagtctcaagccagaagcctgtcttagatgttcatgcag

SEQ ID NO: 756599 - DNA, 100 bp, Homo sapiens
tcctcctgaagtgtctttggtccaacgttgttccagtcaggtgccactctttgtgcaaattcaccacaaatggcgaagaatgtatgtaggagaatgtcaa

SEQ ID NO: 756600 - DNA, 100 bp, Homo sapiens
acgcagatgtggacttgaaagaagctgcagcggaggaaggcgagggaagcggaggtgccgctggtgctcctggagaacgaggcagaaccggtccactggg

SEQ ID NO: 756601 - DNA, 82 bp, Homo sapiens
ctgtggagacacggccagatctgccctccatgggaatgtaagacggacttagatattgcatacaaatttggaaaaactgtgg

SEQ ID NO: 756602 - DNA, 90 bp, Homo sapiens
gtaacaacgtctcgaactttctatgtgcaggagtctcaggagcaggggctgcggcagaggctgctggacgagcagttcgcagtgttgcgg

SEQ ID NO: 756603 - DNA, 75 bp, Homo sapiens
aggaatgcttactgttgcgtggttcgttattaacaggattttctgccgtctcttggcaaaaatggcaaataatga

SEQ ID NO: 756604 - DNA, 75 bp, Homo sapiens
aggaggagctgcaattgatgatattgaatttaaaaactgcacaactgcttctacagatgacagtgcagctgagaa

SEQ ID NO: 756605 - DNA, 74 bp, Homo sapiens
gaaaacaacttcgagggcagagtcccgcggcagtgctggtggccatggttcccgtagccagaaggagttgccca

SEQ ID NO: 756606 - DNA, 75 bp, Homo sapiens
cgggacaccccggaagctgggaaatgttcatagccctgatgaagcaagttactctgctctcctaataaatgcaag

SEQ ID NO: 756607 - DNA, 75 bp, Homo sapiens
aagttgactaccaccagtggagtccaggatgagtcttgctggaggtttgttaaatttatttatcttttcaaaaac

SEQ ID NO: 756608 - DNA, 87 bp, Homo sapiens
gtgtctcctgcttccgcacccccttcgggcctctgtcctcaaggttggatggcaagcatgtggtgtttggcaaagtgaaagaaggca

SEQ ID NO: 756609 - DNA, 100 bp, Homo sapiens
cagccacaaggggtcttcctgtggccctcaaacaaaaaatcactgcattacatcagcagctcaaaagccaaaagtctctgagaacgactttgaagatctg

SEQ ID NO: 756610 - DNA, 101 bp, Homo sapiens
acattgtaagaggtgacaacgtaatcgcctaccagaggaatgacgatgatgaagaggaggcagcccgggaacggcgccgccgagcccgacaggaacggctg

SEQ ID NO: 756611 - DNA, 97 bp, Homo sapiens
tggctgtgacctgacggagtatctggaaagctcgggacaggatgaaaccaatagagccatggcgactccctctgctgccttcgaggcccttatgaat

SEQ ID NO: 756612 - DNA, 101 bp, Homo sapiens
ccctggaagagtcgctggccgaagccacctccccgtgcaagatcctcaagtgcaactctgagttctggagcgccacgtcgggcagccacgccccagcctca

SEQ ID NO: 756613 - DNA, 50 bp, Homo sapiens
tgaacctggaagttgtgctttttaaggagctgtgactgatgagaattaaa

SEQ ID NO: 756614 - DNA, 100 bp, Homo sapiens
gccagatagaaaacggcgagagtgggcgagaacgtccactgcgggccggcgaaagctggacctcccggacatattgtctaccctaagcaccaggctggac

SEQ ID NO: 756615 - DNA, 75 bp, Homo sapiens
ggagtgcgtgggggaccggctgttggcggggctgggttacgacccctacaaccctgagctgcccaagccccccgc

SEQ ID NO: 756616 - DNA, 100 bp, Homo sapiens
ctcctcttttgacttggactatgactttcaacgggactattatgataggaattgaatgatctggcacgggaccctccagcacagtgttcagcaggtcctg

SEQ ID NO: 756617 - DNA, 83 bp, Homo sapiens
ccaacctcaaggacacctcctccaaggtcatccagtccgtcgctaagttgttccaagttgttgggaaaacagacgacacactt

SEQ ID NO: 756618 - DNA, 100 bp, Homo sapiens
ctcaggcgtgcgcggacggtgtgcggatcattggttgcagagtgaggagagatccccctaactccaccgaacgatacacacgttggatcaaccagctgac

SEQ ID NO: 756619 - DNA, 82 bp, Homo sapiens
ctggagcctgacgagctggcgggtgacttaagagattaaaattaatttggttgctgttggttctgaacaaataatgagttct

SEQ ID NO: 756620 - DNA, 100 bp, Homo sapiens
gagcaaagtgcgtgaggagtttaaggagctgaaagcgcgggacgactggagtgagcactggcctgggagtctgaagattgtgccttcagacctacttcgt

SEQ ID NO: 756621 - DNA, 50 bp, Homo sapiens
caggttccagcgcccggcggcccaggtactccaaagattcaggtttactc

SEQ ID NO: 756622 - DNA, 98 bp, Homo sapiens
tatcttcaagactgcctcgatgccatccagcaagacttcgtgatttttaacagagaaaagccttctggcggccgcccctggtttctcctggggggtga

SEQ ID NO: 756623 - DNA, 74 bp, Homo sapiens
cgaaagagcactggactccggaagctattgacctgaaaagtggttctggaaaagtgtaccaaggccctgcaaaa

SEQ ID NO: 756624 - DNA, 82 bp, Homo sapiens
tcagcaagaacgggaacaaaactctggtggatgaaaatactaggaaaagtttatttaagttacgttctacatgggatgaaat

SEQ ID NO: 756625 - DNA, 74 bp, Homo sapiens
gaacacctcactattgatggtgtagcgctttaggggaaggttgccatcaagattatcgacaaaacccagctgaa

SEQ ID NO: 756626 - DNA, 100 bp, Homo sapiens
tttcaagagacaaggtttctcctatcagggtcgggcttccagttacatggacacagaacagtatgaagaagcagtacgagactatgaaaaagtataccag

SEQ ID NO: 756627 - DNA, 96 bp, Homo sapiens
gagtgagagatggaacccgaagaagaaaggattcgttacagccagagattgtgccggtggtggtgtgcacattgagccccggtatagacagttccc

SEQ ID NO: 756628 - DNA, 100 bp, Homo sapiens
ggcggatcggctcacgcagcttcaggacgctgtgaattcgattaaaaggaatcttagagcgtggaaaagaagaattggctgaagctgagattataaaaga

SEQ ID NO: 756629 - DNA, 96 bp, Homo sapiens
ggtttgctcgaaagcccttctgtgttatagctctattccaattgattacaacctgtatcgaaaattctggtcacttcaggattacttcaggaaccc

SEQ ID NO: 756630 - DNA, 50 bp, Homo sapiens
tgtcgacaagggctacaagaaccagccaaaacaacttcccgacaagtggc

SEQ ID NO: 756631 - DNA, 99 bp, Homo sapiens
gagaaggtgtacaacacccgccatcagggccacccagtgctcctgcagaagatcgttcaggaacacccgacagcattgcttcctcctcctcagcagctc

SEQ ID NO: 756632 - DNA, 74 bp, Homo sapiens
ggtcagccccatgggcacccgctccaccctgctggcagccaggaggttccccaatacaactcatgagggtttca

SEQ ID NO: 756633 - DNA, 88 bp, Homo sapiens
cttcgccccgggccccccagcatgaagaccccggcggacacaggttaatttggagtggcccctggagtcagtttcctacaccatccga

SEQ ID NO: 756634 - DNA, 151 bp, Homo sapiens
tccctggccacagagctcaggacagggctgaggaaccatgtctccatccccgaccgccctcttctgtcttggtttttcgttggaatatacgttgcacatttatggcgattctgagtgtgagggcagacttctgccaggctcagcacagcat

SEQ ID NO: 756635 - DNA, 90 bp, Homo sapiens
gatttggaaatgtcatccgatggcacaatcaggagttaaagttcctcgtaattttcgcttgttggaagaacttgaagaaggacaaaaagg

SEQ ID NO: 756636 - DNA, 73 bp, Homo sapiens
tcttgtctttactgggaagctggagagtcacagtctagtagaagaaaggcaatgcatgaaccattgcaaactt

SEQ ID NO: 756637 - DNA, 96 bp, Homo sapiens
cttattgctacagatgtagcctcccgtgggctaggtctctaattaacagaagatggcaaagcccagccacagcagctatgtccttcagcagctaaa

SEQ ID NO: 756638 - DNA, 105 bp, Homo sapiens
cgttccccgccaaccgcaaccattgacgccatgtcgggttattcgagtgaccgagaccgcggccgggaccgaggtcaccttcaggccattcagaggaggaaagag

SEQ ID NO: 756639 - DNA, 100 bp, Homo sapiens
tgtgaagatacataagatcgtagccagacccccagcatatagcactttctacattgtgggtttaatattatcaatgcagataccttttgtgggattccag

SEQ ID NO: 756640 - DNA, 74 bp, Homo sapiens
tctcttcaatcatgagagtcccagaagagccacagctccggagcaagccccagccccggcccggccataccagg

SEQ ID NO: 756641 - DNA, 90 bp, Homo sapiens
gatggtgttacctggagcttaaaaagctgcacgcaagtgttaaacttctggtattaatctctggagaagacacatccacagttagcactt

SEQ ID NO: 756642 - DNA, 75 bp, Homo sapiens
ctactacatggacgtctggggcaaagggaccacggtcaccgtctcctcagagccttcacgaagtcagtaaaagtg

SEQ ID NO: 756643 - DNA, 90 bp, Homo sapiens
gctgtcatgatcgtgatggtgccgtcgctcatcaagcagcaggtccttaagccgctgtacaaccagccctccgacacccggcagtatcat

SEQ ID NO: 756644 - DNA, 100 bp, Homo sapiens
agaaatcattatcttagccaccaggatgctggatgagtactttgaggagcagatgaaggagatcatccgaatgtgttcccaccaccgccagaccatgctc

SEQ ID NO: 756645 - DNA, 99 bp, Homo sapiens
caggactctgcaaattccctaaagtaggaggaaaaatgaccatgtccaagggatccagcaccggctcctcctccggcaaccacggtgggagcggcggag

SEQ ID NO: 756646 - DNA, 96 bp, Homo sapiens
ctaaggacgagctgatcaagtatatgactgaagaagcttgaagtacatctggattccttatgtgtgcatgttagcagcatttggtgtatgttctcc

SEQ ID NO: 756647 - DNA, 74 bp, Homo sapiens
cgaggccggacgcacctctgtttgggggtcctcagttctgtggctcctgatggatctgagaagatggacgtgga

SEQ ID NO: 756648 - DNA, 95 bp, Homo sapiens
ctttcttctagcaaatgcctgcaatggactagctctgctacagaacaccaaggttcaaaccttgtactactcagctgatcacaagctgcttgatg

SEQ ID NO: 756649 - DNA, 100 bp, Homo sapiens
gttagtaactttggaaaacagtccatgtattacaccagagttgcttcgtatatttcagaatatgtcaccacttcttgagatggagtttcgctcttgttgc

SEQ ID NO: 756650 - DNA, 101 bp, Homo sapiens
cctttgttcaccgccaaccccttcgagcaagacgtgggaagaggcagaaatccaggcagaacttgaacgtttggaaagagtcagaaatcttcacatacgtg

SEQ ID NO: 756651 - DNA, 83 bp, Homo sapiens
ccccgaggtgtccagcatcaaccaggaggcgttggtgctcacggccaaggccacgcgacttcctgattctcccaggattcata

SEQ ID NO: 756652 - DNA, 82 bp, Homo sapiens
gcagctggcggacccgtggcagaagatggctgtggagagcccgtccgacagcgctgaggacctgaaggagaagaaggagaag

SEQ ID NO: 756653 - DNA, 43 bp, Homo sapiens
gcctcgggagtcggcctgtgagagatgccctgcccagagagga

SEQ ID NO: 756654 - DNA, 82 bp, Homo sapiens
cgtcagcactcagcgcgggccgagagtttcattctgtcgcccaggctggagtgcaatggcgcgatctcggctcactgcaacc

SEQ ID NO: 756655 - DNA, 58 bp, Homo sapiens
actctatactctcagtggcttagagtgtgaacatggctacgcctcttcattcccgtcc

SEQ ID NO: 756656 - DNA, 100 bp, Homo sapiens
ctcagcgactcttctgacctccgcgcgacgtacccgccgccgccgttggctggaggattggtccaaaggaagattttttccattgtttgaaatgtaactt

SEQ ID NO: 756657 - DNA, 75 bp, Homo sapiens
aggccggggagccgacgcctggtgtttcaggcctcacctgaagatcatgaaaaatacggtggggatccacagaac

SEQ ID NO: 756658 - DNA, 98 bp, Homo sapiens
tgactttcacagctcagtacctaagaggcggaaacctgacactcttgcacttcttgctgggtttgaaaactgcagctgatgatgatctggtggctgac

SEQ ID NO: 756659 - DNA, 82 bp, Homo sapiens
cggccgggagcccgccgcgctggtagcggtctcggcgcggaagatggccggcggcgtggacggccccatcgggatcccgttc

SEQ ID NO: 756660 - DNA, 90 bp, Homo sapiens
ccagcagatggcggatgccctgcagtacctgcagaaggtctctggagacatcttcagcaggtggccaaggtggaatacgtcaggaagaag

SEQ ID NO: 756661 - DNA, 82 bp, Homo sapiens
ttgaagccgcctctgtattacttaccaggttgtgcagcctgactctgaagaagctggtggtcttcaaggagctggagaagga

SEQ ID NO: 756662 - DNA, 75 bp, Homo sapiens
cgggagccctagagaggacaccgggacacccagaagccgggaaatgaaaagtcctccatacattttctccccaat

SEQ ID NO: 756663 - DNA, 75 bp, Homo sapiens
ggctggaacatcacatagtctggcatggactgctcttcctagggacagtttagaagaccaaactggacaatggac

SEQ ID NO: 756664 - DNA, 82 bp, Homo sapiens
aatccacatacttaccttaatccacctaacatggagactggtatgggtgagaaggactggcagaaatacgagactgctcggc

SEQ ID NO: 756665 - DNA, 75 bp, Homo sapiens
gtctttctaaaatagaacgtgcaaatgcctgcaactcaatgtatggtggcatgagaggcatgaagggattggtct

SEQ ID NO: 756666 - DNA, 75 bp, Homo sapiens
gttttttcctgtatgaagcggttggcaccactgaagtgaccgaatgagggattcacctacgctcttaccagctgg

SEQ ID NO: 756667 - DNA, 99 bp, Homo sapiens
gtctacagagaaaaagaagatatgtatgacgagattattgagttaaagaaggtggattcaccaatgaacttgaagcatcctcatgacctagtcatatta

SEQ ID NO: 756668 - DNA, 46 bp, Homo sapiens
ccacccctgaagaaattgcacagggtatgagtattatagaacaatt

SEQ ID NO: 756669 - DNA, 82 bp, Homo sapiens
tcggaagcatacctggatggaggatgctgacagtgaatggtcctcgtccgaagtgagaatgggcagttgttaatgattcctc

SEQ ID NO: 756670 - DNA, 100 bp, Homo sapiens
ggagccatggaccaggaaggaagacctctcccaagacacctgtccaggcagccaagaacttgatgaatgctgtggtgcagacagtgaaggcatcctacgt

SEQ ID NO: 756671 - DNA, 100 bp, Homo sapiens
tcccagcgctgcgcaggacttctcctggcggcgctgcggatccagggggtcggctgccaggtacaggagaaaatgcagaagtctccatggacgtttccct

SEQ ID NO: 756672 - DNA, 83 bp, Homo sapiens
aagggaccaaggtggaaatcaaacgtcccaaaccagttgtcttcctgcaacatggcttgctggcagattctagtaactgggtc

SEQ ID NO: 756673 - DNA, 82 bp, Homo sapiens
aaacaatggcatttacagaaagagtcaacagcagtggcaacagggttttggccaaattgggcgagggcacaaaataaccact

SEQ ID NO: 756674 - DNA, 76 bp, Homo sapiens
acgtcgagcgtgcccgagacccgaggatgggagaggacagaagaactcagatgccaagtgtgtggctgaactgcag

SEQ ID NO: 756675 - DNA, 100 bp, Homo sapiens
cccccggcaccgcgcctgctgccgggttgcgctccgtgcacctcttgcggctcatatgttagatttgatatcattcgaaggatcctaaccaaggtttttg

SEQ ID NO: 756676 - DNA, 82 bp, Homo sapiens
gcactctgggcgaaaattggatgtgaaaatgaagccagaccgagcccaggaacagcaaagtttgatacacaccaaccaggct

SEQ ID NO: 756677 - DNA, 102 bp, Homo sapiens
cagaatgagctggagagactgaaagagcatcctgaggttagcattacacttctcccagtggagcccatgacttctgatcaggacgctaaggttgtggctgaa

SEQ ID NO: 756678 - DNA, 74 bp, Homo sapiens
ctgggacttcccgtccgcggcgtggagggtgccttcttcatcccctacctcgtcttcctctttacctgtggcat

SEQ ID NO: 756679 - DNA, 74 bp, Homo sapiens
caggctcaaggagcagtatcaattctgttgatgtatcatctttatcagaaagtgaggagtcccaggactcatcc

SEQ ID NO: 756680 - DNA, 74 bp, Homo sapiens
gggaagagacaggaagatggtgcccagattcccaggactccggctctctctgcttctgtttccggtggctgctc

SEQ ID NO: 756681 - DNA, 100 bp, Homo sapiens
agaataccaggcttgaattgctgtggtcagggaagagcctgctacagatggtcaaaaagatctgggagcacagatggtgtatttggaccagttaaaaacc

SEQ ID NO: 756682 - DNA, 90 bp, Homo sapiens
ctctcccaggccacaagacatttcctgctcggaaccttgtttactaattagccactcagtacacatgcatgttgcttagatatttgttag

SEQ ID NO: 756683 - DNA, 83 bp, Homo sapiens
ctccaccacgcagagaatccagcctgcacccagtcagcttgaagagtttcaaatggaccctaccactgagaaatcaagatggc

SEQ ID NO: 756684 - DNA, 90 bp, Homo sapiens
ccgagacgttgttgagtcccctgtgtcctcttctggttctgtgatatgagcaacaatggaccagaagattttatctctagcagcagaaaa

SEQ ID NO: 756685 - DNA, 100 bp, Homo sapiens
tccgagacactaaaaccagccacttcactgtggccctgcagaaacttgaagggtcaaagtgcaaagggcagcttttgatttttggggcaaccaactggga

SEQ ID NO: 756686 - DNA, 80 bp, Homo sapiens
ccgctcggtgcccactaacaaggccctgggaggagcggggacactgaggacctctctccaaattggcctctcaactcaca

SEQ ID NO: 756687 - DNA, 100 bp, Homo sapiens
ctcagacctgccaatttaccagagataattgataacaccctgtaacagctgaagtcacaatggcttcagcctttcgcctttctttgaaaccaaaggtcag

SEQ ID NO: 756688 - DNA, 82 bp, Homo sapiens
gctcgcccagctcgcccagcgtccgccgcgcctcggccaaggacgcgtgaccaaaaccaaagacggccatgaagtgagatcg

SEQ ID NO: 756689 - DNA, 82 bp, Homo sapiens
ccgcgcgcagggcctgcagcgggagctggacggcgagcgcgagcggcgcgagaaatctgcagatctccaggggagcccacca

SEQ ID NO: 756690 - DNA, 75 bp, Homo sapiens
tcctggatcagtttctttgtcatgtagccaagactggagaaacaatgtgctggagaatctggtaaaagcaccatt

SEQ ID NO: 756691 - DNA, 100 bp, Homo sapiens
cattgaccccaaactgcaagaatacctcggcaaattccgacgtcttgaagacttccgagtagattgtgctacatctcagccttggtcttgtcctgcttac

SEQ ID NO: 756692 - DNA, 100 bp, Homo sapiens
cttccaggacatcatgcaaaagcaaagaccagaaagagtgtctcatcttcttcaagataacttgccaaaataaatacatgctacaggatttaactatcag

SEQ ID NO: 756693 - DNA, 73 bp, Homo sapiens
cggcccagtgcagggcatcatcaatttcgagcagaagatgactgtccaagtgcctccaaagtgtacaaagcat

SEQ ID NO: 756694 - DNA, 75 bp, Homo sapiens
tgcttcctgagccagtgcggggcctggcatggagtactggctgtgatcgaacttctcaaccctcagagacttaga

SEQ ID NO: 756695 - DNA, 89 bp, Homo sapiens
ggtaggggtcgctgggtccctcctccggcttcccgcaatgaggagggcccttcacagaaccggggtcacacagcggcagtgataaagag

SEQ ID NO: 756696 - DNA, 100 bp, Homo sapiens
cgccgcacaagatcgccggagtcatattatcgacgtagttaaagcccactagcctaaagccgggcggactgcgggcaccttctctctgattattgaagct

SEQ ID NO: 756697 - DNA, 100 bp, Homo sapiens
taacccaaagatcgtgcagctcttggcaggagtagctgatcaaaccaaggatggaagctgtacattggaatgcgtttacagtcattgtaatggaagcaaa

SEQ ID NO: 756698 - DNA, 100 bp, Homo sapiens
agatgtggtgatggggcattcttgctaacaacgtgaatccgccatactacatcccgctggttgagctggtcccccacccggagacggcccctacgacagt

SEQ ID NO: 756699 - DNA, 82 bp, Homo sapiens
aacaccgttcccccagccgggctggaaagccatcaccaagtcgggcctccagcacctggccccccctccgcccacccctggg

SEQ ID NO: 756700 - DNA, 90 bp, Homo sapiens
cggtaggctgggaccataacacaagatctccagcaccctgccggtggcactactgagagacgaggtgccagggtggttcctgaaagtgcc

SEQ ID NO: 756701 - DNA, 75 bp, Homo sapiens
agcgagaagaaggccaaacacagcatcgacggcatcctgagcgagcgagggctctgcctgccacaattcatgagc

SEQ ID NO: 756702 - DNA, 83 bp, Homo sapiens
taatgaaagagaaaatgttgaatatatagaaagagaagaatctgatggtgaatatgatgaggatcaaagttctgatcgtacca

SEQ ID NO: 756703 - DNA, 117 bp, Homo sapiens
gtccctgtgtgatgcttttgatatctggggccaagggacaatggtcaccgtctcttcagattccagctaagaaagagtcttgtccaaacactggaagagacaaagaccacctgttga

SEQ ID NO: 756704 - DNA, 89 bp, Homo sapiens
cgtgacgcggcctcctccgcgcctcgcggcatggcgtcggaggggccgcgggagcccgaaagcgaggtcagctggccgccggcacctgt

SEQ ID NO: 756705 - DNA, 76 bp, Homo sapiens
cagattcgcagtggtcgcttcttctccttggtgccaggaccattgacaccagaaatggaggcacggcaggctacac

SEQ ID NO: 756706 - DNA, 78 bp, Homo sapiens
agatcctcacgagatacgcgtttcccctggctcacagtctgctcaagactgcagtgcagatgacgacaacttccttgt

SEQ ID NO: 756707 - DNA, 100 bp, Homo sapiens
ggcaaacattggtgggcaccgatcttcctgttcattctgcaagaacccaagagaaggaaaaccgtcttcagatacagtccctaagcccaagagagcccca

SEQ ID NO: 756708 - DNA, 83 bp, Homo sapiens
gaaatttggagtgtgcgtgcgcgccgagcgagggagacgctgttgcggcagctggagacgaaccagctggacatggacgccac

SEQ ID NO: 756709 - DNA, 105 bp, Homo sapiens
ggcaaatcaagcctagtgcttcgttttgtgaaaggccaatttcatgaatttcaagagagtaccattggggctgctcatgtttcccacctggagaatgtgtcagag

SEQ ID NO: 756710 - DNA, 101 bp, Homo sapiens
gcggcggcggcggacgagggccccgcccgagaggagccctcccaggcccaatacttcaaagcatcctacctctgctcaatatatattacttggagaggatt

SEQ ID NO: 756711 - DNA, 100 bp, Homo sapiens
gcagagacgaagtgacctcgatcgcttttggctagagacatggccacagatgtctttaattccaaaaacctggccgttcaggcacaaaagaagatcttgg

SEQ ID NO: 756712 - DNA, 98 bp, Homo sapiens
aaagcattacaaatatgaagaggcattatttatgaccttttctatggaaagatatggacatttctggaattacagagccccctctacattgagcacaa

SEQ ID NO: 756713 - DNA, 75 bp, Homo sapiens
cgccgctgctggttgctgtccctggtcctcagaaacgtgaagaattatgatctctggagaaggacaggaaatcac

SEQ ID NO: 756714 - DNA, 75 bp, Homo sapiens
ctgctgtcttcgtgggaggcgccgtgagttcgccgctggtggctccggggggctcgagttggtagaatagatgct

SEQ ID NO: 756715 - DNA, 100 bp, Homo sapiens
atgtcagccttcccagtagctggaactacaggtttgaagatcagcttcagcaatggttgtctgaagactcaggagcatttacggatttaacttcccttcc

SEQ ID NO: 756716 - DNA, 75 bp, Homo sapiens
cacggacaacccctacccatgaggccctgatggaaaacacaaaggatctggttggagtgcaacggtgcgatctcg

SEQ ID NO: 756717 - DNA, 75 bp, Homo sapiens
atctgctggtaaattcctcaggaaaggctcacaggattcactggcaaaatttgctggcagaaaactgaaagactg

SEQ ID NO: 756718 - DNA, 75 bp, Homo sapiens
cgaagactgcatcgccaagatcatggaaaatcctgccttgcttcgttgggcctatgcaagaacaataaatgtcta

SEQ ID NO: 756719 - DNA, 51 bp, Homo sapiens
ctcctgcatctgcctccccatgatcagttccatgacaagaccccttatacg

SEQ ID NO: 756720 - DNA, 96 bp, Homo sapiens
tgataggctgcgctaccggaatgtcatccagcgagtgattaggtcatcctgtacagttctacagcatgaataggcctgcctctcgccatactcccc

SEQ ID NO: 756721 - DNA, 82 bp, Homo sapiens
gtccagagaaggtggaggaatcctgatactgagcgggggatatgagactttctactcggaatatcctgagtgttgcgtggat

SEQ ID NO: 756722 - DNA, 90 bp, Homo sapiens
ggacgtccggcttcggagcgggagtgttcgttgtgccagcgactaaaaagagatgaaggatttgggggcagagcacttggcaggtcatga

SEQ ID NO: 756723 - DNA, 75 bp, Homo sapiens
ttgaccaatgagagatatttgaaggtaaaagtgctgtttgtacgcaaccttgccaatactgtaacagaagagatt

SEQ ID NO: 756724 - DNA, 100 bp, Homo sapiens
gagggatgcacctatggattccattgaatgggctgaagtggtgatcaatgtgaacaatattctcaaggctcccagccccattgccaataccttcctccac

SEQ ID NO: 756725 - DNA, 98 bp, Homo sapiens
gcgggttttgggccgaggcctgggttacaagcagcaagtgcgcggttggggccactgcgaggccgttttaggtgtgatgaatgcagactctgctacca

SEQ ID NO: 756726 - DNA, 100 bp, Homo sapiens
caaaaccatacagggctatgatgctattgtggttgaacaatggacagtcctggaagtgactaataaaggtaccagaagaatatggctgcacaaataccag

SEQ ID NO: 756727 - DNA, 73 bp, Homo sapiens
gatgaccggggtgtgccggggggaaaggggcagcatgatggtctgagatggcgggcagggctgggcagcggcc

SEQ ID NO: 756728 - DNA, 83 bp, Homo sapiens
cgctgggagagaggtacctctccttttccctctccctttccctaaggtatgatctcgtgaaatcttgagagaaactgaatgac

SEQ ID NO: 756729 - DNA, 73 bp, Homo sapiens
tgctcaatggagagaaggaaagtcaatcgtaggaagaacacagtacaggttgctccttgagggcaggacagtt

SEQ ID NO: 756730 - DNA, 101 bp, Homo sapiens
cgcgacctcggggcccaggatgcccccgccatcgccttcggtggaaggtgattctgtccgagtcgcgcacaggagctgaggtgcccttcttcgagacctgg

SEQ ID NO: 756731 - DNA, 100 bp, Homo sapiens
ctctgctgcctgcattgagggatgggtcagagaatttctgaatgaagaaaacaaaggtcttgatgttctagtggaatatctctcatttgcacagtacgcg

SEQ ID NO: 756732 - DNA, 88 bp, Homo sapiens
accagaatactacgttcagctaaattaagcgtttctggtgaaccaggctgttaagtgcaccagaaaaataaatttagaacagtgtgaa

SEQ ID NO: 756733 - DNA, 102 bp, Homo sapiens
tgatcccccacgactttgggatgaagaagcctccgctcctgaacaatgcagacagtgtgcaggtctttggcatgatcttcacgtgctgcctgtacaggagtc

SEQ ID NO: 756734 - DNA, 100 bp, Homo sapiens
tgacgtaatcgcgctcaccaagcaggtgctgaaaggctcccggagctccgagggcttgctctcaattttgcgcaagttgaaaagtgcaccagaccaggag

SEQ ID NO: 756735 - DNA, 100 bp, Homo sapiens
ctaacggcatcttcccgaggcccagaatccaccgtcaggcataaattgattattcctcgcccacatctgtgccaggttgtatcagagtaagatggacggt

SEQ ID NO: 756736 - DNA, 80 bp, Homo sapiens
ttcttcgttctgtgcggcgacctcatccacgccatgccagatgacgtccggttgtttgccttcgtgcgcttcaccaccgg

SEQ ID NO: 756737 - DNA, 90 bp, Homo sapiens
tgtggaaccctccattctgtggatcagaccatcaagtgcctgctgatccaccctaaccccgagtctgcactcaacgaggaggcgggccgc

SEQ ID NO: 756738 - DNA, 100 bp, Homo sapiens
aaattattcacatgcttgaatactgtggagtcgtagatgtatccaaaggaattgttaatgcagttaaggatcctgatgccaatgggaaatcctttgcttt

SEQ ID NO: 756739 - DNA, 100 bp, Homo sapiens
cggggagagcgcagaagcgtctctgggtcgtggccctgaagttcatcccaaaattggggcgctcagagaaggagctgaggaatttgcaacgagagattga

SEQ ID NO: 756740 - DNA, 74 bp, Homo sapiens
tcgggcggggcggcggcgacgcggacctgcggactagcgaacccggaggtagatgacattaatgctgataagaa

SEQ ID NO: 756741 - DNA, 80 bp, Homo sapiens
tcaccctgggcaaggagttcaaagaaggacacagctactactacatctgactcagaattcatgattgaagaaatgcaggt

SEQ ID NO: 756742 - DNA, 90 bp, Homo sapiens
gaaattcttaacttcttccaaggttaccaggtctcctctgagcctccggcctccataagacccaaaacagatgacacctcttcccagtcc

SEQ ID NO: 756743 - DNA, 100 bp, Homo sapiens
aggattcttgatgtttcttctgagctccagggtcaggcagtatgattgaagtttctaagccagctactggtcagaagttatatgtaaggctctttcaacg

SEQ ID NO: 756744 - DNA, 75 bp, Homo sapiens
tcggggaaatggctgcgagaccctagaggcctgcggcctgcggatttgcagatttacagaatggctgcacattaa

SEQ ID NO: 756745 - DNA, 100 bp, Homo sapiens
gggcgtgcgcgtcctcctccccaggcccgccgcctccctgccaagtccaagtggtaagaagttcagaagcaagcctcagttggcaaggtacctgggaaat

SEQ ID NO: 756746 - DNA, 98 bp, Homo sapiens
aaaggagttcgagcagatcgacaagtccgggagctgggcggccatttaccagtgtgccggtccaacaaaagcccttgggtctgtttgacttgttcaag

SEQ ID NO: 756747 - DNA, 75 bp, Homo sapiens
tttctggatgatggagtggatgaacaagtactgatggaactaaaaactgaatagccaggccagaagaaggaaggc

SEQ ID NO: 756748 - DNA, 83 bp, Homo sapiens
accttcacgatgtttcccttggtcaaaagcgcactaaatcgtctccaagtgcaccaattccagctggacatcactgtgaaaat

SEQ ID NO: 756749 - DNA, 83 bp, Homo sapiens
ctggagcctcagttggaagcagccgatccagcctgcggagcctgtggggcaggtgtcttataagactttgacacttcctgttt

SEQ ID NO: 756750 - DNA, 74 bp, Homo sapiens
gcgcccgaaccgggtgtccacatgagtgcctctcccagcagatccagatgaaatacctgtcacaaagagaacat

SEQ ID NO: 756751 - DNA, 86 bp, Homo sapiens
tcggccaagaaagacaaagacccagtgaacaaatccgggggcaaggccaaaaagaagttccgggtgctcttcgccaacctggcagc

SEQ ID NO: 756752 - DNA, 89 bp, Homo sapiens
gtcttccccagctctgcagccacatactatccgtttgttcaggaaccaccagtgacagagtgaatctgattaacgagcccctggtgata

SEQ ID NO: 756753 - DNA, 97 bp, Homo sapiens
gctgaggaggagaggacagaggtgcctggggcaacctccaccttgacggttccaggtgaatctggattgggaaagtcgacattaatcaactcattat

SEQ ID NO: 756754 - DNA, 88 bp, Homo sapiens
cagcaaccaatgatatatatctgtggagggcaattgaaggaacagactaaaaatcgtgtcctggaaggaaactacaggtactaccagg

SEQ ID NO: 756755 - DNA, 90 bp, Homo sapiens
atcttcgcggtagctgggaccgccgttcagggtgttcctgaaaagccccatagtgattgagtcttcaaaaccaccgattctgagagcaag

SEQ ID NO: 756756 - DNA, 82 bp, Homo sapiens
gctcatgcgggatttcaagcgcttcaggatgagttagagaaaggtgaacgggacaatgcagaactgcaggagtttgccaacg

SEQ ID NO: 756757 - DNA, 150 bp, Homo sapiens
gagacagacagcatactgaagtggtttgcaacatccttcttctggataacactgtacaagctttcaaagtcaatgtgttctttgacctaatgagagaaatcagaacaaagaagatgtcagaaaacaaagacaagaatggcaagaaaagca

SEQ ID NO: 756758 - DNA, 125 bp, Homo sapiens
gaaatgagtctggaaaactgggccaaagcagtgaaacgctccatgaattggtgcatggctgcctcctaatcccatagtccagaggaggcatccctaggactgcgggcaagggagccgggcaagcc

SEQ ID NO: 756759 - DNA, 85 bp, Homo sapiens
agaatttactgacaatgtgagcagtgcttttgaacaagtgaactttgaggcgctgatcatcaccatgtcggtagtcgggggaacc

SEQ ID NO: 756760 - DNA, 82 bp, Homo sapiens
ttctggggagtcctggcggtttttattaaggctgttcatgtgaaaggtgtctgacttccagcaactgctggcctgtgccagg

SEQ ID NO: 756761 - DNA, 75 bp, Homo sapiens
gccaccggcttccctttgtaaattgagctctgcacgctggggagtttgttgggataacatccctgaggacctcag

SEQ ID NO: 756762 - DNA, 98 bp, Homo sapiens
ctgggcggccggccgacccttcctgtcgctgacggcgactgcgggaggccagtttgggagcctctggtggagcaagtaattgggattcctacagtgac

SEQ ID NO: 756763 - DNA, 82 bp, Homo sapiens
ccggcccgcgggtctacttcctcaaagggtaagcttgatgattaccaggaacgaatgaacaaaggggaaaggcttaatcaag

SEQ ID NO: 756764 - DNA, 50 bp, Homo sapiens
tcaccaagtcacatgacaagcatgctgttccctcgtcacaccaatgccag

SEQ ID NO: 756765 - DNA, 75 bp, Homo sapiens
gggggctcctcctcgccctcttgccccccggagccgcgagcacccaagctgtgcagcgcattgctgagtctcacc

SEQ ID NO: 756766 - DNA, 86 bp, Homo sapiens
ctacgacaacacattgctgagcttgaaatccagggggattcccgaagtcttccgttttctgagaatgtgagtgctgttcaaaaatt

SEQ ID NO: 756767 - DNA, 100 bp, Homo sapiens
cccacagttaccctggggtttcctcattgcgcaagaggtccaaaggcttctaagcatgcgggagaagaaggcctgttacatgaacagaatatggcaaaaa

SEQ ID NO: 756768 - DNA, 98 bp, Homo sapiens
gaacgaggcaaggagctaaagcagcgtgcgttcagccctgggtcaggatggctaaaggtgaccccaagaaaccaaagggcaagatgtccgcttatgcc

SEQ ID NO: 756769 - DNA, 80 bp, Homo sapiens
cgagacaacagtggccttctgatgaatactttaaggaatgactctactaatgatggggtcagcagatgctcttccagaag

SEQ ID NO: 756770 - DNA, 100 bp, Homo sapiens
cttctggcatcattaacggaccttttaccatgaatagttctactccttctacaggtgtgtatgatctggacgttggtggttggctatgtgttgactgttt

SEQ ID NO: 756771 - DNA, 100 bp, Homo sapiens
ctggaccacggcgcagacgcgggcgagctgcggctcggacgccagcggacacgcgggcgagtttcatgatcaacatgggagactcccacgtggacaccag

SEQ ID NO: 756772 - DNA, 100 bp, Homo sapiens
agcggagcccggagcgtcgtggaaagagggaccacagagcaccagcctgcatggaacttccttcctcactcagcttcccacgttgccagctgggacaggg

SEQ ID NO: 756773 - DNA, 82 bp, Homo sapiens
ccaaatgtctgactctgactctcggactgagaaacgcaaggagtgtggccatctggggccgtgtggtatttgccactcagga

SEQ ID NO: 756774 - DNA, 90 bp, Homo sapiens
gaatgtacctcgctcccgggagccggacggcccagtagggcgcactggaggacgctccgctgcgggagaggtcctgctgtactagccacc

SEQ ID NO: 756775 - DNA, 100 bp, Homo sapiens
cggcacaagcatgtacggcaaaggcaagagtaacagcagcgccgtcccgtccgacagccaggcccgggagaagaattgaaacctgacatagtaactaaat

SEQ ID NO: 756776 - DNA, 100 bp, Homo sapiens
cgatctaggttctgcggcacgggatggcggaggcgcctcctgtctcaggtctgcttagtggcctatcttggcttgtttatgctttgtgtctcatatcagg

SEQ ID NO: 756777 - DNA, 100 bp, Homo sapiens
gacgtggagtttatcagtgacctgattgcctgcctgcttcagggctgctatcaacgaagagatatcactctgaagatgatgagaaactgaaaaagaggaa

SEQ ID NO: 756778 - DNA, 90 bp, Homo sapiens
cgccacgcagccggccaccgccgagacccagcacatcgccgaccaggcagcaaatatgaagtctatggaccctgcctcaggttattcaaa

SEQ ID NO: 756779 - DNA, 74 bp, Homo sapiens
gcctgcgcagctccggccgcctggctccccatactagtcgccgggagatgcacttatttacatggaaccagaga

SEQ ID NO: 756780 - DNA, 90 bp, Homo sapiens
ctcggagaccccgcgccgacggctgctcaaacatcaggaatccagggcctgaaaacccagaatgaacttgtgtccatcccagagatcact

SEQ ID NO: 756781 - DNA, 74 bp, Homo sapiens
gtcatcaaacagtcggcctatgactcgaaggttacaactgatggaaaaccaaaaatcgttgatatcattgatac

SEQ ID NO: 756782 - DNA, 75 bp, Homo sapiens
tggtttccagtgcagcgcggagtgggcgatgccagcgtgccagacaaatttacatgtattggagaccagaccaga

SEQ ID NO: 756783 - DNA, 75 bp, Homo sapiens
ccgccgcgcacaaccgcacgtgcaggtctgcactgctccccattgccttccctcccgcctcaccagttgatccct

SEQ ID NO: 756784 - DNA, 98 bp, Homo sapiens
aagaaggagcgaggctccggcaagaagccggagtccgcggcgggcagccagagcccaggaggagacatcacagctttcccagatcgggaggaaaaata

SEQ ID NO: 756785 - DNA, 73 bp, Homo sapiens
cgcatcaagagcttcaagaacaagggccgcgatgtggaagttcaaaagatgtcgtgataaaggcacaggtttt

SEQ ID NO: 756786 - DNA, 75 bp, Homo sapiens
ggaggaggaggcggcagcggcggaggaaggcggcgcaccccgagagctatgctaagaaggaatctgatcttaatg

SEQ ID NO: 756787 - DNA, 87 bp, Homo sapiens
gacctctgagaaagtgagccagaaacatgctgagcctttgacagtgagatggaagattttcgaggtatagcagaagaatcatttcca

SEQ ID NO: 756788 - DNA, 88 bp, Homo sapiens
ctcagcctcccgagtggctgggattacagggatacttgactttcagagatgtggctatagagttctctttgctggagtggaaacgcct

SEQ ID NO: 756789 - DNA, 99 bp, Homo sapiens
ctttgcctttgcagaactctgtgttgttcctttgcggatcttctccttcttcccagttccagaaaggagaatcacttgaacccaggaggaggaggttgt

SEQ ID NO: 756790 - DNA, 102 bp, Homo sapiens
catccatctaaagcaccagtaaaatatggtgaactcattgtcttagggaggcaggtggaagtcatcataaagtttctgtttcacccgtcgtccatgttcgag

SEQ ID NO: 756791 - DNA, 101 bp, Homo sapiens
tctgtgaagctaaactcaatgctgctgtgtgggaagaagatttgtaaagaaaactcttagagctgtaggtaaaacttgcctactgatcagttacacaacca

SEQ ID NO: 756792 - DNA, 75 bp, Homo sapiens
ctttactgaagaggaggaagcccagggccgttgctccagggagaactgcaaatatcttcatccacccccacattt

SEQ ID NO: 756793 - DNA, 74 bp, Homo sapiens
ccccactctttccgccctaatggaggtctccagtttcgagatgatccctggatccgttctgattagtgatgctg

SEQ ID NO: 756794 - DNA, 100 bp, Homo sapiens
gaaagtaacctggttgtcacatacccccagcttagaggtgcttcaccctgccccaagaccagttcaaggagctgatcctcacactgtgcgatctcatccg

SEQ ID NO: 756795 - DNA, 100 bp, Homo sapiens
cttcgaggacttcacggagctctggagaaacatgaagttcgggactatcttctgccggcattttgcacagaggccgtgtcttatgcggaatacagggtgg

SEQ ID NO: 756796 - DNA, 160 bp, Homo sapiens
aagaacctttttggactattatcggctgaaccccgtggttgaaaaggtggcaattcccatgccgagactgcggtaacttgcccaggagtcgtgcttaaagacaaagaggacatctatcttagcatctgtgtgtttggccaatacaaaaagacacaatgtg

SEQ ID NO: 756797 - DNA, 100 bp, Homo sapiens
gctgctcgagcccccagaaaggtgcttggttcttccacctctgccactaattcgacatcagtttcatcgaggaaagagatggggtttcgtcacattgccc

SEQ ID NO: 756798 - DNA, 98 bp, Homo sapiens
agaaagtaacgcatttttgtttttggaaggagaaggatagacttggctttgagatggatcctgtgcaaaaagcggttattaaccatacatttggagta

SEQ ID NO: 756799 - DNA, 87 bp, Homo sapiens
gacgggaaggcgggagacgagaagcctgaaaagtcgcagcgagctggagccgccggagctggagaatgctggaggagaccttaagga

SEQ ID NO: 756800 - DNA, 95 bp, Homo sapiens
gacccgcggtccccaccgtgcagcggggcatcatcaagatggtcaccctgctgattgccttcatctgtgtgcggagctccctgtggaccaactac

SEQ ID NO: 756801 - DNA, 75 bp, Homo sapiens
gctagtctgaccctccgccaggcaaaaggaagatacttgccagaactaatacagctgatgaaatacctgaccttt

SEQ ID NO: 756802 - DNA, 83 bp, Homo sapiens
ctgtcatcaagacctgggattttggtgtgctactctgttggcattcctggttgaactacttaaaagttcagtagccatgcaag

SEQ ID NO: 756803 - DNA, 124 bp, Homo sapiens
cttaatcctactcagaagaacttgtacagagatgtgatgttggagaactatagcaatctggttttcttgggaaatgatgccagtgaatgcgtagtcccagcctcagcacaggggagccaccttg

SEQ ID NO: 756804 - DNA, 51 bp, Homo sapiens
cctgtgtctgtgggagcactgtgaggatacgcagctccacctggatgatgc

SEQ ID NO: 756805 - DNA, 90 bp, Homo sapiens
attgaggagccaacctcccctgatgacattctggggcacgccaccatttccaagggaaggagattggtgggaagcaagatcaatcgctac

SEQ ID NO: 756806 - DNA, 50 bp, Homo sapiens
gcgctggacggagaggaaagcgcttgaaatccatggcccaaaatgactct

SEQ ID NO: 756807 - DNA, 82 bp, Homo sapiens
acctgtacaacgtgctggagagaccccgcggctgggcgttcatctaccacgctttcgtatcctttcccggagttcagttatg

SEQ ID NO: 756808 - DNA, 95 bp, Homo sapiens
ctaaggacagcttttgatttattaaatttaaatagattagtaactggcatagacaactatgggcaggtaaaataccatgaagattttgaaaaaac

SEQ ID NO: 756809 - DNA, 74 bp, Homo sapiens
tgcctgccggggcagaggccatcccagagcccgtggtgagtgatgaacggcagcagccactcaccaacagccat

SEQ ID NO: 756810 - DNA, 75 bp, Homo sapiens
atcagacctctgtggcagcattttttccagaacacaaaagggaactgtccaggtttattgctgccgggagactac

SEQ ID NO: 756811 - DNA, 85 bp, Homo sapiens
gtattgggagatccacagctaagacaccgggacctcctggaagccaaaaatgttttcggctttgtgagaaaccttaccatcaaac

SEQ ID NO: 756812 - DNA, 91 bp, Homo sapiens
gaaggagtcagtcagagagccttgggccagagttccaggggctctgggagtggctgccaggaaggaggagaatcagaaggtcgccattgaa

SEQ ID NO: 756813 - DNA, 75 bp, Homo sapiens
cctctctatagtcaactccttcaagcatataagtggtcaaacaagggcctgtcctcccaaagccaactctaagga

SEQ ID NO: 756814 - DNA, 75 bp, Homo sapiens
gcatcatgtccctctaacacggcctttcaactttgcttacacagtgactgcctcttatttcctgtttattctttg

SEQ ID NO: 756815 - DNA, 100 bp, Homo sapiens
ggagaaggatgtggactgcagtgctgcagtgccagacgtgccaccttgcttagcgcccgtcaaggaatgatgtctgcacgaggagacttcctaaattatg

SEQ ID NO: 756816 - DNA, 75 bp, Homo sapiens
tgttccccacggctgcgctcatgccaggaaagaacatgaggttcccttggaaatcattcaagaggaagatggaag

SEQ ID NO: 756817 - DNA, 75 bp, Homo sapiens
aaaaaagacgacaagaaaaagaaggaagctgctcaaaagaagcacaacattctgaaattttttggttattgtaat

SEQ ID NO: 756818 - DNA, 82 bp, Homo sapiens
acctgtacaggaatgtgatgctggaaaactttaggaacctgaattcattgcgtaaagaacccagcttagactagaaagtcta

SEQ ID NO: 756819 - DNA, 99 bp, Homo sapiens
tttgaaaagaactgtagatgcccggctgaaattaagtgaggaattgagtggtggtagattgaagttggaaagcttcaaggctctgttaatccaagctgt

SEQ ID NO: 756820 - DNA, 100 bp, Homo sapiens
cttttgggaatatgaataatgctgttagaccagtttttgccatccagagctgctgttggcggattgtacccacggggagatgattcctcatgaagagcct

SEQ ID NO: 756821 - DNA, 75 bp, Homo sapiens
catccttggaaatcctgccgcggacttctctgcacagcatccctgtgacagtgactgagttttcaaagaaaacag

SEQ ID NO: 756822 - DNA, 73 bp, Homo sapiens
agtatctgcatggtctgctgcagggagcacttcaccatgaactgataaatttcaaacggaagagagtggcagc

SEQ ID NO: 756823 - DNA, 74 bp, Homo sapiens
aagctgagcttgccgcacaaaaagctagagagggtttactagcattgggcatcagtaagtctgttcaaacacca

SEQ ID NO: 756824 - DNA, 75 bp, Homo sapiens
cgagccagcccgccagcatgccccagtccaaagaggagcaggagcggcttcgcttggagcaggagcgagagcagg

SEQ ID NO: 756825 - DNA, 100 bp, Homo sapiens
attcctcactaatgagctctccagaaaattgatgcagaaccttctgaggaaaggaggccatacagaaattgaacctcagcacttctgtcaagctttccac

SEQ ID NO: 756826 - DNA, 100 bp, Homo sapiens
agaactacgaggcctccatgtcccacgtggacaagttcgtcaatgtactaatggtcacttgatgtgcgctggctgttttatccacctactagcagatgcc

SEQ ID NO: 756827 - DNA, 100 bp, Homo sapiens
gcccctgcacacgacctccagctcctgccccagcaggccgggatggcctccatccttgccaccgcagtgatcaacaatctcacattcttgaaggtggcat

SEQ ID NO: 756828 - DNA, 90 bp, Homo sapiens
cggtcccgcccaacgcccgactctatggcccactgcgtgaccttggttcagctgtccatttcctgtgaccatctcattgacaaggacatc

SEQ ID NO: 756829 - DNA, 82 bp, Homo sapiens
acgtcaagctgggaggcgtgaacaacatcctgctgccccagggcaggagctctttgttcaatgcctagccacctattcctac

SEQ ID NO: 756830 - DNA, 75 bp, Homo sapiens
acagaaaagaagaggagaatgctaagcagactgccaatttgtggtgtctgaagaccaagactacacagctcattt

SEQ ID NO: 756831 - DNA, 100 bp, Homo sapiens
gagctgagagcaccacgccgaggccacgagggataccaataactagtgcctcgtactacgcgacagtgaccctggatcaggttcggaatatacttcgttc

SEQ ID NO: 756832 - DNA, 100 bp, Homo sapiens
agagaacccagaagcctacaatgaagaactgaagaagctggagttgctcagacagcaccgacagtaaatggttcacggccgacatcatgtccataggggt

SEQ ID NO: 756833 - DNA, 74 bp, Homo sapiens
tttgatatgattgaagaagcatacatgacaaaatgtggccacagcttttgaaatgcatcttctgcagacaccgg

SEQ ID NO: 756834 - DNA, 50 bp, Homo sapiens
ctcccaaggtgctggaattacagggatctttgacattcagggatgtggct

SEQ ID NO: 756835 - DNA, 76 bp, Homo sapiens
tattcaggagaccgtcgttgccttgtatttccagagaacagaaggacagaataacgggctcccagattcacaagcc

SEQ ID NO: 756836 - DNA, 76 bp, Homo sapiens
cagcgagtaaaggagaaagaagccatattgaaagaagctgagagagagcaaaacatggacatctatcgacgatcca

SEQ ID NO: 756837 - DNA, 99 bp, Homo sapiens
aattaagagttaaaactgtgaaatactttaaagatttgatggtagagtggtggcaaagcttccttttacccctctttcttacatccaaggactgtctca

SEQ ID NO: 756838 - DNA, 82 bp, Homo sapiens
gctacctgtgaacagtacgcagtgaatgttctcctcacagccagtgaccttgcagccagtgacctcaaaggatttcagccac

SEQ ID NO: 756839 - DNA, 116 bp, Homo sapiens
tggagaccctcacggagctgggcgacgagctgaccctgggagacatcgacggtactaggttttgacaagcttgcatcatgcgtgagtataagctagtcgttcttggctcaggaggc

SEQ ID NO: 756840 - DNA, 100 bp, Homo sapiens
ttctcaaatgccttctcatccccacatacagccagttaacctggagggacgtccagcacctgctagtgaagacatcccggccggcccacctgaaagcgag

SEQ ID NO: 756841 - DNA, 82 bp, Homo sapiens
gtatgatcttcccaagaaagaggacgctttactctaccagagcaagggggccggtgagcccaacttcgatggcctggagagt

SEQ ID NO: 756842 - DNA, 96 bp, Homo sapiens
ctggaggggcattgcttggttcgcgtggtagcagaggagcttgaggcctcattgctacgatttcagagtaccctggtaatagctgagcatgcaaat

SEQ ID NO: 756843 - DNA, 99 bp, Homo sapiens
tcatgttcgagtctggggctgtcgctgtgctctcaaagcagttgagagcttagctgaagcaggtggctctgaaatccagcgggtgaaagaagatgctcg

SEQ ID NO: 756844 - DNA, 99 bp, Homo sapiens
accagtcagcattctacaaccccagaccaccgttaatccagatcgcatcaaacaagatcacctgctgttaccagctaccacccataacaagaccacaag

SEQ ID NO: 756845 - DNA, 51 bp, Homo sapiens
cttactttgaagccattcagaaggaagtacatgacctgctcagtgactatg

SEQ ID NO: 756846 - DNA, 71 bp, Homo sapiens
cgatggcatcggtcaaggtggccgtgagggtccggcccatgaatcgcagctacttcaccgagccgtggtgc

SEQ ID NO: 756847 - DNA, 75 bp, Homo sapiens
cctgtcatcgggcagtgtgcaaggaagacctccgtgtggatggccgtggctgtgaggactaccgatgtgtcgaag

SEQ ID NO: 756848 - DNA, 82 bp, Homo sapiens
ctgccctttccgtttccagggttccgaccagagagctgtagtacacatggatgaacgacgagaagaacaaattgtacagtta

SEQ ID NO: 756849 - DNA, 100 bp, Homo sapiens
gcctcggtgcagggctccaccccgtcgcctcgacaggtatcgagaaccttccctgcgaacttcagaggaacttccagctgatgcgagagctggaccagag

SEQ ID NO: 756850 - DNA, 83 bp, Homo sapiens
ggcttctccgccatgcaaggctggcgcgtctccatggagctgtccagaccaaaacgaagaagacgttagccaaacccaatata

SEQ ID NO: 756851 - DNA, 82 bp, Homo sapiens
cgaaaagcagttcaacgagaatgaagccatccaatggatgcaggaaaactgctattactataacaagcgcattctgcacaag

SEQ ID NO: 756852 - DNA, 82 bp, Homo sapiens
cgggagaacctgcggcggccggagcggtttgatctgtggatgaaatgaatcatgattttcaagctcttgcattagaatctcg

SEQ ID NO: 756853 - DNA, 100 bp, Homo sapiens
gacggagtcctgttccaccttcagagcgtcacggcgtacgccctcatggggaaaatctccccggtgactttcagattctggatgaaattgaagaacataa

SEQ ID NO: 756854 - DNA, 100 bp, Homo sapiens
gcggaaacctggagtggaaggctttatttgaaggtagacgcatcgaatttgcagaacaaataaataaaatggaggctaggcctagaagacaatcaatgaa

SEQ ID NO: 756855 - DNA, 74 bp, Homo sapiens
gcacaagagaaagaaggttaagctggctgtcctgaaatattataaggtggaaagcgtaaagatagtgtgtgggg

SEQ ID NO: 756856 - DNA, 95 bp, Homo sapiens
tcaatgtgacacaaggaaagtattctacagacgaacagcctacacctacaaccccgagcctcagatgtacgcccccagcagcacggcttcttact

SEQ ID NO: 756857 - DNA, 50 bp, Homo sapiens
gaaggaatatatcctgactgattaattcaggtattgaaaaagcttttctc

SEQ ID NO: 756858 - DNA, 98 bp, Homo sapiens
cgtgcccgaccgccgcccgactgccatcgcccggcccggccgcgcccgcggaaccagaccagctctacgtctcctccgagagccgcttcaacaccctg

SEQ ID NO: 756859 - DNA, 80 bp, Homo sapiens
caggccctacctatactagctagggaaagaatcatgtgatgtacagctttatataaagagacaatctgaacactccatct

SEQ ID NO: 756860 - DNA, 103 bp, Homo sapiens
tccttccatgaaccaatcaagcattgcccaagatcgagctgtccctacctggctcgcaagctgacccttgccatccccatcatcgctgccatcctcttcttct

SEQ ID NO: 756861 - DNA, 83 bp, Homo sapiens
ccctcggcgcggcagcgctccagctcgctctccaccttcaggattttttatcaagcagaaatgcatcgaacaacgagaatcaa

SEQ ID NO: 756862 - DNA, 83 bp, Homo sapiens
tccaactggtccctcagtcacacatgccagagattgctcaggaagcaatggagtaagtgacgaaaattccaagaggctgtcta

SEQ ID NO: 756863 - DNA, 98 bp, Homo sapiens
ctcatacactggaaaggaagagattcatgaagcaggtgaacaattttctgacctcatcctggcgggatgatgactttgtgccacgctactgtgagcac

SEQ ID NO: 756864 - DNA, 90 bp, Homo sapiens
gagcggcggcaagaaaaatgccagccagaagaggcgttcgctgcgcgtgcacattccgaacagatctcggcccctttccaaacactcctg

SEQ ID NO: 756865 - DNA, 75 bp, Homo sapiens
gttgaaaatggacgagtaatcgcctgctttgattcattgaaagtcaaagattctaaactgcctgcatataaggat

SEQ ID NO: 756866 - DNA, 51 bp, Homo sapiens
gctgcagatcccattataaccagggatgatacgttttcagacactctgagc

SEQ ID NO: 756867 - DNA, 100 bp, Homo sapiens
ggcgctgaaacggattaataagctataaagagaatgtcatgaaattatcaagaattcatcatgaccaaccaatgaagcccctggatcgagcagtcttctg

SEQ ID NO: 756868 - DNA, 143 bp, Homo sapiens
caccatcctggattctggaggcatcattgtggccattgagcacagcagccgtcctatcaatgtgattaaggatgcgtccttgatggcaatgagaaggcgcattgaaggtttgactccagaggaaatccgaaatctttccaaag

SEQ ID NO: 756869 - DNA, 50 bp, Homo sapiens
aagtggtgaaggagtgtgtgcagcgtgagaaagatcagtctaaagaaaag

SEQ ID NO: 756870 - DNA, 74 bp, Homo sapiens
tcgttgctgacagtcagaaacaattaccagctctggctgggtcgccacaacttgtttgacgacgaaaacacagc

SEQ ID NO: 756871 - DNA, 100 bp, Homo sapiens
agagtacatcattcagcaaggtggctggtttggaaattttagcattcaggtgccaggaatgcagatgggacagccagtgccagaaacaggcccagctata

SEQ ID NO: 756872 - DNA, 98 bp, Homo sapiens
gcgaggcctcccgcgccgcagggagtttgtgatgcaggatggctgtgactttgtctgccgttctaaacctcgaaatgtgcctgcagcatatcgtggtg

SEQ ID NO: 756873 - DNA, 75 bp, Homo sapiens
ggccttggcacagaagaatgtcaagctctcaacagagcagagaggagccggtgcgcaagttcacgggcaaggcgg

SEQ ID NO: 756874 - DNA, 75 bp, Homo sapiens
ggatgatacaccttttccacagggaattgagttgggccggcagacattccaccgctttgacaagttcaactccaa

SEQ ID NO: 756875 - DNA, 90 bp, Homo sapiens
gtgaccagttgggatggacaaaacccaccaagatccagattgaagctattcctttggccttacaaggatcctcagtcttccacaatgaac

SEQ ID NO: 756876 - DNA, 99 bp, Homo sapiens
tattctctttgtgtatgtccaccacagttactttatcccttcatctgtggatgggcagatttcaacactacacttgcacaatgtctttgaaaccaagag

SEQ ID NO: 756877 - DNA, 101 bp, Homo sapiens
acagtgttaacaatgcatccacagagccctcctcctctcgacacggggactccaaaacggaccgtgagaagagtcagatggtagggatcagcaatagtgca

SEQ ID NO: 756878 - DNA, 49 bp, Homo sapiens
tggaggagaaggtccgcttcaatgcaggcgacctggatggcctatgaca

SEQ ID NO: 756879 - DNA, 100 bp, Homo sapiens
tggccggctttttcggagccggcggagcaggttactcgcacgcggatttggctggcgtcccgcagatggagtttcactgtgtcagccaggatggtctcga

SEQ ID NO: 756880 - DNA, 90 bp, Homo sapiens
ctgcagtcggtgaccgcgcgactcggcgcccgcccgcgggtggccattcagggcaactggggccttcgtcagttgccccttcattccgcc

SEQ ID NO: 756881 - DNA, 100 bp, Homo sapiens
agaaggcctgggctatcgagtcagaatttttcacagacaacctatgggacacactcccttgctcatggcaggaagcattggatggactgaaaccaccaca

SEQ ID NO: 756882 - DNA, 100 bp, Homo sapiens
ctcatgggggagacgcagctgtgcaccacaagtctgcagacctgctggaaatgaaatctggtgctcctgcgagacaggttatgggtggcctcgggaaagg

SEQ ID NO: 756883 - DNA, 96 bp, Homo sapiens
gccacctcccacctcagggcccccttcagccatgactcctccctacccgcagtttgagctgcagcaaaaaattattcctgatcaggaccaactgat

SEQ ID NO: 756884 - DNA, 50 bp, Homo sapiens
ttttgctgtaacaaacgcctaggatgaggaagatgaggaaatggtggaat

SEQ ID NO: 756885 - DNA, 90 bp, Homo sapiens
tgttgaggaccatcttgcctggagcaagtggagatgcggtttcaccgtattgaccaggctggtctcgaactcctgacctcgtgatccact

SEQ ID NO: 756886 - DNA, 50 bp, Homo sapiens
aatgagcccctgccagagaggctggagatgccttcaattaagttgcagag

SEQ ID NO: 756887 - DNA, 75 bp, Homo sapiens
gcggcggcgcgcggacccaggcgcggatggcgaggccagcaggatcctaaggcctttgtagtccttcagccactg

SEQ ID NO: 756888 - DNA, 75 bp, Homo sapiens
gcaccgcggcttaaatgatgtattttgtgatcgcagcgatgaaagataaaccgagaaaactggtgtacaatagag

SEQ ID NO: 756889 - DNA, 83 bp, Homo sapiens
gctcagcaccactctcccgccgcccaaccctccagcgcacatggcacagcactcaagcctacggccccaccagtgtagccagt

SEQ ID NO: 756890 - DNA, 83 bp, Homo sapiens
ttttctaatcatcagcatttacatgacagaaatcacctatgtttacagcgacaggtatgaaacaacttcaagtgatgattcca

SEQ ID NO: 756891 - DNA, 100 bp, Homo sapiens
ttctacgaccaggggcgccggggcagcagcgaccccacagtgcagcgctccgtgtttgcatcggtggacaaggtgccagctgtggtcgccaggacccccc

SEQ ID NO: 756892 - DNA, 82 bp, Homo sapiens
cggaagatgcccacggactacatcaggaacggggtgctctacgtcacggagaagtgaagttcatccacgaccagacctcccc

SEQ ID NO: 756893 - DNA, 80 bp, Homo sapiens
acgctggacaagctggacgttaaagggaagcgggtcgttatgagtgcgaggacgacgggcagacgttcttcagcctagat

SEQ ID NO: 756894 - DNA, 100 bp, Homo sapiens
ctaaagcttgaaatgctacatttccaaggaaaaggcattaatagctgctcagctggacaatgccattgagaaggaattactggagagactgaaacaagat

SEQ ID NO: 756895 - DNA, 100 bp, Homo sapiens
attctcgttcaagttaatccaggtgagactttcacaataagagcagaggatggaacacttcagtgcattcaaggggacggcaaaacagaacagaaaggcg

SEQ ID NO: 756896 - DNA, 75 bp, Homo sapiens
ggtgaggcacagatgagtaacgtgaatttgtccgtctccgacttctggagatatcatggaaatcaggacagtggc

SEQ ID NO: 756897 - DNA, 100 bp, Homo sapiens
ccaggggaagcccggggccgcccgggacctcggcccgttcctccggacccgagaggccgccgcacggggaggccacttcatctgtaaaacctttgacctg

SEQ ID NO: 756898 - DNA, 90 bp, Homo sapiens
aagaataattccttccatatcaacatgagaaggtagaagatagcaccatgccgattcgtcgaactgtgaattctacccgggaaactcctc

SEQ ID NO: 756899 - DNA, 121 bp, Homo sapiens
tggagaaacgcaagtccatgtacacgcgagattataagaagcttgggttcattcggacaaggcaaaatctcagcaagttcggacctctagtacaataaggcgaacctcctctttggataca

SEQ ID NO: 756900 - DNA, 89 bp, Homo sapiens
gagcaggaaccagagcccatcttaatcccgagtcacctaaggtcctgcgagtacaagggtcgacccccaaaggcaggggcagagccagc

SEQ ID NO: 756901 - DNA, 100 bp, Homo sapiens
cttggagcacttcctattccactggattgggaaagaccatggcagcacttttcaggattagaagaggctgtgtatagaaacatacaagcttgcaaggagc

SEQ ID NO: 756902 - DNA, 75 bp, Homo sapiens
gcacagagaagctcccagctttgaaggtcttgcggtggctttttctcctccgtgacagccagagtaatccaaagg

SEQ ID NO: 756903 - DNA, 50 bp, Homo sapiens
ctgaggatgatggtagattgccagaaggcagagtgcttattcactttgga

SEQ ID NO: 756904 - DNA, 100 bp, Homo sapiens
cgtcgctcacgggtcttaccccatcccaacagaatacaggagtgctaacaggaatgaatgaaacttctgctgtaatcattgctgcaccacagaatttcac

SEQ ID NO: 756905 - DNA, 88 bp, Homo sapiens
ccctggggactacgacgtccctcaaaccttgcttctaggagataaaaaggcgtccgacctccgatcatgaacgggcccctgcacccgc

SEQ ID NO: 756906 - DNA, 100 bp, Homo sapiens
gccctgacgtgaactcattttatctgccacgacccagaagatgcagagcaaagcggcagtccccggacagggatgggctctgaccaggaggacagcaagc

SEQ ID NO: 756907 - DNA, 82 bp, Homo sapiens
cgggccgcaggcagtcccgcggcagcaggatcacaggtgtgggcaagagcagtttactgttgcgttttgcagacaacacttt

SEQ ID NO: 756908 - DNA, 100 bp, Homo sapiens
ccactgccctgcaaaagctggaagaagctgaaaaagctgctgatgagagtgagaggctttcctcggagacgggtggcatggggagcagctagaacaatgc

SEQ ID NO: 756909 - DNA, 96 bp, Homo sapiens
atgatgtatggaaagcagcagagtttctacaaatgctagaagctatcaaagcccttgaagtcaggcctgaattattggaacaactttggaaagcca

SEQ ID NO: 756910 - DNA, 126 bp, Homo sapiens
ctccaagaaaaaaaccacaaatgtttttctgttttgcctgaatacatgatttaaacaagagatttccacagaaggtgaaatgacaatggatgctctgttggctcgattgaaacttctgaatccaga

SEQ ID NO: 756911 - DNA, 101 bp, Homo sapiens
atccgggaaagggccgaatgcgatcaaacctaatccgcgagacttgctaacccccttacccaggaatggaacaacctccacaccatccttactatcagcac

SEQ ID NO: 756912 - DNA, 75 bp, Homo sapiens
acaaagctatcatcctgccaaactccaggctcagatgtcacagttctcctgtgcctcctgttggctctctttgca

SEQ ID NO: 756913 - DNA, 99 bp, Homo sapiens
ttgaagtatatgttgaagtggcctatcccaggacaggtggcactctttcagaattcagaaggagctggcggacatcactttagaccctccacctaattg

SEQ ID NO: 756914 - DNA, 98 bp, Homo sapiens
tggagctggtgcagcaggaattgggatcgtgtcgctgcggaagtttctaaaacatcatttgcgaggaaagaactgtgaactcctgctggtggtaccag

SEQ ID NO: 756915 - DNA, 99 bp, Homo sapiens
tcttcctgaagatctctaccatttaattaagaaagcagttgctgttcgaaagcatcttgagaggaacagaaagcccggtggttctttattcattactac

SEQ ID NO: 756916 - DNA, 116 bp, Homo sapiens
ctcagagagggaagagattcagccagcacactcctcgcgagcaaggtttggtgcacctcgatttggaggaagtagggcagggcccttatctggaaagaagtttggaaaccctgggg

SEQ ID NO: 756917 - DNA, 98 bp, Homo sapiens
ttctagtctccaggcccagtacatggatgcttgttggatgaattaatgaaccttgacccacaccaaggacctgggccttgagaggaccctccttcctg

SEQ ID NO: 756918 - DNA, 100 bp, Homo sapiens
gaaaacatcatcgttttgaagagttctgcgttttgccagtcacctctcaactgtgtgccaaagaatgatatggaacctagcaaagctgttccactgaatg

SEQ ID NO: 756919 - DNA, 100 bp, Homo sapiens
ccaaagatccccgttcctggagattctgattgagggactttgaacatgtcggggatcgccctcagcagactcgcccaggagaggaaagcatggaggaaag

SEQ ID NO: 756920 - DNA, 73 bp, Homo sapiens
tgctgctgaaccaatgccaacagcaaacattgaggagaatgtgctaccttaccatcaaagaaatggctaccat

SEQ ID NO: 756921 - DNA, 100 bp, Homo sapiens
ctgatcatatgtgtgctagtgggcatggtctggtgctcggtacggcagaagggggaagaggctgctgggggtgacaggctcatccatgagcaggacctgg

SEQ ID NO: 756922 - DNA, 80 bp, Homo sapiens
tttcggatcatgtctggtggctccgcggattataacaggagtgtaccaacacgtcaccggagagatgatgggtggccatg

SEQ ID NO: 756923 - DNA, 50 bp, Homo sapiens
tggacattccagacaaaactaatgttggaaattggaatgggattaacagg

SEQ ID NO: 756924 - DNA, 74 bp, Homo sapiens
gttcatccatcgcaagaagaagatgtggctcagaagttagttcaaagaggaaaaaagatgaaacagccaaaaag

SEQ ID NO: 756925 - DNA, 88 bp, Homo sapiens
ggccgcgcccgcggaaccagaccaggctgctctttggcgtaaattgcaatcgattagggatcgtttctcagaatcaagttagaagtga

SEQ ID NO: 756926 - DNA, 75 bp, Homo sapiens
gtcgccgccgccgccgccgccgcagcttgggaggtgctgccaccacagaacaattgtttgaccagacccaacatc

SEQ ID NO: 756927 - DNA, 80 bp, Homo sapiens
gacaaattatgctgcagcatattgtactggcctgctgctggcccgcaggattcgttatatttcacaaacacaaggcttgc

SEQ ID NO: 756928 - DNA, 100 bp, Homo sapiens
tgagtgcagctccccctataagcctcggcctccacagggcaccatgccggtggaaaggatgcgcatgcgcccgtggctggaggagcagataaactccaac

SEQ ID NO: 756929 - DNA, 100 bp, Homo sapiens
cttcatgcacaggaggagcaagaaagcctacgaggacaagcagaaactcaagcggaccgagatcatcagccgctcctggttcccctctgcccccggatcc

SEQ ID NO: 756930 - DNA, 90 bp, Homo sapiens
atatcatcaccaattttatgcgaacccgggaagaagctgcaacattattcctctgcaaagatgattgtccctggggaacagtaacaggaa

SEQ ID NO: 756931 - DNA, 75 bp, Homo sapiens
atcaaagctttgcgcaacgccaacctcaggcgagatgttggtgacaaagttcctgctgatataaggttaacttcc

SEQ ID NO: 756932 - DNA, 73 bp, Homo sapiens
agagcggccgccgccgctgccgcttccaccacagtagtattattgattccacagaatacagccaacctccagg

SEQ ID NO: 756933 - DNA, 74 bp, Homo sapiens
tcctgtccagccccctcacctcatatctcagccatacagtcttggctgttcaaccgtactttctccagaaggat

SEQ ID NO: 756934 - DNA, 100 bp, Homo sapiens
ctggcagcgccatggagacggtacagctgaggaacccgccgcgccgtgggtgaatttgtaagtgatgtcctgctagttccagaaaagtgccagtttttcc

SEQ ID NO: 756935 - DNA, 75 bp, Homo sapiens
agttgcctgcaaagattcgaatatggaactactttatgaacaagattcacaatttagaagaccgtttgaagaaat

SEQ ID NO: 756936 - DNA, 90 bp, Homo sapiens
ggccagctctcgcttctgcaagaccacgaacacagctctgtgtccagaatagtccccaggaggcacggaacatgttacttcagaaccctc

SEQ ID NO: 756937 - DNA, 75 bp, Homo sapiens
cgctgcccgacgatgtccgcaggcggaatactcccccagttgcaagaggcgcaggaccgtggaagacttcaacaa

SEQ ID NO: 756938 - DNA, 100 bp, Homo sapiens
gcggccagatgatgctggcacagggccttctgctgcatttcctgcccagaggagattgaccccagcctgggcgtggcggagctgcctgacgagttcttcg

SEQ ID NO: 756939 - DNA, 100 bp, Homo sapiens
gaccacctgaaggccgaagacacagacttctcgaaaaagcttgtggtgaaggggggcaaaaaaaagaagcaagttctgaagttcactcttgattgcaccc

SEQ ID NO: 756940 - DNA, 74 bp, Homo sapiens
tggaggttccttcactgtgcgtgctgaccatggtcaaaaccgctttccgggatgccgctgcaaagcacagtgca

SEQ ID NO: 756941 - DNA, 136 bp, Homo sapiens
gcgccccctcccccctccggcgcggaccccgcgtgcgccttgctcgcccgcagccccgagaccgcaggtgctggagaatctggtaaaagcaccattgtgaagcagatgaggatcctgcatgttaatgggtttaatg

SEQ ID NO: 756942 - DNA, 101 bp, Homo sapiens
gtgagccgaatcagaactctctttatctctcctacagagttgtggaaagtaaaaatgtagccctaccaaaaggaactattgtactggcttctccaggctgg

SEQ ID NO: 756943 - DNA, 83 bp, Homo sapiens
atattctggtggggagatgaacccaacctagtgggtgtaatacatcatgaactgcaggttggtagctggcagtgttgtgatgg

SEQ ID NO: 756944 - DNA, 113 bp, Homo sapiens
cccgggaggaaggaacgaggcaaggagctaaagcagcgtgcgttcagccctgggtactatactggcaattgctggagaagattttgcaattgttgcttctgatactcgattga

SEQ ID NO: 756945 - DNA, 80 bp, Homo sapiens
ggacccggtgtctgctcctgtcgccttcgcctcctaatccctagccactatgggggggccctcagcctcttggccttgaa

SEQ ID NO: 756946 - DNA, 75 bp, Homo sapiens
cagagcctctggataccactataatgcactgacctgtgaggggtgtaaaggtatttaccttgctgtggattgctg

SEQ ID NO: 756947 - DNA, 83 bp, Homo sapiens
agcggctccgcaagcgctaccccaccaacaacttcgccgagctattgaccagtgcagagaagagagcagaaatgcagaaacag

SEQ ID NO: 756948 - DNA, 100 bp, Homo sapiens
gtaaacttcacaacatgatagttgatctggataatgtggtcaaaaagggctacttctacaagtccgaacagccagtccagcaaaatgaacagcattgtct

SEQ ID NO: 756949 - DNA, 78 bp, Homo sapiens
ggcagaagagaagcagtgaaggagtgcagaggcatcacctgaaaggcggcccctatcagattgaggtccacatcgtgg

SEQ ID NO: 756950 - DNA, 89 bp, Homo sapiens
ctcctgtgcatcacaagtctttgctattagtattgaatgctttacttccaaccctaagaaaacaatattgcacattaaaagaagccggc

SEQ ID NO: 756951 - DNA, 75 bp, Homo sapiens
cccaaatcagtctgaaagtacctgctatgaagtggcgctcctgaggttgatgctatgaaactgggagtaaaggaa

SEQ ID NO: 756952 - DNA, 50 bp, Homo sapiens
ttaccatggtcctcaaattaaaggcgaagctgctctcaggggagaaccca

SEQ ID NO: 756953 - DNA, 78 bp, Homo sapiens
cagagaagagcaactcggagttttgggggtgtgctttcaaatgcagccctgaggatttggctactgcatataacaaca

SEQ ID NO: 756954 - DNA, 82 bp, Homo sapiens
gcagggcaagcacgggaagaagcagctggacccgctcaccatctacggcatccggtctgtttgcagacaaggtcccaaagac

SEQ ID NO: 756955 - DNA, 100 bp, Homo sapiens
tcccctggtgatgtacctcagcggcttcttgtcctccttcctcatgaagcccatcaacaagtgcattgggaggaacgaagcagatgaagccaccctggcc

SEQ ID NO: 756956 - DNA, 100 bp, Homo sapiens
cccagcctttgcggggcttagtgaggctcccgatggcgggagctccaggaaaggtatattactcgaggggtttttaaatattgtcaggaaaaagaaggaa

SEQ ID NO: 756957 - DNA, 76 bp, Homo sapiens
gctttatcatcggttattaaggagcttcgcaaggctactgaagcactgaagatcaggatcctcatgaccagccaaa

SEQ ID NO: 756958 - DNA, 100 bp, Homo sapiens
agaagaaactcgaggagctaaaagcgaaggccgcggggaaggggcccttggcatttgatgaatacagaaatatcagccaaaaggacattgtggacagcat

SEQ ID NO: 756959 - DNA, 50 bp, Homo sapiens
tctgcctcctcatagagcaagctctgtcctccgggcctcatatgaacagg

SEQ ID NO: 756960 - DNA, 100 bp, Homo sapiens
gagaaagtctttatttacagcttcatggagacctggtcaggttgctgaggcctattgtaagacgtggtcctaccgagaggatgcactgcttgccttgtct

SEQ ID NO: 756961 - DNA, 100 bp, Homo sapiens
ttcagatgggatctttccggatcaatccagatggcagccagtcagtggtggaggaaacttccattttagaagaatacagtatcaattggactcagaagct

SEQ ID NO: 756962 - DNA, 50 bp, Homo sapiens
attgcctctgatgtcaagcgaaagagccgtctcaccgcaagctccgtggg

SEQ ID NO: 756963 - DNA, 50 bp, Homo sapiens
gaaagtcatgttacccaacaccgggagcttactccacgggaacagcctct

SEQ ID NO: 756964 - DNA, 49 bp, Homo sapiens
ccgctttcggctcgggcctcagcttgcgcgatctctggcctcttcaact

SEQ ID NO: 756965 - DNA, 80 bp, Homo sapiens
ttgtctgtgacagtaacagtacttgggatcccccagttccaaagtgtcttaaagattctggaggaagccgaccaccattg

SEQ ID NO: 756966 - DNA, 96 bp, Homo sapiens
ctggatgtccccctggatcttcacacagctgcttccattggccagtatgaagtggtgaaggagtgtgtgcagcgatctgggcacgaaagcttctct

SEQ ID NO: 756967 - DNA, 89 bp, Homo sapiens
gggcgcaggaccggccgcagtgccacttcgacatcgagatcaaccgggagccggagctgattggtcagatggttgtatcctgaccttcc

SEQ ID NO: 756968 - DNA, 100 bp, Homo sapiens
caagtctgaagagaccctggatgaggctgagggtaaaaagctgggattggtaggctgggtccagaacactgaccggggcacagtgcaaggacaattgcaa

SEQ ID NO: 756969 - DNA, 100 bp, Homo sapiens
ctgcatgatctgcggggccaggtggccaagaagcgggcttttgccatgttgtccaggctggtctctactcctgggctcaagcagtcctcctgcctcagtc

SEQ ID NO: 756970 - DNA, 101 bp, Homo sapiens
cgcctagagtagcgacccggggggagcgcggggcgacgctggctgcagggacccggtgacagcgtgagaggtgagcgagtgctgtgctttcatgggcctct

SEQ ID NO: 756971 - DNA, 90 bp, Homo sapiens
ctaaactccaaatattagagcttagagaaaaccagttaaaaatgttgcctaaggaatatatgaggataatgaaatttccaataatgcgtt

SEQ ID NO: 756972 - DNA, 100 bp, Homo sapiens
caggagtattaaatgaaaacacagtttctgcaggaaaagatctctctacttctcctaagtcctggtggactctccctgggaaagagtccctgaatctctg

SEQ ID NO: 756973 - DNA, 50 bp, Homo sapiens
ttgggatggaaaagaggagtccaggtgactctgacatcattagaagcatg

SEQ ID NO: 756974 - DNA, 89 bp, Homo sapiens
tgaatcacacgccgccatccgggaggcccagggaaggtgtgagttcttgatacgaatgaaaggccaagagtttgttgatgagattcaag

SEQ ID NO: 756975 - DNA, 100 bp, Homo sapiens
caagcacctcgggatcccattccttcacagggaccctagccagaaagggctattgcaagacacgaagtccgagaaattgagcagcgacatacaatggatg

SEQ ID NO: 756976 - DNA, 100 bp, Homo sapiens
ggaaagctgtgtggtgcgagtaactgtacagtgaaccaaccggtgagccctctcctaagagacccaggggaagacccaaaggcagcaaaaacaagagtcc

SEQ ID NO: 756977 - DNA, 101 bp, Homo sapiens
ggagtaagaggggttggctgtgaatgataaggagcacaagtgtcctttgatttgtgggaggaaactccgttgtggccttcataggtgtgaagaaccttgtc

SEQ ID NO: 756978 - DNA, 75 bp, Homo sapiens
gaatatatccgaagcctgaagatggttccaagtattccctatctaggctactgaaagcattaaaatgctggtgac

SEQ ID NO: 756979 - DNA, 76 bp, Homo sapiens
ggcgcccgaggggccgagcgagggcgtctctggccgagcctctttttgtggaaaacgacagcagcagcagtggcct

SEQ ID NO: 756980 - DNA, 50 bp, Homo sapiens
gtccccgcagttttcaatcatggcatcaactgtgaaatctgtgttagaat

SEQ ID NO: 756981 - DNA, 100 bp, Homo sapiens
ccagactcagggcgtgggcgcagtgagaagaaggctatcaattgctctatatgcaatcagtgctgtctactttgctggagtgatggtgcgactgatgttg

SEQ ID NO: 756982 - DNA, 98 bp, Homo sapiens
ccggagcccccagcgcagcggccgcggtcaaaatgcagatcttcgtgaaaacccttaccggcaagaccatcacccttgaggtggagcccagtgacacc

SEQ ID NO: 756983 - DNA, 82 bp, Homo sapiens
ctgggcaccaggaagcgaaggctggagccttcacgtaaatgggtccagtcatgcctcccagtaagaagccagaaagctcagg

SEQ ID NO: 756984 - DNA, 100 bp, Homo sapiens
tttgaggttcatttaaccccaaaatcagtgattctacatctcaagctcatattttgaagtgtttacgggttaattatagaaaatgccaagtaggaaattt

SEQ ID NO: 756985 - DNA, 82 bp, Homo sapiens
cggggtgctgcaaggggagcggctgctcaccatgtcctgcagtgacaagattgcacgatcaacaggcggtccttcgggtcgg

SEQ ID NO: 756986 - DNA, 107 bp, Homo sapiens
ggaggagctgtgcagccgcgaggaggcgcgggaggtgttcgagaacgaccccgagacgggagtaccctgacttctaccggaagctctacggcctcttggacccctct

SEQ ID NO: 756987 - DNA, 90 bp, Homo sapiens
tcggagtcgaccagatcgttctgaacttgtcaggatgcacattttagaagcccgttctgggccctcagcccgcggaacacccagggctcc

SEQ ID NO: 756988 - DNA, 90 bp, Homo sapiens
gtctgaggcggagggagtaatggtctcccctgccaaatccaccctagcccactgaagcgctccatgtcactcatccctacaagcccccag

SEQ ID NO: 756989 - DNA, 82 bp, Homo sapiens
agtccaggctgaagacagagggctctgatctgtgcgacagaagacgtcttgagtgaagatgaaaatgacaagaagcaaaatg

SEQ ID NO: 756990 - DNA, 90 bp, Homo sapiens
gcgtcaaggactccccgcgcttcaggaccaagaatcgccttcagccctgtctggtgcatccttggcagaaagtgaggaggaaaacacccc

SEQ ID NO: 756991 - DNA, 101 bp, Homo sapiens
tcctctgcattgccattgttctgagaccctgatgatccgagactggtggatgtgcatgatcatcagcgtgatgttcgagttcctggagtacagcctggagc

SEQ ID NO: 756992 - DNA, 83 bp, Homo sapiens
ctcgcggccctcagggcacagcccaaggctgtcagcctcccggcccagctgcaagctttcttcctggtggcagatgacatcat

SEQ ID NO: 756993 - DNA, 98 bp, Homo sapiens
cggctcaacccaccgctgccgaaatgaagtataaggtctgaatttcctgctgctgttcacaaagatgctttttatctttaactttttgttttccccac

SEQ ID NO: 756994 - DNA, 118 bp, Homo sapiens
ggaagtgagcggcggcagctgcgaggctcggagaaacaggcgccgcgggctccgcgcccggccggacccgggcccgaggggaacgcccttttgcttgtgactggcagggctgcgacaa

SEQ ID NO: 756995 - DNA, 75 bp, Homo sapiens
agtgatttgcctcagcttgtactagctaaacttgacgtcctacagaatttctctaacttaacatgttgagtctct

SEQ ID NO: 756996 - DNA, 50 bp, Homo sapiens
agtctatggagccgaacaacatcgtgtattttgagcacgttgaagaagct

SEQ ID NO: 756997 - DNA, 75 bp, Homo sapiens
cccgctgtagcaaacgtccgcggcctctcagtgcagtgtgccctgaaccgccctgccttctttgctgagaggctc

SEQ ID NO: 756998 - DNA, 82 bp, Homo sapiens
gttgccatgaaatatggaaacgactcctcggccgagctgagtgagattcctcagttccttttagatgattgctttaaaaatg

SEQ ID NO: 756999 - DNA, 83 bp, Homo sapiens
ccctgatcgcctgcggcaagtgctgcctgcaggtccatgccaaccgttggtcccaggaagacatgctgactttgctggaatgc

SEQ ID NO: 757000 - DNA, 74 bp, Homo sapiens
gaggcactcagttggaagagtccagcaaggtctctccttacggggccagggcaatttcttttcgttcttgcccg

SEQ ID NO: 757001 - DNA, 100 bp, Homo sapiens
ctgagctggaccttgtctgatggcttcctccaaccctcctccacagcctgccatagggtaactgcataacctgtgagggccgggtggacagccaggagta

SEQ ID NO: 757002 - DNA, 90 bp, Homo sapiens
tactgcgccgactgcgaggccaaagattgattataccggaacagagccttccagtccctgtaataaatgtttatctccggatgtgacacc

SEQ ID NO: 757003 - DNA, 100 bp, Homo sapiens
gctacagagtgtagttgggaccatttatatgtttatgatggggactcaatttatgcaccgctagttgctgcatttagctttggaaacatgatgagcaagg

SEQ ID NO: 757004 - DNA, 75 bp, Homo sapiens
ctgggaaatgccgtgtcagtggggttgttttggactgtgaaccagaagagctgactgactggtctatggatgaaa

SEQ ID NO: 757005 - DNA, 100 bp, Homo sapiens
gagaataacggctgcacctggagattgacgcagagtgggcggcggtggtgaacctaaaggcagacccagaagagctttttacaaaactagagaaaattgg

SEQ ID NO: 757006 - DNA, 74 bp, Homo sapiens
ggatgatgagcgccttaaggatctctttggcaagtttggtgaagttggacttctggtttgcaaaatcacacaac

SEQ ID NO: 757007 - DNA, 97 bp, Homo sapiens
tcctgctgaagggcagcggcgcccccgcacccccgtgccccgctccggccagaaggcgtccagctcagcgcatgaaggtcgcctcagtgacccacag

SEQ ID NO: 757008 - DNA, 100 bp, Homo sapiens
ccgggatcgtgaccgagaccgtgaccgagagcgtgaccgagagcgcgaatatcgtcatcgttagaagacgtggctggtggctattcatattccatgcttg

SEQ ID NO: 757009 - DNA, 93 bp, Homo sapiens
ctgccatgcaggcaggccctgagcacgctgctgtgtgagcagcagacaatgcagatcttcgtgaagactctgactggtaagaccatcaccctc

SEQ ID NO: 757010 - DNA, 83 bp, Homo sapiens
agatagagaagatcgtgggctcagaaatagacagtacgggaaaattcgcttttcctggcttggccgatggtggagaatcaaag

SEQ ID NO: 757011 - DNA, 96 bp, Homo sapiens
agaagattacctttgactcttgtcccagataagccaatggacacgtcagtgttatctgaagaaggaggagagccttttcagaagaaacttcaaagt

SEQ ID NO: 757012 - DNA, 100 bp, Homo sapiens
attacaatcgcttgtacaaaggagagtttaaacagccaaaacagttcattcatattcagcagttgcatgctgagaatttgaaaaatgaagatgatgtaga

SEQ ID NO: 757013 - DNA, 83 bp, Homo sapiens
catagggacagccgcccctggtgcacacaccctcgtattctcctgcccttccccagatctgactgcagccatgagcagcaatg

SEQ ID NO: 757014 - DNA, 90 bp, Homo sapiens
ggcggccccagcgcgtggcagccgtgcgccgccaagggccatgaagcccccaggaggagaatcgagcaatctttttggaagtccagaaga

SEQ ID NO: 757015 - DNA, 100 bp, Homo sapiens
ggggatgccatttattactgtgccacctgctctgaggaccccggcagcacctatgctgtgaaagagaggagaggcagcagcatggcgagtgtcctgtccc

SEQ ID NO: 757016 - DNA, 101 bp, Homo sapiens
aaccagatgttcacagaaggagaggaaatgtatcttcaagacgcatcttctctccagactgccgatcccagaaagccaggtgatcaccattaaccccgagc

SEQ ID NO: 757017 - DNA, 90 bp, Homo sapiens
gctgtaaccacctcacagattccagcttcggaacaagagaccctggtagaaacctgtgggttcttgttgtggggcggtttccaaaggaac

SEQ ID NO: 757018 - DNA, 48 bp, Homo sapiens
ggtgttcgagaacgaccccgagacgaaaaacacaccttgactttagtc

SEQ ID NO: 757019 - DNA, 100 bp, Homo sapiens
agttctgagaacattacagcagatcaagaaatccagctcaagtatctacgagaccccagcaggcaccatcctttaccatgctcatttagacatcgaggcc

SEQ ID NO: 757020 - DNA, 82 bp, Homo sapiens
gggaaccctggtcaccgtctcctcagatgacttcaaacctgcttctattgacacttcttctgaaggataccttgaggttggt

SEQ ID NO: 757021 - DNA, 100 bp, Homo sapiens
caaagctgttgtctcagggagcacagaagaactggttgctgaaagcatgggagaggagtgcagaggtattccagggtctgtgttcaagaggaccagcccg

SEQ ID NO: 757022 - DNA, 74 bp, Homo sapiens
tatggaaactcatcaggacggaagcacaggggccactcagagtcgcccgagaaacagagtcttgctctgttgcc

SEQ ID NO: 757023 - DNA, 82 bp, Homo sapiens
gaagagcatgatcggcatgtccaccaaggcagggtgctttcttctgcgacctggtactcatctacctcatcaaaaagagaga

SEQ ID NO: 757024 - DNA, 100 bp, Homo sapiens
ccttgtttaatgactttggtgccctcaacatctctcagagacgaaagggccgttgctccagggagaactgcaaatatcttcatccacccccacatttaaa

SEQ ID NO: 757025 - DNA, 75 bp, Homo sapiens
tgaggcggaggctgacgaggaggcggatcccccggcgtcagttactccacaggatccgctgaacataggatgttg

SEQ ID NO: 757026 - DNA, 83 bp, Homo sapiens
cgaccccgtcccgaccctggccgccccgagcggagcctggagggagcatcgagtacagctgtccggcctccaacgagtgtgag

SEQ ID NO: 757027 - DNA, 80 bp, Homo sapiens
gtggatcctgtccttcatgcagtctctcattggcttctttgagactgaaatggcaggaactgtggctgcaccatctgtct

SEQ ID NO: 757028 - DNA, 101 bp, Homo sapiens
gttgatttatgctctatgagtaatggtcaaagaattgactgtagatccaactgctgctggtgatgttcgtccaataatgcaccatccaccaaaccagattg

SEQ ID NO: 757029 - DNA, 100 bp, Homo sapiens
tgcccgcactggtgtcacagatcagcccccctatgtctgccttggtggtcctgtccagtcttactgatggccagtggtgaatgtgtcactcccccgcagc

SEQ ID NO: 757030 - DNA, 75 bp, Homo sapiens
tggccgagcaggctgagcgatacgacgatcatggaagggaagtggttgctgtgtatgttactggtgcttggaact

SEQ ID NO: 757031 - DNA, 75 bp, Homo sapiens
ctggcacgccccagcacacgagttacctagaaaagtacgagaaagttcatcattttggggaggatgatgatgagg

SEQ ID NO: 757032 - DNA, 75 bp, Homo sapiens
tccaaagaagctcctaaagcttgcagaaattttatccaactttgtttggaagaatgttggctaccagggtattta

SEQ ID NO: 757033 - DNA, 97 bp, Homo sapiens
accaaacctcaaagcatggctaagagtgttcagtagaaatgggtgaccaagaatatggcccaggtgaccaaagccctggacaaggccctgagcacca

SEQ ID NO: 757034 - DNA, 100 bp, Homo sapiens
tcctggctacatcgccgtggacgaggtccgggtccttgctcatccatgcagtgggaagaagagcgctatcctgaaggcatcaagtggaaattcctagaac

SEQ ID NO: 757035 - DNA, 98 bp, Homo sapiens
agcaaatttttgaaatagttcatgaaccaaatcatcaggaaatactacgagactgtctcagcccatccctacaaggagacatggtgaattatgatgaa

SEQ ID NO: 757036 - DNA, 90 bp, Homo sapiens
ctcatgtccctgtgggacacaatgcccccaagttcctccgtgtcacaaagcagtacctgccccacgtggcgcgcctctgtctgatcagca

SEQ ID NO: 757037 - DNA, 80 bp, Homo sapiens
ccaagctcctggccctggccctgatcatcctgctgggcttcgtccagatcgggaagggtatcatgatattagctggtttg

SEQ ID NO: 757038 - DNA, 99 bp, Homo sapiens
ggggccgcgccgccaccgtctgaactaggatgtcccgacatgaagtcagccataatggcaggtgaagaaattaatgaagactatccagtagaaattcac

SEQ ID NO: 757039 - DNA, 100 bp, Homo sapiens
aataagctatatactttggttacctatgtacctgttaccactttcaaaagagatacaactcgtcaacgaatcaaattcagtgatgacagagtatgcaaga

SEQ ID NO: 757040 - DNA, 76 bp, Homo sapiens
ggaaaaaatgacatccagcgacaaggactttaggtgttggtaaatcatgcttattgctacagtttacagacaagag

SEQ ID NO: 757041 - DNA, 100 bp, Homo sapiens
ccgaccgccatttcacatccagcagaggaggcgggggcagccgctgagacggtttttcacaaggcagacgcgtgccatgcctaccagatcattcaccgca

SEQ ID NO: 757042 - DNA, 100 bp, Homo sapiens
ctcgcacatttgacttggaagcaatgtttgaacaaactcgaagaacagctgtggaaagaagttgcaaaacactgggggcaagattcttgccaagagaatt

SEQ ID NO: 757043 - DNA, 82 bp, Homo sapiens
ctcagcctggacctgtaccaaggcaccgggtccctcgcccaggtccccttggacaaatggggaaaggcgtaggaggaggagc

SEQ ID NO: 757044 - DNA, 100 bp, Homo sapiens
ctactcaaaattctacgttagagagactgaaaagacatctaatttcattgctcggcaggtgtcatggagaaactccagctgggcccagagattctgcagc

SEQ ID NO: 757045 - DNA, 90 bp, Homo sapiens
cgcgcggacccaggcgcggatggcgaggccagcagagcgccgccctgtgctgggctgccgggagctcgtcttcaggaacctctccaagat

SEQ ID NO: 757046 - DNA, 100 bp, Homo sapiens
tttttcagaaatgcgcagagcaaacatctttcaaaggcgtttagatgccaaccatattacctcagtccccgaggacagttttgaaggacttgttcagtta

SEQ ID NO: 757047 - DNA, 75 bp, Homo sapiens
tgatccagaagtccagagctgaggactgcctgtttgcaggagtataatgtctcaggaaggcgattatgggaggtg

SEQ ID NO: 757048 - DNA, 75 bp, Homo sapiens
gattctgctggtatacagctacatccaggagagaatgctgacagtcctgcaggccctcgggaccaaggatcacgt

SEQ ID NO: 757049 - DNA, 98 bp, Homo sapiens
attagatgatccaagtcaccaagaaattactgtctcaagtgatacgacatagggcctgattacattccaacagaggaagaaaggagagtcttcgcaga

SEQ ID NO: 757050 - DNA, 99 bp, Homo sapiens
ggaaccctcactgagaataagatggtttttcgaagatgtagtgtggcaggatttgattactgccatgaagaaaatggggatcatcgtcttgctcttctt

SEQ ID NO: 757051 - DNA, 75 bp, Homo sapiens
agaattcccaagccaaagctttccaggcatgaagaccccgtttggaaaggcagctgcagggcagcggtccaggac

SEQ ID NO: 757052 - DNA, 75 bp, Homo sapiens
tggcgggaaacgctgtttgaagcggggctatgagggcctcgtggagggaggtgagaacatcaagcaggccaactg

SEQ ID NO: 757053 - DNA, 96 bp, Homo sapiens
agctgatgaaatgttgaataaagtcaaggggaagagtgattcctcacactgctttcaagctggactgagccagtctcattctgggaaagaaacgct

SEQ ID NO: 757054 - DNA, 75 bp, Homo sapiens
gagacctctacttagctcagcaattcttaccttactcagaaccgtgctgcatactatcctcctagccaaattgct

SEQ ID NO: 757055 - DNA, 48 bp, Homo sapiens
caacatctgcaaggtccgcttcaccagcagaaacagtcctgctccagc

SEQ ID NO: 757056 - DNA, 145 bp, Homo sapiens
tttcacatccttgtctgtgaagctaaactcaatgctgctgtgtgggaagaagatttgtaaagaaaactcttaggtactaggttttgacaagcttgcatcatgcgtgagtataagctagtcgttcttggctcaggaggcgttggaa

SEQ ID NO: 757057 - DNA, 101 bp, Homo sapiens
ctgcgcgaagctggccaaagcctgcccagacggctcacctgtgcgggatggaacaaaaggagtttcaattactgaaaattacttggaaatagaaggaatgg

SEQ ID NO: 757058 - DNA, 99 bp, Homo sapiens
ctggaactgggacttcacctccgcgctcttcttcgccagcaccgtgctctccaccacagtgaacagagtatctgtcaggcaagagctgctgtgatggtt

SEQ ID NO: 757059 - DNA, 82 bp, Homo sapiens
cagcagaggtagttatggaggaggtgatggtggatataatggatttggaggtgatgggtctactgctgagccagtttctcag

SEQ ID NO: 757060 - DNA, 82 bp, Homo sapiens
gctcgaagaaggcgagcagggtgcgggagagccccttgcagaagacgccgtacgaggacatcggtgggatcaagtgaaaaag

SEQ ID NO: 757061 - DNA, 136 bp, Homo sapiens
gaagtggttacaagtacagactctggagccagactgcctgggtttgaattgtgcggtttcagatggactagaggcttttaccagatttcttaaaactgaattcagtgaagaaaatattgaattttggatagcctgt

SEQ ID NO: 757062 - DNA, 82 bp, Homo sapiens
caagtgcctcacccctttctacaaggagggcaagtttgcttccaaggtgaatggcgtcctgcccatcctccccctgctcttt

SEQ ID NO: 757063 - DNA, 101 bp, Homo sapiens
actgtgttcgggagtccttggaactgtggtccatggtaaagttttacagccccctgcctgggatgcgccagccactgagccttcagggacccagcagccag

SEQ ID NO: 757064 - DNA, 124 bp, Homo sapiens
ccagagtctccatcagctttgctaatcgactgattggaaataattcctcaaacaccaccaagtcaaggatacaggaaacctgtccagtttaagtcgtcttggtctgagatataacagactgtca

SEQ ID NO: 757065 - DNA, 83 bp, Homo sapiens
agctactactacgtggtgcttggaaagccccagtggacaggaaagctaaggcctcagcgatgccggactccccagcggaggtg

SEQ ID NO: 757066 - DNA, 75 bp, Homo sapiens
gaatgagttgcataaaattccatataccatgtttgtgtggaagtgccccgtgtttgctatgccgatgctgtccta

SEQ ID NO: 757067 - DNA, 101 bp, Homo sapiens
ccctcacaaagggcggagcggggctgtcacctggagatcacggagggaagcttagaccatgctcagcctccaagcagccttgtcatcgacaaagaatctga

SEQ ID NO: 757068 - DNA, 100 bp, Homo sapiens
ttgcctgggtggaattttaccttttggttcaatctttattgaaatgcagcacacttctgcttttgttccttcatcaggacgaatttactcttttgggctt

SEQ ID NO: 757069 - DNA, 98 bp, Homo sapiens
tcaggcgtgcgcggacggtgtgcggatctgtgccatcattggcgggaccttcaccgtcgccggcatcctggactcatgcatcttcacagcctctgagg

SEQ ID NO: 757070 - DNA, 82 bp, Homo sapiens
agatccgcggaggccgacaggattcgttggctgccgtccccgctgctgtgcattggttgatattcactgatggactccaaag

SEQ ID NO: 757071 - DNA, 50 bp, Homo sapiens
cctcaacaacttttcagtggcaactcattgctatggacagtgctatcacc

SEQ ID NO: 757072 - DNA, 50 bp, Homo sapiens
cggccgccggctcccccacgagaattaaacaaccaccatgtcgagcaaaa

SEQ ID NO: 757073 - DNA, 75 bp, Homo sapiens
gtcccaggggaggcccccacctccccttctattgttctgtggcccaggttgcctgtggctggagaaaggaatgtg

SEQ ID NO: 757074 - DNA, 100 bp, Homo sapiens
ccgcctggcccggctcatcaaggaggccgtctgggtggagatgacccctgagaagttcagtgtcttaatggagaagctctgtaaaaaggggctggcagcc

SEQ ID NO: 757075 - DNA, 75 bp, Homo sapiens
actagtgtctagaaggcactaagggtgaaaggtgtagcagtcactcggcctacacccacagcatcgaccttgtga

SEQ ID NO: 757076 - DNA, 124 bp, Homo sapiens
gagactgacccgaccccggcactacctcgaggctccgcccccacctgctggaccccagggtgtttacaaaatatgggaagtgttacatgtttaactcaggcgaggatggcaaacctctgctcac

SEQ ID NO: 757077 - DNA, 90 bp, Homo sapiens
gcatgatctggaagcggctcaatgaccatggcaagaactggcgtcacgtttacaaggttgcacgatgggaacacaagacccgcaagctga

SEQ ID NO: 757078 - DNA, 97 bp, Homo sapiens
ccggcctcgtgcgccgcgctttgagttacagaatgtctgaaggggacagtgtgggagaatccgtccatgggaaaccttcggtggtgtacagattttt

SEQ ID NO: 757079 - DNA, 75 bp, Homo sapiens
ggagcactcggtcatgtacccggtggactcggtgaaggacaatgaaaagcgaaccccattgcacgccgcagctta

SEQ ID NO: 757080 - DNA, 74 bp, Homo sapiens
ggaaaggagcgctatacctgcaggctcaaagtctaactccccaggactataatctgaggtggtcaggccttttg

SEQ ID NO: 757081 - DNA, 75 bp, Homo sapiens
cattccgtttataattttgaaaaacctgttgtcatgaagctggttatattctgggcactaaatgaaggcgtttct

SEQ ID NO: 757082 - DNA, 75 bp, Homo sapiens
agtccccagtgagggtgtacaaatacccctttgaattaattatggctttttcggctttgtgagaaaccttaccat

SEQ ID NO: 757083 - DNA, 75 bp, Homo sapiens
gaaaattgaccacagcacagtacagagtatctaagaggaacgtgttgtgggctttcacgtactgggtccaaatgc

SEQ ID NO: 757084 - DNA, 74 bp, Homo sapiens
cctgtgaccagaacggcacggccatctgtgtgtctgggcagtgcaaggccgggatagaaaatcgtcagctggac

SEQ ID NO: 757085 - DNA, 98 bp, Homo sapiens
gatcgctatgttccttatcactctgcccgcattgaaatgtgtaaaacagctttaaaggacaaacagtcaggatcaccccttctgtgtcattctctgag

SEQ ID NO: 757086 - DNA, 100 bp, Homo sapiens
agatatgctcatgtggtgttgaggaaagcagacattgacctcaccaagagggcgggagaactcactgaggatgaggcaggaccagatgctgtgttgggga

SEQ ID NO: 757087 - DNA, 75 bp, Homo sapiens
tctccacgacctcggtcgagcatgttcaccagggcccagccaatgttttcagttgcaccaagcttagccaccaat

SEQ ID NO: 757088 - DNA, 83 bp, Homo sapiens
gggataggcacggacgcaacacttttggaacttagacgctaccatccacgaaaatgctttcattgtgttcattgcctcatccc

SEQ ID NO: 757089 - DNA, 75 bp, Homo sapiens
taatatgaacggaataaataattccagtgggatggttttatgacttacctagtggagcctttatttacagaatgg

SEQ ID NO: 757090 - DNA, 100 bp, Homo sapiens
ttcacacgtctcaatctctacctgcattctggtcaggtggccttggccaaccagtgcctctcccaagtggatgatctcttcagggaagcagatatcgaac

SEQ ID NO: 757091 - DNA, 88 bp, Homo sapiens
atggtggagtaggaggcaggtctccgcgaactctaagaaggagctgatgtggaggagcagctgagacagttcaagatgacgaccacag

SEQ ID NO: 757092 - DNA, 75 bp, Homo sapiens
ttggaccaagagaacaatgggaaccagtctttcaaaatcccagagcatgttccagatcccagagtttgagccgag

SEQ ID NO: 757093 - DNA, 100 bp, Homo sapiens
tgctagaattacctggaacttcatcatcatctacttcacaggaattgccatttaaaatgtatggagatctagatgtcttattcctgacagatgaatacga

SEQ ID NO: 757094 - DNA, 100 bp, Homo sapiens
cagaagtttggatagaagatccttatattagacatactcatcaggtgaatgaactggtgcaggtagaaacgtacctccgcagtgaaggtgtgctggtgcg

SEQ ID NO: 757095 - DNA, 75 bp, Homo sapiens
ggacccaggcggttgaggctggtcagctctctgtcctagggcctggcggcagttacacaccatctaccagtctgt

SEQ ID NO: 757096 - DNA, 139 bp, Homo sapiens
gaggacgagggcggagccgccgccgcgcctgcgcagaaggccggggccggccagaagcgggcggcgcgggggagatggtactccaaagattcaggtttactcacgtcatccagcagagaatggaaagtcaaatttcctg

SEQ ID NO: 757097 - DNA, 83 bp, Homo sapiens
ttcccgcgtccgccgattcctcctccttggtcgccgcgtccttggctggcgtctctaagcgaaagacatgaggcctcagcctg

SEQ ID NO: 757098 - DNA, 98 bp, Homo sapiens
gaggagttgtacggcctggcactgcgcttcttcaaaggatttgttgagaaagagataagaaaagctaacattccgattatggacaccggtgaaaaccc

SEQ ID NO: 757099 - DNA, 74 bp, Homo sapiens
agagaagaaatgctgtggcatctgttgtcgcaggtatattgatctccagtctatgtgctgaagaagcagcagcc

SEQ ID NO: 757100 - DNA, 75 bp, Homo sapiens
gccatgagccgctacatactcatcatggggctcctgtacaagatgctggacgagaaccaccacctgatccagtgc

SEQ ID NO: 757101 - DNA, 74 bp, Homo sapiens
gcacgtcttcgccatcttcaacacggagcagaggctccttggcgatcccagcaccatccatccggctggtgccc

SEQ ID NO: 757102 - DNA, 75 bp, Homo sapiens
ggagaactgattgccctttaacagtcaatatgttggaggcatgctaagattcatgatgttgctatcaaaagttga

SEQ ID NO: 757103 - DNA, 98 bp, Homo sapiens
cggagcgctgcagggggctgcgcctgcctgctccgccccagacctgtcggcgaaaggatttgataatgggctgcattaaaagtaaagaaaacaaaagt

SEQ ID NO: 757104 - DNA, 75 bp, Homo sapiens
gtcgctgcatacctccttccctgtcctcaatcaggtcatttcttcagatagctccccagctgtggaaaatgagca

SEQ ID NO: 757105 - DNA, 123 bp, Homo sapiens
ggatcgtgaccgagaccgtgaccgagagcgtgaccgagagcgcgaatatcgtcatcgttagaaggtcccctcttgctgttggctgcacatcaggaaggctgtgatgggaatgaaggtgaaaac

SEQ ID NO: 757106 - DNA, 74 bp, Homo sapiens
ctgcgggaaatcgggctgaagcgactgagtccgcgatggagcgtacacagactttactaaaagagtacaaagaa

SEQ ID NO: 757107 - DNA, 82 bp, Homo sapiens
agatgtgattaatgtattccaccacctccgccagttaagaggaaaaagacttattcgtctaatggaagagatcatgagtgag

SEQ ID NO: 757108 - DNA, 100 bp, Homo sapiens
gctgtggaagatggagctacagaaatcgacgtggtaattaacagaagcttggtgctgacaggccagtgggaagatcctgataacttaagtgactctctct

SEQ ID NO: 757109 - DNA, 100 bp, Homo sapiens
cgtgctattcctggtctacatcctgcgggtgcctttgaaaatcaacgacaacttgagcacagtggtcgtggagtcggactttgtgaaatacgagggcaag

SEQ ID NO: 757110 - DNA, 90 bp, Homo sapiens
gccaagaggaggacagttcgctacacagcaatgcatcgagcgtcgtctcggagatgcagccaagaaagccatcagtaaattgacaaccag

SEQ ID NO: 757111 - DNA, 100 bp, Homo sapiens
cagtgtgacagtccatatgtaaccaaatattatggatcctatctgaaggcctcaggagtgcaagtagctgatgaagtatgtcgcattttttatgacatga

SEQ ID NO: 757112 - DNA, 95 bp, Homo sapiens
gtcatgatggagaattatggaaacctggtctcactggatcatggaagggaagtggttgctgtgtatgttactggtgcttggaactgctattgttg

SEQ ID NO: 757113 - DNA, 75 bp, Homo sapiens
atctatgccatccctgaggacatcatgcgaggcagtggcacccagatatgggtaagtgtcaccttaccaaaggca

SEQ ID NO: 757114 - DNA, 100 bp, Homo sapiens
cacaggacaccgcaccctgaaggtcctcagggaccagatgaggagggatccagagggtgcccagatcctgcagtaactaggatttctacctcaaccgcga

SEQ ID NO: 757115 - DNA, 74 bp, Homo sapiens
aaggattccaagtaactcttatttgcaaagaatggctcaagaagtactgacacatttaaaggagcatcctgatg

SEQ ID NO: 757116 - DNA, 90 bp, Homo sapiens
gtttttagccttttaacattcaaggattaggttgaaaggattgttgacaaaaggaaaaataaaaaagggaagacagagtatttggttcgg

SEQ ID NO: 757117 - DNA, 100 bp, Homo sapiens
tttcaatgtgacacaaggaaagtattctacagagctttcagcagaggccaaggcagcattgcttgaatttgaagaaagggagcgacagcataaacaagga

SEQ ID NO: 757118 - DNA, 75 bp, Homo sapiens
ccgcctgagcgactaactcctgcgcccctgagggctgcaggccaacttcaccatccgggaagatgccaaccccag

SEQ ID NO: 757119 - DNA, 51 bp, Homo sapiens
caagagagagactattttcgttattacaagacagggtctctctctgtcacc

SEQ ID NO: 757120 - DNA, 139 bp, Homo sapiens
cagaacagcacgtaccagaggtggaagtccaagtcaaacgcagaaggactgcctcactgagcaaccaagagcactggtgaggtggattgatgatgaatcttctggcacacctggagcaactccagaacacagtcgtgag

SEQ ID NO: 757121 - DNA, 82 bp, Homo sapiens
aaagccaagctcatctctgagacccggaggaggttcgaagctgagtatgtgacaggtgttggagcgggccggagagaagtag

SEQ ID NO: 757122 - DNA, 75 bp, Homo sapiens
ggatcgctgtgatcgtcacttggtgactcgccgggccctattccctggagattctgagattgaccagctcttccg

SEQ ID NO: 757123 - DNA, 75 bp, Homo sapiens
attgacaaaatccatctcattaatgacaatcagccatcctggattggacatgagcatgtttttgaacacattaac

SEQ ID NO: 757124 - DNA, 90 bp, Homo sapiens
ggacaagtatgctgcaagtgagaacatatttaacaggaaagaccacagcaagattctttcattcgtctcctcctagcctgggggaccagg

SEQ ID NO: 757125 - DNA, 101 bp, Homo sapiens
gaaggatgaaggggaggcctggctgagctgtcatcccccagcaagttaaggtgaactgcacagctgaagtactttacccttcaacgggacaagaaactgca

SEQ ID NO: 757126 - DNA, 83 bp, Homo sapiens
ctactctgcctcggggacgaaagcagatgcggcattccaaaagaactcactgtcctgattgggatagcagagaaagctgggga

SEQ ID NO: 757127 - DNA, 74 bp, Homo sapiens
cccacctgagcccccgctgagcagcccagccagtcagcacaaaggaggacgtgcaattctgtggtgttcttggt

SEQ ID NO: 757128 - DNA, 73 bp, Homo sapiens
agagttgaatgccagttcagttggaatggcaaagcttatctattttaggcaaggacatgaagcttatgttcgg

SEQ ID NO: 757129 - DNA, 89 bp, Homo sapiens
ctcggatacgatagaaaatgtaaaggccaagatccaggataaggaagctctcatttcactcttcagtgttcctgttatttatgaacggc

SEQ ID NO: 757130 - DNA, 98 bp, Homo sapiens
aattataggaacctggtctccctggggctggtgaattaccatatctccgtcaagtgcagtaaccagttcaagttggaagtgtgtcttttgaaatcaga

SEQ ID NO: 757131 - DNA, 75 bp, Homo sapiens
actatgaatgctacttggatgcctcttaagaaatacatgctacaggatttaactatcagaatgaagatgaaaaag

SEQ ID NO: 757132 - DNA, 82 bp, Homo sapiens
ttttatttcgggagcaagggggctctgctgcatcttccaatcttccagggtctctgggtgtgacactttgggagctttttga

SEQ ID NO: 757133 - DNA, 83 bp, Homo sapiens
gcacggagacggcggcagcgctggactaggtggcaggtccagggcatgtccttcatagcagcagtgttgatcttgaacttaga

SEQ ID NO: 757134 - DNA, 100 bp, Homo sapiens
gcgttgctcttgcttttcctcgctggggtgtacggtaatgcaggtggtgaaggagcaggttatgagagcacttacaaccaagcctagctccctggaccag

SEQ ID NO: 757135 - DNA, 100 bp, Homo sapiens
gggcagaaagaaactcctgtatatattcaaacaacattgtcattcttcagggatggcagccctaaacacagcatggcaactcatctactcactcatgaaa

SEQ ID NO: 757136 - DNA, 99 bp, Homo sapiens
gtcctaaagagcaagcctaactcaagccattggcacacagtgggaatttcagattggaccttgtgaaggaatcagcatgggagatcatctctgggtggc

SEQ ID NO: 757137 - DNA, 100 bp, Homo sapiens
gaagaccagtgccaaccctgagactctgctgggggagatggaggcgaagacaagagagctcattgagcaatggtggaacaaagcggcaaaagatatccca

SEQ ID NO: 757138 - DNA, 97 bp, Homo sapiens
aaatttgttcagcatgatgctgtagagggaatcttaactatgctttatggaggccaggcactgtttatcagctgctaatgtcatttttggtcaaact

SEQ ID NO: 757139 - DNA, 82 bp, Homo sapiens
cacaagacgactcaataggaggaagaagtgaagctggacaaggtttcatgctgttgctgcttagaaaagagctttgaactac

SEQ ID NO: 757140 - DNA, 96 bp, Homo sapiens
caaatccgaccaattgctcatcgtcgtgtccatcctagaaggttcagcagactgtacaggatctttttggcagagccccaagtaaagctgtcaatc

SEQ ID NO: 757141 - DNA, 82 bp, Homo sapiens
aacgatcctctcatctcagcctccaaaagtgctggcattacaggttaacacagaaatctgcctcctgggccatgccgcttct

SEQ ID NO: 757142 - DNA, 75 bp, Homo sapiens
cttaccttgcccaccaacttcagagatttgtccaaggagctgaccagtgctttggtgcatctaaaactgcatctt

SEQ ID NO: 757143 - DNA, 75 bp, Homo sapiens
aacagccaaaggggactatcctctggaggctgtgcgcatgcagcacctgatttcaggtatgctgctgaaagtggg

SEQ ID NO: 757144 - DNA, 98 bp, Homo sapiens
ctgagatcccaggaggatggccacatccccccgggctacatctcacaggattgatttccagagacttatgttacttgaggaagacaccaagaaggcaa

SEQ ID NO: 757145 - DNA, 112 bp, Homo sapiens
aaataaaaaaaaagccaaaaagataaaagcccggatgaacttcaggaaaagaatacttgagatccatttgtaaggaaagaaaaggaagcaacaacataatgcccagagttgg

SEQ ID NO: 757146 - DNA, 75 bp, Homo sapiens
atttaagcctgatctaacccctagaaacagttacatgggaataggactctcggctcaaggcgtcaacatgaacag

SEQ ID NO: 757147 - DNA, 73 bp, Homo sapiens
cggcgcagtcttcctgctttggcgttgtctctcagataagccaatggacacgtcagtgttatctgaagaagga

SEQ ID NO: 757148 - DNA, 90 bp, Homo sapiens
cgcggagttcaaggagcctacgccgagcctcaccggccaaaagcaatagccgatttggataccatcaagacacctgaaaccttatcatga

SEQ ID NO: 757149 - DNA, 75 bp, Homo sapiens
ggcgggcccggcggcgggccgaggagccgggcgcaatggagcggaagagggggggccctcagcctcttggccttg

SEQ ID NO: 757150 - DNA, 82 bp, Homo sapiens
ttggtggccatttatgaagttttaaaggatgatgaacgaaggcagagttcttacagcagctgtgacacaagcctcactgcag

SEQ ID NO: 757151 - DNA, 82 bp, Homo sapiens
acagaagagtgagagatggaacccgaagaagaaaggattcgttacagccagagattgaaagacctgagctgtcttccttggc

SEQ ID NO: 757152 - DNA, 100 bp, Homo sapiens
ctccttccccagggaatctctcctgtcagccagcactgggcaacctgggccctgtataacctcgtgtctgtctacctacgaattggagcaatgttggctt

SEQ ID NO: 757153 - DNA, 75 bp, Homo sapiens
tttttggagctactcatgttccttacttggaggaggaaggaagagacttgagctgttgtgtagcttctcttgttc

SEQ ID NO: 757154 - DNA, 100 bp, Homo sapiens
ggacaaatgaacttcaatgcagattctagccaacataaagctggaagagaagactgagaacaagttgggagaactaggctcctccgctgagagcaagggg

SEQ ID NO: 757155 - DNA, 89 bp, Homo sapiens
aagggcgacagcaacagctctgccggctggaagaaatgcacttaaacaatggtaacttttcctctgaagaagaggacgccgacaaccac

SEQ ID NO: 757156 - DNA, 90 bp, Homo sapiens
gatgcccaccgggatggagaaggaggaggaatcgttgtacaatggtagatggagtgatgattcttcctgtgcttatcatgattgctctcc

SEQ ID NO: 757157 - DNA, 98 bp, Homo sapiens
tactgtatttatttctaatgtgattttcaaactgcttcaaaacaaaacctaagtaacttagtttctccagaaggtcgcttataccaagttgaatatgc

SEQ ID NO: 757158 - DNA, 74 bp, Homo sapiens
gagcgcgcgcgcgaaaactccgggcagcccggcagcatcgagcaggcagtggaggagatccgcgtggtggtgcg

SEQ ID NO: 757159 - DNA, 75 bp, Homo sapiens
gccgaggcggtgctgcaagagaaggcactcaagtttatgccttgttgtcctcctggtgcgaagagctcggccgcc

SEQ ID NO: 757160 - DNA, 100 bp, Homo sapiens
ctgaggaggccggctgcagccccaagacagagcgctactcctggcagtgcgtcaatcagagcgtcctgtgcggtttaccttccagaggctggcaatgctg

SEQ ID NO: 757161 - DNA, 123 bp, Homo sapiens
gggttccaaacccctagccacgacatggaagaatttttgcaacgcgccaaatctaaactggtgaaaggtgtagcagtcactcggcctacacccacagcatcgaccttgtgaacccagcgacct

SEQ ID NO: 757162 - DNA, 98 bp, Homo sapiens
tagcgggagcccggccggagctgggtctggagacgccgtggcagcctgaacggagtgtgcgacggattgggagcctcttcgagcactactgctactcc

SEQ ID NO: 757163 - DNA, 102 bp, Homo sapiens
ggagtatctggcctccatcttcggcaccgagaaagacaaggcaaaatctccaaaaatcttgccagatattctgaagaaaatcggggacacccctatggtcag

SEQ ID NO: 757164 - DNA, 75 bp, Homo sapiens
gttcaagaaccttgacaagctcatccggctggtaaatgcgcagctggagccagacggactgctggtgtgggtcct

SEQ ID NO: 757165 - DNA, 100 bp, Homo sapiens
cttatgagtactgcaactgcattctatagattgacaagaaagggtaaaatccagtacaaggaatatatcattgaaggatttgaaaacatgccagctgcat

SEQ ID NO: 757166 - DNA, 50 bp, Homo sapiens
cttggattcagacgccgattcgcccagaaaaggcgacggcggattgacag

SEQ ID NO: 757167 - DNA, 90 bp, Homo sapiens
ccagttgcttgatcaggtggaacagattcagaaggagcaggattaccaaaggggggctcgaatggttcgtgaactctttgaaatggccag

SEQ ID NO: 757168 - DNA, 101 bp, Homo sapiens
agcctaccaccccagcggcaaggaccagaccgtcgggaacagccatgcaaaggcaggggaggaagccacctcgagcacgtcagctaactgttcagatgatg

SEQ ID NO: 757169 - DNA, 76 bp, Homo sapiens
tgatctcgtcactcctttctttgtggtcttcatttgtgaatacataggtgccacgggtcggagacagcacggaagg

SEQ ID NO: 757170 - DNA, 83 bp, Homo sapiens
cggacgaggggaagtcgtacagcgcctacagacctggtacctggatttttgcccgagatgattcctaccaccttactactgac

SEQ ID NO: 757171 - DNA, 100 bp, Homo sapiens
gtccgggctcccgtggccgcgtgctgggaggagactggagcccggttaggaagaatggagttggcgactcgctaccaggactcacaccacccggcaagaa

SEQ ID NO: 757172 - DNA, 50 bp, Homo sapiens
ggaaaggggaaaatgtctcagtcgaaaggatcctaagcacttcaagtcag

SEQ ID NO: 757173 - DNA, 100 bp, Homo sapiens
ggcccacctccccaccaaggaaggaagcaagactgctggtggccaaggcctacagacacaccgagaaggtgctgcaggacaacctggacaagttgcaggc

SEQ ID NO: 757174 - DNA, 74 bp, Homo sapiens
tggaggagccttctcaagaacagagcttacaaaacactacacagcaaaataatgatctgctagactgctaaccc

SEQ ID NO: 757175 - DNA, 75 bp, Homo sapiens
gaccctgtattgcagaggattgtagacattctgtatgccacagatgtgcataaggcaaatccaatacgcaagtac

SEQ ID NO: 757176 - DNA, 75 bp, Homo sapiens
acgcggtgctgcgagggcagaacctggctatttcatgcagtgcaaagattgcaaagagtacaaaaccagctgaaa

SEQ ID NO: 757177 - DNA, 75 bp, Homo sapiens
tcacggcgtacgccctcatggggaaaatctccccggtgactttcagagacccatgattttatgtttctgcaaagc

SEQ ID NO: 757178 - DNA, 50 bp, Homo sapiens
ctgttcagaccgcgctccgccgaggttatctgtgctacaattgcatttgg

SEQ ID NO: 757179 - DNA, 88 bp, Homo sapiens
atctcttctccctccccttcttgtgtttaactgctgaagagatcttttcccttcatggcttttcaaatgctacccaaataaccagctc

SEQ ID NO: 757180 - DNA, 87 bp, Homo sapiens
agctcaagtgggcatcctgggagctccattccctaaggcactgtgactctcagcgttctcatctctcttccttcaccatgaagctga

SEQ ID NO: 757181 - DNA, 100 bp, Homo sapiens
gactactgatgggaagttaattgccagagcattgagaagttcagctgttgtagaggaaaatggcattcctatgaagaaagcacgaaatgatgaatatgag

SEQ ID NO: 757182 - DNA, 90 bp, Homo sapiens
caagatggcagccaccacgggctcgggctaaatttggccgaagatggaccaaaatttcaaagctaattggaagccgcactgttttacaag

SEQ ID NO: 757183 - DNA, 75 bp, Homo sapiens
gatcaaaggaccggacaaagaggaggatctggttctgctgccggagaaggcaaacccgctttgagtgaagaggaa

SEQ ID NO: 757184 - DNA, 90 bp, Homo sapiens
cggatgccggcggtctctgctgaagagagaagatggcgcttgacggaccagagcaggttacaaccgaatgtggacactcggcagaagcag

SEQ ID NO: 757185 - DNA, 98 bp, Homo sapiens
aggacccggcgccagcatcaacccagagcgtgcttgccgatgggacagattctgcagattgaaaaggaagatcaggccaaccccaaagaagaagtgac

SEQ ID NO: 757186 - DNA, 100 bp, Homo sapiens
cccagactaccttgcacctgagctgttactaggcagggcccatggaagccttggaagatcgtttggaaaggattaatcgagaactgggttcagttcgcat

SEQ ID NO: 757187 - DNA, 50 bp, Homo sapiens
cgccaggcgccgctcctttacagtgtactaatggtcacttgatgtgcgct

SEQ ID NO: 757188 - DNA, 75 bp, Homo sapiens
aaaaaacccttcactgtgaagagacatgagatgattgccaaatccccagaccttaaacagattcagagaccgtgg

SEQ ID NO: 757189 - DNA, 100 bp, Homo sapiens
ctcacttgcatgtatttggaacaaaaaaaggagatgcctggcagccccgctctctgcacttcgttgttccctctggcttgtgggggcacggctgtgctcc

SEQ ID NO: 757190 - DNA, 100 bp, Homo sapiens
ttggtgtggacgttgtctaaatttcggtagccatggcacaagaatataaatccagcaactatcacaagaatactccttagccacttcaattgggataaag

SEQ ID NO: 757191 - DNA, 98 bp, Homo sapiens
ctcgcgctgcaaggatgctcctgggatttcggagaggccgcaggagtcatttcataaatactgcaacaactgtagctgacttaaagtcaataataaat

SEQ ID NO: 757192 - DNA, 96 bp, Homo sapiens
ctttttcatgggccggctcccattgctccggcgcgttctcaagggcttgcagctgtgtggcaaaggagcagagaactttgacaagttcttcacacg

SEQ ID NO: 757193 - DNA, 100 bp, Homo sapiens
ctggtgaataagtccgtcagccagggcttctgcttcaacatcctgtgcgtggtttagaaacctgctgaagtggtatgctaaggagttcaaagacccactg

SEQ ID NO: 757194 - DNA, 83 bp, Homo sapiens
ggagatcctgcaatctgaaaagcagactgaaagcagtcccagctatctgacttcatgtgaaagatggctaatgcagaagtgag

SEQ ID NO: 757195 - DNA, 75 bp, Homo sapiens
ggagtctccaccaggactgaccgctgccgcccagcacgtccagggaagcagtttaagtgcacggtgtgtgactac

SEQ ID NO: 757196 - DNA, 50 bp, Homo sapiens
cgtgctctcgccccaacccgcgcgccaggcgcatattaaatttcctattg

SEQ ID NO: 757197 - DNA, 75 bp, Homo sapiens
caccactgcagccatgatctccttaacggacacgcagagagaatggtgttgaacgcgtgtgtcctgagagcctgc

SEQ ID NO: 757198 - DNA, 50 bp, Homo sapiens
gatgccatgcacctcagcatgctggaaggatggaggaaccaggggacgcc

SEQ ID NO: 757199 - DNA, 95 bp, Homo sapiens
caaggccccggggaccctggtaggccagatctccgcggctgacctggactcccctgccagcccaatcagaataactgaagtgaagtgatggactc

SEQ ID NO: 757200 - DNA, 82 bp, Homo sapiens
cgcagggcctgcagcgggagctggacggcgagcgcgagcggcgcgagaaaaaccacgaagctgccctgagacgctcactcac

SEQ ID NO: 757201 - DNA, 100 bp, Homo sapiens
tgacttttcagaagaaatagacaacgatctgcctcaaaatacatcgagatatttccaagcagaaggaatgaagttcgaacacatgtcggttcttataagg

SEQ ID NO: 757202 - DNA, 75 bp, Homo sapiens
cacaatcaagaaatgcagaaacgtaaagaaatgcaattgagctactgcgactactaccggccccggttcttcctc

SEQ ID NO: 757203 - DNA, 97 bp, Homo sapiens
ctcggtttgcctactgaagagcttatcagagctctacttgggaaattactccacaggatccgctgaacataggatgttgccacaaaatctacctcgt

SEQ ID NO: 757204 - DNA, 82 bp, Homo sapiens
cgggaggaaggaacgaggcaaggagctaaagcagcgtgcgttcagccctggggttactcactataaacaatatccacccaac

SEQ ID NO: 757205 - DNA, 100 bp, Homo sapiens
gaacaccccccagaaggctgacaaggatgccggcctggcccagacagcaccagttgcccttgaagcagaaaacagaggtgaaatgaaactagctctccag

SEQ ID NO: 757206 - DNA, 48 bp, Homo sapiens
cgcgaatatcgtcatcgttagaagggaggctgagaagacaaaactcct

SEQ ID NO: 757207 - DNA, 75 bp, Homo sapiens
ccagaagtttacactggaactggacagggttgctatcaagatcatagataagacccagctggatgaagaaaactt

SEQ ID NO: 757208 - DNA, 83 bp, Homo sapiens
atgcctggcagccccgctctctgcagccggaagctgagaggaaaagccttttattttgtcaacggcaaagtgttttgtgaaga

SEQ ID NO: 757209 - DNA, 82 bp, Homo sapiens
acaggacaagcaaacctcagcctggaggcacttttccagaaaacaacagttttgttggcatgtgaagctccagtttcctcaa

SEQ ID NO: 757210 - DNA, 75 bp, Homo sapiens
gccggagacagcagggtgacagtcaagacagtcaccaccgaagagtacctggtgaaccctgtgggcatgaaccgc

SEQ ID NO: 757211 - DNA, 100 bp, Homo sapiens
ggcctgcaaagctgtacaagagatcatgcagatcttcttggaaacagaattgttctacaaaggtatccgccctgcaattaacgttggtctgtctgtatct

SEQ ID NO: 757212 - DNA, 75 bp, Homo sapiens
cgggaggacccactcccccaggactcctttgaaggcgtggacgaggacgagtggacaatgcagatcttcgtgaag

SEQ ID NO: 757213 - DNA, 101 bp, Homo sapiens
aaaacaagccctccaggaactcacgttaaccttgattttcacacaaaagaagtcattacaaacagcatcactcaacctaccctccacagttttgatgctgc

SEQ ID NO: 757214 - DNA, 100 bp, Homo sapiens
ccaggagttcgtctcttacgtctgcggaagtgcagctgcctcagttcttagcgcagtacctttgtgttggatgaatttaagcgcaagtactccaatgagg

SEQ ID NO: 757215 - DNA, 100 bp, Homo sapiens
aaatttttgactgcattgactttcgtagtacttgtcattagctgaataccactagaaacatacctgtaaccagagacagctgattatagctttctgcagc

SEQ ID NO: 757216 - DNA, 85 bp, Homo sapiens
atgttgacctgctcattatctccaaagatagacttaccagaggagctatgaagacatgattggtgaggaggtgccatcggatcaa

SEQ ID NO: 757217 - DNA, 98 bp, Homo sapiens
tgggggtgtcctggtgcacccccagtgggtgctcacagctgcccattgcctaaagaagggtcaagtccttcctgctcatacacttctgaatacagtag

SEQ ID NO: 757218 - DNA, 50 bp, Homo sapiens
ttgcaggatgcacagattctgtttcttcaaggaaagtccatgaagtgcct

SEQ ID NO: 757219 - DNA, 75 bp, Homo sapiens
ctcggcccctggctcctgctcctggagttcactgacttgaagtatactcagttaaaatcggggctggaggtgcag

SEQ ID NO: 757220 - DNA, 100 bp, Homo sapiens
agccctacctatagaagggccgagcacagcaatgcaagacacattcagctaacgtattttagcaggtggagtgaggttgaagattcctgtgacagcgatg

SEQ ID NO: 757221 - DNA, 83 bp, Homo sapiens
ccgaggggcactgcagctgacaagagggcctacttggaagtgcaccagcaggagcaagagaaactccaggggcagataaggga

SEQ ID NO: 757222 - DNA, 83 bp, Homo sapiens
gccggggccgccatggagcccgactcggtgattgaggacaagaccatcgagctcatggacttcagaaatgggcttgggaacca

SEQ ID NO: 757223 - DNA, 114 bp, Homo sapiens
aagagcgtgccctacttcaaggataagggtgacagcaacagctcggcgggctggaagatatgtaactggttcatcaatgcccggcggcggcttctcccagacatgcttcggaag

SEQ ID NO: 757224 - DNA, 139 bp, Homo sapiens
agggactcctctccgtctccctggaccgctgtgtaggcacctgagttaacggacgctaagcggggtaggggaagattgtagggaatggaagtgaacagcagctgcaaaaagagctagcagatgtactgatggatcctcc

SEQ ID NO: 757225 - DNA, 83 bp, Homo sapiens
aacatcacattttcatgcatcattttttcaaaataggccaaaagaatgcaatggtgtaaagattccagttgatgccagtaaac

SEQ ID NO: 757226 - DNA, 74 bp, Homo sapiens
tcagatgctgactgtgtggagttacttctggaaaaaggagccgaggagcgagaacccgagcagcgccatgagca

SEQ ID NO: 757227 - DNA, 88 bp, Homo sapiens
tccacgtgaagctcaccgacagtgccctgagggccttcgagagctaccgcgccagacagccctgggcgctgcctatggcacagccaag

SEQ ID NO: 757228 - DNA, 50 bp, Homo sapiens
ccctgaggtccttcacagcctgcagctcgccctcccctacctgcggaaga

SEQ ID NO: 757229 - DNA, 95 bp, Homo sapiens
acctgcgtttcctggatgctcttaaagtggatgattcaacagccacacaaagcagcaacattttttggatgcattgggatagataaatttgggga

SEQ ID NO: 757230 - DNA, 100 bp, Homo sapiens
aattgttttacagtctgttccacatgatcattgtaataaggtgaagctcgtgtgtggagtgccacggtacaatcagacgacagatggacagtgtgacaaa

SEQ ID NO: 757231 - DNA, 50 bp, Homo sapiens
ccacgactttctgggagactcggttggccaacggtccagatgtgctggag

SEQ ID NO: 757232 - DNA, 82 bp, Homo sapiens
ccttcgccttcgccctttccacctcgcggcagttcgatctcagtggttcaatagcatccccagatgtcaaattaaatcttgg

SEQ ID NO: 757233 - DNA, 75 bp, Homo sapiens
ccgtcattgagacttattcatgctgtcagaggaggccttcgaggaagaggcccacctccttcatgggcctctgag

SEQ ID NO: 757234 - DNA, 83 bp, Homo sapiens
gggcaacaattttctgtacaccaatggaaagtgcgtcatcctaaggaacatcgacacaatgcagatcttcgtgaagactctga

SEQ ID NO: 757235 - DNA, 60 bp, Homo sapiens
gcccgggagggccggggccgcgctcagccaggtgtggtggtgcacgcctgtaatcccagc

SEQ ID NO: 757236 - DNA, 80 bp, Homo sapiens
attcagcgtctccgggaagtcttggtccgccgggagtctgagctcaggttcatgttgcttttaactttgacagaggaaga

SEQ ID NO: 757237 - DNA, 97 bp, Homo sapiens
gacgcgtgcttcgtggcccggcaccgttccgcggacgtgctcgtgagagggtccaagcctggtaagaatgtccagcttcaggagaatgaaatcagag

SEQ ID NO: 757238 - DNA, 97 bp, Homo sapiens
ttcccaacaccatgccgtccgccttctctgtcagctctttccccgtcagcatcccagccgtgctcacgggcagctggtggaatttttgaagaaaatg

SEQ ID NO: 757239 - DNA, 90 bp, Homo sapiens
gatcctctgtacgcccgttcactggtgtcctggggaagtgtcgctacgtttactatgggaaaaactcagagggcaacaggtttatccgag

SEQ ID NO: 757240 - DNA, 87 bp, Homo sapiens
gtattatctccaagccgagcactccctgccagcgctcatccagatcagctctttcaccatgcctggatcacttcctttgaatgcaga

SEQ ID NO: 757241 - DNA, 75 bp, Homo sapiens
gcgattagttgatgtggcctgcaagattagcctgaggcctgctcagtcgttcctaatgaataaaaatcaagtgcc

SEQ ID NO: 757242 - DNA, 100 bp, Homo sapiens
gctgcgatgcctgtataacccagggactggcgcactcacagctttccagagaatgcagaatctattgatcttaaacagtttttcgaccaacatttttcac

SEQ ID NO: 757243 - DNA, 95 bp, Homo sapiens
ccctatgaaggagagagctcatatatcatatttcaacagtttgatggctctttcaccatgcctggatcacttcctttgaatgcagaagcttgctg

SEQ ID NO: 757244 - DNA, 100 bp, Homo sapiens
tcccaggggactggtgccaagaaggctgccgttaaactttttatctgcaacatgtcatggtttagtggcctcctggtccctaaagtggatgaacggaaaa

SEQ ID NO: 757245 - DNA, 100 bp, Homo sapiens
cagccaagaaaacaggaagagggttggaggcaaagttccgaatagggatgaggcatacgtggtatgattatcgggaaatgctgcacaatgccactttctg

SEQ ID NO: 757246 - DNA, 113 bp, Homo sapiens
agcaggagtggcacaagatctcctaaaaagcctcggtctcctaaaagaaaattgtcccgctcaccatcccctaggagactgaggagttgtaccaggtaattgaaggtcaaaat

SEQ ID NO: 757247 - DNA, 100 bp, Homo sapiens
tgttgctggaacggttcggatagcatcaagatggtgctcatgtggaccagtggtgacgccttcaagacggcctacttcctgctgaagggtgcccctctgc

SEQ ID NO: 757248 - DNA, 90 bp, Homo sapiens
agttcgtctcttacgtctgcggaagtgcagctgcctcagttcttagcgcagttcgatcctttggtacagaagacagaccgacagatcgtc

SEQ ID NO: 757249 - DNA, 100 bp, Homo sapiens
actgatgggagcaagttgactaccaccagtggagtccaggatgagctttcgaacctctgatttggagttcagtggaaatttaacctttttggacctcttc

SEQ ID NO: 757250 - DNA, 85 bp, Homo sapiens
aagctggggattggccagctgactgctcaggaagtaaaatcgaaaccgaaacttcattgccccttcaatgtgggaatccagccag

SEQ ID NO: 757251 - DNA, 75 bp, Homo sapiens
gagaagacgaggatgatgcggaaattaaccccaagggatagctgggagtatggccaccctgctccacgatgcggt

SEQ ID NO: 757252 - DNA, 100 bp, Homo sapiens
taccctgctgcattggagatgatctcaataagccctcgcaccttggtcttggcgttgagccagtcggatgatgattctgggtcagcttcaggctctggat

SEQ ID NO: 757253 - DNA, 75 bp, Homo sapiens
tgttccacctgttccccctgcgtccagcaccccttataaaccaccctatgaattctgatgtgaaactaacagtct

SEQ ID NO: 757254 - DNA, 82 bp, Homo sapiens
gtgctggccaatggtgtgatgaattccttgcagtacgaattggagcaatgttggcttatacacctctggatgagaagagcct

SEQ ID NO: 757255 - DNA, 75 bp, Homo sapiens
atcagcaacaaaaccgccaagcagcactcgctgcactccgcccagtggttattacgacctattgccctgctaaca

SEQ ID NO: 757256 - DNA, 100 bp, Homo sapiens
tggaactgggcgagctgcggctgcgggtgcggcgggtcctggccgaaggcgtccgacctccgatcatgaacgggcccctgcacccgcggcccctggtggc

SEQ ID NO: 757257 - DNA, 100 bp, Homo sapiens
gccctatgagaggacggctgccccaccccgttccatggctccccatcgccagccccccacgcccaccaggtagaatgtaagaaagctcagccgaaagaag

SEQ ID NO: 757258 - DNA, 96 bp, Homo sapiens
tggactgggatttggaggatttaatacacagcagcagcagcaaactaatggagaacttaatgttctggatgatattttaactgaagtaccagaaca

SEQ ID NO: 757259 - DNA, 88 bp, Homo sapiens
cagaggatcctggaggcctgggaagccaacgaccacacgcaatgccatggacaatattaccaggcagaaccaattctacgatacccaa

SEQ ID NO: 757260 - DNA, 90 bp, Homo sapiens
tcatcagccagtgtggaaaaccagtggtaaatgtcagctacaggccagcttatgaccagcaattcagtttgttctcagtgatgagtttag

SEQ ID NO: 757261 - DNA, 100 bp, Homo sapiens
ctttcctcttgacactgcagctgcagtcaacctcttccccaatttcaatgcggcaccatacaggaagattacttgagagagctgctgacaaccatggggg

SEQ ID NO: 757262 - DNA, 90 bp, Homo sapiens
tggatctgaagtacaaaatattttccaggtcagtttaggggctggtgcaaaggatgagttgcacattgttgaagcagaggcaatgaatta

SEQ ID NO: 757263 - DNA, 83 bp, Homo sapiens
ccctccatgcgcaagactaaagcagcggaagaggagaccaggtgataggtttgatcgagacagaccgttgagaggacgtggag

SEQ ID NO: 757264 - DNA, 90 bp, Homo sapiens
ggaaggcccagcgcctataactttgacaatagccctgtgctgcaggttcgttttaaaaatttagcatccagaccgtattctctacatgcc

SEQ ID NO: 757265 - DNA, 100 bp, Homo sapiens
atttaattttagggtcctttatatagaagggagagtagccttcccctaggtcttcagaagcatcaagttttaactgtggacattggatttggtggaacag

SEQ ID NO: 757266 - DNA, 80 bp, Homo sapiens
agcgggagctggacggcgagcgcgagcggcgcgagaaagtacaccaggggttggaaaaaccacactaggcaaagaacttg

SEQ ID NO: 757267 - DNA, 51 bp, Homo sapiens
cgaggcgcagaagtggattgagatcctaattatctcatggctaatgaacgc

SEQ ID NO: 757268 - DNA, 95 bp, Homo sapiens
ctgaagagctatggtgaaacaccactgaagcattgccaagcccccaaatacatcaagatgtttgtactggatgaagctgacgaaatgttaagccg

SEQ ID NO: 757269 - DNA, 101 bp, Homo sapiens
tccccagtagctgggattacagttactaaaagatgtaactgaactgcagatccttggtgaaatatctttcaacaaatctctatatgagggactgaatgcag

SEQ ID NO: 757270 - DNA, 83 bp, Homo sapiens
aactgcgcagcctcttcgagcgccgcggacgcgtcatcgagtgtgacgtggtgaaagtctgcagatctccaggggagcccacc

SEQ ID NO: 757271 - DNA, 98 bp, Homo sapiens
tccgtggctggttcccggcgagctacgtgcagttgctggagagaaccatggagtctggcagtaccgccgccagtgaggaggcacgcagccttcgagaa

SEQ ID NO: 757272 - DNA, 95 bp, Homo sapiens
cattcctgctgtgagcatgagacgtcgctgtccgagcttggcgcctaagccaagggtttctttatttggccggagccctcatgacttcagtgacc

SEQ ID NO: 757273 - DNA, 100 bp, Homo sapiens
ccgaaaccggtttgcaagtccttgtagagtgtgttggcatgcatcagcccagaagcagtgatctctggattaaactgcatgtcatttgctaatgttggca

SEQ ID NO: 757274 - DNA, 98 bp, Homo sapiens
agacgtctggtccttcggcgtcctgctgcacgaggttttcacctatggccagtgtccctatgaagactcgctctccgtctccagcaatgacgccagtc

SEQ ID NO: 757275 - DNA, 75 bp, Homo sapiens
gtgggatgtgaaaactctgttactgaaggatagagggaggaatcagcagcttggaaattcaagcacgtgatctgg

SEQ ID NO: 757276 - DNA, 83 bp, Homo sapiens
cggcgggtacctgcggccaattcggtggaacgaggacgcggactgcgaaggcagcccctgccgccttgtcatgactccgagga

SEQ ID NO: 757277 - DNA, 100 bp, Homo sapiens
cgccatcgttgctgccttcttcgtcaaggacctaatccggagagacatcctgtactacaaaggccgcattgacatggataaatatgaggtagttgacatt

SEQ ID NO: 757278 - DNA, 87 bp, Homo sapiens
tgcccctgtcgagtcccgactactacgagaggctgggccaactccagcacgggctgcgggacaggggtttcttccagaaaacaagtt

SEQ ID NO: 757279 - DNA, 101 bp, Homo sapiens
gccgctgccgccgccgctgctgccgccgccgcccgcgaagccggagctcgagccgcagcgggtttttcgttggaatatacgttgcacatttatggcgattc

SEQ ID NO: 757280 - DNA, 100 bp, Homo sapiens
ggctgttgtgttaatcttatcaacaatacctgcttttacaccaagaatggacatagtttaggggtttcctggaagcaccttcatgtcatcctatcaaaac

SEQ ID NO: 757281 - DNA, 88 bp, Homo sapiens
ctgcatgtagaagtcgagccgtctgtatttttcacccgagtcagcaccctcccagcaaccagtgaaattcgtaaggacaccttgaagg

SEQ ID NO: 757282 - DNA, 75 bp, Homo sapiens
tttgttggtggactactctcagcctactatctgtctggagaagagccaaggaagtatcgcctggggatgctggag

SEQ ID NO: 757283 - DNA, 73 bp, Homo sapiens
ctatggtggcatcaaccgagttcggaccctgctctcagcggcccacgaggtggagttgcagcggcagaaggag

SEQ ID NO: 757284 - DNA, 80 bp, Homo sapiens
gcctcctgagtagcttggattacaggatgagatccccactggaatgccatgcctggagtcagtgaccataggtgatgata

SEQ ID NO: 757285 - DNA, 75 bp, Homo sapiens
agttgggattttgtgttcatgtcaagcatcctcataagaattggcagagggggtcgatttgggaggaaaggtgtg

SEQ ID NO: 757286 - DNA, 100 bp, Homo sapiens
aatgttcaaaggaacaacatctttaccatctcatctcaagaatggagggaagaaaccaatagttttctgaaagcgattgaagaagccaataaaaagatgc

SEQ ID NO: 757287 - DNA, 83 bp, Homo sapiens
gcctcagcctcccgagtggctgggattacagagggcaaggagttggtgcacacctacaagggctgcatcaggtcccaggactg

SEQ ID NO: 757288 - DNA, 100 bp, Homo sapiens
cgaggagtccccggggagctgccgcggtggtcgccgttgagtccgtccgtgccgctggggccgaggcagctggaggtgccacttgaagaatggatgatga

SEQ ID NO: 757289 - DNA, 100 bp, Homo sapiens
gtgaccatcgaaaggagcaagagcaagatcaccgtgacatccgaggtgcctttctccaaaagctgatgttctaatcatgtcagataaagatgatattgag

SEQ ID NO: 757290 - DNA, 90 bp, Homo sapiens
actggaagaagaaacacatgctcattacatcgatgttgccagcaagtgcagccgcggagccctgtacacaggcttttccatcctggtgac

SEQ ID NO: 757291 - DNA, 82 bp, Homo sapiens
gatatcgaggatttagccggaaggacttgccggagcagccttacttgcagcctccactcagcatcttggtgattgagcgccg

SEQ ID NO: 757292 - DNA, 100 bp, Homo sapiens
ctggactggagcagaaccccaggactgcgcccccgggagcgggcgcccagagagggctgtgctgaagtttgctgctgccactggagccactccaattgct

SEQ ID NO: 757293 - DNA, 75 bp, Homo sapiens
atctactatctgggcatcgggcccacactcaacatcctgggtgccctcaatctcctgagcccgctgaacctggag

SEQ ID NO: 757294 - DNA, 83 bp, Homo sapiens
gtgccctcccgctcggccccgccagcagcactgtggaggccgtcctcgggcgtgatggtgggcatgggtcagaaggattccta

SEQ ID NO: 757295 - DNA, 96 bp, Homo sapiens
atcatggaaaagcagttgctcgaagaactcgagcgacagagacaagctgagcttgccgcacaaaaagctagagagttgtatgaagcatgtcgttac

SEQ ID NO: 757296 - DNA, 82 bp, Homo sapiens
caaaatcacagctttgagtgagaaacaggctgtgaagcttcatggaggtatcgatatcctagtctccaatgctgctgtcaac

SEQ ID NO: 757297 - DNA, 110 bp, Homo sapiens
ctaattaatggctacacttcgatggacctgttgaaaaaaatctgggaggttgaacttattaattattgtgcttctgctaagccaaaaacaggcacttgaagaactgaaac

SEQ ID NO: 757298 - DNA, 58 bp, Homo sapiens
agaacggcagccttgactccccagggaagcaggtcactggaaagaagaatggcaatgg

SEQ ID NO: 757299 - DNA, 100 bp, Homo sapiens
acggttgatcggtgatgccgcaaagaatcaagttgcaatgaaccccaccaacacagtttttggagctggtgactgccctcatgtgtgatttgcggcggcc

SEQ ID NO: 757300 - DNA, 82 bp, Homo sapiens
aaacactggaagaagatgaagaggaactttttaaaatccttatgccagcctggaccatcttggaggcagtgtaggatcatgg

SEQ ID NO: 757301 - DNA, 98 bp, Homo sapiens
aatttctcctgcgtgagacacaaagggctgctctgcggagtggaggaatcagacatcattgatcttgagaaacgctattggttattgaaggctcaatc

SEQ ID NO: 757302 - DNA, 90 bp, Homo sapiens
ggaacttctacccgacacttacatgccatggccttctacgttgtgaaaatggctattcctcagtatgctattccttgtcactccagctcc

SEQ ID NO: 757303 - DNA, 76 bp, Homo sapiens
cggggcgccacgggggccatgtaagcaggaagattgttgatcgaatcgacaatgatggggatggctttgtcactac

SEQ ID NO: 757304 - DNA, 50 bp, Homo sapiens
ccagtattggccgcagagaataaaggccatggttgcttgttatccgggca

SEQ ID NO: 757305 - DNA, 75 bp, Homo sapiens
agaacttgtacagagatgtgatgttggagaactatagcaatctggttttcttggtctctgctggatgaaccgaat

SEQ ID NO: 757306 - DNA, 101 bp, Homo sapiens
gtcagtgacatgcccatgcgagtacctgaggaagaactacattaccatggacgagctgcgccgcgagctgccacccgaccaggctgagtactgcatcgcgc

SEQ ID NO: 757307 - DNA, 75 bp, Homo sapiens
actcctgaaattaggaaaattgccactgctttataagcgcaggaaggcggaagggaaggcggagaccggcaagag

SEQ ID NO: 757308 - DNA, 130 bp, Homo sapiens
cagaaagtgagattaatgaaagaagtcatggaacactatgctgatcaagatgatctggttgtcatgtttactgaatgcattgtcgtggaagttctccgaatcctggttttgattggtcagattctttttt

SEQ ID NO: 757309 - DNA, 88 bp, Homo sapiens
ggccattcttactgacctgatagtggaagaaaattggataacagggcaagattcagaggaagaaaaggatattgatgcattatgttga

SEQ ID NO: 757310 - DNA, 50 bp, Homo sapiens
gccatgcaaaagatgcctgtgttattagttgttctaagaacggaagcatc

SEQ ID NO: 757311 - DNA, 100 bp, Homo sapiens
gttcatcaggaacgtcgcggacgccaccagatatcagttttagagaatgtggcgtggagaaattctcaaggaaagagtaaaatgctggtgatgtgctgag

SEQ ID NO: 757312 - DNA, 75 bp, Homo sapiens
aggcgggaggcaacggagctaccagccgaatgactgctgatggagcgccagaattgaagatagagagtctgaatt

SEQ ID NO: 757313 - DNA, 100 bp, Homo sapiens
agcccaacagtgaaaagagaacctccatcaccccagggtcgatccagcaattctaggccgactcgcgggccgctgcacccaccgccaaggacaaaaggag

SEQ ID NO: 757314 - DNA, 98 bp, Homo sapiens
atattgaagcaatgcttgaggctccttacaagaaggttggacaccactgcatgaagcttgcaatgttggatattacgatgttgctaagatacttatag

SEQ ID NO: 757315 - DNA, 74 bp, Homo sapiens
ctggcttttgccctggccaagggcttcacagcagcagaaattccaacagaatgggtttcctgaaacggatttgc

SEQ ID NO: 757316 - DNA, 74 bp, Homo sapiens
ttgaacatgccttcatcctctataacaagtatatcacgtatcccacgttcatcgatgccctgcgggacctggac

SEQ ID NO: 757317 - DNA, 100 bp, Homo sapiens
ggctgcagctggaggctattcataagatggcagaaacggtggacacaagcgaaatggtcaacggcgctacagaacaaaggacgagctctaaagagtccag

SEQ ID NO: 757318 - DNA, 127 bp, Homo sapiens
atggagtccatctcagatgttgttgatgaagtaatacagaactgccccatcgatgtgcggcgcccgctgtataaggtactccaaagattcaggtttactcacgtcatccagcagagaatggaaagtc

SEQ ID NO: 757319 - DNA, 50 bp, Homo sapiens
ctttccgtctgcttggctcccccagagtctcgctgtgttccccaggctgg

SEQ ID NO: 757320 - DNA, 73 bp, Homo sapiens
tggagccatccaacatttagctgggatgaaagacagcaaggctttaatccagtgtgaccagttgaggaaggag

SEQ ID NO: 757321 - DNA, 100 bp, Homo sapiens
cgggcagaggcgacctccccgcgttccatgcgcacagggacaggggagctctgcaggagtctgcaggtcacccggagcaggacggggaggagctgagccg

SEQ ID NO: 757322 - DNA, 73 bp, Homo sapiens
ttttctgtaggccatttgtccagaaagaaatcgtggtgcttggagtaagtctgaaacccggaaactaatcaag

SEQ ID NO: 757323 - DNA, 90 bp, Homo sapiens
gccgtcggctgcccgtccagcctggagtgaggaggcgtcttcctttgcatgtcaggaagctcttcgtgggcggtcttgactggagcacga

SEQ ID NO: 757324 - DNA, 83 bp, Homo sapiens
tctgcaacatggctagagactgccgggactggtcagatgaacccatcaaagagtgcgggagtgcatccgccccaacccttttc

SEQ ID NO: 757325 - DNA, 100 bp, Homo sapiens
atgatggaatgcttgacagagatgagtttgcagtttgtgttggcatgcatcagcccagaagcagtgatctctggattaaactgcatgtcatttgctaatg

SEQ ID NO: 757326 - DNA, 75 bp, Homo sapiens
gtggaacttacagcttccttgatcggactcagcattcagaacttagtgatttggcccgtgaccctccagcacaat

SEQ ID NO: 757327 - DNA, 90 bp, Homo sapiens
accctgtgggcctggcgctggaggcagcggtgcacgtgcagaatagcctaacatggcagaccagagacagcgctcactgtctacctctgg

SEQ ID NO: 757328 - DNA, 100 bp, Homo sapiens
cagataccagttcctttgtcaagagcatactttggaccctgttttcagaaagcagagtacagaacaggtggccgcattttgccgcagtttgcatgagatg

SEQ ID NO: 757329 - DNA, 101 bp, Homo sapiens
tgggaggcgaggacggtctctgccagtataaatgcagtgacgggtcaatgcaaccaacttcatggaggcaggagccccagttatgtggaatgggcacagag

SEQ ID NO: 757330 - DNA, 100 bp, Homo sapiens
aaagttctgtgctcgttgtggaggtcgagtgtcattacgctcaaacaaggcatgctggaagatggactgccctccaatggtgtgccccgatctacagccc

SEQ ID NO: 757331 - DNA, 113 bp, Homo sapiens
cgccagtaagaagaaaaaagcgtccgcttccagctttgcgcaggagtgtccatcaggacagcttcacctccttgaggattaaagcctaacagtactgagctatttgtctgtca

SEQ ID NO: 757332 - DNA, 75 bp, Homo sapiens
atatagttgctgctatacaacacaattataaaatgtcagcttttaaggcggatactctgttttcaaggaagctga

SEQ ID NO: 757333 - DNA, 101 bp, Homo sapiens
ttcacttattcatctgtccagcatgactcatccccgggagtgttgagatctagtgaaaagccatttgatgtatgcggtcagagaagaagtggaggtcctca

SEQ ID NO: 757334 - DNA, 83 bp, Homo sapiens
gtgccatttcgcctttatcgtggtggagtccaccctggctgtgatgccatggacaatattaccaggcagaaccaattctacga

SEQ ID NO: 757335 - DNA, 82 bp, Homo sapiens
gcctgggtggttgttggcgtgtccctgcagcgaaggatcctggtttggtgcacctcgatttggaggaagtagggcagggccc

SEQ ID NO: 757336 - DNA, 100 bp, Homo sapiens
gcccaggccccggcagcgcctgggacaaggcttgcagccctgagtgatcgagagactcggctgcaggaggtgcgctcagccttcttggctgcgtacagca

SEQ ID NO: 757337 - DNA, 82 bp, Homo sapiens
gacgcggtgaactctgtccagttttcaaaccacacagtgtggacgaatgtggaacctcgctctgtggctgtgttcccttggc

SEQ ID NO: 757338 - DNA, 101 bp, Homo sapiens
cactttgttttcaatgacaccaagttggacgctatgctggaagaatttaagaaagctgttaaacgtttaatgaaagaagcggcagaattgaaagatccaac

SEQ ID NO: 757339 - DNA, 76 bp, Homo sapiens
cttcagagttgtccagcgaaggaacacagcattcttactcagaggaagacatctacaggtttctcaaagacaatgg

SEQ ID NO: 757340 - DNA, 101 bp, Homo sapiens
gatcattaagaagcagatcctgaaacacctgtcccgctcctggaatgaggccgcccatgggaggccatatgccaatgatgcctgggcccccaatgatgaga

SEQ ID NO: 757341 - DNA, 100 bp, Homo sapiens
cccgggcgtccgctcctcagcggatgtggcagccccgagccatggctctcgccgtccgagtcgtttattgcaaacggggattcagcgtccgatcctttgg

SEQ ID NO: 757342 - DNA, 80 bp, Homo sapiens
tcttctctcacctaccccagtacagcagacaaaactctctgacccagtttatgaggaattacatgaacgacagccttcgc

SEQ ID NO: 757343 - DNA, 80 bp, Homo sapiens
ggctgcaacctgcagcacatcagcgaccgggagaacatagacgatgctctgaacgttcttctcatcatcgtggatgacct

SEQ ID NO: 757344 - DNA, 75 bp, Homo sapiens
gatcagcaacaactaactcagcagcaacttaatggaaactaggtaactcaactggacccaaataaatcattattg

SEQ ID NO: 757345 - DNA, 101 bp, Homo sapiens
ttcacagtttgcgggactcagtcccatcactccaaggagagaaggtatgaacgctgccgtccgtgccgtggtgcgcatgggtatctacgtgggggccaagg

SEQ ID NO: 757346 - DNA, 75 bp, Homo sapiens
caacttttgatcttggtgggcacgagcaagcatgaatacaactttgtctgagagccccttcaagtgtgatcctga

SEQ ID NO: 757347 - DNA, 74 bp, Homo sapiens
acttcctgtgggacaagcgcacgggcctcgccgccagaacgacagaaccaagttgtattgttagacacactgga

SEQ ID NO: 757348 - DNA, 82 bp, Homo sapiens
ctttaattgtgggttgtggcctacaaatgttccagcagctctcaggcattaacaccatcatcagcccctgtcaaagggaaca

SEQ ID NO: 757349 - DNA, 75 bp, Homo sapiens
tggtggcaagtattgctgtgggtgctgggacttcccgtccgcggcgtggaggggtgatattcatgaggatttttg

SEQ ID NO: 757350 - DNA, 82 bp, Homo sapiens
gtccggcttcggagcgggagtgttcgttgtgccagcgactaaaaagaggaaaatggcaaatgcacgacagcggcctcctgaa

SEQ ID NO: 757351 - DNA, 100 bp, Homo sapiens
ccttcctggaaaacaggcccagctctcaaggttgcaggttatgaagacagtatggagtttccagaccatagtagacatttgctacagtgtctgagcgagc

SEQ ID NO: 757352 - DNA, 96 bp, Homo sapiens
atctcgagataaaaccatcaagctatggaataccctgggtgtgtgcaaatacactgtccaggtgctaagtgtggtggctcacacctgtaatctcag

SEQ ID NO: 757353 - DNA, 74 bp, Homo sapiens
gataccttcagtggctgccaggctgttccttggaacctgtgcaggggtcacttttacaaagagaaagtttggat

SEQ ID NO: 757354 - DNA, 83 bp, Homo sapiens
cacagtgcccggctcggctgcgataacgaaggaggcccaacttcattcaataaggagcctgacggatttatcccagacggtag

SEQ ID NO: 757355 - DNA, 83 bp, Homo sapiens
taccctcagtacgccacctactattacccccagtatctgcaagccaagctttgcaatcagcttgacctgtggggactcagaag

SEQ ID NO: 757356 - DNA, 98 bp, Homo sapiens
cccgaactcgctggaggacaagtacttggaccatgagactgtttcagccactttcatcgacagcagtggacagtttgtttcctcccaggtgacaggaa

SEQ ID NO: 757357 - DNA, 101 bp, Homo sapiens
cgtggatctgccgccgggttgctgtgcgactattctccgggagccgtccgtgtcaccgccggaacctggcgcaggttgaaatcacaaagattagacacctt

SEQ ID NO: 757358 - DNA, 100 bp, Homo sapiens
atctgaagatgacaatttattagatggtgacactgcagttgctgcagggaagtcaacatttgtgaatatccttaaacaattgtgtgaagattgggaagtg

SEQ ID NO: 757359 - DNA, 98 bp, Homo sapiens
ctgttccgaggtcaggaggatgcaagtcctgacagattcagcaacactctacccttcgaggaactggagtcccagagaggcctgccccagctcaagag

SEQ ID NO: 757360 - DNA, 100 bp, Homo sapiens
gtcagctcccctttctcgcccagcgcccccaggccgctcccggggctcacgagttgtggaaagtaaaaatgtagccctaccaaaaggaactattgtactg

SEQ ID NO: 757361 - DNA, 80 bp, Homo sapiens
atatggagccctgggcgcgggggcggcgtgtcaggtggttgcggagctggtaagggaaatcctcattgacgattcaattt

SEQ ID NO: 757362 - DNA, 97 bp, Homo sapiens
gcgggtgaccctgttcctgaacggcagccccaagaacggaaagaatttaagggacgctgtgaagcaatcatggatgcaatgaagagagggctctgct

SEQ ID NO: 757363 - DNA, 101 bp, Homo sapiens
cgtgaccgagaccgtgaccgagagcgtgaccgagagcgcgaatatcgtcatcgttagaaggcaaatgaagatgtgacacagattgtggagattctccattc

SEQ ID NO: 757364 - DNA, 95 bp, Homo sapiens
cattaccaatcggtgtctcaggccactgggcccttagtggatgtttcagacgctcggccgggaacgagcgtggaagacattttggtgaagccaaa

SEQ ID NO: 757365 - DNA, 89 bp, Homo sapiens
gagcaggctgagcgatacgacgttactccacaggatccgctgaacataggatgttgccacaaaatctacctcgtgtatttttctctttc

SEQ ID NO: 757366 - DNA, 85 bp, Homo sapiens
agcttcctgcaggcccagagccggcatgaactctcccaacgagtcggagtccggcagcgtcttctcttgagggagcaatttggag

SEQ ID NO: 757367 - DNA, 82 bp, Homo sapiens
agatgtaattaatcaaacttggacagctctctatggagccttcacgtaaatgggtccagtcatgcctcccagtaagaagcca

SEQ ID NO: 757368 - DNA, 89 bp, Homo sapiens
agtaaatccagcaaggatatggagagccatgttttcctgaaggccaagacccgggcttctagcagtgcagggaacttgggagtactcat

SEQ ID NO: 757369 - DNA, 83 bp, Homo sapiens
ggggagcgcctcgtcgacatgagtgatgtggaggaaaacaacttcgagggcagagttgatgataattagaagcatgctttcca

SEQ ID NO: 757370 - DNA, 75 bp, Homo sapiens
ctagcaatcagcgagactccgtgggcgtaggaccctccgagccagacaatgcagatcttcgtgaagactctgact

SEQ ID NO: 757371 - DNA, 75 bp, Homo sapiens
accgtgggacgctcccctggacccgggcctgacctctattcaggtacaaacccgtagtgctgatgaaccaatgac

SEQ ID NO: 757372 - DNA, 75 bp, Homo sapiens
tctaatactcctcctctaacatgtcagcgttattgtaatgcaaatgctgacagtgaaaccgtgaaggcagcaaag

SEQ ID NO: 757373 - DNA, 75 bp, Homo sapiens
cccagatcagttgttctctgacctgcttggagggactcagaggctgtggagggctacttctacaagtccgaacag

SEQ ID NO: 757374 - DNA, 100 bp, Homo sapiens
accaggcccgggagcgcgatgtggagcgcttctttaagggctacgggaagatcctggaggtggatctgaagaacggggcctattccctggtggattccag

SEQ ID NO: 757375 - DNA, 59 bp, Homo sapiens
gagtcttccatcaatcatatctcacaggtgctatcagtgctaaagcattcattgctgtc

SEQ ID NO: 757376 - DNA, 129 bp, Homo sapiens
catgtttctggacgcggatttttggcctcatactctgttatagataaacaaggtggataatattaatgcagctgtgatggatttgaaaaaaaagaagatccgcagtctaagtgaagaggtcaaaatagg

SEQ ID NO: 757377 - DNA, 124 bp, Homo sapiens
atgcgaaggaaaaaccacacacaccagcaagatattgacgacctcaagcggcagaatgctcttctggagcagcaagtcactcaagactgcttgcaactgattgcagacagtgaaacaccaacta

SEQ ID NO: 757378 - DNA, 74 bp, Homo sapiens
cgaaagattcgggccagagacgacaacccgggcctccgaggtgcagcagtaccgcgtcgccatgactgccaagg

SEQ ID NO: 757379 - DNA, 82 bp, Homo sapiens
gctctgcctggctgctcactgcctccttctctgcccagcagcacaagggcagtttgcagttaagtgggcagaccaacatcca

SEQ ID NO: 757380 - DNA, 49 bp, Homo sapiens
ggctgcctcatccgcttctatgcagcgttacagtgtttctgccacctct

SEQ ID NO: 757381 - DNA, 101 bp, Homo sapiens
agcaagcccaggctcattatcagggttatatcctgtgttgtgacctcatggtttaagtgggaataaagatgagtataagcagtgatgaggtcaacttcttg

SEQ ID NO: 757382 - DNA, 87 bp, Homo sapiens
cacagaagaaagtttgaggaactactacgaacaatggggaaagcttacagactgtgtgacatatctgaagagatggattaagaatgc

SEQ ID NO: 757383 - DNA, 82 bp, Homo sapiens
ctgagacgccaacggcagtcactgccccccattccagctcctggattacaattcctagaccttctgtggcatctacacagtc

SEQ ID NO: 757384 - DNA, 100 bp, Homo sapiens
ggagaagaaagaagcgctgagcaagacacatatgtgatcaagctgttcgaccggagcgtggacttggcccagttcagcgagaacacgccactgtacccaa

SEQ ID NO: 757385 - DNA, 100 bp, Homo sapiens
cgtgatgaataaaaacatttcaactccctacagttgtgccatgcgaccgggactttgtagccaagcagaaggaggacctggagctggccatgaagaggct

SEQ ID NO: 757386 - DNA, 98 bp, Homo sapiens
ctctgcatattgttcagctgtcaggaggaagcttcaagcacctgcatgctttccagcctcagtcagtttaattggttggggtcagataagaagaggag

SEQ ID NO: 757387 - DNA, 74 bp, Homo sapiens
gcattttcttattaggactggctgataacgaagcagctattgtccaggtacggacattgctgcaggagaagagg

SEQ ID NO: 757388 - DNA, 74 bp, Homo sapiens
cgggcggctgagacaaaggcgacgcacccctgcagtggaccatgagtcggtaatgcccactgaggacctctggg

SEQ ID NO: 757389 - DNA, 97 bp, Homo sapiens
gctgagagggaaaaggacgccgcggtcttcccaggcgtcgcggagagcaggtgtcatggagaaactccagctgggcccagagattctgcagcgggaa

SEQ ID NO: 757390 - DNA, 83 bp, Homo sapiens
agcgcttggaccccggcttctgggacgcgtcagaccatggtgaatccgggcagcagctcgcagccgcccccggtgacggccgg

SEQ ID NO: 757391 - DNA, 100 bp, Homo sapiens
agcacacacctcttgataaggaagctgcccttcagccgcctggaatggaagttggatacactttgtgacttgtacgagacactgaccattacacaggctg

SEQ ID NO: 757392 - DNA, 85 bp, Homo sapiens
agattctgatgaagaagttattcaagatgccaaaatgaagtttaatccctttgtgacttccgaccgaagcaagaatcgcaaaagg

SEQ ID NO: 757393 - DNA, 75 bp, Homo sapiens
tgcgtccagcgagaggagcgcggcagggggccgggggcccagtgcggaaacatggctcgcgaaggactgcggacc

SEQ ID NO: 757394 - DNA, 100 bp, Homo sapiens
tcagcagcgcaggcggtggtccctgaggcccgtggaaggagtcaaacttgcgggaattttgcaggtacaggtttgcagattccgccagcagcacagcaag

SEQ ID NO: 757395 - DNA, 100 bp, Homo sapiens
aggagatgttgaagcgcgactggaaggagagctggtcccctgtcccctggcagatgtggaagatgtgaaatttgtcatcaattatgactaccctaactcc

SEQ ID NO: 757396 - DNA, 100 bp, Homo sapiens
ggtgacagcctcaagggcttcagcaccgcgcccatggcagagccagaccggcctgcttccgcgaggccaacatcccaacccacttcgggagaagaaccga

SEQ ID NO: 757397 - DNA, 83 bp, Homo sapiens
gagcactgcagcgattgcgagaatgaggaggacaacagctacaaccggggctatgtttccagtgtcctctgggtgtttccaag

SEQ ID NO: 757398 - DNA, 82 bp, Homo sapiens
gaccaacttgctgcggtttttgttcctggggctgagtgccctcgagtccggcagcgtcttctcttgagggagcaatttggag

SEQ ID NO: 757399 - DNA, 75 bp, Homo sapiens
cttgctgggccagcccccaactccttcggatgagccaggaggaactctctcccagtccgcctttgttgaatccat

SEQ ID NO: 757400 - DNA, 76 bp, Homo sapiens
ccgagtgagcgcgggcgccgagcttgctgagcgagagcgagaagcggcccttcgtggaggaggcagagcgccttcg

SEQ ID NO: 757401 - DNA, 95 bp, Homo sapiens
ccaggctgcggcgcgcgcgaagacgctcgggcggcgggacccagggaaggcagcggccggagcgcgcaagacagtggagatgcaccctgcctaca

SEQ ID NO: 757402 - DNA, 100 bp, Homo sapiens
ttggctgtctccagaagctgctgtttggaaaggtggcaaaggatagcagcagaaagtttcctacactactgaggtttaggggcactgtgaagcaaaagcc

SEQ ID NO: 757403 - DNA, 100 bp, Homo sapiens
tgaacgtcaccgaggagaagtaccaggaggcgttggccaaggaacaccttccaccatgaccacctcagcaagttcccacttaaataaaggcatcaagcag

SEQ ID NO: 757404 - DNA, 75 bp, Homo sapiens
gtggaaaggagagctaccatcactaagcctcatattcctgaagcccaacctggagatgctggacttctttgacct

SEQ ID NO: 757405 - DNA, 95 bp, Homo sapiens
acaacctgccagcctatgctccatacctgccctgcgaggaatcccttggcaccatgtcctgtgtgcattataaattttcctctaaactcaactat

SEQ ID NO: 757406 - DNA, 88 bp, Homo sapiens
tgcgtgttgctgcgagtgggacgcgcactggtcggtgccggctcaggagccgggtgccggtggtggtgtgcacattgagccccggtat

SEQ ID NO: 757407 - DNA, 100 bp, Homo sapiens
ggaggaggaggggctccggctggtctgtggtgaggccatcaccatcgaggctgagccaagagctgatggcagccgccggaccacccgctatgacatcgac

SEQ ID NO: 757408 - DNA, 75 bp, Homo sapiens
ctgctctgaaagctcttcttgaaaaatgcaaagatgtagatgagagaaatgagatcaccggcgtaatcaacccag

SEQ ID NO: 757409 - DNA, 75 bp, Homo sapiens
cagtatacagactagaccatacctttgagtatgccttcaagacagtgtgttggctttctggaaacatgggatgca

SEQ ID NO: 757410 - DNA, 100 bp, Homo sapiens
gaatgtgcagtttgagtctgatgaggaggtggtgttcccactgatgaagagcaggcgactgggttggagagggagatcatgctggctgcaaagaagggac

SEQ ID NO: 757411 - DNA, 51 bp, Homo sapiens
agccatccctgacacccggcatgaccaaaggtgcttcctggaggggcctgc

SEQ ID NO: 757412 - DNA, 75 bp, Homo sapiens
gccttttccgttgccggtgccggcctagcgtcctggaattacttcaatcaaaaatggtggagtcaatgaagaaag

SEQ ID NO: 757413 - DNA, 102 bp, Homo sapiens
cgcagggggacggggaccagcagctgtcgccgccgctctcagccttcctaatgatggtgatgaaaaatatgagaagaccataattaaaagtggagatcagac

SEQ ID NO: 757414 - DNA, 83 bp, Homo sapiens
agatgttggatatttgcttggaaaaacgtgtgggtacgaccttgtttgcctgagaatacagatcaacccacagaacaaagcgg

SEQ ID NO: 757415 - DNA, 88 bp, Homo sapiens
aacgggactaaactggcgggctccgtggaagcgtggccggcagcgtcccggacgaggaggggccacctacagatgctcctgcagtgga

SEQ ID NO: 757416 - DNA, 133 bp, Homo sapiens
caaaggagtggaagtttgagagaagtttaagagaagaaatggacatgattgcctaaatcagccaaacacaggatatattcgactttatgggagaaaatttagcaaagaagatcatgttctttttattaagtta

SEQ ID NO: 757417 - DNA, 98 bp, Homo sapiens
accgagcttcagcaagctctctccaacggaaccatattacgttcgttgcatcaaacccaatgacaagaaatctccacagatatttgatgatgaacgct

SEQ ID NO: 757418 - DNA, 100 bp, Homo sapiens
gaaagagctccaggatcagctcgaagcagaacagtatttctcagttcatgaaagccttaagttatgcatcattagataaagaagatttattgagtcctat

SEQ ID NO: 757419 - DNA, 73 bp, Homo sapiens
ggggccacgtgagccacggccacggccgcataggctctgtggatagcaactggatcgtgggtgccacgctgga

SEQ ID NO: 757420 - DNA, 100 bp, Homo sapiens
cggcccggtttccctcggcgtgctactgtgcgctcgatccagcaccatggggaagcgggacaatcgggtgaaatgaaagctcattagcatctacactgaa

SEQ ID NO: 757421 - DNA, 50 bp, Homo sapiens
aattggagccaagaaatgagtataggcgtgccgctggtgacggggtacac

SEQ ID NO: 757422 - DNA, 50 bp, Homo sapiens
gaatattggtcaagttgctgaccttgaaataccccacctggtggcccgtc

SEQ ID NO: 757423 - DNA, 95 bp, Homo sapiens
caagcctacagacttccagatggaatttcgtttccctctcaggactttgagcagatgtatggccggtacactcaggaccttggggcctttgccaa

SEQ ID NO: 757424 - DNA, 100 bp, Homo sapiens
gacgaaggccctactgggcaaggtgttttggggaacgagtttagtatattaaaatcaccagggtctgttgttttccgaaatggaaattggcctataccag

SEQ ID NO: 757425 - DNA, 50 bp, Homo sapiens
gacatatcgttggacccagaattgaggacaccagcccccaggaaggaccc

SEQ ID NO: 757426 - DNA, 87 bp, Homo sapiens
tctcaacaggtgtcaggcagagaacatccagtcatggataaaaatgagctggttcagaaggccaaactggccgagcaggctgagcga

SEQ ID NO: 757427 - DNA, 75 bp, Homo sapiens
ctacttccattccagaaagatggcatcatttttgccctcaaaagaaatggcaggaatgaatctgaagtctgctgc

SEQ ID NO: 757428 - DNA, 50 bp, Homo sapiens
ccaggacagcagcttccatctatgagaactcctgtgggcctctgctgctc

SEQ ID NO: 757429 - DNA, 76 bp, Homo sapiens
catcaagtggcatccatcataaggatgtgaagttaccccagatgtaaacatttcaggccaaaaatttaacattaaa

SEQ ID NO: 757430 - DNA, 75 bp, Homo sapiens
cgactgcggggacagcaacgtgatgcgggagagcgggttaatacaatctgttggaatgacactggagaatatatt

SEQ ID NO: 757431 - DNA, 96 bp, Homo sapiens
gtggaggtgggaaggtgtgtccggaggtttgcaggggtgcagtgtgtctggtcttatgaggccaagcagatagaacttcagttcactattggcgaa

SEQ ID NO: 757432 - DNA, 80 bp, Homo sapiens
ctgcacgaggtctatgagaacaagacggacgtcatcctgatcttggaactgacattcactgaacaatgccagggatacaa

SEQ ID NO: 757433 - DNA, 74 bp, Homo sapiens
tctagatcttcactatccaatacggaaagtcgtggaaggcgctgacgctgtcccagaagaggccgtacgtggac

SEQ ID NO: 757434 - DNA, 101 bp, Homo sapiens
ggagctagctgaaataacccttgatcctcctcctaattgcaggccacgcccagatttcttctaccgctgcttccctgatgggctagcccattctgacttga

SEQ ID NO: 757435 - DNA, 75 bp, Homo sapiens
attggaacagatattgcaaatgaaattctggatttacagagtgtatgggtttcgacagaccatgatgaaattgag

SEQ ID NO: 757436 - DNA, 100 bp, Homo sapiens
ctgggtttgaacggaatgctggagtcagtggaagacggagctggtcggcccgaaggatgcctaaatcaaaggaacttgtttcttcaagctcttctggcag

SEQ ID NO: 757437 - DNA, 98 bp, Homo sapiens
gtttactgttgcgttttgcagacaacactttctcagctttgctctggtgagtgacaagctgtaccagcggaaagagcctgtcatcagttctgtgcaca

SEQ ID NO: 757438 - DNA, 75 bp, Homo sapiens
tttttattacaagactacggagcataggaggaaaattcatcatctgccttgcaccagaatagagagatgatagac

SEQ ID NO: 757439 - DNA, 75 bp, Homo sapiens
ctgtggatatctgtctaagtaaggccaaatttgagtttcatcatggtgactatgaaaaacagtttctgcatgtac

SEQ ID NO: 757440 - DNA, 134 bp, Homo sapiens
aggctgccgggcgctggtcgtcagcgccgaggctgggctgaggcgccgcggtaccatgaggcgccgcttttgtctggtcctctgagccccagtgagagtttcctgaggtacctcacccttccacaagacaacag

SEQ ID NO: 757441 - DNA, 100 bp, Homo sapiens
gggaatgaattggatgaacaaaatggtgctcgcggtgaggatcgatgacctggaccacctcccggagaccaccaccatcgacgcctcctccattggcatc

SEQ ID NO: 757442 - DNA, 128 bp, Homo sapiens
ggacatgcctgaggtcctcaagtccctgctggagcactctctgccttggccagagaagagaacaggacacattcagctaacgtattttagcaggtggagtgaggttgaagattcctgtgacagcgatg

SEQ ID NO: 757443 - DNA, 74 bp, Homo sapiens
tatactttctgtcagccagaaactggtcagaaaaagagtgcacgccagtatcacgtacagttctttggtgacgc

SEQ ID NO: 757444 - DNA, 83 bp, Homo sapiens
atcacaattactgatgggagcaagttgactaccaccagtggagtccaggatgagctttaccgatttgttacaactcaagcaag

SEQ ID NO: 757445 - DNA, 78 bp, Homo sapiens
gcaagagcttccagctgagacaccgtgagggtcggcactcttcaccctcccgagccctgcccgtctcggccccatgcc

SEQ ID NO: 757446 - DNA, 98 bp, Homo sapiens
ccacccgagagcaacaaagcaggcgactacagccacgtgaaggttgtggttcaccttgaaactattctaggagcctcagttcaacatgttaaactgaa

SEQ ID NO: 757447 - DNA, 98 bp, Homo sapiens
aatgattcgactcattacgcatgggcttggtggagaaggctatctcaatttcatggcacggaaaagaggcgcagggagcaagaaaataaatatttaga

SEQ ID NO: 757448 - DNA, 75 bp, Homo sapiens
ggaggtgtcctaaatgtgtcgccgaggtggttggaggcaaagtaaagaagcccggtaaacgtggtcggaagccag

SEQ ID NO: 757449 - DNA, 106 bp, Homo sapiens
ctacattccaattcaagaggaggagaggggttgttttataaactgcctggccgaatcagccttttcacgctcaagggtgttcctgaaaagaaggtacttccaatca

SEQ ID NO: 757450 - DNA, 101 bp, Homo sapiens
gccagactcctggagatcgacccgtacttgaagccctacgccgtggacttccagcgcagagaaagtttcattgtgcaaatctaacttcatggcctcgctgg

SEQ ID NO: 757451 - DNA, 75 bp, Homo sapiens
ggtcctctcaccgctgacgatgcatttgatcatgagcgtcttgttgttcatcgagcactcagtagaggtggccca

SEQ ID NO: 757452 - DNA, 101 bp, Homo sapiens
caacttttcacccatctgtacatcctatgtcaactgcttctcaggtagcaagtacatggggaggtggttgtgtcaaaccgattggtgacatctccatgctg

SEQ ID NO: 757453 - DNA, 101 bp, Homo sapiens
tgacggccacgaacttccgagtgggaatcatattgacaggtcatgaaaatgagaccaaaagatctctggaagcgattaatgataaaatttcatggagaaga

SEQ ID NO: 757454 - DNA, 76 bp, Homo sapiens
tgagtcaggacgtaaatggaaccctgaaccttctgataacttaagagagattctccaaaatgtggccagattgcag

SEQ ID NO: 757455 - DNA, 100 bp, Homo sapiens
aacaagcgcacggagccctcaaggattgaaagccacaaccactgatgtcaggaagaatgactccatcatttcaaacgtaacagtaacaagtgttacactt

SEQ ID NO: 757456 - DNA, 75 bp, Homo sapiens
cggcctcactgggacccccaggaggtgaccctgcaggactgggctaatgctaatgtcagcagacagattgaggac

SEQ ID NO: 757457 - DNA, 50 bp, Homo sapiens
atgctggcaagtctgaaggtcaagtggattctccacagttttcctcgtgc

SEQ ID NO: 757458 - DNA, 75 bp, Homo sapiens
ggcaaatatgcatggagatgagatgagcagcaccagcagtaagagggctccgaccacggcaacccagaggctgaa

SEQ ID NO: 757459 - DNA, 80 bp, Homo sapiens
gaaaggggcccggcgtctgcctcgagactgaagaccggtgctggagaatctggtaaaagcaccattgtgaagcagatgag

SEQ ID NO: 757460 - DNA, 100 bp, Homo sapiens
agaggaaccgaaagtgaaaacccagtggccgaggtctgcagatgagcctgggctatacatggcgcagacagaccggccagaatttagcttcacttgagag

SEQ ID NO: 757461 - DNA, 80 bp, Homo sapiens
gtttgctggcctagacctgaactcttcagataatcagagtggaggaagtacagccagcattaaacacagtgggaatatca

SEQ ID NO: 757462 - DNA, 82 bp, Homo sapiens
acagacataaacagaaagtcttacatgacacaatggatctgaatcatctcttgaaaggtgagtcatcatccccctgctgctg

SEQ ID NO: 757463 - DNA, 83 bp, Homo sapiens
ttctttcccaaacccatactaatgttcatatgcagaccatcgaaagactggttaagacagagcgggatgccaccagcttgtcc

SEQ ID NO: 757464 - DNA, 88 bp, Homo sapiens
atctccactggacactggtcaggaatacctccacgggcccattcccgagattctagtgattctgctgatggacgggccacaccctctg

SEQ ID NO: 757465 - DNA, 99 bp, Homo sapiens
cttgaagcaagggaccttgttatagaagccttaaaggtgaccaagaatatggcccaggtgaccaaagccctggacaaggccctgagcaccatggacctg

SEQ ID NO: 757466 - DNA, 75 bp, Homo sapiens
taaatgacgaaggggcttcttccagagccaaggaggaagggttgtccgggcccagcttcccgatcagtggagacg

SEQ ID NO: 757467 - DNA, 80 bp, Homo sapiens
gacctcgaccagctgctggacatgtcctagaggaagagtttgccagcccgggatggaggcttcaccctggaagacatctg

SEQ ID NO: 757468 - DNA, 75 bp, Homo sapiens
ggtaatgctggtggtctgcatcaccaccggatcaacttcgacaaatattctacatcaaacagttcgttaactgca

SEQ ID NO: 757469 - DNA, 101 bp, Homo sapiens
gagaaaaggaggaaaatggtcaccttgggggaagaaggagaaagggccaacccctgaagaagcaatacagaaactgaaggagacagagaagatactgatca

SEQ ID NO: 757470 - DNA, 101 bp, Homo sapiens
tcaaatcagcatttgccccctttggtaaaatatcgtgtcattgctgggtcccctgcacctccagagttgatccgagccatcatcaacaagataaatatgaa

SEQ ID NO: 757471 - DNA, 83 bp, Homo sapiens
cccaccgctgccctcagctccgagtccagggcgaggttatgatgtgattgctcaagcccaatctgggactgggaaaacggcca

SEQ ID NO: 757472 - DNA, 74 bp, Homo sapiens
cgaggacacgaccttcctgcccttcacgctccaggagctaggaacttgctactaccagcaccatgccctaccaa

SEQ ID NO: 757473 - DNA, 134 bp, Homo sapiens
cctggagaagtggcagaagcaaatgtataagcaagagatgaagaccaattacgagacccttgattccctgggagaaccaggacgtcctggcagcccggggaaggatgggacgagtggagagaagggagaacgag

SEQ ID NO: 757474 - DNA, 100 bp, Homo sapiens
tggagtgttaacagtgtagggaaaatagagtgtgtatcagcagagaccaccgaagactgcatcgccaagatcatggttcaacagagtttggaaaagattt

SEQ ID NO: 757475 - DNA, 80 bp, Homo sapiens
aggtgaaggtgcggcccccgcccctgaagaagacctttgactctgtggacaaaaagtcctacctccatctccgtgggccc

SEQ ID NO: 757476 - DNA, 100 bp, Homo sapiens
tgacttttcctgtggtaataataggtaggcgaaaaccaagagtacatcggcctcgttctcctatattggaagaaaaagacatcccgccccttgaatttcc

SEQ ID NO: 757477 - DNA, 146 bp, Homo sapiens
ctccagcgcgggtcggagtctgggggttcgcgcccgccgacccgcgccctgctccctctcagcacctgggcggacggactattggaaatgcacttcatgcaatgaaatgaatcccccccttccatcacattgcaacagatgttggg

SEQ ID NO: 757478 - DNA, 50 bp, Homo sapiens
ctgcctcctgcagcccccatagcaggcaccatgactcctgtgaggatgca

SEQ ID NO: 757479 - DNA, 100 bp, Homo sapiens
gacaaagagcccctcatcgagctcttcgtcaagtgcaaattgggaatcgtgaaattcatagaagctgaacaggtgcctgaacttgaagctgttctccact

SEQ ID NO: 757480 - DNA, 100 bp, Homo sapiens
ttggttctgacgaggcacagcgtttcttgcaagaatgggagggggcagctggcattttatgctatgtgggagcctatgtcttcatcacttatgatgacta

SEQ ID NO: 757481 - DNA, 82 bp, Homo sapiens
ctaatcttcaacaaccacgggaagccgcggctctccaagttctaccagccctacccctaccacttatgtcttggatgaagat

SEQ ID NO: 757482 - DNA, 100 bp, Homo sapiens
tctgtcttcggtggactccttcggcagtccacccaccgccgccgcctcccagattggtttatcttggaagctaaagggcattgctcatcctgaagatcag

SEQ ID NO: 757483 - DNA, 97 bp, Homo sapiens
gctttgtctcctttttcaacaaatggattttgaaggtatggcctttcttgaaactgaacaaggaaaaccatttgtgtcagtattcagacatttaagg

SEQ ID NO: 757484 - DNA, 90 bp, Homo sapiens
gaccgatgttgcgcgaggaaaatgcgggacgcccagtgccggtggtggtgtgcacattgagccccggtatagacagttcccccagctgac

SEQ ID NO: 757485 - DNA, 98 bp, Homo sapiens
gaggagcctgtattgccgctaatgtgtgtgcctgcccacaaggcttcactggacccagctgtgaaacgggaaacgtgtccctgatcaccacccctgtt

SEQ ID NO: 757486 - DNA, 75 bp, Homo sapiens
ataatgaaattgattggcttaaaagaattagggtggctatggaggcttttacaacagtgatggatatggaggaaa

SEQ ID NO: 757487 - DNA, 82 bp, Homo sapiens
gttcaatacacctcccacctgtcctcaggcatatcaaaggtttacccaaggtccagcctagcccctaggcaccatgtcggac

SEQ ID NO: 757488 - DNA, 75 bp, Homo sapiens
gcagccacacctgaactaccaaaagacttccattctttatcgactctgctgaagggcctgtcacgtcagaagtgc

SEQ ID NO: 757489 - DNA, 82 bp, Homo sapiens
aagaaccgactggaccccacgtggcaggagatgctgaaccatgctacctgcaaggtttccacttcaagcgtgacccttttgc

SEQ ID NO: 757490 - DNA, 90 bp, Homo sapiens
ggtcgcgatcgaagagtccccccaagtctcctgaagaggaaggagcggtgtcctcttaagaaaatgacatatctgaagagatggattaag

SEQ ID NO: 757491 - DNA, 100 bp, Homo sapiens
gacctgttcacgcaggggaaacttgaacattcgcagctcctcagagaaattttgaaattgccttcaagatgtttgatttgaatggagatggagaagtaga

SEQ ID NO: 757492 - DNA, 100 bp, Homo sapiens
agacaagtaatgtcgataaagaggaggaagctgcgttcctcttgatccaaagtgagaagatgaaaaatgattacatttacctcagctggttagctcggtg

SEQ ID NO: 757493 - DNA, 75 bp, Homo sapiens
cgggacctgggctgggaacccgcggtggagcgggacacgaacgtggaagatgagaatgtgcctactgctcctgat

SEQ ID NO: 757494 - DNA, 89 bp, Homo sapiens
cacctgtgcactcgctccgtacctggacctgctgaatcatagcccacatgtccaggaggtggtccaggccacgctggtggtcctggcct

SEQ ID NO: 757495 - DNA, 82 bp, Homo sapiens
gccgctccctagcaccttctccagtcgacactctcgcgcccggagtgccctctggtggtcagaagatgctgtgctgtctcgt

SEQ ID NO: 757496 - DNA, 50 bp, Homo sapiens
aaagaggagcgttagttgttggtaatactgcattgcatgattgtgcagaa

SEQ ID NO: 757497 - DNA, 75 bp, Homo sapiens
aggacagagccaatctactcctcctgggttatgctcaaggaagactagagcagcagccgctcttctaaaacattc

SEQ ID NO: 757498 - DNA, 100 bp, Homo sapiens
ccggggtccgccgtcctagccgctgctgtcttcgtgggaggcgccgtgagttcgccgctggtggctccggtgctcatcatcactgtaggggacctttgaa

SEQ ID NO: 757499 - DNA, 82 bp, Homo sapiens
ccagccctggcggggcgggcagcatggttcactccagcatgggggctccagatcctggagagctcccagactttgctcagcg

SEQ ID NO: 757500 - DNA, 100 bp, Homo sapiens
gttttggctgggatcatccgcggcggccgggctcgtggggcgcctggagtgagggttctggttcccgccggcgaggtccttgacacttactgtaaaatct

SEQ ID NO: 757501 - DNA, 83 bp, Homo sapiens
ggcgcggcccggggtgtcagtgtggaggagactgaggaaagtgggggctcagcaagaactgattaccgagccattcaactagc

SEQ ID NO: 757502 - DNA, 98 bp, Homo sapiens
gcgcgatggagcagcgaaaacgtggttgtagagttccgtgactcccagaactgccattggatgtccagaatcccctgtagttgataatgttgggaata

SEQ ID NO: 757503 - DNA, 90 bp, Homo sapiens
caacgaggacgccttccagcacggcatctgctttgaggccaagcatgttggaacaggattccaggagaatgaaccctagtgtgagccctg

SEQ ID NO: 757504 - DNA, 83 bp, Homo sapiens
aacagaactagctccaatgcagataaaagcttgggacagtatggaaattaccagcagtgaaaaagtacttacattccagtagc

SEQ ID NO: 757505 - DNA, 100 bp, Homo sapiens
cgctgaccagcgcctctactggaccgacctggacaccaacatgatcgagtcgtccaacatgctgggactgcctccgggcctgccaggagcagatcgaagc

SEQ ID NO: 757506 - DNA, 101 bp, Homo sapiens
cttccggaaggactttggcgaggcgcgttccttcacctcgggcagaataactttgcagaagcccacaggttcttcacagagatcttaaggatggatccaag

SEQ ID NO: 757507 - DNA, 82 bp, Homo sapiens
ccttcacgcaggctttaagatgatgagcaaagcttcttccccgggagctcgcagggctgcgacgccttcctgcggcataaga

SEQ ID NO: 757508 - DNA, 89 bp, Homo sapiens
cgaccccagtcggtgctccggggaggtcacctgacgaggagaggctgaggggatctggcggtggagcgctaggatcagacgcccccgcg

SEQ ID NO: 757509 - DNA, 75 bp, Homo sapiens
atctttattgaagctcacctttgtctaaataagtttctctggaaacccccctggtaagtgtggaggaggcgggac

SEQ ID NO: 757510 - DNA, 87 bp, Homo sapiens
ctgccgcgttagttccgagcttgaagtcacattaccgctacattggcaagaccatggattaccggggaaccatgatccctagtgaag

SEQ ID NO: 757511 - DNA, 90 bp, Homo sapiens
tgcggcgtcggcagctgctgctccgaggaatgtcgttgtctgctgggtcttcccctcttcattcccccaagattactccacatacttctc

SEQ ID NO: 757512 - DNA, 113 bp, Homo sapiens
tgaggagcctcctggcctgcagcttctgtgtgctcctgagaggtgctggagaatctggtaaaagcaccattgtgaagcagatgaggatcctgcatgttaatgggtttaatgga

SEQ ID NO: 757513 - DNA, 100 bp, Homo sapiens
ctgggtcctgccttcgcgctgaggagccctcgttttcgagatcaggcctgaccgggataagctccagatctttgaaccaccagctccaggagaaggcaac

SEQ ID NO: 757514 - DNA, 100 bp, Homo sapiens
ctggatttattacaacattatcattggctaaaaagaaaagccctgaatggttcaataagactgcagcgaggcaagaaacaacagattgaaaatggtagtg

SEQ ID NO: 757515 - DNA, 100 bp, Homo sapiens
ccctacagaccattctctgtcggagtttgagtttgacgtcatcattggtgccgatggccgcaggaacaccctggaaggaagttctacagactttgaccaa

SEQ ID NO: 757516 - DNA, 73 bp, Homo sapiens
ctcccctagcttcactcaatgttagtaagctgcccaacatgttcggcgaccttcggtccacgtttattgcctt

SEQ ID NO: 757517 - DNA, 100 bp, Homo sapiens
caggaagccaggttgcagggtgtccgcttcctcaggttttacacatccataagtagacctttttggagcctcaccagccaattcaatggcgtcctcttct

SEQ ID NO: 757518 - DNA, 106 bp, Homo sapiens
tcactgagaagtgtatatcaagccacaatttccatcaaaaagtgattaagcagagaatggagaagaaggttgattccagacccctgtaaaagagcccaacagtgaa

SEQ ID NO: 757519 - DNA, 82 bp, Homo sapiens
cgttcccgggccgttgatcttcggccccacacgcctcaaggaataggttctcctagtgtctatcatgcagttatcgtcatct

SEQ ID NO: 757520 - DNA, 51 bp, Homo sapiens
cctatagatgagaaaccatacaagctgtgcctgatgtaaatgctgacattg

SEQ ID NO: 757521 - DNA, 112 bp, Homo sapiens
caggctggacccacgtctgtctggtgataccaggggcagagggaccactctgacagttgacattttgctaaaggctgtgggagacactcctattatgaaaacaaagaagtgg

SEQ ID NO: 757522 - DNA, 100 bp, Homo sapiens
tgatgcatttcatggctatcatctacacatttgatggtcctcgaagatttgaggatttagggtcaaggtgtgaaggaccgagacccaaagggcctcgttt

SEQ ID NO: 757523 - DNA, 100 bp, Homo sapiens
aaatgcaaaaaaactaatggaattagcctgcaacatgaaggagtgtggggctgattgtgctaagttccagaagagtgagctagaattcaagtttaatcgg

SEQ ID NO: 757524 - DNA, 50 bp, Homo sapiens
gccgtctctggaggagtactggcaacagaacatgaaaggctcccggagca

SEQ ID NO: 757525 - DNA, 75 bp, Homo sapiens
attagaagaacagattgcaaatcagactggaagatgaaatgggacgtcggtcatcagatactgaagaagaaagca

SEQ ID NO: 757526 - DNA, 100 bp, Homo sapiens
ggcgttcttccgctggctcagccgcaagtacccgtccatcatagtcaactgcgtggaagagaaggaaatgtggctttagataatctacagataaaagaaa

SEQ ID NO: 757527 - DNA, 75 bp, Homo sapiens
gaaagctccgcaccaaggtggagaacggacgaatacctttctctcgtggccaggctcattatccattttcgagac

SEQ ID NO: 757528 - DNA, 74 bp, Homo sapiens
gccttgcttgcttgagcttcagcggaattcgaaatgctccagtgatccacaagctcagaaatacatcgcggaaa

SEQ ID NO: 757529 - DNA, 125 bp, Homo sapiens
atcgggagttcttgaatctgcagacccgtctggaggagaaaccagatctacgaaagttcatcaaaaagctcttccccgcagctctgggagacgtggaggcctctgaagctgaagaccacttcttc

SEQ ID NO: 757530 - DNA, 80 bp, Homo sapiens
ctcagtaaggactcggcggacatcgaggttatgaagacagtatggagtttccagaccatagtagacatttgctacagtgt

SEQ ID NO: 757531 - DNA, 98 bp, Homo sapiens
aaaagcgttaagattgaggaacgggaaggcatcactgtctattccatggaaggccaaaaatccccctggagactccagcctacactgggcagccatgg

SEQ ID NO: 757532 - DNA, 100 bp, Homo sapiens
gaaagaaacaagcaagactggtattgcaaccccagtcgaatatggaggatacagaccacaattactatatatctcgaatatatggtccatctgattctgc

SEQ ID NO: 757533 - DNA, 100 bp, Homo sapiens
agcctcccgagtagctgagattacagatcttcctcagaagaataggcttgttgttttacagtgttagtgatccattccctttgacgatccctaggtggag

SEQ ID NO: 757534 - DNA, 83 bp, Homo sapiens
cgctcgacctcctggtcagcacttaccggctgccccagatcgcgcgcctggacaacgagtgatggctgttttagtacttcagg

SEQ ID NO: 757535 - DNA, 50 bp, Homo sapiens
gcctaacagatgagctgtcgatagagacggggtttcgccgtgttagccag

SEQ ID NO: 757536 - DNA, 75 bp, Homo sapiens
gagagaggctgcctcctgcagcccccatagcaggtttaagaattgtttaagctgcatcaatggagcacatacagg

SEQ ID NO: 757537 - DNA, 100 bp, Homo sapiens
ctttgccaatgttctcattcaccggctctcgatcctccttcaggggagacaccaatttctatggcaaacagccatgctgtgacctacaagcaaactaaat

SEQ ID NO: 757538 - DNA, 98 bp, Homo sapiens
ggcgccgcgacctccggatgacccgggcttcggcccccaccagagactcgatcttagcaaagcaatgtctcaagatggtgcttctcagttccaagaag

SEQ ID NO: 757539 - DNA, 100 bp, Homo sapiens
ccgagcacctctccgcgcacatcactcccgagtggaggaagcaatacatccagtatgaggtgtttaaaattatccaactgccatagagctaaattctttt

SEQ ID NO: 757540 - DNA, 50 bp, Homo sapiens
tacattgccatccgcatcccgctccgataaagcaacagaagcctccagcg

SEQ ID NO: 757541 - DNA, 50 bp, Homo sapiens
caggactgcgccgcgtcttcctcaagattgcaggaggagatgcttcagag

SEQ ID NO: 757542 - DNA, 100 bp, Homo sapiens
gatgattttgagcgtcgcagagaacttagaaggcaaaagagggaggagatgcgactcgaagcagaaagttgaagactgggatagtttccaagctattttg

SEQ ID NO: 757543 - DNA, 75 bp, Homo sapiens
tcaaactgccaactgaacttcatcgctcctgacaagcatgaggggctaagtgatggatcttgtactccgtgttgc

SEQ ID NO: 757544 - DNA, 100 bp, Homo sapiens
gaggtctgcatcaatccctaccactataagagagtagaaagccctgattcgcttcaagctcagcttatcaatatgggtgttattcctaccttagtgaaat

SEQ ID NO: 757545 - DNA, 90 bp, Homo sapiens
gacatgtcctctttcacaaagtttgagataacagcataaacttggaggaggcagtggagagagcatcctggtatcacagcttcagcatgg

SEQ ID NO: 757546 - DNA, 75 bp, Homo sapiens
gcagaaggccgagaagctctacccactgccctcggcccgcggatttttgtccctgagtcatggaagacagaagag

SEQ ID NO: 757547 - DNA, 100 bp, Homo sapiens
ggaaattcctccagggctgagtcacagggaagaaagcgatttcctccgcctcttccaaagcggagtgtgaggaagaggctgtctgtgtcattatgtgtgc

SEQ ID NO: 757548 - DNA, 75 bp, Homo sapiens
ctcttcccacggacgcgcgagacaatgaggagagaagcttgattctttgctctcagactacgatattctctcttt

SEQ ID NO: 757549 - DNA, 100 bp, Homo sapiens
gtcagaacaaaggctgggatgggtatgatgtacaggacacagcattgttggttttgccatgtactattttacctatgacccgtggattggcaagttattg

SEQ ID NO: 757550 - DNA, 96 bp, Homo sapiens
gcactttattatgcaggtggtctgtgaagccacacagtgtccagatacgaggtgcagcgtaagtatgcacagatgaagatggaactaagccgagta

SEQ ID NO: 757551 - DNA, 101 bp, Homo sapiens
cggggacctggagctgacgcctaagagtacacactagatgtgtacagactctcctccgtggtcacacagcacgattccaagaaggctggagctgaggtggt

SEQ ID NO: 757552 - DNA, 78 bp, Homo sapiens
gaagagaccccaagagtgttgagcagcccatcgtgcttaaagaaggccctgggcgctgcctatggcacagccaagagc

SEQ ID NO: 757553 - DNA, 83 bp, Homo sapiens
acccagtgcacacattaactgaagtggagcttctggcatttacatcagtagttaacctgcagtacagtgaagttcaagatcgg

SEQ ID NO: 757554 - DNA, 83 bp, Homo sapiens
gaaggaacgaggcaaggagctaaagcagcgtgcgttcagccctgggagatgccctgtatccaagcccaatatgggacaccagc

SEQ ID NO: 757555 - DNA, 100 bp, Homo sapiens
gggcagcagggcggcggcgggagcacgtcctcaagcagctggagcgggtcaagagagtctactgtggccacgagtacaccatcaacaacctcaagtttgc

SEQ ID NO: 757556 - DNA, 100 bp, Homo sapiens
cagtgcccaggggtctgagtctcacagcttgtaaaggtggctgagatctgcgttgaaatggagctgcgggacgagattctgcccagagcccagaacatcc

SEQ ID NO: 757557 - DNA, 83 bp, Homo sapiens
cgacaagccgctggcagccgcggatctcaccgccgctcaggaataccctctaccatctgctttggtcagggtgccgctcgagg

SEQ ID NO: 757558 - DNA, 100 bp, Homo sapiens
ctttttgttcaagataaagtgattttttgcctttgttgattaactggacaaattcagattgaaaaggaagatcaggccaaccccaaagaagaagtgacca

SEQ ID NO: 757559 - DNA, 100 bp, Homo sapiens
tctgcaacacctttggaggaggggtgtttctggccacgtgcttcaacgctctgctgcccgctgtgagggaaaagcagcctcgtcttacagcgtgactgca

SEQ ID NO: 757560 - DNA, 98 bp, Homo sapiens
ggatttgcaacctctttatcgataatattatcaacattgatctcctatttttggcttcaagattttgtgccaaccagagatggggttttgccatgttg

SEQ ID NO: 757561 - DNA, 75 bp, Homo sapiens
gaatttgtggctggctggatctctggaggctctgtcggtggtgagcgacgaccagtccctctttgactcagcgta

SEQ ID NO: 757562 - DNA, 80 bp, Homo sapiens
gccaagatcgccgccaacctgcagtggatctgcgccaaggcctacggccgaggtttgatctgtggatgaaatgaatcatg

SEQ ID NO: 757563 - DNA, 100 bp, Homo sapiens
ccggagtgcgccggcggtggcgcctgcggacctaactagctccaggttaggccgagctttgcgggaaagcagcgacctgaccctgcagctgctggctgtg

SEQ ID NO: 757564 - DNA, 100 bp, Homo sapiens
tctactgcagaaatatcagctagaaccatgcagtcaagtgactattatatggttaaaaagattttggaggaaaacagttcaggtgacttgaacataaatt

SEQ ID NO: 757565 - DNA, 101 bp, Homo sapiens
tcaattcaaaggacctgcccccagagagagctgagtatgagtttatcagctctggtctctacctagtggtgttattgcacttgtgcgaacaaagcttttct

SEQ ID NO: 757566 - DNA, 75 bp, Homo sapiens
gcgtggagcctgctgccatgaagtcagcgatgtacagttacccagcacgtgtacctcctcctcctcctattgctc

SEQ ID NO: 757567 - DNA, 90 bp, Homo sapiens
ggcttagagggactaggctgggtgtggagctgcagcgtatccacaggtgtctgacttccagcaactgctggcctgtgccagggtgcaagc

SEQ ID NO: 757568 - DNA, 112 bp, Homo sapiens
tcaatatctgtcttcggtggactccttcggcagtccacccaccgccgccgcctcccaggtaatctgtaagtcagatgctccaacaggggatgttcttcttgatgaagctctg

SEQ ID NO: 757569 - DNA, 98 bp, Homo sapiens
cagaggagcagctgtgtcacttgtggctgcagaccctgcgggagatgctggagaagctgaaatgcaagttctagccggtttttcctacaaggaatcca

SEQ ID NO: 757570 - DNA, 75 bp, Homo sapiens
ggactgagaaggaaagcttctttctgggcagccagagccgcaaagtagtttatgccaacgtgacttcattcatac

SEQ ID NO: 757571 - DNA, 83 bp, Homo sapiens
cagaggaggaatcccgcaaccgaagcacaaaagttatcaaacccggtggaccatatgtaggtatggcctcacaagtcttggtc

SEQ ID NO: 757572 - DNA, 101 bp, Homo sapiens
actcttggaactgggcttggtgcaggatttggaacaggtcagaatggcggcagtggagcatcgtcattcttcaggattgccctactggccctacctcacag

SEQ ID NO: 757573 - DNA, 98 bp, Homo sapiens
tctgccaagtgcactgaggaaggaaaatggagcccggagcttcctgtctgtgctcgtacagtctttgcccgctgcctgatttttcctctcatcgtgac

SEQ ID NO: 757574 - DNA, 75 bp, Homo sapiens
cgaacatgcgcttttgacacattggagcttatttccagtgatgctgatggagccatccaaagggctggaagattc

SEQ ID NO: 757575 - DNA, 100 bp, Homo sapiens
gagatttactgaagcaggagagcggggcagagcggcttgggtaaatccaccttaatcaacaccctcttcaaatccaaaatcagccggaagtcggtgcagc

SEQ ID NO: 757576 - DNA, 100 bp, Homo sapiens
aattggagaaaagcattgatgacttagaaggtcaccacctcccacagccctgctgcaccaggggagcaaggcttcggggaatgcctcctggccgtggccc

SEQ ID NO: 757577 - DNA, 74 bp, Homo sapiens
gacaggacccggcgccgggcactgagcaccgccaccatggggaagggggccggtctaattgaagccaacggaga

SEQ ID NO: 757578 - DNA, 83 bp, Homo sapiens
ccctaatggaggtctccagtttcgattttgcaagaacgaggctcaaggatgtgagggacacagtattgacagctgaagaaatg

SEQ ID NO: 757579 - DNA, 100 bp, Homo sapiens
tcgtcataccattagatctacaaacaggaatgccagagctgaacggacagcttcagaaataaattgggatctcattcctaggcaccagcaagtgtttagc

SEQ ID NO: 757580 - DNA, 73 bp, Homo sapiens
gagcagtagccgccgtgggagggagccatgaagcattacgagtatgaagtgtaacagaacagactttaccacc

SEQ ID NO: 757581 - DNA, 87 bp, Homo sapiens
cgcgctgacaggggggcctggccgcgcagccgggagtgcatccgccccaacccttttccccctcgtctcctgtgagaattccccgtc

SEQ ID NO: 757582 - DNA, 96 bp, Homo sapiens
cactacccgtgtgccagcgatgcaggtgccaagtcctgccctgccaacttcttggcagctgccgacgacaaactcagtgggttccagggggacttc

SEQ ID NO: 757583 - DNA, 50 bp, Homo sapiens
cttgccaaaatcaacacattttattcagggcaagaatatcacggcatggg

SEQ ID NO: 757584 - DNA, 147 bp, Homo sapiens
ggacattttgggttttaaacagcgcgtttaagaacacctcagatctgccttctctatcccaatggcagaggtaatagcctgcagctggtgttttgagaagccctactgctgaaaacttaacaattttgtgtaataaaaatggagaag

SEQ ID NO: 757585 - DNA, 100 bp, Homo sapiens
tggagtggtttgaatatcgtaagcgcacgtttaaacatctcaagattgttcaggaatatacaaaaagagaagaagaaatagaacagttaactgaggaact

SEQ ID NO: 757586 - DNA, 100 bp, Homo sapiens
cggactgcggttggggcgggaagagccggggccgtggctgacatggagcaggctgaccggttccctgatgtgttacctgcttctgctactgatccaaact

SEQ ID NO: 757587 - DNA, 82 bp, Homo sapiens
ggcgggccgaggagccgggcgcaatggagcggaagagctgagcgtgctccgcctctcaccttccatgggccacccgctggag

SEQ ID NO: 757588 - DNA, 100 bp, Homo sapiens
tcttttggcctcctattttctgttgccttccccgtggatggagagcctggcaagaagaattccatcctcctgcacaaggtgcagcatgacctcaactcgg

SEQ ID NO: 757589 - DNA, 74 bp, Homo sapiens
agaaagcgtttgtggagccgtattttaaaggtgatgaaagaaaatgtggacacagacttgccaggcagcctggg

SEQ ID NO: 757590 - DNA, 74 bp, Homo sapiens
agaccacttgcaacaagggtctgcgaatttcatatatgacgatgtttcccaacagtgatgtcacaagattgacc

SEQ ID NO: 757591 - DNA, 96 bp, Homo sapiens
gctgactgcacttcttttttgagaaaggaaggaatatatcctgactgattgctcccagccaacctctgataaaccctcccagcggccatcagagag

SEQ ID NO: 757592 - DNA, 100 bp, Homo sapiens
gacgtgaacggagtgaccaagagcaggtttgaggtgtcatggagaaactccagctgggcccagagattctgcagcgggaaaatccaaggcttatttatgc

SEQ ID NO: 757593 - DNA, 75 bp, Homo sapiens
cttcaatgcagtctttagtcgcatttctaccagaggactactgagcccagccaggctgtatgccattgctgccaa

SEQ ID NO: 757594 - DNA, 51 bp, Homo sapiens
acgagctgaccctgggagacatcgacggagctcgaggccatgagcagatat

SEQ ID NO: 757595 - DNA, 101 bp, Homo sapiens
tggctgaagttcgtaaagatgatgttgtaacagtgactgtgtgggactacaatactggcagagtgggagcaccattagtttgctgtgaaatcaaattaaaa

SEQ ID NO: 757596 - DNA, 88 bp, Homo sapiens
tcgccagcagccgtccggagccagccaacgagcgggtaatctacagttgctgcagaactgcctggcagtgttaaatggagacacataa

SEQ ID NO: 757597 - DNA, 75 bp, Homo sapiens
attcattctggattggtggatctgaagtacaaaatattttccaggatctgcctacaaactggtttgctactttac

SEQ ID NO: 757598 - DNA, 100 bp, Homo sapiens
catcttcgacttgagcgaagttttatgcaagctgcattacaggcactaaagagaaagaagaggttcgagaaacagctcactcagattgatggcacacttt

SEQ ID NO: 757599 - DNA, 101 bp, Homo sapiens
aacatgggcattttgtttatgagcaaggtggcaaatggtaggatccaaagccttgaggccaccattgagaagctcctgagcagtgagagcaagctgaagca

SEQ ID NO: 757600 - DNA, 50 bp, Homo sapiens
ctccagccccagccccaagggcagagatccagaagtggggcaacattgag

SEQ ID NO: 757601 - DNA, 107 bp, Homo sapiens
gtagaacacagttatgggtcgcaagaagaagaagcagctgaagccgtggtgctgatgtatgtccctgggaagctgcatgatgtggaacacgtgctcatcgatgtggg

SEQ ID NO: 757602 - DNA, 51 bp, Homo sapiens
catcatttcatcacatcctgtcaagggtgctggagaatctggtaaaagcac

SEQ ID NO: 757603 - DNA, 51 bp, Homo sapiens
tcagctgttcaagctgcactggagaagcacacagcatgcctctgcaatgcc

SEQ ID NO: 757604 - DNA, 73 bp, Homo sapiens
tgttaaagctaccaatggaccaagatatgttgtgggttgtcgtcgacagatccccgtcgaggtcaagatcaag

SEQ ID NO: 757605 - DNA, 100 bp, Homo sapiens
cctgcctctccctgggctctgggttggtacattgtgacctatgccttggggatctaccatctaaatcttttcatagcttttctttctcccaaagtggatc

SEQ ID NO: 757606 - DNA, 100 bp, Homo sapiens
tcggccggcgtgggagcgccaaggccgcagacttcccaagaaggacaacccgaggcgaggcttgtggctggccaactgccagcggctggaccccagcggc

SEQ ID NO: 757607 - DNA, 100 bp, Homo sapiens
aatagaagaataagcagtgcctgtgtggaatactcccccagttgcaagaggcgcaggaccgtggaagacttcaacaaattctgcacctttgtcttggcct

SEQ ID NO: 757608 - DNA, 100 bp, Homo sapiens
gcgtccgcgcgctggagctggagaacgaccggctcctgctcaagatctcagagaaggaggaggtgaccacgcgcgagatgctcagccagcattgggcagc

SEQ ID NO: 757609 - DNA, 100 bp, Homo sapiens
aggctgtgctttggaagagtatgcctgggtcccgccgggtctgaagcctgaacaggtgaaaacagctactattgccactgaaaggaatgggaaaccagag

SEQ ID NO: 757610 - DNA, 75 bp, Homo sapiens
ccacagagaagatccgcgaggttgtctgctgcagatgccagccccaaacctcatccctagtggaggccttgctga

SEQ ID NO: 757611 - DNA, 96 bp, Homo sapiens
ctagaagggcaattactggatggaatgatattccaggcctctaattgtggcattgtagaaagtatcctgaactgggtgaaatttaaggctcagact

SEQ ID NO: 757612 - DNA, 89 bp, Homo sapiens
gccccagagctcaatgggggaccacagcatgcacttccttccagcagctacacaggtcatcatggtcacaggagaccatccaatcacag

SEQ ID NO: 757613 - DNA, 100 bp, Homo sapiens
agacatccctgctgagagagccaagggtgctgctggtcctcctgggccacctggtgctgctggtactcctggtctgcaaggaatgcctggagaaagagga

SEQ ID NO: 757614 - DNA, 80 bp, Homo sapiens
cccctatcctatccgcaaacaatttctggcatcagaaaaacaccgactacaacaacagccctttccacatctcccagtgc

SEQ ID NO: 757615 - DNA, 90 bp, Homo sapiens
ctacgatgaatgcctagagagggtattgacatggcaacctgatgccagcacatctgtccacagctgggggcgccatatccaacatgtaca

SEQ ID NO: 757616 - DNA, 98 bp, Homo sapiens
cccgcgagtcgcatctgctcaacgacgaggacctgacgcagtgttcctttctgccgaaattctccattcatatagaaaccaagtatgaggacaacaaa

SEQ ID NO: 757617 - DNA, 78 bp, Homo sapiens
gctgccacctgcctttgacctttttgaagcctttgcaaaagtttattgggcacttcctagcaccaggcactgcaataa

SEQ ID NO: 757618 - DNA, 50 bp, Homo sapiens
gaatcaggtcccgaaagtgctaaaaaggataactgggatgacgatgatga

SEQ ID NO: 757619 - DNA, 75 bp, Homo sapiens
gggggccaactctgaggagtccactgcagcaggtatggcctcacaagtcttggtctacccaccatatgtttatca

SEQ ID NO: 757620 - DNA, 100 bp, Homo sapiens
tcaagttctacccaaccgaccatttggcctttttactcattacgtactctccctgtccagccgcctgcagctgaccctgtaccagtacaagacgtgtccc

SEQ ID NO: 757621 - DNA, 51 bp, Homo sapiens
cctctgtgtacgctgaggggggagagctgaaatatgctaataccgtgatgc

SEQ ID NO: 757622 - DNA, 76 bp, Homo sapiens
tggaccaccgctgccgtatcttccagaacctggatggagccttggttatcccagatcactgaagctgagatggctg

SEQ ID NO: 757623 - DNA, 100 bp, Homo sapiens
gacatgccagaggtggtacaattaaggatgactgaaaacatcctggaatcaaatagtgttacggcaacaagtttcagaagaggagccccgccgaggcatg

SEQ ID NO: 757624 - DNA, 100 bp, Homo sapiens
cagtggaatctcagtcctgacaagaggtgatagttctggaagcagcaaaagcataggcaggctttcaaaaacagacacgctctttactcagggaatatag

SEQ ID NO: 757625 - DNA, 90 bp, Homo sapiens
caagaaacgacccagcgccaccaagatgctcagtgtactggtgtggcatactcggacagagaagcccaagatgaagcaggaggagcagct

SEQ ID NO: 757626 - DNA, 100 bp, Homo sapiens
tgaagtggaaggcgcttttcaccgcggccatcctgcaggcacagttgccgattacaggtgctggagaatctggtaaaagcaccattgtgaagcagatgag

SEQ ID NO: 757627 - DNA, 74 bp, Homo sapiens
tgtacgccctcttcctcctggccagcctcctgggcgcggctccttcccgaactcacaaatcctgacgagctcct

SEQ ID NO: 757628 - DNA, 98 bp, Homo sapiens
agaagaccttgaaatgcatccgctggtcgctgccggaaatggccagaggctgggaggcggcagaatgcagccagaggagggcacaggctggctgctgg

SEQ ID NO: 757629 - DNA, 75 bp, Homo sapiens
cgcgtctcggaaaccggtagcgcttgcagcatgacggcaaatggatacatcttgttttttcatattacatctaca

SEQ ID NO: 757630 - DNA, 82 bp, Homo sapiens
cggcgcggcagagtccccgtacgcctacagtaacgaggttgacggatatattcagacgttacgacacggatcaggacggctg

SEQ ID NO: 757631 - DNA, 96 bp, Homo sapiens
cgccaggctggagttgcagtggtgcgatctcggctcactggaaccttcgactacctggttcagtgcatttgcccagtataacatggatcagttcac

SEQ ID NO: 757632 - DNA, 51 bp, Homo sapiens
cacctttgctgcaaaaaattacggcgaatgctgatgtcttaaaggcgatgg

SEQ ID NO: 757633 - DNA, 100 bp, Homo sapiens
caagctatccgaccagactggctacgtggagtactacagcagccagactgccttccgggtcactgccatggaggagccgcagtcagatcctagcgtcgag

SEQ ID NO: 757634 - DNA, 100 bp, Homo sapiens
ccaaataagctatatactttggttacctatgtacctgttaccactttcaaaaatgaaaaagagaggtttgaccctactcagtttcaagactgtattattc

SEQ ID NO: 757635 - DNA, 88 bp, Homo sapiens
cgctgccacttgtacccgcagacattatgaaagatcttcaacttgctgctgagcttgggaagacattactggatcggaacacagagtt

SEQ ID NO: 757636 - DNA, 97 bp, Homo sapiens
acagccaagctagaagcctgaggagccggagagggtgctggctgccgcgcggccgagtacttccagcggcaatgtaagcaacagaaaggatgagaca

SEQ ID NO: 757637 - DNA, 83 bp, Homo sapiens
cagcacagaccctcgggcctcatcatggccaggaaggagaactacgatgacccgcacaaaacccctgcctccccagttgtcca

SEQ ID NO: 757638 - DNA, 50 bp, Homo sapiens
aatccatagatggaaaagatgctgttatttcaagaaaccaagaagggcca

SEQ ID NO: 757639 - DNA, 101 bp, Homo sapiens
gcaccctgatccaatgtttgggcagcgtcggccgccaggccggccaccgcctcggacatcatggtgatgttggggctcccatagctgatgttattctccca

SEQ ID NO: 757640 - DNA, 82 bp, Homo sapiens
gcacagccaggacatcctggaacctgggaaaggatggactctcgtcctgtcacccaggctggagtgcagcggcgcaatctcg

SEQ ID NO: 757641 - DNA, 50 bp, Homo sapiens
tctgcccagatagtgtctgcagctgacttgaaagaggagattgatattcg

SEQ ID NO: 757642 - DNA, 98 bp, Homo sapiens
atgatgctacaagccagcttgcaagaaattggggatcgtcacatcgatcagacaacaacatggcaggaccccaggaaggccatgctgtcccagatgaa

SEQ ID NO: 757643 - DNA, 98 bp, Homo sapiens
gaacgtgacgctcaaacgccggagcccgattgtgacgatccaccaggagcccttcgtgtacgtcaagcccacgctgagtgatgggacatgcaaggagg

SEQ ID NO: 757644 - DNA, 101 bp, Homo sapiens
ctcttataattaatgcaataaaacgcttccatctttatccagagggaatgaattttatagcaggatatctgattcttataacaaataatgaagaagaatct

SEQ ID NO: 757645 - DNA, 73 bp, Homo sapiens
aggccgtgaagaccttcaatagcgaggtcacggtctagatcacattctcgatccagaggaaggcgatactctc

SEQ ID NO: 757646 - DNA, 100 bp, Homo sapiens
ctcagcatggtcatcctgctgccggatgacattgaggacgagtccacgggcctgaagaaggatgtgtttcacatggtagttgaagtaccacgctggtcta

SEQ ID NO: 757647 - DNA, 100 bp, Homo sapiens
ctcgactttaagaagcgatgagagagtgtggacgaatgtggaacctcgctctgtggctgtgttcccttggcactccttagtccccttcctggcacccagc

SEQ ID NO: 757648 - DNA, 82 bp, Homo sapiens
caccagcgccttgatcgagtacttgagttccagggtctccctccactgctgtagtaacccgggtccggggcctcggtggtgc

SEQ ID NO: 757649 - DNA, 87 bp, Homo sapiens
tcaggaggacgatttcctggggggcatggagtgcaccctggggcaggccctgtctctgcccctggtggtcatcgtccatggcaacca

SEQ ID NO: 757650 - DNA, 91 bp, Homo sapiens
cttacgacgggttggggatggcgtgcagcgcaaccacgagacggccttccaagggacccgagctgatccagaaagccaacggtctccacgg

SEQ ID NO: 757651 - DNA, 90 bp, Homo sapiens
gtcatatgctagtgatctctataatggttccagtatagtctctagcagccagacccggtccgtttggaatgcctgggatggtgccgccgc

SEQ ID NO: 757652 - DNA, 75 bp, Homo sapiens
atgtcagccttcccagtagctgggaccacagaaatggaagcaactgtcgagattgcagcggaatatgattctctt

SEQ ID NO: 757653 - DNA, 98 bp, Homo sapiens
atgctagaattacctggaacttcatcatcatctacttcacaggaattgccatttacatgcaagaaagcacttcagccaagcagaagggagccagctgg

SEQ ID NO: 757654 - DNA, 100 bp, Homo sapiens
ggaccaccgtgctggctgctgtggccttcctggatgccttccagaaagtggctgacatggctaccaacacccgagaatgtggtggtaaaatgcacttgag

SEQ ID NO: 757655 - DNA, 75 bp, Homo sapiens
gacagccccagctcggtgttcctcagattaataaagaactcttcagaattcctggtgtttcatcatatatacgac

SEQ ID NO: 757656 - DNA, 49 bp, Homo sapiens
gcaaggctgagggacgagaacgagggacatattaaattggctaaatttg

SEQ ID NO: 757657 - DNA, 100 bp, Homo sapiens
acttaagtagccagacaaatcagtcgaggtcctcatgggcggagtaatggagcttcgtcacacaagcctggcagcagcccatcatccccgcgggaaaagg

SEQ ID NO: 757658 - DNA, 83 bp, Homo sapiens
atttttcattatccttttctgggtgctatgggtgatcattccaagaagtttgagcggtgctgaactgtcagcaccatctgtcc

SEQ ID NO: 757659 - DNA, 90 bp, Homo sapiens
ctcagcactcaagcagcaggagcagcccgcggcgaccaagatcaggaacctgccctgtgctactatatcggggccacagatgatgcagcc

SEQ ID NO: 757660 - DNA, 100 bp, Homo sapiens
cggccacggaggcaccatgaagaagtcttactcaggtggctttttctcaagtatattttccagtctgtttggaactcgggaaatgagaattttaattttg

SEQ ID NO: 757661 - DNA, 75 bp, Homo sapiens
tatgagcccaaccagcagtttctggagcgagaaacctctgtagaggagcaggatgcaaccgacaggctgtggccg

SEQ ID NO: 757662 - DNA, 90 bp, Homo sapiens
cggaaagcttgtcctggtataaagatgatgagcaagtgaactgcacaaactcttgcagccatttctgctgaggcgagtgaaagctgaggt

SEQ ID NO: 757663 - DNA, 75 bp, Homo sapiens
ccgcatctacatccaggcccacatcgacagggacgtcctcattgtcctcggcaaactaggcgtggcaactgctgg

SEQ ID NO: 757664 - DNA, 74 bp, Homo sapiens
ctcggccgatgaagtgcagaggtttttttctggatccagtggggatattgtgatgactcagtctccactctccc

SEQ ID NO: 757665 - DNA, 98 bp, Homo sapiens
gtggagtgtccgctgtgcccgggcctgcaccatgagcgtcccggccttcatcgacatcagtgaagaagatcagtttaacttacatgtgtagagctgga

SEQ ID NO: 757666 - DNA, 123 bp, Homo sapiens
gctaaactcaatgctgctgtgtgggaagaagatttgtaaagaaaactcttagaacccagtgacttgattgtaaaaatttacagagcggaatcatatgctggtctccaagagtttaaagcagcc

SEQ ID NO: 757667 - DNA, 88 bp, Homo sapiens
tgaaatgctgactaaggaacaagatggactcaccctgtcacccaggttggactgcactggcctcaacctcctgagttcaagtgatcgt

SEQ ID NO: 757668 - DNA, 100 bp, Homo sapiens
agagatgttgctcaactcagacatcttctggaagccccaggaggctgtgcagggagacgcaggtgcccgcgctgctggaggccggcttccggagggagaa

SEQ ID NO: 757669 - DNA, 75 bp, Homo sapiens
cttcaacagcgaggtggacgagaaagtgctcaaactggaggattataaggatcgcctgaaaagtggagagcatct

SEQ ID NO: 757670 - DNA, 82 bp, Homo sapiens
tctggaaaaggaacaatattattctaaataatttagatttggaagacatcaattttttcagaagaagtgaagtcaagatgaa

SEQ ID NO: 757671 - DNA, 100 bp, Homo sapiens
tccttcagtgtggtcttccaggaggccgaggacacaccgctggatcagtgtaagtgcgagcagtcccacctcatgagagagcatgaggatgtccaggagc

SEQ ID NO: 757672 - DNA, 100 bp, Homo sapiens
cttcggagtgcttatgccaagaggaacagcagtgtaaatgactcagagatcctacagtaaggaattgtttgaagaagttatttcaaagatgcggaaggca

SEQ ID NO: 757673 - DNA, 106 bp, Homo sapiens
tatgaggagacatgaaatggtagccaaacccccaggccaggagtggtggctcacacctgtaatcccagctctgggaggccaaggccagtggattgcttgagcccag

SEQ ID NO: 757674 - DNA, 87 bp, Homo sapiens
acagagaaacactctcaacattgacaaattgaaaatagaaactgctcagggcttcgtgggacacatatgcaacatgcctatgatttt

SEQ ID NO: 757675 - DNA, 100 bp, Homo sapiens
ggagagagtaactctgtccttattatcggaccccgaggatcaggaaaaactatgatggtcagtaggacagaaggtaacattgatgactcgctcattggtg

SEQ ID NO: 757676 - DNA, 75 bp, Homo sapiens
aggcacgcttaaacaacataaccattattggtccacttgatatgaaacaagtgcgaaattcatccacacttctct

SEQ ID NO: 757677 - DNA, 100 bp, Homo sapiens
aaatgtgagcctatggatcaaggagttgggcctcctgcagttacgtgaaggtgcttcaggaaggagcatgaggtctgcactgtgctgcttaaccatctta

SEQ ID NO: 757678 - DNA, 51 bp, Homo sapiens
ggattccaagtaactcttatttggcttctgaatgcttatgatgaacatcaa

SEQ ID NO: 757679 - DNA, 83 bp, Homo sapiens
gcccccaatttcccagctgctaaaggaagaggaagtttccagagtgtggattctttggcatgtatgacaaaattcttctcttt

SEQ ID NO: 757680 - DNA, 50 bp, Homo sapiens
gagcattgaggaacccagtgctaaggcaaactaggcgtggcaactgctgg

SEQ ID NO: 757681 - DNA, 98 bp, Homo sapiens
ctgctgtttaccttggcgaggcctttcaccaagtccatgctagagatgatcgctatggaaaatcctgcagacttgaagaagcagttgtatgtggaatt

SEQ ID NO: 757682 - DNA, 75 bp, Homo sapiens
gacaagcttttgtccccaaaccagagaaaattttaagagcttgcattgaacaagtgaaaaagtattcagaattct

SEQ ID NO: 757683 - DNA, 84 bp, Homo sapiens
gcggattcgccgaggcaccgaggcactcagaggaggcattgaagttgatatcgatgtggagcacggagggaaaagaagccgcct

SEQ ID NO: 757684 - DNA, 83 bp, Homo sapiens
ggacaagacccatctttatgcaaagccagcgttacagtaatgttccagaattacggatccagatcaggagatttgaggagctg

SEQ ID NO: 757685 - DNA, 50 bp, Homo sapiens
caatgaggagggcccttcacagaaccgggatcttagcaaagcaatgtctc

SEQ ID NO: 757686 - DNA, 100 bp, Homo sapiens
cccaggtccggcgacagggtctacaagaacgagtgcgccttctcctacgactctcccgagaaggtcattccttcggtggtcatagagcctgcctccaacc

SEQ ID NO: 757687 - DNA, 98 bp, Homo sapiens
tgctgcacttccagcagcaacagatgtcatctgggtgattctcagtgtggaggtgggtggacttttaggagtaacgcagcagctgtcatcttttgaaa

SEQ ID NO: 757688 - DNA, 74 bp, Homo sapiens
aagaggtagcaagaaagaaaattagagtgaatgtagttgcaccagataatcagacagctaaatggagtctgagc

SEQ ID NO: 757689 - DNA, 87 bp, Homo sapiens
tatctgtcttcggtggactccttcggcagtccacccaccgccgccgcctcccagcttcctgcctgacacagctcacttcaagaagtg

SEQ ID NO: 757690 - DNA, 82 bp, Homo sapiens
cgagagctcgccccgaacgggggtcttcctcctccgccgttgacagatcccagatgcagtgactggttactacctgaaccgt

SEQ ID NO: 757691 - DNA, 75 bp, Homo sapiens
agtcagtcttcccgagtgagggatttcgccgcccgctttcaggcccgttgggtgggaggacgctactcgctgtgg

SEQ ID NO: 757692 - DNA, 49 bp, Homo sapiens
cggaaggagtacctggagtacgaggtctcaccaacggctttgggggtgc

SEQ ID NO: 757693 - DNA, 50 bp, Homo sapiens
ccagctcagtacgctgcccgaaggagccaaggcaaagagggaccactgtg

SEQ ID NO: 757694 - DNA, 50 bp, Homo sapiens
agggccatcgccttggaccccgctcacggcacacggaccctgactactcg

SEQ ID NO: 757695 - DNA, 99 bp, Homo sapiens
ctggcttttgtctctggcatcttcttcatactatcgggggaaccccctcggaaggggaagggttgggtgctgacgggcaggagcacaaagaagacacat

SEQ ID NO: 757696 - DNA, 100 bp, Homo sapiens
gtgcaatatgccttgaagaattgcagcagggagatactatagcacgactgccttgtctatgcatatatcataaaggcatcaagcttctagctgtgcaaga

SEQ ID NO: 757697 - DNA, 119 bp, Homo sapiens
gatttttgagctggtggaagtggttggaaatggcacctatggacaagtctataagtactatactggcaattgctggagaagattttgcaattgttgcttctgatactcgattgagtgaa

SEQ ID NO: 757698 - DNA, 75 bp, Homo sapiens
cccttgtggcgaatggggctcacgtcgagttgaagaagcctcagcggaggcgatacggcctcctcgccaacactg

SEQ ID NO: 757699 - DNA, 51 bp, Homo sapiens
ctgcctcgaagacctgaggagcaagggcctttgaggattggaataagacag

SEQ ID NO: 757700 - DNA, 74 bp, Homo sapiens
aaggtggcctaccaggaggccaggggtgtcgccatggatatgtttgccttcatgggcagcctggataccaaggg

SEQ ID NO: 757701 - DNA, 100 bp, Homo sapiens
gtgatgccagaggtcaacaaggttctggacaagatgaagtctttctgccaggcctccaagactgcagagaatgccaccagtggggaaacattagaagaaa

SEQ ID NO: 757702 - DNA, 100 bp, Homo sapiens
gccgaggctacagagccggcggcaggggatggcaagatagcggcgcgggagcgtaccatcatgacaagatgtttaagatgagtgaaaagatattactcct

SEQ ID NO: 757703 - DNA, 102 bp, Homo sapiens
ctgaacttgaagcctggaggagttctctgctcagcacagccaaggaacagaattagaagaaaaggaaccctggcctgagcatttaaatcaaacggtattgag

SEQ ID NO: 757704 - DNA, 100 bp, Homo sapiens
caaggagactgcaggctacctcaggggccgtccccaggacactgtccggatcttccctccctggaaacagattattacttccaacaccaacagtaaagca

SEQ ID NO: 757705 - DNA, 100 bp, Homo sapiens
cggaggtcgaggatccgctcgtccgtgggaagaattttaaatcgtttctccaaagacattggacacttggatgatttgctgccgctgacgtttttagatt

SEQ ID NO: 757706 - DNA, 100 bp, Homo sapiens
tgagagaaaagcccccaaaagcagctattcaggtcattcctgtcccaatcagctgctctactactgatgacattaaagatgccttcattacccaggcaca

SEQ ID NO: 757707 - DNA, 100 bp, Homo sapiens
caggggttttggtttcatcaccttcaccaacccagagcatgcttcagttgccatgagagccatgaacggagaggccagcagaaacagggatagagccgag

SEQ ID NO: 757708 - DNA, 75 bp, Homo sapiens
acgaaagagaaacccggagggcgccgggatcaggatcctcatgaccagccaaagagaagaagaattaggaagcat

SEQ ID NO: 757709 - DNA, 82 bp, Homo sapiens
gcagaagctacaattttctttactagaccatgctcgacagctgaccaaggccatgatgcgaaaggccacggccagccgcctg

SEQ ID NO: 757710 - DNA, 100 bp, Homo sapiens
gacctcttcgatgtgcgagactttggaaagccgagccattttgcaggaggtgctggacgcagacctgagcaacgaggccttcccgttctccacccacaag

SEQ ID NO: 757711 - DNA, 83 bp, Homo sapiens
agatgatgatatccttctcaaccttgtgggatgtgaaaactctgttactgaaggaatggaggatctttggttccataccaatg

SEQ ID NO: 757712 - DNA, 75 bp, Homo sapiens
caccaggcaaaccaccatcacatctcattttgcaaaggggttggccgttgtccaatgtgttgctgttatctggaa

SEQ ID NO: 757713 - DNA, 75 bp, Homo sapiens
ggtcgtgcgtctgaagcctacaagaaagactcccccccagatccagcccttcagccaggatgacttcctgcgtag

SEQ ID NO: 757714 - DNA, 100 bp, Homo sapiens
ccaaaggccaagcaggaaaacaggccccaaatgctggagaccaaagttttcccaagacctgtcttgccgtctctcacagctggagtgcaatggcgcgatc

SEQ ID NO: 757715 - DNA, 98 bp, Homo sapiens
ttcgcgctcttcttcttcttccagggactcagcacctggcagtccaatggatgggaccccaatgaaatgttcaagttcaatgaggagaactacggtgt

SEQ ID NO: 757716 - DNA, 75 bp, Homo sapiens
cagtggtgtttttctcaggtgaaaggagcagtagatgatgatgtagcagaaggtcttagaaaaataccccaatac

SEQ ID NO: 757717 - DNA, 74 bp, Homo sapiens
ccacaatcaagttccaaatgaagaaggtgtttgtaaaatgtatgaagaacatctgaaaagaatgaatcccaaca

SEQ ID NO: 757718 - DNA, 74 bp, Homo sapiens
tttgggacctgaaatcttttttcatccagaggatattggtgctggaaaaggcaaatactatgctgtcaattttc

SEQ ID NO: 757719 - DNA, 90 bp, Homo sapiens
ctattcactaaaaccatgtgtctgaactgaagaagcttgggctcacttccacaaatatccctaaagaagtggctgacatctttaacgccc

SEQ ID NO: 757720 - DNA, 100 bp, Homo sapiens
tagcagatttgatgcctactgctttaaacgcaaaggcagctcgagcatctcatctgacgtgagttcaagtacagatcacacgcccactaaagcccagaag

SEQ ID NO: 757721 - DNA, 75 bp, Homo sapiens
tgcgcggtggaggtgttcgggctcctggaggacgagaactggttagatcctgctaaagaaataaagagacaactg

SEQ ID NO: 757722 - DNA, 101 bp, Homo sapiens
aaaatgccaacgccgtgtctgaagtcttctggaagtactactatgggcattacttggacgactatcacacaaaaaggacttcatcccttgtcagcctgtca

SEQ ID NO: 757723 - DNA, 100 bp, Homo sapiens
cggaaacaaagttattttgctcggccaagctataacatcagaaatggtgaatgaatacaagaaaattcttttgctgaaaggatttgagctcatggatgat

SEQ ID NO: 757724 - DNA, 75 bp, Homo sapiens
gcctgcgaaggtggcggcgctgctgctcgggctgctcttggagttacagaatgtctgaaggggacagtgtgggag

SEQ ID NO: 757725 - DNA, 82 bp, Homo sapiens
tgcgaaccccgggcagcccgggaaatctccaagtcagaaaggaggagataagcaaggacctcagagccacactgaacgcctt

SEQ ID NO: 757726 - DNA, 82 bp, Homo sapiens
gaggagctggcgtgggagaccgacggccgactgcctccaagtggaagttggcaggatttaaaggatcacatgcgtgaagcag

SEQ ID NO: 757727 - DNA, 101 bp, Homo sapiens
ttcttgtacaaagtggaatttcctactgtatcatgatcatcataggagtggagaacatgcacaagcaagctaatgaagaatatcaaatactggcgaactcc

SEQ ID NO: 757728 - DNA, 90 bp, Homo sapiens
cgctgaggtggacgtgtacaacccgacgaggaacgaatgggacaagatcccgtccatgaatcagggatatctgcattacctccacctcct

SEQ ID NO: 757729 - DNA, 123 bp, Homo sapiens
cgagcggtgacctggaccacggcgcagacgcgggcgagctgcggctcggacgccagcggacacgcgggcgaggtgctggagaatctggtaaaagcaccattgtgaagcagatgaggatcctgc

SEQ ID NO: 757730 - DNA, 75 bp, Homo sapiens
aaaagctgccctgagacggtgtcccgccgaaaggaatcttctgcggcttgtccatagtgtgaataaaaactaaat

SEQ ID NO: 757731 - DNA, 82 bp, Homo sapiens
cccgggaggaaggaacgaggcaaggagctaaagcagcgtgcgttcagccctgggcgagaaccctctgcccacagtggagatt

SEQ ID NO: 757732 - DNA, 100 bp, Homo sapiens
gtccggaccggagactttggggcctaactaggaacagatggagtcggataactgttcaggaggagatgatgactggacccatctgtcttcaaaagaagtg

SEQ ID NO: 757733 - DNA, 109 bp, Homo sapiens
ctggatgactttggctctgagaatgagggggagctgcgtgctcgtaaactgaaatcaccccctgcccagcagttgcagcggaagcggcacatcgggaacgacatcgtgg

SEQ ID NO: 757734 - DNA, 74 bp, Homo sapiens
ccgtgacatccgaggtgcctttctccaaaaggaatgtaggagccttttattctcatgtaatgcccccaccctgg

SEQ ID NO: 757735 - DNA, 101 bp, Homo sapiens
cggcagcggcggtggcggtggctgagcagaggacccggcgggcggcctcgcgggtcagatcaggatcctcatgaccagccaaagagaagaagaattaggaa

SEQ ID NO: 757736 - DNA, 74 bp, Homo sapiens
aaaatggctccgagcagggaccgcctgctgcactttgggttcaaggcgacagtccagctgggagctccccgacc

SEQ ID NO: 757737 - DNA, 74 bp, Homo sapiens
ttccctctgagggaattgggaggtcggcggccccaaaaggcgtctctggccgagcctctttttgtggaaaacga

SEQ ID NO: 757738 - DNA, 95 bp, Homo sapiens
ttcttgaaaatctggataaatcccgaaaaggagaacttcttaagaagagtgcagccaactcttcctgccaaataaatagagtcatcagtcatcct

SEQ ID NO: 757739 - DNA, 75 bp, Homo sapiens
tcttctaccgggcgccccacgggccgaagccggttctccgtggaggagccagccaacgtcctttgaccccaaacc

SEQ ID NO: 757740 - DNA, 82 bp, Homo sapiens
tgcttcattacagccaggaggactcttcggacggggacagagagctgatgaagttcacagtacagagccagttgtccaggag

SEQ ID NO: 757741 - DNA, 98 bp, Homo sapiens
aatgctttcttgtctcatgtcgtcagccagcaccaagccttgttgggcactatcagtccaatggatgggaccccaatgaaatgttcaagttcaatgag

SEQ ID NO: 757742 - DNA, 90 bp, Homo sapiens
tactacggaggagagagtgcatctataacaccattggaagatgttctgggaagttctggattgtttaataaccatggactccaagtacag

SEQ ID NO: 757743 - DNA, 100 bp, Homo sapiens
ctgggagggcaacgagcacaacaggagctacgaggagttggaaagaccacagcaagattctttcattcgtctcctcctagcctgggggaccaggctcgaa

SEQ ID NO: 757744 - DNA, 98 bp, Homo sapiens
tctcttccagggtcttctaagtcagagacatcaaaacctggaccttctggattacaggccaaattagcaagaagagaggatggtgatgcaccggttac

SEQ ID NO: 757745 - DNA, 100 bp, Homo sapiens
ggagtgaccagagctgctaggatagaccccccacttctggagggaaggcagaaagaattcagagcctgaagcagagcatagacttcatggctgacttgca

SEQ ID NO: 757746 - DNA, 99 bp, Homo sapiens
ccgatcccggcctgagcaagcggccgcgcactgaggaggcggcggccgacggtggcggcgggatgcagccccgagccatgatgaagactttgtccagcg

SEQ ID NO: 757747 - DNA, 97 bp, Homo sapiens
ctgaggtcctcaagtccctgctggagcactctctgccttggccagagaagagaacagagactgatggagaggcagaaacggaaggcggacatcgaga

SEQ ID NO: 757748 - DNA, 75 bp, Homo sapiens
tgaaaaagttggatgtcagttaaggccctgtgtgtccaaatgctgggagaacatcaccccttggatgaattgcca

SEQ ID NO: 757749 - DNA, 75 bp, Homo sapiens
ccgtagacaccagctccgaaatcaccaccaaggtcagaagagatcaattctacagaaatttccagtggttctgtt

SEQ ID NO: 757750 - DNA, 100 bp, Homo sapiens
aggttagacttgtttcttatatgtgatgccattccagcactggactcatggaggctgagcatttattcagatgatgaacaacatgggtggtgatgaggat

SEQ ID NO: 757751 - DNA, 76 bp, Homo sapiens
ctgctcagcggcatcggccggatttccctgcaggcatatactagtgtctcaaaggcttcacttggccttgcagatc

SEQ ID NO: 757752 - DNA, 100 bp, Homo sapiens
ctttccggccggaccagtcacattgctttgtcattctctatggaatggaatttcgcctgaaaacgctgagcctgcaagttgccgaggtactgtctgaatg

SEQ ID NO: 757753 - DNA, 118 bp, Homo sapiens
ctgagtggttgtgtggtcgcgtctcggaaaccggtagcgcttgcagcatggctcacagaacatttcctgcctgttgctcacactctgttgtccacagcatacccgcaccctagatggc

SEQ ID NO: 757754 - DNA, 90 bp, Homo sapiens
ggcttcccatttttagaatcagagaatgaaaaaaacgcaccttggagaaaaattttaacgtttgagatcacaaatgttcacagcagccgg

SEQ ID NO: 757755 - DNA, 100 bp, Homo sapiens
gtttgcgtcctgcactgaaaggaaatgacggattttggggatatgagactttctactcggaatatcctgagtgttgcgtggatgtaaaacccatttcaca

SEQ ID NO: 757756 - DNA, 74 bp, Homo sapiens
ccaaaatgtttcctaaagttcgtgaatctcaacttagagttggaaactcaactattggaacaatgtactgttga

SEQ ID NO: 757757 - DNA, 75 bp, Homo sapiens
cgtggctgtcataggcatcgacgaggggcagtttgccccatctccttggctaacccctgatccagcctctgttca

SEQ ID NO: 757758 - DNA, 100 bp, Homo sapiens
agcccttccgtgtgctcgtgtgccccatctacacctgcctcagggagaacactcgtgaaactgctcaggccatcaagggtatgcatatacgaaaagccac

SEQ ID NO: 757759 - DNA, 75 bp, Homo sapiens
ccgagagctggaggccactcgacgccagaggatggattacccagtgtataatgggtctctcccaaatggcgatag

SEQ ID NO: 757760 - DNA, 74 bp, Homo sapiens
gcatgcgtcgtcggcctctgggcagcaggtggacttaaatgaagaagaaactatattgatcatcaggcgtctac

SEQ ID NO: 757761 - DNA, 101 bp, Homo sapiens
agcatgtcaccaacccggccttcaccaaactccctccaatgttttcagttgcaccaagcttagccaccaatgcatcagcagccgcctttaatccctatctg

SEQ ID NO: 757762 - DNA, 82 bp, Homo sapiens
cctggagcctcagttggaagcagccgatccagcctgcggagcctgtggggcagatggccgccaagaacgagtcatgtttgac

SEQ ID NO: 757763 - DNA, 82 bp, Homo sapiens
tggattacacacagcaagttcctgcttctgggacagctctactgacggatgaggaagtacagacaattggtcagatagaact

SEQ ID NO: 757764 - DNA, 102 bp, Homo sapiens
caacatctcttcctccatccccagagatttcctggagcccgattcagggaatatcctccgaatcctaaatctagagctccaaggatgctggtcattaagaaa

SEQ ID NO: 757765 - DNA, 83 bp, Homo sapiens
gaactccaagactgttttgatgttcatgatgcatcttggggatgtttgtattcatcaagacaagaagattcatctcacagtgg

SEQ ID NO: 757766 - DNA, 82 bp, Homo sapiens
caggactgcgcccccgggagcgggcgcccagagggactggtgattgcagctggaagtgcccatgaccgagctggcgtcctcc

SEQ ID NO: 757767 - DNA, 75 bp, Homo sapiens
ctggggctgggattggaactgtgtttgggagcctcatcattggttatgccagtgaatgggtctcctgcgaccatc

SEQ ID NO: 757768 - DNA, 82 bp, Homo sapiens
tgcagccgcgaggaggcgcgggaggtgttcgagaacgaccccgagacggtcgagtcccagacaccagaagtctgaatttgga

SEQ ID NO: 757769 - DNA, 100 bp, Homo sapiens
cgggagttcaaggaggtgctgaagagcgaggagcgggacccttctgagacagtgtctgtgaatgatgttttggcccgagctgcagccaagggtctgctgg

SEQ ID NO: 757770 - DNA, 127 bp, Homo sapiens
gtggaccctcgtgagcgacccggacaccgacgcgctcatctgctggagcccggatgccgaggaatgtgacagggctgggagtgtggccacctgccaggccgtcatgcgtgccgtgattgggattggg

SEQ ID NO: 757771 - DNA, 100 bp, Homo sapiens
taagtccccagattggaggaggctggctctggtcttcgatgcacaggagtggccgttatggaacgcagtgccctctggtggtcagaagatgctgtgctgt

SEQ ID NO: 757772 - DNA, 75 bp, Homo sapiens
agaagaccatcgcagagggaaggcgaatccccataagtaaggtctatgttaacaatgaatgggcaaccagtgttg

SEQ ID NO: 757773 - DNA, 100 bp, Homo sapiens
tgaacttatgacgtctggaacacttaaaacgttcgtgctggccgtgggcagcgccgtctttgatgccatgttcaacgggggaatggccacaacatccacg

SEQ ID NO: 757774 - DNA, 100 bp, Homo sapiens
cctatcactgactttgaatattcccagccaaaaagacctggagaatctgaaagccgaggtggcgcggcggcaccagctccaggaggccagcagaaacagg

SEQ ID NO: 757775 - DNA, 87 bp, Homo sapiens
aagagtcacttctttacttggtgcaggaaggcagtctttgctacgtacagcaaaagtctgcaggagctgcctggtgaagtacctgga

SEQ ID NO: 757776 - DNA, 83 bp, Homo sapiens
agaagaccttgaaatgcatccgctggtcgctgccggaaatggccagctacgagttccagggagctctgtcctggtgaccgtgc

SEQ ID NO: 757777 - DNA, 100 bp, Homo sapiens
cttggttctgccagatgttcctggggttactgtaaatgggaaggacaggcagagctaaacaagtctatgcagatggtagtatatgtctggacatacttca

SEQ ID NO: 757778 - DNA, 50 bp, Homo sapiens
agcacgagaaatacggcgtgggtacattttatattggaggaaaaggttca

SEQ ID NO: 757779 - DNA, 83 bp, Homo sapiens
cgcgtctcggaaaccggtagcgcttgcagcatgccccagtggacaggaaagctaaggcctcagcgatgccggactccccagcg

SEQ ID NO: 757780 - DNA, 74 bp, Homo sapiens
ccccgctgctgaccgcctgtcctactcaggccgccctggaagccgacaggcctgtggtcaaatcgggagacaag

SEQ ID NO: 757781 - DNA, 80 bp, Homo sapiens
gtggagcttggtttcgggatctcggtgctgcagacggcgagacctcctgcacaggactcctcctattttgaggacttctc

SEQ ID NO: 757782 - DNA, 75 bp, Homo sapiens
gcggaatgcagagcggaccgccaccgccgggaggctgctgtacgacatgattcctgagctgaaatgcagatgacc

SEQ ID NO: 757783 - DNA, 100 bp, Homo sapiens
ctgcctcgacctcttctgcctcttcatggagatagaatctcactatgttgaccaggctggtcttgaactcttggcacccaagcgatccttttgcctggaa

SEQ ID NO: 757784 - DNA, 100 bp, Homo sapiens
tcgagggtgacgctcgctccgctcgtcccgctcgtcatggcctacccgggatacggaggaggggagcccctatgatgtagcctgttgtgtcaagatgatt

SEQ ID NO: 757785 - DNA, 100 bp, Homo sapiens
gataccttcatcgctgacctggttgtggggctgtgcactgggcagtgaatcatcctctacaatttcatctaaccagagtcaggagtctggttatcagagc

SEQ ID NO: 757786 - DNA, 75 bp, Homo sapiens
agaggaatgacaaacaaccagctcttcagagtgctccaagctcccgaagccgaagtctcactttgctcccacatg

SEQ ID NO: 757787 - DNA, 76 bp, Homo sapiens
aacctattgaactcagactggatgacagaagagagctggttattaagctcccatggctattgaagaacaagtggct

SEQ ID NO: 757788 - DNA, 74 bp, Homo sapiens
gacggaaaaagtcgatctggagcttttcccctccccgggaacaagatcactcaaggtgaaggataatctactaa

SEQ ID NO: 757789 - DNA, 90 bp, Homo sapiens
catcgtgctattcctggtctacatcctgcgggtgcctttgaaaatcaacgacaacttgagcacaggtcataacacaaacagagtctcacc

SEQ ID NO: 757790 - DNA, 98 bp, Homo sapiens
tcttggtctcactgacttcaagaatgaagccacggaccctcgcggaagcagaatctggtaatataagtcaaaagtctgatgaagaagattttgtaaaa

SEQ ID NO: 757791 - DNA, 100 bp, Homo sapiens
gcagaagcgtagtcggccagagaactcccccactggaaaggattctgaaagaaatgaagtcagccctcagaaatgaagttgactgcctgctggctttctg

SEQ ID NO: 757792 - DNA, 51 bp, Homo sapiens
gggggcaccgctgccgttccgagattttggaggcaacatcaacgtggagac

SEQ ID NO: 757793 - DNA, 75 bp, Homo sapiens
tcttccaagaaaccaacattcccaacagccaccaccaccaccagatgggaacagtgttgataaagactgctgaag

SEQ ID NO: 757794 - DNA, 94 bp, Homo sapiens
agaagaggtcccaatcccccactctttccgccctaatggaggtctccagtttcgataacgaaggaggcccaacttcattcaataaggagcctga

SEQ ID NO: 757795 - DNA, 80 bp, Homo sapiens
ggtcctggtgcggaccctccggccgcagccatgtgggacccgcgggcagctagcacggggtcactctggtgcccattgag

SEQ ID NO: 757796 - DNA, 73 bp, Homo sapiens
actcgttcacacgcagaagctgggtgtcataggatgcaaagccggaataagagcaatgaccaccatgcctgac

SEQ ID NO: 757797 - DNA, 51 bp, Homo sapiens
cgcgagtgaggaaaggaggtactgtagctagagttgggaagacatcactga

SEQ ID NO: 757798 - DNA, 83 bp, Homo sapiens
ggggatgagattggcctggatgcagctgcccttcctggacaggcctccggtgtggctgtctctgatggtgtcatcaaggtgtt

SEQ ID NO: 757799 - DNA, 82 bp, Homo sapiens
atccttaagttcgtcgtcttcatcgtcgcggttctgctgccggcatttattaatacagcaaaagaaatttatgaaaaaattc

SEQ ID NO: 757800 - DNA, 75 bp, Homo sapiens
tggctctttttccgttacttggctattggcttttggaccccaatgaccagaagtctctagaggggatgcagaaga

SEQ ID NO: 757801 - DNA, 90 bp, Homo sapiens
cagaagggtgaatgccatgtcaactttgttcggaaggagatctattgggaaactgattataaccactcgggcaccatcgatgcccacgag

SEQ ID NO: 757802 - DNA, 74 bp, Homo sapiens
acctgcggcctcactgggacccccaggaggtgaccctgcaggttgatgctatgaaactgggagtaaaggaaatg

SEQ ID NO: 757803 - DNA, 124 bp, Homo sapiens
ggcggacgaggcggaagaccgcgcgcagggcctgcagcgggagctggacggcgagcgcgagcggcgcgagaaacttcggaaccaaaaagaagcttcccagagccggggccaggagccccaagcg

SEQ ID NO: 757804 - DNA, 90 bp, Homo sapiens
cctgatcctgccatccgacgtccaggaaagaccacagcaagattctttcattcgtctcctcctagcctgggggaccaggctcgaactgac

SEQ ID NO: 757805 - DNA, 101 bp, Homo sapiens
aagctcctacttccagaaaaagtgctcctgggactccaggataccagtgtgaacgagctctatgtcgatgacccagacaaggacagcggtggcaagatcga

SEQ ID NO: 757806 - DNA, 100 bp, Homo sapiens
cagagaggaaaaaacggctatctataataggctgctttgctggctctgcaagaaaatggactagacgcaactacagtgaaacaagagcactttctaaaat

SEQ ID NO: 757807 - DNA, 88 bp, Homo sapiens
cccacagtcgcgccgcgctcgaccgcctggagaagctgctgcgctgctcgcgttgcattgcactttgactatggaaacagaggctatt

SEQ ID NO: 757808 - DNA, 98 bp, Homo sapiens
ggccatcaacggcaaggtgttcgatgtgaccaaaggccgcaaattctacgggcccggtcttcccaatgttgggaagagcagcctgatcaatagcctga

SEQ ID NO: 757809 - DNA, 75 bp, Homo sapiens
tatagaagtacgtccaggaatagaagtgacctgctttttcgcaaagaggtgccagtaacttgacctggcgatcag

SEQ ID NO: 757810 - DNA, 96 bp, Homo sapiens
tctaggcagccgcgcagcttccgtgtttgctgcgcccgcactgcggtgtggtatctgtgcgctttgaagaagatgaagacaggaacttgtgtctaa

SEQ ID NO: 757811 - DNA, 71 bp, Homo sapiens
gttgcaccagcgtgcccgggagtacatctacatgcattttggggaggcggaggagtgcgggatcctggacg

SEQ ID NO: 757812 - DNA, 97 bp, Homo sapiens
aaatcttaaccttcaaccatctggggaaaaggcaaaaatcccatctaccgcaactctcagttcgagagtaaagatcttagcaaagcaatgtctcaag

SEQ ID NO: 757813 - DNA, 82 bp, Homo sapiens
atccattggtaaattgatcaggatttttggcctaccctccaaagaaaaggaagttggtgaaccatctaaagaagagaaggct

SEQ ID NO: 757814 - DNA, 100 bp, Homo sapiens
gcatggcaaagactggcaaaagcacaaggattctcgctgtgacagagacaacaccgagtatgagaaggcaactgtactcctgatgatattggtctgtgaa

SEQ ID NO: 757815 - DNA, 83 bp, Homo sapiens
ggctgaacatgaatccacagatcagcttctcttttaaaaggactaaaacatgctaacatagtgctacttcatgacatcatcca

SEQ ID NO: 757816 - DNA, 100 bp, Homo sapiens
agctacaagaaacacctgaagcatcactgtaacaattggttgaatctggcgatgtggaacccatggatatggagggctgactatatacaccatgtttttt

SEQ ID NO: 757817 - DNA, 100 bp, Homo sapiens
caggcttccacattagaaggacggagaattattgttgctattgatggttggcccagaaattccagatatccaaatgatgtgtttcacatggtagttgaag

SEQ ID NO: 757818 - DNA, 74 bp, Homo sapiens
tctttttgaaccaaattatgctgcaaatggagtgcatccgccccaacccttttccccctcgtctcctgtgagaa

SEQ ID NO: 757819 - DNA, 100 bp, Homo sapiens
ggaggactcttctaggagacgagagagcgaacgccagggaccctgtgcaggcctgctcctccgtttgcaaggagtggccagaaggctcctctccaggcct

SEQ ID NO: 757820 - DNA, 90 bp, Homo sapiens
gtttaaaatcattggaccatttagtaagaagaattccagtcttataaaaatatcctccgaatcctaaatctagagctccaaggatgctgg

SEQ ID NO: 757821 - DNA, 100 bp, Homo sapiens
ctgcccagcaccttccgctcagtcctcggcgcccgcctgccgcctccggagcgcctgtgtggcaaatgaagctcgtgaccgagaacctgaaggaggaacc

SEQ ID NO: 757822 - DNA, 75 bp, Homo sapiens
aagcttttggacattcctgggctgcagcatatcgtgagtgatgagatctgtgtgcaggtgactgacctttacctg

SEQ ID NO: 757823 - DNA, 82 bp, Homo sapiens
ctgctctgaaacccaagcggtcccaccgcaaggcagaccctgatgctgcccacagactgtggagcatggcttccccaatcag

SEQ ID NO: 757824 - DNA, 96 bp, Homo sapiens
atctcattgacagctgcattcaatcttttgaatcgagagctccagatcatgagaaagctagatcactgtaacatagtccgattgcgttatttcttc

SEQ ID NO: 757825 - DNA, 101 bp, Homo sapiens
aagatcatgtacgtcggggacgtccgcagcgtcacacagaagcatgttggatggcaagcatgtggtgtttggcaaagtgaaagaaggcatgaatattgtgg

SEQ ID NO: 757826 - DNA, 83 bp, Homo sapiens
aaagttggtgattctctgctagatgttgtggttgaaaataatctagatattgatggctttgatggagtctcgctctgtcgccc

SEQ ID NO: 757827 - DNA, 82 bp, Homo sapiens
tgtcttcccagaagaagagagttagggaattaaaaggagagcgttcttccatgcggtggtgcaggaggcaaaggtgtctggg

SEQ ID NO: 757828 - DNA, 99 bp, Homo sapiens
gagatatggtttgaatatgaaggcacaccactgaaatgatttgagagggaagatctgatctcctagaattagagttggtacagaaaccatttcagctcc

SEQ ID NO: 757829 - DNA, 100 bp, Homo sapiens
gtgaaagtggcggtgcggatacgacccatgaaccggcgaggtgagaaataaggctcagcaaacattttttgctgccttgggagcatataacttctgttgc

SEQ ID NO: 757830 - DNA, 115 bp, Homo sapiens
gtgggaggcgcgcgcggaggccgcgacggacgcaagatggcgacggcgaccatagctctcgtgctggagaatctggtaaaagcaccattgtgaagcagatgaggatcctgcatgt

SEQ ID NO: 757831 - DNA, 100 bp, Homo sapiens
gcctgatcctgcaacacgagcatggcatggccccgcaggtcttcacccaggccctggagtgcatgcgcagcatcctgatgaaaagagattggaaggcctc

SEQ ID NO: 757832 - DNA, 82 bp, Homo sapiens
gcggtggcgagaggtgcggcgaaggaggcagaggcacttatgcttgtcaggaggagagacttcagcatgcaaaccttcatct

SEQ ID NO: 757833 - DNA, 75 bp, Homo sapiens
ccgtccttctccactttcgccagcccgtgccgcgagcgcggcctgcaggaggtcacgaacgagatcacgccggtg

SEQ ID NO: 757834 - DNA, 83 bp, Homo sapiens
tacttccagaagattggtggagcttgatctgaaggattattacagtggtggctactatcctgcacaggacccggccctggtcc

SEQ ID NO: 757835 - DNA, 100 bp, Homo sapiens
aaatggcccgctggcccaaagagcagccttccacctggtatagtcagtacaagcgggggtccctggccggtcagtacggcgtggcccagactaggaggcg

SEQ ID NO: 757836 - DNA, 100 bp, Homo sapiens
ggagcatgggtgccaaggagtcacggatcggattcctcagctacgaggaggcgctgaggagaggtccagcaagactatgaatctctgttccaaatgcttt

SEQ ID NO: 757837 - DNA, 100 bp, Homo sapiens
agccctggactgtgaagagtgaggagaccatagctgcacagccagggctctcacctttgtgtatccttttggtgccacattgagtgtcatgaaaccagca

SEQ ID NO: 757838 - DNA, 75 bp, Homo sapiens
cgcgcccagccccccatctttaattggcaggttgaaatcacaaagattagacacctttttagataggtgttcttc

SEQ ID NO: 757839 - DNA, 100 bp, Homo sapiens
agtcacataaggatgaaatattccaggatgatgatgctgaagctatccttgctgcagacttcgaaattggtcactttttacgtgagcgtataatcccaag

SEQ ID NO: 757840 - DNA, 75 bp, Homo sapiens
gtggagatatggcgcaactgcggcgccaatggctgccatccggaagaaactggtgattgttggtgatggagcctg

SEQ ID NO: 757841 - DNA, 82 bp, Homo sapiens
ccaacgcctggctcggagcagcagcctctgagctgcggttggatttctcacgatgtccagtgttatctccatgtctgcccct

SEQ ID NO: 757842 - DNA, 83 bp, Homo sapiens
tctgaaaagaaggtggcagacccggtttgctgatcgccccagggatcaggagatgaagtggtgaagagagcctgcgattgaag

SEQ ID NO: 757843 - DNA, 76 bp, Homo sapiens
gtaatcagcaggccaaagactcagagagaatggatcttggagaatgtctgaaagtccatgacctggctttaagagc

SEQ ID NO: 757844 - DNA, 71 bp, Homo sapiens
cgacgccgcctggcaggccctgcgcaccagattgaaactgcttctgccttggctagaggccagaattcatg

SEQ ID NO: 757845 - DNA, 96 bp, Homo sapiens
cccacgcagctggatgtaccgcatgtgatcactctgggactcgtggggctgcagcaccgcaatacctgaacaccttctatggctgccccaaggaga

SEQ ID NO: 757846 - DNA, 75 bp, Homo sapiens
aagcctgcccagacggctcacctgtgcgggatggaacaaaaggcgtcgaccagaagattatgatattcataacag

SEQ ID NO: 757847 - DNA, 75 bp, Homo sapiens
cccagaagagtggctggacattctggtcatggggaagttcacctggactgcctgggcagcatacaggacaagatc

SEQ ID NO: 757848 - DNA, 100 bp, Homo sapiens
ctatgtttccacatcggtcagaaaaagatgttttgcacactagggaccaagaagccctcggggacactgctgagaaaagactgccgaagggaagaccagc

SEQ ID NO: 757849 - DNA, 83 bp, Homo sapiens
atgagaccgggggaggcgacgctaagttgctgatcgtggcggtgtggatgaggtcaccattgtcaacattttgaccaaccgca

SEQ ID NO: 757850 - DNA, 100 bp, Homo sapiens
gctgaattcttctctgatatcttcctgtcatggttccccttctactacatgctgaagtggccacagatgtctttaattccaaaaacctggccgttcaggc

SEQ ID NO: 757851 - DNA, 88 bp, Homo sapiens
gacacaatctattctgctgattcacaattatggagactgtctgatggtgagaccattctaaaaggcctccagtccattttccaggagc

SEQ ID NO: 757852 - DNA, 100 bp, Homo sapiens
acctcagccacaggaactagagacagcttgctttctgtcgtggcaatgttttgaaactggcaaaatcagaattgaagacgtaccacctcccactaaaaag

SEQ ID NO: 757853 - DNA, 72 bp, Homo sapiens
cttagttgatgatttagttgattctctgaagcttggtgatccagctatttttcctgccgtaattgtggaaca

SEQ ID NO: 757854 - DNA, 75 bp, Homo sapiens
cgacaagcacacactatggcgctgaaacggattaataaggaccatagaattttttggctgattacaggaattatg

SEQ ID NO: 757855 - DNA, 100 bp, Homo sapiens
ccaccaccgccgctgccccggctgcctcctccctgagattggccatctgcaagcttcccttctccgtggagagcaggaagacagtcatgggacctcaggg

SEQ ID NO: 757856 - DNA, 82 bp, Homo sapiens
gggagccccgggagccgcacgtttggtgccctggttgtcagatgttggaaagcagtaggacggaacatactcttcgtggttg

SEQ ID NO: 757857 - DNA, 135 bp, Homo sapiens
cattttcaggaggaagcgatggcttcagacagcatatttgagtcatttccttcgtacccacagtgcttcatgagaggatgaagtcattgctgtttccgaaaaggtgattgtgaagcttgaagacctggtcaagtg

SEQ ID NO: 757858 - DNA, 100 bp, Homo sapiens
tggttccccagaaggtatctaccaaagatctttcggaatgaccgtgtggccagactccactgatgatagctgccgaacaaggcaatctggaaatagtgaa

SEQ ID NO: 757859 - DNA, 100 bp, Homo sapiens
ggacagctccaaggccaggacctccctggatgccctgaagatcagcatccgccagctcaagtggaaggaggttgcacgttttcaaaaaatacctaatggt

SEQ ID NO: 757860 - DNA, 82 bp, Homo sapiens
cgacttcctcacccgcgcctgcgacctcgccgactgactgctgcagaccaccgccaactgcagctctccatcagctcctgtc

SEQ ID NO: 757861 - DNA, 83 bp, Homo sapiens
tggcggccggcttggagaggccgagggtttgatgaaggtggaggcagcgcggctctcagtgtggacgaatgtggaacctcgct

SEQ ID NO: 757862 - DNA, 75 bp, Homo sapiens
agcagaaaaagaggcagaattgcaccttacttacctcaacacacactcacgggacacagtgggaaagtgctgtct

SEQ ID NO: 757863 - DNA, 100 bp, Homo sapiens
gaaactcaagatccccatggacaacaaggaggtgttcatgaagtctgtgaagctggagtgggtgcaagacaacatcagggcagcccaagatctgtgcgag

SEQ ID NO: 757864 - DNA, 82 bp, Homo sapiens
ctgagtttttcaagtctgccctgcaagcgataggagtggaagcccaccaggccgccgactcgaagcgtgagcagttccggag

SEQ ID NO: 757865 - DNA, 74 bp, Homo sapiens
ccgccgagtcctagcgcctggcctgcgcgccgctgcccgcgccacagaatgggttgaatggcttgcatctggct

SEQ ID NO: 757866 - DNA, 100 bp, Homo sapiens
agctcatctcctgtcattcctgcccatttctggaccccagccactcctcaaacagggagtctccccaggacagtgctatcacccgggatattaaccgaac

SEQ ID NO: 757867 - DNA, 50 bp, Homo sapiens
cttgcccgcttggccaacgaagggatgatcagtagaattgaatatgtgca

SEQ ID NO: 757868 - DNA, 100 bp, Homo sapiens
gtggagagggattcgtggtgaaggtccggggcttgccctggtcttgctcggccgatgaagtgcagaggtttttttctgagcacgaacttccaggagccgg

SEQ ID NO: 757869 - DNA, 100 bp, Homo sapiens
gtgagcagagctctgccaggcagaaggcctctctcctgatacagcaggcgctcaccatgttccctggaggtgccatcgcctgcaggattctttattcagc

SEQ ID NO: 757870 - DNA, 75 bp, Homo sapiens
aagggccctcaggccagaggccaaggggtggccgctgccaagcaggttgttggatatgggaagtatgaactggaa

SEQ ID NO: 757871 - DNA, 75 bp, Homo sapiens
aaaaagaagaacaaagaaggatctggagatggaggtcgagctgagtgtcaaatactcatccctggtggcacttgc

SEQ ID NO: 757872 - DNA, 59 bp, Homo sapiens
gggagagccccttgcagaagacgccgtacgaggaacatccaatacttgggcaacccttt

SEQ ID NO: 757873 - DNA, 96 bp, Homo sapiens
acctgttaccactttcaaaagagacactgtcggacattcgggaaggtgcgccgctaggggtccacctgccttttgtgggctactcctactcctgca

SEQ ID NO: 757874 - DNA, 74 bp, Homo sapiens
ggccggcggattcgggaactgactgctgtagttcagaagaggttgttggaagaggagcctttggagttgtttgc

SEQ ID NO: 757875 - DNA, 112 bp, Homo sapiens
tacttacaagacctggtgaaggtggaacggggctcccaggacctccactaatcaccagaacaaaatgtgcaggatgtgatcttcgtggtggaaagctaaattttaaaaccac

SEQ ID NO: 757876 - DNA, 75 bp, Homo sapiens
aggcatcggtgaccagggaggaagtggtgtctgagctaggacaaagcccacaaacgctatctgctaatgagcatt

SEQ ID NO: 757877 - DNA, 51 bp, Homo sapiens
cggagagcgagagaggggagcaggaaagtccatcagcttgataatggagga

SEQ ID NO: 757878 - DNA, 101 bp, Homo sapiens
agcgcttcccccagcacaccatcatggaaggtgtcttgctgcaggtaactaatgaagaagtggtcaaccacagagtcttcaagaaataagaaattctgtac

SEQ ID NO: 757879 - DNA, 83 bp, Homo sapiens
aaaagcaaagacgctacagtgaccatgcatcagacaacagtcagcgctttcgagaaacctgttttgcatttgccttgacacca

SEQ ID NO: 757880 - DNA, 98 bp, Homo sapiens
aggaatcagaacgcaagcaaaatgcgttaggaaaatgtgatgcatgtctcagtggcacaattcagattcagaagcgtcaacagttagtcagaaagata

SEQ ID NO: 757881 - DNA, 90 bp, Homo sapiens
gaatagagttgagcctgtgggacacttcgggattttttatcaagcagaaatgcatcgaacaacgagaatcaagatcactgagctaaatcc

SEQ ID NO: 757882 - DNA, 95 bp, Homo sapiens
cacacgactacttcgagttcttcgccgccgacctgaggacgtgttcctcatgatccggcgccacaagaccaccatcttcacggacgccaaggagt

SEQ ID NO: 757883 - DNA, 100 bp, Homo sapiens
catcgacgccgcctggcaggccctgcgcaccagtacggcatcaagaagaaggaggagcgcgaggccgaggcccaggccgccatggaggccaactccgagg

SEQ ID NO: 757884 - DNA, 101 bp, Homo sapiens
attgggaacaactggactatggagtacagtttacatcttcacggaagtttttcacaatttctccaataattctactgtaaaaggtggaatttctgaaacaa

SEQ ID NO: 757885 - DNA, 100 bp, Homo sapiens
atgggatctgccgagatgatgggaatatcaagtctggatctgtgccagttcagaagcaggcgagcctcttccctgatgaaaaagaagataacttgctggg

SEQ ID NO: 757886 - DNA, 90 bp, Homo sapiens
aaaattctaggaccaaaacctcaggagaaaatgctgagaagcttctgcagttcaagcgttggttctggtcaatagtagagaagatgagca

SEQ ID NO: 757887 - DNA, 83 bp, Homo sapiens
tttagagaaaaattatccgactcctcggaccagcaggacaggttttgggcggaaagacgtagttgaatatttgcttcagaatg

SEQ ID NO: 757888 - DNA, 100 bp, Homo sapiens
aaagggaagtcatttctactggacttcatgcttagatacatgtataacaaggttgacatcatggacatatgtgagtccatcctggagaggaagcggcatg

SEQ ID NO: 757889 - DNA, 50 bp, Homo sapiens
agcaaatggagaagttcaggaagatgaagtctggcaaactgatgacctaa

SEQ ID NO: 757890 - DNA, 98 bp, Homo sapiens
gaatatgaagaggaggaggaggaggactatgacgaggaggaggaagagtccagtgaagggggggccctcagcctcttggccttgaacgggctgttcat

SEQ ID NO: 757891 - DNA, 75 bp, Homo sapiens
cgccccattatgatgatgtcgaggtgatggatgtggacacactgtactaggccctgagagtggaacccttacatc

SEQ ID NO: 757892 - DNA, 83 bp, Homo sapiens
ccactgttcctggaggaatccgagaagagcagagcggagggagccccagacacgacggaccagcaggctgaggccaggtccta

SEQ ID NO: 757893 - DNA, 75 bp, Homo sapiens
ggaagcccctagacgcgccgaggggccgggctacgagcggctgagcttttctgggagaagaggctacaaggactt

SEQ ID NO: 757894 - DNA, 90 bp, Homo sapiens
aaaggcatttttacaaaagactacaagaaaaccattggagttgattttttggagcgacaaattcaaatgtgacagtgatgataacatggg

SEQ ID NO: 757895 - DNA, 100 bp, Homo sapiens
gggagacctgtcagttgaagaagtcatgaaaattaaagcagaaataaaggctgccaaagcagaaatggcacctcgaaaggggaaggaaaagaaggaagaa

SEQ ID NO: 757896 - DNA, 100 bp, Homo sapiens
cattcacctggggatctggcaagatggctgaatagcaacagctccagtctgcagctcccagtgagaccaacacagaagatcacaaaatttgtccaggata

SEQ ID NO: 757897 - DNA, 80 bp, Homo sapiens
gagtgacccgggtgccgaggagcgggaagagttgctggggtccagcaccatgtgctaggtcactcccagcgcgaggccac

SEQ ID NO: 757898 - DNA, 100 bp, Homo sapiens
ctccgttccccgtcccggagctgccggcggcatgatccgacacgccggggcgcccgcgcgcggggaccccacggggcccctccagccagcgtcaggtgca

SEQ ID NO: 757899 - DNA, 97 bp, Homo sapiens
ggagtatgatgggcggggggtgctcatcgcagtcctggacacgggggtcgacccgggggctccgggcatgcaggaaatacaactggagcacgcaaag

SEQ ID NO: 757900 - DNA, 101 bp, Homo sapiens
tagcttcggagtctcccgcgcgcacctcagccgcctcctagcggcgcggcgctcgctcctacggagaactatgccatttttgggtcaggactggagatctc

SEQ ID NO: 757901 - DNA, 99 bp, Homo sapiens
ccagttagtggatatagcacaccatccccagccagtttgggatgtacattccgttcctgcagctgaattgcgacctccgcaagacaagcctcttcaacc

SEQ ID NO: 757902 - DNA, 75 bp, Homo sapiens
tggcccaggcagaccttgcagtcaaaatttttgatgaaattgagtcatgaaactgtaaccattgaattgaagaac

SEQ ID NO: 757903 - DNA, 100 bp, Homo sapiens
ggctctcatgctcagtttggttctgagtctcctcaagctgggatcagagttgtctgctggttctcagcttgaagaagattctgcagtccttattgatcct

SEQ ID NO: 757904 - DNA, 80 bp, Homo sapiens
gtccttggggacggagcagcgcgtcgtggggcgagcggcagatgccggtgcagctgacgacagccctgcgtgtggtgggc

SEQ ID NO: 757905 - DNA, 82 bp, Homo sapiens
ggcgcacctgccagccaggcctcggacgaggaggacgcgcccgccaccgacatctactttggcagcgggtggcatgagacgt

SEQ ID NO: 757906 - DNA, 95 bp, Homo sapiens
gtccagttcggggcagcttctccggctggtgggtgggtggggcagcctttcaggcaggccctggttaactgggacccagtggatcaaacagtgct

SEQ ID NO: 757907 - DNA, 83 bp, Homo sapiens
tgtcaatcgcttgccccagcacaggttaaaaatctgtaagagcctgattttagaattcaccagctcctcagaagtttggcgaa

SEQ ID NO: 757908 - DNA, 75 bp, Homo sapiens
aaacgcacgagtattacccctatctcagcagtgatggggagagccatagcgagctgccatcagtcatgctcttaa

SEQ ID NO: 757909 - DNA, 90 bp, Homo sapiens
gaaaacatcaaagaggtctagcaaagagcatcctggccagaacaagccaaggagccaagacgagagggacacacggacaaacaacagaca

SEQ ID NO: 757910 - DNA, 83 bp, Homo sapiens
tccacagaggataaatttcaacctccggggccacaatagcgagtgccctctggtggtcagaagatgctgtgctgtctcgttag

SEQ ID NO: 757911 - DNA, 90 bp, Homo sapiens
cgcccagcttgtgccctacatcatcgacctgcagtccatgcaccagtttcgccaggacacaggacctatatccagactttgcctgacact

SEQ ID NO: 757912 - DNA, 83 bp, Homo sapiens
aacttgattcagaacactaacatcgacaatggacaagtggcagaatttagtgacatttggaagcttttcaaacatggttccct

SEQ ID NO: 757913 - DNA, 100 bp, Homo sapiens
aatcaacctgataatgaaggctggataccactacatgcagcagcttcctgtggatatcttgatattgcagagtgccagcgagatttcagattcctgtaaa

SEQ ID NO: 757914 - DNA, 82 bp, Homo sapiens
gtctgcaaacctggagccagaaacattaccgtcatattccacccattactaagctttcggaaaatgtgattgatcgaatgaa

SEQ ID NO: 757915 - DNA, 83 bp, Homo sapiens
cgcggtccctgtattggtctcctgctcctagagatcagcttgaacgggtctttttacgacttggccatgctgaaacagatgaa

SEQ ID NO: 757916 - DNA, 87 bp, Homo sapiens
ttaagcaaggaaattgaactaagaaatggagagatatttgttcagtcgaatcaaggtgaagaggaaacaacaagaatttcatatttt

SEQ ID NO: 757917 - DNA, 74 bp, Homo sapiens
ctgaagatgacccattatttccacctattgagttctgcggcatgaggaatttgaagaaggctgcaaagctgcct

SEQ ID NO: 757918 - DNA, 75 bp, Homo sapiens
atgagaagcatgatgcagtcactaagccagaatcctgaccttgctgcacaggctactgcagcactggggtgtcag

SEQ ID NO: 757919 - DNA, 100 bp, Homo sapiens
cgtggctcccaactttgaggccaataccaccgtcggccgcatccgtttccacgactttctgggagactcggaaagtcttcagatggcagtaggcccattc

SEQ ID NO: 757920 - DNA, 100 bp, Homo sapiens
atcgaccagtccaagctgcctggagtcaaggaaggaattaagtagactggctggacagattcgaaggttgtatggttcaaacaaaaaagctgacaggcca

SEQ ID NO: 757921 - DNA, 75 bp, Homo sapiens
gtttgctgctagaacccaggatcgctggaaaatcacctagcagcagtaagactttgaccccgacgcaggcttcag

SEQ ID NO: 757922 - DNA, 74 bp, Homo sapiens
gaatgggcctggcctgtgggcaggtcacgtatcagttaaaaattcttacaacagcattattttctgtgtctatg

SEQ ID NO: 757923 - DNA, 90 bp, Homo sapiens
cgggagtgatcacctaccctacaggtcactgttcatcatgttagatagccttaacagtctcgatggttctactagctctgtgggacaagc

SEQ ID NO: 757924 - DNA, 50 bp, Homo sapiens
gaattctctttgaaattacagcagcgcctgcttcgcggtttcctgcttgc

SEQ ID NO: 757925 - DNA, 75 bp, Homo sapiens
cctgtcagttgacctaccccttgcacacctaccctaaggaggtgctcctgtaccctggccacagcccaatcctgc

SEQ ID NO: 757926 - DNA, 111 bp, Homo sapiens
gggaaaatgccaagtggaataaaaaccaacatcaagtcggcttccatgcatccctaccagcgtcacaagcacctcttcggcaaagcccacctccctctctcgcttgattcc

SEQ ID NO: 757927 - DNA, 83 bp, Homo sapiens
cggaggaccgtatccccagcccactgggctacgcagggcagctggtggaatttttgaagaaaatggaatctcgaggccccctt

SEQ ID NO: 757928 - DNA, 75 bp, Homo sapiens
gatcgactacaaggagatcgaggtggaagaggaggaaacacaattattactagaaaacctgcatgtttatcatat

SEQ ID NO: 757929 - DNA, 100 bp, Homo sapiens
gcaggggcccgtgcatcatctataatgaggataatggtatcatcaaggccttcagaaacatccctggaatttgtgaccctcaaggatgtcggcatggact

SEQ ID NO: 757930 - DNA, 100 bp, Homo sapiens
tgaacatgagcctcctcctctccttctacctgctggggttgcttgtcagtagcgggcaagatgtgactctgaaaatcgctatgttggtaatccacttaga

SEQ ID NO: 757931 - DNA, 96 bp, Homo sapiens
gcaccagggcttcgccagcgggccagcaacaaagtgcaagggatgaactcaagcggcattacaacctgggggagtactggattgaggtggagatgg

SEQ ID NO: 757932 - DNA, 101 bp, Homo sapiens
gaggaaagtgtgcattttgacagagatcttccagaatttgggttcaggaagatttgactgaagagaaaaaaagggaactggagcataatgctgaagagacc

SEQ ID NO: 757933 - DNA, 80 bp, Homo sapiens
ggtgcccagccgggaactccccatcgcgttttgccagcgataatacgcctcagataagtgccatagagttcatttccatt

SEQ ID NO: 757934 - DNA, 75 bp, Homo sapiens
caaagatgccaagaaaccctgatacattaattgtttggtcagaagcagagaactatgatttggctctgagttttc

SEQ ID NO: 757935 - DNA, 100 bp, Homo sapiens
gcctacggaggtggcagccatctccttctcgagttcctatcagactgagattgggcagaccctggacctcctcacagccccccagggcaatgtggatctt

SEQ ID NO: 757936 - DNA, 100 bp, Homo sapiens
tgctgccccttctgctggcctctctgctcgcgtcctgctcctgtaacaaaggcctgctctccctcctgtacctgccaacaggatttttctccctggcccg

SEQ ID NO: 757937 - DNA, 90 bp, Homo sapiens
cttttgagcagttggcactacccgtcttgaggaatagaaagtctgtgattgctgtgagcttcatagcagcgttccttttcctgctggttg

SEQ ID NO: 757938 - DNA, 78 bp, Homo sapiens
cggcgtgtagaagacgaagtcaacagtggagtgggccaggattactacagcatcccatttcccacacccactactccg

SEQ ID NO: 757939 - DNA, 50 bp, Homo sapiens
ttcaacagaatgtggcaaccaggcggcttacagggagaacacagttggcc

SEQ ID NO: 757940 - DNA, 99 bp, Homo sapiens
ctgacggagccggaggctgggagccgcggcggcctggggtgaaaggtgtagcagtcactcggcctacacccacagcatcgaccttgtgaacccagcgac

SEQ ID NO: 757941 - DNA, 98 bp, Homo sapiens
cggcaccagcagtaacaacagcgaggaagaagaggacgacgacgacgaggaagaggaggtttctgagggaagaggaagaacgtctgagaaataaaatt

SEQ ID NO: 757942 - DNA, 106 bp, Homo sapiens
cgccctggcggctctagggaccccccccgcgcctgcacttagccccgcgcccgaggtgagaagccctaccactgcaactgggacggctgcggctggaagtttgcgc

SEQ ID NO: 757943 - DNA, 95 bp, Homo sapiens
ttaccacatgggattcttggtcagtgaggatgaaagcaaactggatccaggttcagagcttcatgcgaggatggttgtgcagaaggaaatggaag

SEQ ID NO: 757944 - DNA, 74 bp, Homo sapiens
ctcctccctccaggcttcagctataaggctggatgtaacatcgctattgcggttccgaggcagtgggaagagat

SEQ ID NO: 757945 - DNA, 75 bp, Homo sapiens
aaaactttggatggccctactttcaggaaatgcttccagactgcacacttttacttagaggacagtacatcccct

SEQ ID NO: 757946 - DNA, 100 bp, Homo sapiens
aggcaagaccgaattcagaaggatatcgacgtcgtgatccagaagtccagagctgaggactgcctgtttgcagatgagggttactaccagggtggaaaat

SEQ ID NO: 757947 - DNA, 105 bp, Homo sapiens
cttgaacccgggaggcagaggttgcgataactgataccgtgcttccagaagatttttctaacagtgtttgcaagctataaaatagtgctttcacttagaaaaggc

SEQ ID NO: 757948 - DNA, 76 bp, Homo sapiens
gcgctggcagaagttcgtcatgttctacgacagcgagtatggtcagaatgaaggaacgatttccgtagttgaagga

SEQ ID NO: 757949 - DNA, 87 bp, Homo sapiens
agagtaattcacgcagagccggctttgcagtgttttccaagcagtgaagcacttgccgtgttgaactgaatgcactactggagaatg

SEQ ID NO: 757950 - DNA, 100 bp, Homo sapiens
cggcaaatggcggacttcgacacctacgacgatcgggcctacagcagcttcggcggcggcagaggagatgcgggccttggcagaactcctgggcccctat

SEQ ID NO: 757951 - DNA, 100 bp, Homo sapiens
cccaggtgtaagcgcagaaagcaggcgaacccgcggcgcaataacgaaatgcactcggtgatggaaagagagccactattctgaagaacacttggccaaa

SEQ ID NO: 757952 - DNA, 50 bp, Homo sapiens
cgttgatcttcggccccacacggaaacccctcctggagtttccccaaagc

SEQ ID NO: 757953 - DNA, 96 bp, Homo sapiens
ctctcccaggccacaagacatttcctgctcggaaccttgtttactaattacaatgcagatcttcgtgaagactctgactggtaagaccatcaccct

SEQ ID NO: 757954 - DNA, 83 bp, Homo sapiens
cgaggagatgctgtgggtggggagccacggggttttaaaatcaaagatgggaaaatcggagaaaattgcccttccccatggcc

SEQ ID NO: 757955 - DNA, 90 bp, Homo sapiens
gatgttggtacctgcatctgtaggcctccttgaaaccggatggtcatccagactcagagctctctctacagagaggaaattctccactgt

SEQ ID NO: 757956 - DNA, 100 bp, Homo sapiens
ggccgccgtgccattcttaaaggcgcccgagtgtaggcgacaggccgctgacggccggaaggaaaatgctgccaaggggccaagggatgagctggggccc

SEQ ID NO: 757957 - DNA, 106 bp, Homo sapiens
gaagaagcagctggacccgctcaccatctacggcatccggtggactttgaacatgtcggggatcgccctcagcagactcgcccaggagaggaaagcatggaggaaa

SEQ ID NO: 757958 - DNA, 100 bp, Homo sapiens
agtcggagggagtaacaccaactggaaaaccttgtatgaggtcaaatccgagaacctgggccaaggcgacaaggccatggaggaattgcaagaccaagag

SEQ ID NO: 757959 - DNA, 50 bp, Homo sapiens
atgatttaaacaagagatttccacagaagtttcaggtttagctgtgcctc

SEQ ID NO: 757960 - DNA, 100 bp, Homo sapiens
ctcagcctccagttgcttctctgtgcatgcacatcagtcactgatctcacctactggatgcagaaggctatcaacaggctgagcaggcttctgaaacctg

SEQ ID NO: 757961 - DNA, 100 bp, Homo sapiens
aacgcccccaatttcccagctgctaaaggaagaggaaggtatgtgacgcattcccagactcttcagccaactgagcatcagcttcttcacagcaattggg

SEQ ID NO: 757962 - DNA, 100 bp, Homo sapiens
ggagtgagaagcaagaaggccctggacacagcaatatctctgggctttcacagttaattggcatgctgctggcctgctgtctgtcccggttcatcacggc

SEQ ID NO: 757963 - DNA, 85 bp, Homo sapiens
cggggcctccgcgaggacgagttccacatcagtgtcatcaggtttgtttgtaaaaacaatggtgtgttgtttgaaaaccagctgc

SEQ ID NO: 757964 - DNA, 99 bp, Homo sapiens
aggagagcatgcaggaggtgcaggcgagggtgcagagcctggagagcatgccccggccccctgagcaggttatcaatactctggctgaccatcatcatc

SEQ ID NO: 757965 - DNA, 98 bp, Homo sapiens
ggccgtacgcggtgctgcgagggcagaacctggagctgctgcccaaagggagcaaggaggaacagcgggattacgtcttctacctggccgtggggaac

SEQ ID NO: 757966 - DNA, 100 bp, Homo sapiens
tgggtcagtccgccgctcaccccgcggccgcaccttcccgccttctcagggttgtgagtcccggcccagcccctccacccccctgcccccccgatgcgac

SEQ ID NO: 757967 - DNA, 74 bp, Homo sapiens
cggcgcggcgcaggcaccggcccggggagaggcaccatgagcgggaacgatcagcgttggagtagatgccaccg

SEQ ID NO: 757968 - DNA, 87 bp, Homo sapiens
aaaaggaccacatagtccatcgaagaagagtccttggaacaagcaactggctattgaaaaggtgctggagaatctggtaaaagcacc

SEQ ID NO: 757969 - DNA, 83 bp, Homo sapiens
gcgaacagtctcgttgctgcctctgtgtacgctgaggggggagtaagactttgaccccgacgcaggcttcagtgattgccgcg

SEQ ID NO: 757970 - DNA, 74 bp, Homo sapiens
atgtggttttgaaaaatgtcaaaccagaccaatgggtgaaggcactggtgaggtggattgatgatgaatcttct

SEQ ID NO: 757971 - DNA, 75 bp, Homo sapiens
cacaaagttctctcgatcagggcatacatctttcttcgacaaagggaagttttattcagtgtatgggtctggtca

SEQ ID NO: 757972 - DNA, 98 bp, Homo sapiens
attagacctcccctcactcagggcaatctgaggtacatagctgagaagactgaatttttcaagggaagtgttcgccagttactacatgaaaagataag

SEQ ID NO: 757973 - DNA, 75 bp, Homo sapiens
tagcaatgccactttcaggatactagagcagcgatggattttgggtggggaagtcctccttgcggagttggcgcc

SEQ ID NO: 757974 - DNA, 75 bp, Homo sapiens
cagcaagaacagagagagaggtggacagatctgagagatactgagaatgacctggatgaccctgaaagaggaatg

SEQ ID NO: 757975 - DNA, 101 bp, Homo sapiens
acggatcagcctgagatgatcccagctgtgctctggacagggggtcttgctcctcagaacaaaccagaattgcagaaggtgatggaaaaaagaaaacgaga

SEQ ID NO: 757976 - DNA, 89 bp, Homo sapiens
cttagctgtgctcgcgctactctctctttctggcctggaggctatccagcggcgtctctggccgagcctctttttgtggaaaacgacag

SEQ ID NO: 757977 - DNA, 100 bp, Homo sapiens
aatttccagaaggtgcctgaccagaaaggaactcccaagcgactgcaggcagaagctgagacggctaagtgcaagaagaaacacacgctgctgtgccccg

SEQ ID NO: 757978 - DNA, 76 bp, Homo sapiens
cgtccgcccgggggcgccgcccaccgcgcctcgctcggttttggctacgggcctccacctccaccgccagatcagt

SEQ ID NO: 757979 - DNA, 74 bp, Homo sapiens
ctcaaggtcgtgcgtctgaagcctacaagaaagccaaggccacctttgatgccatttctaagacctacagctac

SEQ ID NO: 757980 - DNA, 100 bp, Homo sapiens
gctggtgggactcaatgttctcgatgccaatctctgcttgaaaggagaagacttggattctcagaggttatgggtgatggtgaaagtgcacatgattctc

SEQ ID NO: 757981 - DNA, 100 bp, Homo sapiens
atgctgccggggccggcgagccaaagaggagccggccgcgcgggccgggaggggacggccgccggagccgcgaggccaaaacacagatatgtagaactct

SEQ ID NO: 757982 - DNA, 136 bp, Homo sapiens
ggaggccatgggcgacccagcccccgcccgcagcctggacgacatcgacctgtccgccctgcgggtctccaattgagaaacatggcactgtttttcctgcactctacccacctattgctggacttctgttgtacaa

SEQ ID NO: 757983 - DNA, 97 bp, Homo sapiens
cgcccattcttaccaaatgttgattttgttggaggacttcactgtaaaccagccaaacccttgcctaagcctgtcagagttgttcagtataatatca

SEQ ID NO: 757984 - DNA, 90 bp, Homo sapiens
ctaacccatgttattgaaggctttgtgattcaggagggattggagccatttcctgtagagttggctttgtgggacacagctgggcaggaa

SEQ ID NO: 757985 - DNA, 51 bp, Homo sapiens
gagctgaggactgcctgtttgcaggtggtttgtgatgaaaatggttccaag

SEQ ID NO: 757986 - DNA, 75 bp, Homo sapiens
ctcagatccaagtcaacagtactacatgaggaaataattgacttttataacttcatgtccccttgtcctgaagaa

SEQ ID NO: 757987 - DNA, 76 bp, Homo sapiens
ggaagtaccaacaaacagcagcaatcaccacccaagtggatgatgatgaatcagaaggagaagaattcacagtccg

SEQ ID NO: 757988 - DNA, 74 bp, Homo sapiens
gatgaaattaaagatgcatgctgatggcgataagtcattaccacaggatggaacaaaattcatctgtattgggg

SEQ ID NO: 757989 - DNA, 101 bp, Homo sapiens
agaagcatgtgtcttccccagctctgcagccacatactatccgtttgttcaggaaccaccagtgacagagatgaaactgattccaagacagcctccccgtg

SEQ ID NO: 757990 - DNA, 83 bp, Homo sapiens
cgttttgcctccggttggggctgctgtttctcttcgccgacggtgtccctggccagtgtccttccacctgtccacaagcatgg

SEQ ID NO: 757991 - DNA, 96 bp, Homo sapiens
agaaaaccttatcaagaaatatgggacacatttcttgctatctgctactctgggagtttgtcagaggaatggctgtgaatggatgcctggaaggac

SEQ ID NO: 757992 - DNA, 75 bp, Homo sapiens
ggaacccgaagaagaaaggattcgttacagccagagattgccccacaggagacaggatccgaagcaaagttgagc

SEQ ID NO: 757993 - DNA, 87 bp, Homo sapiens
aagggccgctttttttgcagagtcagcgctttgggaccaagctatgctaagaaggaatctgatcttaatggcgcccagatcaagctt

SEQ ID NO: 757994 - DNA, 100 bp, Homo sapiens
gaaggagcggcagggagctctcgcgccttggcccattgtcgggcttggaaaattcttgttaaaagttgatagcaaggaaagaccacagcaagattctttc

SEQ ID NO: 757995 - DNA, 51 bp, Homo sapiens
tgaccttacagtaatacagtcaacacaggtgatcgaggagttctacaacca

SEQ ID NO: 757996 - DNA, 74 bp, Homo sapiens
aggatggtttttcaacaagttggagtaagcatgcaatcggttcgagaacttgtcttggacaattgcaaatcaaa

SEQ ID NO: 757997 - DNA, 76 bp, Homo sapiens
agtggagcgtgtcctgaaggagttccaccaggccgggaagcccatcggtgatgatgacagcctcttcatctatgac

SEQ ID NO: 757998 - DNA, 75 bp, Homo sapiens
gcaacttcggggagctccgcctaggtctgggaggggctgaacgtggtgaagacaggccgagtgatgcttggggag

SEQ ID NO: 757999 - DNA, 83 bp, Homo sapiens
ctaccttcgaggcaggagccctctcatggtgaacagcaactattatgtcatggagcatcagatccatgctgctgctgactcgg

SEQ ID NO: 758000 - DNA, 74 bp, Homo sapiens
tgccatccacagtgatgttgatgctagttctgacctgatcttcaggtttgcatatccaaaaagcctacatgttg

SEQ ID NO: 758001 - DNA, 100 bp, Homo sapiens
cttttccagagaggctgtggtccatagcctctgttcgttttcactgcaggaccaggcacgaaaggagtgaggaggccaacgggggcactccccagagcag

SEQ ID NO: 758002 - DNA, 75 bp, Homo sapiens
ggaaaatcatattatagatggagtaaaggtggcgacatgtctaagaatgtgagccagtcacagatggcaaaattg

SEQ ID NO: 758003 - DNA, 80 bp, Homo sapiens
acaggggcggcgcggcccggggtgtcagtgtggaggagactgagcattgcagtgtcgagatggctatgaaccctgtgtaa

SEQ ID NO: 758004 - DNA, 75 bp, Homo sapiens
ttcttcttcgagtatttgtagaaggacagctggaaatgatccctattgttttgtggagtttcatgagcatcgtca

SEQ ID NO: 758005 - DNA, 76 bp, Homo sapiens
ccaaatttcagtgaacccaacccagattatcgaggacagcagaacaaagggtgccaaagaatcctttacttcatct

SEQ ID NO: 758006 - DNA, 75 bp, Homo sapiens
ctgctgcgttcacggcaggattcggttaggaacagggcggatacctgaccaactcgtgatcctagacatgaagca

SEQ ID NO: 758007 - DNA, 82 bp, Homo sapiens
atataatgaacctcatgaaagcagaaccaactcggatattgttgagatggaacagattaaaagggccaataaactgtttacc

SEQ ID NO: 758008 - DNA, 100 bp, Homo sapiens
acggccaccgcctcagcgggagaggagtctccaccaggactgaccgctgccgcccagcacgtccaggatatgaacgagactgccaaacaagaagatattt

SEQ ID NO: 758009 - DNA, 96 bp, Homo sapiens
ccggcctcggcctggatgggcagcgccagaggaaactcccagtacagccagcagcaggccgggtaccagcagggtgccgcgcagcagcagacgtac

SEQ ID NO: 758010 - DNA, 100 bp, Homo sapiens
cagaaataaatcagagtctactggctgtctctttaatgtggggaacaagctgctggtaagcctggacttgctttttgcaatcagaaatcagatcaagctc

SEQ ID NO: 758011 - DNA, 73 bp, Homo sapiens
gagcaagatcaccgtgacatccgaggtgcctttctccaaaagccttcaaatgtttatctggtgtgactgtatt

SEQ ID NO: 758012 - DNA, 100 bp, Homo sapiens
gtacccgtttgagctggtcatggcggtgaaaggtgtagcagtcactcggcctacacccacagcatcgaccttgtgaacccagcgacctgactgccttggg

SEQ ID NO: 758013 - DNA, 100 bp, Homo sapiens
tgaagatatcgtggccaccaaaggacaaaggcaagaagttaattcctgaagtcgagtgtggtgtaaaggaattcattagccatggatgtattcatgaaag

SEQ ID NO: 758014 - DNA, 115 bp, Homo sapiens
ctgcgctgttcgtgctgctgggattcgcgctgctgggcacccacggagcctccggggctgggactttgaacatgtcggggatcgccctcagcagactcgcccaggagaggaaagc

SEQ ID NO: 758015 - DNA, 100 bp, Homo sapiens
tatcttgaaaagctgccagaaaggggcagggagtcggcggcttagcttcctctggagcacggttccatcagccagatgcgctcacatccagctcttagcg

SEQ ID NO: 758016 - DNA, 100 bp, Homo sapiens
cttatatcaatttaggaaatgtcttgaaagaggcacgcatttttgacagacacacccatgacctccggattcatcaactgcaagtgagagtaaatggctg

SEQ ID NO: 758017 - DNA, 100 bp, Homo sapiens
agtggcgccagatagaaaacggcgagagtgggcgagaacgtccactgcgggccggcgaaagctgaacccagtgacttgattgtaaaaatttacagagcgg

SEQ ID NO: 758018 - DNA, 75 bp, Homo sapiens
caagccactcactctgctctgggaaaattgtgttaaggaatggtactgaggcatttgactcctgggagaagcccc

SEQ ID NO: 758019 - DNA, 75 bp, Homo sapiens
tggagaccagaccagaagcccttctgaattaaggtattattaacccaaagaatccaaaggaagctccaaagtcct

SEQ ID NO: 758020 - DNA, 74 bp, Homo sapiens
tctctcatcgaggcccaaaccgccaaggtgctggagaatctggtaaaagcaccattgtgaagcagatgaggatc

SEQ ID NO: 758021 - DNA, 97 bp, Homo sapiens
ttgtgacatatcgttggacccagaattgaggctgaagacagtgggagcagccgagttcagtccttgctctccaactaggcaaggttctctcaactaa

SEQ ID NO: 758022 - DNA, 83 bp, Homo sapiens
ccggtttgcctcggcagccaaggagggcggtccgcaagcaggtggtgaacatcccgtccttcattgtccgcctggattcccag

SEQ ID NO: 758023 - DNA, 95 bp, Homo sapiens
cttttgggcaaggatcagacacaaaggttagaggactcgggtcaagctggaaagcctggaagacgcctacattctgcggggagatgatgattccc

SEQ ID NO: 758024 - DNA, 73 bp, Homo sapiens
ggagcttcatcaacgatatatgtcagatctaaagggtaagatgatcatgcaggataaactggagaaggagcgg

SEQ ID NO: 758025 - DNA, 100 bp, Homo sapiens
aaacagtgtacccaggcgactttggattcttgtgaggaaaacatggtggtgccttcaagggatggaaaattcagggaaaatggcgaacgactcccctgca

SEQ ID NO: 758026 - DNA, 82 bp, Homo sapiens
cccctaccttggggaccaggcccttgcgctgtggaaccaggacagagcgggatgccaccagcttgtccaaagggaagttcca

SEQ ID NO: 758027 - DNA, 75 bp, Homo sapiens
gctgaagaagaaatcatagacgatgatgatgatgacatcacccttacaggattttctgccgtctcttggcaaaaa

SEQ ID NO: 758028 - DNA, 97 bp, Homo sapiens
gaactgccggcggctcttgtgctgcaggacgccctcctgcaaaacggcccaactacgttaagcttggcactctggcacctttctgctgtccctggga

SEQ ID NO: 758029 - DNA, 157 bp, Homo sapiens
ccagattgcaaagagttatggatattctggtggggagatgaacccaacctagtgggtgtaatacatcatgaactgcaggaactgggaccctggaacttggggataaattgctcgcaatagataatatccggctggacaactgttccatggaagatgc

SEQ ID NO: 758030 - DNA, 97 bp, Homo sapiens
acagagtcggagtgaaaagaaggcacggaaggctgtggtccaaggccatttttgctggctataagcggggtctccggaaccaaagggagcacacagc

SEQ ID NO: 758031 - DNA, 110 bp, Homo sapiens
cccagatgccttccctctctgttttgtctgtgtgcacagaggaatcatcacctccaaatactggtcccacgggagtgcatccgccccaacccttttccccctcgtctcct

SEQ ID NO: 758032 - DNA, 82 bp, Homo sapiens
ctggtcatcatggtgggcaagcaggtcatcaacaacatgcaggaggtcctcatcccgtatcgagaaccttccctgcgaactt

SEQ ID NO: 758033 - DNA, 75 bp, Homo sapiens
acccttcgagaaatctcgtctcgaccaagagctgaagctgatcgcctgtggacatctctacagcaatgagtgaac

SEQ ID NO: 758034 - DNA, 98 bp, Homo sapiens
tcctcggggagctccagcatcagcaggtgacactacctgagaagcctgttaaactagcttcacataccagagacaccacaggtgtatctcagatgttc

SEQ ID NO: 758035 - DNA, 100 bp, Homo sapiens
cgcgctgctgccgcgattacccgggtcgactccgggccatcaaccctgagaacggcttctttggggttgcccctggtacctctgccaccaccaatcccaa

SEQ ID NO: 758036 - DNA, 101 bp, Homo sapiens
gccaggggatattattcggttgaccagaggacaggtcctcataacctagaaacttgtctgagcgtggtgctgctgtctctcgccatggtcatggctggctc

SEQ ID NO: 758037 - DNA, 75 bp, Homo sapiens
attttgaagtaaaaattgtcagtaagggaagagatggaacatatgctgtcaggaggataagagatgccttcagag

SEQ ID NO: 758038 - DNA, 100 bp, Homo sapiens
gaatgtttttgccacacttaacagatgtccaaaaagactcctgactgctgaggttcaaaccttgtactactcagctgatcacaagctgcttgatgggaac

SEQ ID NO: 758039 - DNA, 82 bp, Homo sapiens
gggccttgagaaacttaaggagtgtgtgttgcgtgacgtgtgtcccggcatggatatccggaacaacctcactaggttgcat

SEQ ID NO: 758040 - DNA, 100 bp, Homo sapiens
ggctttctgcgccatcctgcaccgccaccggcccgacctcatgagctgcggcgccaagatgagtggagaggagaacccagccagcaagcccacgccggtg

SEQ ID NO: 758041 - DNA, 100 bp, Homo sapiens
cagagccgcccagccctgccagctgcgccgggacggcagtcacccgcagggccaaggtggctcccgctgagaggatgagcaagttcttaaggcacttcac

SEQ ID NO: 758042 - DNA, 90 bp, Homo sapiens
tgtctttatatcctgacactatgaatgctacttggatgcctcttaaggttgggggccgtcccgctcctaaggcaggaagatggtggccgc

SEQ ID NO: 758043 - DNA, 114 bp, Homo sapiens
cgctggcgggtccggccgcgcgcggggcgccgacacctgtggctggagggcctaaacggcagcggcaaaacaactttcccatgtttccctctcctaaagcctggaatttcagag

SEQ ID NO: 758044 - DNA, 80 bp, Homo sapiens
agacgctcaggctgtgttctcagaggggggatgatccagacggcagagcagtaccagttcctgcaccacactttggccct

SEQ ID NO: 758045 - DNA, 82 bp, Homo sapiens
agaccggcttcaatatcttcacccagcatggttgaaatcacaaagattagacacctttttagataggtgttcttcagcacca

SEQ ID NO: 758046 - DNA, 75 bp, Homo sapiens
agtccggacatctgaaacttgtgctcctgcgggaagaagtgtcgcggctccaggaggaagttcaccttctccggc

SEQ ID NO: 758047 - DNA, 75 bp, Homo sapiens
tgcagcgccgggatctgagtgcgaaactccgagcggaagctggtctggcaggcttccgaagatcttctcaaggaa

SEQ ID NO: 758048 - DNA, 75 bp, Homo sapiens
cgggccatggccgccgccgatgccgaggacacaatgtttgcacgaggactgaagaggaaatgtgttggccacgag

SEQ ID NO: 758049 - DNA, 96 bp, Homo sapiens
cctgcggaggatggtgcaggagcgcgagaaggatatcctgacggccatcgccgccgacctgtgcaagagccataagaaagtgggagccttatggag

SEQ ID NO: 758050 - DNA, 100 bp, Homo sapiens
tgccatggacacccactttgccaacatgcgctccctcatccagctccagagaaagagacacattggaaatgacatcgtggccatcatcttccaagaggaa

SEQ ID NO: 758051 - DNA, 78 bp, Homo sapiens
gcaaggtctccaagtcccagctcaagcagccaacagagcagtcagcagagcagccacgatgatgattctagcaggttc

SEQ ID NO: 758052 - DNA, 51 bp, Homo sapiens
gcggggaccttgccttgcccggggacccccgcagcaaacacaagtttaaga

SEQ ID NO: 758053 - DNA, 76 bp, Homo sapiens
ggaatggttcctcttgctctttggcccgtggctccttaggaagggagtaccctgacttctaccggaagctctacgg

SEQ ID NO: 758054 - DNA, 97 bp, Homo sapiens
agaagaaatagcaaggcccaaccagttcttcatctggagacagttcaacgttctgcaaaccagtttcagacccaaagtttacgcctatcagacctac

SEQ ID NO: 758055 - DNA, 100 bp, Homo sapiens
gctgctcttcctgaggttttcctaagccatcccctggcggaaccgcccccaggaagatgatccctatgatcttgaagatgtttctgcacagaaatgaggg

SEQ ID NO: 758056 - DNA, 74 bp, Homo sapiens
ggggaaaatctccccggtgactttcaggtaaagatgatgattcttttgatcggaaatcagtgtaccgaggctcg

SEQ ID NO: 758057 - DNA, 51 bp, Homo sapiens
gccagaactgcccaaggacatcagcaaatacttccctggacaagaaagcca

SEQ ID NO: 758058 - DNA, 75 bp, Homo sapiens
agtggacgccgaagcctttaatctcagatttcaggtatgctgctgaaagtgggaatcctctacattggtgggcag

SEQ ID NO: 758059 - DNA, 82 bp, Homo sapiens
aagtgtctttggtccaacgttgttccaggaaccctaaggactctgcaatatgaataattccctagagaacaccatctccttt

SEQ ID NO: 758060 - DNA, 98 bp, Homo sapiens
actgtatttatggagaccgctgcagtggtggacttgctttgtgaagagacagttcatgaacaagagtctttcaggacctggacagtgaagggagcccg

SEQ ID NO: 758061 - DNA, 75 bp, Homo sapiens
ctacatctcgcctctctacagcttcctgcccaacaccaaaagtattgtcttctaagaactctgaagcaatgtcag

SEQ ID NO: 758062 - DNA, 75 bp, Homo sapiens
gaccccagagcggccatgagctggtgtgcagccgcccaggagggactccatcaagaatgctggaggaagggtgtt

SEQ ID NO: 758063 - DNA, 101 bp, Homo sapiens
ggctggtccaggccttccagtacacagacgagcatggggaagttgatttatgaagactctatggatctaatcgcaaagctaccttgtgttgcagcaaagat

SEQ ID NO: 758064 - DNA, 100 bp, Homo sapiens
tgagccccatcgtggattccaagacatccctgctgagagagccaaggtacatgtcccagagcaagcacacggaggcccgggagctcatgtactcgggagc

SEQ ID NO: 758065 - DNA, 100 bp, Homo sapiens
ccgccatcgaggcacagcacttgctcaagaggaaaccaggtttaccgacaagactgtgaaactttcgggatggtggtgaaaatgctgattgaaaaagatc

SEQ ID NO: 758066 - DNA, 82 bp, Homo sapiens
agggaccctgagactcccagatcttcagacctattccatctgggctagcagttgtaaaaacaaagcagagtgcaatgaactc

SEQ ID NO: 758067 - DNA, 100 bp, Homo sapiens
cttggtgtgtcccaaaaattggtatcaccttcaaggagcacaagtagctgctcttccaagcaaggaagtcgacaggtaagaagagttcctgggtcaagtg

SEQ ID NO: 758068 - DNA, 119 bp, Homo sapiens
agatttccagccttccaagctctactgtgacttcagagacactgccaagcagccttagccctagtgtagaggggccacctacagatgctcctgcagtggacacagcagaacaagtctat

SEQ ID NO: 758069 - DNA, 95 bp, Homo sapiens
ggagctttcgtcacctgtccttctacattttcgatagagacgttttccggagggattccatcataggatgaccagtgtcccagtgaaggaacgag

SEQ ID NO: 758070 - DNA, 82 bp, Homo sapiens
ctgcacttcagctgcagctcctacttgatcaccactccctgctacaggtggcagtgctccttttggacttttctctaggttt

SEQ ID NO: 758071 - DNA, 75 bp, Homo sapiens
gtggatcgctgtgatcgtcacttgcagctgcagtatctcggaagaaaaaacgaagaatgggaacctatagcctgg

SEQ ID NO: 758072 - DNA, 100 bp, Homo sapiens
gtggaagtccaagtcaaacgcagaaggactgcctcactgagcaaccaagactatgtttccagtgtcctctgggtgtttccaagagcaacaagaaacgaat

SEQ ID NO: 758073 - DNA, 100 bp, Homo sapiens
gctgcactcactctacgtggagttgggccctgcaggaaggacggacttcaggggcagaagttaccccccaagcgtccagaactccctccaactctaatga

SEQ ID NO: 758074 - DNA, 82 bp, Homo sapiens
aaagtcttgacacagatagtcttcttattgctgcttaacagagcgttccaaaaagaggactctccagctactttttattgca

SEQ ID NO: 758075 - DNA, 100 bp, Homo sapiens
agatggcgggacggctgccggcctgtgtggtggactgtggcacggggtgagtgctccagttgtaacatctaccactcaggaaaagccgaaggatagcgat

SEQ ID NO: 758076 - DNA, 74 bp, Homo sapiens
cagccatggtgcattgcagttgcgtgttgttcagaaagggctgggtataagtaagcaagaagagggcctgggag

SEQ ID NO: 758077 - DNA, 100 bp, Homo sapiens
tgctgtccccgcgccctgtccactggactcccgagacccttggaacccagacttaattcagtgcacaaatgagatgaatgtgaacatcccacagttggca

SEQ ID NO: 758078 - DNA, 100 bp, Homo sapiens
gattgctggttaccagtggccttccaggttgttatctgcaggtgtggcaggttgcagaggacagtgggtgaggacgcttgagcggaagttagaagcaaaa

SEQ ID NO: 758079 - DNA, 82 bp, Homo sapiens
gtttattggtgaaaaagaattccagaccccagttattaaagcttttggcatcttgaagcgagcggccgctgaagtaaaccag

SEQ ID NO: 758080 - DNA, 75 bp, Homo sapiens
gagggaaagctgctcttgaacctcattagccagataagtatgctgttcgcttcatccctcatgagaatggtgtcc

SEQ ID NO: 758081 - DNA, 97 bp, Homo sapiens
ggtgttccacccgacgcatgagtggcaggcccttcagccaggtgtcatggagaaactccagctgggcccagagattctgcagcgggaaaatccaagg

SEQ ID NO: 758082 - DNA, 51 bp, Homo sapiens
caccgactactgtcagcagctgtgccagttgatgcggatgaaattaaaagg

SEQ ID NO: 758083 - DNA, 100 bp, Homo sapiens
ccagccatgtctccagcatgtctgtacctcaggctgaggtgggcatgctacccagccagagcttcattgcccatgccattcgccactgctaccagcctgt

SEQ ID NO: 758084 - DNA, 90 bp, Homo sapiens
gtctaccagtttttgtctccagagacccaatatctaacagtgatacgccttcaccaccacctggtttgtcaaaatccaatccagtcatcc

SEQ ID NO: 758085 - DNA, 101 bp, Homo sapiens
cccaaccccagccgaccttgagctccaggagttcgtctcttacgtctgcggaagtgcagctgcctcagttcttagcgcagaaatgcactcggtgatggaaa

SEQ ID NO: 758086 - DNA, 100 bp, Homo sapiens
gtcttggtcaccggggaacagctacgtgaagtacatgcgagaagccacgccctatgtgaagaaaggatccccagtatccgagattgggtgggaaacacct

SEQ ID NO: 758087 - DNA, 90 bp, Homo sapiens
gcgttggagcgcggaaatctggaaccgggatggcgacgtctacactgagtcggaggcgaagggagagtcccgtattctcagagtaaaagt

SEQ ID NO: 758088 - DNA, 75 bp, Homo sapiens
actgacctgtaaatcatcctttaggttgggggccgtcccgctcctaaggcaggaagatggtggccgcaaagaaga

SEQ ID NO: 758089 - DNA, 100 bp, Homo sapiens
aagtttaatcagacctgctcacacttcagaatagagaaggttaatccctatatcctgaagaagaacatgatcctcatgacaaatcatttctatgcagcga

SEQ ID NO: 758090 - DNA, 80 bp, Homo sapiens
ctgttgaaagcgacaagtggaggcgccgctctagcggccgggactctgaactatggcggagaatggggtactaagagaaa

SEQ ID NO: 758091 - DNA, 100 bp, Homo sapiens
ccaatacttacagtaatctcatattaacagcctcccaaagtgaaatgcctgaccaagatctggcaccccaacatcacagagacaggggaaatatgtctga

SEQ ID NO: 758092 - DNA, 90 bp, Homo sapiens
actgccagctggaaccagaccatagcctggtatttcaacatcagatattctgtcttggattaaacaagaagaagagcctcaggttggggc

SEQ ID NO: 758093 - DNA, 100 bp, Homo sapiens
gccgcggatccccaagcccgccacgccgcccagcccggccccgcccgcgccggaagagccacgccggaacagaggcggctgagccaggaacgggatcgcc

SEQ ID NO: 758094 - DNA, 75 bp, Homo sapiens
gccacaaaggaggggatacttgatcctgataaacgctctatagtatcaaccctccttgctcttatggatggatta

SEQ ID NO: 758095 - DNA, 100 bp, Homo sapiens
gtaccccctgctcctgcagagcatcgggcagaacacagctgatcacctgcctttccagaccggagacgggcggcaagtttgaagtcgacacccagaggcc

SEQ ID NO: 758096 - DNA, 97 bp, Homo sapiens
aaggagatgggaactccagatgtgcgcattgacaccaggctcaacaaagctgtctgggccaaaggaataagggtatttggtttcccagtccactata

SEQ ID NO: 758097 - DNA, 101 bp, Homo sapiens
tcgaagcgagggtctgaagttcacgactactagaaggggaggggagtggaaaggctctcagtgaaaaagccaggcccagacatgtccgtccttgtaagtta

SEQ ID NO: 758098 - DNA, 82 bp, Homo sapiens
ttctgcggggcatccagaaggtggcgatgttggtccaagggaactgggtggtgaagaggaccatggccaacctggagcgcac

SEQ ID NO: 758099 - DNA, 100 bp, Homo sapiens
ccaagagaagagcacagaagagggagaagtggctgctctgcgcctcacggccagatcccagggcagctggtggaatttttgaagaaaatggaatctcgag

SEQ ID NO: 758100 - DNA, 80 bp, Homo sapiens
atagctccagaaggaggggaagcatttctagtggcgtttcttacgaagagtttcaagtgatttgcatgggcaactgattt

SEQ ID NO: 758101 - DNA, 76 bp, Homo sapiens
accgagcacaaactccacgaagccaacgcccagatgttctcagtgcagctgagtcttggtgagcagacatgggaat

SEQ ID NO: 758102 - DNA, 83 bp, Homo sapiens
ccctgctgagcccggagaaatccgtgcagatccagaatgcgctgggtggtccacaattagtgaaaatctgtttgcaaccactg

SEQ ID NO: 758103 - DNA, 75 bp, Homo sapiens
gttcaagcgaaaacatgaccgctgagcccatgagccgtgctggtatagaggactctaagaagtggggcatgctgt

SEQ ID NO: 758104 - DNA, 100 bp, Homo sapiens
aggacctgcgctaagccccacccagccccccagtgcccgtcttcctgtcccatctgctcagagagaggtggagcgcgacaacctggccgaggacatcatg

SEQ ID NO: 758105 - DNA, 88 bp, Homo sapiens
gtggaatatgccaaggaaaaactggagagcttcatcaaaaatagtgatagctttgataatgacaacactgcagctgaaggaggagttg

SEQ ID NO: 758106 - DNA, 75 bp, Homo sapiens
ccagatccatttacactttacagaggatacgaagcgttttcggcttcctgcccggagctgtgcagcaaacagtcg

SEQ ID NO: 758107 - DNA, 100 bp, Homo sapiens
ggggtcagtgatggagctgcttcaggctgttcgctgctatgaatctctaatcttaaaagctgaaggaaaagtggagtctgatttcttttgtcaattaggt

SEQ ID NO: 758108 - DNA, 105 bp, Homo sapiens
cggatgtgaggcgatccgctggcgctagtctgaccctccgccaggcaaaaggaaggctcatggatttgagatcttatgctccaaatgtagcccacatttttctga

SEQ ID NO: 758109 - DNA, 100 bp, Homo sapiens
gtttgacaagacgcggctgccgtacgtggccctcgatgtgctctgcgtgttgctgggcatcaagcatgatggaaccatgtgtgatacctgccgccagcaa

SEQ ID NO: 758110 - DNA, 98 bp, Homo sapiens
aggaaccagttggtggcctgggcagcctgctggaccctgccaagaagtcgcccatcgcagcagctcgcaaacggggattcagcgtccgatcctttgga

SEQ ID NO: 758111 - DNA, 100 bp, Homo sapiens
gaatgagaccctggtggagtttgctattgaaggaagaggcccagcagaagggactcgctgagccaccccccgccccactccatgttggctgtgctctcag

SEQ ID NO: 758112 - DNA, 83 bp, Homo sapiens
gcccttgttcccccaaatgtctgactctgactctcggactgagaaacgcaagaaggaagaggcccagcagaagggactcgctg

SEQ ID NO: 758113 - DNA, 71 bp, Homo sapiens
aagacggaggtcctctttccttgcctaacgcagccatgtcacctggaacctctatgactccaagtagtggg

SEQ ID NO: 758114 - DNA, 101 bp, Homo sapiens
agacagttcgagtcttgaagaaaataaataagcctgggaatatgattatggctttcagcaacttggcagagagaatcaagtgttctggaccatcaatggag

SEQ ID NO: 758115 - DNA, 101 bp, Homo sapiens
ctgtggggaagtctcaagactatggccggattctcctcaagagcttatacctgggttactaggtgtctttcagaagctgattgcatccaaagcaaatgacc

SEQ ID NO: 758116 - DNA, 51 bp, Homo sapiens
caacaccaagtgcatcaccatccccagatgctggctccccgtcccctgtcc

SEQ ID NO: 758117 - DNA, 75 bp, Homo sapiens
ccgcgttagttccgagcttgaagtcaaattcagatcaggaaggaggtggaaagaaaaagaagaaaaagaaggaca

SEQ ID NO: 758118 - DNA, 83 bp, Homo sapiens
ggcttgtcctggctcttgccctcatcctggttctggaatcctcagttcaagatgtgtcttgctgaatcagggctctcttatcc

SEQ ID NO: 758119 - DNA, 73 bp, Homo sapiens
gttatgaatgctttagataacagagcccaagaagatgaaaggattgttcttgttgacaacaaatgtaagtgtg

SEQ ID NO: 758120 - DNA, 101 bp, Homo sapiens
gtccgcgaggatgcgtgttcgcgggtgtgtgctgcgttcacaggtgtttctgcggcagagtgtgaacatggctacgcctcttcattcccgtccatgccgag

SEQ ID NO: 758121 - DNA, 99 bp, Homo sapiens
ttagaagtgcttaaggaagagtgatgaaggcactggtgaggtggattgatgatgaatcttctggcacacctggagcaactccagaacacagtcgtgagg

SEQ ID NO: 758122 - DNA, 100 bp, Homo sapiens
tgagactcctgctcagtgtagcattaagcttcagaggatgattccgaagaagacggagaccataacaggacatttgatattgcctaacttcatataagac

SEQ ID NO: 758123 - DNA, 80 bp, Homo sapiens
ggaatattggggggctcggctgcagacttggccaaatggacgggactattaagctttggcagcatgtaagcagctgtttg

SEQ ID NO: 758124 - DNA, 75 bp, Homo sapiens
ctatccagtacatggtatggagggaaatgcaggacactctctgcccaggtactccaaagattcaggtttactcac

SEQ ID NO: 758125 - DNA, 75 bp, Homo sapiens
ctacggtggccagagcagcatgagtggatacgaatttctacaagtgtgaaagaattagaaaacttcaggaacttg

SEQ ID NO: 758126 - DNA, 100 bp, Homo sapiens
gaggaggtgatggtggatataatggatttggaggtgatggtggcgacgtccctgagaccaactacctcttcatgggggactttgtggaccgtggcttcta

SEQ ID NO: 758127 - DNA, 100 bp, Homo sapiens
tattgctgtgggtgctgggacttcccgtccgcggcgtggaggaacactctgctccagccaaggtggtgagggcagctgttcctaaacagcgcaaaggcag

SEQ ID NO: 758128 - DNA, 98 bp, Homo sapiens
ttaagtgaaagaagtggaaacacccctaactctcccagagcttggggcttccttggtcgcacccaccacctgcctgcccactggtcagccttcaggga

SEQ ID NO: 758129 - DNA, 96 bp, Homo sapiens
tcagctgtttgcgttgactggagtccagcctgccagacagaaagttatggtgaaaggaggaacgctaaagggcaaacttgaagataaatcttttga

SEQ ID NO: 758130 - DNA, 96 bp, Homo sapiens
cgtcgccaggcacaagacacgtcggatgttgcagcagagccagcagctagcgcagccttggtcatctataatttcctgagcctgtgctatgagtac

SEQ ID NO: 758131 - DNA, 75 bp, Homo sapiens
atgatatgcggctatgcctgcctcaaagggacttccaaggaagatgccatgaaagcttacatcaacaaagtagaa

SEQ ID NO: 758132 - DNA, 98 bp, Homo sapiens
ctataagttcttcttcaagtctatggacgacgatttcggggcaatagtctgaccttgattgaccttcccggccatgagagtttgaggcttcagttctt

SEQ ID NO: 758133 - DNA, 73 bp, Homo sapiens
ccaaacagatgttctgggtgcgagcccggggctatattggctgaccccgcactacatctacccaccagccatc

SEQ ID NO: 758134 - DNA, 80 bp, Homo sapiens
cctgatcatgcagacatctccaactgtgggaactctttccagcttgtgtctgattcttgttggatctagccttggagggt

SEQ ID NO: 758135 - DNA, 101 bp, Homo sapiens
caggcgctctttccaccccacgacgcgcgcccgcagcctcgcgcgcccagttgccacctcggtgcgatttggtcaacaaaagcgataccaagattggttcc

SEQ ID NO: 758136 - DNA, 76 bp, Homo sapiens
gaagaagatgaagatgaggatgaggatgaagaggatgacggacaagtgtttccggaagtgtatagggaaacctggg

SEQ ID NO: 758137 - DNA, 98 bp, Homo sapiens
ttccggcttgccgcggcctgccgcaatggaaacatctatattctgagaagaaatcatttctaccagttcggagagatccggacgatcactgttgtgca

SEQ ID NO: 758138 - DNA, 83 bp, Homo sapiens
ctgaagtcggtgtctgctgcgttcacggcaggattcggttaggtacgaggaacagcaaattcaggaaaaagtggcgacctttc

SEQ ID NO: 758139 - DNA, 75 bp, Homo sapiens
tgaagctccccaaggagctgcagagttacactgttagaccttatgatagccaagataacgagtgatgagccactc

SEQ ID NO: 758140 - DNA, 80 bp, Homo sapiens
gaaaatacaaatcacacgcataatggatgaaaggaaccgacagggttctccaaaaaatgtggaatcctttgcatctatgc

SEQ ID NO: 758141 - DNA, 75 bp, Homo sapiens
ctgagactcctgctcagtgtagcattaaggtgtaaagatttctctctgtgttactggaatccctattggatgctg

SEQ ID NO: 758142 - DNA, 75 bp, Homo sapiens
tacgtgggtctggagctgactgccgtcctgacacgtcctagagctgcaagcagagtaagaaggcagtgctttcca

SEQ ID NO: 758143 - DNA, 50 bp, Homo sapiens
cacacacaactccaagaagaactcacaagtgtctttctcgagaagcaggt

SEQ ID NO: 758144 - DNA, 98 bp, Homo sapiens
tgctgctgctgctgcccgcgtccgaggctcgcgggcggcgggcccgggttcgtgctggccgtgggcagcgccgtctttgatgccatgttcaacggggg

SEQ ID NO: 758145 - DNA, 98 bp, Homo sapiens
ccaccaaaaggctgtaaatgatgaaacatgcaaagctagccacataacatcaagtgtctttccttcagcctctctcgtcgaggctttgggcaatccaa

SEQ ID NO: 758146 - DNA, 75 bp, Homo sapiens
gagacagctgactactccatccgagaagagattgtggacctgtatgtctgtcttttatgtggcagtggcaatgat

SEQ ID NO: 758147 - DNA, 80 bp, Homo sapiens
atcactctcccatctctgcttggtacctttggtcccagctagtccacagggaccagcagtgccatggaaggatttaacat

SEQ ID NO: 758148 - DNA, 100 bp, Homo sapiens
agacctcttatttgtattacattgaattagagaaaaggggccttgctgttcaacaacatattttctatcgtgcctgcgatcttaatgggatgcagcagag

SEQ ID NO: 758149 - DNA, 100 bp, Homo sapiens
ccgggtgtccggccgtgtcccgaggaagtgcaagacccggaacttggcattagaattcctcgaccactaggacagggaccaagcagattcatcccagaaa

SEQ ID NO: 758150 - DNA, 76 bp, Homo sapiens
caggaggacctgcaggaggacgcagacggatcctgagattcctgaacgcctctgcgaacaaactggaaagccttcc

SEQ ID NO: 758151 - DNA, 75 bp, Homo sapiens
ttaactgccttgccagacgaattctctccagctgtttcccaagcgcacaggtgggcaaacgcagaggcgggaaca

SEQ ID NO: 758152 - DNA, 82 bp, Homo sapiens
agattctgcgcgtcaacgacaaatccctggcccgggtgacccacgcggaggccgtcaagtatgacttctctttggaaaagaa

SEQ ID NO: 758153 - DNA, 109 bp, Homo sapiens
tggcaagttatggcaatgtgatcgtcatcacagtcaactatcgacttggagtactcgatgaatgatggaccactctgcaaatgcagcgcaaaggcaagacgcacaggaa

SEQ ID NO: 758154 - DNA, 82 bp, Homo sapiens
aactggccctggactacctctgcaggagcaggccgggctctcgccatgggtcactgtcgcctctgccacgggaagttttcct

SEQ ID NO: 758155 - DNA, 82 bp, Homo sapiens
ctcccgagcagctgggattacagggtggcccagttgaaatccttcccttcctctaccttggaagtgcctaccatgcatccaa

SEQ ID NO: 758156 - DNA, 80 bp, Homo sapiens
accactggagccagccggtttgcctcggcagccaaggagggcgttttggctacgggcctccacctccaccgccagatcag

SEQ ID NO: 758157 - DNA, 75 bp, Homo sapiens
gaatatcttggtggaggctccgcactagatctatgcctggctctctggctatgaaaatcctgtggtgtctcgaat

SEQ ID NO: 758158 - DNA, 90 bp, Homo sapiens
aaagatggaaactttggacttcaagaacttggattaaagaacttgacaggaaattcagttcatgaagataagaagtttcttgacaaatac

SEQ ID NO: 758159 - DNA, 78 bp, Homo sapiens
cttgacagtcttcggcaggaaggttcacaagtttttaaacagaaaccgggatcagctggaccctgctgtggtggagat

SEQ ID NO: 758160 - DNA, 75 bp, Homo sapiens
gaagcagggatgactctgggagccacagatgaagatatccttgctaaaggaaaacagtccatcaggagtcaggct

SEQ ID NO: 758161 - DNA, 83 bp, Homo sapiens
ctctttttcgttgcagccactgaagatcctggtgtcgccatgggccgccgccccgcccgttgacctgcctagagctggaacgt

SEQ ID NO: 758162 - DNA, 82 bp, Homo sapiens
gtaacaacaaccttatcccggccccaaactggcagggtctttatcccaccattagagagagtcattgaaattatgagactat

SEQ ID NO: 758163 - DNA, 101 bp, Homo sapiens
cgtggatttatcgctgccacggtctgcgtagctccagaggtttaaccataggatagagaaaccagcagtgaaaggactatggatctggttttggaaatgtg

SEQ ID NO: 758164 - DNA, 93 bp, Homo sapiens
cgagggtggggtcgacgacgaagacagcggagaggagagcggtgcggaggactgagacaatgcagatcttcgtgaagactctgactggtaaga

SEQ ID NO: 758165 - DNA, 100 bp, Homo sapiens
ctcagtgcactttggagaggacggcgcctcctacgaggcagaaatcagggagctggaggccctgcggcaggtggcccgctgcaagcagctgatctgtgac

SEQ ID NO: 758166 - DNA, 100 bp, Homo sapiens
aaaaagcgatgactgtgaaggagttcaggcagctggccaacagtggcaactgttcagcatgagaagctggagtgacatgcgacaggaggtgatgtttctg

SEQ ID NO: 758167 - DNA, 83 bp, Homo sapiens
caactaactccattcttaattggtgtcgtgaaaactacccctaaaagccaaaatgggaaaggaaaagactcatatcaacattg

SEQ ID NO: 758168 - DNA, 74 bp, Homo sapiens
gtcttgcctgtgtcccacttgttcgcggcctatagtgccaccatggcaactgcaccatacaactactcttacat

SEQ ID NO: 758169 - DNA, 82 bp, Homo sapiens
ctggttaatcaagaattctctatttctgctccgtcatccatgccactgaaatctggcattttttaaagtttgcgccccacaa

SEQ ID NO: 758170 - DNA, 100 bp, Homo sapiens
ctttacgatgtcacttgggaagaagtccaaggcttgcgagaaggtcatttccgtgggtcaaacggtcatcacgaagcatcggaacacccggtattacagt

SEQ ID NO: 758171 - DNA, 100 bp, Homo sapiens
ctggacccgtgaagtcttcagctcctgcagctctgaagtggttctgctcccaagcctgtgagcaagatgcgcatggccaccccgctgctgatgcaggcgc

SEQ ID NO: 758172 - DNA, 89 bp, Homo sapiens
agataattcagagatctttctcttctccagaaaattttcagagacaagcagtgaatttttccctagattggtgtaaacagccagacgtg

SEQ ID NO: 758173 - DNA, 100 bp, Homo sapiens
actgacctgtgcttttgaggacccagatgtcaacatcaccaatctggaatttgaaatatgggttggatgaaagcactggcatggtggtcaacagcccaac

SEQ ID NO: 758174 - DNA, 100 bp, Homo sapiens
cggcgggtcgtgggggctgactgtcgctctgcctttgacaggagaggctgcttcttgtagaggtggaacacctgcagcaggagactgctgctctgaaaaa

SEQ ID NO: 758175 - DNA, 98 bp, Homo sapiens
gccttgggtttctttcttaaaggactgatttttagaactccacatttgaggtctgctgagaacagacccagtccctgaggaaggagaagatgttgctg

SEQ ID NO: 758176 - DNA, 96 bp, Homo sapiens
gcaacctctgccttccgggttcgagtaattctcctgcctcagcctcccaagcagctgggtctacagatcttaccaatatatttgagtccttcctgc

SEQ ID NO: 758177 - DNA, 86 bp, Homo sapiens
ctccgagcgcaaggacagcgcgaggtccgcgcagcccagcgcagccatgaagctcttcgtgggcggtcttgactggagcacgaccc

SEQ ID NO: 758178 - DNA, 100 bp, Homo sapiens
gtgctcgaccgcgaatcccgtgtgcagtcgccccgcgccccgcgcgacccttcgggaaacccttttccaaagagaaatgaagaagaaaactgtatgtacc

SEQ ID NO: 758179 - DNA, 75 bp, Homo sapiens
aaagcgaaatgggcacaccacaggtccccaggatcggctgagagccctggtggtgatccccatcatcttcgggat

SEQ ID NO: 758180 - DNA, 89 bp, Homo sapiens
tagccacatgtcctctggagtgcccactcccaccaagagattcaggggtcagtttacttcataaaaaatcattagaaaaggaagaatta

SEQ ID NO: 758181 - DNA, 82 bp, Homo sapiens
atatggtgaactcattgtcttaggctccgccgcatgcaagagatgattgcaaggatgcaggcgcagatgcagatgcagatgc

SEQ ID NO: 758182 - DNA, 83 bp, Homo sapiens
aacatcgtgggggatctcttacggaaagtaggggattggatagctttagtcaaagcagctgctgcagctgcagccaagaacaa

SEQ ID NO: 758183 - DNA, 100 bp, Homo sapiens
ggagacctacctgcggcgtcggcagctgctgctccgagtggccctcatggagcacagcaactgctcgtcggagcccggcttctgggcacaccctcctggg

SEQ ID NO: 758184 - DNA, 90 bp, Homo sapiens
agagtgaatgccagtagtttcaacacaactacctttgtggcccaagaccctgcaaatcttcagattatatctgggtgttggcacccagcc

SEQ ID NO: 758185 - DNA, 50 bp, Homo sapiens
ctttactgtggccaaggaccctatgagacaaaaggacccagtgaaaggaa

SEQ ID NO: 758186 - DNA, 100 bp, Homo sapiens
ccggcggacacgcagcctcgcggagccgggtgtgggctgagccctgcctgattgatgctgccaaggaggagtacaacggggtgatagaagaatttttggc

SEQ ID NO: 758187 - DNA, 78 bp, Homo sapiens
gtgacccctgccctcgtgtgcctcagtcagctgctcaccaagagcgagcacttttcatttttgggtattaacaatcag

SEQ ID NO: 758188 - DNA, 106 bp, Homo sapiens
ttctgctgcttcgaaagctggtaaggcctgagggatcagtgtccttcagggatgtggctatcgatttcagcagagaggaatggcggcacctggacctttctcagag

SEQ ID NO: 758189 - DNA, 50 bp, Homo sapiens
cccgtcgtcctggtgctgcagcggtacctactgtcaacaacgggaagtgg

SEQ ID NO: 758190 - DNA, 125 bp, Homo sapiens
ctaaccaactgggttcctggcccgatggcatgttgtccatggaacaagtttctcatggcactcaaaataggcatttgatgaagcaattgctgaattggatacgctgaatgaagagtcttataaag

SEQ ID NO: 758191 - DNA, 98 bp, Homo sapiens
aacaatcgtggctacaaaaatcaatctcagggctacaaccagtggcagcagggtgtggtgaagcagtattttccaatttgaagattcatttgaaggtg

SEQ ID NO: 758192 - DNA, 50 bp, Homo sapiens
ctcaggaaaggccagtaacaatccagacaactacacctttgcccaacctg

SEQ ID NO: 758193 - DNA, 137 bp, Homo sapiens
gtgaaggtccggggcttgccctggtcttgctcggccgatgaagtgcagaggtttttttctggctttctcctgtttctcagaggatttatcaattatgcaaaagttcggaagatgccagaaactttctcaaatctccc

SEQ ID NO: 758194 - DNA, 75 bp, Homo sapiens
agattgttcctaaaccagaagaggaggttgcccagaagaaaaagggccattcacatgttaaactgcagcttgcag

SEQ ID NO: 758195 - DNA, 90 bp, Homo sapiens
gacgaggaagtggggacaccagcagcttaatagatccagacacttcattaagtgaattgcggagacagaagagatgggtgatgaagaagt

SEQ ID NO: 758196 - DNA, 112 bp, Homo sapiens
gagcacataacggggttcgggtgtctcgtgtgtgaacatcacagatacagaattcgttgttgggaaggactggggaaacagctgtaacatttgccaccctcagaagctgctg

SEQ ID NO: 758197 - DNA, 82 bp, Homo sapiens
catttatgaagttttaaaggatgatgaacgaaggcagaggattttttatcaagcagaaatgcatcgaacaacgagaatcaag

SEQ ID NO: 758198 - DNA, 51 bp, Homo sapiens
cagctttagaagtcatccttatccatccttttacaatccctgctattattc

SEQ ID NO: 758199 - DNA, 82 bp, Homo sapiens
ctatttatgttgcacaagattgtacaggaaggagattatactacccctgctactctgcagcgtggacatccttgcatgtcac

SEQ ID NO: 758200 - DNA, 75 bp, Homo sapiens
ggaggatgatttcatgtgcgatgatgaggaggactacgacctggatgaagatgggtttcaagaactaaatgagaa

SEQ ID NO: 758201 - DNA, 100 bp, Homo sapiens
aaagaagtaaaatattgtactttctccaaagatccttcaaaacctattccaggagtctactcttcatcttgtgttgagacttcgtggtggtgctaagaaa

SEQ ID NO: 758202 - DNA, 100 bp, Homo sapiens
acggacatccaggagcccatgttcagtgctgcccgggaacagaccttctctgggggctacgtgcacgtgctgaagggtgtgctctcagacgacctcctcc

SEQ ID NO: 758203 - DNA, 88 bp, Homo sapiens
ataacctaatcggcttcatgtcactcgccacactcacagatcagttgtgtggccgggaccctactctcactgatgagctgctgaatat

SEQ ID NO: 758204 - DNA, 83 bp, Homo sapiens
gtcagcctcccgccggccgtctccttaacaccgaacaccaaaatgatgcatcctgttgccagcagtaatccagctttctgtgg

SEQ ID NO: 758205 - DNA, 101 bp, Homo sapiens
ctgccctgagacggtgtcccgccgaaaggtgttggggcgatgtttcctgactgtggtgcaagtccatttccagtttttgactcatgcgttacagaaggtcc

SEQ ID NO: 758206 - DNA, 83 bp, Homo sapiens
ccggcgcgggcactgctttccactcggctcctgtcgtccgttctctcaggctcccgttcagtgcctccggagccagcgtggtg

SEQ ID NO: 758207 - DNA, 74 bp, Homo sapiens
tgacaccatcctggaagtctgcgagtgatagacagccaagcagagaaactgaaggagcttgacaaggagatccg

SEQ ID NO: 758208 - DNA, 121 bp, Homo sapiens
gccgagatgtctcgctccgtggccttagctgtgctcgcgctactctctctttctggcctggaggctatccagcgtttacccaaggtccagcctagcccctaggcaccatgtcggacagtga

SEQ ID NO: 758209 - DNA, 50 bp, Homo sapiens
gaaggtcctgagattgtggactgtgacggtagagacggggtttcaccgtg

SEQ ID NO: 758210 - DNA, 80 bp, Homo sapiens
cgacaaaatgcaaaaaaggaggccaaagactttttcaaaagaatgctgaaccgggagctgacacacctctcagagatgag

SEQ ID NO: 758211 - DNA, 105 bp, Homo sapiens
agcacatcgagaccgcttaccgcatctggctggagccctgcattcgcggcgtgtgcagacaatgcagatcttcgtgaagactctgactggtaagaccatcaccct

SEQ ID NO: 758212 - DNA, 90 bp, Homo sapiens
ggcgcgcgcagctgacggacattgaggctggatgctgcgatcccgcaggctctgctgccatgaaggtgaagattaagtgctggaacggcg

SEQ ID NO: 758213 - DNA, 75 bp, Homo sapiens
cctgggccgagagggccacctgggcacatcaaggtcttgtctaatggcaattgaaggaacagactaaaaatcgtg

SEQ ID NO: 758214 - DNA, 100 bp, Homo sapiens
ggagccgcccgggctgatcttcaataaggtggtgggagtgaaggacgatcggatgggggaagagatttgtgcctgcattcggctgaaggacggggaggag

SEQ ID NO: 758215 - DNA, 100 bp, Homo sapiens
tgtaaattacggaagatcatttatatacacatggacagtcattttgtttactcattcagccctgttgcaggtcccaataaactcttcataaggttgacag

SEQ ID NO: 758216 - DNA, 98 bp, Homo sapiens
ttgacagcatcgatgctagacagacagccatttcataattctgaatcatgtctgataacggagaactggaagataagcctccagcacctcctgtgcga

SEQ ID NO: 758217 - DNA, 74 bp, Homo sapiens
caacagcacccagagcctcatcttttgatacaaccaagtcggatgggcagtttaagaagacagccagtaacagc

SEQ ID NO: 758218 - DNA, 75 bp, Homo sapiens
ctgcgcgcgggagttcgaggccctgcggagctgcttcgccgctgcggcaactttgtccctaacaaaatgtggaag

SEQ ID NO: 758219 - DNA, 75 bp, Homo sapiens
ggaaaaggctaatggcacaactgtccacgtaggcattcaccccagcaagaacctgtctccagagaagattttcca

SEQ ID NO: 758220 - DNA, 97 bp, Homo sapiens
gagaccaagaagcctggcatgaacttgcagaactttacatcaatgaacatgaattgcaaatagaagagtcttccaaaccagtgaggctatcacaaca

SEQ ID NO: 758221 - DNA, 100 bp, Homo sapiens
tggtgcatctgtttgccggaggcaacccctataccacccgacctaaccgtcggggtgatacttggcatgatcgagatcgcattcatgttactgtgcggag

SEQ ID NO: 758222 - DNA, 101 bp, Homo sapiens
caaatgggtatctgaaaaatggatcagaaagccaagacgaacttgaccattatatcaaccaccttctgcaaagcacatcgttgaggtcctatctgcctcct

SEQ ID NO: 758223 - DNA, 100 bp, Homo sapiens
aggaagaggagccgagcatctgggccgagaccattccgtatggagagccgggggcgagaggtcaatgatcttaaaagaaaatctccttcagatctttgga

SEQ ID NO: 758224 - DNA, 51 bp, Homo sapiens
aggatggaacacttcagtgcattcaaggattcagtggtcccaatttaaagg

SEQ ID NO: 758225 - DNA, 48 bp, Homo sapiens
aacgagaaggcgatccataaggagagctctcggagcagattcagaggg

SEQ ID NO: 758226 - DNA, 101 bp, Homo sapiens
agcgcagtgacagcgcctcaccgccaccagctcctggaccaccatggccaagaaccgcagggacagaaacagttggggatgtacagttacccagcacgtgt

SEQ ID NO: 758227 - DNA, 51 bp, Homo sapiens
caagggacttgcttttatttcggccgaatcccgccgccgctcttcctctga

SEQ ID NO: 758228 - DNA, 76 bp, Homo sapiens
cgccgcgtccttggctggcgtaatagcctaacatggcagaccagagacagcgctcactgtctacctctggggagtc

SEQ ID NO: 758229 - DNA, 98 bp, Homo sapiens
caatgtagagctcatagcaaaaaatgacttgcgctttatagatgctgtctataaggaagagagaagggcacagttacctaagtatcaacgtaatcttc

SEQ ID NO: 758230 - DNA, 75 bp, Homo sapiens
aagttccatcccacctttgagtcaggaataagacgagttggaagaagacctgatcaacaacttcagggtgaaggg

SEQ ID NO: 758231 - DNA, 101 bp, Homo sapiens
ggcgacagcggccggggcgcaggcgcccgtgcggaatggcagcctcccaaagtgaaatgcctgaccaagatctggcaccccaacatcacagagacagggga

SEQ ID NO: 758232 - DNA, 50 bp, Homo sapiens
ataaagatgtttccggaaagatgaacagaaatgctttgaacatagtgaag

SEQ ID NO: 758233 - DNA, 100 bp, Homo sapiens
gctgaggatctttctaagcaaacagaaattgcttatggaacattagactctggctccactaaagagtttttcagggtttgtaaaagaatggacttggtct

SEQ ID NO: 758234 - DNA, 75 bp, Homo sapiens
ttttcaggaccaaaattgtggaaaagtcactctgcagttgaccaagctccaccagttggccatgcagcaaacccc

SEQ ID NO: 758235 - DNA, 101 bp, Homo sapiens
gaaaaatcgaatgattcgactgcatcctgatggaacagttctctatggactccggtttcctttacctagtcatcctgctgcacctcctgaacatcttaaag

SEQ ID NO: 758236 - DNA, 90 bp, Homo sapiens
ctctacaggagaagacgagatcgccccgatagtttgagagtaaatgggttaccagaggaagagctaagatggagaacaaggtcttcagtt

SEQ ID NO: 758237 - DNA, 120 bp, Homo sapiens
gtgcgccggcggtggcgcctgcggacctaactagctccaggttaggccgagctttgcgggaaagcagcgacaatgcagatcttcgtgaagactctgactggtaagaccatcaccctcgag

SEQ ID NO: 758238 - DNA, 98 bp, Homo sapiens
tcggctggacagctcgccctgttcgctctggcgtggagattggtgaaagcgtgagaggggaagatgtctacatcatccagagcggctgcggggaaatt

SEQ ID NO: 758239 - DNA, 100 bp, Homo sapiens
ggaggccgtccagcagatggcggatgccctgcagtacctgcagaaggtctctggagacatcttcagcaggccatgggtgtatatggagccctcaccaaag

SEQ ID NO: 758240 - DNA, 95 bp, Homo sapiens
attgtggcattgagagaagctttgattactccacaggatccgctgaacataggatgttgccacaaaatctacctcgtgtatttttctctttcact

SEQ ID NO: 758241 - DNA, 100 bp, Homo sapiens
cgggaagccggacttcagggcctctcggcccgtgggcttctccccgagtctccccgagtcggttggcattaagaggtgctggagaatctggtaaaagcac

SEQ ID NO: 758242 - DNA, 100 bp, Homo sapiens
cccatccactgccgcggccgtgggcccgaccgcggggaccccaacacagatgtacacacggtggcatcacttcttaagctgtacctccgagaacttccag

SEQ ID NO: 758243 - DNA, 102 bp, Homo sapiens
tttgtacggcttagaggacttccctttggatgtagcaaggaagaaattgttcagttcttctcaggctcctggcgacctccctgctgcagggggccctcccag

SEQ ID NO: 758244 - DNA, 88 bp, Homo sapiens
gccccggaatgacctgtcgcctgccagctctggcacgtgtggttctcaaatataggcattctgatgggaacttgtgtgttaaagtaac

SEQ ID NO: 758245 - DNA, 100 bp, Homo sapiens
ggggagcgtccggagctagctggatcctctaggcagaaagctctgggtgtgcggcagtaccatgtggcctcagtcctgtgccaacgggccaaggtggcga

SEQ ID NO: 758246 - DNA, 100 bp, Homo sapiens
gcaaaagtatctcatatgaccagtgatgcctgtgaggagccaccaacatttgaagctatggagctcattggtaaaccaaaaccctactatgagattggtg

SEQ ID NO: 758247 - DNA, 100 bp, Homo sapiens
gcagtgttgcctggctataccctgaagagccaactagacatcttgagcctcctgaaacagatcacgcaggaggccggggaattcatgatcacatttccct

SEQ ID NO: 758248 - DNA, 100 bp, Homo sapiens
cttcatagactcccaaagggaaattcttgggcttacggcaaccagctcctttttctgatgaaattgaagttgactttagtaagccctatgtcagggtaac

SEQ ID NO: 758249 - DNA, 80 bp, Homo sapiens
cgctccgctcgtcccgctcgtcatggcctacccgggatacggaggagggcctccttttagaggactcagaagaagaagaa

SEQ ID NO: 758250 - DNA, 100 bp, Homo sapiens
agcttggttggtggtaccctaaaattagggcatgattaaggcacgcttaaaaaggcctcttaagagccttgatggtgctctatatgatgatgaagatgat

SEQ ID NO: 758251 - DNA, 74 bp, Homo sapiens
gaggtgtacgagaagccggtacaggtgccctgcggacacgtagtttattaaccacttaacctctcagaactgaa

SEQ ID NO: 758252 - DNA, 83 bp, Homo sapiens
attacattctctcggccagcgcctccgcgggttttggccaaattgggcgagggcacaaaataaccacttaccccttctcaccg

SEQ ID NO: 758253 - DNA, 87 bp, Homo sapiens
ctggaatggaggtcttatgagctgctattgaacacggcaggttcgagaacttgtcttggacaattgcaaatcaaatgatggaaaaat

SEQ ID NO: 758254 - DNA, 74 bp, Homo sapiens
ctgccaagcctacgtgaaccaaggcgagaacctattcgacctcacattactactttgcgcaaatacacatacgg

SEQ ID NO: 758255 - DNA, 73 bp, Homo sapiens
aatgcaccctccttccacctggccaggaatcaggcactcaaggagttgcccctggtcctgtaattggacttca

SEQ ID NO: 758256 - DNA, 100 bp, Homo sapiens
cactactcttggaatcaaagataaatccaaatactgcatatcagaaacaacaggtaaagatgagcccagcagctacacatgtacaacttgcaaacagcca

SEQ ID NO: 758257 - DNA, 76 bp, Homo sapiens
ttggagtccggacatctgaaacttgggtgagaaggactggcagaaatacgagactgctcggcggctgaaaaaatgt

SEQ ID NO: 758258 - DNA, 75 bp, Homo sapiens
tgaatttgttactttttcttgtccgggtgcggataagggacccgacactgatgtggcttctggcacagcagctta

SEQ ID NO: 758259 - DNA, 50 bp, Homo sapiens
gcaacgcggtcacggcccagcgcgttcgggggggccctcagcctcttggc

SEQ ID NO: 758260 - DNA, 75 bp, Homo sapiens
ccagtgtctagaggaccacacctgggcacctccctttcccatctgcaaaagtaggaagatgaagggcttctccct

SEQ ID NO: 758261 - DNA, 75 bp, Homo sapiens
ttctcatctgcccataatcatggacacagccccaggatgtgcaggatgtgaagttcatttccaatccgccctcca

SEQ ID NO: 758262 - DNA, 115 bp, Homo sapiens
cccatgagccgagccaccagtggctccagtttgcctgttggaatcaataggcaggacttaaccaccaccatgtcgagcaaaagaacaaagaccaagaccaagaagcgccctcagc

SEQ ID NO: 758263 - DNA, 100 bp, Homo sapiens
cttggggaggatcaatgaggtagaacctgcaaagggcttagcagagagcctagcacctactgagcgctcagtaaaggtccacacgttccgaggcccacac

SEQ ID NO: 758264 - DNA, 100 bp, Homo sapiens
ggagcagaagactctgagcccccgaactctgcaaagcctccagaggacataccacctccaggatcaggatgcagagacagagtcttgccctgttgcccag

SEQ ID NO: 758265 - DNA, 100 bp, Homo sapiens
gtgtggctcataagccacgaaccgggaactccactttgtggcaccgtgagattctccagtcaagtaagggagaattgactacgcttatacatcagcttca

SEQ ID NO: 758266 - DNA, 75 bp, Homo sapiens
gggcaagatcctgtgcactgactgcgcatttaaatcaaacggtattgagatggattgggttatgaaacataatgg

SEQ ID NO: 758267 - DNA, 100 bp, Homo sapiens
ggcatattgacgcaatcagaaaatcaagtaaaggaacccaacagagatctcttctgttctccactgctagtcttactactttgaccgcgatgatgtggct

SEQ ID NO: 758268 - DNA, 88 bp, Homo sapiens
gacgggcggcggcctggtcggcagagagtagcctgcaacattcggccgtggttacgatgcttggggctgaactgggagcgcaggcaat

SEQ ID NO: 758269 - DNA, 98 bp, Homo sapiens
caccgccgcccccccagacaagatggacaccgcggaggaaggctatggagttactagtagagaaagcaatcagcagtgcttctagccctcagagccct

SEQ ID NO: 758270 - DNA, 74 bp, Homo sapiens
gagcctcagttggaagcagccgatccagcctgcggagcctgtggggcaggaatggtctgccgaaaaccgaccga

SEQ ID NO: 758271 - DNA, 101 bp, Homo sapiens
gacaaagacccagtgaacaaatccgggggcaaggccaaaaagaagctatggttgatactaaaggaggttttcccactatccgtatgcatcttctctgtttt

SEQ ID NO: 758272 - DNA, 81 bp, Homo sapiens
gtggaagatggcgcctgttgtgacaggaatgttgtaccatctttgggtaggcagacttccctgacgacatcagtgataccc

SEQ ID NO: 758273 - DNA, 100 bp, Homo sapiens
ccacccctcctgtaacccagcctgtttcacttcttggaatcccttggcaccatgtcctgtgtgcattataaattttcctctaaactcaactatgataccg

SEQ ID NO: 758274 - DNA, 90 bp, Homo sapiens
ttgcctttctggacacagaagtatttgtgacagagctaatgtcaaaccccgaaattccacaccacctagtttggcaagaaatcctgcccc

SEQ ID NO: 758275 - DNA, 100 bp, Homo sapiens
gcggtgatgagtttaccattgctgccactgatggaagagagaagggcacagttacctaagtatcaacgtaatcttcctcggccaggacaggcccccatcg

SEQ ID NO: 758276 - DNA, 75 bp, Homo sapiens
attcctcctccttggtcgccgcgtccttggctggcgtgatccaaactactggatacaggtgcatcgcttggaaca

SEQ ID NO: 758277 - DNA, 74 bp, Homo sapiens
aactataagcagcttcggaaaggagccaatgagggtgaagatggagctggaaaaacaagcttaataagaaaaat

SEQ ID NO: 758278 - DNA, 83 bp, Homo sapiens
tgaagaacagtgaagagctccgagaaattatgggtacccctgaatatgtggagaaatgcccccgaagagaaggcgtctgtagg

SEQ ID NO: 758279 - DNA, 75 bp, Homo sapiens
gctccatcagcctcggtgacagtgtggagatccctgccctcaaggccagggagctggagagcagagaggcagagc

SEQ ID NO: 758280 - DNA, 73 bp, Homo sapiens
aagaatacctcggcaaattccgacgtcttgaagacttccgagtagatagcagcccgacggccatggaggctga

SEQ ID NO: 758281 - DNA, 94 bp, Homo sapiens
cacagttatgggtcgcaagaagaagaagcagctgaagccgtggtgctggtactctcagtcaccagctctggaattagataaattccttgaagat

SEQ ID NO: 758282 - DNA, 100 bp, Homo sapiens
cctctgcagccagaagaacaagaagtaggcattgaccccttgtccagttactctaacaagtctggagggtgactgttggatctgtatggaactcatgtct

SEQ ID NO: 758283 - DNA, 78 bp, Homo sapiens
aaggctgccgtggaatggtttgatgttccaagatgagatgggattctccaacatggaagatgatggcccagaagagga

SEQ ID NO: 758284 - DNA, 76 bp, Homo sapiens
agggtgcagagcctggagagcatgccccggccccctgagcaggttcttctgtgtggcagttcagaatgatggatca

SEQ ID NO: 758285 - DNA, 110 bp, Homo sapiens
ttcctatctttctcccggaagtcaccattggagctcatcagactgaccgtgtcttacatcagttcagagaggaatttagataatgggctgtgtgcaatgtaaggataaag

SEQ ID NO: 758286 - DNA, 80 bp, Homo sapiens
tgaggagtttgcactccgtgtacaacaggtactctcgcctccgccagtggaacaccctctatctgtgtgggacagatgag

SEQ ID NO: 758287 - DNA, 75 bp, Homo sapiens
agactccctgtcccggaccgcaggaggaggaagccaagaatctggtgagcgaagccatcgcagctggcatcttca

SEQ ID NO: 758288 - DNA, 100 bp, Homo sapiens
ttttctggaggaaggaaaagagtcctggaatatgaagagacatgagatggtggaagaatccccagtgaatattacttcagtgtagaaaatttggaacgag

SEQ ID NO: 758289 - DNA, 110 bp, Homo sapiens
catgaaggacagcctcttctcaatgaggcatccatcctgagctatgatggtagcatgtacatgaagatcatcatgcccatggtcatgcatactgaggcagaggatgtgtc

SEQ ID NO: 758290 - DNA, 82 bp, Homo sapiens
ccgccgaagaagcatcgttaaagtctctcttcaccctgccgtcatgtctaagtcagaggacagctactgtctggaggagcct

SEQ ID NO: 758291 - DNA, 74 bp, Homo sapiens
tttggagttcttacaacatggcagacattgacaaaatcttcagctacttggagcaacagccattgaggataaat

SEQ ID NO: 758292 - DNA, 50 bp, Homo sapiens
tgctattgaaagagagtatgcacagagacagatgggaccgtgttcagaat

SEQ ID NO: 758293 - DNA, 90 bp, Homo sapiens
agaggaacagcctatgtgggcttccacggagatcccaccaaatattttggttgtgagctgggagcacagacccagtttgatgttaagaat

SEQ ID NO: 758294 - DNA, 139 bp, Homo sapiens
agctcacctccatcatcgtcaaccagctcaagaagatcatcaagcgcaagcacaccctaccgaattacaagatcagaaagctgatgtcctgaccactggagctggtaacccagtaggagacaaacttaatgttattaca

SEQ ID NO: 758295 - DNA, 100 bp, Homo sapiens
agccggtaacgttgctggaccgggacgcacgctcagctgaggaggacccccaaagggggaaatgcagtgtgaccctcttgaatgagacagatatcttgag

SEQ ID NO: 758296 - DNA, 73 bp, Homo sapiens
ggcaaggagagacgtcgctgaggggcttgcctgaagcgaggggtacatgatgttgattgatggcacaaatgaa

SEQ ID NO: 758297 - DNA, 140 bp, Homo sapiens
caaaagaaaaaagaatgggtcaaccaagaacgtcaaacactccaacgattgagagcatttaaagatgaacagatggagtcggataactgttcaggaggagatgatgactggacccatctgtcttcaaaagaagtggaccc

SEQ ID NO: 758298 - DNA, 75 bp, Homo sapiens
gcgcccccagcacggggccagaggaggaacatgcccctggagaggatgaaagaggagaaggcagagcccccccag

SEQ ID NO: 758299 - DNA, 74 bp, Homo sapiens
gtcggccctcagagcccttgcccgctcgggtatgaagatcgggcggattggactggaaggatcaccagcacata

SEQ ID NO: 758300 - DNA, 76 bp, Homo sapiens
ggaataatatttatggagcatatattatggaacacaattgtaaaccatggctgtgtggatacaagctcagcagctc

SEQ ID NO: 758301 - DNA, 75 bp, Homo sapiens
gtgacagagtggagccatggctagaggttgtggcagcactgcctgaaggtatgagaccagattctaatctttatg

SEQ ID NO: 758302 - DNA, 80 bp, Homo sapiens
atgcgcagagcaaacatctttcaaagaattcatctgtgccttattccagttcactcttgtaagggtgatgcttgtgatcc

SEQ ID NO: 758303 - DNA, 51 bp, Homo sapiens
cgtggatccaagatggcgacggcgatggctttccggcagctgtcgcaccgc

SEQ ID NO: 758304 - DNA, 94 bp, Homo sapiens
ccgggggcctggctaaggaaaccctattacctccaggtgctggagaatctggtaaaagcaccattgtgaagcagatgaggatcctgcatgttaa

SEQ ID NO: 758305 - DNA, 105 bp, Homo sapiens
ggggtcagagtgccggaccccagcacacagaagccgagacgcaggatgaagttaaaggaagtagatcgtacagccatgcaggcatggagccctgcccagaatcac

SEQ ID NO: 758306 - DNA, 75 bp, Homo sapiens
cctgctggtgggccagtacagcaccggcaagaccaccttcatcaggattcttacagaagcagagattgatgctca

SEQ ID NO: 758307 - DNA, 100 bp, Homo sapiens
ttcagatgggatctttccggatcaatccagatggcagccagtcagtggtggaggttagaaaatggatttctgactggaatctcaccactgaaaaaaagca

SEQ ID NO: 758308 - DNA, 83 bp, Homo sapiens
aagtcaccattggagctcatcagactgaccgtgtcttacatcagttcagagagtgcaggtcgtaatctgaaggagtggctgag

SEQ ID NO: 758309 - DNA, 74 bp, Homo sapiens
ctgcctcagcctcccgggtagctgggactacagttattaccccattcaagttgacaactgaggcaacgcagact

SEQ ID NO: 758310 - DNA, 99 bp, Homo sapiens
acctgcagttccttcttcgagaaaccaaggaaggaaaatcacctcggcagtgtttgaaggaaggatactgcaactctttgaagtacgcattttttgagt

SEQ ID NO: 758311 - DNA, 74 bp, Homo sapiens
cgtgcggacgctcgtgcacagatacgacccagatgatgtggtaccagttggccaaagaagagcctggtgttggt

SEQ ID NO: 758312 - DNA, 101 bp, Homo sapiens
gataaatcagacagaacagttaatcctcaatttaagcctgatctaacccctagaaacagatcctcagtttgtggtctgccagctaaaggtgaagatatatt

SEQ ID NO: 758313 - DNA, 75 bp, Homo sapiens
tcgaaggcagcacaggacctggaaaaattacatggcgaactttctgaccaagtatacaactacccagagggccta

SEQ ID NO: 758314 - DNA, 110 bp, Homo sapiens
gctggagcggggagagctgtttgtgggccagctgccctctgaggagatggtcatgacagacaatgcagatcttcgtgaagactctgactggtaagaccatcaccctcgag

SEQ ID NO: 758315 - DNA, 82 bp, Homo sapiens
cctcgctggaccagaccatggccgcggccttcggtggagtttgaggacgggtcccagctgacggtgaagcgtggggacatct

SEQ ID NO: 758316 - DNA, 50 bp, Homo sapiens
cgccggtggagacgcaggcgagttggattggatgctgctggcaagacaac

SEQ ID NO: 758317 - DNA, 122 bp, Homo sapiens
cttcaccacgtctgtggcgaacgcggcatccatctcaggacatgttctgaaacacctggattcttatctagctgactgctacgatgccattgctgtttttctctgtatccacattgttctcc

SEQ ID NO: 758318 - DNA, 89 bp, Homo sapiens
cgcctccctccctgggcaggccctgggcaccactcacggggccctcagtgccaccaccatcttcagggggggccctcagcctcttggcc

SEQ ID NO: 758319 - DNA, 80 bp, Homo sapiens
tctgaaccatccacacatcataaagctttaccaggaatactcccccagttgcaagaggcgcaggaccgtggaagacttca

SEQ ID NO: 758320 - DNA, 75 bp, Homo sapiens
cgctgcccctggccgatcagatcaagatcctgatgaagaatggccctcgggaccaaggatcacgtcatgactccg

SEQ ID NO: 758321 - DNA, 80 bp, Homo sapiens
cgactcggaggtgggtccggggagcccgactcggaccgcggaggttttgggttggtgaaactggatgtgaaaacaaagtc

SEQ ID NO: 758322 - DNA, 101 bp, Homo sapiens
gctgcagacatctgcttcaccaaggagctacactcccacttcttcagcttgggcaagtgtgtgcctgtgtgccgaggaattacatgaacgacagccttcgc

SEQ ID NO: 758323 - DNA, 83 bp, Homo sapiens
tttatttctttggagacaaaactatgccagtccaagacaagctgctgctatctgcgtgccacttactggtctcactggccacc

SEQ ID NO: 758324 - DNA, 75 bp, Homo sapiens
gggctttccaggacaagtactttatgataggtgtgaagtttttcaacatgagtggcctcggggacagttcatccg

SEQ ID NO: 758325 - DNA, 75 bp, Homo sapiens
agggtaactatggaagaagccagcagaggaactccttatgaaatcgttagcaccttaggagaggggaccttcggc

SEQ ID NO: 758326 - DNA, 98 bp, Homo sapiens
gcggcggcggcgttgacaatggttaaaagccaactgcaaggtctaatgactgcaggatctagctatccattgtttctggccgcctatgcgtgcactgg

SEQ ID NO: 758327 - DNA, 80 bp, Homo sapiens
ctatcgtggacgtcactggccctggtggggattgacagccacgggaaggctggagtgcagtggcgagatctcgactcact

SEQ ID NO: 758328 - DNA, 75 bp, Homo sapiens
acctgtggccagtgttgtcatggacaaggacaagacctctgtgagtgaaagccttcagagggaagctgctaagaa

SEQ ID NO: 758329 - DNA, 82 bp, Homo sapiens
tcaaggcctgccgttggctatagcaaatgccccaggacatggatttgattgacatactttggaggcaagatatagatcttgg

SEQ ID NO: 758330 - DNA, 82 bp, Homo sapiens
cagagcctcgcctttgccgatccgccgcccgtccacacccgccgccaggttagagcagccagcgggtacagaatggattttg

SEQ ID NO: 758331 - DNA, 80 bp, Homo sapiens
caaaaagtttaggactgctaagcaacgcacctcttgctttttcctccaaagtatgttatgttaagtttcgtgatccatca

SEQ ID NO: 758332 - DNA, 89 bp, Homo sapiens
gcctcatcactggagccaccagcccaaccgtgttgtatgtgagtggaggaaatacgcaggtggtgctggggctgcccttcctgctggag

SEQ ID NO: 758333 - DNA, 98 bp, Homo sapiens
gaagcaggagccctactcggcagcaaattgtggctactaatttgccccctgaagatcaagatggctctggggatgactctgacaacttctccggctca

SEQ ID NO: 758334 - DNA, 90 bp, Homo sapiens
gacatggcctccgacgaggacattgctcctgattcctgacaatgccaacgtcttctatgccatgagtccagtcgcccccagagacttcat

SEQ ID NO: 758335 - DNA, 100 bp, Homo sapiens
attccaagtaactcttatttgaacatccatgatagcagtcttctgtaaatcgaacttttcaagaattctctgaaggaaccaagtaggatattcttacatc

SEQ ID NO: 758336 - DNA, 75 bp, Homo sapiens
tcgaggatgtgtacgagctgtgcgaggtgatcggaaaagctacgaagtgaagagtgtcctcggaaaggaagtggg

SEQ ID NO: 758337 - DNA, 82 bp, Homo sapiens
tctctcattttctttccctgcaccaactagcagaacctaaaggcagacccagaagagctttttacaaaactagagaaaattg

SEQ ID NO: 758338 - DNA, 76 bp, Homo sapiens
gctcctcaagtgcaacaagtcccacttccgaaaccacaagtttgccgatctaccggctctcccgggtcattgagcc

SEQ ID NO: 758339 - DNA, 82 bp, Homo sapiens
gaacactttccagccttgtttttcagcagctttgaggaaaagtatagataacgaaggaggcccaacttcattcaataaggag

SEQ ID NO: 758340 - DNA, 100 bp, Homo sapiens
gcctagactagacgcacatcaggaagacagaagccctacaggtggcaactactagcccaactgccaatactactggtactgctactacttcctcaaccac

SEQ ID NO: 758341 - DNA, 100 bp, Homo sapiens
actgcgaaagctgtgatgagaatgaggatgatttcatccaagtcactaaaaatggatcagattgcccaaggactccagatactccaaataatgaccctcg

SEQ ID NO: 758342 - DNA, 75 bp, Homo sapiens
cgcctcctcccgcctgccccctcagccctgtggctgggggcagagctcagcggagattctggagctggctggcaa

SEQ ID NO: 758343 - DNA, 100 bp, Homo sapiens
aaaagctgcttccagtgggaatccacattaagaagtacaatagcattcgcggaattgagtgatctacagcgcgatccacctgctcactgttcagctggac

SEQ ID NO: 758344 - DNA, 100 bp, Homo sapiens
aatgcctcagaaaccacacccaaagatgcctgtgaggagccaccaacatttgaagctatggagctcattggtaaaccaaaaccctactatgagattggtg

SEQ ID NO: 758345 - DNA, 76 bp, Homo sapiens
gtggaaaatttcagtttgaaactgaagttcccgatgcgtacaacatggtgttgtgaatgggagagttcacatccgc

SEQ ID NO: 758346 - DNA, 83 bp, Homo sapiens
gccgagttcaacatcctcctggccaccgactcctacaaggagctctttgttcaatgcctagccacctattcctacagacacgg

SEQ ID NO: 758347 - DNA, 83 bp, Homo sapiens
ccgagcgcagagcattggcaggaggggcaaggtggaacagcaatggctgccatccggaagaaactggtgattgttggtgatgg

SEQ ID NO: 758348 - DNA, 90 bp, Homo sapiens
gtgccttgtaactcacaatggattcgcttcaagctcagcttatcaatatgggtgttattcctaccttagtgaaattactgggcatccact

SEQ ID NO: 758349 - DNA, 75 bp, Homo sapiens
ttttttggaggaggaggaaggatgcagagagaaaggagaggtagtaacactctggtacagatctccagaagtatt

SEQ ID NO: 758350 - DNA, 82 bp, Homo sapiens
tgaagagttgtcccagctcggcccgcgggggagccccgggagccgcacggaagaagaaattgtcgagacgaataacatgagg

SEQ ID NO: 758351 - DNA, 50 bp, Homo sapiens
tggccgagcaggctgagcgatacgacggctgaccccgcactacatctacc

SEQ ID NO: 758352 - DNA, 75 bp, Homo sapiens
cagggtggccgccccagcagacagtgctacagagccaactcctgacagggcatttttggtcgaagagagctgaag

SEQ ID NO: 758353 - DNA, 49 bp, Homo sapiens
gagaaactcgctcgccttcagaagacagaattcattgagggcgtctctc

SEQ ID NO: 758354 - DNA, 100 bp, Homo sapiens
caaaatggcgccctacagcctactggtgactcggctgcagaatcaattctgtttatgggaagagtgacaaatcctgacacccaggagataaaaggaagag

SEQ ID NO: 758355 - DNA, 73 bp, Homo sapiens
aaaaacaaccacactgcttcgatcctggacaggatgcaggcagatgagcgcctgccaacggtaccgctgtccg

SEQ ID NO: 758356 - DNA, 90 bp, Homo sapiens
gccggccaaggatgaagcctcacttcagtggaatgcagtagccctctgggcctgggatattgtggttgataactgtgccatctgcaggaa

SEQ ID NO: 758357 - DNA, 83 bp, Homo sapiens
gactttctctctgggtccccttccaaaacgcagccaccgccgtcaccaatctctacaaaggagaccaagacacattccacccc

SEQ ID NO: 758358 - DNA, 80 bp, Homo sapiens
ctcagagatccaagtgcgcgccctggcgggtccggaccaaggctctgacgcccgctctgcggcttcggtgtttgaacagg

SEQ ID NO: 758359 - DNA, 129 bp, Homo sapiens
atgcctcaactgattgtgaacgcactgtctttcagtttgatgtccagaggaagtacttcaaggaagctcttgatagatacgtggttgcagtaggattggagtgtggaaagatttgcttatatacctgga

SEQ ID NO: 758360 - DNA, 106 bp, Homo sapiens
tgtattctaagattgaagctttgttaggttctgctggtcacacaaccctcgggatcacacttatgattgacactgtgagaagttgtgtagcaaagttgttcttcac

SEQ ID NO: 758361 - DNA, 100 bp, Homo sapiens
taaagtacagaagagtattttgaaaaagcattacaaatatgaagaggcattatttatgaccttttctatggaaaggcattatcctgcactgaaaactctg

SEQ ID NO: 758362 - DNA, 82 bp, Homo sapiens
gaacgggatcctctgctgcatagtttcggtcatctaaaggaggttttaaacagtataacagacagaatgttgctgcgggatg

SEQ ID NO: 758363 - DNA, 141 bp, Homo sapiens
ggtggggaaagatgctgttccaggcgcacactagtctacaaggccagagctttctggaagggggcagtgctggcatcggccccaccattcagattggggaggagacggtgatcactgtggacactaaggcggcaggcaaag

SEQ ID NO: 758364 - DNA, 100 bp, Homo sapiens
ctctacttagctcagcaattcttaccttgttgcagtgtaggattttggaagtcctccctccatcacatcaaaatggttttgctaatggacatgttaacag

SEQ ID NO: 758365 - DNA, 112 bp, Homo sapiens
gaagggtcatcaggaaatacctcactgcctttggtgctcaaaaaggacttgaactgccatgtcctctgaagaaggaaagctcttcgtgggagggctcaactttaacaccgac

SEQ ID NO: 758366 - DNA, 95 bp, Homo sapiens
gtccccactggtggaggccaaggaccccaagctccgagaagaccggcggccaatcacagtccactttggacaggagtctccccaggacagtgcta

SEQ ID NO: 758367 - DNA, 76 bp, Homo sapiens
ttctgcagccactgcaccgacttcatctggtggacgacatccttggagaaggcagcgacgacagcgacagcgagaa

SEQ ID NO: 758368 - DNA, 75 bp, Homo sapiens
ccaaggtgtacttcatctacgaggctggaggcaaagctggaaaggacagtgggaaggccaaggctaaggcagtat

SEQ ID NO: 758369 - DNA, 75 bp, Homo sapiens
ctggtgcaatgcttgccttgggactaatgacatgcttgtcagacaagttggatggcttgaggactggtactaaaa

SEQ ID NO: 758370 - DNA, 80 bp, Homo sapiens
caacgaatcatccacgcacctgcagctctgctgagagagtgcaagccgtgggcttctagaggccacccgcatcccctgcc

SEQ ID NO: 758371 - DNA, 74 bp, Homo sapiens
aagaacatttccatcaaaccctgagagctttattaccagacatgatctttcagtttatgcaactactgctgcca

SEQ ID NO: 758372 - DNA, 74 bp, Homo sapiens
cgggacaccccggaagctgggaaatgccacgccgcaatgaagagcttcttacagtgaaagcaaagtaggtcgag

SEQ ID NO: 758373 - DNA, 75 bp, Homo sapiens
tcgcctccaggccaagagggatccttcacccgtgtctggctgagcagcaagtctctgctgacatcagatgattat

SEQ ID NO: 758374 - DNA, 115 bp, Homo sapiens
agagagagagcttggttaacttgggagaaagtttcatctgtggatggagtattgattcttgtagacactgtttgggctctgtcatacttgacagatggaggtaatgaacagatac

SEQ ID NO: 758375 - DNA, 75 bp, Homo sapiens
ggctccgggctgagcttcctggagaagaggaagacatatctgaagagatggattaagaatgctttggattaagga

SEQ ID NO: 758376 - DNA, 74 bp, Homo sapiens
tctgggacttgaaaggcagagtatccagagtctcacattcccagtcaggaggtcccaggcacccaggtgggaca

SEQ ID NO: 758377 - DNA, 74 bp, Homo sapiens
gcgcctttagtttcaaaaagttgctggatcagtgcgagaaccaggagctcgagcgagtaaccagctcataaatc

SEQ ID NO: 758378 - DNA, 100 bp, Homo sapiens
caggtggaccatggcggtgagattccagctcccaaaatggcgatgacaccggcacctggcccaacaaccagtttgacacagagatgctgcaagccatgat

SEQ ID NO: 758379 - DNA, 75 bp, Homo sapiens
cgacctggggccctgggtgaagtgctccgtcgcccttgcctccaggtacctagtcgatagtcgctggttcaaaca

SEQ ID NO: 758380 - DNA, 89 bp, Homo sapiens
gctgacattgagacctggtgtcagccttacagaaatcgtggatgggaatgtgaagatgaccctgggcatgatctggaccatcatcctgc

SEQ ID NO: 758381 - DNA, 90 bp, Homo sapiens
gccgctggcggcagtcacttgtacagcgccggtcaacatcgcggtcatcaagtactggtgctttcttctgcgacctggtactcatctacc

SEQ ID NO: 758382 - DNA, 90 bp, Homo sapiens
ctgtccggctcgtcggtgtcctccggaaagaccacagcaagattctttcattcgtctcctcctagcctgggggaccaggctcgaactgac

SEQ ID NO: 758383 - DNA, 100 bp, Homo sapiens
ggagcggattcagctaatgatgatggtcaaagaaaagatgatcacaattgaggaagcacttgctagggtatgcccaagaggacagagaacgaatgcacag

SEQ ID NO: 758384 - DNA, 75 bp, Homo sapiens
gagggagtgatgtcttccagactcggtgctgtacccgccactggtgaattttcagctcgtttccttttgaagctg

SEQ ID NO: 758385 - DNA, 100 bp, Homo sapiens
atttattcgtaatgcgactcaaagctgcacggcagtctgtttatgaggcaaaccacagggaagctggaaaagaagcggccctggcagaagtggctgacga

SEQ ID NO: 758386 - DNA, 90 bp, Homo sapiens
gagttccgcccctttctggcaaagatgagggggattcttaagtacatccagcagtggtcattcgacaacgaaagtcataccgtagaaaag

SEQ ID NO: 758387 - DNA, 75 bp, Homo sapiens
gcgacccattcaggcacttatggccatttcagccaggcaggattatttgttgcctgaagcagaagaaattactat

SEQ ID NO: 758388 - DNA, 80 bp, Homo sapiens
tcgccgctgtccccaccactgcagccatgatctccttaacggacacgcagaggaggacatgtatgcccaggactctatag

SEQ ID NO: 758389 - DNA, 74 bp, Homo sapiens
ccgggagtaggagactcagaatcgaatctcttctccctccccttcttgaacatccagtcatggataaaaatgag

SEQ ID NO: 758390 - DNA, 74 bp, Homo sapiens
atttttctctggaaatccttgtaatcttgaaggaatggacctcaaaagacgagttgtactgctgtcacaggaaa

SEQ ID NO: 758391 - DNA, 75 bp, Homo sapiens
cggtggggccttcggaaagagagagcaggctgaagaggaacgatatttccgtttttcagaaactttggaattggc

SEQ ID NO: 758392 - DNA, 100 bp, Homo sapiens
atgtggacttgccctgcaccgccccctgggatccgcaggttccctacacggtctcctgggtcaaggtttatggttggctgtgggagatgtgatgactggt

SEQ ID NO: 758393 - DNA, 82 bp, Homo sapiens
gtgagcgagcagaggcttaaggtcttcagcggggcgctccaggaggcactcacagaagcatccgaaatcatgaagagcatcg

SEQ ID NO: 758394 - DNA, 96 bp, Homo sapiens
cggaagcgcagggagaaggaagaggtgtttgaaaaggtacatcgaggaggccattgagaaactaagcaagcggcaccagtaccacatccgtgccta

SEQ ID NO: 758395 - DNA, 100 bp, Homo sapiens
gacggaagcccaagtggcacaaatgcagaaactccctctggtgatgatttcagatgaaggcttgactattgacctgaagaattttagaaaaccaggagag

SEQ ID NO: 758396 - DNA, 100 bp, Homo sapiens
gaattcctctgaactagatgaagaatacctaatagaactggaaaaaaacatgtcggatgaagagaaacagctttctgatatgatctccatcagtgagaag

SEQ ID NO: 758397 - DNA, 100 bp, Homo sapiens
cgagacttttctcagatgttggatatttgcttggaaaaacgtgtgggtacgaccttggatacaatgtctctttgctatatgaccttgaaaatcttccggc

SEQ ID NO: 758398 - DNA, 104 bp, Homo sapiens
ttgcaccctgttttgcaaaaaccatcagtgtttgggaatgattctgatgatgatgatgagggggctgttgtggttccgactataaacagtacgtgtttggcggc

SEQ ID NO: 758399 - DNA, 75 bp, Homo sapiens
gccgagcggaggaggaggaggaggcgaggaggagagactatatggctcgtggacagcagaaaattcagtctcagc

SEQ ID NO: 758400 - DNA, 99 bp, Homo sapiens
gagagtccggccgcgacaggacggctctttattgagaaactaccaaaacatcgagattacaaatctgctgtcattcctgaaaagaaagacacagtaaag

SEQ ID NO: 758401 - DNA, 100 bp, Homo sapiens
tcatgcagtaggcaactttgcttccaaaagaagttaccaacatttagaatttctacttattctgagtaataatttttcaccatgcatcggaaaaaggtgg

SEQ ID NO: 758402 - DNA, 80 bp, Homo sapiens
gagcctcagttggaagcagccgatccagcctgcggagcctgtggggcaggtcggcgtcctcagctggccgagcatggtgg

SEQ ID NO: 758403 - DNA, 100 bp, Homo sapiens
tgaaggctttctgaacctggtgtgatggacttgaaagaggagattgatattcgactctccagggttcaggatatcaagtatgagccccagctccttgcag

SEQ ID NO: 758404 - DNA, 100 bp, Homo sapiens
gcaaggtacctgcaggacccatttgtgtccattgatctcttggagcagctggggatcatggttctggaaacgagctggatttgttcctgtttatctgaga

SEQ ID NO: 758405 - DNA, 89 bp, Homo sapiens
tccctcttcagttctctggagccccagattcaacccgtgtacgtgcctgtgcctaaagttacctgctacttggccttattgccatgttg

SEQ ID NO: 758406 - DNA, 75 bp, Homo sapiens
gtctagttcctggttgccggctgaaataacctgctcatgatggagcagtccaagaagtcctccctcatggtggcc

SEQ ID NO: 758407 - DNA, 75 bp, Homo sapiens
aacagaggactaattttggcagttctaaatttgaatttgagattacaggctgtgccagccctggaaaaacagtta

SEQ ID NO: 758408 - DNA, 102 bp, Homo sapiens
gtgatcttcacagtgctcctgcagtctctctgtgtggctgtaacttacgtgtactttaccaacgagctgaagcaggtaatagcctgcagctggtgttttgag

SEQ ID NO: 758409 - DNA, 99 bp, Homo sapiens
cagaagctgaacagtttctcagaaagacacaaattcctgagaattgggaacatgctaaatacaaatggtatcttaagaacatggacttcccgtgcctct

SEQ ID NO: 758410 - DNA, 87 bp, Homo sapiens
tcccagggagtgcaagcttagagcgtctggccaagaatcagaggaagtggaacaagttgaaatcatcgcagaaggataaagttcgtc

SEQ ID NO: 758411 - DNA, 100 bp, Homo sapiens
cgcatcaccggagcgtcccagctgcgaggagaattacgttcctacagtgtttgagaattacacggccagttttgaaatcgacacacaaagaatagagttg

SEQ ID NO: 758412 - DNA, 51 bp, Homo sapiens
caggatgctggatgttcatggagtgagaaacagactgaatttgatctgatt

SEQ ID NO: 758413 - DNA, 90 bp, Homo sapiens
tcgcagctccattaatgcaactaccattacactaaggaaaattgcctaagaattatgacccaaaagttaccccagatccagaaagatggc

SEQ ID NO: 758414 - DNA, 100 bp, Homo sapiens
ttccattttgccctgaaagtcccagatttttgctcattaacagaaaagaagaggagaatgctaagcagatctctgctggatgaaccgaatcctaacagtc

SEQ ID NO: 758415 - DNA, 75 bp, Homo sapiens
tacccgggcggcccctgcgccccccagaggcttcccagcagcggcttatggaccagtggcagcagcggcggtggc

SEQ ID NO: 758416 - DNA, 100 bp, Homo sapiens
cctgggggagtggggccacctggaccctgccgaggagaacctgaagagctaccggaagctgctcctgtgggtggaactctctagcctcctggttcggaat

SEQ ID NO: 758417 - DNA, 100 bp, Homo sapiens
cgacgcactggcccaggacctgcacaagataccccatcagcctgagtctcttaaaggcctttatacacatatgtctacacatagggatttggatgatctc

SEQ ID NO: 758418 - DNA, 100 bp, Homo sapiens
tgccgttggctatagcaaatgccccaggtgaagatggagctggaaaaacaagcttaataagaaaaattcagggaatagaggagtataagaaaggaagagg

SEQ ID NO: 758419 - DNA, 117 bp, Homo sapiens
cttcccctccgtggtgacagcctctgggtcctcggtcggtacagtctctgcacctcgcgccccagcagatgtcatttgtcagagtgaaccgctgtggtccccgagttggtgtaagaa

SEQ ID NO: 758420 - DNA, 97 bp, Homo sapiens
ttctgatgcagcagagcttggaaggatgcttcagctcatcttaggctgtgctgtgaactgtgaacagaagcaagaccggaacatgaacattttgcag

SEQ ID NO: 758421 - DNA, 50 bp, Homo sapiens
tggttctggaatcctcagttcaaggtctcctctgagcctccggcctccat

SEQ ID NO: 758422 - DNA, 90 bp, Homo sapiens
catcctgcgggtgcctttgaaaatcaacgacaacttgagcacagaatgtgaaagatgttgcagaagtgttccagaagtggctgaagatag

SEQ ID NO: 758423 - DNA, 75 bp, Homo sapiens
accgctgtcaagctcaacactgggccaaggccacctttgatgccatttctaagacctacagctacctgacccccg

SEQ ID NO: 758424 - DNA, 100 bp, Homo sapiens
tgggaggtcatcgaaggctaccgggcccagcacagccagcaccgcacgccctgcaagggagatgctggcccgcgagagacattgatgcattttgctgtgc

SEQ ID NO: 758425 - DNA, 98 bp, Homo sapiens
aattggcagagccacgcgtttgatggcttcgaggtgaactggaccgagcagcagcagatgtgttgtctcagcttggctctgccgagaacagacctgag

SEQ ID NO: 758426 - DNA, 75 bp, Homo sapiens
cttccccggggtgtaataatgttaactgaggtgaaaagagatttgaatgcccggaatgttctaaaaggtttatgc

SEQ ID NO: 758427 - DNA, 125 bp, Homo sapiens
cttcataatgagctacaaactaccaatggaggatcttaaagagaccagttagcagatgcttgttgaagatgagcagccgtcaacactatcaccaaaaaaaaagcaacggaatggaggcatgcgga

SEQ ID NO: 758428 - DNA, 90 bp, Homo sapiens
ggggaacggaggccagagctgcggctgcccaagcgccagaggtgacctatgaggcagaagagggctccttgtggacgttgctactcacta

SEQ ID NO: 758429 - DNA, 82 bp, Homo sapiens
ttgtggatcgctgtgatcgtcacttgcatgttggcagataaattgaacatgactccagaagaagctgaaaggtggattgtaa

SEQ ID NO: 758430 - DNA, 100 bp, Homo sapiens
tgagaagaagcggaaaaaagaaaactctagaagtctggatgtcggtgggcctctgagatatgccgtttacggtatgtccgtggttcagaccctgtattaa

SEQ ID NO: 758431 - DNA, 102 bp, Homo sapiens
cggcgcaacatggctgcggccgccgcctccgcctcccaggatgagctgatgaatgaaaggaatactctacaggaagaaaataaaaagctttctgaacaactc

SEQ ID NO: 758432 - DNA, 50 bp, Homo sapiens
gtcagcactgactttcagctatggaatcgtgtgtgttttaatagaaaagt

SEQ ID NO: 758433 - DNA, 90 bp, Homo sapiens
gaacgaggcaaggagctaaagcagcgtgcgttcagccctggggccgctttgtagttcagaatgtttctgcacagaaagatggagaaaaat

SEQ ID NO: 758434 - DNA, 100 bp, Homo sapiens
ggttttcgtacgggcggccgtgcgcgaggcgagggccgttgctccagggagaactgcaaatatcttcatccacccccacatttaaaaacgcagttggaga

SEQ ID NO: 758435 - DNA, 100 bp, Homo sapiens
ttcatgggcaggactaggccgaaaactccccagaatgaattaccagatggattaaacaaaaagcgtttacaaatcttattaaaaggctatggtgaatatc

SEQ ID NO: 758436 - DNA, 100 bp, Homo sapiens
tgccgctgcagccatagcagcaggtgtggacatgatcagtaaaatgctgaagatgcagatgttggaggatgaggacgacctggcctacgcagagactgag

SEQ ID NO: 758437 - DNA, 82 bp, Homo sapiens
acgctcccaccagcagcgcctatgagtttgtcacctggctcgatggcattaagaacaagatcactcaaggtgaaggataatc

SEQ ID NO: 758438 - DNA, 75 bp, Homo sapiens
acatcgtggtggtcggatttcaccacaagaagggctgccagtcaggtaccaggagtctaagagaatatacgctta

SEQ ID NO: 758439 - DNA, 83 bp, Homo sapiens
gggaaaacttgctgcggttgctcaagattctgctcagcaatcctcagatgtggtggttaaatgattccaatcctgaaaccgac

SEQ ID NO: 758440 - DNA, 75 bp, Homo sapiens
gttccacccgacgcatgagtggcaggcccttcagccaggtgaccttggagaaggtgctgggaattacagtgtctg

SEQ ID NO: 758441 - DNA, 76 bp, Homo sapiens
agaagagattccatcttccagaggtgagacaggcattggcaaatccacgttaatggacactttgttcaacaccaaa

SEQ ID NO: 758442 - DNA, 90 bp, Homo sapiens
cctacacaatgcgttgcctggctccacgccctgctgggtcctacctgtcagagccccaagatggagttttaacattgaatgcggagaaca

SEQ ID NO: 758443 - DNA, 90 bp, Homo sapiens
cacaaatgtttttctgttttgcctgaatacatgatttaaacaagagatttccacagaaggattacagtttaaagacaatttctgtgatca

SEQ ID NO: 758444 - DNA, 74 bp, Homo sapiens
ctggggcggccggccaggaaccacccgttaagtttgtgtgtgttggtggaagcccctcccggatgaaagccttc

SEQ ID NO: 758445 - DNA, 74 bp, Homo sapiens
ctcgtgggcggcaaggacttcgagcagcctctcgccatttcccggatgatgtgatgccagccacttactgtgaa

SEQ ID NO: 758446 - DNA, 94 bp, Homo sapiens
ccgcaacatcgaccagaccatgctctccatcctgctcttcttccacagtgagaaagatcagtctaaagaaaaggagaagaaagtgaaaaaaaca

SEQ ID NO: 758447 - DNA, 51 bp, Homo sapiens
accttcacgcagtcaagaacgacttccagctgagatctgtatctgtggacc

SEQ ID NO: 758448 - DNA, 82 bp, Homo sapiens
ccccgcctccctcccgcgcgtgctgcgggtctgctcgggggtctacttcgaggggcgccatgttttggaagtttgacctgca

SEQ ID NO: 758449 - DNA, 100 bp, Homo sapiens
aaggccttgaccagtgagattgcactgctgcagtccaggctgaagacagagggctctgatctgtgcgacagaaacctaaaggcagacccagaagagcttt

SEQ ID NO: 758450 - DNA, 83 bp, Homo sapiens
cagaaacccgacccagtgccgcgcagctgctggaggaaagatgaatgggagggctgattttcgagagccgaatgcagaggttc

SEQ ID NO: 758451 - DNA, 100 bp, Homo sapiens
atgctggagaactacagccacctcatctcagtgggaaggagggagccccaggaacaggagtcccaccgaagaactgctctctgacagaacagagacctcc

SEQ ID NO: 758452 - DNA, 100 bp, Homo sapiens
cttgggggtcgagcacataacggggttcgggtgtctcgtgtgtgaacatcacagttcccagtgggaaaagctacagaaagatgacacagatccggggcaa

SEQ ID NO: 758453 - DNA, 75 bp, Homo sapiens
tagaaatgctaagaatgatgacttgtggagcagtctgtcaaatggcaagtgtccagagaatggctgggatgaaag

SEQ ID NO: 758454 - DNA, 75 bp, Homo sapiens
gggcaagcccaggaacgtggcgctcatcaccggtatcacaggccaggggtgcccagaggatgcgacatcctcatc

SEQ ID NO: 758455 - DNA, 74 bp, Homo sapiens
tggagcctcagttggaagcagccgatccagcctgcggagcctgtggggcagctatggcattgctggttctacca

SEQ ID NO: 758456 - DNA, 100 bp, Homo sapiens
agaagatcggcttgaaattaccaactgctttcctttccctcagcacacagaggatgatgctgactttgatgaaggagtccaatgtgctgattgctgctaa

SEQ ID NO: 758457 - DNA, 100 bp, Homo sapiens
tcaaattgaagagagcagttgaagaagtgaagaaattattggtacctgcaaatggctgcagtctgtccaggccaccatgatcctgtcgatcatcttcagc

SEQ ID NO: 758458 - DNA, 92 bp, Homo sapiens
ggagcctcagttggaagcagccgatccagcctgcggagcctgtggggcaggggcactatgaacgaagaggagcagtttgtaaacattgattt

SEQ ID NO: 758459 - DNA, 80 bp, Homo sapiens
ggccttccagggccacggcgcgggcaacctggcggatgatgattattccccaccttctaagagacaaagaccaacgagcc

SEQ ID NO: 758460 - DNA, 100 bp, Homo sapiens
aaaatgagaattataaagccctcgtcagaaggaattatgggaaacgcagaggcagaaaccagaactaagttcagaaaatcttagaacttgctttaagatc

SEQ ID NO: 758461 - DNA, 100 bp, Homo sapiens
ccggagcatgagtggccctgataaccggggcaggggaagagggggatttgatcgtggaggcatgagcagaggtgggatgcagatcttcgtgaagaccctg

SEQ ID NO: 758462 - DNA, 90 bp, Homo sapiens
caggaactggggggccgactatatcctgttcaggcttcagagagcccctgacgcctgcaggaacatggcagaggagacaccgtctgtctt

SEQ ID NO: 758463 - DNA, 51 bp, Homo sapiens
atggaatgctcctaaatgatcgcaaagtaagaagaggaggttacttcaaac

SEQ ID NO: 758464 - DNA, 100 bp, Homo sapiens
cgcgctctgggcacagccttggaaagtcaggaccgcgacggcagcagagcaaatcgtccgcactaaagtcccctgcagcgtgaccatgtcgagaccccgg

SEQ ID NO: 758465 - DNA, 93 bp, Homo sapiens
gtggtgcctatgtgaaactgctttctaaaacaccagaactcaacctgcatcttcatgatacagttaagaggaatcttgacagcgccacttccc

SEQ ID NO: 758466 - DNA, 75 bp, Homo sapiens
tctgtttgcaaagcacctgaactggaagatgaagatcctgccaaaggtgatcagagtcgatcagttgaccttggg

SEQ ID NO: 758467 - DNA, 75 bp, Homo sapiens
gttctttctcctggaggaatacacaggatccgattatcagtatgtgggcaagggtcaaagaattgactgtagatc

SEQ ID NO: 758468 - DNA, 90 bp, Homo sapiens
gcagcatctcagcccaagagaaggtgctggaagcccaggaagcacacatcaaggctcccttgccagcagggtgctgccaataaaaggtag

SEQ ID NO: 758469 - DNA, 95 bp, Homo sapiens
agggtttaggagaagcactgttgttttccacacaggaggaactctctggaatgaaaaataaaatacaagtagttgtgcttgaaaacgaagggctc

SEQ ID NO: 758470 - DNA, 75 bp, Homo sapiens
gccaccagttcaggagcacttgggagtgatctaggtggcagatatgctgttggagctctgtgtcaccgagttgga

SEQ ID NO: 758471 - DNA, 100 bp, Homo sapiens
atgaggtggaccagctggtgctggaactgcagaaagttaagcaggagccgaggcctgcctggagccccagatcaccccttcctactacaccacttctgac

SEQ ID NO: 758472 - DNA, 88 bp, Homo sapiens
cagcttcccttacctgcattatgattccctccttgttccagatgtggcaaaatctggcaaaggcagagaccaaacttcatacctcaaa

SEQ ID NO: 758473 - DNA, 90 bp, Homo sapiens
ctgttattccaaaccaccctccaagcaatccagagccagccagagaagttccacttcaggagatgcccgagtggtaaaagacatggcaac

SEQ ID NO: 758474 - DNA, 82 bp, Homo sapiens
cttgactacaaacattttgctctgagaactttcttccctgagcaataagagctaactgccatcaagagccatcagtatgtct

SEQ ID NO: 758475 - DNA, 74 bp, Homo sapiens
catccctgagcacacaaaattggcctcaagttgcctcttgatcctggtgtccctggccagtgtccttccacctg

SEQ ID NO: 758476 - DNA, 82 bp, Homo sapiens
agaagattaacctggagttaaggaacagatccccggaggagcggaatcggacatgtccaaaccaccgtgttacgaagaggcg

SEQ ID NO: 758477 - DNA, 75 bp, Homo sapiens
tagctctgtatgagaaggacaacacctacttaggagggagccatggatttgctgcgggagctgaaggccatgcct

SEQ ID NO: 758478 - DNA, 100 bp, Homo sapiens
tccaacagccacagtcaagatgttgccaacattcgtaaggtccattcctgatggctctggtggatggagagagaaagaaaaagccagagaggagagctgg

SEQ ID NO: 758479 - DNA, 73 bp, Homo sapiens
cggaagtagcagtccggtcctagggactagcaggtattacccagtgtagatattgacagcatttcaaatagta

SEQ ID NO: 758480 - DNA, 100 bp, Homo sapiens
aatgagaagctacaaacaagaaatgggaaaactcgaaacagatttttcaggccttgaaaagaggatagaccaggctgtggaggagtggaatattgagaag

SEQ ID NO: 758481 - DNA, 101 bp, Homo sapiens
gtggagatcaagcgcagcgatggaagcggggagaggtggtgagagatgacccctgttgaggatttcattggtgtctgccacaggccgccatggcatcagat

SEQ ID NO: 758482 - DNA, 97 bp, Homo sapiens
gatagggatgcagaggatcagaaccggtacctggatggcatggtgtcttggctgggcatgacaaccgcgtcagctgcctgggcgtgactgacgatgg

SEQ ID NO: 758483 - DNA, 75 bp, Homo sapiens
agagacacgctgggccgaccccagagaggcgctggacagcgggaatgcatatcagtccacgtgggccaagcggga

SEQ ID NO: 758484 - DNA, 98 bp, Homo sapiens
gaacctgactctgagaacaccccccagaaggctgacaaggatgccggcctggcccagatcaatgaactgagccatgttcaaatccctgttatgttgat

SEQ ID NO: 758485 - DNA, 71 bp, Homo sapiens
tcaatatcttcacccagcatgactgaaatcgccaagagattgaatacgatttgtgcacaagtcatcccatt

SEQ ID NO: 758486 - DNA, 83 bp, Homo sapiens
gcgaccgacggccgcctcacctgcccgctgtgccacccatgacagacctggacacaaagatccaagaaaaggccatgaaggtg

SEQ ID NO: 758487 - DNA, 50 bp, Homo sapiens
tctaattcaggcaatttgcaaaagataacaacgaacttgatgcaagtgat

SEQ ID NO: 758488 - DNA, 50 bp, Homo sapiens
gccccgctcccgaccttctcggagatggcttctgagccccggagctggag

SEQ ID NO: 758489 - DNA, 79 bp, Homo sapiens
ggccgagcctatgccctggcttttgcagaaagaggagcgttagttgttggttgtgaagatgagaaaagaagtgaagaga

SEQ ID NO: 758490 - DNA, 100 bp, Homo sapiens
caatgcccacttcattgcctggacaggtcgaggcatggagttcaagctgatagaaccggaagaggtgttttggggaacgagtttagtatattaaaatcac

SEQ ID NO: 758491 - DNA, 82 bp, Homo sapiens
agaaaacttgactgtatacagaatcttgaatcagaaattgagaagctgatgaagattatggaagagattcgggccctcccac

SEQ ID NO: 758492 - DNA, 100 bp, Homo sapiens
gctttggatcttgtggaaagtcagaaatttcttcaggttgaattacctagaagtttgtcactgacttgtgttcctgaactatgacacatgaatatgtggg

SEQ ID NO: 758493 - DNA, 100 bp, Homo sapiens
atgctggccaggctgtcacaattgttgcacaatatcgacctgaagacgaagttatacggaagcgtctcctcattgatggagatggtgctggagatgatcg

SEQ ID NO: 758494 - DNA, 75 bp, Homo sapiens
gggcatgggcctctctatgggcagtatgatctgtggctgggataagaaggatcacagtcaccttctatatagcac

SEQ ID NO: 758495 - DNA, 97 bp, Homo sapiens
cgcccgggtgtccccgcggcgcaggaggcggtggagcgcagagcgggcgagcgcggaaaaaacgaggagtcattggagagtacagaaggcttccggg

SEQ ID NO: 758496 - DNA, 100 bp, Homo sapiens
gcccgcaggagctgcggcggcgaagcggagagcaccggggggaggagatgggaaggatcgagatcgagaccgggatcgtgaagatcggtctaaagatcga

SEQ ID NO: 758497 - DNA, 74 bp, Homo sapiens
ctccagggagtgctctgttcacggctccatcgctgttagttttggggccttgtcacagatgccagatgatttgc

SEQ ID NO: 758498 - DNA, 100 bp, Homo sapiens
tgactgacctgcgcgcccgcctcggcccgcacgccaagcacgtggtgggctatggccaccttgactgtgccctgtccacggtgcctcctgcatgtcctgc

SEQ ID NO: 758499 - DNA, 100 bp, Homo sapiens
aacaccatcctttgtgtgtagggcaccaacggctcacagatctgggacaccgcattcgccatccaggctctgcttgagggttgtgagtcccggcccagcc

SEQ ID NO: 758500 - DNA, 51 bp, Homo sapiens
gaggccgaaccagcgcgggggtcgaggttctggctccttggcagcaatggc

SEQ ID NO: 758501 - DNA, 100 bp, Homo sapiens
tgggcaaggcagtggtcagcgacccgcagtccatctgactcctgcttcccgggtgttgctcgtgaagatttcgatgtcgatcattttgtgtctgactgta

SEQ ID NO: 758502 - DNA, 97 bp, Homo sapiens
gtggatggtgcgttgcgtgccctacttcaaggataagggcgacagcaacagctctgccggctggaagagatactttctagttgggagcaataatgca

SEQ ID NO: 758503 - DNA, 100 bp, Homo sapiens
ggaaaagatccctggaatatgaagagacacagtatggtagccacacccccaggaaccaaccggtgagccctctcctaagagacccaggggaagacccaaa

SEQ ID NO: 758504 - DNA, 100 bp, Homo sapiens
gcgggcactaccaccctcaccccgtcctcacaagtgtttgattgcatcgaggtctatgcccctggcttcaaggactctgtggttggcagagacatcctca

SEQ ID NO: 758505 - DNA, 80 bp, Homo sapiens
cattcctcagggatacacagtggagaagcgagagggctacccacttcggccagaattctggggagacattgccaaggaat

SEQ ID NO: 758506 - DNA, 82 bp, Homo sapiens
ttggaaggtgcatctgcagtacaggatatgaagaaattgagggttcttgccatggtttcctgctgatcttggcactgaccga

SEQ ID NO: 758507 - DNA, 100 bp, Homo sapiens
gctgatcctcctcctgcaatttgggttgcaacaactaagtctacagtaaataaatgggcaacctgtgaaaagctgaacaggtccaattctgaacttgagg

SEQ ID NO: 758508 - DNA, 74 bp, Homo sapiens
cgtacagagtgtcattgacagccaaggctttgaattgtattccatggtgccatctatttgtcctctagaaactc

SEQ ID NO: 758509 - DNA, 108 bp, Homo sapiens
gcagcaccgcagccttgggcctcgcgccggctatggccgtgccctggggctgagccctcagataacgaaggaggcccaacttcattcaataaggagcctgacggattt

SEQ ID NO: 758510 - DNA, 101 bp, Homo sapiens
ctccacagctggtcctgcagctctgcattatcgtacagactcatagcttacaggccctccaaggatgaaaactttcggaagagaaagttgcctgtggtaag

SEQ ID NO: 758511 - DNA, 75 bp, Homo sapiens
cttcgaaggattttgcaacaaattcgagctgtccgactctgagaatggccgggatagaaaatcgtcagctggaca

SEQ ID NO: 758512 - DNA, 83 bp, Homo sapiens
tttggttgtatcttggaaggaccagagcccagtcagctcaaaccactagttatacagattacagtacctatagccaagctgca

SEQ ID NO: 758513 - DNA, 75 bp, Homo sapiens
cccgatggagctgatgagaatgactgccgagatgtaatcagtgtagagaaaaccgtgaagagatgccttttggac

SEQ ID NO: 758514 - DNA, 75 bp, Homo sapiens
gagttaacacctctgccgctgctaaaaggacttggaaaacagtgtgggtgaacttagtgaaggacaaagacccca

SEQ ID NO: 758515 - DNA, 110 bp, Homo sapiens
tggcttctcccagcatagccccagatctgtctcgtaactgtgtaatcaaggaactagcaccacaacaggaaggtaacccaggagaagtattccacacagtgacattggaa

SEQ ID NO: 758516 - DNA, 90 bp, Homo sapiens
ccatgactgggcagtgccgctcccggacctccacaggtgaaggctgaagtgttagacatggcagataatgcatttgatgatgaatacctg

SEQ ID NO: 758517 - DNA, 75 bp, Homo sapiens
taaaaagccctcagtaccagagacagaagcagatggattcgtccttttagtcgctgggtaagtcggagtgccact

SEQ ID NO: 758518 - DNA, 100 bp, Homo sapiens
cctgacctagagcccatcctaaggaaaagctgtcagaggaagagagaaaacataaggaagctttggaagatcttcacatggtggttgatgaggattcgag

SEQ ID NO: 758519 - DNA, 100 bp, Homo sapiens
gcctctcgaatgggcacacctgtgtaggcacagttggtggatctgaaatctgaactgacagaaacccaagcagagaaagttgttttggagaaagaagtac

SEQ ID NO: 758520 - DNA, 100 bp, Homo sapiens
ctgtgcagtggcacctgcgcgaagctggccaaagcctgcccagacggctcacctgtgcgggatggaacaaaaggaacttgctactaccagcaccatgccc

SEQ ID NO: 758521 - DNA, 82 bp, Homo sapiens
tggactcggattcgttgcctgaggttgaaccatgattccggtgacagagctccgctactttgcggacacgcagccagcatac

SEQ ID NO: 758522 - DNA, 83 bp, Homo sapiens
cctcaagacggtgctgctcttggccgaccagatggtgtgcatcaccttcgaccaggccaacctgaccgtcaagctgccagatg

SEQ ID NO: 758523 - DNA, 100 bp, Homo sapiens
aaagagaaaatgacagacatctgcaggtcttgtgggctgaagtgccatggcatgatcatggctcactgcaacctcgacctcccggggctcaagagatcct

SEQ ID NO: 758524 - DNA, 113 bp, Homo sapiens
tcttcttggaaaaccagatccagaaactggaggagtcccgctcgaagctagatgccaggatagaagaatttgtttatgagaaactggatagaaaagctccaagtcgtataaac

SEQ ID NO: 758525 - DNA, 82 bp, Homo sapiens
aaacaagctcagggcttccactgattctacattatggaggaattctaaggaaaggtgcaaagctgttcttccgccggcggca

SEQ ID NO: 758526 - DNA, 98 bp, Homo sapiens
agggaagactccaggccatcacaaagacttgcactatctgccagatgctgcttcctaaccagtgcagttatgcatcacaccagagaatccatcagcac

SEQ ID NO: 758527 - DNA, 90 bp, Homo sapiens
tgactttgcacattatgaaaagcgtcaagaagaggaggaagccatgcgtaggagtggtggacatgacaacagagtcaactgcatacagtg

SEQ ID NO: 758528 - DNA, 75 bp, Homo sapiens
caatggactgcgaagaactcctaaacaggtggatccaggcagctatcaatggtgtaataccacaggaaaatggca

SEQ ID NO: 758529 - DNA, 87 bp, Homo sapiens
tggggaacttggcattcaacattaaaaagcggatccaaagacccaggaatgacaggtagtgggcagcagtcagtgacaggtgtaacc

SEQ ID NO: 758530 - DNA, 75 bp, Homo sapiens
aaatgctggtgttcatctgtggttcttctgtgtggcagttcagaatgatggatcaagctagatcagcattctcta

SEQ ID NO: 758531 - DNA, 75 bp, Homo sapiens
gtgaacattcatgcacaaatttttatgtggagattgctgtgctaaggagacagcaacgtatgataaaaaatcgag

SEQ ID NO: 758532 - DNA, 75 bp, Homo sapiens
catccacgcacctgcagctctgctgagagagtgcaagccgtgggacttcgacccccaccacttctggcagtggag

SEQ ID NO: 758533 - DNA, 76 bp, Homo sapiens
cggcggtttccttgcccggggccgcgggaaggccgaccgactgccgcgacaccattcgcttttcacccaagatgat

SEQ ID NO: 758534 - DNA, 75 bp, Homo sapiens
gatgaagtctacgttcattcagggcctgctgtggaagaccagccccaaagatgagctttgatccaaaccttctcc

SEQ ID NO: 758535 - DNA, 90 bp, Homo sapiens
gcccacatgcccgctcacctgcgctgtgatgcctgcagagctgtggcttaccaggccagcaggaagaccaagaagaaggaagggggtgcc

SEQ ID NO: 758536 - DNA, 101 bp, Homo sapiens
tagtgcggggtgccggccacatcactgtgtctgagaaagaaccccagtttaagtttatctacttcaaccacatgaatctcgccgagaagagcacagttcac

SEQ ID NO: 758537 - DNA, 83 bp, Homo sapiens
agatgagcagctcctctacagcttcaacttgtccagcctttccacgagcacctttaaggactcaggatttgaagacaaaaaag

SEQ ID NO: 758538 - DNA, 58 bp, Homo sapiens
ccagaatgagctggagagactgaaagagggaagacatgtaaggaatttgcataagaca

SEQ ID NO: 758539 - DNA, 100 bp, Homo sapiens
gaacaatctccggaaagaagaaatcccagtacaagagaaaacccctaaaaaaaggtgagagatcacaaaatttgtccaggatagacatagagctagaaga

SEQ ID NO: 758540 - DNA, 74 bp, Homo sapiens
gatggattgactatggaaaagttgccaaattgtgccttcccagaccttccaccttaggttctgctgcaaaaagc

SEQ ID NO: 758541 - DNA, 98 bp, Homo sapiens
attagcttcgcagtctggaaagctttaggagttcacagtgcaagaaaactgatcagtgattttgccattatcttgtccattctcatcttttgtgtaat

SEQ ID NO: 758542 - DNA, 75 bp, Homo sapiens
tcagtcaactttggttttagtaacttcagctttagctgcagctgcctctgttcagccacttgcaacacaatgttt

SEQ ID NO: 758543 - DNA, 83 bp, Homo sapiens
agagaagaccaggggaaccgcagtcccactctggcccggaacttgcctgtttggctccccaaccaggacgagccccttcctgg

SEQ ID NO: 758544 - DNA, 75 bp, Homo sapiens
cacacatccccgaccacttgcggcctgagtatggtttccacttgagcggcacagtgacagaacctgcaatacaat

SEQ ID NO: 758545 - DNA, 75 bp, Homo sapiens
ttccacaggaagaaacagaggaggaggaagtttctacagtaaatcctgtggacatctctacagcaatgagtgaac

SEQ ID NO: 758546 - DNA, 82 bp, Homo sapiens
ctcggggatctggctcaggcccacatacagcaacttagcgaagctgccggtgaagatggtctcggcgcggaagatggccggc

SEQ ID NO: 758547 - DNA, 82 bp, Homo sapiens
gaatgctcctaaatgatcgcaaagtgtaccagccagagcagcctaacctggtataccagatggccagtacttccgacgagtt

SEQ ID NO: 758548 - DNA, 90 bp, Homo sapiens
tgaggactttccttacctgtttttccagctcacccactgccagcagagatctccagtctatgtgctgaagaagcagcagcccaagagcag

SEQ ID NO: 758549 - DNA, 95 bp, Homo sapiens
ccacccgccatgaagccccccgcaggacacagtggtctttgaagacgtggttgtggatttcacgctggaggagtgggccttgctgaatcctgctc

SEQ ID NO: 758550 - DNA, 100 bp, Homo sapiens
gaaaggatgacggcaccttcccattggataatgaagtgaaggcctttatgagaggacagaggctatatgaaaaaaatcatttctaccagttcggagagat

SEQ ID NO: 758551 - DNA, 75 bp, Homo sapiens
caccgacctaaattaaatgaaggggtctggaaaaactgcagcatttctgttgcccatcttgagtcagatttattc

SEQ ID NO: 758552 - DNA, 76 bp, Homo sapiens
acaatttattagatggtgacactgcagttggtgatggaattttactgccagtcctgtgagactgccatgtgtcggg

SEQ ID NO: 758553 - DNA, 100 bp, Homo sapiens
ctcgcttcatcaaggaaggcaagcctgcctgcttctgcatcgacagatagccgtcttcagcttgagccccatcactaggcgcctccggcatggcggcggc

SEQ ID NO: 758554 - DNA, 100 bp, Homo sapiens
cttggggcaaaatgtggacaaggatattgatgatgttaagaagttcaaaccgggttacctggaagctactcttaattggtttagattatataaggtacca

SEQ ID NO: 758555 - DNA, 96 bp, Homo sapiens
cggtttcaaacggcttagagcaggccgcttggttctgacccagctgagttttcggctttgtgagaaaccttaccatcaaacacgatggccagcaac

SEQ ID NO: 758556 - DNA, 73 bp, Homo sapiens
accattcttcaagtttgcaaaggttatggaattccactgaaagacggagatgagaaaacagatgaagaagcag

SEQ ID NO: 758557 - DNA, 75 bp, Homo sapiens
ttatgcccaccctccaactttgcgacggaaatgtgtcatcgaaagccaggacttatcaaactggtttcaaagcac

SEQ ID NO: 758558 - DNA, 100 bp, Homo sapiens
tttcgatgatgatgatcctgagactggcatcagtactatgacatagtttatatgaagcctcatgggagactccagaaagtcatgaaccacatcacagacg

SEQ ID NO: 758559 - DNA, 75 bp, Homo sapiens
aaaacagtgtcgctgataccaacaagatcagtgtgcgtgtgaccaccatggatgcagagctggagtttgccatcc

SEQ ID NO: 758560 - DNA, 75 bp, Homo sapiens
ttgatgacacatcagcatttgtttcccttagccagcccgagcaagtaaagattgtatccatatattcctgcacat

SEQ ID NO: 758561 - DNA, 95 bp, Homo sapiens
tttgcgtactgggccgggtctgtccacactgcgcttgttttcctgggattgaatgctggtgggaaggagcagcatttctttctattactactatc

SEQ ID NO: 758562 - DNA, 75 bp, Homo sapiens
gacaccaatgacattgtctggggaaagaggttacccttcagccagctcctgcgatcacttatcgcacgattggag

SEQ ID NO: 758563 - DNA, 100 bp, Homo sapiens
agagcatcaagcagttagaattgagaatctggaactaatgtcacagcatggatgtaatgcctggaaagtatacaatgattttcaaaccagaagaactacg

SEQ ID NO: 758564 - DNA, 50 bp, Homo sapiens
cgcggatctcaccgccgctcaggattatttgcaggtgtcttccctcgaat

SEQ ID NO: 758565 - DNA, 76 bp, Homo sapiens
tggaaacgccgggagctgcgagtgtccagatgccttcaattaagttgcagagttctgatggagagatatttgaagt

SEQ ID NO: 758566 - DNA, 75 bp, Homo sapiens
aagagttacaatactacgtcggacagagttttgccaatgaatcctgttacacctgggatttaggcactttcaatc

SEQ ID NO: 758567 - DNA, 100 bp, Homo sapiens
gcctgaagctcaagggactgtgtccaccctcagggttttggccaaattgggcgagggcacaaaataaccacttaccccttctcaccgaggaagagcggga

SEQ ID NO: 758568 - DNA, 97 bp, Homo sapiens
ccacttcttcacggaccagtttcagttcgccgatgggaaacccggagaccaaatccttggaacatcatcttcagcgggctatttcagcacagcaggt

SEQ ID NO: 758569 - DNA, 97 bp, Homo sapiens
ttgttttatttgtggaagagaagggcacattaaaaaggaatgcccacagtttaaaggctcttcaggtatgcaaccactcatgtattcggttcaggaa

SEQ ID NO: 758570 - DNA, 83 bp, Homo sapiens
cctgaaatgaaatcatttttcactcctggaaaagtgacatgacatgagaattgccttaaaatactcaaggaaaaaaatcctac

SEQ ID NO: 758571 - DNA, 82 bp, Homo sapiens
tttccataacatcatgtccaatgaaacaatcggtacccttgcctttctcacatcagagctcacaatgtctctctgcaccaag

SEQ ID NO: 758572 - DNA, 75 bp, Homo sapiens
tccatcatagtcaactgcgtggaagagaagatctcccttgagtttagaaatctggctgagaaataccaaacagtg

SEQ ID NO: 758573 - DNA, 111 bp, Homo sapiens
gacatgagggaaaagggacgtaggaagaagggcaggacctgggcggaggccgccaagacgcagtagcagccagatgaagaagcggccaacatctgcagtgggctacaagag

SEQ ID NO: 758574 - DNA, 82 bp, Homo sapiens
aaaccaaacaccctcagctccacattgagagcaaaatctacaagatgatgcagggaggaggctgaaggtgatgtggccgccc

SEQ ID NO: 758575 - DNA, 100 bp, Homo sapiens
gagaagcaggacctcgggccatggcaataatgacgatgaggacctgacaccagagcagaaggcagagcgtgagaaggagcggaggatggccaacaatgcc

SEQ ID NO: 758576 - DNA, 75 bp, Homo sapiens
ggagaacacccccccatggaggcgaggtagagttggggtcgcagcaaatccagtttgctgatgacatgcaggagt

SEQ ID NO: 758577 - DNA, 83 bp, Homo sapiens
actggccggcggggctgaccacttaccgcagcatccaagtcggccctgacttcccaagtaagaagcggaagaggagccgctgg

SEQ ID NO: 758578 - DNA, 73 bp, Homo sapiens
gcgcggaggcggaggcttgggacattcttcttttggccgatgaaaaatttgacttcgatctttcattgtcttc

SEQ ID NO: 758579 - DNA, 50 bp, Homo sapiens
ggacgaccaggatgtggagctggaaactggcgatggaatatgagaggagc

SEQ ID NO: 758580 - DNA, 100 bp, Homo sapiens
gacgcacggagaggtgcagctgggatattgctggtgcctggcagaggctggagcaggctgagaagggttacgaggagtggttgctcaatgagattcggag

SEQ ID NO: 758581 - DNA, 100 bp, Homo sapiens
cttcggagcggccggtactgttgaaagcgacaagtggaggcgccgctctagcggccgggactctgaactatggcgacctgtgaccgcatcaagcagtcag

SEQ ID NO: 758582 - DNA, 90 bp, Homo sapiens
cggcgccagcagcccggaggcccggcccgcgcaggaggcgctcctccttcccaccgaaagtactgaaatcccaccttatgtgatgaagtg

SEQ ID NO: 758583 - DNA, 75 bp, Homo sapiens
agcaatggagaagagaaagcacaaagcatggagaccctccctccagagcaccaaaactactttggaatagatgaa

SEQ ID NO: 758584 - DNA, 100 bp, Homo sapiens
cgccttctgcctggtcgggatcccgccccgcccggagccccggcccccacagggggccgaaggccagagaccaggatttggctacggaggcagagcgtcc

SEQ ID NO: 758585 - DNA, 83 bp, Homo sapiens
ggagctgtgcagccgcgaggaggcgcgggaggtgttcgagaacgaccccgagacgctgcggttggatttctcacgatgtccag

SEQ ID NO: 758586 - DNA, 74 bp, Homo sapiens
gaagtttgtgaactcaactggctatttgacagagactgcctctttaagctatgtcccatgaaccgctactctgc

SEQ ID NO: 758587 - DNA, 90 bp, Homo sapiens
catcatgctgcgcggccttcccatcaccatcacagagagcgattgccctgtgggacatcgagaccggccagcagacgaccacgtttaccg

SEQ ID NO: 758588 - DNA, 100 bp, Homo sapiens
ttagtcacccacctacatgttgagggttttgactctgggaggagggctgccttatttggagcaccttaatctctctggttgtcttactataactggtgca

SEQ ID NO: 758589 - DNA, 83 bp, Homo sapiens
ctggagattacagagacactcaagtcctggatcagtgacattcgagcaggaaccgccccttcatgcaggaaccacatcaaatc

SEQ ID NO: 758590 - DNA, 82 bp, Homo sapiens
gatgatacgtttgatccagaacttgcagcaacaatagtgagatggaagattttcgaggtatagcagaagaatcatttccaag

SEQ ID NO: 758591 - DNA, 76 bp, Homo sapiens
gaagaattttccaaatgaatttgcaaaacttactgtagctaatgtgactgtgtccttgcctgtccggggctgtgtc

SEQ ID NO: 758592 - DNA, 74 bp, Homo sapiens
cccacaaacaaactacccattttcttttttggaactcatgagacggtgataaaagaaaatgtggctgaagttac

SEQ ID NO: 758593 - DNA, 50 bp, Homo sapiens
aaatctcaaagccatgtctcaggtattgcgcagcgatgcacggccatcaa

SEQ ID NO: 758594 - DNA, 78 bp, Homo sapiens
taccggcccacgccctccgactgccagttctgcggggagtgtctccagccctgcctgcaggtgccatccccgctgtgc

SEQ ID NO: 758595 - DNA, 100 bp, Homo sapiens
accggaattagcggttccacttcctgtctcctggggttgacgacctagctggagatcctgaaggagctagacgagtgctacgagcgcttcagtcgcgaga

SEQ ID NO: 758596 - DNA, 83 bp, Homo sapiens
ctgcggcctggcggcttccaggcgcactaccgcgggctctgccagcagacagccttggcacacaggcacaagggctggagccc

SEQ ID NO: 758597 - DNA, 100 bp, Homo sapiens
cgccgctgccgctgcgtgggggtgaggggatcagtctatgactttgaaagaagccatcaagtcttcactcatcatcctcaaacaagtaatggaggagaag

SEQ ID NO: 758598 - DNA, 75 bp, Homo sapiens
ctcattcaaggttacccagttggaggagacatcacagctttcccagatcgggaggaaaaatatggaatgtgtttt

SEQ ID NO: 758599 - DNA, 75 bp, Homo sapiens
ttcgtcatgttcttcgcgccctggaccaggaagaaacaggctcctgccagcaccgacagcaacgaaaatgttccc

SEQ ID NO: 758600 - DNA, 51 bp, Homo sapiens
cctggttctcccggagtctacagaggcaggtggaagtcatcataaagtttc

SEQ ID NO: 758601 - DNA, 82 bp, Homo sapiens
ggcaaactgtcagaaaagagtagcctgggctgtctggaaatctgaggccatccggctgtccttagagcaagccctgcctcct

SEQ ID NO: 758602 - DNA, 75 bp, Homo sapiens
agttacgatggcaaaacagcagtgaccgagatcgtcaacaggaacaggcctttgagagcagccagaagtacaaag

SEQ ID NO: 758603 - DNA, 74 bp, Homo sapiens
atcaacccccaagatcatcgagagcttcacctcttccttaaatatatggagtcttgctctgtcccccaggctgg

SEQ ID NO: 758604 - DNA, 100 bp, Homo sapiens
ctttcattgtctcggacgtgcggggcctgggcctcccggtccgcaagcagtggtctcggaaagagggtcgtggtcccgcacggatgcgcttgttgggaga

SEQ ID NO: 758605 - DNA, 74 bp, Homo sapiens
ctgaaggtggaggcgccgcaagcgctgagatgactccaatgatatgtgggaggaccaggaggaggaagaggagg

SEQ ID NO: 758606 - DNA, 83 bp, Homo sapiens
aattgatttgctcttacgtatttgtgtgacttgactcttcaaacacaaagggttgaaaggaggagcaggaggtactgatggac

SEQ ID NO: 758607 - DNA, 99 bp, Homo sapiens
gaacagacaaaccccacaagcactgcatacggtggaagcagggaaaggcctggagatgaggaagctggttctctcggggttcttggccagcgaagagat

SEQ ID NO: 758608 - DNA, 100 bp, Homo sapiens
gtcatggcgtatttcgtcgagaatttttgggaaaatgttctgctgctgccctggatgttcttgcaaatgtgtatcgtgatgaactgctgccacatatttt

SEQ ID NO: 758609 - DNA, 80 bp, Homo sapiens
ttgaaaagactagagacagtacaaggagggagagagatgttccatttaagcagacctcttccatagctgtagctggagcg

SEQ ID NO: 758610 - DNA, 75 bp, Homo sapiens
ccagtggagggggtgcctttctggtgctccccctaagcaaggtgcccacctggactggatttaagtcagaagaga

SEQ ID NO: 758611 - DNA, 98 bp, Homo sapiens
ctccgacttcctcatgaagagactccagaaagggatgacacctttgaggccctgtgcatcgagccgttttccagcccgccagagctgcccgatgtgat

SEQ ID NO: 758612 - DNA, 98 bp, Homo sapiens
atctacagctttcactatggggtggagacgtggtactcagcaagctcgagttaaagttggatgtgctggaacaggctcccagaaccctggccgaagct

SEQ ID NO: 758613 - DNA, 100 bp, Homo sapiens
cggcggtttccttgcccggggccgcgggaaggccgaccgactgccgcggttaaacccatccagagtaatggctgcggccttacccaggaccctgggggag

SEQ ID NO: 758614 - DNA, 75 bp, Homo sapiens
tttatgaagatgcttatgacaaactttctccagaaaatggcgactgataacgttcaatgaagcggacgaaagtgt

SEQ ID NO: 758615 - DNA, 98 bp, Homo sapiens
gagaatgtgacacggacaaggatagttttggctgatgttacttcctcgcgtattgctaaaggaggagttgaccacaccaaaatgagtctacatggtgc

SEQ ID NO: 758616 - DNA, 99 bp, Homo sapiens
agcccgcgcccaacaccttctatgtaggatccctccccgcggcggcgatggcccgagccatgagagtgaggactttccgcgcccattggtgacccttcc

SEQ ID NO: 758617 - DNA, 87 bp, Homo sapiens
ggactccggaaaggccaagacaaaggcggtttcccgctcgcagagagccggcttgcagttcaatttcacattgcccacttatatgaa

SEQ ID NO: 758618 - DNA, 108 bp, Homo sapiens
ccaccatcttcctctgaagacgtagccatcttgctccatgaaggtcaaaatgcagatcttcgtgaaaacccttaccggcaagaccatcacccttgaggtggagcccag

SEQ ID NO: 758619 - DNA, 75 bp, Homo sapiens
ggcgcggctgcgcgaggagcaggaaaagtttgcagaaaaaacttcagcatgtgccaggaacacaacctcaccttg

SEQ ID NO: 758620 - DNA, 74 bp, Homo sapiens
aagatgtcgcagacggccatgtccgaaacctacgtcaccacgttctgcgcttttccgagtcggacatatgagca

SEQ ID NO: 758621 - DNA, 100 bp, Homo sapiens
gaaattttgaacaacattaacactattatttgtgatcttcagcctcaacaggggcttttagctttggaaggagagcttacacccattcttgttcaaatgg

SEQ ID NO: 758622 - DNA, 75 bp, Homo sapiens
tccaggaaattgctgactctgtaaagatttgaatataacctgccgctttgcaggtgtattccacgtggagaaaaa

SEQ ID NO: 758623 - DNA, 90 bp, Homo sapiens
gtttctggatgtatctgagacagacggaggtgtcctatgccagacccagttcagcatccatccgggatgctaacctgtacgtcagcgggc

SEQ ID NO: 758624 - DNA, 82 bp, Homo sapiens
tggggccagggaaccctggtcaccgtctcctcaggagcacgtgaattgcctctgcttacgttcaggccctgtcctaaaccca

SEQ ID NO: 758625 - DNA, 100 bp, Homo sapiens
gggcaatgtgtttctgcatctgctgcccgaagcctgggcctacacgtgcagcgccagccctgctgccccagagcacatcagctatgtgccccagctctca

SEQ ID NO: 758626 - DNA, 100 bp, Homo sapiens
atgtgttcgagtgtaatttagagagcagcgtggagagtatcatctcaccaaagtaatctatgccagcaattatgacaatgttagcagaccatgcagctcg

SEQ ID NO: 758627 - DNA, 100 bp, Homo sapiens
acccgggacactaaaaattctaccttcatacatggtatttaccttgctgtggattgctgactggatggtccatcacttctggaggaaaggaaaggacccg

SEQ ID NO: 758628 - DNA, 110 bp, Homo sapiens
cgagctgagtggttgtgtggtcgcgtctcggaaaccggtagcgcttgcagcatgtttgtttcgacgccggaccgcgtaagagacgatgatgttgggcacggaaggtggag

SEQ ID NO: 758629 - DNA, 96 bp, Homo sapiens
atttgtggggctgggagtatttgtagacacctaccccaatgaggagaagcagcaagaggttcgagaacttgtcttggacaattgcaaatcaaatga

SEQ ID NO: 758630 - DNA, 86 bp, Homo sapiens
aaagaaactggagccaccatcaagctgtctaagtccaaagatttttacccagaacccagtgacttgattgtaaaaatttacagagc

SEQ ID NO: 758631 - DNA, 75 bp, Homo sapiens
tgaagagggaagacacgcggaaacaggagaaatgccggtggttagcttcatcaaaaggaaaacaagtgagaaatt

SEQ ID NO: 758632 - DNA, 74 bp, Homo sapiens
gttcaaggaggccttccagctgtttgaccgaacagcctgccaggagtgaagaaagctttgggcaaatatggtcc

SEQ ID NO: 758633 - DNA, 82 bp, Homo sapiens
cgatgtttcccttggtcaaaagcgcactaaatcgtctccaagctgactacacagacttagtcttctccactccgtgttcctg

SEQ ID NO: 758634 - DNA, 82 bp, Homo sapiens
tcacggccacggcgctggtcaccggggtctgcctggcttccccgggcgctgcctggacaggcctgcctgcgtgctgggacat

SEQ ID NO: 758635 - DNA, 100 bp, Homo sapiens
tctggctcatgcttcaacaacaagaataagcttgcgaaagggaagaggagagctcagaattgccaagatttatgacaggagcttcaggatggttcgtact

SEQ ID NO: 758636 - DNA, 75 bp, Homo sapiens
cggcgacaagggtgttcccgaactagagtggattactggaagaattggttcggaaagagaaagaattacaagcac

SEQ ID NO: 758637 - DNA, 96 bp, Homo sapiens
aacagaacaccaggacatcccagagtctgggaaatggtgacctcacaaagttcggccgtggggatgcctcctccccagccccggccacaaccttgg

SEQ ID NO: 758638 - DNA, 82 bp, Homo sapiens
tgggtcccgccgggtctgaagcctgaacagaaactggcgatggaatatgagaggagccctctggaaagaaaaggacagaccc

SEQ ID NO: 758639 - DNA, 100 bp, Homo sapiens
acctcgaaattcctgaggcgctgggagccgcaccacctaacgctggccgacaacagcctggcgtccgccacgtaggtgatttcaaatcggagaagtccaa

SEQ ID NO: 758640 - DNA, 83 bp, Homo sapiens
gaaaatcatccatctaaagcaccagtaaaatatggtgaactcattgtcttaggattccaaagtcatgtgttgaaatagcggaa

SEQ ID NO: 758641 - DNA, 100 bp, Homo sapiens
gcggcgagtaagatggaagatgaggaggtcgctgagagctgggaagaggcggcagacagcgggatgctaatcctgaggtgacgatgacaatgcttcgctg

SEQ ID NO: 758642 - DNA, 50 bp, Homo sapiens
gaagatgctaattaaagtgaaggtgccacttcggataaaccctttggact

SEQ ID NO: 758643 - DNA, 50 bp, Homo sapiens
agtctgtttgcaaagcacctgaactgttaagtgggcagaccaacatccac

SEQ ID NO: 758644 - DNA, 100 bp, Homo sapiens
ccaagatgtcgcagacggccatgtccgaaacctacgggcgaactttctgaccaagtatacaactacccagagggcctaggagaagtgctgtatagagagc

SEQ ID NO: 758645 - DNA, 82 bp, Homo sapiens
cccagaccctggagcctcagttggaagcagccgatccagcctgcggagcctgtggggcagatgactcttctacaaaagtgga

SEQ ID NO: 758646 - DNA, 100 bp, Homo sapiens
aatacttgctggatggtggactcagagaccaataaaaataaactgcttgaacatcctttgactggttagccaggttccgaggtttggcaccccatctgca

SEQ ID NO: 758647 - DNA, 90 bp, Homo sapiens
gaagccatgcccctcaggctggaacttgccctgtctcctcgcagatgaggttcatgcatgggagatctcagaccagttgttacagatccg

SEQ ID NO: 758648 - DNA, 100 bp, Homo sapiens
gtcgcagcgagctggagccgccggagctccagaaactaaaacgatcactttctttcaagaccaagagtttacggagcaaaagtgctgacaacttcttcca

SEQ ID NO: 758649 - DNA, 75 bp, Homo sapiens
tctactcagcctacggagatgagacaggcgtgcagtgtgcgctgaggccggctgttcggacggaagcatcaggct

SEQ ID NO: 758650 - DNA, 147 bp, Homo sapiens
gagaaatatctacaagaatgtctcagtaaatctgatagtctgcagaaacaaatctcccaaaaggagaaacagctagtcatcagaaattgggccttccctcgtgattcacaccactgtcccatttggagttacatacttggaacacag

SEQ ID NO: 758651 - DNA, 75 bp, Homo sapiens
attgtctgtactgatagcatctaatatttcaggtatgctgctgaaagtgggaatcctctacattggtgggcagct

SEQ ID NO: 758652 - DNA, 101 bp, Homo sapiens
gccgggggtcgcgcactccaagcggcagcccactggagtcccagtcgccacgacaggcggcagccagactgtacaatttgttcaaggaatttttgtagaaa

SEQ ID NO: 758653 - DNA, 75 bp, Homo sapiens
ctttgagaaagccgtgaaggattacatttgctgctgagaggggtcacggggacatctgctccctcctcctgcaac

SEQ ID NO: 758654 - DNA, 75 bp, Homo sapiens
aagtgacgcagctacaattgtccagaaatgttgaaaattgataccaaggccattccactgtttgggaactccctg

SEQ ID NO: 758655 - DNA, 95 bp, Homo sapiens
cttgggacccaccgctgccctcagctccgagtccagggcgaggtgcgcgcggagccatggttatcatgtcggagttcagcgcggaccccgcgggc

SEQ ID NO: 758656 - DNA, 101 bp, Homo sapiens
taaggctgaaatcattgaagtgcttggagtgcagaactgaaagaggacccagatgatgtggtaccagttggccaaagaagagcctggtgttggtgcatgtg

SEQ ID NO: 758657 - DNA, 83 bp, Homo sapiens
ccggagcccaaacccggggcaggcgggcagctgtgcccgggcggcacggccaggtcaaaatgcagatcttcgtgaaaaccctt

SEQ ID NO: 758658 - DNA, 83 bp, Homo sapiens
gatgatgagcagtttgtttctctgtatggcacagaagaatatttgggtttcttgaattcctctgagctttctggacttccagc

SEQ ID NO: 758659 - DNA, 98 bp, Homo sapiens
gtatctcaacaccctgagtgcggatttctgctatgatgacagatttgcttgtaaatgcatcacgaagaggcagcccagaatgaagaaagcaagcagga

SEQ ID NO: 758660 - DNA, 82 bp, Homo sapiens
tgaaatgcttcatgggatggcccctcagcaaaagcatgggcaggcaacaagattgacctggctgaaaggagagaggtttccc

SEQ ID NO: 758661 - DNA, 100 bp, Homo sapiens
cttgcatcagtgggaacaagactacctcctcctttaccccagaacctcctttacacagtatcagaactacaagccagctgccatgttgtgagcacatacc

SEQ ID NO: 758662 - DNA, 75 bp, Homo sapiens
ccttaatgagcatgttgacagcatcgatgctagacagacaatggtagtgaaaacctttatggatatggatcagga

SEQ ID NO: 758663 - DNA, 83 bp, Homo sapiens
attttgatgtttctcatgaacacctagaaggtgccctagacaggcagaagctcctcctggggtagagacagatcttattgatg

SEQ ID NO: 758664 - DNA, 100 bp, Homo sapiens
agacgatctgcacttcgcattttggcattgacatttaattttagggtcctttatatagaagggagagtagaaagaacggctcctgtcgaatgggtgggaa

SEQ ID NO: 758665 - DNA, 105 bp, Homo sapiens
aggctgcaacaaggagaagagccatggaaacaggaggaagaattcccaagccaaagctttccagggaccagttactctccacaagaaaattcacacaaccacagt

SEQ ID NO: 758666 - DNA, 75 bp, Homo sapiens
tggaataggtgtatcaagtaatggtgcaaagcctgaacagcgccccccagagcctgagaccggtgagagtgcggg

SEQ ID NO: 758667 - DNA, 82 bp, Homo sapiens
cgacgagcgcggaggaccgggaggctcccgggcttgcgtggccctgggcgctgcctatggcacagccaagagcggtaccggc

SEQ ID NO: 758668 - DNA, 98 bp, Homo sapiens
gacaaaaccacgcgactcgaggctgtgcgggaaatgtcggagacccatcactggcatgatgaagtggctgtaattgatgaaattcaaatgattagaga

SEQ ID NO: 758669 - DNA, 100 bp, Homo sapiens
gccggaggagcccctcaggcctaatctatgccagcaattatgacaatgttagcagaccatgcagctcgtcagctgcttgatttcagccaaaaactggata

SEQ ID NO: 758670 - DNA, 75 bp, Homo sapiens
agctcctgctccagacatgaagatcgaaagccttcagaggcttgaccactatgctatcatcaagtttccgctgac

SEQ ID NO: 758671 - DNA, 100 bp, Homo sapiens
aaatttgaaccatttgttcttcatgtgcagtgtcgacaattgcaggatgcacagattctgatttcagagacaactgtctgaaccctgccaccccttccct

SEQ ID NO: 758672 - DNA, 75 bp, Homo sapiens
ctctcctgatacagcaggcgctcaccatgttccctggaggcagaggtgtccaggacctgcctgctcacggttcgt

SEQ ID NO: 758673 - DNA, 82 bp, Homo sapiens
aagtatacagaacagattacaaatgagaagctggctatggttaaagcggtatcatgaactgatcactaaatatgggaagttg

SEQ ID NO: 758674 - DNA, 90 bp, Homo sapiens
atcgacgccgcctggcaggccctgcgcaccagacaatgcagatcttcgtgaagactctgactggtaagaccatcaccctcgaggttgagc

SEQ ID NO: 758675 - DNA, 100 bp, Homo sapiens
atccgagggtgtcctgttacttccaagtcatcaccagaaagtgtactaatggtcacttgatgtgcgctggctgttttatccacctactagcagatgcccg

SEQ ID NO: 758676 - DNA, 96 bp, Homo sapiens
ctttaaaggagatgcaggagaaaatacggcattgctagccaagcttcttgaaaggcctgtctacacttgctgtcttccttcctcacctccaatttc

SEQ ID NO: 758677 - DNA, 100 bp, Homo sapiens
gctggcggcgtcggggactgccagggagtggaggggagccaggcggccgcctcagatgtccggtctgtgctacgacagcaaaatgttccaggtgcatcag

SEQ ID NO: 758678 - DNA, 82 bp, Homo sapiens
ttcagtttgcctgtttccgtttttagaaggttctgtttacagaggaagatgtgaaattctacctcgcagaactggcccttgc

SEQ ID NO: 758679 - DNA, 80 bp, Homo sapiens
caagcacgtggtgaagggaaagcagtatatgactctcaacccttctactaagaggaagaatactggatccccagacagga

SEQ ID NO: 758680 - DNA, 75 bp, Homo sapiens
gttccgcgccgggcgtggacggtgtggggcggtcccggccccgcaggtcacgggatggatagccggcctgccatg

SEQ ID NO: 758681 - DNA, 75 bp, Homo sapiens
tactttgaagtagaagaagctgatggccctggccaacgtcaacattgggagcctcatctgcaatgtaggggccgg

SEQ ID NO: 758682 - DNA, 75 bp, Homo sapiens
ggtttgggaaacaaggcttccagtgccaaggtgacaaacagcatgtttggtgcttcaagaaagaagtttgtagag

SEQ ID NO: 758683 - DNA, 100 bp, Homo sapiens
aggctttcaaggatatgctgtattcagctcaggaccaggcaccttctgtggaaggtctcgtgggctgcctaaactaaaagagtcacgttcccatgaatcc

SEQ ID NO: 758684 - DNA, 72 bp, Homo sapiens
gaaaactgaggaatttgaagtgaccaaaacagcagctggctactccaagaccctggcatgaggctgaggaca

SEQ ID NO: 758685 - DNA, 75 bp, Homo sapiens
gtgctgaggaaaatgtcttgcaacgagaaaatgtcattgaatataaacactgtttgattacaaaaaatgagaatg

SEQ ID NO: 758686 - DNA, 100 bp, Homo sapiens
cgtggatcctgctcaccttgggcttggtggcctgcgtgtcggcggagtcgggctgcgtccaaagaggactctgcggctggtgctctggactgcagaagaa

SEQ ID NO: 758687 - DNA, 100 bp, Homo sapiens
ttgaaaagttccttgctgatcagcaatccgagatcgatggcctgaaggggcggcatgagaaatttaaggtggagagcgaaaattcttaacctgaagtcag

SEQ ID NO: 758688 - DNA, 100 bp, Homo sapiens
attgcagcctttgggggacatcctcagtgcctggtctggctgattcaagcaggagccaacattaacaaaccgctcccctcccacccggtcactccgtcca

SEQ ID NO: 758689 - DNA, 83 bp, Homo sapiens
gacatttcccgaggaactagatatgagtacttttattgatgttgaagatgaggtagttggcaaaaaaggagaaagccactaag

SEQ ID NO: 758690 - DNA, 98 bp, Homo sapiens
ctcgcagaggccaggatctcctttaacctgggggcagacgctggcctccttgctgactgcgctgcctcggagcagtccggccgaactgaccatctccg

SEQ ID NO: 758691 - DNA, 100 bp, Homo sapiens
tttccacaatggaaccaattgttttacagtctgttccacatgatcattgtaataaggtaaagtgcaagttaagagttcagacatacaagttggagacctc

SEQ ID NO: 758692 - DNA, 100 bp, Homo sapiens
tgactccacctcgaaggaaaattccccagtgttcgcagttgcagtccatctcaggttttgcgcacagctgcttccagtatgccatccagaagaaatggcc

SEQ ID NO: 758693 - DNA, 100 bp, Homo sapiens
cttggagcacttcctattccactggattgggaaagaccatggcaggtctttactgggattttcacagcagaaatggttctcaagatcattgccatggatc

SEQ ID NO: 758694 - DNA, 96 bp, Homo sapiens
tgaagacagcagccacatcattgctttatgtgtgtaaacaggaacatcgataagtagtgtaaaaacttgcacaatgaaatccgaagccaaggatgg

SEQ ID NO: 758695 - DNA, 51 bp, Homo sapiens
ctgtacttgtcacctcgaattgagcacctctacggcagacacatgcaggcc

SEQ ID NO: 758696 - DNA, 75 bp, Homo sapiens
gatcaataatgtcctggcaacaataggagaattggcacagggtattttactggatgaagcctcaggtgtaaacaa

SEQ ID NO: 758697 - DNA, 73 bp, Homo sapiens
agcatgtttcctcagatttgcagggaacaaactccagaaggccaaatgacgcagggtgatggtgaggattcca

SEQ ID NO: 758698 - DNA, 82 bp, Homo sapiens
ctgcgtgagcgagcagaggcttaaggtcttcagcggggcgctccaggaggcactcacaggattacaagggccagaagctagc

SEQ ID NO: 758699 - DNA, 101 bp, Homo sapiens
aaggggagccagtttgccattcgctggggctttatccctcttgtgatttacctggggttactatgaatgaaaaagacaatttcatgaatgcagaaaatctg

SEQ ID NO: 758700 - DNA, 100 bp, Homo sapiens
tcagtggtgtttttctcaggtgaaaggagcagtagatgatgatgtagcagaaggtatggcctcacaagtcttggtctacccaccatatgtttatcaaact

SEQ ID NO: 758701 - DNA, 97 bp, Homo sapiens
tcccttatcgatattatgagagcagagcatgatcctcttaaggttcataattggacccttgaagacactcttcagtggttgatagagtttgttgaac

SEQ ID NO: 758702 - DNA, 100 bp, Homo sapiens
cggggaccagcagctgtcgccgccgctctcaggaagtggttacctggaaggaaaggagctgcagaacttgatccaggagctccagcaggcgcgaaagaag

SEQ ID NO: 758703 - DNA, 100 bp, Homo sapiens
gttgaggatctttgctcttccatccgcctttgatcgtcttcctcttcagccatccagcataagcttaaatcgtctcagaaggacaaggtccgccagttta

SEQ ID NO: 758704 - DNA, 82 bp, Homo sapiens
ataaagacatcttaattgggcacgaaagagatttggagcaagaggtggtggtggccttcccccgaagaaatttggtaatcct

SEQ ID NO: 758705 - DNA, 100 bp, Homo sapiens
caccacgtttcattggaaaaagtgcagattggatttgccagggcatgtagctctccaggcttgcaagcgattaccagcaaatggtcagctgagacttctg

SEQ ID NO: 758706 - DNA, 82 bp, Homo sapiens
cgggaggaaggaacgaggcaaggagctaaagcagcgtgcgttcagccctggggtgtggaaacaggaagagaactagaactgg

SEQ ID NO: 758707 - DNA, 100 bp, Homo sapiens
cggtcatctaaaggaggttttaaacagtataacagctcgcagattcactggtgcccatggagatcaagcctggcatctccttggcaactgtctcggccgt

SEQ ID NO: 758708 - DNA, 90 bp, Homo sapiens
gaagtcagctgggatgtgctgtaataacccacgcaaaaccgatgatgggctgaagctaaagcactgaggatagtaatgatgacactgaag

SEQ ID NO: 758709 - DNA, 75 bp, Homo sapiens
ataacaagttttgtgcagattgccagtctaaaggcacgtgacacaagctgacctcaagagctccacgttttggct

SEQ ID NO: 758710 - DNA, 90 bp, Homo sapiens
ggagacaaatgctgattgggatggaagaccaaccaagagatcaagctatctctgcgaatcagatgatgaagaacgagagcttcaaatgga

SEQ ID NO: 758711 - DNA, 98 bp, Homo sapiens
gaacatggagtctcccttatgcaatgaagccctggtagatcaactttggaaacttatgaattctggtcacctcatcatctcaaggaggagcattcccc

SEQ ID NO: 758712 - DNA, 111 bp, Homo sapiens
agaagaagaagttgcgaaggatccccaacggggaggccaacgtgaagaaacaatgcagatcttcgtgaagactctgactggtaagaccatcaccctcgaggttgagcccag

SEQ ID NO: 758713 - DNA, 75 bp, Homo sapiens
tggatcctacatgtgccatagggattttttatcaagcagaaatgcatcgaacaacgagaatcaagatcactgagc

SEQ ID NO: 758714 - DNA, 96 bp, Homo sapiens
ggcagccggcacctgacggcgtgaccgacccgagccggtgtcttcaaaaacaaacatatttaaaagattttacttctcatctccaggaagaaccag

SEQ ID NO: 758715 - DNA, 99 bp, Homo sapiens
cggggttcggcggcgggcgagtgactgcggccacgcctgaaaggcgactctcctaaaccaaggtgtatgttggtaacctgggaactggcgctggcaaag

SEQ ID NO: 758716 - DNA, 50 bp, Homo sapiens
agcagcatgttggccaggatatattgatcatggaggtggcctcacccacg

SEQ ID NO: 758717 - DNA, 100 bp, Homo sapiens
cagagatacccagacaacaggatcgtctcgtccaaggtgtacatcggtgagctcccgcaggacttcctccgcatcacgcccacacagcagcagcggcagg

SEQ ID NO: 758718 - DNA, 90 bp, Homo sapiens
cgagaccccgagctctggagctggaaaaacccggatgcagaatcctgatacactatcagcaatgtcaaaccctagagcaatgcaggcctt

SEQ ID NO: 758719 - DNA, 96 bp, Homo sapiens
ctggagccgaggcgcaggtggcgctggaccttcacggcatggtgcaactcccacctgcggaaggcaggcacacagatcgagaacattgatgaggac

SEQ ID NO: 758720 - DNA, 82 bp, Homo sapiens
atggcggatgccctgcagtacctgcagaaggtctctggagacatcttcagcagggccttgggaactccaagacagaatggcc

SEQ ID NO: 758721 - DNA, 100 bp, Homo sapiens
tgacaatctcctcagggaaggggcagcacatcttgtgaaaatgccattgtgtgctggaaacctggcaagatggaagatgatatagataaaattaaaccca

SEQ ID NO: 758722 - DNA, 83 bp, Homo sapiens
gtgcggaggacactcctgcgaccagaggttgacggatatattcagacgttacgacacggatcaggacggctggattcaggtgt

SEQ ID NO: 758723 - DNA, 100 bp, Homo sapiens
taactgtgcaaccccaaacaaatctcctaaccttcagaggctcggatttcttgtctatgagatgaagaaagtgactgagaccgaagatgatagtgatagt

SEQ ID NO: 758724 - DNA, 82 bp, Homo sapiens
acttatcctctaggtcccaggaatgaagactgcaaaattcaaaatggggctcaaggtattcgtttcatctacaccagagaag

SEQ ID NO: 758725 - DNA, 96 bp, Homo sapiens
ggggactggcctggcgtgcactccgcacctcggggacattattgcgcgtggaacggctgcttttggaaggggtcggcgctttgcctgatgacccta

SEQ ID NO: 758726 - DNA, 75 bp, Homo sapiens
gcgttcactacctgcactctaagcgcatcgcacactttgacctgaagcccgagggcaacatccttcgagaccggt

SEQ ID NO: 758727 - DNA, 49 bp, Homo sapiens
tttgccgatttcatgactaaccagtgatatccgacatgaagccagtgac

SEQ ID NO: 758728 - DNA, 98 bp, Homo sapiens
attgaagagtatttgaagtctgtgtcaaacatccatatcataagtggaattttggagatattcaaagaactgataaatttcaaacggaagagagtggc

SEQ ID NO: 758729 - DNA, 82 bp, Homo sapiens
gagaatcgaggagctcaacaagtaagactttgaccccgacgcaggcttcagtgattgccgcggatcagaagcctgagcactt

SEQ ID NO: 758730 - DNA, 82 bp, Homo sapiens
tcggcaaccgctgctggcagttttgccaggtgtttgttaccttgatgtgaagttcatttccaatccgccctccatggtggca

SEQ ID NO: 758731 - DNA, 115 bp, Homo sapiens
gcagtggcccggcgatgtcgctcgtgctgctaagcctggccgcgctgtgcaggagcgccgtaccccgagagccggtgacagagctgaatgaacctctctccaatgaagatcgaaa

SEQ ID NO: 758732 - DNA, 114 bp, Homo sapiens
gagaaggcatgggatcctgaaactaaaagatgtcacaaaggaaaacgaggaaagtcccaggatgactactgtgtcaacatgctacaagtgaaaactgatgagaaactgaatgtg

SEQ ID NO: 758733 - DNA, 82 bp, Homo sapiens
gttcttttgtacttccaaatgtcgcagcgagaaaatgtcattgaatataaacactgtttgattacaaaaaatgagaatgaag

SEQ ID NO: 758734 - DNA, 75 bp, Homo sapiens
ggcgcggagcccgggacgcgcgtacgccctgctgcttctcctggtgcacacatcttgaccaactcagcagcaagg

SEQ ID NO: 758735 - DNA, 99 bp, Homo sapiens
cacccgcccaaggacgagaaggcgccgcacctcaagcaggtggtcaggcagatgatccaacaggcccagaaggtgtttcagaggcgccaggatggttct

SEQ ID NO: 758736 - DNA, 100 bp, Homo sapiens
tttgccattggggtgcagcagctgcaccccaccttgatccagcggacttacggacgaacaggaggcattgaactcaatcatgaacgatctggtggccctc

SEQ ID NO: 758737 - DNA, 83 bp, Homo sapiens
tcctcctccaccgagtcgtgctctcgccccaacccgcgcgccaggctgtctgtccccagaccccagagcacgtccggcaccac

SEQ ID NO: 758738 - DNA, 83 bp, Homo sapiens
gggtggcgaacggggcgagcctggaggattgtcactccaacctcttttcgctggttttaaaatcaaagatgggaaaatcggag

SEQ ID NO: 758739 - DNA, 98 bp, Homo sapiens
gctgatcccttcaactctgaaccagaaaccctgcagaaaatctatttcaggaacttcaggaacattttcaagctctgacggcaacattaaacctcaga

SEQ ID NO: 758740 - DNA, 100 bp, Homo sapiens
cttacgtctgcggaagtgcagctgcctcagttcttagcgcaggtatataatgtttacatggcagggaggcagctgtgttctaagcggtaccgggagtttg

SEQ ID NO: 758741 - DNA, 83 bp, Homo sapiens
cagagatctcccacctcagtgtgggttccatcttacttgtcacgctagatgaacagtgtagtgctattcccacccgtaccatg

SEQ ID NO: 758742 - DNA, 83 bp, Homo sapiens
gtgggcgagaacgtccactgcgggccggcgaaagctggtccttctatatgatccactctttgactggaccatgaatcctttga

SEQ ID NO: 758743 - DNA, 100 bp, Homo sapiens
ccacgatagtgccaggcctatgttggagagctgcaagcgtttgctcaccacggccgctccctgccaagattccaggtgactctatgctttggagaggagt

SEQ ID NO: 758744 - DNA, 100 bp, Homo sapiens
atcctcggtgagatgcagacattggaaggaaaagttcactggagcaagctggacgtaaagaaagaagtgatgcactcaattctgcaatagataaaatgac

SEQ ID NO: 758745 - DNA, 82 bp, Homo sapiens
ttatgccatgtatgctgtatgaagaaaagatcccctaacaacagtgagagagcaatgcgagcagttggagaaatgtgtaaag

SEQ ID NO: 758746 - DNA, 83 bp, Homo sapiens
gtctgtgtcaaacatccatatcataagtggaattttggagatattcaaagatggagcagatggtgctttttacccagatgaaa

SEQ ID NO: 758747 - DNA, 116 bp, Homo sapiens
gaagatggcggacggcgtggaccacatagacatttacgcggatgtcggcgaagagttcaaccagagataattgacgaccttgccaacctagtggagaacacagatgaaaaacttcg

SEQ ID NO: 758748 - DNA, 75 bp, Homo sapiens
aagtgcccgaggagagttaacagtgtcagagatggctttggattccccgttctgtgtgctgctgtctggctcctg

SEQ ID NO: 758749 - DNA, 83 bp, Homo sapiens
ccttgctggtgcatgcgtcgtcggcctctgggcagcagggtgacgagaacaagtcagtgcgcgaccgtttcaacgcccgccag

SEQ ID NO: 758750 - DNA, 100 bp, Homo sapiens
tgagagaggttcctggacctgtgaactttgctgttatagataccatgttatagccattaaaatgaaacaaccttgccagagtgtcaatccatatctacaa

SEQ ID NO: 758751 - DNA, 100 bp, Homo sapiens
gacatttgatgacctccctgcaagatttggttatagacttccagctgaaggtttaaagcagggagaaggttttaaggtgaaaacgaagaaagaaatccgg

SEQ ID NO: 758752 - DNA, 83 bp, Homo sapiens
ctggcatgacgtgcaggtctctagcgcgcccagcagaagtcctctctgtcttctccaggcgcagcccttcagccatgcaatcc

SEQ ID NO: 758753 - DNA, 90 bp, Homo sapiens
ggttctcttcttcgattttatgaaaatggagaactctgtgatgtcacactcaaggaagaggcatggtctcctaccatgcacacaacagtc

SEQ ID NO: 758754 - DNA, 75 bp, Homo sapiens
cctgagctgcgtgagaacccgcccatgaagccagatttctcccaggaggtaatacagattttcattgaagacaac

SEQ ID NO: 758755 - DNA, 100 bp, Homo sapiens
cccctgtttgagaaaaggcctaagaattttggcattgattcaaccctatgaaaagataaaggccaggggcttgcctgataatatatcttccgtgttgaac

SEQ ID NO: 758756 - DNA, 100 bp, Homo sapiens
gcaggtcggtgcacttccagacccacgtcaccaagaactgtctgcactacacgaggagagttggttttcggaatactttgcttggaatttacacatttga

SEQ ID NO: 758757 - DNA, 100 bp, Homo sapiens
cacaaatgcaaatacttgtgcactgggagagtgaatcagacgtcccaatagatgtggagacggtcacatcaacgcctatgccactctatgacaatcagaa

SEQ ID NO: 758758 - DNA, 100 bp, Homo sapiens
cagattaaggaaccagtgaaatttgttccacaggatgtgccaccagaacccaagaagattccgataagaaacacggtagcagcagcagcagcagcagcag

SEQ ID NO: 758759 - DNA, 83 bp, Homo sapiens
tgcgccgtccgccgcccgccggatcccccggaccccccgaccatgatatcatcaagttgaatcgaaaggaagggaagaagcag

SEQ ID NO: 758760 - DNA, 90 bp, Homo sapiens
catcgcctgcagccgagcgggcccgttccgccggagctgaggaccaggttgggggccgtcccgctcctaaggcaggaagatggtggccgc

SEQ ID NO: 758761 - DNA, 82 bp, Homo sapiens
ggatgtcggcgaagagttcaaccaggctcttttccacaatggcccccctgaccagcgcgtcgaccgcggccgcgctcctgag

SEQ ID NO: 758762 - DNA, 82 bp, Homo sapiens
tatctccgctacttcactcgcactatccttgatgctaggtgtcgtgaaaactacccctaaaagccaaaatgggaaaggaaaa

SEQ ID NO: 758763 - DNA, 80 bp, Homo sapiens
cgatccagcctgcggagcctgtggggcagtttcccagcgaggtggtcattcagagcctacacatctgttctgtattttaa

SEQ ID NO: 758764 - DNA, 51 bp, Homo sapiens
ttttggaactgtcaggtacctcaaagcggttttggccaaattgggcgaggg

SEQ ID NO: 758765 - DNA, 98 bp, Homo sapiens
tcccaatcccactgatgaggatcagcccatgctcctgccccggagccgggccctggcgaggcaggaatggccccgaggcctccgaccgccgcgcccca

SEQ ID NO: 758766 - DNA, 90 bp, Homo sapiens
ggcaagcgctgttcaaacccatgaagaagatgttaccgagtacttcagtgaattccttagtgcaggggaacggagtcttgaattccaggg

SEQ ID NO: 758767 - DNA, 83 bp, Homo sapiens
gtgcaggttcgcgggtcgctggcgggggtcgtgagggagtgcgccgggagcggagatatgctcaccatggatgatgatatcgc

SEQ ID NO: 758768 - DNA, 74 bp, Homo sapiens
ccattgttagtgaacgtggacaaagctgttgtctcagggagcacagaagccccaaattctcaccagtccgtctc

SEQ ID NO: 758769 - DNA, 95 bp, Homo sapiens
aattcattgagtcttgtcaaaagatagagccacgaaccccctgaacaaggagctcgactgggccagcatcaacggcttctgcgagcagctcaacg

SEQ ID NO: 758770 - DNA, 151 bp, Homo sapiens
ccggcatctttacagagcagagcatgatcacattcctgccgctgctgctggggctcagcctgggctgcacaggagcagggcactgaagccaaaggcagaagttgatgaggatggagttgtgatgtgctcaggccctgaggagggagaggag

SEQ ID NO: 758771 - DNA, 75 bp, Homo sapiens
ctgcccttccggagtccgccccgtgaggagaatgatggcccactgcgtgaccttggttcagctgtccatttcctg

SEQ ID NO: 758772 - DNA, 78 bp, Homo sapiens
tgatcttttaaaatattacttaagagaatctcaagctgctaagccattggaaaagaagtttgttcgagtttcaggaga

SEQ ID NO: 758773 - DNA, 75 bp, Homo sapiens
gaacgatcaaaagccaagtggcaaacgcatctgggctgatgggccgtaccctgcaccgtgagccacccgcaggag

SEQ ID NO: 758774 - DNA, 90 bp, Homo sapiens
ggaccgtgggcagccagggtcggtgaagacaccattcgcttttcacccaagatgatttgatgtcttataaaactctgatgaaccatgatg

SEQ ID NO: 758775 - DNA, 75 bp, Homo sapiens
cgggccgtgctgcttatggcggcgctggagagggggcgctgagctgttgggatataattgaccctgcaatcctgc

SEQ ID NO: 758776 - DNA, 90 bp, Homo sapiens
ccgccgccgccgccgccgctgccgctgccgctgccgcacctccgtagctgactcggcggtgcgtctttctacgtgaataggattttgtgg

SEQ ID NO: 758777 - DNA, 75 bp, Homo sapiens
gaggacaacgcagatatagaacatttcttttatcacactggtcaattcgggagaggatgtcctcgtgttctacaa

SEQ ID NO: 758778 - DNA, 60 bp, Homo sapiens
tatggtggatgatatgctgcaggaaaagaagcccatctgtgtccagagatcagaatagaa

SEQ ID NO: 758779 - DNA, 98 bp, Homo sapiens
atttgacgggcaaccaatcaatgaaacagacacacctgcacagcaatcatcctcttccagtggtagcgtgtttgggtctggaaacactggaagagggg

SEQ ID NO: 758780 - DNA, 50 bp, Homo sapiens
tgctcctaaatgatcgcaaagtgcaggtccgatcagaaaacaaagaaaag

SEQ ID NO: 758781 - DNA, 100 bp, Homo sapiens
gaaagaaacaatcatgaaccaggaaaaactcgccaaactgcaggcacaagtgcgcattggtgggaaaggaggaagagatagtcgctctggatcacccatg

SEQ ID NO: 758782 - DNA, 75 bp, Homo sapiens
acctggcattgacctctcagatcccaaacaactggcagaatttgctagaaatacatgctacaggatttaactatc

SEQ ID NO: 758783 - DNA, 101 bp, Homo sapiens
aggcggagaaggggcttcctgagcgtcccagtacactgacagagatgcccatccagggaggacttccccctgattgagacagaggatgaggcttacctgcg

SEQ ID NO: 758784 - DNA, 88 bp, Homo sapiens
acgaacatcccggtgctaggggtgcaggaggaggacggcagcaaccgcagcagcagccttcaggtttttcgttggaatatacgttgca

SEQ ID NO: 758785 - DNA, 90 bp, Homo sapiens
cacagtggctgaacaccaggaaggaactggcacttggagtccagacatctaaaatttgatggcagaaacggtggacacaagcgaaatggt

SEQ ID NO: 758786 - DNA, 96 bp, Homo sapiens
aaatcagatcgcactcctgaaattaggaaaattgccactgctttataaggagaatcttatttatactgctgatccagaatcctttgaagtaaatac

SEQ ID NO: 758787 - DNA, 110 bp, Homo sapiens
caggcagcaccggaggcccaggtctccgtgcagcccaacttccagcaggacaagctttagcgtcacctccctcactgggcagcatgggggagaagtcagagaactgtggg

SEQ ID NO: 758788 - DNA, 90 bp, Homo sapiens
catcatctcattctccagggatcagtgcggcctggacagcgcctcctgcttccaggtggtctcgctgatgaaagggctcgctcaaggggg

SEQ ID NO: 758789 - DNA, 97 bp, Homo sapiens
cgcgcagccgagaagatgtctccgacgccgccgctcttcagtttgcccgaagcgcggacgcggtttacggtattgttgcagcatctggcagtgagac

SEQ ID NO: 758790 - DNA, 87 bp, Homo sapiens
caggaagcaattctggaagcgcagcaacagcaagctcccgggcagagacgaggtcttgctacattgtccaggatggagaagtaggaa

SEQ ID NO: 758791 - DNA, 96 bp, Homo sapiens
gagcaagaaaagcctctgggagcagaagggaggctccaagacctcatcaacaattaaggtccatggggccgatgtatgggagatgaatgtggtccc

SEQ ID NO: 758792 - DNA, 75 bp, Homo sapiens
aaggatttgaagctggcagtctggttccaggccccagcacccgcagagcagacactgcgatgacaacggacgaca

SEQ ID NO: 758793 - DNA, 87 bp, Homo sapiens
aatggaccaaaatgaacacagtcactgggtgctctatgcccaggtctctgtggctgggctgctccagcctggcggacagcatgcctt

SEQ ID NO: 758794 - DNA, 51 bp, Homo sapiens
ccgcagcgatgggaagacgtgtgcaattcattcggctcctaaagaagtagc

SEQ ID NO: 758795 - DNA, 90 bp, Homo sapiens
cacggacagactcatggggaagggccaggtccaggcagacctcaacaccaacatcgaggatgaaggcagctccttctatggggtctccag

SEQ ID NO: 758796 - DNA, 75 bp, Homo sapiens
ctgccatctctacttccatccctgtaatttcacagccccagggctggtggactaggcctcaattttgtcggtgcc

SEQ ID NO: 758797 - DNA, 75 bp, Homo sapiens
gcaggctccgggctgaagattgcttctcttctctcctccaaggagccgggtgtgggctgagccctgcctgattga

SEQ ID NO: 758798 - DNA, 100 bp, Homo sapiens
ctacacagtaccagaggtggggactgttgttggaggaacactttccaggtacaggtttgcagattccgccagcagcacagcaagctctacagatgagtgg

SEQ ID NO: 758799 - DNA, 98 bp, Homo sapiens
gccgtcccttcctggtccaaagtgaaccagggtctcatccgcatgtataaggccgagacccagctcatccagatggtggtgtggatgctgcagcgccg

SEQ ID NO: 758800 - DNA, 96 bp, Homo sapiens
ggctccaagcggaagcagtcgggcagagctctgatgacatcaaaggcagaaattctcaggatcataaaaggattcctctgtactagcacactcccc

SEQ ID NO: 758801 - DNA, 100 bp, Homo sapiens
gtcaccgccagcacgcgcctgcttcccgtctgcgcgagtccacgcagctccccagtttgttggaccagattccagacatgtttgcagactctaatgaaaa

SEQ ID NO: 758802 - DNA, 145 bp, Homo sapiens
cgctgctgaacgctttcaccgcaacttttgagctaagtgatgatggccgctttgaggtgtggaatgcgatgactcgggcaacgggcatgaggaggtagttgcatgcgcctgggatggacagacatatatcattgatcacaaccgc

SEQ ID NO: 758803 - DNA, 82 bp, Homo sapiens
ctgccgtcgccgccgccaccatgcccaagagaaaggatccctggagttgcagctaccagacatggtgcgtggggcccggggc

SEQ ID NO: 758804 - DNA, 142 bp, Homo sapiens
aagatggacctgttgaactatcagtacttggacaagatgaacaacaatatcggcattctgtgctacgaaggtgctggagaatctggtaaaagcaccattgtgaagcagatgaggatcctgcatgttaatgggtttaatggag

SEQ ID NO: 758805 - DNA, 82 bp, Homo sapiens
cgcgagcacagagcctcgcctttgccgatccgccgcccgtccacacccgccgccaggcaagagcggtgagcggggcgcctat

SEQ ID NO: 758806 - DNA, 75 bp, Homo sapiens
caagcttagagcgtctggccaagaatcagaggaagtggtgcagagcagagcgggcggaggaccccgggcgcgggc

SEQ ID NO: 758807 - DNA, 82 bp, Homo sapiens
cccgagtatgcttcgtttttcgccgtcatgggcgcctcggccgccatggtcttcagcggtgtgggcaagagcagtttactgt

SEQ ID NO: 758808 - DNA, 98 bp, Homo sapiens
ctcagcgttcccctctggcgcctttgctgctcctctctctgcacgccgttatggaacacctgaagagctacaagaactggtagacacagctcattcca

SEQ ID NO: 758809 - DNA, 83 bp, Homo sapiens
ggacagttcgctacacagcaatgcatcgagatgatgattattccccaccttctaagagacaaagaccaacgagccaccacagc

SEQ ID NO: 758810 - DNA, 89 bp, Homo sapiens
cgaggagctgttcatcgaacagaaggctggacgactgtggcctcacggaagcacggtgcaaggacatcagctctgcacttcgagtcaac

SEQ ID NO: 758811 - DNA, 74 bp, Homo sapiens
ccgagacagaactcgtcagattcttgcctgcaggccaaggcagaggcttcctcaggagaccatcccactgacac

SEQ ID NO: 758812 - DNA, 71 bp, Homo sapiens
ttgatccagaacttgcagcaacaataggaggctgatccgatagagtaatacctaattatatcaccatgaga

SEQ ID NO: 758813 - DNA, 111 bp, Homo sapiens
gtgcctccattcccgggaggggggagcggcgttggaggccaccgtttccagattattgcttgggttagaatatgccctactggtttggtggactcctaaagtagaacatca

SEQ ID NO: 758814 - DNA, 100 bp, Homo sapiens
accgccacagccacgatcatggtggcgacatgtctaagaatgtgagccagtcacagatggcaaaattgaaccaacaaatggccaaaatgatggatcctag

SEQ ID NO: 758815 - DNA, 88 bp, Homo sapiens
tggccatccgaagcaagattgcagatggcagtgtgaagagagaagacatattctacacttcaaaggagaacagtctcaagtccgggaa

SEQ ID NO: 758816 - DNA, 96 bp, Homo sapiens
gcgggtccgtgcgcccagcgtcccagggcccaggccgagcagacaatgcagatcttcgtgaagactctgactggtaagaccatcaccctcgaggtt

SEQ ID NO: 758817 - DNA, 50 bp, Homo sapiens
agctgcagccgcacctggccaagggaaactgctgcctctgttgaggtcgg

SEQ ID NO: 758818 - DNA, 100 bp, Homo sapiens
aaagggcttagcagagagcctagcacctactgagcgctcagtaaaggcatgttatgttacccagagaactttccaaacaagtacctaaaactcatctgat

SEQ ID NO: 758819 - DNA, 83 bp, Homo sapiens
atcaagttcatcagcgagactctgcggcgcatggaggaggaggagatttagtacctcaagacaaactcttatgtggattccag

SEQ ID NO: 758820 - DNA, 75 bp, Homo sapiens
aagatgaagtccaaggaggaagagactgctgtcaaaatgcagatcttcgtgaaaacccttaccggcaagaccatc

SEQ ID NO: 758821 - DNA, 90 bp, Homo sapiens
gatgtggaggaaaacaacttcgagggcagacgagacggtcatctgttccagccgggccactgtgatgctttatgatgatggcaacaagcg

SEQ ID NO: 758822 - DNA, 100 bp, Homo sapiens
tcagagggaaagactgtgcagtaattgtcacacagaagaaagtacctagttcattgccaaattttaaacaaaacgagttttcagttgttcggcaacatga

SEQ ID NO: 758823 - DNA, 100 bp, Homo sapiens
cgctttcccacccgagagccgcgagcgcccggccgaacccgcgatggaataatgcccagcggcccgccaggtcccgctttgtgctgatgaacatggtcac

SEQ ID NO: 758824 - DNA, 75 bp, Homo sapiens
agtcctaccatgtcagccttcccagtagctgggaccacaggaatgtgcggcaagaggagaagactatgagaaagt

SEQ ID NO: 758825 - DNA, 75 bp, Homo sapiens
gccaactacacagaccttactccccttagaacaggcctgtaaaagaggaaattcagacatcgtacgactcgtaat

SEQ ID NO: 758826 - DNA, 75 bp, Homo sapiens
caaggaagcctggttcagcaggtggccctaaggttggaggtacaaattctgagctgtctaacccctctgaaacgg

SEQ ID NO: 758827 - DNA, 100 bp, Homo sapiens
ctccaagtgtgagaggcaaagtctggagcttagccattggcaacgagttaaatatcacccacgatgaagtggaaagggaaggacctctttgatttggtgt

SEQ ID NO: 758828 - DNA, 83 bp, Homo sapiens
cttggtctacaatgctctgcacctggaagataaatcggcacaaaattgtcaccgagaacaactgaggctgatgtgaatccaaa

SEQ ID NO: 758829 - DNA, 96 bp, Homo sapiens
tctaccatctccttcagcttcatggtcagcaccttcttcagcaaagccctgggcgctgcctatggcacagccaagagcggtaccggcattgcggcc

SEQ ID NO: 758830 - DNA, 100 bp, Homo sapiens
gctgatggtgctgtctccacggttggatcacactcgtgcagtcaattatttcagcaaggtcagtaacagatccaagagatggaaagagagtagcgctcaa

SEQ ID NO: 758831 - DNA, 50 bp, Homo sapiens
catatgctaggccactatacagattttttcagaagaagtgaagtcaagat

SEQ ID NO: 758832 - DNA, 50 bp, Homo sapiens
cttgttaactacaacagaccatctgattgcatttgcacacgattcaactc

SEQ ID NO: 758833 - DNA, 100 bp, Homo sapiens
cttcgggcggaggaggaagtaggggtgcacctcagcactatcccaagactgctggcaacagaattatatccagatcgagagacagaagattctgaaaggg

SEQ ID NO: 758834 - DNA, 50 bp, Homo sapiens
cccggtgcagctagaagtccatatcgacaggtgcagttcaggagcagatg

SEQ ID NO: 758835 - DNA, 51 bp, Homo sapiens
gaacacgctgcttcacctcttcgccggcggctgcatgaaagcggttacgat

SEQ ID NO: 758836 - DNA, 100 bp, Homo sapiens
ccgcgcacagctgctcccttcgccttcgccctttccacctcgcggcagttcggcctgcactgcccaaagtcttggaaacttgctggatatgatgtaccgg

SEQ ID NO: 758837 - DNA, 100 bp, Homo sapiens
cagaacactggcttttcctttggtaataccagcaccataggacagccaagcaccaacaccatgtggtaagcatccgtggcattcaagacgaagatccccc

SEQ ID NO: 758838 - DNA, 100 bp, Homo sapiens
aacaagcaagcatgcagcttactgcttgaaaggtcaatggctgtctgcttgaccctgtgcctcctgtcctggtgcggaagggatgccagtcactgcccag

SEQ ID NO: 758839 - DNA, 90 bp, Homo sapiens
cgtcgcagtttccagcccgacgagcttgttttgtcccggactcgaaataacatctgctttgctgccgagctcagaggagaccccagaccc

SEQ ID NO: 758840 - DNA, 104 bp, Homo sapiens
agaaaatgctttatttttgtggcaggcatctgtgggatctgtaatagaaatggcatgcgacagggggaatggctcgcttcagtgccctgctgctcaaagctcta

SEQ ID NO: 758841 - DNA, 100 bp, Homo sapiens
tgatgatggctttcagatctgtgcagaaagtattgaaggtctacttccccagcaggacagcatcattctcctatatcttctagacatcactcatcttcct

SEQ ID NO: 758842 - DNA, 50 bp, Homo sapiens
ggaggagccagaaattgacagcccaggggcattagtgccagcagtagttc

SEQ ID NO: 758843 - DNA, 75 bp, Homo sapiens
ctggggccctggcactggggctctgtttggtcagatgaagactgggtggagaagtttgctgggaagaggataaag

SEQ ID NO: 758844 - DNA, 75 bp, Homo sapiens
ggttgccttggaaaatgccaacgccgtgtctgaagtctgcctaccctcctaggctgagctggggtttacccaaat

SEQ ID NO: 758845 - DNA, 75 bp, Homo sapiens
ctggtgctggtattggaacagtctttggcagccttatcattggttatgccaggcaattcttcagttagatagtcc

SEQ ID NO: 758846 - DNA, 78 bp, Homo sapiens
ccactggcgtcttcaccaccatggagaaggctggcagtgatggggccaagattgggaactgcccattctcccagagac

SEQ ID NO: 758847 - DNA, 83 bp, Homo sapiens
gccatattgtgtcttccccggccggtccctcgcctcccggccgagctgacgcacatggattaattgatgtatgttgagtttat

SEQ ID NO: 758848 - DNA, 89 bp, Homo sapiens
ggacaaacagatatccagatgctaaaatggacccaatgaacatctgggatgacatcatcacaaatcgagcctgccttctggtacaagat

SEQ ID NO: 758849 - DNA, 50 bp, Homo sapiens
gtggggacttctgcattcaggttggcagctcgccctcccctacctgcgga

SEQ ID NO: 758850 - DNA, 75 bp, Homo sapiens
caaaattgtgagaaacctaatggaatctttagctcagggagagcttatggatggagaccaaacatccagatctgg

SEQ ID NO: 758851 - DNA, 100 bp, Homo sapiens
aagtaccttgagacactcctttactcacagcagcaggtctgctgtgcacgtgctgcagaactccatagacagcctcactttgtgctcgggggcctgtccc

SEQ ID NO: 758852 - DNA, 98 bp, Homo sapiens
gcagtcacagactcacctgccaggaagctgcgttcctttgcctgcaacaggggtcaagatgagttttgcctgacttctttgatgtcctgaactttccg

SEQ ID NO: 758853 - DNA, 100 bp, Homo sapiens
gaaatacgttttcaatggattgccacagtaagaaccatccgggtatggctgaaaagagacagtggtcaatactggcccagcatttaccacacaatggcct

SEQ ID NO: 758854 - DNA, 100 bp, Homo sapiens
aaagctgatctacaacaacatttatttccagaaaagaatttctgcttggacactgcatagctgctgggaaaatgaacatcagtgttgatttggaaacgaa

SEQ ID NO: 758855 - DNA, 98 bp, Homo sapiens
gcaggaggggctcaggaacctgggcatccctctgggccaggacgccgaggaggttgacatgatgaaagaagcattagaaaaacttcagctcaatatag

SEQ ID NO: 758856 - DNA, 82 bp, Homo sapiens
gactgcagaaggtgctgagggagtctgcgcgggacaaaatcattttcctacacgggaagccgaggtgctcggtggagtcatg

SEQ ID NO: 758857 - DNA, 100 bp, Homo sapiens
gacctctacgagctggaggaggagtattactcgtccagtgtggccatcctgctctacctgacgcgcaaatataaggtccctgactactggtaccctcagg

SEQ ID NO: 758858 - DNA, 100 bp, Homo sapiens
ggaaactgacggagacgcagatgtggacttgaaagaagctgcagcggaggaaggcgagaggggtctggttgctgcttacagtggtgacagtgacaatgag

SEQ ID NO: 758859 - DNA, 100 bp, Homo sapiens
taggccgccctccccactgttaccaacatgaagctgctcgcagcaactgtgctactcctcaccatctgcagccttgaagccagtttcaagcgcccggtag

SEQ ID NO: 758860 - DNA, 98 bp, Homo sapiens
tgatgatgatgacttttaccaccaggatattgtactaaatgaagttaaaaaagtggattctgaatacattgctacagtctgtggcagtttcagaagag

SEQ ID NO: 758861 - DNA, 75 bp, Homo sapiens
ttcggactatttgtagtcatgtacagaacatgatcaagggtgttacactggatgaaatctgtaagtacagacctg

SEQ ID NO: 758862 - DNA, 74 bp, Homo sapiens
gaaatgcttcgaaataatgaatccaaaatccttcatttacaggtattggtggtaatttggtggccattcaggct

SEQ ID NO: 758863 - DNA, 78 bp, Homo sapiens
cgggacggacatgcgcgggagggcgccgcggggcagccgccgctcctccgggtttgttgcatattctaaggacccaga

SEQ ID NO: 758864 - DNA, 100 bp, Homo sapiens
cagcccgtgacattgctgtggtctcgccatacaacctccagctcctcctcccccgtgtctgtggtgctgtgcagcctgaggtcaaaggaggaaccatgtg

SEQ ID NO: 758865 - DNA, 100 bp, Homo sapiens
cttaagctggtggagaaactcggaggatcccttttcccccagaaattactcaatgctgaaacctctcaaagtggtattagagacgctgaaagcaccatgg

SEQ ID NO: 758866 - DNA, 75 bp, Homo sapiens
tggagatgcttccgaactgtgggcaaaaatggcgccatcatctgccctccaccatccatacctacgtttgcaaca

SEQ ID NO: 758867 - DNA, 75 bp, Homo sapiens
cacagaccttcgcctcgccccgccggttcctcaccctcggggagcaacatgggagtccaaaactacttacctgga

SEQ ID NO: 758868 - DNA, 98 bp, Homo sapiens
tagtcaatgtgacatgcgtttcatacagaagtacctgcttcagagacatgagaagattcatactgaaagcgaaattattattgacgatggacaatttg

SEQ ID NO: 758869 - DNA, 100 bp, Homo sapiens
ggagattctccggggacccttccgtatctgcctaggcattttgctgtctcctcctaatacggctgacggagccagtgcagccggaaggaaaagcactgcg

SEQ ID NO: 758870 - DNA, 100 bp, Homo sapiens
cagcatttcatccctcgtcgaaaggattggattggcatctttagaggttaagtttagagcaagttgacatcttatggcattgtttagtagaagattctga

SEQ ID NO: 758871 - DNA, 83 bp, Homo sapiens
cttcctgcaggtgtaccacaccttcctcaggattgcagagaccagacaatgcagatcttcgtgaagactctgactggtaagac

SEQ ID NO: 758872 - DNA, 100 bp, Homo sapiens
ccgctgcctgcgccgccggccgggcatgagttagtcgcagacatggacaccaaacatttcctgccgctcgagaggaggttcagatgagcccctgctgact

SEQ ID NO: 758873 - DNA, 100 bp, Homo sapiens
gtggtccggccatggacgacctcggaatgtatcctgtcaggtataatgtcagtgaatggcaagaaagttcttcatatggatcgaaacccttactacggag

SEQ ID NO: 758874 - DNA, 100 bp, Homo sapiens
ggattctggcatcagggaggctttcagccggagaagcgagtttcagctggtattaatctctggagaagacacatccacagttagcactttcttcagatgc

SEQ ID NO: 758875 - DNA, 90 bp, Homo sapiens
ctttctaattccatgacctcacttgcaacttcccagcattccccaggaataaaattgaagggtgtttttcttagagaacatcatttgtca

SEQ ID NO: 758876 - DNA, 90 bp, Homo sapiens
tgaggagcccccaccctcccgagacacgctgaacacaactcttcattacctccactcactgctcaggccggccccgggctccaccgcccc

SEQ ID NO: 758877 - DNA, 98 bp, Homo sapiens
ccaagcctctcagcttcggagaatggagtcttccatcaatcatatctcacagggtcccaggccataaaacaacggagagctgtacttgcttgtcactt

SEQ ID NO: 758878 - DNA, 98 bp, Homo sapiens
ctcctctgcgctctggctcccggcgcccccggacccgcaccaggtagtttctctccctggctcatcttgcatgcttgctctgatggaaaaggtcacct

SEQ ID NO: 758879 - DNA, 100 bp, Homo sapiens
tggagagaagcagcggatcagcagaggtgtccaggatgtggaggtgcacttggaggaccagatggtcttggtacacaccactctacccagccaggaggtg

SEQ ID NO: 758880 - DNA, 100 bp, Homo sapiens
agcgtttccgaggtgaaggcgccgcgccaggccgggcgggcggctcccaagaaacatttgcaaaatgggattatccgtggctaccaaataggttaccgag

SEQ ID NO: 758881 - DNA, 107 bp, Homo sapiens
ggtgggaaggcgatggcggatttagataaactcaacatcgacagcattatccaacggctgctggaaggtcaaaatgcagatcttcgtgaaaacccttaccggcaaga

SEQ ID NO: 758882 - DNA, 50 bp, Homo sapiens
cccttccccacagctaggaaccaaggtttatgatgataaagactacagga

SEQ ID NO: 758883 - DNA, 87 bp, Homo sapiens
atataactgctgcagagggtaaacttcacaacatgatagttgatctggataatgtggtcaaaaaggactggaagcaaccccaaaatt

SEQ ID NO: 758884 - DNA, 122 bp, Homo sapiens
ccggccccggcctggtcctggccccggagctgttgctggacccctggcagggcatccgtgtcattctggaccttactcccaactaccggggtgagaactcgtggttctccactcaggttgac

SEQ ID NO: 758885 - DNA, 83 bp, Homo sapiens
gtccttacagccgctcgtcagactccagcagccaagatggtgaagcagatcgagagcaagaattcagaaggagctggcggaca

SEQ ID NO: 758886 - DNA, 83 bp, Homo sapiens
ggttaagtctgggctgtgcagccagccaggttttaaaatcaaagatgggaaaatcggagaaaattgcccttccccatggccag

SEQ ID NO: 758887 - DNA, 100 bp, Homo sapiens
aaagtttatgacgcgccgtggtttttgattctggcggaagccttcccgagtcgagagaacgtgcaggccctgggaggagcggggacactgaggacctctc

SEQ ID NO: 758888 - DNA, 82 bp, Homo sapiens
actgaaattcatcctgagatgaggctggacggcagtctggaaacgaccaatgagatcttggactctgcctctcacgactgcc

SEQ ID NO: 758889 - DNA, 100 bp, Homo sapiens
gccacgcagccggccaccgccgagacccagcacatcgccgaccagcggagtttaagagagctgtgaaagtagcaacaggacaagaactctcaaacaatat

SEQ ID NO: 758890 - DNA, 74 bp, Homo sapiens
ttgaaatggacagtggagatgaagcctaagaatatgatcaggaatacaaacagaagcttgcacgagtaacccag

SEQ ID NO: 758891 - DNA, 100 bp, Homo sapiens
ggcagcggggtccgggtccggagcgccacagaagaaggtagataatgactataatgcccttcgagaaagactcagcaccttgcctgataaattgtcttat

SEQ ID NO: 758892 - DNA, 98 bp, Homo sapiens
cgaggctagggaggacctcacttccccggggtgtaataatgttaactgagattctgaagggagtggtaatggaagtgaagatgcttcaaaggacagtg

SEQ ID NO: 758893 - DNA, 89 bp, Homo sapiens
ctcggagattggctgcctcatccgcttctatgcagatgtgttgcagcatgccataatccacaagaagcatactgggaaaagtcccattg

SEQ ID NO: 758894 - DNA, 100 bp, Homo sapiens
tggctccctcctcccagggccaggcgccgctcagaacggtgaaaggtgtagcagtcactcggcctacacccacagcatcgaccttgtgaacccagcgacc

SEQ ID NO: 758895 - DNA, 100 bp, Homo sapiens
tccagatcggatcacggtgagggaaagatgagcgaggagacggcgacttctgacaacgagtaagaatgattgatgttggctgatattggagtgctcattc

SEQ ID NO: 758896 - DNA, 50 bp, Homo sapiens
gttttgtgcagattgccagtctaaagctgtccctacctggctcgcaagct

SEQ ID NO: 758897 - DNA, 83 bp, Homo sapiens
ctggaccgtcgccttgctcctcgccgcggcggggactgcaggtggtcaagtaccccctgcacgccatcatggagatcaaggag

SEQ ID NO: 758898 - DNA, 96 bp, Homo sapiens
tcagatggtacagattgctgcagtggaaaatcaggtgaccaagaatatggcccaggtgaccaaagccctggacaaggccctgagcaccatggacct

SEQ ID NO: 758899 - DNA, 96 bp, Homo sapiens
cagaggaaaatagtatgggaattcctattatggaggtgctaatgatgctggataactatgtaagagatttcaaagcattgattgactggattcagc

SEQ ID NO: 758900 - DNA, 98 bp, Homo sapiens
cccaatcttgcatcagtgggaacaagactacctcctcctttaccccagaacctcctttacacagtatcagaacgttatatcttaagtgtggtgctgct

SEQ ID NO: 758901 - DNA, 98 bp, Homo sapiens
cccctttgccaggttcaataagggcgagctggagcggcagctgctgcaggccaaccccatcctggaggccttcgggaacgccaagaccgtgaagaatg

SEQ ID NO: 758902 - DNA, 82 bp, Homo sapiens
ggtgggtgcaagatgccgctgccggttcaggtgtttaacttgcagcaaacggggattcagcgtccgatcctttggaacaggg

SEQ ID NO: 758903 - DNA, 51 bp, Homo sapiens
tgacaacgtggatcgttgttttgaaacttggttgaatctggcgatgtggaa

SEQ ID NO: 758904 - DNA, 75 bp, Homo sapiens
agagacggagccccggctcgcccgtgtgcagagtacctggagtagaacagaaaaattattatgtctgtgttccct

SEQ ID NO: 758905 - DNA, 101 bp, Homo sapiens
aaaatatcttcaactctcaaagtagaaccctggagcatttcctccctctgctatttatacacggaaagacttactacagcgatctacccatattgccacca

SEQ ID NO: 758906 - DNA, 96 bp, Homo sapiens
ccgctccagaaatggggttgtgatataaagacagggatatgagtgaagaaaacacagagccaccctggaaagatgttaagggaagctaaggagaag

SEQ ID NO: 758907 - DNA, 101 bp, Homo sapiens
gcaaggaggccgtcaccttcaaggccgtcagacaagctattgacctgaaaagtggttctggaaaagtgtaccaaggccctgcaaaaggtgctgctgataca

SEQ ID NO: 758908 - DNA, 98 bp, Homo sapiens
accttacaagtatccccgttcgccaccaattatgggagggctggccaacttctgctacagacgactcagcaaaaatctccagccctacagagactgag

SEQ ID NO: 758909 - DNA, 99 bp, Homo sapiens
catcttggccatcactatacacaacgttccaggatcgaacctgcaagcacttatagacagtactcgggaaccaaatagctctgcacaaattgatattgt

SEQ ID NO: 758910 - DNA, 83 bp, Homo sapiens
gacggagggaatctggcgaggggactcggcgaggggacgcggcggctcctcagcccaaatacacgataagaatactccatgga

SEQ ID NO: 758911 - DNA, 48 bp, Homo sapiens
atctcagaggcaccgactgggaggttggatgattgatgagaacattcg

SEQ ID NO: 758912 - DNA, 82 bp, Homo sapiens
cccaggaagctttggatcagacttttgtgttgcagttcggggggatatgagactttctactcggaatatcctgagtgttgcg

SEQ ID NO: 758913 - DNA, 50 bp, Homo sapiens
gtttaatagagtatgaattcagggcctgaccaaagatggcagtaatgaaa

SEQ ID NO: 758914 - DNA, 100 bp, Homo sapiens
ggccaggtacaggatacgtacctgtggagttttggaaaaaaacaggagtacgagagggcctccaaagtggaccagtttgtgacgcgcttcctgctgcggg

SEQ ID NO: 758915 - DNA, 75 bp, Homo sapiens
agggggtggagttcgatgtgctgcctgcctttgatgccctgggattttgcaggttaattcctcacacacgttcac

SEQ ID NO: 758916 - DNA, 111 bp, Homo sapiens
gtctggagtttatctggagtgaggtggccggttcttggtgggatctgagcagacttcccaagtaagaagcggaagaggagccgctggaaccaagacacaatggaacagaag

SEQ ID NO: 758917 - DNA, 100 bp, Homo sapiens
ttaagaggaagtgattcggagaaactgagagcattgaatgtgcaggttctttcagctcttcacagaggtcctccaggatcaaggggaccactgattccac

SEQ ID NO: 758918 - DNA, 75 bp, Homo sapiens
agcagctgctgtaagacagtctaaactacgaaatacaccttatcaggccaaatttgagtttcatcatggtgacta

SEQ ID NO: 758919 - DNA, 89 bp, Homo sapiens
caggatattattaaagattgttatggcatcaccaaatggctgcctttaatattggttgggaacaaatctgatctggtggaatatagtag

SEQ ID NO: 758920 - DNA, 90 bp, Homo sapiens
cattttatgtaagagaaacagaccagagttcctccgatggccaggaaccttttagtacttccgggtgatcagcccatgacctaaacctcc

SEQ ID NO: 758921 - DNA, 100 bp, Homo sapiens
tgtcaactttactgagaattttccacctcctgacacaacaccactcagaagggaaaaggccgaggcatcagcgtgtgaagaccgcaaagacgatcccgag

SEQ ID NO: 758922 - DNA, 135 bp, Homo sapiens
ggcggacgggaaggcgggagacgagaagcctgaaaagtcgcagcgagctggagccgccggaggtgtggatgaggtcaccattgtcaacattttgaccaaccgcagcaatgcacagagacaggatattgccttcgc

SEQ ID NO: 758923 - DNA, 101 bp, Homo sapiens
aggtggaagtccaagtcaaacgcagaaggactgcctcactgagcaaccaagagcagcctgcttctgcaaagtggtacgatcgaagggactatgtcttcatt

SEQ ID NO: 758924 - DNA, 83 bp, Homo sapiens
cagcagctaaatgcaggaaccggcggagggagctgaccgaccgactccaggcgtttccaacatggctagatccatcagaaact

SEQ ID NO: 758925 - DNA, 95 bp, Homo sapiens
cattgactcctgggcccaactgtgaccgatttaaactgcacataccatatgctggagagacattaaagtggaaacaaaggacccatcgcaaatgt

SEQ ID NO: 758926 - DNA, 100 bp, Homo sapiens
gaaataccagtgtgtgaagctgaatgatggtcacttcatgcctgtcctgggatttggcacctatgcgcctgcagaggccagcgttaatgactgccattga

SEQ ID NO: 758927 - DNA, 98 bp, Homo sapiens
cagctcgggcaaggatggtggaggcgagaacactgaggagatcctggtgaagaccatgatacgtaaacgctcctttgggaacccattcgagggcagcc

SEQ ID NO: 758928 - DNA, 85 bp, Homo sapiens
ggccagggaaccctggtcaccgtctcctcaggatcaggtctcctgggcatggctaacattgacctggaaaagagcaggactggtg

SEQ ID NO: 758929 - DNA, 87 bp, Homo sapiens
tacagctggaaatagggcacagatccagaatctggcaatgggggcaggagctgttggagctttgcagctgacctacatctcgaaggt

SEQ ID NO: 758930 - DNA, 100 bp, Homo sapiens
ctggcagtgcgtcaatcagagcgtcctgtgcgaatgttgtaccatctttgggtaggcagacttccctgacgacatcagtgatacccaaagctgagcagag

SEQ ID NO: 758931 - DNA, 96 bp, Homo sapiens
caagggcgaggtcagccccaaactaccggaattaacatttgtatcctttccatggaatactcgttaagaatacatcaaacgcatgcggtacaaatg

SEQ ID NO: 758932 - DNA, 75 bp, Homo sapiens
attgaaagccactcaacaactctttatgtgacagaataccaagctgctattttacacttgaagagggagcacaaa

SEQ ID NO: 758933 - DNA, 113 bp, Homo sapiens
gtggagcatgccagcgagaagctgcagcttgtcatcagctacactggctccaactgcagccaccaagtccagcacgtctgagagaagaaatggaagaaatcacacagcagcag

SEQ ID NO: 758934 - DNA, 83 bp, Homo sapiens
ctgcattttgggaaactcgactttggagaaaccaccgtgctggaccgcttttacaatgcaggatcttcaacaggatggcagag

SEQ ID NO: 758935 - DNA, 90 bp, Homo sapiens
cagagattcaccaactcagcaggacctcctcccccaggctttaagtctgagttcacaggcatgttatgttacccagagaactttccaaac

SEQ ID NO: 758936 - DNA, 100 bp, Homo sapiens
ctacagaaccgtcccaaaatatggcaaagaaacctattctgaggagacctacaaattgccgcaccggctcatcgagaaaaagagacgtgaccggattaac

SEQ ID NO: 758937 - DNA, 73 bp, Homo sapiens
gggttctgacaagatggccgggctgccccgcaggatcatcaagaagctgcacacatacatgtaagagaagcaa

SEQ ID NO: 758938 - DNA, 90 bp, Homo sapiens
tagaggcctgattaaatactggtttcacactccaccaagcatcccattacagatagaagagtacgcctgcctcacaccttgcgatgcgcc

SEQ ID NO: 758939 - DNA, 82 bp, Homo sapiens
ccaggagctcctccaccaggccaaagacttcggcagtgaaaggtgtagcagtcactcggcctacacccacagcatcgacctt

SEQ ID NO: 758940 - DNA, 90 bp, Homo sapiens
gcttggcctcggcgtcctcggaaactgttcatacttggtgcgctgtggactcttgtgataattaaccaagagtagctctatttgtccaac

SEQ ID NO: 758941 - DNA, 122 bp, Homo sapiens
ggcgagctgggtggtctggagaccatggagaccctcacggagctgggcgacgagctgaccctgggagacatcgacgaattcagaaggagctggcggacatcactttagaccctccacctaat

SEQ ID NO: 758942 - DNA, 100 bp, Homo sapiens
ccgggcggagagaactcagcgaggattctgagagctgcagaaactggagggcagcagtggacctgtgcggacgtctcctcacagcccacggccagggcta

SEQ ID NO: 758943 - DNA, 74 bp, Homo sapiens
caccctggaccgccagcagcagtgagaaggtccattacatcgtcgcgtctgctcaggtctggatgataacacgc

SEQ ID NO: 758944 - DNA, 100 bp, Homo sapiens
cgtccccggtttggtgttgcggcgcccaccttcgggaggatcagttgctgtctctgctggccttcatctgtgaagaagttgtatcacaatgtactttatg

SEQ ID NO: 758945 - DNA, 83 bp, Homo sapiens
atcagctcctggttcaacgaggccattgacttcatagctgtacaggaagaggcacatacaaagaaaagaatccccgaaagggc

SEQ ID NO: 758946 - DNA, 100 bp, Homo sapiens
caaagacccgcagcaaccctgagaacaacgtgggccttatcacactggctaagggtactttcattgaattccgaaatgggatgttaaacgtgtcccctat

SEQ ID NO: 758947 - DNA, 75 bp, Homo sapiens
aggcaattgatcccaagttgtcgacgaccgacagggtggtgaaagctgctattaacttagcaaagctgaaacttt

SEQ ID NO: 758948 - DNA, 73 bp, Homo sapiens
tcgcctgcgacgtggaggctgactttgccgtcattgctggtattaataggggaccctattaccacatgtcttt

SEQ ID NO: 758949 - DNA, 101 bp, Homo sapiens
gctatttcacagaatcagccagcaccggcactttacagagaagcaagccagccaagtaacaaagcagggcaagcaagctccacatatgcggaacaaactgg

SEQ ID NO: 758950 - DNA, 100 bp, Homo sapiens
caccagctcttcagatcaatatgggcccagaggctttctccgatgtctaactctttgtgccttgagctcctttatgtttgggtggcatgttcatgaaaaa

SEQ ID NO: 758951 - DNA, 82 bp, Homo sapiens
cgagattggcttctctgtgtcctccttgctgtggaccccgtgacgccacagatttgctgaccatgaaagaatatcactgttt

SEQ ID NO: 758952 - DNA, 100 bp, Homo sapiens
gcacggaccaattcgggaacaaatactactacatcccgcagtacaagaactggagagggcgatgccagtccctccactccagaggagaacgaaaccacga

SEQ ID NO: 758953 - DNA, 100 bp, Homo sapiens
gctccaaggaaagcccctcggtaacccagccgctggcaccatgaacccaggacttcactgaggatgtcaactgtgcttttgagttcctgctgaagctcac

SEQ ID NO: 758954 - DNA, 82 bp, Homo sapiens
cctaactttaacacccctcaagctctacgtttcaggagacaagtattatctttaaatctaaatgggtgcaattcattaatga

SEQ ID NO: 758955 - DNA, 82 bp, Homo sapiens
cggagcctggcttaggaaggggagctgaggtccggggcccagttttccggagttgcggtcagcccaaggccaaccccactgt

SEQ ID NO: 758956 - DNA, 75 bp, Homo sapiens
cgcggagctggtttctgccgacaaatttacgggcaatgtcaagctcaaaggcatcattataatgggagaggatga

SEQ ID NO: 758957 - DNA, 101 bp, Homo sapiens
agcccagctcgcgcttcagcgtcccggcgccgtcgcgccactcctccgaccaagaaggatcaagaaggtggagaagaaaagaaatctgtgcaaaagaaaaa

SEQ ID NO: 758958 - DNA, 100 bp, Homo sapiens
ggaacaaaaaaaggagatgcctggcagccccgctctctgcagtgtactcagtgcctatggggggtatgatggtaaggcagtcctttgccattggaggctc

SEQ ID NO: 758959 - DNA, 75 bp, Homo sapiens
cgcttcagcaacatttccgccgccaaagtttctgatgaagaattgaaaagaagagtagctgaggagctggcattg

SEQ ID NO: 758960 - DNA, 74 bp, Homo sapiens
gaagatcatcattaaggacggaggcacggtggaagttaaacgagctgagcctcgggacagcaagagccaagcgc

SEQ ID NO: 758961 - DNA, 100 bp, Homo sapiens
aaactcttgaggtttcaagaacatcatgaaaaaatactgaacaaatttctgtccaagcttaagcaacacttggatgcagaaaatgcgattgtgcatatgg

SEQ ID NO: 758962 - DNA, 50 bp, Homo sapiens
cgcctctttgccagcacttaaggacaggcatgttgttgggactggcggcc

SEQ ID NO: 758963 - DNA, 88 bp, Homo sapiens
tctgcctggtcgggatcccgccccgcccggagccccggcccccacagacactaccccaagcagtccttcaccatggtggcggacaccc

SEQ ID NO: 758964 - DNA, 100 bp, Homo sapiens
cgaaaagttcctccaggtttgccatcttcagatccatcagttacacaagtgacaagaaatgttccaccaggacttgatgaatataatccattctcggatt

SEQ ID NO: 758965 - DNA, 50 bp, Homo sapiens
tatacattgtaagaggtgacaacgtacacgaatgcagagtttgagtccag

SEQ ID NO: 758966 - DNA, 82 bp, Homo sapiens
ggaggaggggcggccaagcgctgttgaagtaaaggcatgacttcctggcaccacagggaaaatcgggtgcaagcccagaaac

SEQ ID NO: 758967 - DNA, 74 bp, Homo sapiens
tgggtccgctgagcggggcgacccgaggctttttggaaaggatataaacaacggaaggagtatatgcacaggcg

SEQ ID NO: 758968 - DNA, 97 bp, Homo sapiens
atccaagcctctcagcttcggagaatggagtcttccatcaatcatatctcacagaaccaacgaaacgtatgctttccttccaagggttagctgagtt

SEQ ID NO: 758969 - DNA, 75 bp, Homo sapiens
ccggtgcagtcgggcctgcccggcatgcagttttagaaagagcgttttcgctacgtaaagcacattcgataaagg

SEQ ID NO: 758970 - DNA, 90 bp, Homo sapiens
gatcggtgtcagcatgcagcgcatatcatcagcgagctgattcttacagcccaggttagtaaaactggagctgaaggtgctgtgctggat

SEQ ID NO: 758971 - DNA, 75 bp, Homo sapiens
gtagacaccagctccgaaatcaccaccaagatgcctgaggaaacccagacccaagaccaaccgatggaggaggag

SEQ ID NO: 758972 - DNA, 75 bp, Homo sapiens
tattggttattctaacagacatgagttcttatgctgaagcacttcgagagggatctatttgtgatgactatatgg

SEQ ID NO: 758973 - DNA, 90 bp, Homo sapiens
cctggatctgcgatctgtttgtggacctcagcagccatgtcgaagccccatagtgaagccgggactgccttcattcagacccagcagctg

SEQ ID NO: 758974 - DNA, 75 bp, Homo sapiens
aatccgttatggagcatgcctttaccccgttggagcccctgctttccactgggggtcctgatgacaacttaattg

SEQ ID NO: 758975 - DNA, 75 bp, Homo sapiens
gagacctccatggtccatgaactcaaccggcatgttatgttacccagagaactttccaaacaagtacctaaaact

SEQ ID NO: 758976 - DNA, 100 bp, Homo sapiens
gattgtgcgctgtgacgagcgtggcagcatggggacctccggggaggcctgccgctgtaagcctgggttactaggtgtctttcagaagctgattgcatcc

SEQ ID NO: 758977 - DNA, 75 bp, Homo sapiens
gggaaatcgggctgaagcgactgagtccgcgatggaggcagaaaaagtacatgagttaaatgaagaaataggaaa

SEQ ID NO: 758978 - DNA, 100 bp, Homo sapiens
cgtctcggcttggaatctttttgccataaattctaagtgctggagaatctggtaaaagcaccattgtgaagcagatgaggatcctgcatgttaatgggtt

SEQ ID NO: 758979 - DNA, 99 bp, Homo sapiens
cagtatggcaactcctaggatttgtcacgaatgggaagccaagtgccatcttcaaaatttcaggtcttaaatctgggtctgggggtggtggcatctccc

SEQ ID NO: 758980 - DNA, 74 bp, Homo sapiens
atttcttcgaaaaaagcttattgggaagaagcagagagagatcatcattgcctgaatttagctttgtgactgca

SEQ ID NO: 758981 - DNA, 98 bp, Homo sapiens
ctgagatgtacgctaagactgaacaggatattcagagaagttctgttggtgttcgaggaagagacattgttgttcttggtgtggagaagaagtcagtg

SEQ ID NO: 758982 - DNA, 51 bp, Homo sapiens
tagggtcctttatatagaagggagagtagaatggatttgccatcatccggc

SEQ ID NO: 758983 - DNA, 99 bp, Homo sapiens
ggaccccaaaagtttggaaatccggacgctaacagtggaaaggctgttggagccacttgttacacagtcctaggggactacagaaggaaaaagacaaga

SEQ ID NO: 758984 - DNA, 100 bp, Homo sapiens
ctgaaatacttcagaaggatgcagctagctgcatgacagtccatgacaagggagatcttgtgcgaaaactcaaagaagataaagcaccccaagtagacgt

SEQ ID NO: 758985 - DNA, 80 bp, Homo sapiens
ttcgggaacaaatactactacatcccgcagtacaagaactggagagtactttaggaagaatcatcaaagtaactcaggag

SEQ ID NO: 758986 - DNA, 82 bp, Homo sapiens
gatcaatccagatggcagccagtcagtggtggagggtcggcactcttcaccctcccgagccctgcccgtctcggccccatgc

SEQ ID NO: 758987 - DNA, 101 bp, Homo sapiens
cggggcgctgctggcgtgtctcctcctagtgcttcccgtctcagaggcaaactctctggaggctgccatcgagaacctcaatgaagccaagaactattttg

SEQ ID NO: 758988 - DNA, 83 bp, Homo sapiens
gccgcgaggccgcagctcccgttctgcctcctgggggcattgctggcccccatccgagtgcttctggcctttatcgtcctctt

SEQ ID NO: 758989 - DNA, 101 bp, Homo sapiens
aggccttcacattcactctctactaactcactgactcacccagagcaacgtccagccctgcaaactccattcatggtacctagtcgatagtcgctggttca

SEQ ID NO: 758990 - DNA, 90 bp, Homo sapiens
cctacagccccgacgaacatttctgggtgacactcaacaggattcccgatggccgccaagaacgagtcatgtttgacaaaattacatctc

SEQ ID NO: 758991 - DNA, 100 bp, Homo sapiens
aaacactctaggacggggaacgacaattacatgcctgaggaagtgcaccatggagaggaggaggtggagacttttgcctttcaggcagaaattgcccaac

SEQ ID NO: 758992 - DNA, 90 bp, Homo sapiens
tggattacataaaccagtcacccaagtgcattgcctttggaaacgaggaatgcttctagtcacaacagacacccttggccatgactttca

SEQ ID NO: 758993 - DNA, 100 bp, Homo sapiens
actgttgaaaacaatcggcaaggggaattttgcaaaagtaaaattggcaagacatatccttacaggcagagaggtgccgtgagcgatgtggagatgcagg

SEQ ID NO: 758994 - DNA, 100 bp, Homo sapiens
aggctttgtccttctcaccgtgggagctctcctcatgctgacaggaagctgtgctgaatggtttggtggccactgaggtgttgatgtggttttatgtcgg

SEQ ID NO: 758995 - DNA, 75 bp, Homo sapiens
gttcctccgcaccctgcccggcttcctcatcgtggccgagatcgatgtggagagcatcttgtgcgcaccatactg

SEQ ID NO: 758996 - DNA, 74 bp, Homo sapiens
ccaagcctcagatatgggaggagaatcaccagtatcaccttttgccatgatagcatttctttcattggacagtt

SEQ ID NO: 758997 - DNA, 98 bp, Homo sapiens
gacaagatggcgctctttatggtggaggggaccaagttccggagcctgctcctcaacatgctgcagacacgagacgacttcctgggccaggtggacgt

SEQ ID NO: 758998 - DNA, 75 bp, Homo sapiens
cctcctccacccctgtatttcacttggctctccaaattgactcaactccaggtgtttcagtcacctccagtaaca

SEQ ID NO: 758999 - DNA, 75 bp, Homo sapiens
atcaaagtgaagacattcctgccaggtgctggcaatgagtccacaagccctagccatgccgtggtagccaatgtt

SEQ ID NO: 759000 - DNA, 75 bp, Homo sapiens
tggtgttttgggatggaaaagaggagtccaggatgtgcccgatattccagatctccaacgttacaggcgagaacc

SEQ ID NO: 759001 - DNA, 90 bp, Homo sapiens
ttgccgccgaaacagacagttaaaatctttaatataacagataatgctgcaattaaaccagctgctcgactgatccaaaacatggatgcc

SEQ ID NO: 759002 - DNA, 100 bp, Homo sapiens
gcttgggcccgcatcatcgcttgttcgtacgtttcaggagacggcagcgaggctaccttgcatggtgtggtggacgagctggtgcggttccggcagaagg

SEQ ID NO: 759003 - DNA, 97 bp, Homo sapiens
agagacaagatgtccgccagagctgcggccgccaaggaatctgagaaaaaggggttgattgaaagaatctatatggtacaggatattgtttcaactg

SEQ ID NO: 759004 - DNA, 83 bp, Homo sapiens
ctccactctggtcagcaagtatccagacatcagtacgatcttgccaaggatgcggtggaggccttgtataaggtccatgggat

SEQ ID NO: 759005 - DNA, 74 bp, Homo sapiens
gttcgtcagagctctggcagccttcctcaaaaagtgcaaagaatcagattcacctcatgctgttactgtatata

SEQ ID NO: 759006 - DNA, 86 bp, Homo sapiens
aatggcaacagctttgccactcgactttccaacatttttgttattggcaaggatggccaggccatgttatgggatctcaacgaagg

SEQ ID NO: 759007 - DNA, 88 bp, Homo sapiens
cgggaaagggtcagaggcttcctaacgcagactcgagtgcgaagcgcgcagtcgccgggccttttcagatattaatggcaaagttcag

SEQ ID NO: 759008 - DNA, 90 bp, Homo sapiens
tggacgctggggaagagtgtgactgtggtactccaaagatcatcaatgctgtggtactgttgattttattgagtgccctggctgatccgg

SEQ ID NO: 759009 - DNA, 100 bp, Homo sapiens
aacagggaaggctttattggcagaaggtgtcattttaagacgagtaggcgaagcaaggactgctgaccggttccctgatgtgttacctgcttctgctact

SEQ ID NO: 759010 - DNA, 50 bp, Homo sapiens
ctctgttccaaatgctttgctggtctccaattgagaaacatggcactgtt

SEQ ID NO: 759011 - DNA, 100 bp, Homo sapiens
ggatcggatccttctggagtccgtgtgccagcaacagagctgggtccgggtgtacgcctcctgacaaggtgatccgggcgggccccgcaggaattttatc

SEQ ID NO: 759012 - DNA, 100 bp, Homo sapiens
aggaaaacaagaggccccagagggaaaagaagcccaaagttttaaagctgatgatataaagccatgtccacgatgtgctgcttatataataaagatgaat

SEQ ID NO: 759013 - DNA, 50 bp, Homo sapiens
gcagcatatcaatcccaataagacatgaggaattttgttgtcagagaata

SEQ ID NO: 759014 - DNA, 100 bp, Homo sapiens
attacaacagtgccacccaatcttcgaaaactggatccagaactccattgatgaccggaaagaagggatgaccgcgtttgtggaaaagagaaaggccaac

SEQ ID NO: 759015 - DNA, 100 bp, Homo sapiens
aatgaccgtgaactgtacagttacctccgtgtgtcacaggaagactcttggaaacatgcacaattcttggattacaacaggtgaagattctggggtgggc

SEQ ID NO: 759016 - DNA, 97 bp, Homo sapiens
gtgcacccgcaacaggcgttttgcaatgcagatgtaggtgtgacgtatgcagccaaaggctactttgacgccctggtgaagatgggggagctggcca

SEQ ID NO: 759017 - DNA, 100 bp, Homo sapiens
ggaagaagaagaggaaatcctcttgaactcttacaccacaccttcaaagatcctaagtgtgaacgtgaagtccccagccctgctgctgagccagttgctg

SEQ ID NO: 759018 - DNA, 98 bp, Homo sapiens
aaggcgggccagcagaggggagcagagatacccctgggggccgtcatgagggtcctgtgtggcaagtggcctgggctcaccccatgtacggcaacatc

SEQ ID NO: 759019 - DNA, 50 bp, Homo sapiens
cagtgcgtcaatcagagcgtcctgtgcggagtgcctgtgaagaaaacggg

SEQ ID NO: 759020 - DNA, 100 bp, Homo sapiens
ggggctgggtctcggagtgggagacgtggagtgcagggaaacacctttgtccaagtcccctatttcccggaccttctaagcccttttgggtgctggtggt

SEQ ID NO: 759021 - DNA, 51 bp, Homo sapiens
cttctgcactgtttacaggcacaggtgctggagaatctggtaaaagcacca

SEQ ID NO: 759022 - DNA, 101 bp, Homo sapiens
gggaagtgaagtcagtgcctcagttgctggggctcacaacgaagtaagacagtagatgacaattctgcaaagcagactgcgcacaataaagaaaaacgaag

SEQ ID NO: 759023 - DNA, 116 bp, Homo sapiens
ctcaatatctgtcttcggtggactccttcggcagtccacccaccgccgccgcctcccaggttatggaaacaaaggacatgctttacatcgtcactgaatttgctaaaaatggagaa

SEQ ID NO: 759024 - DNA, 82 bp, Homo sapiens
gggcagaggcgacctccccgcgttccatgcgcacagggacagggacctgcctagagctggaacgttacctccagagcgagcc

SEQ ID NO: 759025 - DNA, 100 bp, Homo sapiens
gactgtctgtataacttgggtctttgttacatggaggaaggcaatttacaaatgaaagcatgtacctacatcagatctaaccttgatcccagcaatgtgg

SEQ ID NO: 759026 - DNA, 82 bp, Homo sapiens
cgtcgggccagggccggttctgcaccatcttcaggtcctactccaggggcgctcaggtgatgtgtccaatctagatcccaac

SEQ ID NO: 759027 - DNA, 102 bp, Homo sapiens
cggattaatgtgactgaggtgaacccactgggtgccagcacacgcctgctggatgtgagcttgcagagcatctgccaagtcaaattcctgcagagctttggc

SEQ ID NO: 759028 - DNA, 90 bp, Homo sapiens
ctctgagggaggagctggggacggcgaccctaggagaggtactgggcctaatcgctacgtgcctctttggctatgatgcctatgtcacct

SEQ ID NO: 759029 - DNA, 82 bp, Homo sapiens
gcccaggacctccaggggaacaatgaggcctacgcagagctcatcgtccttgggtgtcgtagtcattcttcagcacaattct

SEQ ID NO: 759030 - DNA, 83 bp, Homo sapiens
ccgccaccacccactccggacacaggtgatgtgtccaatctagatcccaacttctcatttgaaggcaccaaactggatgtggg

SEQ ID NO: 759031 - DNA, 98 bp, Homo sapiens
ggaccatctaatggctatgggagatggtcctccacttcttccaccttggctacccctgagatagcaagaccaatccttcctcttcttcctccttctca

SEQ ID NO: 759032 - DNA, 138 bp, Homo sapiens
tgtgttctcagaagacgttctgtatttcagcttcctgctatgtgccctctttgttcctaaaggctgacaaacgggctcatcataatgcactggaacgaaaacgtagggaccacatcaaagacagctttcacagtttgc

SEQ ID NO: 759033 - DNA, 98 bp, Homo sapiens
tgaaaccagcaggtgccatctatatggagaaaagcggatgtagtccatttccagtgtgttgggctaaaggggacaagcaggccttcgcactatcacgt

SEQ ID NO: 759034 - DNA, 96 bp, Homo sapiens
tcgtgctgctgggattcgcgctgctgggcacccacggagcctccggggctggttgaaatcacaaagattagacacctttttagataggtgttcttc

SEQ ID NO: 759035 - DNA, 87 bp, Homo sapiens
tcttaagaactcttttcgaggaactatccgccaggtctaaactgcagtaatccatttactcagctggagaggagacatcaagaacat

SEQ ID NO: 759036 - DNA, 100 bp, Homo sapiens
gccgcctggctttcgtattcgttgttctcggcgggctgtggggcctccgcgccgcggccgttagtcatgtcgggtccacgctgcttttatgagctgtaac

SEQ ID NO: 759037 - DNA, 74 bp, Homo sapiens
aagaggagccgagcatctgggccgagaccattccgtatggagagccgggttcacaaaaaggattctggcttttg

SEQ ID NO: 759038 - DNA, 78 bp, Homo sapiens
caccaggactccaaaatggcgtcagttgattgatgcactgagtaaaagaagcaaggaagctgaagcagctttcttgaa

SEQ ID NO: 759039 - DNA, 100 bp, Homo sapiens
ccggccagccgtggagacaggtacatgctggtcacctacgacgaacccccgtactgcatcaaggatctggggactttgatgattttaacctggaggatgc

SEQ ID NO: 759040 - DNA, 101 bp, Homo sapiens
aagcctgcacagccgcggcggcagcagcagtgagaggtacgtgcggccacttcatacgctcctgagcgcgctggtagtggcggtggccctcggcgtgctgg

SEQ ID NO: 759041 - DNA, 75 bp, Homo sapiens
ctggacctctctggctgcacccagacactgctgagtatgaagaactaattggagaaggaagccgttgtatagcag

SEQ ID NO: 759042 - DNA, 100 bp, Homo sapiens
tgtgtgcaaccattggcgtggatccgctggcctctgcaattctcattgcaagatcatcgcctccctggtttatagtagacagaccttttctgtttttcat

SEQ ID NO: 759043 - DNA, 88 bp, Homo sapiens
ttatctttctgtggatccttacatgatggcagaaacggtggacacaagcgaaatggtcaacggcgctacagaacaaaggacgagctct

SEQ ID NO: 759044 - DNA, 75 bp, Homo sapiens
gattgctatgggagattggatgactgttacagatccaggtctgtcttcagggtgaggaggttgggagagaaccaa

SEQ ID NO: 759045 - DNA, 101 bp, Homo sapiens
catggtgatataaaagcagcaaatctacttttgggttacaaaaatccagaccaggctcagcttgtcaatcggaaacagaaattagagtctgtggaactttc

SEQ ID NO: 759046 - DNA, 50 bp, Homo sapiens
cgtatccccagtgccaagaagtacaaagaaatggatgatgaagactgtga

SEQ ID NO: 759047 - DNA, 100 bp, Homo sapiens
cgagcctgactcctcccaaaataagcagacacttctaggtcttaaagaaagtgcagaagagatggtcaaaaacaaattggaaggaaaggataaactgacc

SEQ ID NO: 759048 - DNA, 82 bp, Homo sapiens
gggagggatttttttctattttccctacgaaaaacagatctttttaagcaaattgtggctactaatttgccccctgaagatc

SEQ ID NO: 759049 - DNA, 50 bp, Homo sapiens
atccttgatgataaaccagtaaatagtccgaaattgaagttcagaggaag

SEQ ID NO: 759050 - DNA, 100 bp, Homo sapiens
ttaacgacaagcacatcaccactctgcaggcttatcaggagggcagacttcaaaagctactaaaaatgaacggccctgaagatcttcccaagtcctatga

SEQ ID NO: 759051 - DNA, 131 bp, Homo sapiens
ggggcggcggcgaatgctgggagagtccgacgagcgctgcactaacgcaggatccggctgccgaaggtcctcgccagtgatattgggattggtcagtctcaagatgacagcatagtaggattaaggcagac

SEQ ID NO: 759052 - DNA, 100 bp, Homo sapiens
cctgcagggggactctggccgcggctactacctggagatgctgatcgggacccccccgcagaagcgcgcagggaccatgtcggcggagaccgcgagcggc

SEQ ID NO: 759053 - DNA, 76 bp, Homo sapiens
ctgaggacattgtgtacacactacagctggaggacagaaacaagagacttttcccaggtccctcgtatcaaaacat

SEQ ID NO: 759054 - DNA, 75 bp, Homo sapiens
tatccagaagattgatcatcatatgggttgtgctttgtaacagagccagactggtttcctatctcccaggatttt

SEQ ID NO: 759055 - DNA, 73 bp, Homo sapiens
ggtgggattcatgacgtcatagcagatgagcacgaggagtgctcgaggccccacaatgggcgctggattggat

SEQ ID NO: 759056 - DNA, 75 bp, Homo sapiens
aaacttacaaacaaccccatctccagacaaatggacatttgggagcaataaaaataagaagaaaggaaaagccag

SEQ ID NO: 759057 - DNA, 131 bp, Homo sapiens
gaaccatgaaccccaactgcgcccggtgcggcaagatcgtgtatcccacggagaaggtgaactgtctggataagacaatgcagatcttcgtgaagactctgactggtaagaccatcaccctcgaggttgag

SEQ ID NO: 759058 - DNA, 82 bp, Homo sapiens
ctttccaacacagatgtccaagctgccaagcctctaagaaatatgtctccaaagaacttgccaaagagattcgtgtcaaagc

SEQ ID NO: 759059 - DNA, 83 bp, Homo sapiens
gccagctgacggagatggtgcagaagatggaggaggactttgtgttttatgccccacgtctgagaatcaacaagcggatcctg

SEQ ID NO: 759060 - DNA, 75 bp, Homo sapiens
agcagaggctcatctacagtggcaagcagatgcaggaccagatgctgtgttggggaggacaatctggggagtttt

SEQ ID NO: 759061 - DNA, 76 bp, Homo sapiens
aaatacttggattctatccctcctggtcagtacatggattcttcacttgttaagtctgaaccaatcagagtccttg

SEQ ID NO: 759062 - DNA, 82 bp, Homo sapiens
aaaagaaatcatgtctgctgctctaggcccatagtcagcagcagctctgagccagggggatatgagactttctactcggaat

SEQ ID NO: 759063 - DNA, 100 bp, Homo sapiens
gctgacggaaaaatcatcccagatcgtggacccttgggagaggccaaatttgagtttcatcatggtgactatgaaaaacagtttctgcatgtactgagcc

SEQ ID NO: 759064 - DNA, 90 bp, Homo sapiens
atactatgcagatggggaggacgcctatgccatgaagcgggacctcactcagatggccgacgagcgtgagtgcatctccatccacgttgg

SEQ ID NO: 759065 - DNA, 100 bp, Homo sapiens
ggacaagcagtttgttgccaagtttatatcctggaacctggagatcctcctttgttacagcaaccactacagacatccaaatctggtattcaacaaataa

SEQ ID NO: 759066 - DNA, 101 bp, Homo sapiens
caggatatgacaggggtaacacccttccagatgatttttgagagctcttgaatctgaacagaacatcaatatttcatagcccttttggatttcttgatctc

SEQ ID NO: 759067 - DNA, 76 bp, Homo sapiens
cgtgtctaaggagctggttggagagtttttgcaatttgttcaacttgataaacctcattgccttctctgaagacgg

SEQ ID NO: 759068 - DNA, 100 bp, Homo sapiens
actcagacttctcccgcctggcgagggtgctgacgggcaacgccattgccctggtgcttgggggagggggagcaagaggcggggtttcaccatgttgccc

SEQ ID NO: 759069 - DNA, 100 bp, Homo sapiens
ttggggagcccaggccaagccatccattcttgggtcctttggaggtgctccatacttgcttgcagtgcctacgtggctctggctttgggtgataacctca

SEQ ID NO: 759070 - DNA, 96 bp, Homo sapiens
caagaggcataaaacagttctcactgaactacagtaattctacaataatgcgtttttcttctgggagaggagaatgtgcatttttgacctcaacaa

SEQ ID NO: 759071 - DNA, 82 bp, Homo sapiens
tatctgtcttcggtggactccttcggcagtccacccaccgccgccgcctcccagggcgcggatggcgtcggggcgccccgag

SEQ ID NO: 759072 - DNA, 74 bp, Homo sapiens
ggacctggaaaagaaggagggacgtatagatgatttgctcaggactctgtttgctggctacacggacaacctgg

SEQ ID NO: 759073 - DNA, 90 bp, Homo sapiens
ctatcatatgacaaaggctttgccgcagttcatcttcctccctgtgtactttccatttgccttcctggctgcagatctgggacacggccg

SEQ ID NO: 759074 - DNA, 75 bp, Homo sapiens
accacgacaaaaccaccctagaacaagatcactcaaggtgaaggataatctactaataccagcactttgaatgaa

SEQ ID NO: 759075 - DNA, 74 bp, Homo sapiens
agcaccaggttccaaatcatcaatgaagcaagtaaggtacctggcaaagaattctgcaactttgttcagtgcca

SEQ ID NO: 759076 - DNA, 75 bp, Homo sapiens
cggggctctgtggctgctcctggctctgcgcaccgggggggccctcagcctcttggccttgaacgggctgttcat

SEQ ID NO: 759077 - DNA, 75 bp, Homo sapiens
cactaggcagcggaggagcccgaccgacccgggtgtttctgtggcctgggactggttagcaccaacaagtcctgc

SEQ ID NO: 759078 - DNA, 100 bp, Homo sapiens
agacggctcacctgtgcgggatggaacaaaaggagaagcaacagtttcagcgccatctgacccgcccaccaccccagtaccaagacccgacacaaggcag

SEQ ID NO: 759079 - DNA, 100 bp, Homo sapiens
gctttttatttttccccaattcagcagagaatattttcaaggggggaccaagaatcgccttcagccctgtctggtgcatccttggcagaaagtgaggagg

SEQ ID NO: 759080 - DNA, 96 bp, Homo sapiens
ccagagcctgcagtcccacacggtgctggatgtgtctggggcagacatgttggccaagtcaattgccaactgccaggtggagcttctggaaaactg

SEQ ID NO: 759081 - DNA, 71 bp, Homo sapiens
acactgttggaccaagttttgccaggtgtggtcactcacctgtctaccactcccgtgaaatggcagctcgt

SEQ ID NO: 759082 - DNA, 97 bp, Homo sapiens
ggtcacttaagttttccgtgtgcgggttgcaaggagcgtgcgtgcgtctgagccctatgagtttgtctctctggaatggctgcaaaagtggttggat

SEQ ID NO: 759083 - DNA, 90 bp, Homo sapiens
ggcgggtggaggttcgagcgctgttctcgctccggagccgctgcacatttcggccgaatacatcaagcaatggtaacatctttaaatgaa

SEQ ID NO: 759084 - DNA, 101 bp, Homo sapiens
tccaggaggccactcaaacagtgatgatgtcgacgggaatgactactctgagcagcccgtgccccgcatcatggtgcagtcagccagcccggacatcaggg

SEQ ID NO: 759085 - DNA, 100 bp, Homo sapiens
cttggagccatcctctacaggacccgctttctaccattaagatccgaagccaacgacttagccttacgcctggctcggcagttcagaggccaccaggatg

SEQ ID NO: 759086 - DNA, 80 bp, Homo sapiens
gagtctctccaccgcagacatgacgaagtgttctaagaacggaagcatctgggctggatggaatttagcatcaagcagag

SEQ ID NO: 759087 - DNA, 101 bp, Homo sapiens
atgtgggcaatatgcaaccaactgctcagtattctgttaatgtgttaagagccattgacatttgaagatcatcagaagtgaagataaaacatctcaaaaat

SEQ ID NO: 759088 - DNA, 75 bp, Homo sapiens
gattttgtcaccgttatgtgggaagcgaatccagttatcctcttcacgcccctgaagcctactttccttatttca

SEQ ID NO: 759089 - DNA, 92 bp, Homo sapiens
atcgggagcgcaaggtcgccctcaaggccatgatcaaaacgttcacaactacatgatgccacccctcgaccgaagctggagggactacgtcc

SEQ ID NO: 759090 - DNA, 75 bp, Homo sapiens
cctgtggtttttgattcaagtcctgttctacctactgccaattggaaaggatcccggctactcaacagaaatgaa

SEQ ID NO: 759091 - DNA, 90 bp, Homo sapiens
cagaagagcagcagcgtcaggaaggtgccattgcggagcctcatctcctcggatacctggactacagacgagtgcccaacagcaaccccc

SEQ ID NO: 759092 - DNA, 101 bp, Homo sapiens
ctgcaggctgaggatgggcactggacgggtgattatggtggcccacttttcctcctgccagccccttccaaatgacaaaaccttactctacaatccatttc

SEQ ID NO: 759093 - DNA, 82 bp, Homo sapiens
agtgacgtgttctccaaataccagctcgacaaagatggggttgtcctctttaagaaggaactctttgctgaatttggaacgc

SEQ ID NO: 759094 - DNA, 82 bp, Homo sapiens
ttgaagcacctgaggaccctgctgagccctcagaatgcaatttgcgtgggagcaggggacaagcccatgaatgagtatcgct

SEQ ID NO: 759095 - DNA, 100 bp, Homo sapiens
ccccgccgcccccgacgtttgcactggtgaatacatcaagacctggaggccacggtacttcctgctgaagagcgacggctccttcattgggtacaaggag

SEQ ID NO: 759096 - DNA, 98 bp, Homo sapiens
cgccagggaccctgtgcaggcctgctcctccgtttgcaagggatggaagcttcctggcgccaggtggccggtggccgaggccgatcccggggacgggc

SEQ ID NO: 759097 - DNA, 82 bp, Homo sapiens
gagattccaggaggaagtactggcgaagtgctccatggaactcgatcaaaatgccactgaaaaagtccagacaatgttcaca

SEQ ID NO: 759098 - DNA, 88 bp, Homo sapiens
atagaagctgtggatgaatttgcttttctggaagataaataggatttaccaatccttggatgaagtgcttgggaagtctttaagtgcc

SEQ ID NO: 759099 - DNA, 85 bp, Homo sapiens
tgctgctgctgctgctgcatgtctaccaggagaggagggaactgcggagcggaatggagaagctgatgccatgagcttggatgga

SEQ ID NO: 759100 - DNA, 98 bp, Homo sapiens
agcgctacgggaacatcaccttgcccatgtctcacgcggaattcaaagaagctttttcactatttgacaaagatggtgatggaactataacaacaaag

SEQ ID NO: 759101 - DNA, 75 bp, Homo sapiens
tcaaacaagtaatggaggagaagctgaatgcaacaaacattgagccacagcctccggagccgttgcacacctacc

SEQ ID NO: 759102 - DNA, 75 bp, Homo sapiens
actcctctctgagactgtctggggagctctccgagcactgcccctaacttcagagatgctgattgcagttaaaaa

SEQ ID NO: 759103 - DNA, 82 bp, Homo sapiens
atcaaagtgccagcagattcagtgtcatgtgaggacgtgcttcctgcttcatagataagagtctattatcctcccagtccac

SEQ ID NO: 759104 - DNA, 100 bp, Homo sapiens
gagactgagccttgagcagaggaacctatacaaagaagtgatgctggaaaatctcaggaatctggtctcattggttactccacaggatccgctgaacata

SEQ ID NO: 759105 - DNA, 100 bp, Homo sapiens
cctcgctccggaaaggggacacctggtaagaatctacgatctttcaaaatatgatcatggatcagatgatgtgctgatcttggccactgatggactctgg

SEQ ID NO: 759106 - DNA, 75 bp, Homo sapiens
gctgggtccttcccaaggttgagttatttctcaaactctgaggctgcggagttcacacattgaaatctgtcatct

SEQ ID NO: 759107 - DNA, 98 bp, Homo sapiens
ccgcctccgggcatcttcaactacaggggcaagtgtccgagtggtgaatcagctacttacagagatggatggtctggaagcacgccagcaggttttta

SEQ ID NO: 759108 - DNA, 87 bp, Homo sapiens
tggctttgcctttctggacacagaagtatttgtgacagtgattcgcctttgccagtctcatctcgtgtctgctttgttaagttccat

SEQ ID NO: 759109 - DNA, 90 bp, Homo sapiens
aagcccgaggcagaggaaccggctcccaggatggtaagcggatgtttggcacctattttcgtgttggtttttatggaaccaagttcgggg

SEQ ID NO: 759110 - DNA, 83 bp, Homo sapiens
ctacccgagtgtgcgaagctagccaagacatttctcttgggaagttgtgcatctgacaggaatatagtactgtacgatatgag

SEQ ID NO: 759111 - DNA, 98 bp, Homo sapiens
cgattcggtgaagcgattcctgcaggcgttggttcccctctttgacctggaaggaccatcgagacctgttcttgaatacatcgatctggtctgtggtg

SEQ ID NO: 759112 - DNA, 75 bp, Homo sapiens
atggtttcctgccagctttgtgagggtcatgaagacatatcacatgtacaatgccgacagcatcagtgctcagag

SEQ ID NO: 759113 - DNA, 96 bp, Homo sapiens
cgactactgagcttcagaagacaactggaactgtcatggaaaatggaagatttgcaaaatacaaatattttacccatgtcatgatcaataagacag

SEQ ID NO: 759114 - DNA, 75 bp, Homo sapiens
attcccaagataatgggattggaaggagagcagggcgggctctacgaggcggtgaatgaggtctacaagaacctc

SEQ ID NO: 759115 - DNA, 100 bp, Homo sapiens
tagatgccagcgcagaagggacgtgagcccagccgaggtaccgctgaagaggaatcaattttgttgatcatggccttgccaggttggtgacagtatattg

SEQ ID NO: 759116 - DNA, 74 bp, Homo sapiens
agtggctggtgccgctgtccacggtgagaaagatcagtctaaagaaaaggagaagaaagtgaaaaaaacaattc

SEQ ID NO: 759117 - DNA, 136 bp, Homo sapiens
ccacgacccagatcccagcggaaaggagcgcgcctctttttggcttggggagctgcagcgttcggtcaatgtgacggtggactacattagaccagccagcccagccacagagacagtgcctgccttttcagagcgt

SEQ ID NO: 759118 - DNA, 95 bp, Homo sapiens
ctatcgccgagctcgttggagcttgaacccattgtcacccctccgccaccctgaagggtcccttcccaagcccttagggaccgcagaggacttgg

SEQ ID NO: 759119 - DNA, 100 bp, Homo sapiens
ccatggtcaaccccaccgtgttcttcgacattgccgtcgacggcgagcccttgggccgcgtctcctttgaggtgtatgcccacgcaggcgcgacgctgga

SEQ ID NO: 759120 - DNA, 82 bp, Homo sapiens
ggctgagaaaagcgagaccgcgtgcgaggaccgaggctgggaggcggcagaatgcagccagaggagggcacaggctggctgc

SEQ ID NO: 759121 - DNA, 80 bp, Homo sapiens
cttgccttgagtcagtgcgccgctctccagcccgcttgaacgccagagagatgacacgggggaaattcctcaatattcta

SEQ ID NO: 759122 - DNA, 98 bp, Homo sapiens
ggaggtctgttttgatgattctgggaggtctggcagtatattactttgatgcgtcggatattcctgattgactgtccaggtgtggtttacccctctga

SEQ ID NO: 759123 - DNA, 76 bp, Homo sapiens
agtacttcctgcacatgtgtgagcgggcctgcatgcacctggggcacctcaaggtatcacctcttctgggctcaag

SEQ ID NO: 759124 - DNA, 75 bp, Homo sapiens
atcctgcccgcggggatcccgtcagccggtttaagaattgtttaagctgcatcaatggagcacatacagggagct

SEQ ID NO: 759125 - DNA, 100 bp, Homo sapiens
cttcaactggtatctatgaggccctagagctccgggacaatgataagactcgctatatggggaaggcccagctcaacattggcaatgtgctccctgtggg

SEQ ID NO: 759126 - DNA, 75 bp, Homo sapiens
ctatcactcagtcggtgctatgatataatacctgaaactttacttcctgaaccagctgcctcttccatctccttt

SEQ ID NO: 759127 - DNA, 75 bp, Homo sapiens
ggtgcctgaggccgttggagatcagaaagcccttcaagaaggggaagactatgtgaaagggtttggaggaaaatt

SEQ ID NO: 759128 - DNA, 98 bp, Homo sapiens
aggtgatctggacaaaggaacaggtatctcagatacagtttatgtaacttgatggaagaaaatggaattactccaaaaagacaagtgctcaagcagca

SEQ ID NO: 759129 - DNA, 50 bp, Homo sapiens
gttcgctacacagcaatgcatcgaggtttacaaagatgagcaggtggtgg

SEQ ID NO: 759130 - DNA, 98 bp, Homo sapiens
aaaagtgcatcatgaattccggagttgccatgaaatatggaaacgactcctcggccgagctgagtgaggaatggcggcgctagatagtaaggcatcag

SEQ ID NO: 759131 - DNA, 88 bp, Homo sapiens
aagaagaagaggaagaagctgaagaagaagggcaaggagaaggcggaagcacagcaggtggaatccaggcagttcccagtgactgtgc

SEQ ID NO: 759132 - DNA, 75 bp, Homo sapiens
aaccttgtgggatgtgaaaactctgttactgaagacatatctgaagagatggattaagaatgctttggattaagg

SEQ ID NO: 759133 - DNA, 100 bp, Homo sapiens
gccaatcgcaaggcacctctgagaacttcaggtggatctaggatccggcttccaacatgtggcagctctgggcctccctctgctgcctgctggtgttggc

SEQ ID NO: 759134 - DNA, 95 bp, Homo sapiens
catcccgacgatctgctcgagtcacccgctcctcagccaggctaagccagagttctcaaggtagacagattggaagtcgtcaacaagcgttttgt

SEQ ID NO: 759135 - DNA, 100 bp, Homo sapiens
caattcaggatcgagatatgaagcgaaataccttagtggaattgctcactttttggaaaaattggcattttcggaacgtcaaggtcgtgggaaataaaag

SEQ ID NO: 759136 - DNA, 50 bp, Homo sapiens
caccctgcacagctataagagaagccaaagtggaacaggtgaagttcgat

SEQ ID NO: 759137 - DNA, 100 bp, Homo sapiens
ctggtgaggacagagcttctggaaacccttgcagagattgacttcaggaatagccaggtctggctgggtcggcacaacctgtttgagcctgaagacacag

SEQ ID NO: 759138 - DNA, 75 bp, Homo sapiens
cgcaagatggcgacggcgaccatagctctcagcttccttctcctacatctgcttgctgctgggatacccgtcacc

SEQ ID NO: 759139 - DNA, 97 bp, Homo sapiens
cccaggacctggtgtgggatgggagaactccgctgagaccctgcaggaacacgaaacagatgccaaccgagaggggttttggccaaattgggcgagg

SEQ ID NO: 759140 - DNA, 99 bp, Homo sapiens
agcggcctccacagaggctgtttgatgctgagaagatcaggccgcctgatcttcgacaacctaaagaagtccattgcctacaccctgaccagcaatatc

SEQ ID NO: 759141 - DNA, 75 bp, Homo sapiens
agatcaacctggagctctacgcctcctacgtttacctgtccatggcaacctgtctggactgagcatttctctgac

SEQ ID NO: 759142 - DNA, 80 bp, Homo sapiens
cccaacaccacgacaatccagtttcctgctaatttgcagcttcctccagagagaaaaggaacagttccgtaagctcttta

SEQ ID NO: 759143 - DNA, 100 bp, Homo sapiens
acgagctcgacttcaaactcgtctttggcgaggacggggcgccggcgccgccgcccccgggctcgcggcctgcagatgtataaagggttccaagccttag

SEQ ID NO: 759144 - DNA, 83 bp, Homo sapiens
tgatggcggaggcttcgagtgacccgggtgccgaggagcgggaagagttgctggggcctccaggcccaaggtcagcatcccac

SEQ ID NO: 759145 - DNA, 100 bp, Homo sapiens
gacgaaatttgcatttcagaaaggccacctgatactgtatggaggatggcctagagggctgaactgatgcttgaagtttaacttacatgtgtagagctgg

SEQ ID NO: 759146 - DNA, 75 bp, Homo sapiens
gctaacttttctgtaaccaacctgatgatgggaggcaagggtcttaaacaagccacggaaactgcgatattaaat

SEQ ID NO: 759147 - DNA, 75 bp, Homo sapiens
caagactcctctgctttggactgaagaccctacagcttggggcctgggctcctctgaccatcctcattgagaaag

SEQ ID NO: 759148 - DNA, 98 bp, Homo sapiens
cagaatccattaaaaggagagctgggaggagatcatcaatctgtttgtggctgtcatcatggataatttcgactatctgacccgggactggtctattt

SEQ ID NO: 759149 - DNA, 74 bp, Homo sapiens
agaacagagatgacatgccagcccagactttcatgtttctctggaaacccccctggtaagtgtggaggaggcgg

SEQ ID NO: 759150 - DNA, 100 bp, Homo sapiens
ccgagcgtctcggctggtggaaggggcgaggagctttgcagttgtgtgcgagtgtgtacaggcatccgtgtcattctggaccttactcccaactaccggg

SEQ ID NO: 759151 - DNA, 74 bp, Homo sapiens
gcagtggtcgcttcttctccttgtatacgctcaacggcaagaaagtggaagttgccgtcaaacagatcatcgct

SEQ ID NO: 759152 - DNA, 100 bp, Homo sapiens
gcagaaatagcgaccatggcgaggagtgtggccatctggggccgtgtggtatttgccactcaggagacatgtccctatgacatagcagtggtgagcctgg

SEQ ID NO: 759153 - DNA, 100 bp, Homo sapiens
cttgaatggcgactagatgtacaggactatttgccacgacatttcaaaggattccaagagagaatattggtgtccatgctgtgatgattcctcagctcct

SEQ ID NO: 759154 - DNA, 87 bp, Homo sapiens
ggcggcggggccgagcgcggccctgcaggcgatgtcgccgaaaccgggctgcaggcggcaggaggagcaatctcagaactgttatga

SEQ ID NO: 759155 - DNA, 78 bp, Homo sapiens
agaagtggagcgtgtcctgaaggagttccaccaggccgggaagcccatcggcccagctcaacattggcaatgtgctcc

SEQ ID NO: 759156 - DNA, 50 bp, Homo sapiens
ctctacttagctcagcaattcttaccttagccctaaataagtcacacagc

SEQ ID NO: 759157 - DNA, 93 bp, Homo sapiens
gtttattctcaggtctggagcatgcagcagccagaaagctcaggttcctacaaacttgatgacttttgagtagaagcctgagaaaaaaagaga

SEQ ID NO: 759158 - DNA, 100 bp, Homo sapiens
gaaacccccaagatgggcatctattacattccagtcaatgatgccttccttcatgtgatacaggggaaatccgtgggcaaggtgcttctcgctcttaaat

SEQ ID NO: 759159 - DNA, 100 bp, Homo sapiens
cagcccagaaccctgaggacctccgcatgtttgccaggtgggatgctatggaatatgatgagaagctggcccgtttccggcaggcccacctcaacccctt

SEQ ID NO: 759160 - DNA, 100 bp, Homo sapiens
accatggggactgtgcacgcccggatgtcagtattgaatatggtggtgaggcgtgaccctggcaacactgaacctgtgaaagccaaggaagagctcatat

SEQ ID NO: 759161 - DNA, 126 bp, Homo sapiens
ggacaaggcaactggttatcactaccgctgtatcacttgtgagggctgcaagggagattttgcagctgctgccggcaacctacaaacctgcctggcagttttgggccgggcactgcccacctcccg

SEQ ID NO: 759162 - DNA, 76 bp, Homo sapiens
aaggaatatgtccaaccagtacaacttaggatacatgtgctgcccttttgttctggacaaagatggagtcagtgcc

SEQ ID NO: 759163 - DNA, 98 bp, Homo sapiens
gagaccgtcctggcgcgatgcgtcaagtacactgaaattcatcctgagatgagacatttatgcagtgtgtgattctttctaaaacaactccctggaag

SEQ ID NO: 759164 - DNA, 82 bp, Homo sapiens
gactgcgccgcgtcttcctcaaggaaggtgggagtcaatcattttgacaagtctcctgaaaggaacagctagcaggaactga

SEQ ID NO: 759165 - DNA, 75 bp, Homo sapiens
aaaatgctgttgtatgcagtgaaagagttgctgaactacaaagaaaggttacagaaattatctcagagattcggg

SEQ ID NO: 759166 - DNA, 75 bp, Homo sapiens
ccggcggcggcgtaggacggaggcgtcgctaggcagcaagagcaactcaccaccagccttgggcccagaagcatg

SEQ ID NO: 759167 - DNA, 75 bp, Homo sapiens
ggagcagaggcaactcctggagctcaggtggtgaagcagtattttccaatttgaagattcatttgaaggtggctc

SEQ ID NO: 759168 - DNA, 50 bp, Homo sapiens
gttggtttagtgctgttattcagaatgatatggaacctagcaaagctgtt

SEQ ID NO: 759169 - DNA, 74 bp, Homo sapiens
ctgtcccgggcctaccccctggactccctggagaagcagatggaaaagggtcttgctacgtacgttgcccaggt

SEQ ID NO: 759170 - DNA, 100 bp, Homo sapiens
cagatagtaccatgatagctgtatcagagggagcaaaggagtttgctgctgctctcaccgctgagcggataaagaccccaccaaaacgtccaggaggccg

SEQ ID NO: 759171 - DNA, 82 bp, Homo sapiens
gggtagtgtctgggatccagtacgagttgaatcattgttcaaataaggtgttggtggaatgagcgttgcatgtgtcttgaag

SEQ ID NO: 759172 - DNA, 90 bp, Homo sapiens
tttcaccacaagaagggctgccagagtgcttgtgcacagagctcgaaaactagctcaacaatactatcttgtgtaccaagaacccattcc

SEQ ID NO: 759173 - DNA, 100 bp, Homo sapiens
cttgacaggcggctttgcatcggaaatcagctctacagttcagtggatgaggatcgcagtacggaacctgaccgattgcaggtgtttcacaagagagcca

SEQ ID NO: 759174 - DNA, 100 bp, Homo sapiens
gatgctgatcgggacccccccgcagaaggagcgggacggtatgcgggccatcctggggtcctacgacagcgagctgaccccggccgagtactcaccccag

SEQ ID NO: 759175 - DNA, 75 bp, Homo sapiens
cgcggcgctgccggaccagagcttcctgtggaacgttttccagagattgacgagatgcctgaggctgccgtgaaa

SEQ ID NO: 759176 - DNA, 98 bp, Homo sapiens
aacaaagtcttgcagtggcgtgtttggtggagaaccattgtcatatacccggttcagcctggctcggcaagtagatggcgataacagtcatgtggaga

SEQ ID NO: 759177 - DNA, 101 bp, Homo sapiens
aagtgggggaggagcgttccttgtcctccctctgcacaagagactctgacctgtttttgttggacacccgtgtagtatgggcctcagaagaaggctggctg

SEQ ID NO: 759178 - DNA, 101 bp, Homo sapiens
tggagagtcgtgcggacagcattgggagcggccgagccatcccaattaaacagttactccacaggatccgctgaacataggatgttgccacaaaatctacc

SEQ ID NO: 759179 - DNA, 100 bp, Homo sapiens
gctgaatttgggagaagatggcagcttatccaagaaggggttgtaccaaacaggttctactgacacgccgctttttggatgcctcctatgcctggcggga

SEQ ID NO: 759180 - DNA, 89 bp, Homo sapiens
gtcggatgttgtgttgcccgccaccatgagctacacagatgccatggacaatattaccaggcagaaccaattctacgatacccaagtca

SEQ ID NO: 759181 - DNA, 75 bp, Homo sapiens
agtatgcctacagcgacaacagcctggaccccgtagctttccacagccccaccaccaggatcaagaaggagcccc

SEQ ID NO: 759182 - DNA, 82 bp, Homo sapiens
agtggtcgcttcttctccttgatttggtgcttccagatgtgagttatcaggtggaatccagtgaggaggatcagtctcagac

SEQ ID NO: 759183 - DNA, 100 bp, Homo sapiens
cgagaggcgggctgaggcggcccagcggcggcaggtgagaagccctaccactgcaactgggacggctgcggctggaagtttgcgcgctcagacgagctca

SEQ ID NO: 759184 - DNA, 100 bp, Homo sapiens
cctgcactctcatcgctctcggcctcggcctcggcctccgacacgtaagactttgaccccgacgcaggcttcagtgattgccgcggatcagaagcctgag

SEQ ID NO: 759185 - DNA, 75 bp, Homo sapiens
cgatgtttcaatattggaagcgctttgatttacagcagctgcaggctctcaaaattagagagatgtgtaattgtc

SEQ ID NO: 759186 - DNA, 83 bp, Homo sapiens
cagtacgggaagaacttcttcagaattagaaaggagctgcttcccaataaggaaacatctattatcctcccagtccacaacgc

SEQ ID NO: 759187 - DNA, 100 bp, Homo sapiens
cttaaacacctccaacggggatggctctgaaacagaaaccacctctgccatcctcgcctcagtcaaagaacagaacctagaagtcggaatccggaagaag

SEQ ID NO: 759188 - DNA, 80 bp, Homo sapiens
ggcccccgcaccaggatgttctcaggtccctaatcatggactccccaagagctggcacccaccagggccccctcgatgca

SEQ ID NO: 759189 - DNA, 82 bp, Homo sapiens
tatgaactatgataagctgagcagagccctgcgatactattatgacaaggcaacaagattgacctggctgaaaggagagagg

SEQ ID NO: 759190 - DNA, 100 bp, Homo sapiens
gagagcggcctgattgggaagaaactcttagcgcaatggtgttggtaaatcatgcttattgctacagtttacagacaagaggtttcagccagtgcatgac

SEQ ID NO: 759191 - DNA, 103 bp, Homo sapiens
gcacgggaagaagcagctggacccgctcaccatctacggcatccggtacaatgcagatcttcgtgaagactctgactggtaagaccatcaccctcgaggttga

SEQ ID NO: 759192 - DNA, 98 bp, Homo sapiens
aacaatgagtacaactaccgctgctggaccacaaaccgctgccagaaaacaacggccgagccgtgcactataatggctccagtttgttacagtggaag

SEQ ID NO: 759193 - DNA, 89 bp, Homo sapiens
tcgggaaaagggatcaaggaaatgactattcctccaaataaaatgccaagtcctgtatctgccatgtctgtggcgtccacctcaacagg

SEQ ID NO: 759194 - DNA, 98 bp, Homo sapiens
tttcctcttgatcgggaactcctgcttctccttgcctcgaaatggaccccaactgctcctgctcgcctggatgaatttcacccattcatcgaggcact

SEQ ID NO: 759195 - DNA, 75 bp, Homo sapiens
atgactttggtgccctcaacatctctcagagacgaaaggacatcaatgcaagcttgaataagaaaaacaaattct

SEQ ID NO: 759196 - DNA, 50 bp, Homo sapiens
ctccggagtagctgggattacagatctccgttacaagctcataatgaatc

SEQ ID NO: 759197 - DNA, 75 bp, Homo sapiens
ctttaggctggaagcgccttagaggagccatttttccaggatcaggcagctagagacatgaagaggcttgaagaa

SEQ ID NO: 759198 - DNA, 100 bp, Homo sapiens
ttgtatctcaacaccctgagtgcggatttctgctatgatgacagcacgtcagctaactgttcagatgatgcaaaatcctcagattcttgcagcccttcaa

SEQ ID NO: 759199 - DNA, 83 bp, Homo sapiens
aagaaagagaatggagaagtaaagattttgctgaaaaactgggctggcttagatgaagatgaagatgcacatgtctgggagga

SEQ ID NO: 759200 - DNA, 75 bp, Homo sapiens
gcggactcttcttcgccttcgaagactaattgagcagcgtgatactttgaaagaaacaaatgaagagcttcgatg

SEQ ID NO: 759201 - DNA, 80 bp, Homo sapiens
atttggggaaatccttcggatggtgaactcattagaacaaaagctgatgaagcattgaaagccaaagaaagaaatgagga

SEQ ID NO: 759202 - DNA, 75 bp, Homo sapiens
tgaggcccctggacaagctgcccggcctgaacacggccaccatcttgactagacgcttgaagcaaagctgccatc

SEQ ID NO: 759203 - DNA, 76 bp, Homo sapiens
tcggcactgctactgcgaagacagctggcaggagatctctttgctgccactttcctcattaagaatggggcctttg

SEQ ID NO: 759204 - DNA, 100 bp, Homo sapiens
tacatctactcctacttccacttcgtgttcttcctagcttccctgtatgtgatgatgaccgtcaccaactggttcaagctgaaaatacctcctgattgca

SEQ ID NO: 759205 - DNA, 88 bp, Homo sapiens
cttccagaatgcacagatgtctgaggacaaccacctgagcaatactattccagaacagtttggtccaatacggacagtggccgagggg

SEQ ID NO: 759206 - DNA, 98 bp, Homo sapiens
ttaaacaagcaagcctgccataagtgagaaggcagtgctcggaatgtgaccaggcagggagcagtgacatggaagcagatatggccatggaaacccta

SEQ ID NO: 759207 - DNA, 97 bp, Homo sapiens
attaaagctaaagacatagttcctggtgatattgtagaaattgctgagtaatcaagtcagaggattatatgacttttatctgcctagagaagaacta

SEQ ID NO: 759208 - DNA, 100 bp, Homo sapiens
gcaaaagctaattgtgtggcctggttgggaggatctagtgaaaagccatttgatgtatgcggtcagagaagaagtggaggtcctcaaagagcaaatcaaa

SEQ ID NO: 759209 - DNA, 82 bp, Homo sapiens
gagccttggcggcggacgtgcagggcgccttcagccgctgctacaagctgacagacatgtccaccagcgccgtgttcgccct

SEQ ID NO: 759210 - DNA, 83 bp, Homo sapiens
cagcatcctggaggaccagtcagaccagcgcgtcatcatcaagagaccatttgtttgtgactatgaagggtgtggcaaggcct

SEQ ID NO: 759211 - DNA, 74 bp, Homo sapiens
ggaccacggtcaccgtctcctcaggcgggagtcatggatgtagatgctgaaagagagaagataacacaggagat

SEQ ID NO: 759212 - DNA, 82 bp, Homo sapiens
tttcaacttccggctggattccaagtccgtcgtggagctcaggcgctcaggactgccaggacccagaggattcacacgccag

SEQ ID NO: 759213 - DNA, 100 bp, Homo sapiens
actgcagcctcaacttcttgtcctcaagtgatcctcccaccttagcctcctaagtagctgggaccacaggaagagagaagggcacagttacctaagtatc

SEQ ID NO: 759214 - DNA, 87 bp, Homo sapiens
ggcatggcagcatccgctctccgctctggcgaggaggtctcctcatttaccacatcccccaggttgaaccacgggaccttgacttca

SEQ ID NO: 759215 - DNA, 75 bp, Homo sapiens
gtcatttctcagaaggttttgataggtgggccttagaggagacgccgccggaggaggtgcgccagtctgtaactc

SEQ ID NO: 759216 - DNA, 83 bp, Homo sapiens
cggctgagccagaggccaactgcagaggaactggaacagaggaacattttgaaacgtgttggagagcacaatggctgaacaag

SEQ ID NO: 759217 - DNA, 100 bp, Homo sapiens
cagaagaaacttttcagctctctcggtggacaccttttatcaaagatattatggaggactggaagctgaccctgatcaccagggtgggactggcgctgtc

SEQ ID NO: 759218 - DNA, 75 bp, Homo sapiens
aagggacaaggttccccacatctacttggaaatctttgggatgctcaatggtatactgcaacatccagatggcac

SEQ ID NO: 759219 - DNA, 97 bp, Homo sapiens
cacggacctgggacgcggagtcctgaagccggcggacggttttcgtacgggcggccgtgcgcgaggcgaggagagcttgtttcatatccatatccca

SEQ ID NO: 759220 - DNA, 100 bp, Homo sapiens
ctcggagcgtggagcccgccaaggttcagacagtaactttaattccaggagatggtattggcccagaaatttcagctgcagttatgaagatttttgatgc

SEQ ID NO: 759221 - DNA, 50 bp, Homo sapiens
gcacctacggggacgtctataagagccagcccctgggcaacaaagtggaa

SEQ ID NO: 759222 - DNA, 71 bp, Homo sapiens
tgtctccagaagctgctgtttggaaaggtggcaaaggatagcagcaggccacggcatatgcctccaaggac

SEQ ID NO: 759223 - DNA, 83 bp, Homo sapiens
agaagactcttgtcacactaattgccaacaacaatgaaatttctgaataaattggcagaagaacgcagacagaagaaggaaac

SEQ ID NO: 759224 - DNA, 83 bp, Homo sapiens
aacagtggttctgctggattgataaacccagctgctacagacagcccacctgaggatattgaccataaggactcatatctcat

SEQ ID NO: 759225 - DNA, 90 bp, Homo sapiens
cggcgtgatgttctcggcaggagcggagagtttgctccaccaggccagttaagtgggcagaccaacatccacctcagcaaaaacttcttc

SEQ ID NO: 759226 - DNA, 75 bp, Homo sapiens
ctgcggcgtcggcagctgctgctccgaggctcacgaggcccagggaatcctctggaccatcagattaccaatgaa

SEQ ID NO: 759227 - DNA, 50 bp, Homo sapiens
cgcgaggcgggcagccggggcgtccaggcttcttcagaaagttcagaaaa

SEQ ID NO: 759228 - DNA, 82 bp, Homo sapiens
attttcagagactgtaacaagatcgcattttacagacaccattcgcttttcacccaagatgatttgatgtcttataaaactc

SEQ ID NO: 759229 - DNA, 100 bp, Homo sapiens
agaggctgccaacaaaataattactgtcccagtgtttcacctgtttcacaaactcttggcagagctccttaataagcatttatagtcagtttttggcagc

SEQ ID NO: 759230 - DNA, 110 bp, Homo sapiens
cgccgcgcccccctccaccccggccgcgcccaagcgcaggggctcctcgggctcagtggatttggagcaagaggtggtggtggccttcccccgaagaaatttggtaatcc

SEQ ID NO: 759231 - DNA, 100 bp, Homo sapiens
caaggcgtgaggcgccgcccgggtgtccccgcggcgcaggaggcggtggagcgcagagcgggcgagcgcgatgagcgtgaagccgtgcagaagaagacct

SEQ ID NO: 759232 - DNA, 100 bp, Homo sapiens
gatccaaaagtcagttagtgacagctaatcccagcataattcggcaaagagctgtaggtaaaacttgcctactgatcagttacacaaccaatgcatttcc

SEQ ID NO: 759233 - DNA, 74 bp, Homo sapiens
acccagtgaacaaatccgggggcaaggccaaaaagaaggctcaccgtcatggatgctctatcagaagcaaatgg

SEQ ID NO: 759234 - DNA, 75 bp, Homo sapiens
accggcctgactcgagcagctttgcagccagccttcgagagttggagaagaggctgacgcttgtgcttgccctgg

SEQ ID NO: 759235 - DNA, 76 bp, Homo sapiens
ccccgcccgcctaccacgaggtggtggacgcggagaattcctagaggacctgtgcaacaacctcttgaggatcgaa

SEQ ID NO: 759236 - DNA, 83 bp, Homo sapiens
ccagcgcagtgaagtggtgagcctttttgtcactgttgcttctgcaggaagcctttttggtggcatggtcctcaagaagttcc

SEQ ID NO: 759237 - DNA, 96 bp, Homo sapiens
agcaggaggacaggtgccggagcagctcgtgcagctaagcagccaactgcagaaacgtcaggccacgtgcgagcgagggtttgcagcaatggaaga

SEQ ID NO: 759238 - DNA, 74 bp, Homo sapiens
ttcacccgtctgaaaagattcctcatttgctccccccacccgctgcctgcggttttgtttctgttaaaacgtca

SEQ ID NO: 759239 - DNA, 101 bp, Homo sapiens
ttttaattcttcggaaataccaagtggtctctaccctgctagaccaacaggagttgctttgtggacagattgctggagttgtccgctgtgtttctgacatt

SEQ ID NO: 759240 - DNA, 75 bp, Homo sapiens
ctgactggtaagaccatcaccctcgaggtggagccccacgccaccattgcggagatcaagaacctcttcactaag

SEQ ID NO: 759241 - DNA, 111 bp, Homo sapiens
atgtgatgtcaccgagatgcagaggatactcagtcaaccaacatttactgagcatctacttcgtgccgtatggttttgaatatagccgttctggaaatcccactaggaatt

SEQ ID NO: 759242 - DNA, 83 bp, Homo sapiens
catcatgggccggcctggaacagatagtattgaagccagccttgaggctgcgtcctcgcatgcggaggcagcccgccagctcc

SEQ ID NO: 759243 - DNA, 74 bp, Homo sapiens
ctgaacacaattttagcacagatcatgcctttcctgtcacaagaggaatgtgggtgccggcaggacaggcgatt

SEQ ID NO: 759244 - DNA, 75 bp, Homo sapiens
caaaatggcggatcatgtgcagggctctggaacttcatccattctctatgaaacctcttctgaggcgggcgatgg

SEQ ID NO: 759245 - DNA, 100 bp, Homo sapiens
ctggggacgaagagctgcagctcctcctgtgcggacttaattcagtgcacaaatgagatgaatgtgaacatcccacagttggcagacagtttatttgaaa

SEQ ID NO: 759246 - DNA, 97 bp, Homo sapiens
gagagatgactgcagatgtaatcgagcttaaagggaaattcctcatcaacttagaaggtggtggttgtccaggccatcagtgccctgtgtcagaaat

SEQ ID NO: 759247 - DNA, 100 bp, Homo sapiens
aagcccagaaagggaaaaactaccagaacggagatgtgtttggcgagccctatgagtttgtctctctggaatggctgcaaaagtggttggatgaatcaac

SEQ ID NO: 759248 - DNA, 82 bp, Homo sapiens
cgagtgcggcagtaccgcctccttcccagccgcgcggcttcctccagacctctcggcgcggcattttgaaagcgaagcagaa

SEQ ID NO: 759249 - DNA, 90 bp, Homo sapiens
gtgacgtttaagacttttgaagaaatctggaagttttccacctaccatgctctcggactgggctaagcctgggccctatgaccagcctct

SEQ ID NO: 759250 - DNA, 90 bp, Homo sapiens
agaaccctgggaggggaattccagcaccgcagcaaccactccagaaactttccctccttcagggtatggctctctcggcatgatgaccag

SEQ ID NO: 759251 - DNA, 73 bp, Homo sapiens
cgggacgctgcacctcccgcgccgcacggtggacgagctcagagtcaagatctccactgaagttggcatcaca

SEQ ID NO: 759252 - DNA, 100 bp, Homo sapiens
tgacagacccagagactggtaccggagaatgttccagcagattcaccggaaaatgccagaatccggacaatcagatagttcaaaccagcaaggagatgcg

SEQ ID NO: 759253 - DNA, 96 bp, Homo sapiens
gaatgtgtcagccgatgcaccgagtccagcccaggaaaatggagagaaagtgttgtgaagagcgaagacttttcgctcccagcttatatggatcgg

SEQ ID NO: 759254 - DNA, 75 bp, Homo sapiens
cagattcgcagtggtcgcttcttctccttgtttgtgatggacgcctctgaccccacccagctctctgcatcctgt

SEQ ID NO: 759255 - DNA, 83 bp, Homo sapiens
ttctctgcctcctgtggacaaaaaaaggtgtcagttgtacccgaggcgttctcagcagcagcaagtacctgtggtggatttcc

SEQ ID NO: 759256 - DNA, 101 bp, Homo sapiens
ccacctccagttctgggagcggagcgccgccgctgttgccgggcaacgcggtgtagctagcttgaaccagagtgcactgagccgtccaatgcaaaggaaac

SEQ ID NO: 759257 - DNA, 83 bp, Homo sapiens
tccagctcagtgtttccatcgctttcaacttcctggatggcaggattttcataatatatgtagtatgagttccacatcttggc

SEQ ID NO: 759258 - DNA, 113 bp, Homo sapiens
ctgtgtgtgcagtccccccttgccaacacacccttccttggttacttctatcatggtgctgttgagggccccaaggctgttgcagctcctcgacctgatcggttggtcaatcg

SEQ ID NO: 759259 - DNA, 82 bp, Homo sapiens
cctggaggagaatcaagagctccgagactcggtgaaatacctggagtgctcagctctcacccagagaggcctgaaaaccgtg

SEQ ID NO: 759260 - DNA, 100 bp, Homo sapiens
atgtttggaaaagctatatggagataaatggaattcttttaccatcttattaattcactctgattctgagaacaataactccacaatggcgtcggcctcg

SEQ ID NO: 759261 - DNA, 75 bp, Homo sapiens
cctgcaccttcaaggccaaactatgcagccttcctacagcaacttcccactccaggtggccagacgggagttcca

SEQ ID NO: 759262 - DNA, 100 bp, Homo sapiens
gtgcttttatattcatctcaaaaacaaaattctgaactcaggacttggcaaaaaaggtactttgtggactatcggagagtgcttgtctgtggaggaaacg

SEQ ID NO: 759263 - DNA, 100 bp, Homo sapiens
gcgagatgtcgaagccgccacccaaaccagtcaaaccagcaacccttctgtggggctcaattttggaaatcttggaagtacttcaactccagcaactaca

SEQ ID NO: 759264 - DNA, 75 bp, Homo sapiens
gctgccagaggctgctcctacctctgtcggaaaaggtaacagaagatggaactcgaaatcccaatgaaaaaccta

SEQ ID NO: 759265 - DNA, 96 bp, Homo sapiens
cctagcgctatgcctgcggcggagactgcatcaggctctcgtctgcgggccaggcatcgacatccgcaacgactatcagcagctgaagcgcctgga

SEQ ID NO: 759266 - DNA, 51 bp, Homo sapiens
tggaggaattcagtttcttgggggagtgagctgagtcgacagaaacttcat

SEQ ID NO: 759267 - DNA, 75 bp, Homo sapiens
ctgaacttcaccttttggctttcttggcctgatgctgaactctcgaggacgaaatctcacaaaactgtcccttat

SEQ ID NO: 759268 - DNA, 100 bp, Homo sapiens
ccagttccagaagaaaagccaaaagaattacctgaatggagtgaaaaagtggctcacaacattttgtcagcttcagtatcagacacagcacagcagccat

SEQ ID NO: 759269 - DNA, 96 bp, Homo sapiens
atttcaaagcttttcccatggaggtgttggtaaatcatgcttattgctacagtttacagacaagaggtttcagccagtgcatgaccttactattgg

SEQ ID NO: 759270 - DNA, 74 bp, Homo sapiens
aggactccaaaatggcgtcagttggtattgactgggctcccaagagcgaccgcattgtcacttgtggggcagac

SEQ ID NO: 759271 - DNA, 82 bp, Homo sapiens
tcaagtgatgaaaaacacccacctgaaaatatcattgatgggtcttaaaattttggtagcagaaagcaaatgtgcaaagagc

SEQ ID NO: 759272 - DNA, 83 bp, Homo sapiens
gcgcgactctcgcggcccgagcggccggaccttgtcttcgtgaaagaacttgtcctggacaacagtcggtcgaatgaaggcaa

SEQ ID NO: 759273 - DNA, 50 bp, Homo sapiens
gatcgagaccatcctggctaacacggctggagtgcaatggcatgatctcg

SEQ ID NO: 759274 - DNA, 100 bp, Homo sapiens
gaaaaatcgagcagaaagaatgtctttcaggtgatttgaagatattaaagctagaaattggaactagaaaatcaaaagaattcaaggcatcttaacgtga

SEQ ID NO: 759275 - DNA, 100 bp, Homo sapiens
tgaagagattgcatataatgctgtttcctttacctgggacgtgaatgaagaggcgaagggcttatttcaaaacctttgtccctcagttccaggaggcagc

SEQ ID NO: 759276 - DNA, 102 bp, Homo sapiens
cagttcagaagagccaaggaataaacatgcaatgaacccaaaaggatttgagttctgtgaacctgcatttgttgttggtaattgcctccagatagcttctga

SEQ ID NO: 759277 - DNA, 75 bp, Homo sapiens
aacaaaccttggaaatgttattgataactatgtttatgaacataccctggattcttggactatgtctgttacaga

SEQ ID NO: 759278 - DNA, 100 bp, Homo sapiens
caggctttttatggctgtgagacacgttaaaatttcaggtcatggctccgatcttcatcttgaagaagagtgacattgggtgactgctgcttggaaaact

SEQ ID NO: 759279 - DNA, 87 bp, Homo sapiens
cttcgaacttagacttccggaaggactttggcgaggtgccggtggtggtgtgcacattgagccccggtatagacagttcccccagct

SEQ ID NO: 759280 - DNA, 101 bp, Homo sapiens
cgggagattcagccgtgaagcaagtgcagatagatggccttgaacatcatttacagcgagcaatttcagcacagcaagtgtttagagaaaaaaaagagagt

SEQ ID NO: 759281 - DNA, 75 bp, Homo sapiens
ccgacccgcgaacccctctgggatccccgccgctctgtctacaacccgaggggttgcagatggtgtaggaggctg

SEQ ID NO: 759282 - DNA, 75 bp, Homo sapiens
acacaattataaaatgtcagcttttaagggctcaaagtctaactccccaggactataatctgaggtggtcaggcc

SEQ ID NO: 759283 - DNA, 82 bp, Homo sapiens
aggacccagaggaaacccagccgcttctggggcctcctggcggcagcaaacggggattcagcgtccgatcctttggaacagg

SEQ ID NO: 759284 - DNA, 75 bp, Homo sapiens
atggctgccgcgccgccgctacgggaccgcctgagctttctacaccggactgtccaggacggccggcagtttcta

SEQ ID NO: 759285 - DNA, 74 bp, Homo sapiens
gtgacagcaacagcgacgactatgacctcgagtctgacatggtccttgaatgggcaagagggcacatgaagtac

SEQ ID NO: 759286 - DNA, 50 bp, Homo sapiens
acccggagggcaagaagtttgaccgagctacaaggctttggccgaccaag

SEQ ID NO: 759287 - DNA, 80 bp, Homo sapiens
gccaggacagaggaggctgtcggcagcactctcgagtggaccctgaggagctcttcaccaagctcgaccgcattggcaag

SEQ ID NO: 759288 - DNA, 113 bp, Homo sapiens
cgaggccgcagagctaaatgggggcctctccagggagtgctctgttcacggctccatcgctgttaaattaaacaaccaccatgtcgagcaaaaaggcaaagaccaagaccacc

SEQ ID NO: 759289 - DNA, 90 bp, Homo sapiens
ggtctactctgatgtcaatcttgagggctaggtcatatataccagaagttctgagattgaagagctgaaagccactattgaaaatctgca

SEQ ID NO: 759290 - DNA, 99 bp, Homo sapiens
attcatctcaaaaacaaaattctgaactcaggacttggcaagacgctgccaaggtctgcagagaattcaccgagcgtgagcaaggagaagtccgcttct

SEQ ID NO: 759291 - DNA, 100 bp, Homo sapiens
taagtttcagagcttcgtggtcacctacgtggccatgctggccaagcagtctaccagtctccaaacgtccacaactatcccgatatggaagccgttcccc

SEQ ID NO: 759292 - DNA, 71 bp, Homo sapiens
accatgaatgaaatgaagagttattctcaagctgtcacaggaattcacatatgctgagtttaccacatctt

SEQ ID NO: 759293 - DNA, 100 bp, Homo sapiens
ctacttgcctaaatgaggaatgtctttcctaccatctaaaatacgaaggtttctggctggattgctcgagactttaatcccaactggatgagtgctgtgg

SEQ ID NO: 759294 - DNA, 100 bp, Homo sapiens
ctgcctgcttcagggctgctatcaacgaagagatatcacgtatggcccatctcctgtacgcttggagcgacctttggctacgtggctggccttgttattt

SEQ ID NO: 759295 - DNA, 110 bp, Homo sapiens
aaggatgttggcggtccctgtgacctgtggagacacggccagatctgccctccacaaacttggaaatcatgtcttagagatcaaggagccaagagatgagacaagcctgg

SEQ ID NO: 759296 - DNA, 74 bp, Homo sapiens
tggcgcgatgcgtcaagtacactgaaattcatcctgagatgaggttgaaggtcgaggagctggaaggcgagcgg

SEQ ID NO: 759297 - DNA, 75 bp, Homo sapiens
aagaaatttggagtgtgcgtgcgcgccgagcggccctgggcagtgacggggttcgggtgaccatggagagtgcgc

SEQ ID NO: 759298 - DNA, 100 bp, Homo sapiens
ccatggcataaggaactctatcccaggaatacagctttgcattaggacattgccgagaatggctgcgcccccaccccagaagagcagctgccaaagactg

SEQ ID NO: 759299 - DNA, 46 bp, Homo sapiens
aaggattccaagtaactcttatttgtttcgttggataccactagct

SEQ ID NO: 759300 - DNA, 75 bp, Homo sapiens
gatcttgcggccaaaggggacctcggcgcagtaatgtcaacataatgtgaaaacctttgcatcttctgatagtct

SEQ ID NO: 759301 - DNA, 91 bp, Homo sapiens
ctactcagagcagcacaaggaagctgccttcttcaaagagctggaatgtcccagcggaattgtcaatgaggagaacttcaagcagatttac

SEQ ID NO: 759302 - DNA, 50 bp, Homo sapiens
ctgacttcgaggaattctttctaatgccatggaaagccattcactcctca

SEQ ID NO: 759303 - DNA, 75 bp, Homo sapiens
gtgaaactgaacttataatcgtcactggattgataaagtggccagtgtgtacgaagccccgggctttttcctgga

SEQ ID NO: 759304 - DNA, 75 bp, Homo sapiens
cgacgtccctcaaaccttgcttctaggagataaaaagttgtcgagatgtccacagaaggaggatttggtggtact

SEQ ID NO: 759305 - DNA, 87 bp, Homo sapiens
gagattcgcaagaccttcaatatcaaaaatgactttactgaagaggaggaagcccagagtgtgggatgtgaacacgggtgaagttct

SEQ ID NO: 759306 - DNA, 51 bp, Homo sapiens
ggtggagttggcaggtgtgcgcaggaattacatgaatgacagtcttcgaac

SEQ ID NO: 759307 - DNA, 98 bp, Homo sapiens
accaaagagcaaggcagaatgtgagagccggggccatccagtcttggcagcatgctcatgcctgtccaggagactgcctgggaagagctcatccgcac

SEQ ID NO: 759308 - DNA, 75 bp, Homo sapiens
gtcactggctgcaacaggaccacagtcaagacgatcatagtcactggtggtctgtttttctggggggccaccaac

SEQ ID NO: 759309 - DNA, 75 bp, Homo sapiens
ctaaaccagaagaggaggttgcccagaagaaaaaggtttctgttgcttacaactcattagattttgaaccagaga

SEQ ID NO: 759310 - DNA, 100 bp, Homo sapiens
gcttctttgagactgaaatggcaggtggaagtttagctgatgctataagtgaaaactacagaatcatgagttactttaaagaagcagagttgaaggatct

SEQ ID NO: 759311 - DNA, 75 bp, Homo sapiens
tggtgcccgacttcgaccccgggagagacaaaggcagcgctgccctcgggggagtattggccctggcggaacgca

SEQ ID NO: 759312 - DNA, 100 bp, Homo sapiens
ggctgtggcttcccagtgggagaggaccggcaaaccatttaatccactcttgggagaaacgtatgaattaatcagtttttgagagtggatcaagataaag

SEQ ID NO: 759313 - DNA, 75 bp, Homo sapiens
tcggcgcgggcccgggccccgagcgcccgaacaggactgcctggacagatcctttcgggcacaggtgttcagctg

SEQ ID NO: 759314 - DNA, 75 bp, Homo sapiens
ctttgtggctgtgcttgccaggcctggctccaggacaggagagagtggcaagagtacgtttatcaagcagatgag

SEQ ID NO: 759315 - DNA, 75 bp, Homo sapiens
aaaatacttgtaaaagtcctccaaaaatgagcaagttttcggctttgtgagaaaccttaccatcaaacacgatgg

SEQ ID NO: 759316 - DNA, 100 bp, Homo sapiens
gggctgaagcgactgagtccgcgatggagatactggataaactactagatggcgacttaacaagtgatccttcttacttccagaatgttacaggatgtag

SEQ ID NO: 759317 - DNA, 75 bp, Homo sapiens
agatcactcacctgtccacactgcagagtctaactagttatgatgtctgtagcatacttcttgggacttctacca

SEQ ID NO: 759318 - DNA, 115 bp, Homo sapiens
ccgcgcctgccccgccatgaatgaggagtacgacgtgatcgtgctgggcaccggcctgacggcatgtaatgaatttactacacatgtgatgaaccttctccgagaacagagtaga

SEQ ID NO: 759319 - DNA, 75 bp, Homo sapiens
ccgggacccacttcactccagtgcctccgacgcctcctgatgcgtatagcttctggcctgggcttggcctggatt

SEQ ID NO: 759320 - DNA, 100 bp, Homo sapiens
cgggaggtgaatttccatgtcaacatagtcctggttgataatcagttaccaggtgcaatgttccctgttgtatttcatcctgttgcccctccaaaatcta

SEQ ID NO: 759321 - DNA, 100 bp, Homo sapiens
gaggaaaggatatgatcgtgtgtctgtgatgcgtccacagccaggagacacggttttcctttggaatatggataaatacaccatgatacggaaactagaa

SEQ ID NO: 759322 - DNA, 97 bp, Homo sapiens
cagcgattcgagaaggtttcctactttgtatttggtgatttcaacttccggctggattccaagtccgtcgtggagggtgctgttggcccaaaggttg

SEQ ID NO: 759323 - DNA, 100 bp, Homo sapiens
ccgccaccatgtccgtggccttcgcgtctgcccggccaagaggcaaaggggaggttacgcagcaaaccatccagaaggttaaagatcgaggtccggaagc

SEQ ID NO: 759324 - DNA, 100 bp, Homo sapiens
aggaggaacttcgaaccatggaccaggccctcaagtccctgatggcctcagaggaggaggcacccctgaggagccgccaggtggtgagtctgcagaagag

SEQ ID NO: 759325 - DNA, 51 bp, Homo sapiens
cctggcgctgacaagggtccagcctccgattttgaacgccatgaccctgtg

SEQ ID NO: 759326 - DNA, 96 bp, Homo sapiens
actgattttatgggaaaattaagcagatgctccagtttgagaaacctggatctgcgatctgtttgtggtagctacagcaagctgggtagcaggcag

SEQ ID NO: 759327 - DNA, 95 bp, Homo sapiens
cctggcggtgctgcggccacacaccggcaacgcggtcacggcccagcgcgttcgggatagctgggagtatggccaccctgctccacgatgcggta

SEQ ID NO: 759328 - DNA, 74 bp, Homo sapiens
cgccgcagcccgggcccaggccccggcagcgcctgggacaaggtgaagctgtacttcacaaaaacagtagagga

SEQ ID NO: 759329 - DNA, 100 bp, Homo sapiens
tatcaacttaaaagatgccacctctaaggtatttgtaggcaaaataccaagggatttatatgaggatgagttggtgcccctttttgagaaggccggaccc

SEQ ID NO: 759330 - DNA, 98 bp, Homo sapiens
aaggatgcttcgcgttttctctctcctttttggagacagattcgcagtggtcgcttcttctccttggatcgaacagaggctgcaaatagaataatatg

SEQ ID NO: 759331 - DNA, 75 bp, Homo sapiens
tcggcgtccgccagcgatggcacaggatgtatgttgtgttcacagcgaaggtactcccttcagcctgtcccagaa

SEQ ID NO: 759332 - DNA, 136 bp, Homo sapiens
ctgggatcgctgctcctctctggggtcctggcggccgaccgagaacgcagcatccacgggatcgcttacacctgagacgaactacagaacagcacgtaccagaggtggaagtccaagtcaaacgcagaaggactgc

SEQ ID NO: 759333 - DNA, 75 bp, Homo sapiens
ctggagcctcagttggaagcagccgatccagcctgcggagcctgtggggcagatgatgataattccgaagaaggc

SEQ ID NO: 759334 - DNA, 96 bp, Homo sapiens
gacccgggctttccaccgcttgcgcctggagctgctgcttgacacacaatgcagatcttcgtgaagactctgactggtaagaccatcaccctcgag

SEQ ID NO: 759335 - DNA, 50 bp, Homo sapiens
gtctcccaccgactgcctgtttaagaatgataacactttgtgtccaggat

SEQ ID NO: 759336 - DNA, 82 bp, Homo sapiens
acgcggaggccgcctggggtagcggcggcgggagtcctggcgctctgcagcaattctgtggtgttcttggtcacacatttat

SEQ ID NO: 759337 - DNA, 100 bp, Homo sapiens
atgtgcagccagatgagcccaaggttcttaatgaatgtctaaggtggagccgccaccaaaatgcagattttcgtgaaaacccttacggggaagaccatca

SEQ ID NO: 759338 - DNA, 100 bp, Homo sapiens
agagagagaggtggacagatctgagagatactgagtaccaaaagaattggtggagctccatttgaagctgatgaggaaaattggcaaatctgttactgca

SEQ ID NO: 759339 - DNA, 100 bp, Homo sapiens
ttcccccaggcttctgcgcagaatgcttctcagcagcaacatccccaaacagcggcgtttcacggtggcacatacatgagagtaatgccttctagctttt

SEQ ID NO: 759340 - DNA, 100 bp, Homo sapiens
tcgcgctgctgggcacccacggagcctccggggctgtgtcaacagcatctccaccctggagcctgtgagccggtgccagcgcctgagtgagctgtacctg

SEQ ID NO: 759341 - DNA, 82 bp, Homo sapiens
gaaacctagccccggacgagaagcgcagcaacgtgcggtgggaccacgagagcgccaaatttgagtttcatcatggtgacta

SEQ ID NO: 759342 - DNA, 98 bp, Homo sapiens
ggaaaatggagcccttcaccaatgcccagctcaacattggcaatgtgctccctgtgggcaccatgcctgagggtacaatcgtgtgctgcctggaggag

SEQ ID NO: 759343 - DNA, 98 bp, Homo sapiens
ccacagactggattttctgacatcaagtcccacgcgttcttccgcagcatagactgggacttgcgcccagaggcacccacctgtgggagttcatccgg

SEQ ID NO: 759344 - DNA, 100 bp, Homo sapiens
ggcagaagccatctgcaaggagcaacacctcttcctgcctttctcctacaaagacgagttgtactgctgtcacaggaaatggacgctggattacaagcat

SEQ ID NO: 759345 - DNA, 75 bp, Homo sapiens
gtttatgtcagccaactggggaaagtggaattgaaatcccataaaggtggataagattgtggaccagctgcagca

SEQ ID NO: 759346 - DNA, 100 bp, Homo sapiens
agcagccccaagctttacactggatgcagcgatcaacccaccactcaccaggccagagcaaatcttacccaggcctcaaatctttattctggacaagtac

SEQ ID NO: 759347 - DNA, 98 bp, Homo sapiens
gagctgcagcagcccgtctcgtgggcgccgcagcctcccggggccctacggccgcccgccaccaggtcagcacctcatctatgggcactttaccaaag

SEQ ID NO: 759348 - DNA, 74 bp, Homo sapiens
ccaagctgagagcagccacacagcccccaaatacatcaagatgtttgtactggatgaagctgacgaaatgttaa

SEQ ID NO: 759349 - DNA, 75 bp, Homo sapiens
cagaaaagcaagttgcgctcttgaccaatgagagatatttgaagtgcatgcaagatatgggaaatactaaagcaa

SEQ ID NO: 759350 - DNA, 100 bp, Homo sapiens
tgttatctctgtaccgggcgatgctgagagagagcaagcgtttcagcgcctacaattacagctatgacatggtgcattacggccactccaaccagctgcg

SEQ ID NO: 759351 - DNA, 99 bp, Homo sapiens
ggaagaaatggcttctctagaggaggaagcctgcagccttaaggagttcacagggaaggaagaaaagacatcattgttactacataattcccatgcttt

SEQ ID NO: 759352 - DNA, 100 bp, Homo sapiens
gagcgctgactgggtgcgagtggggaagctgctaacccgacccggattggcgctgaggtggcccgtggggcaggtaacgtgaagcacctggttctcttcc

SEQ ID NO: 759353 - DNA, 74 bp, Homo sapiens
gagccttcacctacagcatcgtgggcgccggctcccagtttgggtgcactccctctaccgacggacaggggcca

SEQ ID NO: 759354 - DNA, 83 bp, Homo sapiens
gaaaagctcctattctgattgctacagatgtggcctccagagggctagatgctgggctcttgcactgtttggtggaaatggtg

SEQ ID NO: 759355 - DNA, 75 bp, Homo sapiens
ccgagggcttggaatctcgagcgggaaaaggcacgtgtggttctcaaatataggcattctgatgggaacttgtgt

SEQ ID NO: 759356 - DNA, 100 bp, Homo sapiens
cggccatggcgttgtcgatgccgctgaatgggctgaaggaggaggacaaagagcccctcatcgagctcttcgtcaaggttgtaaagaagaaagttctacc

SEQ ID NO: 759357 - DNA, 100 bp, Homo sapiens
atggaaaacatcgatgtgtgtgagaactgccattatcccatagtcccactggatggcaagggcacgggcattcacacgggccagtttgtgtattgcggca

SEQ ID NO: 759358 - DNA, 98 bp, Homo sapiens
cgttcttttcggaatataccagaagccgaattgctgcatcttttgggttctccaaaaaatgtggaatcctttgcatctatgctgagacattctcctct

SEQ ID NO: 759359 - DNA, 82 bp, Homo sapiens
gccggagagagccgtaggcaggaccccgggacaccctggaagccaggaaatggaagctcttcgtgggcggtcttgactggag

SEQ ID NO: 759360 - DNA, 75 bp, Homo sapiens
gccgcggcaacgtgcagctggaagcgggcgaggacgtgggtcagttacccagcatgccacaatctgattgctgac

SEQ ID NO: 759361 - DNA, 100 bp, Homo sapiens
cggctctgcgcgtccgttactacagtgacaccagactctcaaagatgaagacttttgtaaacgtgtatctttggctactgtggataaaacagttgaaact

SEQ ID NO: 759362 - DNA, 83 bp, Homo sapiens
ccgcaaccattgacgccatgtcgggttattcgagtgaccgagaccgcggccgggaccgagggcaccatgactcctgtgaggat

SEQ ID NO: 759363 - DNA, 100 bp, Homo sapiens
tggatgctcacccgaaggctgattactttgggagccttttcataagctgctggcccaaggccttatcaaggggcagacattccgcctaccatctggacag

SEQ ID NO: 759364 - DNA, 50 bp, Homo sapiens
gtagcctgggctgtctggaaatctgagacggaatgaagttgataatagtg

SEQ ID NO: 759365 - DNA, 88 bp, Homo sapiens
ctcgggagaaacaacaactgctacatctgttggaggagccaactagcatggaagtgcaggaaattggagaattattacaaacaagggg

SEQ ID NO: 759366 - DNA, 100 bp, Homo sapiens
gatgttaaaagttacctgtttcggaatgcttttgtgctgctcacagtcaccgctgtcattgtggctgatttagaagaaagttttaatgaacatgaactgg

SEQ ID NO: 759367 - DNA, 96 bp, Homo sapiens
acatcgaagccatgatttaaatatcggcgttaagcaccagtatgcatgagcgggtgaaccgaacagaaagacagtttcgatcacttccagctaacc

SEQ ID NO: 759368 - DNA, 75 bp, Homo sapiens
atcattaaggacggaggcacgactattgcccagaagaaaagatgtttggttttcacaagccaaagatgtaccgaa

SEQ ID NO: 759369 - DNA, 50 bp, Homo sapiens
ggccccagaactatcttttcgggatttatttaatggggatgtgttcaagg

SEQ ID NO: 759370 - DNA, 98 bp, Homo sapiens
ggctccgtgaaccttagggacaacaccgggacacccgcgaggccggaaaatggtgttcaaggccaagttcaagaattgggacgatgtgttgacggtgg

SEQ ID NO: 759371 - DNA, 82 bp, Homo sapiens
ctgctgaagagtttccaaggagagcaaattcaacacccaacagcttccttaatagcaaaggtagcaacagcccaggatgata

SEQ ID NO: 759372 - DNA, 75 bp, Homo sapiens
tgacctctgacacgtattgtctcaagattaaagtgccacaccagaggaatataatacagttgtacagaagccaag

SEQ ID NO: 759373 - DNA, 100 bp, Homo sapiens
attaaatagaggagtcatcaaacaggtcatcatcagatttgaaatatttaaagtggatacaaaactatttcagcaatgcagacaattaagtgtgttgttg

SEQ ID NO: 759374 - DNA, 100 bp, Homo sapiens
gagtgccatcactgcagtgtctgtagctgtggtgaatctgcagtaccaaggagcccatctgcctgtccaggaatttggtcttgcccgattcaaaagcaac

SEQ ID NO: 759375 - DNA, 50 bp, Homo sapiens
aaagaagttccaccagagtagaggttggaagtactccatgacacacactc

SEQ ID NO: 759376 - DNA, 50 bp, Homo sapiens
ctcccaagtaactgggattacagatgatagtgtggatcctttctggccag

SEQ ID NO: 759377 - DNA, 90 bp, Homo sapiens
tgcttatagggctcttcctgctgttgcttctacttttaattttcgctcagctctcttcagctctagacggagttttgcacttgttgccca

SEQ ID NO: 759378 - DNA, 51 bp, Homo sapiens
agaaatcctgcggatcacagacccaaatgtgattcgtcatcgagatgttcg

SEQ ID NO: 759379 - DNA, 98 bp, Homo sapiens
gaggacagagaagccttttccgttgccggtgccggcctagcgtcctggaattacttcaatcaagcactggctcaggcgatcagggaagccagagagca

SEQ ID NO: 759380 - DNA, 83 bp, Homo sapiens
ggcaccgaggaccagctcaatgacagttcgtgtttagtaggagcacagtagctgtttggggaacgaccttaagtgaatagatg

SEQ ID NO: 759381 - DNA, 83 bp, Homo sapiens
ggctgactacctgctgtacaccctcaacaaacaccagcgctttggatgaaggatttgggggcagagcacttggcaggtcatga

SEQ ID NO: 759382 - DNA, 87 bp, Homo sapiens
cgtcagtctgtttgtccttctgaccacagccaagtacaaatctattgtcaagtacaagacagctttctactccttctaccttcctat

SEQ ID NO: 759383 - DNA, 100 bp, Homo sapiens
aaggaatcctctccatctggttcgaagtctcagcggtattctggtgcttatggtgcctcagccgctcctgacatcactggccataaacggagtgagaaca

SEQ ID NO: 759384 - DNA, 75 bp, Homo sapiens
ccggccttgtgtgtccgactcggcagcagtggttgaatcgctcctagctgacccctcacgtctcttatgatacgt

SEQ ID NO: 759385 - DNA, 82 bp, Homo sapiens
ctggggccagggaaccctggtcaccgtctcctcaggtgtagaatgagccaaggagactcaaacccagcagctattccgcatg

SEQ ID NO: 759386 - DNA, 49 bp, Homo sapiens
caggagaagaggaacctgcaaaggtcctcagaatggttggaatgaccct

SEQ ID NO: 759387 - DNA, 82 bp, Homo sapiens
ggacaccagccgtgtgcagcctatcaagctggccagggatgccaggccaaggtggagcaagcggtggagacagagccggagc

SEQ ID NO: 759388 - DNA, 100 bp, Homo sapiens
cggagacagcccaaatatcctcggaagagcgctcccaggagaaacaagcagagctgcaaccctcttgtcctctttgaagcagaaattgaaaagtactgcc

SEQ ID NO: 759389 - DNA, 75 bp, Homo sapiens
atctgagcgttctcaacttggttattgtaaaaaaagactatctgttatagtccctgggtcaagacaacaattttt

SEQ ID NO: 759390 - DNA, 82 bp, Homo sapiens
gcctgatgatcacgcagctggctggcttcagtggaccagaattacatgaacgacagccttcgcaccgacgtcttcgtgcggt

SEQ ID NO: 759391 - DNA, 51 bp, Homo sapiens
caaagggacctgatgaagcgaagatcaagattgatgatggtctccagctgt

SEQ ID NO: 759392 - DNA, 80 bp, Homo sapiens
tcttggtctccatgaaggctactggcaggagcacatgagagagtgagagatttttcttgaggctgaatagaaacgggctt

SEQ ID NO: 759393 - DNA, 75 bp, Homo sapiens
acactggccagctccatggggaatctgctcattgctatggacagtgctatcaccctgtggcagttccttcttcag

SEQ ID NO: 759394 - DNA, 130 bp, Homo sapiens
cgacagtgaaaccctttgccatcgacatatttcctgtcaccaacaaagatttcagaaaaatggctacaaacttcctagcacatgagaagatctggttcgacaagttcaaatatgacgacgcagaaaggag

SEQ ID NO: 759395 - DNA, 83 bp, Homo sapiens
caagaagacgtccaatctgagcgtgctgcggacggcgctgcggtacatccaggcgatcagtgggtgaccgcggctgcgaggga

SEQ ID NO: 759396 - DNA, 90 bp, Homo sapiens
gcccaggacaagggtggtttaattcctcttcataatgcggcatcttatgggctctaagcgaaagacatgaggcctcagcctgaaatgagg

SEQ ID NO: 759397 - DNA, 83 bp, Homo sapiens
ctgggagcaacgggagtgtcctggacccagctgagcgggcggtcattcgcatcgcagggaaattcaactactgaggaggttac

SEQ ID NO: 759398 - DNA, 75 bp, Homo sapiens
gagagaggtacctctccttttccctctccctttccctaaggacttgacccaatgaaagaagcatatggcacttgt

SEQ ID NO: 759399 - DNA, 87 bp, Homo sapiens
agaagtcagagagaggatgctggtttcttactaccgatacaggtttgcacatccttatcaatatgaactaaatcactttaccccagc

SEQ ID NO: 759400 - DNA, 98 bp, Homo sapiens
cagcgccgaggctgggctgaggcgccgcggtaccatgaggcgccgtctgaagatgatgagaaactgaaaaagaggaaggagcgatttgggattgtcac

SEQ ID NO: 759401 - DNA, 50 bp, Homo sapiens
gcctgcccttcaccctctacatggtgtctgtgacctttgatgatgtggct

SEQ ID NO: 759402 - DNA, 100 bp, Homo sapiens
gccgacatcgtgtgccgctgccaggcaagccaaaattccttccggatagaatatgatacctttggtgaactaaaggtgccaaatgataagtattatggcg

SEQ ID NO: 759403 - DNA, 98 bp, Homo sapiens
gcgcatgcagctgctgctgaccctggccttcaaccccgagccgctggtgctacagagccttgaaaccagcgaaacaataatcaaagagcagttctgtc

SEQ ID NO: 759404 - DNA, 50 bp, Homo sapiens
ccaccgtctggtgtctaaaccgcctcggacagggtctcgctctgttgtcc

SEQ ID NO: 759405 - DNA, 77 bp, Homo sapiens
aatttgattaactcattcaaggttacccagttggaaaatgtttataggaggccttagctgggacactacaaagaaag

SEQ ID NO: 759406 - DNA, 99 bp, Homo sapiens
acctacccgagcggctgccagctgcgcgccgccagccagagggccgagagccgcggggagaaggccatcacccaggagagtgtgcctgtgtccagttac

SEQ ID NO: 759407 - DNA, 100 bp, Homo sapiens
cagagcctcagtttgtgcaggacaccgacatggaacagggactcactggggggtgttttgaatgctgtatcaaatgcctggggggcattccctatgcctc

SEQ ID NO: 759408 - DNA, 100 bp, Homo sapiens
agagaatatcagcgacaggactacatggatgccatggctgagaagcctgtcaggattggagctgctttccgagcacctggaccccaaactcctgtgccgc

SEQ ID NO: 759409 - DNA, 75 bp, Homo sapiens
tcctggcgcgatgcgtcaagtacactgaaattcatcctgagatgaggtgcagtctttgcaagccacatttggaac

SEQ ID NO: 759410 - DNA, 98 bp, Homo sapiens
tctcgctgcttcaggaggacctgcaggaggacgcagacggattcagaaaaagtggacagggcagtgctgaaggaactgagtgaaaaactggaactggc

SEQ ID NO: 759411 - DNA, 100 bp, Homo sapiens
caacacggactccttggacatgtgtatcagtggcatctgtcaggagcttttaagtgaataagaccattttcccaatgagcagtgtcataaacattgagga

SEQ ID NO: 759412 - DNA, 97 bp, Homo sapiens
ctgcttttcggttccgggtcttggccccgtccttacctcacagggacacttgacattcagggacgtggccatagaattctctcaggaggagtggaaa

SEQ ID NO: 759413 - DNA, 74 bp, Homo sapiens
tgcggaaattcatctttaaggacgaagagagcatctactacaagccttagtgggtctgatagtgagaccgaggg

SEQ ID NO: 759414 - DNA, 50 bp, Homo sapiens
caagatcctcctgctgcaggcgtacagagatggagtccacagcctaccct

SEQ ID NO: 759415 - DNA, 83 bp, Homo sapiens
cgggtggcttacagacgctgccagcatcgccgccgccaggcacctacgggctgagcaacgcgctgctggagactccctggagg

SEQ ID NO: 759416 - DNA, 76 bp, Homo sapiens
cactactttaagaaagctgctgacatgattgtcagaagcttcagttctggtaaaagagaaggtggggactttgttt

SEQ ID NO: 759417 - DNA, 97 bp, Homo sapiens
gtgcacctgtcaagtcgggtttacagatataagccttccaaagtcagcagcaatctgttacacagcagcactgttgaagacaaggactgtttcagaa

SEQ ID NO: 759418 - DNA, 83 bp, Homo sapiens
aggtcgtcggctggcggagcggcgtatgtatcctccactcctcgctggccaccatcctgctgcccaacagaagaagctcttct

SEQ ID NO: 759419 - DNA, 90 bp, Homo sapiens
gggaaacgcgtgagccaggccgagagttatctgatgatggccgctatgtcttgttatcaataagggaaggatgtgatccagtaaaccgac

SEQ ID NO: 759420 - DNA, 73 bp, Homo sapiens
tgctgctgggattcgcgctgctgggcacccacggagcctccggggctggcgtccgacctccgatcatgaacgg

SEQ ID NO: 759421 - DNA, 75 bp, Homo sapiens
cggactcccggggccatggccggaatgcagtaccctcagcagcaggaaacccagcgtttgctggcagaaccagtt

SEQ ID NO: 759422 - DNA, 97 bp, Homo sapiens
gggaaaaatgccatgtctattttcagttctgctactaaaacagcttactgcagagtgggtctgggcatctgctacgacatgcggtttgcagagcttg

SEQ ID NO: 759423 - DNA, 96 bp, Homo sapiens
cgctggggactgggaaatcagggcatcggagagtgccacattaatggtgttctaatcttaggcgcttcaggcggagttggtacttttgctatacag

SEQ ID NO: 759424 - DNA, 51 bp, Homo sapiens
cgcggccgcggcgggtcggtctcctaggttgaaatcacaaagattagacac

SEQ ID NO: 759425 - DNA, 75 bp, Homo sapiens
catgagatggtagccaacccctcagatggagtctcattctgtcgctcaagctgaagggcagtgccgtgatcttga

SEQ ID NO: 759426 - DNA, 75 bp, Homo sapiens
tgacacggctttggaaacgacgtcatgtgttagcttattccactaagctcaacaaatttcctgtatttaatatta

SEQ ID NO: 759427 - DNA, 76 bp, Homo sapiens
aagatcaagactagtgtgagcaacaaacctatccctcggccagatcctgtgcataataatgaagaaacacatgatc

SEQ ID NO: 759428 - DNA, 75 bp, Homo sapiens
ggatcccgctgtggtacttctcgcagtccccgcgcgtggtcatccagaacccttaggagaaatcttgagagtgga

SEQ ID NO: 759429 - DNA, 114 bp, Homo sapiens
cgggcgcagccggagccggtgccgcagctgcgatggccgtggccgtggggagaccgtctgtactccaaagattcaggtttactcacgtcatccagcagagaatggaaagtcaaa

SEQ ID NO: 759430 - DNA, 100 bp, Homo sapiens
aaggatgaattactgaaattgtgaaaagccatacaagtgtacctgggaaggctgcgactggaggttcgcgcgatcggatgagctgacccgccactaccgg

SEQ ID NO: 759431 - DNA, 100 bp, Homo sapiens
ttaccttagagcagttctccctagcagtgaagagctgtcctgaccaagaggaccagactttgttaatgaaggagattacctggggcaattgatgttatcg

SEQ ID NO: 759432 - DNA, 100 bp, Homo sapiens
agaagctcccgcggtactacaagaacatcggtctgggcttcaagacacccaaggagaggatggagatgaagatgaggaagctgagtcagctacgggcaag

SEQ ID NO: 759433 - DNA, 75 bp, Homo sapiens
tgacacggctttggaaacgacgtcatgtgttaggatcaactcactatcctgaaggtccattctcccaagaagagg

SEQ ID NO: 759434 - DNA, 100 bp, Homo sapiens
acagcttcctgcccaacaccaaaaactgtctcgaggatgcctacggagctggctgcacttcagaatgtcagtgtgtggaggagaataccctggaatgcag

SEQ ID NO: 759435 - DNA, 100 bp, Homo sapiens
tgttcaccagtcagtgtttgaaggagaagagagcaaggaacagcattgcggcctcagctgtgtgcgtcttcaacctgagcgccatcgcgcaggccttctc

SEQ ID NO: 759436 - DNA, 101 bp, Homo sapiens
cgctggagcacaaaagagtctccgcggtggaggtctgcgttgctcttgcttttcctcgctggggtgtacggtactggctcctgtatcacccagctctggag

SEQ ID NO: 759437 - DNA, 100 bp, Homo sapiens
ccggagcttctcagaagacagagggttttcttttgaggtgcagaagtctacttcagacatcgtgtgacacagatcaacctaagagatgacaaatgggaag

SEQ ID NO: 759438 - DNA, 75 bp, Homo sapiens
atctggaggagcagttgtctgatgaagagaaggtacagacagtgtttgtgtgttcctgttgtggctaactttaag

SEQ ID NO: 759439 - DNA, 82 bp, Homo sapiens
cagatcagcaaccaaataggaccaatggaggctgccaaacgagggattctttcatctggtcggggcagaggaattcattcaa

SEQ ID NO: 759440 - DNA, 90 bp, Homo sapiens
gaaaaagaagccgaagaaagaagaggaacagaagtggaaatggaggctccacgctgtttgtggagacatccctgagacggccacaggaca

SEQ ID NO: 759441 - DNA, 50 bp, Homo sapiens
cagacatgtcatcaactcagctggtactccaaagattcaggtttactcac

SEQ ID NO: 759442 - DNA, 82 bp, Homo sapiens
aggaacatagctttgcgttcaagtttagagtggaattcgtgtgttgtacagacccttaagaatcacttgatggctgccagga

SEQ ID NO: 759443 - DNA, 95 bp, Homo sapiens
taaatggttctggcaaactgctcaaggtgtgatgttagctgttgatgctgtaattgctgaacttaaaaagcagtctaaacctgtgaccacccctg

SEQ ID NO: 759444 - DNA, 100 bp, Homo sapiens
cccaggtgtaagcgcagaaagcaggcgaacccgcggcgcaataacgttttcggctttgtgagaaaccttaccatcaaacacgatggccagcaacgttacc

SEQ ID NO: 759445 - DNA, 100 bp, Homo sapiens
tacctcactgcagaggtgctggagctggcaggcagcggaggaggagaaagagatggacctcccggactcggcctcgagggtcttctgcggccgcatcctg

SEQ ID NO: 759446 - DNA, 82 bp, Homo sapiens
aaatactactttgggaaacagtcttcaggagagcctagatgagctcatacagattccagctaagaaagagtcttgtccaaac

SEQ ID NO: 759447 - DNA, 100 bp, Homo sapiens
gaagctcatgagcagcctgcccaacttctgcgggatcttcaaccacctcgagcggctgctggacgaagtcgcagatatggccagtacactatgaaccagg

SEQ ID NO: 759448 - DNA, 118 bp, Homo sapiens
ccaaaaatgtgcatactcacagagttagagagagggatggtgtaacagatcaactcctagcaatcatgatcggatacagcgtctgaggcaagaatttcagcaagcaaagcaagatgaa

SEQ ID NO: 759449 - DNA, 75 bp, Homo sapiens
cagcaaagtgcattcgaacactaacgctcctgggtaaacagactggtctgactcctgatatgccgtacttggacc

SEQ ID NO: 759450 - DNA, 75 bp, Homo sapiens
actctcaaagcaataccaggatagctgttgtttcagagaaaggtaatagcctgcagctggtgttttgagaagccc

SEQ ID NO: 759451 - DNA, 100 bp, Homo sapiens
cttggatccttgtgggcatgatccataatcggtttcaagaatggaggaacacctctgctttatgctgtacatggaaatcatgtgaaatgtgtaaagatgc

SEQ ID NO: 759452 - DNA, 75 bp, Homo sapiens
gatgtatttgcatccttccctgcttcagccaggattactaccaaagtggaagaatgcttttgcgaatgtctcaag

SEQ ID NO: 759453 - DNA, 83 bp, Homo sapiens
gcagaactgcaggacatctgcaatgatgttctggagggagcaaaggagtttgctgctgctctcaccgctgagcggataaagac

SEQ ID NO: 759454 - DNA, 50 bp, Homo sapiens
cggaacaggacgccctctgataataccctctaccatctgctttggtcagg

SEQ ID NO: 759455 - DNA, 75 bp, Homo sapiens
cggcatctccctggcttctcgtctgaacccgccccagaccatgggggatgtgaagctggttgcctcgtcacacat

SEQ ID NO: 759456 - DNA, 101 bp, Homo sapiens
ggcggcggcgctggggcccccagaagtgatcgctcagctggagaacgcggctaaagttctgatgtgaaaatgcctcgtgtaaaagcagctcaagctggaag

SEQ ID NO: 759457 - DNA, 99 bp, Homo sapiens
catgaaggacgtgcccgactggaaggcagtttgaagagaacacatgaagaagaggatgattttggaaccatgcaagtggcgactgcacagaatggctga

SEQ ID NO: 759458 - DNA, 100 bp, Homo sapiens
ctctgggacattcgaaaacctcagaggtctcttcagagctgctgtgcccagtggtgcttcaactggtatctatgaggccctagagctccgggacaatgat

SEQ ID NO: 759459 - DNA, 82 bp, Homo sapiens
tgatggccagagagatgacgatcttaggcttaactggcatgggctgagccccttgggctggccatcatgccgtagcatccag

SEQ ID NO: 759460 - DNA, 82 bp, Homo sapiens
catcatccgcaagtttgagggccagagcttcagtttcacattcttggtacctcctggtggtgcctgggagggagccactgct

SEQ ID NO: 759461 - DNA, 100 bp, Homo sapiens
acgctgctcaaaacctcgctccggaaaggggacacctgatttacaccctcctttttgcgtttgggatcctggaacgtggtgatgttcgtaacctatgagc

SEQ ID NO: 759462 - DNA, 86 bp, Homo sapiens
acaaatgcaatttcaaattttagcattggtcttccaagcaataatgaatcgtatttccagctcattcttggaatcccagaacaggc

SEQ ID NO: 759463 - DNA, 82 bp, Homo sapiens
gggaaaagattgcccacgaattgggtcgatctgtgacagatgtcattgctagaatcgtggatggaagcagattcactgagtt

SEQ ID NO: 759464 - DNA, 100 bp, Homo sapiens
tccggatattctaggatcttccggagctgccgtgcatacctgtgtgaaagcaaccttccacaaacatgccaagggacaagtgttatttgacaaagtgtgt

SEQ ID NO: 759465 - DNA, 100 bp, Homo sapiens
tcagactgacccctcgggcacataccatgcctggaagggcttccgttacaagatgaggtctgtgtatgctcacttccccatcaacgttgttatccaggag

SEQ ID NO: 759466 - DNA, 78 bp, Homo sapiens
gcgcaggtgctagcggccccttcgccctgcaggagcatcagatccatgctgctgctgactcggagccccacagcttgg

SEQ ID NO: 759467 - DNA, 74 bp, Homo sapiens
caaacatcgatggcctactggggataacattcatgcagaacatcagttcaattttgtggggaagattcttggac

SEQ ID NO: 759468 - DNA, 100 bp, Homo sapiens
ccaacatgttctacatcgatcctgagaaaggagacattgtcactgttgtgtcacctgcgctgctggaccgagagattgaagccaagggaacgttgaacgg

SEQ ID NO: 759469 - DNA, 75 bp, Homo sapiens
gactacgaggaatggcggcggctgccgcaggacctgcagcatcccagagcatttaaatcaaacggtattgagatg

SEQ ID NO: 759470 - DNA, 51 bp, Homo sapiens
cctggatgaggaggtgtttgagggagagacaaaggcagcgctgccctcggg

SEQ ID NO: 759471 - DNA, 82 bp, Homo sapiens
cttggcccttgttcccccaaatgtctgactctgactctcggactgagaaacgcaagaacactctgctccagccaaggtggtg

SEQ ID NO: 759472 - DNA, 82 bp, Homo sapiens
gggagcgctacggccccaacggaaatgacttaatcgtctttttggcagaccagaatgcaccctattttaaacccaaagtaaa

SEQ ID NO: 759473 - DNA, 100 bp, Homo sapiens
ctccaagccctactgggaggcacggagggtggcgaggcaggaagctgcacaagccttaatttatgctgagatggcaggatcaagcctagaaaatattcaa

SEQ ID NO: 759474 - DNA, 100 bp, Homo sapiens
gtggaccggacccaggccctggatgggactgtctatgatgtcatgtttgtcagcacagtccgtgcactggagaaggcgaggtcaagtgcccaactgcaga

SEQ ID NO: 759475 - DNA, 82 bp, Homo sapiens
gacactcactgtcccacagggagctcaaagagtgggccaggcgatcagtgggtgaccgcggctgcgagggactttgtcatcc

SEQ ID NO: 759476 - DNA, 75 bp, Homo sapiens
cctctgcctggcgttgctttgcctgggcggtgcggacaagcgcctgcgcttatgtccctgatgccaaaaatgcac

SEQ ID NO: 759477 - DNA, 75 bp, Homo sapiens
ctgagtggttgtgtggtcgcgtctcggaaaccggtagcgcttgcagcatggccaggacagctgatggttgtggca

SEQ ID NO: 759478 - DNA, 75 bp, Homo sapiens
tatgcagtctcttttaccagcagagtacaagcgcaagctagccagagtttccctggtgcgcaaagaactcaggtc

SEQ ID NO: 759479 - DNA, 73 bp, Homo sapiens
ttcacgccctggatccaggcccacgggggctgggtagttcagctacaggaatggatgattaaaagcatcaata

SEQ ID NO: 759480 - DNA, 75 bp, Homo sapiens
ctctgtgcctcaacaaccatttctaagtgggaacttaggctgcggaactatgtcccggaggatgaggacctgaag

SEQ ID NO: 759481 - DNA, 75 bp, Homo sapiens
ctgaacgcggactggcacgcagactgcttcaggaattgaatgatctggcacgggaccctccagcacagtgttcag

SEQ ID NO: 759482 - DNA, 83 bp, Homo sapiens
gtcaaaagcgcactaaatcgtctccaaggtgtggatgaggtcaccattgtcaacattttgaccaaccgcagcaatgcacagag

SEQ ID NO: 759483 - DNA, 96 bp, Homo sapiens
attgcctggcaggacgtgaaggggaagaggcccaccctggagtaaccctcactggagaatccagagctaacaacctgagagaagattacaaatttc

SEQ ID NO: 759484 - DNA, 95 bp, Homo sapiens
agctccggccgcctggctccccatactagtcgccgatgccatggacaatattaccaggcagaaccaattctacgatacccaagtcatcaaacaag

SEQ ID NO: 759485 - DNA, 73 bp, Homo sapiens
gtaggaagccggagacagcagggtgacagggcaaatccagacagaacctttgacttggtgttgaaagtgaaat

SEQ ID NO: 759486 - DNA, 90 bp, Homo sapiens
ccagatcatgtcagagagagagcttggttaacttgggagaaagtttcatctgtggatggagtattggatttgacgggatctgaactatac

SEQ ID NO: 759487 - DNA, 75 bp, Homo sapiens
atggcggcgcccagacaggcctggagcacgatcaaaatacttgctggatggtggactcagagaccaataaaaata

SEQ ID NO: 759488 - DNA, 100 bp, Homo sapiens
gtttgatgtccggctgagtgggaagaccaagacagtgcctggataccttcgaataggggcgaccattgacgaggtggagacggacgtggtggagattgag

SEQ ID NO: 759489 - DNA, 50 bp, Homo sapiens
tgggaaatctcctgctcgaaatagggaccacttcacacacccctttttcg

SEQ ID NO: 759490 - DNA, 102 bp, Homo sapiens
aagatcgcaccgcggacgcccgctgagcttggcgcacgggccgaccagccggcacagtcttcactaccgtagaagaccttggctccaagatactcctcacct

SEQ ID NO: 759491 - DNA, 75 bp, Homo sapiens
aaaagcctcccacaaaagagatgagacaagaggaatggttacacagatggcccactgcgtgaccttggttcagct

SEQ ID NO: 759492 - DNA, 75 bp, Homo sapiens
aatcagtgattctacatctcaagctcatattttgaagtgtttacgggttctcccatgggcaggtggtctctctgg

SEQ ID NO: 759493 - DNA, 50 bp, Homo sapiens
tggcagatcaactacatgctgcagtgggaatgtaagacggacttagatat

SEQ ID NO: 759494 - DNA, 100 bp, Homo sapiens
gaaagccccaacattacagaccggtggatcctgtccttcatgcagtctctcattggcttctttgagactgaaatggcagatccccagacttcaagggaga

SEQ ID NO: 759495 - DNA, 76 bp, Homo sapiens
tgaagtgcagaggtttttttctggtgtcttggtttgcagtgggatgttactatctcatggtcggtcataaaaatga

SEQ ID NO: 759496 - DNA, 75 bp, Homo sapiens
agctgcggaagctccgggccgcccagctggagcccatcacctacatgcaggtagacccagtgtaatcacaagcat

SEQ ID NO: 759497 - DNA, 101 bp, Homo sapiens
cgaaaaacaaccacactgcttcgatcctggacaggatgcaggcagatttcccgaggagagatggatgccgcgtccccttcgcagcgacgagacttccctgc

SEQ ID NO: 759498 - DNA, 101 bp, Homo sapiens
aagaggctttggctttgttacttttgatgaccatgatcctgtggataaaatcgtattgaacactagtctgaatgtataccgaaataaagatgccttaagcc

SEQ ID NO: 759499 - DNA, 100 bp, Homo sapiens
cgcccctgcacaacaacaacaacaactgcgaggaaaatgagcagtctctgcccccgccggccggcctcaacagtcactcctggaagcaaggcggctctag

SEQ ID NO: 759500 - DNA, 82 bp, Homo sapiens
atcccgagaatactggaacaatagagctcgaccttatctctgctctttgccatcggctcccagctgtctcctgaacagggaa

SEQ ID NO: 759501 - DNA, 83 bp, Homo sapiens
gtccacaacagtaccaaacacgattgttgtttcttggactgcagaaattggaagatggacccatcaacttgtgccagtacagg

SEQ ID NO: 759502 - DNA, 75 bp, Homo sapiens
acttcatcatcatctacttcacaggaattgccatttttctcagtagtcttcagtctcctgttgaccggaactccc

SEQ ID NO: 759503 - DNA, 73 bp, Homo sapiens
tagacttcattcactactgcagagccaccgtgtgctgggaactaaagactggtcgaattgacaaatcttaccc

SEQ ID NO: 759504 - DNA, 99 bp, Homo sapiens
agcgggtgaacattgcttttaattatgacatgcctgaggattctgacacctacctgcatcgggtggccataaaagacaagcaggaaggaattgagtagg

SEQ ID NO: 759505 - DNA, 50 bp, Homo sapiens
ctgatgccgtggccagtaaagatgtgatggagctgcttgaagaagatctc

SEQ ID NO: 759506 - DNA, 99 bp, Homo sapiens
atcgacgtcgtgatccagaagtccagagctgaggactgcctgtttgcagaaattgaaaagtttcaaggttctgatggaaaaaaggaagacgaagaaaag

SEQ ID NO: 759507 - DNA, 100 bp, Homo sapiens
tctggatcacggatgtaggaagtgaacctaatccaccaatagatcaagttatacagaaaccaggagttgtacagagatttgtgaaatttcttgaaagaaa

SEQ ID NO: 759508 - DNA, 95 bp, Homo sapiens
cgccggcgctcccttgtcacgcctcgggaagcgcgcacctgccaagcaggaagaaatgttggctatttggcgatgagaggtggtgaacagtgacc

SEQ ID NO: 759509 - DNA, 74 bp, Homo sapiens
ttcatttacaagttattttctcttcttctgaaaaagagatcttggctatcaaaaggagatgtgagagagggtat

SEQ ID NO: 759510 - DNA, 96 bp, Homo sapiens
gcctcgagccgcagcacgagctcaaattccgagtgtcttgggacaaggtgcgcattcctggtgtgctgcagcgattgggagtgacatactttgtgg

SEQ ID NO: 759511 - DNA, 80 bp, Homo sapiens
ctgatgagggaggtgcccctgcgttgtaccatccgcctgtgggacacctaccaggtgaaaggtgtagcagtcactcggcc

SEQ ID NO: 759512 - DNA, 75 bp, Homo sapiens
agaaattagatctgggtgactgtgatctggaagtaaaaatgttgagtagttcaaaatctatgaaggaactcactg

SEQ ID NO: 759513 - DNA, 87 bp, Homo sapiens
cggggctggacgcagcaagcggggcgctgtgtccccaagctccccgtcctcgggcttatggtgaaggctctggtgctgattgtagac

SEQ ID NO: 759514 - DNA, 75 bp, Homo sapiens
ctgcgggatcccaaatcggaagtgaattcggattgtttgctgattgaagaatgtgtggtatgctctgacaagaaa

SEQ ID NO: 759515 - DNA, 99 bp, Homo sapiens
ttgggatattcacaatgtatggaaacagaggtgccgaccaacccccaggatggcggaagctcaccaggccgtggccttccagttcacggtgaccccaga

SEQ ID NO: 759516 - DNA, 101 bp, Homo sapiens
taaggcatttctgaaaatcattgctgtttggaccatatcagtaggacccagatgatgtggtaccagttggccaaagaagagcctggtgttggtgcatgtgc

SEQ ID NO: 759517 - DNA, 75 bp, Homo sapiens
tgaaaatgatatcgtccatctccctagagcattccatctgtaatgaaagcccatggagctcatctgaaagctagt

SEQ ID NO: 759518 - DNA, 80 bp, Homo sapiens
ccggtgacagcgtgagaggttcgcagagaactgtggctgcaccatctgtcttcatcttcccgccatctgatgagcagttg

SEQ ID NO: 759519 - DNA, 130 bp, Homo sapiens
ctgtactccagacacaacccggccatcgaggccctgctgcacgacctcagctcccagaggatcaccagcgtggagcgccgccctgtgctgggctgccgggagctcgtcttcaggaacctctccaagatcc

SEQ ID NO: 759520 - DNA, 75 bp, Homo sapiens
tcagaatggagaatctgcaactcatcataatcctggagttgtaagacgttcatcgccgtgttatccttgagtaaa

SEQ ID NO: 759521 - DNA, 100 bp, Homo sapiens
ggaaagggagagagaaagggaaatgaggaggagtagtggtttgcgagcaggttctcggagggaccgggataggttaagaaaacgacttctgatttgtttt

SEQ ID NO: 759522 - DNA, 100 bp, Homo sapiens
gaccgagctggtcgccccaaccggggaagaagcgatgctgtccacatactttgaaaccatcaatgacctgctgtcttccttcgggccagttcgtgactgc

SEQ ID NO: 759523 - DNA, 82 bp, Homo sapiens
ctctctatcatggattcaaagaagtagaagaaaactggtctaagcatttctcatcaggtactggttttggattaggaattgt

SEQ ID NO: 759524 - DNA, 100 bp, Homo sapiens
ggaaaaagaaatatgtcaccctgtgtgacaatggcgtgctgacctatcatcccagtttacatgacacaggttgaacatcacggcggagaacgactgccgg

SEQ ID NO: 759525 - DNA, 100 bp, Homo sapiens
aacccttgatcctcctcctaattgcagggtgataaaagaaaatgtggctgaagttacccgaagttcagcttgcagtgtaattcagaagagttaagaccag

SEQ ID NO: 759526 - DNA, 90 bp, Homo sapiens
ttcaggagaactggtcgccatcaagaaagtattgcaggacaagagatttaagagtgaaccagaggaaatgcctccagaagcaaagatgag

SEQ ID NO: 759527 - DNA, 101 bp, Homo sapiens
cgggatggtgccacaggaggctgtgcgggccccgctccgcttcgaatggaagacttgcactatctgccagatgctgcttcctaaccagtgcagttatgcat

SEQ ID NO: 759528 - DNA, 98 bp, Homo sapiens
gccgcccccgtgcccgaccgccgcccgactgccatcgcccggcccggccgcgcccgcggaaccagaccagattgctgctaaaattgattcaattcctc

SEQ ID NO: 759529 - DNA, 75 bp, Homo sapiens
tattaacgctgactcagacccatgaagtcatcagatatgttgatgatgtgatcagccgcattgacaggatgtttc

SEQ ID NO: 759530 - DNA, 86 bp, Homo sapiens
gctttgaagaaagatgacaccacctttgatgagatgatgattattctccaccgtctaagagaccaaaggccaatgagctaccgcag

SEQ ID NO: 759531 - DNA, 90 bp, Homo sapiens
tggaaaggctggatgcaacttgtgattttgatttatcacatttctggagcaagtacaaagccatttggaaatagcatcagcagatataat

SEQ ID NO: 759532 - DNA, 82 bp, Homo sapiens
cttctgtaggatctgatgaaaattctcttcattctcttggactgaacttaaatactgatagttgattatggaagattcccac

SEQ ID NO: 759533 - DNA, 99 bp, Homo sapiens
gcagaaggactgcctcactgagcaaccaagagaagattttcagtcaatgacttatggatttaaaatggctaacagtgtgacagatcttcgagttacagg

SEQ ID NO: 759534 - DNA, 82 bp, Homo sapiens
gaaacaagccgtggaataggtgtatcaagtaatggtgcaaagcctgaagtgggtttggaggatttgggacaacatctacaac

SEQ ID NO: 759535 - DNA, 83 bp, Homo sapiens
cggagattgacaatcaatgggccatcttggacgatgatatcatcaagttgaatcgaaaggaagggaagaagcagaattttcca

SEQ ID NO: 759536 - DNA, 82 bp, Homo sapiens
ccagagactgctgagcccgtccgtccgccgccaccacccactccggacacagggtttgccttcccggattgggcctacaagc

SEQ ID NO: 759537 - DNA, 99 bp, Homo sapiens
gtgagaagcaagaaggccctggacacagcaatatctctgggctttcacaggtgtgttgtgaaagtttggaaggtcagacctttttctccaagaaggaca

SEQ ID NO: 759538 - DNA, 99 bp, Homo sapiens
cgcgagttggaggagaaggtcaaggcagtggaaggtatatgaatggcacctgcccagaaggaaacagctgtaaatttgcacatggaaatgccgaacttc

SEQ ID NO: 759539 - DNA, 100 bp, Homo sapiens
ctgtaggctccttcaacccgtggctgatagctgaaagtgagccaaggaggtgttgcattggtctctgacatgtgtccagatcctgggattccagaaaatg

SEQ ID NO: 759540 - DNA, 75 bp, Homo sapiens
ctttggggaggagtccagggagcccagcacaggagcgtcaggaagcagagaaaatgttcaagggcaaacggggtg

SEQ ID NO: 759541 - DNA, 100 bp, Homo sapiens
ttaccatatgttggtatggtcaccataataatgaatgactatccaaaattcaagggccatcctggggaaaagggagaaaaaggaaattcagtgttcattt

SEQ ID NO: 759542 - DNA, 75 bp, Homo sapiens
tgcctatagaccaggcgtcttttgccagccaaaacaggatcacctgctgttaccagctaccacccataacaagac

SEQ ID NO: 759543 - DNA, 80 bp, Homo sapiens
gcaattctcctgcctcagcctcctaagtagctgggactacaggttttaaaatcaaagatgggaaaatcggagaaaattgc

SEQ ID NO: 759544 - DNA, 51 bp, Homo sapiens
accatggcggagaagactcaaaagaggtattctgagagaagcctcacaaag

SEQ ID NO: 759545 - DNA, 50 bp, Homo sapiens
gcagaaacttcataaatatatgcagaataacacatgcacttgatttaaaa

SEQ ID NO: 759546 - DNA, 100 bp, Homo sapiens
ggaatctcagtagggacaacaggcaggagaattatgggagcgcatttccccaggtttcagattggagaactggcaaataccctgacaagtaaattcgagt

SEQ ID NO: 759547 - DNA, 75 bp, Homo sapiens
acgtggagccaggcctgcagaggctgttctacaggggcaaacagtgaagatagtgatccggggagacaggaacac

SEQ ID NO: 759548 - DNA, 100 bp, Homo sapiens
gttgttgctcccgcctgagcccagcccccagaaaggattgtgacatatcgttggacccagaattgaggtcttcaaagcttcacctttctccaaaggcaga

SEQ ID NO: 759549 - DNA, 75 bp, Homo sapiens
gggaaatagtaaccctgccaaatacatcagcttgtaggagacagagacctaatctgggagcctgcaagtgacaac

SEQ ID NO: 759550 - DNA, 75 bp, Homo sapiens
gttggatagtaatgtgacaatgctttatttgaaggtagacgcatcgaatttgcagaacaaataaataaaatggag

SEQ ID NO: 759551 - DNA, 96 bp, Homo sapiens
cgccagttgcttgatcaggtggaacagattcagaaggagcaggattaccaaaggctgaccacagtggccgagaagtcgcgcgtgctgcagctggag

SEQ ID NO: 759552 - DNA, 75 bp, Homo sapiens
aaagagatgtggggggattctcgacctgctaacagaactggaccttttcggtgtgatgaatgcagactctgctac

SEQ ID NO: 759553 - DNA, 82 bp, Homo sapiens
agagcctcgcctttgccgatccgccgcccgtccacacccgccgccagatgccgacaaaaggatcaaggtggcgaagcccgtg

SEQ ID NO: 759554 - DNA, 98 bp, Homo sapiens
cgagatttgggagagacgctctgaactgactgccccgcatcaccggagcgtcccagctgcgaggaggtgacgccttctgggccccatctgtccttcct

SEQ ID NO: 759555 - DNA, 100 bp, Homo sapiens
cagtactgctttgaatgtgactgtttccgttgccaaacccaggacaagtttggaaattttagcattcaggtgccaggaatgcagatgggacagccagtgc

SEQ ID NO: 759556 - DNA, 100 bp, Homo sapiens
cttgcggcagggtttgcagtgtaaaggttaaacccatccagagtaatggctgcggccttacccaggaccctgggggagttgcagctgtatagaatattac

SEQ ID NO: 759557 - DNA, 100 bp, Homo sapiens
tccccctggagctggacatgacccctttcatggcctccaggttacagaatacctatatgctaataaaatggctttccgatacccagaacctgaagacaag

SEQ ID NO: 759558 - DNA, 83 bp, Homo sapiens
aagaacggcagtttgaatcggtgctgaacagacaatgcagatcttcgtgaagactctgactggtaagaccatcaccctcgagg

SEQ ID NO: 759559 - DNA, 100 bp, Homo sapiens
agcatgtcctgggtttcaggctcatcgagaggtaccagattcccaacttcttctggagcctggggatcggtcacactggtgcgtggtggcatactgggag

SEQ ID NO: 759560 - DNA, 75 bp, Homo sapiens
ttgtcggcagcagctggaattgattcgtttacagatggagcaaatgcaggaatcagagatcattgatttcttcct

SEQ ID NO: 759561 - DNA, 100 bp, Homo sapiens
ctcaccctgtttgacagagaccagttttcaccagatggtttctcctctgcctcctacttaaaggtccatgttaaaacccaccacggtgttccccttcccc

SEQ ID NO: 759562 - DNA, 75 bp, Homo sapiens
atcatggcctataaaatgcttcaagtagtcctgtgctcaacattgcttatcggagtgtttctcaggagctatcag

SEQ ID NO: 759563 - DNA, 74 bp, Homo sapiens
cttctccttttcatgagtgttcctgtggtctctgcacctcctttctatggagtctcatgctggagtgagtctca

SEQ ID NO: 759564 - DNA, 98 bp, Homo sapiens
caattctccaagtaaacaactggtccttcggggtcgtcctctgggagatcgccacactggccgagcagccctaccagggcttgtccaacgagcaagtc

SEQ ID NO: 759565 - DNA, 100 bp, Homo sapiens
tggcaaatgacatcatgacactgggaagcagtgggacttgcagttccctgaagaagcagaagctgagggcagagagcgactttgtgaagtttgacacccc

SEQ ID NO: 759566 - DNA, 90 bp, Homo sapiens
tgtggaacatcattctcaccaccagtctcttctctgatctacggaatccagaggcagcattgtctccaaccttccgtagtgacagcccag

SEQ ID NO: 759567 - DNA, 90 bp, Homo sapiens
agattcagaaggagcaggattaccaaaggggttcattccatgatctgctccgtagagaaccaatgctgcgcatgcaggagggagaggggc

SEQ ID NO: 759568 - DNA, 75 bp, Homo sapiens
caacagtgggacagccaggtcaccatgggccacctcttccagaagctggacaggaagatgtcacccaagcgcata

SEQ ID NO: 759569 - DNA, 100 bp, Homo sapiens
ctgaaggctctggatacagtgctctttgggcctcctctcttccagcagcagcacagcagtgcagccgcggctgcccagcagggcggctacgagatccccg

SEQ ID NO: 759570 - DNA, 100 bp, Homo sapiens
catgttgcaaaggttaaattccaggttccagcaacagatagaaatgctttaagttcactctggggaaagctggcctctgaaatcttaatgcagaattggg

SEQ ID NO: 759571 - DNA, 100 bp, Homo sapiens
ccagaagtttacactggaactggacagggagtggacgcttctcttgtgagccagctggaggtcttacctctttgactgaaccacccaagggacctggatt

SEQ ID NO: 759572 - DNA, 100 bp, Homo sapiens
ctttatgtcctcgaagatcagaccgagagcaatggctgccatccggaagaaactggtgattgttggtgatggagcctgtggaaagacatgcttgctcata

SEQ ID NO: 759573 - DNA, 100 bp, Homo sapiens
aggacacccggaagccggaaatggttgggtatctacagccattggttgctgttcaggtcagctttgctcctaacaacactgggaaagaagtaacagttga

SEQ ID NO: 759574 - DNA, 101 bp, Homo sapiens
atagaaccaaatctgtttgctgatgaagattcacctgtgcatggctctgtggcgcaccttacgcaaccctgctgacagcatctcccacgtggcctaccgtg

SEQ ID NO: 759575 - DNA, 74 bp, Homo sapiens
cacatgtatgccaagaacttctacgggggcaatggcatcgtgggagcgcagtggcatggcagagagaaatgcta

SEQ ID NO: 759576 - DNA, 82 bp, Homo sapiens
caacaaactggagagagaccagacctgcaagctctttgacacacagcagttcttgtcaggtggcgggacaggcttcattggg

SEQ ID NO: 759577 - DNA, 75 bp, Homo sapiens
tttgggtcttcttcttaatcccatatctggacatctggaacatccatgcaatggctgccatccggaagaaactgg

SEQ ID NO: 759578 - DNA, 82 bp, Homo sapiens
tagagctggaattaggcaaatatggacagatatgcacccaatgtccagggagcgtgcaaaatttgtcaaaagtggcctttta

SEQ ID NO: 759579 - DNA, 100 bp, Homo sapiens
ggaaactttggaaaagagcttggggccagggaagaccacagctgagccccagcaccagtcacctccagatcttgtagaaaatttcagctgtagcccttgg

SEQ ID NO: 759580 - DNA, 94 bp, Homo sapiens
caaaagccaagaggaggacagttcgctacacagcaatgcatcgaggttccagcaacagatagaaatgctttaagttcactctggggaaagctgg

SEQ ID NO: 759581 - DNA, 82 bp, Homo sapiens
gggaaccctggtcaccgtctcctcagagtaacagttacccctcaatgagcgacccctacctgtccagctattacccgccgtc

SEQ ID NO: 759582 - DNA, 145 bp, Homo sapiens
agcaggatggtggtggatgcggccaactccaatgggcctttccagcccgtggtccttctccatattcgaggacccagatgatgtggtaccagttggccaaagaagagcctggtgttggtgcatgtgctttggactagcatttatg

SEQ ID NO: 759583 - DNA, 75 bp, Homo sapiens
gctcggacccacggagccggcagcccagcactccggttaaacactttaagatgagaaaaattgatctctgtctga

SEQ ID NO: 759584 - DNA, 90 bp, Homo sapiens
agaaaattccatggacaccccctggaactgctctgcagttttactccaacctacacaatgctgaagatggaagactccagacaggggacc

SEQ ID NO: 759585 - DNA, 50 bp, Homo sapiens
ccaaagcctcctggaccgtccaagaagagttcaaagaaggacgcagagcc

SEQ ID NO: 759586 - DNA, 100 bp, Homo sapiens
ctgggaactgggaaaagtgcttcggaaggctggcacaagctccgggtggataaggcagctgctgcagcagcggcactacaagccaaatcagatgagaagg

SEQ ID NO: 759587 - DNA, 96 bp, Homo sapiens
aactgaggacaatggacctgcctgggcatagacttccttaagtaactctcaggagccttctccgcagttggcttcctcggtagcttccacacggag

SEQ ID NO: 759588 - DNA, 100 bp, Homo sapiens
agacggagaactgagagaagacggcagagaacaggatattccccgagtccctccggtggctaatggccacccagcagtttgagtctgcaaagaggctgat

SEQ ID NO: 759589 - DNA, 100 bp, Homo sapiens
atcatcatcgccacctctgtccgaaagtgatgctacccgtgacgccgcaccaggctgcaggccagcccttcaagttcactatcccggagtccctggaccg

SEQ ID NO: 759590 - DNA, 51 bp, Homo sapiens
aagcacggggaacgggtcggatggttgatggacggatggctacatggatgt

SEQ ID NO: 759591 - DNA, 75 bp, Homo sapiens
cggagcgcggtccctgtattggtctcctgctcctagagacagggtcagatgtgttactgggctggagtgtggtgg

SEQ ID NO: 759592 - DNA, 82 bp, Homo sapiens
gactgctggagatggtggagtccgtcagtgaggaaaatagcagctgaatactatgacaacctccctcactacaattcctgga

SEQ ID NO: 759593 - DNA, 75 bp, Homo sapiens
aacaaactgaaaacgcaagccaggctaaacagttggcagtgctcctatatacctaaatgtggaaaaaattttgaa

SEQ ID NO: 759594 - DNA, 75 bp, Homo sapiens
caaatatggaaacaaatactatgaagacaacaagcaattttttgaggagaaggcagagcccccccaggctatgaa

SEQ ID NO: 759595 - DNA, 82 bp, Homo sapiens
cttcgcgcgtgaggctgcggctctgacggctggagcattggatttgctaaaggagcttaagaatattcctatgaccctggaa

SEQ ID NO: 759596 - DNA, 75 bp, Homo sapiens
gcggggcttagtgaggctcccgatggcgggagctccaggaaagtgcctagaaagagccatgaagtttgcctttga

SEQ ID NO: 759597 - DNA, 74 bp, Homo sapiens
atgttcgggccgtcctgcatctcctatgcctgaggaaacccagacccaagaccaaccgatggaggaggaggagg

SEQ ID NO: 759598 - DNA, 101 bp, Homo sapiens
ctctgtctggccggccccttggcactcgcctcggatttgggggcttcctcactcgtggctttccgaaggctgctgggacacggccaacacggtgaaggaaa

SEQ ID NO: 759599 - DNA, 100 bp, Homo sapiens
ggttgtggggccggcgctggtggcggggcccggtgcatggcggtctgtcggcggagtcgccctcgggggctgtcaggtcgtagttcccccgctccctggg

SEQ ID NO: 759600 - DNA, 75 bp, Homo sapiens
ctacattttcgatagagacgttttccggagggattccatcatagccaacacaagccatcagccccatgctcagct

SEQ ID NO: 759601 - DNA, 100 bp, Homo sapiens
agacgctgcagttggagcaacagtccaagctcaaagcctagttccccgagagcgttcagacagtgggggctcaagctcagagccatttgaccgtcatgca

SEQ ID NO: 759602 - DNA, 83 bp, Homo sapiens
tggtttgcgtcctgcactgaaaggaaatgacggattttatcttcccagacccgtcagattttgaccgctgctgcaaactgaag

SEQ ID NO: 759603 - DNA, 100 bp, Homo sapiens
caggacacgaagtttgtcggcccttgccttggcagagctgaggaagctgcactgcaccaggaattacatccacctgaacctgttcctgtccttcatcctg

SEQ ID NO: 759604 - DNA, 101 bp, Homo sapiens
caagaagttaggaaacaactgcgttttcgccccagccgacagagaactcgatgccaccgcaacggtattggcgaaccggcaggatgaaagtgagcagtcca

SEQ ID NO: 759605 - DNA, 99 bp, Homo sapiens
gcgatcatactgggagatgcggggcaatgcactagaaaagaagtctaactatgaagtattagatattggtaaaggttttcaaggtgtcatgaaaagatg

SEQ ID NO: 759606 - DNA, 75 bp, Homo sapiens
gcagcttcatgatattactgtaccgttagaagtttttgaacaatgcagatcttcgtgaagactctgactggtaag

SEQ ID NO: 759607 - DNA, 100 bp, Homo sapiens
cggctgttcagctgcgctccagtcggcccaggcgccgcggcgaggagcgagcgctgcgaggtggcggcctgagggcgtctctggccgagcctctttttgt

SEQ ID NO: 759608 - DNA, 80 bp, Homo sapiens
agtcaccatcccccatgccgccagaggcccccaaccagatgacagacaaccttctgtgccttcatcaagctggttgtgta

SEQ ID NO: 759609 - DNA, 75 bp, Homo sapiens
tattaggtcttcttaatggaaaggatcctgattcctcttcaaagggacacactcaggacaccaacaccttctttc

SEQ ID NO: 759610 - DNA, 75 bp, Homo sapiens
tgcagctcttggcaggagtagctgatcaaaccaaggatgggtatgatgaatatcatcctgaggaggatctgcagc

SEQ ID NO: 759611 - DNA, 96 bp, Homo sapiens
caggggcagccggctctggtgctcccagaagaggctgacaaaccaagaggatttgccagaggtcttgatcctgaaagaataattggtgccacagac

SEQ ID NO: 759612 - DNA, 101 bp, Homo sapiens
ctgatggcaccttacttcagcccctcaagggacacaaagacactgtgtactgtgtggcatatgcgaaggatgactgtatgaaaacaagggagaggctgact

SEQ ID NO: 759613 - DNA, 75 bp, Homo sapiens
gttccggggcctgaaccgtatccagactcaggatacagctatgagcaaactttggttcaaacaagatgataagtt

SEQ ID NO: 759614 - DNA, 101 bp, Homo sapiens
cctgtcccgctggccctctgtctgcctgtgtccctgaccatggctccctgcagtaccctttaacggctcaatattgtgcatgacacccgctacaagtgttg

SEQ ID NO: 759615 - DNA, 75 bp, Homo sapiens
gccggcgaaggaggaggcgttgccgggtgcctgtcctgagacccatggacctgatggtggaggccaccccacgaa

SEQ ID NO: 759616 - DNA, 82 bp, Homo sapiens
cccagccccacagaccagcccagcattcagtgctgaaggaagccatacctctgggcagagtaacgggcgagaccaccaagca

SEQ ID NO: 759617 - DNA, 75 bp, Homo sapiens
ttcaatgcagacaagacggatgtgatgctgcaattctgtggtgttcttggtcacacatttatggagtttctgaag

SEQ ID NO: 759618 - DNA, 97 bp, Homo sapiens
gggggtggtgacagcaggtctgaggctgtgataatgccattatcatctggaatgtgggaacaggggaagcccttataaacttggacgatatgcattc

SEQ ID NO: 759619 - DNA, 75 bp, Homo sapiens
ggcctgtgacgaaggtgctaccatcgtgagagtaagctggacctaccatgaaagacttctgaatccaggaagaga

SEQ ID NO: 759620 - DNA, 82 bp, Homo sapiens
gacccaatcatatagtggggctcagggccagtgctcactcttattgtccctggcaatccagagatcccgatatctaggactg

SEQ ID NO: 759621 - DNA, 101 bp, Homo sapiens
ggacaatatcctctgtggagaacacccccccatggaggcgaggtagagttggggtcgcagagtgcttgtgatttcacgtatttttgctgaactcgtaaaag

SEQ ID NO: 759622 - DNA, 82 bp, Homo sapiens
aaattcttaaaaaggctcagaaagatggatttttgcatgagacgcttctggacagcttcggggagttttgcctggctcacct

SEQ ID NO: 759623 - DNA, 100 bp, Homo sapiens
attttttgctgatggagagctggaatctatgggattttcagctcgatacaatttcacacctgaaaaggatgcgcctccacttagcaaggctgggcaggat

SEQ ID NO: 759624 - DNA, 75 bp, Homo sapiens
ccgtgggccgcctttggatctctgtggccagatttccacaagacggcaccctatgtcgtcactggcagcgtagat

SEQ ID NO: 759625 - DNA, 100 bp, Homo sapiens
cccgagtactacgagctcatccgcaagcccgtggacttcaagaagataaagattcttctgctgatcgacattgagcagtcctacatcaacacgaaccatg

SEQ ID NO: 759626 - DNA, 85 bp, Homo sapiens
ttgccaaacaatctgtgactattaagaccatgttggaagacctttccaaagtgaaactgatgagatttgatgatccactgttggg

SEQ ID NO: 759627 - DNA, 51 bp, Homo sapiens
attgtggatgatgatacattaataagagaaccatggagtctggcagtaccg

SEQ ID NO: 759628 - DNA, 75 bp, Homo sapiens
gcagcgggatcaagctgtgtgcattagtacaaatgcccagcgatctgctcacgagctgcccatggttgaaagaca

SEQ ID NO: 759629 - DNA, 98 bp, Homo sapiens
caaggccctcttcccgggaagcgactgcactgggggccacagtgctgatctcagcagctccattttttgtcctcttccttatccccgtggagtcgaac

SEQ ID NO: 759630 - DNA, 80 bp, Homo sapiens
gacctttatgatgatccacttctacttattaaatacacacagatgaagaaggttatgttaacagtatttaaacacaatca

SEQ ID NO: 759631 - DNA, 83 bp, Homo sapiens
ggactgtgatggccagagagatgacgatcttagggatccacattcttcagcagtgtgacggtagcttttgcacaggaaaggtg

SEQ ID NO: 759632 - DNA, 75 bp, Homo sapiens
tcgagcctgcagacaagaaacattcgtttatgagatgatctccagtctatgtgctgaagaagcagcagcccaaga

SEQ ID NO: 759633 - DNA, 74 bp, Homo sapiens
gcaccacctcctgctgccttcccgtcgccgctcccgaagcttttccagatcatggagctttgtggtgcaacaag

SEQ ID NO: 759634 - DNA, 75 bp, Homo sapiens
tgaccctggtgtgcagctcggccccgggccccctggagctggacctgacggggtcgagctgtgcagttttagcgg

SEQ ID NO: 759635 - DNA, 51 bp, Homo sapiens
ttgctcaagagctgaatgataggccctagactggagctggttacagacgga

SEQ ID NO: 759636 - DNA, 96 bp, Homo sapiens
agcctgttcctcagctctactcgcccgagctaatgagagagtaccatgctgcgcctcagccccagtgctgtccccggcataggtccatctctgcag

SEQ ID NO: 759637 - DNA, 51 bp, Homo sapiens
tttgaatacttgcagcttccaaaggaaagggagattcttcaagcaatcact

SEQ ID NO: 759638 - DNA, 100 bp, Homo sapiens
ccgagaggagctgagcgagcgcggaaggtttcacagatggcagtgttacattgaacaaaggagacatcacccgggaccggcatagcaagacccagatttt

SEQ ID NO: 759639 - DNA, 82 bp, Homo sapiens
ccaccggccgcctcagccatggacgcgtccctggagaaggcctgaagctgcccagcaggcattccaaggcctgggtcctggt

SEQ ID NO: 759640 - DNA, 100 bp, Homo sapiens
agaaaagtttccacgagctacagctataaaagtcactgacatttcaggccctgctggagacggcgctgacgcgagtggtcctgcccatgcccatcctggt

SEQ ID NO: 759641 - DNA, 105 bp, Homo sapiens
atgttggcggtccctgtgacctgtggagacacggccagatctgccctccaggtatcgggtgctgcttcggtatgaaggctttgaaaatgacgccagccatgactt

SEQ ID NO: 759642 - DNA, 74 bp, Homo sapiens
gctcgtccggttaccttcaggttggtagctggcagtgttgtgatggcttttgaagaagtatgcccggacagaat

SEQ ID NO: 759643 - DNA, 100 bp, Homo sapiens
ggcttctgcagctccagaaaaggagctgtcaccatgcctcactcgtacccagccctttctgctgagcagaagaaggagttgtctgacattgccctgcgga

SEQ ID NO: 759644 - DNA, 82 bp, Homo sapiens
ggcaggaagagctgcagtctttgtgggacaaggtgaccctggcaaagatgagagtgcacatttcgtcctgcctgaaggtcca

SEQ ID NO: 759645 - DNA, 96 bp, Homo sapiens
cgacatgttgcttttcgtggagcatccgtacccttccgaagagcagaagaaacagttagcgcaagacacaggacttacaattctccaagtaaacaa

SEQ ID NO: 759646 - DNA, 100 bp, Homo sapiens
ttggcgtgcaacatggggcttgagaaaggtcttatgatgtaatcagcgcgatttcacttcctgaatttcgatgaattctaagacatgggcaagatcgggt

SEQ ID NO: 759647 - DNA, 74 bp, Homo sapiens
agacggtgccgagaagcagctgcgaggtcacagatgtgacattgatgtgtccactgaagccatgtatgctgcaa

SEQ ID NO: 759648 - DNA, 100 bp, Homo sapiens
gatctagaatcaactgagagagatgcttaaaaatcaccagttactttaatgatattatgcagatatgccagcagaagaaagagaaaagaaattggcttcc

SEQ ID NO: 759649 - DNA, 132 bp, Homo sapiens
gacacctatgcctacaggttactcagcggaggtggcagaagcaagtacgccaaaatctgctttgaggataacctaaattgcaggtgctgcagtgtctgaaatttccgggcctttctcaacagaggatgtagc

SEQ ID NO: 759650 - DNA, 75 bp, Homo sapiens
tatatcctccaggaatactggccagaatgttggctaccagggtatttagcctagttggcaagcgagcaatttcca

SEQ ID NO: 759651 - DNA, 100 bp, Homo sapiens
gacggagcggccggggcctggggctgcctgccgggcggccgggcgcggcgagcccaggtgtctgatgatttgtgagcctcaagtgactactctgtggaat

SEQ ID NO: 759652 - DNA, 100 bp, Homo sapiens
agttgtatactattgcacgctatctacagagggcagatgaaagagatggtgactgtcccacccatttagttgaatgtagcggccagagaggcactcgcgg

SEQ ID NO: 759653 - DNA, 83 bp, Homo sapiens
gactccttcggcagtccacccaccgccgccgcctcccagggcttaaaagacaaccttcttgcttctgggacatccagcctgac

SEQ ID NO: 759654 - DNA, 82 bp, Homo sapiens
ctggaacctgcttggacccagtctcttcgccctggggatcttggccacagcctgggattttttatcaagcagaaatgcatcg

SEQ ID NO: 759655 - DNA, 74 bp, Homo sapiens
tgaagaggaagaactgaccagagctgatcccgagcagcgtcatgtacccctggcctattccctggtggattcca

SEQ ID NO: 759656 - DNA, 100 bp, Homo sapiens
cagaaagcagcttgttcatcataaacagattcaagatggaaaaggtgatgtaaccattacaaatgatggtgctaccattctgaaacaaatgcaagtatta

SEQ ID NO: 759657 - DNA, 101 bp, Homo sapiens
ccgcactcgacagccaccgccgcccccaacgtccatgcctgagtgctggagaatctggtaaaagcaccattgtgaagcagatgaggatcctgcatgttaat

SEQ ID NO: 759658 - DNA, 90 bp, Homo sapiens
aacaaagaagaccacacactgggaaacatcattaaatcgtgacctcacaaagttcggccgtggggatgcctcctccccagccccggccac

SEQ ID NO: 759659 - DNA, 74 bp, Homo sapiens
gggtccgatgcctaccctcggggtggagccggcaggtgcaatggatgagcttcatagtctggatccaagaaggc

SEQ ID NO: 759660 - DNA, 78 bp, Homo sapiens
tgacatcgagtgtgtccacaaagaatcaggcatcatcataggagtcacagttgcagccgtagtcttgattgtggctgt

SEQ ID NO: 759661 - DNA, 50 bp, Homo sapiens
tccagaacatccactagcctcactaaaggcagtttggtggttatgccaag

SEQ ID NO: 759662 - DNA, 90 bp, Homo sapiens
ttagtaaaaggtggacatttgaagaaggtaatcactacggtgggctggatggaggccactacacagcctattgtaaaaatgcagcaagac

SEQ ID NO: 759663 - DNA, 100 bp, Homo sapiens
ttgacttggaagcaatgtttgaacaaactcgaagaacagctgtggaaagaagttgcaaaacactgggttggtggaggaccaggcgtggggtacaatgtga

SEQ ID NO: 759664 - DNA, 96 bp, Homo sapiens
ggcatgtcgatttgtccttcactacaggtcctgaacgaggctgtgggggccctgatgtaccacaccatcactctcaccagggaggacctggagaag

SEQ ID NO: 759665 - DNA, 100 bp, Homo sapiens
tcccctgctatccccaacaagaggaaagacacacctaccaagaagccagtcaagcggccaggtgcagaggccaagaccgttttgcccaagaaggagaaaa

SEQ ID NO: 759666 - DNA, 80 bp, Homo sapiens
gctttcaagaaattggcattgaagttacatcctgataaaaacccggtgacaatggaatggactctgatatggaagaggaa

SEQ ID NO: 759667 - DNA, 90 bp, Homo sapiens
gacctggttctgccttctggacaatctttccgcatctacgtcatgggcttggttctggagtggattaaaaacaatggaggtgccgcggcc

SEQ ID NO: 759668 - DNA, 75 bp, Homo sapiens
tggattttttaactgaagatagtgcctttcagccctaccagggactggtgattgcagctggaagtgcccatgacc

SEQ ID NO: 759669 - DNA, 100 bp, Homo sapiens
ggagaagaaggccttgactacggaggggttgccagcatgtggagagggccaaatgtgaactgtgttgacagcactggctacacacccctgcaccatgctg

SEQ ID NO: 759670 - DNA, 83 bp, Homo sapiens
gtggatgttccacaggaagaagtgccattcaggtgactctcctattccatctgtttcttcgggatcatcttcacctctttcag

SEQ ID NO: 759671 - DNA, 83 bp, Homo sapiens
gtcaaaagcgcactaaatcgtctccaaggttgattcttcaccacactgaaaccattaggaaaaatccttgtggttaacagcag

SEQ ID NO: 759672 - DNA, 95 bp, Homo sapiens
atcaaaaggagttcatgcttatgaatgctcgacttcaggcatgtaaggaggaatcaagaagctgtgacatattctgaggacctccaaagaacaac

SEQ ID NO: 759673 - DNA, 48 bp, Homo sapiens
gttatgtggctcaaatgattgtggctgaagaactgaaactggccaccc

SEQ ID NO: 759674 - DNA, 82 bp, Homo sapiens
aggccctggagtgcatgcgcaggatttttagactctgaggagcagttggagctaatccacattatggaaatggaaaccaccg

SEQ ID NO: 759675 - DNA, 50 bp, Homo sapiens
tcctcacgcttcccagactcagtctttggatgctgaaatttctggaaaag

SEQ ID NO: 759676 - DNA, 73 bp, Homo sapiens
cagacagaggtgtgctgacgacctgctacaacagaataagactttgaccccgacgcaggcttcagtgattgcc

SEQ ID NO: 759677 - DNA, 75 bp, Homo sapiens
gaaccctgctcctcaccccacaggaatctacttgaaaatggatcggtttatgttggattaaatgctgctctttgt

SEQ ID NO: 759678 - DNA, 80 bp, Homo sapiens
atgtgctgcagaaaacactttcactcaaggaggcctttgagtctgtggtggagtacttcggagagaaccccaagaccaca

SEQ ID NO: 759679 - DNA, 100 bp, Homo sapiens
tacctcactgcagaggtgctggagctggcaggaagtggatgctttggaagaattaagcaggcagctttttctggaaacagctgatctatatgctaccaag

SEQ ID NO: 759680 - DNA, 74 bp, Homo sapiens
aatttgatagtcattcgtaatcagcaggccaaagactcagagggccttctccagaagcaaaaggagttggaaag

SEQ ID NO: 759681 - DNA, 98 bp, Homo sapiens
ggggggtccgctgcccgagaatgggaattctcttcactagaatatggagactgttcaatcaccagggtgaaaggtgtagcagtcactcggcctacacc

SEQ ID NO: 759682 - DNA, 99 bp, Homo sapiens
gcaagaaaagcctctgggagcagaagggaggctccaagacctcatcaacaattaagaccacagcaccgggaagtccagtcagcggcagatggtgttcgg

SEQ ID NO: 759683 - DNA, 100 bp, Homo sapiens
ccagaattttccagtgccctgaaaaatatgtgcaagatgacctgccacaagaagtgcgtgcacaagattcagagccactgctcctacacctacgggagga

SEQ ID NO: 759684 - DNA, 80 bp, Homo sapiens
gaacgtctttagcaaaacccgttcgacaaagggagattacaaagcctctgagaccgttgggcaaagctgcttccctgttg

SEQ ID NO: 759685 - DNA, 50 bp, Homo sapiens
tgaactggacatctcgttccctcccagataaggagtcaggccagggcggg

SEQ ID NO: 759686 - DNA, 100 bp, Homo sapiens
ctccagcccagcctcgctagctccgcctgcggtacgtgctcccgcctccgactcaaggttttggccaaattgggcgagggcacaaaataaccacttaccc

SEQ ID NO: 759687 - DNA, 82 bp, Homo sapiens
gtgaggcctccccagccatgtggaactaaatggaatccgaggatttaagtggcagagaattgacaattgattccataatgaa

SEQ ID NO: 759688 - DNA, 100 bp, Homo sapiens
tcctgctcctccaggcgctgcccagccccttgtcagccagggctgaacccccgcaggacctcagcagccatgtcgaagccccatagtgaagccgggactg

SEQ ID NO: 759689 - DNA, 83 bp, Homo sapiens
cacgaccccgaccccggcccggggcaccacaccccactctggccggagcacgccaagcagctccccatcgctccggaaacggc

SEQ ID NO: 759690 - DNA, 83 bp, Homo sapiens
gagccaatcagcgcgggcagcgaaccgggggagcgaggcacggtgtcgtgaaaactacccctaaaagccaaaatgggaaagga

SEQ ID NO: 759691 - DNA, 100 bp, Homo sapiens
ctgaccatagccagagaacagccctccatcttgcagcccagaagattgagaggatccagaatccagatctctggaatagctaccaggcaaagaaaaaaac

SEQ ID NO: 759692 - DNA, 100 bp, Homo sapiens
acagtcttctgataggtttcctcggcatcagaagtccttcaaccctgcagtaacaaatgtggcaattattttggatctatcacctgtcatcataactggc

SEQ ID NO: 759693 - DNA, 50 bp, Homo sapiens
cgtgatccatctggctcctccaaatgactgtccaagtgcctccaaagtgt

SEQ ID NO: 759694 - DNA, 98 bp, Homo sapiens
ctcgaaggcccgcggcgccccgtgctgcagggacaagctgtggggggtctgtgtctccatcctggctctcttgcctcgagtcctcaggttgatgctgc

SEQ ID NO: 759695 - DNA, 95 bp, Homo sapiens
gccagatgggaccttcttggtccgagatgcctcaacaaaaatgcagggagattatactttgactttgcgtgcatttgcccagtataacatggatc

SEQ ID NO: 759696 - DNA, 80 bp, Homo sapiens
gcatgctctggaaatgttcccagaacattgcacgatgcctcctgaatgggagctgactgatatggtggtgtgggtgactg

SEQ ID NO: 759697 - DNA, 83 bp, Homo sapiens
gttcaggaatcgtcacccggcggcctctcattctgcagctcatcttctcaaaaacagggctcggagcccagctacctggaccg

SEQ ID NO: 759698 - DNA, 95 bp, Homo sapiens
agaagtcgcgtgtctaggtgagtcgcggtgggtcctcgcttgcagttcagcgaccacgccctgggcgctgcctatggcacagccaagagcggtac

SEQ ID NO: 759699 - DNA, 80 bp, Homo sapiens
atcaggctgcaggaagaagaagggacacctttcacagctatcagggaagtgtgtttcacataacagcagataatcaccag

SEQ ID NO: 759700 - DNA, 60 bp, Homo sapiens
atcagaatcagattcatgcaatagatgattcagtccctcaaggcgttgattgaaaatgca

SEQ ID NO: 759701 - DNA, 96 bp, Homo sapiens
ggccccgccagcagcactgtggaggccgtcctcgactgattcttgctattccaaatcctcttccacgttgacagcccttcagatatttcaacactc

SEQ ID NO: 759702 - DNA, 49 bp, Homo sapiens
ggacctcaacccaggagttaaaaaggtgctggagaatctggtaaaagca

SEQ ID NO: 759703 - DNA, 101 bp, Homo sapiens
tgtggttggaatccttgctgtgctgaatcctggctgtgtgaccccaagagatgcgctctgtgctgcggaaggcgggctccccgcgcaaggcccgccgcgcg

SEQ ID NO: 759704 - DNA, 92 bp, Homo sapiens
cggtggactccttcggcagtccacccaccgccgccgcctcccagcagcccctgtcaaagggaacaggaagcagtccacggagggtgacgccc

SEQ ID NO: 759705 - DNA, 98 bp, Homo sapiens
tgtaggccagccccggtcacagagtgcaccgtatcctgtcacttctggatgtgagggagagcccgggccacccggacagatgggaccagaaggtcctg

SEQ ID NO: 759706 - DNA, 75 bp, Homo sapiens
gacggcagccggcacagctccgaccgcgaggacgacttctccgcaggaggcctgtgcaacctgtgcccagacagg

SEQ ID NO: 759707 - DNA, 82 bp, Homo sapiens
gctcgggaaccgggactgcgagcgggttaatttggagtggcccctggagtcagtttcctacaccatccgaggccccacccag

SEQ ID NO: 759708 - DNA, 98 bp, Homo sapiens
cagcctgcccttcgggacgctggagctaggcgacaccgcggctctggatgccttctacaacgcggacacccgccccctctccacgcagcggccactcc

SEQ ID NO: 759709 - DNA, 89 bp, Homo sapiens
gcacaagtagctgctcttccaagcaaggaagtcgacagtggttggatttcatcccttactggtctcaaccaaaatattcctgttggaat

SEQ ID NO: 759710 - DNA, 90 bp, Homo sapiens
atccgctgtaatcctgttggcctgcagaatgcttctttggttctgtaccttcaaactggcaccactgcaagtggaggtgagaacgagcgt

SEQ ID NO: 759711 - DNA, 98 bp, Homo sapiens
ggggaccgagcctgggaggccggccggtgccagcacctttcggcttctgagacggcggcagcagcggcattcagaccacaccaccccagagccaagtg

SEQ ID NO: 759712 - DNA, 100 bp, Homo sapiens
aggagttcggcctcatcgacaccaaggagctggagccactgaaaattgaccctgaggtggccgccttcctgcagaagctacgaagtagagtgcagatcgg

SEQ ID NO: 759713 - DNA, 90 bp, Homo sapiens
agtttttcgtcgagagattcactatggaatcggcaatccagcatccagcagatgagaagttgcaagagaaggcatggggtgcagttgttc

SEQ ID NO: 759714 - DNA, 75 bp, Homo sapiens
cttctggattgctggaattgtaaaattagcagctgtcccctttcctccaacccaacggcttactttcaaggaagt

SEQ ID NO: 759715 - DNA, 51 bp, Homo sapiens
gaggaaaacaacttcgagggcagaatggaggagatgtataagaaagctcat

SEQ ID NO: 759716 - DNA, 50 bp, Homo sapiens
acatggggaccctcttcacattcagactgcttttggcttctggatgccct

SEQ ID NO: 759717 - DNA, 100 bp, Homo sapiens
cgcagaaaatacgtggttggagagctcatttggaattttgccgatttcatgactgaacagtgtaccagaaagcagctgaagaaacaaacatggagaagaa

SEQ ID NO: 759718 - DNA, 75 bp, Homo sapiens
ggcctcacgcagctccacagacagccccagctcggtgttcctcaggtaccttgtggtctataatcctttagaaca

SEQ ID NO: 759719 - DNA, 90 bp, Homo sapiens
cagaaatggataatgagtgtgttgcacagacatggtttcgctttttacacatgttaagggaaaagaagatctcccggagcagtgccctga

SEQ ID NO: 759720 - DNA, 88 bp, Homo sapiens
aagacccgagtattttagaattactgcctccaacaggatgtattcactctgccggagggatcatagacggtatttctatgtaaacgaa

SEQ ID NO: 759721 - DNA, 82 bp, Homo sapiens
ctttgagaactgagcgcatgtggagttcggaggaaaagggctcagcagaaaaatatggctcaggagactaaccagaccccgg

SEQ ID NO: 759722 - DNA, 97 bp, Homo sapiens
cctgtgggccctgccttcagcccttccaggaggaccagcaagggctctgtgtgcccaggatgcgccggcctccagacctgcctcccggatacctgcg

SEQ ID NO: 759723 - DNA, 100 bp, Homo sapiens
ggaaagtgaaggcgaaatccattgtcttccaccgaaagaagaatcttcagcccctgcctgacttctcacgagtccctggtctgacattgcccagtggagc

SEQ ID NO: 759724 - DNA, 89 bp, Homo sapiens
gaccaaagttgacatccccagtccacctccgaggcgctgtgctcaccaggtatatatgagagatcgagaaattgctgccacagccagag

SEQ ID NO: 759725 - DNA, 100 bp, Homo sapiens
gggctgggagcagcttcatgactacgcggagcgggagagcggccacaccatgcgagagataatcattcaggtcttcgtgagctaaggccaaacaaacaaa

SEQ ID NO: 759726 - DNA, 100 bp, Homo sapiens
aagaggaacagacatgctagcagatggtggtgacgggggtagaagataaggagtcttggcatgggaagcccctccccaaaaacatggctgagcagatcat

SEQ ID NO: 759727 - DNA, 73 bp, Homo sapiens
tcctctgcagtcaagacgctgggcgcgtcgaggactggtacgaattggagcaatgttggcttatacacctctg

SEQ ID NO: 759728 - DNA, 75 bp, Homo sapiens
gaaggaaagcttctttctgggcagccagagccgcaaagaacccttaggagaaatcttgagagtggacagcaattg

SEQ ID NO: 759729 - DNA, 50 bp, Homo sapiens
ccctgcctggaattgttcatgatggccaggccatgttatgggatctcaac

SEQ ID NO: 759730 - DNA, 82 bp, Homo sapiens
gtgaaatcatgcctctgcaaagaatggtagtcgaagaagaacaccaggtggagtttttctgaatctcttgaaaaacactcct

SEQ ID NO: 759731 - DNA, 75 bp, Homo sapiens
ctggagacggcctgggtgctggcgaagcggaggccggagctgttctccatagtggtgttcggctccatcgtgaac

SEQ ID NO: 759732 - DNA, 100 bp, Homo sapiens
caattgacaacggttcaaaaatcaccaactaccttttagagtgggatgagatgatgaataaggtatttggaggtactgtgcacaaaaaaagtgtcagaga

SEQ ID NO: 759733 - DNA, 100 bp, Homo sapiens
caggcatgttgtataaatgtacagtacgtagagaaatcgacactcttaatgaacgtttagctgctgaaggacaagcgattgatggagcagagctgagtaa

SEQ ID NO: 759734 - DNA, 82 bp, Homo sapiens
ggtctacatcctgcgggtgcctttgaaaatcaacgacaacttgagcacagatttcagaagttgattgcaaagatgcactgga

SEQ ID NO: 759735 - DNA, 100 bp, Homo sapiens
taatgatgaagaagatccttcaaaattaaaagaggagcagcatggcatttcagtcactggtttgcagagtccagtgaatgatttgggaggggacttcaaa

SEQ ID NO: 759736 - DNA, 73 bp, Homo sapiens
attctcgacctgctaacagaactggaccttttcggtccaggtgcaggtacagcagtctccgcaacaggtctcg

SEQ ID NO: 759737 - DNA, 90 bp, Homo sapiens
gccttcgaggaggtcatgaaggacctgagcctgacgcgggccgcgcgggcagcggaggaggagaaagagatggacctcccggactcggcc

SEQ ID NO: 759738 - DNA, 75 bp, Homo sapiens
tcgttttgtgaaaggccaatttcatgaatttcaagagagtaccattgggggaatatattattcgagtgcaaagag

SEQ ID NO: 759739 - DNA, 116 bp, Homo sapiens
gccagcgacccgctgctcagcgtcctcatgtggggggtaaaccactcggagcagtgaggagaatgaataccttccaagaccagagtggcagctccagtaatagagaaccccttttg

SEQ ID NO: 759740 - DNA, 99 bp, Homo sapiens
acgagaatgagaacatcaccgtggtgaagggcatccggtagaacttcatggaggaacacggagtgacccaaaccgaacatatggctaccatagaagcac

SEQ ID NO: 759741 - DNA, 82 bp, Homo sapiens
ccggcgcagccagagccaccagcgcagcgctgccatggagcccagcagcaaggcttgggcactgtttaaaggaaagttccga

SEQ ID NO: 759742 - DNA, 75 bp, Homo sapiens
ggaacagattcagaaggagcaggattaccaaaggatctcttccctgaagaacaggctgaaaaaggtctccacaac

SEQ ID NO: 759743 - DNA, 75 bp, Homo sapiens
acaacattggctagagaaaaaagatgttgtggggagagccaggggatggagtctcactctgtcgcccaggctgga

SEQ ID NO: 759744 - DNA, 74 bp, Homo sapiens
gatcagagcatgaaggaagggttggttaccacagagaagcgcttcctcaaagacagtttgtacaatgaaggaat

SEQ ID NO: 759745 - DNA, 98 bp, Homo sapiens
ggaagtacatgtgtcgtatcatagttcattttatgtgggaggatgttcagcagcgcggcagagtcatggggttcactgagacttttttgacggagagg

SEQ ID NO: 759746 - DNA, 76 bp, Homo sapiens
ttagctgctcacatatggatactttcacagttcagcttcctggaaaaaaggatttattcattgaggcagatctcat

SEQ ID NO: 759747 - DNA, 96 bp, Homo sapiens
acccgcgaacccctctgggatccccgccgctctgtctacaacccgagccccactgcaggccccaccatggcgccgttcctgcgcatcgccttcaac

SEQ ID NO: 759748 - DNA, 90 bp, Homo sapiens
aggaacagaagcggaacagccacagcagcctcccaaggagtctgcaagttggcagttgcagtggtgcagaatggctgacctcagtcttgc

SEQ ID NO: 759749 - DNA, 90 bp, Homo sapiens
tggcagcatgaaagttagcatgatgtcttggcattgcccattttcaagcaggaagattccagccttccattggatggtgaaacagagcac

SEQ ID NO: 759750 - DNA, 83 bp, Homo sapiens
gggttcgccgagccgcaggagagacacgctgggccgaccccagagcggcgctggacagggtgtattatctcatatactttcag

SEQ ID NO: 759751 - DNA, 100 bp, Homo sapiens
gagggagacaaagcagcgcccgtctgcttcgggcctctggaatttagcgctcgcccagctagccgcagatttggagcaagaggtggtggtggccttcccc

SEQ ID NO: 759752 - DNA, 136 bp, Homo sapiens
caatagggaaagtgaggcagctgcaaggagggcggcgggactgcactcgagtgtccagacctgctcgatggccgaatacatcaagcaatggtaacatctttaaatgaagataatgaaagtgtaactgttgaatgga

SEQ ID NO: 759753 - DNA, 99 bp, Homo sapiens
cgagagccctgtcatcttctaaacagagcagcagcagcagagatgataacatgtttcaggtggcccacaaactctttaacaacttgaaataaatgtgtg

SEQ ID NO: 759754 - DNA, 83 bp, Homo sapiens
tgtctgtggggccgccggcggcccggcttcaggagaactacgatgacccgcacaaaacccctgcctccccagttgtccacatc

SEQ ID NO: 759755 - DNA, 150 bp, Homo sapiens
tgccctcggacttcatctcattgctcagcgcggacctagacctggaatcgcccaagtccctctactcgcgagatgaggcccacagcgacaaggccaaggagagcattcgagccaagtgcgtgcagtacctagaccgggccgagaagctga

SEQ ID NO: 759756 - DNA, 75 bp, Homo sapiens
ctactggaactgcacaaactggccactgacaaaaatgacccccatgaggaacccctctcccagatcactgcctac

SEQ ID NO: 759757 - DNA, 98 bp, Homo sapiens
ggcggatcatattccttcatctaccatggctcagccgggaactctgaacctcaataacgagatcttgtggaagccctgaagccagagtatgtggcacc

SEQ ID NO: 759758 - DNA, 50 bp, Homo sapiens
tggcttctttgagactgaaatggcaggccacgaaactggctactgctttc

SEQ ID NO: 759759 - DNA, 100 bp, Homo sapiens
gggagacgagaagcctgaaaagtcgcagcgagctggagccgccggagggtccacatatagcctcagttacattagctgcttatgaatgcaattcagttaa

SEQ ID NO: 759760 - DNA, 100 bp, Homo sapiens
cggctctatgccaactgcgaggacgtgggggtggccatcctggtgaggaagcacaagcctatgcagacgacaacagtttgctgttcatggagacatcagc

SEQ ID NO: 759761 - DNA, 83 bp, Homo sapiens
tatacttaatctttgcagctgttgaaggcgtgatgagagtcattggggaccaggactaaaacctccagaggaacggacaatag

SEQ ID NO: 759762 - DNA, 75 bp, Homo sapiens
cactctttccgccctaatggaggtctccagtttcgatttggaacattgctaccaataaactgacgttcttgaact

SEQ ID NO: 759763 - DNA, 90 bp, Homo sapiens
catggttctcttgaaggtgccttcttcactaagtgccgaggagctggaagccatcaagttaattagatacctttgtctggatatggagga

SEQ ID NO: 759764 - DNA, 111 bp, Homo sapiens
atcaacattgatcccaatgccaagggttggatggattgggcagcccacaagctttgtgtccctggtgatgttggaacattaatgatggaacatggccaaacttcagtcatg

SEQ ID NO: 759765 - DNA, 74 bp, Homo sapiens
aaaaatcaatctcagggctacaaccagtggcagcagggtgctcatgctgaagattcggttatggaccatcattt

SEQ ID NO: 759766 - DNA, 75 bp, Homo sapiens
ccagcctcaggcgtgcgcggacggtgtgcggatttcctcctctgatgctcctcttcagcctttggtatcctctcc

SEQ ID NO: 759767 - DNA, 76 bp, Homo sapiens
atcatgctggccaagaagatcatcattaaggacggaggcacgggactggtgattgcagctggaagtgcccatgacc

SEQ ID NO: 759768 - DNA, 101 bp, Homo sapiens
tgctgtccagcaccacgctgctccctcggcagccgctccctctgggcatcaaagtctacgaggacgagaccaaaggacgactgggtttggattcagaagag

SEQ ID NO: 759769 - DNA, 100 bp, Homo sapiens
ccgctgctgtcttcgtgggaggcgccgtgagttcgccgctggtggctccgggtatctggtgacccatctcatgggggcagatctgaacaacattgtgaaa

SEQ ID NO: 759770 - DNA, 83 bp, Homo sapiens
cctgcgtaactttctcccttgatccgggagtctttccactggccttatgccagcctggaccatcttggaggcagtgtaggatc

SEQ ID NO: 759771 - DNA, 50 bp, Homo sapiens
cctgtacagcctgcagaactgaagaatgtggccattagccttcggttctg

SEQ ID NO: 759772 - DNA, 82 bp, Homo sapiens
cacaaattgcctccttatgtctccaacatggaccgcctgggggactcggaactagctatgccaagaccaagacgagagccga

SEQ ID NO: 759773 - DNA, 95 bp, Homo sapiens
tccaataactagagaacttatgaaagatccggtcatcgcatcaggagatgagtatgatgtatgtgccatttgtttggatgagtatgaagatggag

SEQ ID NO: 759774 - DNA, 97 bp, Homo sapiens
tgctgaagcatgtagtgagatgttaccttcgactttcagataaccccagctgtcgcctggttgggcccggaaatgggacgtcgcgctttctcaggga

SEQ ID NO: 759775 - DNA, 90 bp, Homo sapiens
cgctactttgtaatccggatccaggatggtactgcatgtgtttgatgatctcagaggctcagtatccttgtcctgggttggagatagcac

SEQ ID NO: 759776 - DNA, 95 bp, Homo sapiens
gtgttggaacaaatcattcctaactgcagcatactgggaaaggggaaaggttgaggcaactaacgtgacagtggatagtggaaacaggagatcgt

SEQ ID NO: 759777 - DNA, 80 bp, Homo sapiens
tgacgacctacgcacacgagaacatgccttcaccttggttctgggacatccgacagtgctggcataactatccatttcag

SEQ ID NO: 759778 - DNA, 90 bp, Homo sapiens
ggggattttgtcagcttgtcgtcaagatctgttcagcctgtgtgcgctgtaagagctgtggggcaactccaggcaagaactgggacgtcg

SEQ ID NO: 759779 - DNA, 74 bp, Homo sapiens
tcatcgagcacgtggccgatgtgcaggttcaggagaagtggcacctggtggaggacctgtcgcgactgctgccg

SEQ ID NO: 759780 - DNA, 90 bp, Homo sapiens
ggaccttctgattagtccacagtcttcctctatagtaaccccaagaaaggcatcagggttctggagtggttgtttgagtgacacagcaca

SEQ ID NO: 759781 - DNA, 97 bp, Homo sapiens
ttactgcagtctggaactcctgggctcaaaccatcctcccacctcagcctttacataccgagcatcaaatattaaggcacccggagaacagacagta

SEQ ID NO: 759782 - DNA, 107 bp, Homo sapiens
gagctgccctcggcgggcggcgacggcggcaaatctaagaaatttcagaaaaagtcctacctggagcgaagcgttaaggaagctgaggacaacatccgggagatgct

SEQ ID NO: 759783 - DNA, 100 bp, Homo sapiens
aaaggcaaaaatcccatctaccgcaactctcagttcgagagtaaaggacgtggcccagtggaacatcgggagcctccggaccatcctggacatggtggag

SEQ ID NO: 759784 - DNA, 50 bp, Homo sapiens
cacgatcccaccgcacgttcagaagtcggacaatggcgatgaccactcag

SEQ ID NO: 759785 - DNA, 75 bp, Homo sapiens
atcaagacactgcagctcaggggttcagctatttacatgaggtcatacacgctggctgacagagcagagagctca

SEQ ID NO: 759786 - DNA, 98 bp, Homo sapiens
agcctggaactcgcgcaggtcctgcccccagatactctgcccaaccgcacggtcaccctgtatgattttgtagaagttgaggaacccagtgatggaac

SEQ ID NO: 759787 - DNA, 100 bp, Homo sapiens
aagaagaggacgacgacgacgaggaagaggaggtttctgaggccacggactctgactacgaggacgcgctgcccaagcactccttcgtgaaccactacat

SEQ ID NO: 759788 - DNA, 90 bp, Homo sapiens
gcatccaagaaaccaaagcagtgggaactcgaatcatttatgacagaaagtttctgttggatcgtcgcaattctcccatggctcagaccc

SEQ ID NO: 759789 - DNA, 82 bp, Homo sapiens
gcgagccgagtgtgagcggaaaggggcccggcgtctgcctcgagactgaagaccggaagctgtcttctgctgttggctgctg

SEQ ID NO: 759790 - DNA, 75 bp, Homo sapiens
gcctagcattgctctcgccatggctctcagcgatgctgacgtgcaaaagcaggctccagcccccttttggacatc

SEQ ID NO: 759791 - DNA, 73 bp, Homo sapiens
aaaattgtataccgcagattcaggactacgcccaagcaaggtttgatgcctatttccaccagaagaggaagct

SEQ ID NO: 759792 - DNA, 99 bp, Homo sapiens
ggagctgcaaaccacccaagtctgcaatcttaccagggaggccaagcgaccacccaaagaagatgtacattgaagatgtcagtttctacatgtgggaag

SEQ ID NO: 759793 - DNA, 83 bp, Homo sapiens
cagacggttcccctttctgattcccacagcattttccaaccattcacgcatgatgccttcttctgtagagtgggcgctttgca

SEQ ID NO: 759794 - DNA, 101 bp, Homo sapiens
cagggccggctaccactgcggctactgcgattccaaggagggcaaagcgtcctgcgatctttaatctcatgaagtacgacagctacagccgcttcttaaag

SEQ ID NO: 759795 - DNA, 75 bp, Homo sapiens
cggttcagccctttgatgaccgcagcaggtttgttggcatccaaagctgttggggttgatggtgctgaaaaaaag

SEQ ID NO: 759796 - DNA, 75 bp, Homo sapiens
cggcaactctttgatgtactactataatgggaaagcgtccaagtggtaagaagttcagaagcaagcctcagttgg

SEQ ID NO: 759797 - DNA, 83 bp, Homo sapiens
gccggcgggtacctgcggccaattcggtggaacgaggacgcggactgcgaaggcaggtcatcatcagatttgaaatatttaaa

SEQ ID NO: 759798 - DNA, 75 bp, Homo sapiens
ggggtacgctggcttcatcatgcccatcgaggtgcacttcaaaaacaagcaaacggggattcagcgtccgatcct

SEQ ID NO: 759799 - DNA, 100 bp, Homo sapiens
cgtcttgcaacagtggccgcacgcatagacaagttggatggcttgaggactggtactaaaaggaaacgtgactgggaggccattgccagcagaatggagg

SEQ ID NO: 759800 - DNA, 100 bp, Homo sapiens
ggccgccgcgcttctgctctcagtgtcccggacttcagatgagattgtggggaacctgggtgaaggcacctttggcaaggtggtggagtgcttggaccat

SEQ ID NO: 759801 - DNA, 96 bp, Homo sapiens
acgtgatcaagtaccttgagacactcctttactcacagcagcaggtgtgtatagaccatcgatgccagcgtgtggatctcctgggggcacaggaat

SEQ ID NO: 759802 - DNA, 124 bp, Homo sapiens
cgctgagcacgttcttccaagaaaccaacattcccaacagccaccaccaccaccagatgagcgatcaggacgccacggctccgcctgaagcgatggcccagccctacccccccgcccagtaccc

SEQ ID NO: 759803 - DNA, 98 bp, Homo sapiens
ggcaagtaccgccttatggagtatacgggcaaccatggaatcaacaaggatttggagtagaacatccacgacagcgatggcagttccagcagcagcca

SEQ ID NO: 759804 - DNA, 75 bp, Homo sapiens
ccacctcagggcccacatgcgggcacactcaggtcaaactgtgctgaaaatatccgcaaacacattctgcatact

SEQ ID NO: 759805 - DNA, 67 bp, Homo sapiens
cggcaagatcatcgtgggcgacgccacagagaaagccggccaagagccactgcacaatgaggagctg

SEQ ID NO: 759806 - DNA, 98 bp, Homo sapiens
ctctcttccctctgctgggcgtcctgttcttccaggatggttggtaaaggctttttcctagttcagacaaaggaagtgtccatgaaagctgaggatgc

SEQ ID NO: 759807 - DNA, 75 bp, Homo sapiens
aggtctccgtgcagcccaacttccagcaggacaaggctgagcagtccaaagtcctgagcgccgtggaggaccgca

SEQ ID NO: 759808 - DNA, 100 bp, Homo sapiens
ggggaatttccttgtgcctccattcccgggaggggggagcggcgttggaggccaccgtttccagattttaggtgatgggcaagtcagaaagtcagatgga

SEQ ID NO: 759809 - DNA, 76 bp, Homo sapiens
tatgattatgaggcatgggcaaaacttgatgtggtcatctctgaatttgagcaatggtgaaacggaatctgtgaaa

SEQ ID NO: 759810 - DNA, 100 bp, Homo sapiens
tcttaaaccagtacagaagttatttgcaatcattgtaggcagggctcaatttgaacaactgtgtgcttcccttttggccagggttgaaccacctttaaaa

SEQ ID NO: 759811 - DNA, 73 bp, Homo sapiens
agaaaatcataacaagcggttctctaccctgtaaagcaagaagttgagaagtttacagacctagagaaactct

SEQ ID NO: 759812 - DNA, 90 bp, Homo sapiens
tggacagagactaccacgtggagtgttaccactgcgagaagatgggtgtgaacctgacacgcagcaacaaggagacggtgaagcacagcg

SEQ ID NO: 759813 - DNA, 98 bp, Homo sapiens
gccctgcacatataccatctctggctccagggaatgtgagaatcttgcctcctggaatccttcaaatcctgaatgtctcttacttgtggtgaaggaac

SEQ ID NO: 759814 - DNA, 100 bp, Homo sapiens
gccacgggggccaacacttggacatacaaaagcaagccgggaggctggctgcctctcctcctgctgtctctgctggtggccacatgggtgctggtggcag

SEQ ID NO: 759815 - DNA, 75 bp, Homo sapiens
gagaactacaggaacctggagtctgtgggttcacagagtgtttccaaatgggctggcctcccaggaagggactat

SEQ ID NO: 759816 - DNA, 100 bp, Homo sapiens
ggtgattgaggacaagaccatcgagctcatggttggtcaaagaaaaagtgatgtatgaaaaagaggcaaaacaacaagaagaaaagattgaaaaaatgag

SEQ ID NO: 759817 - DNA, 98 bp, Homo sapiens
catgtatcctggagcgaatcctaccttccaaacagtgttctaagaacggaagcatctgggctggatggaatttagcatcaagcagagtcccctttctg

SEQ ID NO: 759818 - DNA, 83 bp, Homo sapiens
gctgtgctcgcgctactctctctttctggcctggaggctatccagcctgcggggtattgaatttgaggctgctctcagcatta

SEQ ID NO: 759819 - DNA, 90 bp, Homo sapiens
ctgacaaaattaggattgcaactggacagatagctggcgtggataaagatggaagggatattggtgctggaaaaggcaaatactatgctg

SEQ ID NO: 759820 - DNA, 75 bp, Homo sapiens
acgatgtcacccgcttcctcaacgaggatctcccagccatccagccccggctagtggcggtcagcaaaaccaaac

SEQ ID NO: 759821 - DNA, 100 bp, Homo sapiens
agacgcagaccccaccgcagagtctgcagcagcccgccccgcccggcagcgagcggcgccttccaactccgggtctccacaccctggcaacctcctactg

SEQ ID NO: 759822 - DNA, 50 bp, Homo sapiens
accaactctttgatgatgcatccagggtacagccaaagaccggagctttg

SEQ ID NO: 759823 - DNA, 100 bp, Homo sapiens
gaagatggcgcctgttgtgacaggatcctggtgtatagcctggaagcaggacgccgcctcttgaagctgggtaacgttctccgtgacttcacgtgtgtca

SEQ ID NO: 759824 - DNA, 50 bp, Homo sapiens
gcctcctgagtagcagagattacagtacttggaccatgagactgtttcag

SEQ ID NO: 759825 - DNA, 90 bp, Homo sapiens
tgaggacgtggaggtgggaaggtgtgtccggaggtttgcaggggtgcagtgtgtctggtcttatgaggcctacaggattatgaagcggca

SEQ ID NO: 759826 - DNA, 51 bp, Homo sapiens
cggggctccaatggcgctttctacaaggccccccggacagaccacccagcc

SEQ ID NO: 759827 - DNA, 75 bp, Homo sapiens
tgggaaacgcgtgagccaggccgagaggttacttcctcagaatgttggcctcctgtatgttggaggttatgaaag

SEQ ID NO: 759828 - DNA, 75 bp, Homo sapiens
acctcctggtgaagaaagcaaacacatgcttttcacttccactgcatctctcgctggctcaaaacacgacaggtg

SEQ ID NO: 759829 - DNA, 100 bp, Homo sapiens
caagactaatcatcctgattcagcaagtgaggtcattaagaaggcaaatgataccttaaatggaatcagtagtagttctgtttgcacagaagtaattcag

SEQ ID NO: 759830 - DNA, 118 bp, Homo sapiens
acaaccccgaccttggcaccgcgtttgtcaagttttctactcttacaaaggaactgtccacactgctgaaaaatctggatgtaaatgaagaccctggagaagatgtggccctcctctc

SEQ ID NO: 759831 - DNA, 82 bp, Homo sapiens
gaagtgagtcaggagctgtatgaccttaacgtggagctctccaagatagaagaagtcagagatgccatggaaaatgaaatga

SEQ ID NO: 759832 - DNA, 100 bp, Homo sapiens
ccaagaaaaaaaccacaaatgtttttctgttttgcctgaatacatgatttaaacaagagatttccacagaaggtaatagcctgcagctggtgttttgaga

SEQ ID NO: 759833 - DNA, 50 bp, Homo sapiens
taaaattgctgttttacagaagatgtgtatatctcatgattgatatggag

SEQ ID NO: 759834 - DNA, 106 bp, Homo sapiens
tggaattttgccgatttcatgactaaccagtgcttccaaaagccaggatcgcaaatcagccagcagagagaagcggtccgtcgtgtcctttgataaggtcaaggag

SEQ ID NO: 759835 - DNA, 100 bp, Homo sapiens
caactgtgtaactgtcttcatctttacagaggaatagtctacaaaggaagacttgtaacctggagaagagtttggaaattttagcattcaggtgccagga

SEQ ID NO: 759836 - DNA, 50 bp, Homo sapiens
aagtatacagcaaagaggaccaggttggacgcgtgtatccccaagcggtc

SEQ ID NO: 759837 - DNA, 71 bp, Homo sapiens
gtgggacaacgaggccgcggagacgtggaagatgcaatgctgatgtttgataaaactaccaacaggcacag

SEQ ID NO: 759838 - DNA, 99 bp, Homo sapiens
cagggttctctatgattatgatgcagcaaacagtactgaattatcacttctggcagatgaggtacgtgaacacactcctgaaactcatcccgctggtgc

SEQ ID NO: 759839 - DNA, 82 bp, Homo sapiens
gcagccgatccagcctgcggagcctgtggggcagttggtcgcattatgtttcagctcttctcagacatatgtccaaaaacat

SEQ ID NO: 759840 - DNA, 95 bp, Homo sapiens
ggtgattctgaagagggtctggaggagccttctcaagaacagagctggccactggctggaggtttaagaagcgcccaggcatcgagaccttgttc

SEQ ID NO: 759841 - DNA, 100 bp, Homo sapiens
cctcttttgtgaagcggcagctgaggagactccggcgctcgccatggccgacgaaaagcccaaggctgcctgctgtttcccggggagatcatgaaacgag

SEQ ID NO: 759842 - DNA, 82 bp, Homo sapiens
ccaccgtgttcttcgacattgccgtcgacggcgagcccttgggccgcgtctcctttgagggaacggcaggagcagctgatgg

SEQ ID NO: 759843 - DNA, 82 bp, Homo sapiens
agaaggtgttattgggaaaattcaacttcattcagttactccacaggatccgctgaacataggatgttgccacaaaatctac

SEQ ID NO: 759844 - DNA, 75 bp, Homo sapiens
agttgttgaaattgtccccgcagttttcaatcatggacacaactcagatgggaagttcatcgcccgggcacagcg

SEQ ID NO: 759845 - DNA, 100 bp, Homo sapiens
ggaaagaccgaaatcagttataatatgtcagcatggaattgatcgtcggttctgtgaatccaagcgggtccatatggaatatttgctggtagggatgcct

SEQ ID NO: 759846 - DNA, 82 bp, Homo sapiens
cgcggccatggcgcagctgggaaagctgctcaaggagcagaagtacgaccggcagctgagtgcctggatcaaagtggaacag

SEQ ID NO: 759847 - DNA, 83 bp, Homo sapiens
cacggaccacggcggcgcccgcagctcctcaccgcgccgtgccgtccctgcagtgacaccgaggtgctcctagccgtctgcac

SEQ ID NO: 759848 - DNA, 75 bp, Homo sapiens
tgcaaagtaaacagggtgccttgtggaaccgggtggtaaacactacacgtgaagagtggtgaaagggaacattga

SEQ ID NO: 759849 - DNA, 82 bp, Homo sapiens
catgtgcaaccaggactctgagtctgtatggagtgacatcgagacttcctagcatgggctgttgtgctggagagaacgagag

SEQ ID NO: 759850 - DNA, 50 bp, Homo sapiens
tcagcctcccgaatagctgggattacagaggagaggagacgccgtgagcg

SEQ ID NO: 759851 - DNA, 75 bp, Homo sapiens
ctcccaagtaactgggattacagcaattaccagctctggctgggtcgccacaacttgtttgacgacgaaaacaca

SEQ ID NO: 759852 - DNA, 85 bp, Homo sapiens
tggagctgccgccgccgggactcccgtcccagcagatttctgcatgaatccccagacagtgctgctcctgcgggtcatcgccgcc

SEQ ID NO: 759853 - DNA, 100 bp, Homo sapiens
tgacaccaagggtcgctttgctgtacatcgtattacacctgaggaggccaagcatttggatgccttattgcgacagatccggaatattgtagagaagcac

SEQ ID NO: 759854 - DNA, 50 bp, Homo sapiens
gcccagcggattctacattgcctccggagacatgcaagaaagcacttcag

SEQ ID NO: 759855 - DNA, 100 bp, Homo sapiens
tgcacgacctgctcctacagccggcgatccactcccggctgttcccccggaggtgatgcaggttctgaatgctgatgccattgttgtgaagctgaactca

SEQ ID NO: 759856 - DNA, 98 bp, Homo sapiens
ttctaagctgaataaagctgttttggaactgtcaggtacctcaaagctatatttgccttccctccatgatctccaacactatccgataaagtagaagc

SEQ ID NO: 759857 - DNA, 51 bp, Homo sapiens
tgggcacccacggagcctccggggctgtcaccttcaggccattcagaggag

SEQ ID NO: 759858 - DNA, 100 bp, Homo sapiens
agacaaaacacccccaccatctcctcctcctgaagaagatgaggacccaggtgttcagtccacaagaatcggaatgtcagttaatgctattcgcaagcag

SEQ ID NO: 759859 - DNA, 83 bp, Homo sapiens
gcctccccaaccatgtgcaattggtatcgtgcagcagtttttggtgttactgacgaccagctctgacgagagtcttcggtttc

SEQ ID NO: 759860 - DNA, 96 bp, Homo sapiens
agtacgacagcctcaaacaggagctggagcagctcaaagaggagatcatgaatcagacagataaaaatcaacaagaaatcccatcataccttaatg

SEQ ID NO: 759861 - DNA, 101 bp, Homo sapiens
tgcaggatgcctttccttttgggtcttagacaggtgctggagaatctggtaaaagcaccattgtgaagcagatgaggatcctgcatgttaatgggtttaat

SEQ ID NO: 759862 - DNA, 90 bp, Homo sapiens
agcagatttaatagacgagtatcagctgtggagctcctgggtgacattgtgcagaactgtagtctggaagactcacagattgagaaggaa

SEQ ID NO: 759863 - DNA, 85 bp, Homo sapiens
agatttaggggtggatgaaacgtgtctatttgaatcggaaggtttggaacagctttgctgagccatcaaggtctaatggaagcat

SEQ ID NO: 759864 - DNA, 101 bp, Homo sapiens
gctgaacggtgcagcagtgatggatgcagctcttctgttgataggtgattcatggcaggggacgtggaaggattctgttcctccatccacgacaccagtgt

SEQ ID NO: 759865 - DNA, 75 bp, Homo sapiens
cagaacacaggagtgtggctagtcaaggcacttcaggtggcaagacagctccttcttcagcagcaacagcagcag

SEQ ID NO: 759866 - DNA, 75 bp, Homo sapiens
agcgggtcaagctgctgctgcaggccaactgcattgactccacagcctcagccgaggccgtgtttgcctccgaag

SEQ ID NO: 759867 - DNA, 75 bp, Homo sapiens
catcacacacctacctttaaccacagctgtgcctgagctgaagcttctctgtggggcagacgtcttgaagacctt

SEQ ID NO: 759868 - DNA, 101 bp, Homo sapiens
caaagaagtactgtttttgtcatttgcaccagcttctttctccaggaaagatcaaaacgatgcactgcaaggaaaatttctaccttgaaccgtatctgaaa

SEQ ID NO: 759869 - DNA, 98 bp, Homo sapiens
cagaaaaaagatcacaagcaactctggatgggattgcaaaatggaggaatgccagctcctgagcaggcctcattggtggaggaggggcaaccacagac

SEQ ID NO: 759870 - DNA, 112 bp, Homo sapiens
ccagggaagacagggcgacctggaagtccaactacttccttaagatcatcgaagatgtggacaaggcagtgaaggccgcccgggccgccttccagctgggctcaccttggcg

SEQ ID NO: 759871 - DNA, 82 bp, Homo sapiens
ggacattattgcgcgtggaacggctgcttttggaagtgaagatagtgatccggggagacaggaacacgggcaagacagcgct

SEQ ID NO: 759872 - DNA, 101 bp, Homo sapiens
cacgcaggaacggctccagcatcaagatccgtctgacagctgcttctggccgtgtgtgagaagagcacccccattggcaccagctgccaaggagccatgct

SEQ ID NO: 759873 - DNA, 50 bp, Homo sapiens
tcctgagtagctgggactacaagtgcccgccaccatgcccggctaatttt

SEQ ID NO: 759874 - DNA, 50 bp, Homo sapiens
ctgggcgtcctgttcttccaggagctcatggtccatgtgggtggattgat

SEQ ID NO: 759875 - DNA, 51 bp, Homo sapiens
atttagcaaggattcaaggctttcagatgcagacagacatgctgaactatc

SEQ ID NO: 759876 - DNA, 108 bp, Homo sapiens
agcttggtttcgggatctcggtgctgcagacggcgagacctcctgcacaggtgctggagaatctggtaaaagcaccattgtgaagcagatgaggatcctgcatgttaa

SEQ ID NO: 759877 - DNA, 100 bp, Homo sapiens
ctatgatgccccactgagtgaggctggggacctcactgagaagtattttgctctgcgaaacatcatccagaagtgatgtcttggcattgcccattttcaa

SEQ ID NO: 759878 - DNA, 98 bp, Homo sapiens
cgtgattcggtcccgctgtcctaggcgggatggtgccgctgtgccaggtgaaaaaccttttgaatgtccaaattgtcatgaacgatttgctagaaata

SEQ ID NO: 759879 - DNA, 50 bp, Homo sapiens
tgaaaatggagagttctacctacgagttgcagtattttacagagctagcc

SEQ ID NO: 759880 - DNA, 100 bp, Homo sapiens
ccatctcgcactaccctgactacagctggagcgcccagaggcgagccctggtggaggaagaggtatggacctgtctgccaatcaggacgaggagaccgac

SEQ ID NO: 759881 - DNA, 83 bp, Homo sapiens
aaccatgtttggattgaagccgcctctgtattacttaccagggagaagtggtgccacatgacccaggaggagcgcgacgacag

SEQ ID NO: 759882 - DNA, 90 bp, Homo sapiens
gcgttttgccagtcacctctcaactgtgtgccaaaggttttgctgttactgctcagtgtagtcacaccttgaataagaaatggaaaacct

SEQ ID NO: 759883 - DNA, 76 bp, Homo sapiens
gagaaattcagacggctcccgaggtttgctaatccagactttacacaacctatctcagaagttgtagatgaagtaa

SEQ ID NO: 759884 - DNA, 89 bp, Homo sapiens
gtgccttccatagggctgagtctgggaccgaggtataccaagcttggctacgcaggcaacactgagccccagttcattattccttcatg

SEQ ID NO: 759885 - DNA, 82 bp, Homo sapiens
ttccagacatcgccctggatgtcttcgcgctctggctggtctcccctctgctggtgtcaacagcatctccaccctggagcct

SEQ ID NO: 759886 - DNA, 90 bp, Homo sapiens
gtgaagttgctgccaccgggacccagggatcatgtaccgcaagtcctgtgcatcatcagcggcctgtctcatcgcctctgccgggtacca

SEQ ID NO: 759887 - DNA, 75 bp, Homo sapiens
ctccgcgctatggctgcgttcggccgtcagagcaaccggctgaccaagatcgagggtctgcagaacctggtgaac

SEQ ID NO: 759888 - DNA, 82 bp, Homo sapiens
attagtgtctccatcgtcatcagaaactgaaggcaactttgtctatcgcacagatgatccagtattcctggaagaagcaggg

SEQ ID NO: 759889 - DNA, 50 bp, Homo sapiens
cttaagatgtcctgcctgaaagttttactctggacaccggtcccctcaca

SEQ ID NO: 759890 - DNA, 75 bp, Homo sapiens
gaccgcagcgtcaatgacttacgccaagaagagaatgggatgtttctggggagctgaaaggaaattctgggtctt

SEQ ID NO: 759891 - DNA, 75 bp, Homo sapiens
gtggttcttctcggcctcctccgaggaggagcgcaaggttcgaacctctgacatgggtggctatgctacttgcca

SEQ ID NO: 759892 - DNA, 90 bp, Homo sapiens
cacagaaggactgggatgatacaccttttccacagggaattgagttggcttctccagggaaagtgaccgaggcagtgaaagaggccattg

SEQ ID NO: 759893 - DNA, 75 bp, Homo sapiens
gcagaaggtgatacaggtggttcagtcagataaagagttaatatcagctttttatcacacatggacacatttatt

SEQ ID NO: 759894 - DNA, 76 bp, Homo sapiens
cccctcctgtaacccagcctgtttcacttcttgcaccagtatgcatgagcgggtgaaccgaacagaaagacagttt

SEQ ID NO: 759895 - DNA, 99 bp, Homo sapiens
ctgaaactcatctgtacctcacttagaaaggaagccagagaagggtatccagtatctgatcgagcggggcttcctgtcagacacaccggtgggagtggc

SEQ ID NO: 759896 - DNA, 74 bp, Homo sapiens
gctggattgaactcagagaagccgggataccccatgtttccccatcactcgaggagtctgggcagagactggac

SEQ ID NO: 759897 - DNA, 82 bp, Homo sapiens
catgcggctactcctgcccagcgtggtggggcagcagaagctccagagcccagacttgcagcggaaggagagttttacatgg

SEQ ID NO: 759898 - DNA, 50 bp, Homo sapiens
ctgcgaccgctgccttctcggctgtatgcaggagctattcttgaagtttg

SEQ ID NO: 759899 - DNA, 99 bp, Homo sapiens
gggcggtcggcgaagcggccggcaggatgaaaacaccgttcttcatctttaacctggcagaaactgctcacatgccttcaaaagtgaaagctcaactct

SEQ ID NO: 759900 - DNA, 75 bp, Homo sapiens
aacgttgcaaactctggaaaaaaacttggtaccttccactggaagaatctcaaacagcgctacttactcaggatc

SEQ ID NO: 759901 - DNA, 80 bp, Homo sapiens
catagtacctacagcagcactccaggctcgtggtcccaagaagcatctgaagcgggtggcagctccaaagcattggatgc

SEQ ID NO: 759902 - DNA, 75 bp, Homo sapiens
ccgccaccgtctgaactaggatgtcccgacatgaagttcttcgtgccatgaaggaggacagtgaaaaagttccga

SEQ ID NO: 759903 - DNA, 75 bp, Homo sapiens
agaccctctgggagcttctcagccattttccacagatcaggtcaaaatgcagatcttcgtgaaaacccttaccgg

SEQ ID NO: 759904 - DNA, 49 bp, Homo sapiens
taattcacgcagagccggctttgcaggaagggatgagaccatgcagcct

SEQ ID NO: 759905 - DNA, 83 bp, Homo sapiens
gagaaggactttcaggatagaacatgattcttggatctcccagtcagcttcatttccccgtaatcagaaacaaccaggggtgg

SEQ ID NO: 759906 - DNA, 100 bp, Homo sapiens
tggcccagcacccgcctgccaggcgctcgggggccgaactggccctggactacctctgcagcaaaacagagcgtgacactcccaatcatctgcatgctgg

SEQ ID NO: 759907 - DNA, 97 bp, Homo sapiens
gtcattgtactaacaaacagaatttacaagttggaaattttcctacaatgaatggtgtatctcaaatgttgatgttagtgaagattcacctcctccc

SEQ ID NO: 759908 - DNA, 100 bp, Homo sapiens
ctctgccttggccagagaagagaacagtctgcagatctccaggggagcccaccagcctagtcaacatggcctcggaagacattgccaagctggcagagac

SEQ ID NO: 759909 - DNA, 76 bp, Homo sapiens
ctggtcctgctcggctgcctcctggcctcgctcctgttctcaggacaagcagagccctaatttgtttagaactgta

SEQ ID NO: 759910 - DNA, 87 bp, Homo sapiens
cgagcaccagagtcggcgtaactatcgcctgacagggtatctgaagtaaaaggggaaaatgacagatggcgagacctggacaggaaa

SEQ ID NO: 759911 - DNA, 98 bp, Homo sapiens
gcccgccaagcctcccaacctggacgccgctctggcgctgctccgcaaagagatggctaggcagctggaagagaaagaccgagtgctaaagaagcagg

SEQ ID NO: 759912 - DNA, 75 bp, Homo sapiens
gtcaggagacggagccacggagcaggtgcaagttcttcagtctgactgagacaccagaggattacactatcattg

SEQ ID NO: 759913 - DNA, 114 bp, Homo sapiens
cagtggtggctatgaacccagaggtcgtggaggtggccgtggaggcagaggtggcatgggaaatgcactcggtgatggaaagagagccactattctgaagaacacttggccaaa

SEQ ID NO: 759914 - DNA, 102 bp, Homo sapiens
ccgaggaaaaggaatcgtatcgtatgtccgctatccagaacctccactctttcggtactgggaacagcttttgatcctttcttaggaggaaaaaacttcgat

SEQ ID NO: 759915 - DNA, 82 bp, Homo sapiens
gtcttctcgggcttctcgccccggccgcggccgggtcctcaggtgtcgtgaaaactacccctaaaagccaaaatgggaaagg

SEQ ID NO: 759916 - DNA, 50 bp, Homo sapiens
ttctgggtgacactcaacaggattcccgacatctttccaggaacagcgtg

SEQ ID NO: 759917 - DNA, 102 bp, Homo sapiens
cctcgaggagcttcctgagcaggtggcagaagatgcggtcaccgaggcagaggaacttcttcaaaatctgtttcagcagtccctgtctgggccccaggcctc

SEQ ID NO: 759918 - DNA, 95 bp, Homo sapiens
attccagaggagggtaaaaggctgagaagcttaagccaagacaatgcaaactccagtgaacattcccgtgcctgtgctccggctgccccggggcc

SEQ ID NO: 759919 - DNA, 50 bp, Homo sapiens
ttgagaccgagaatgtggaaacagttaaacctgaggctccttttgacctg

SEQ ID NO: 759920 - DNA, 75 bp, Homo sapiens
gtgaaggggcccttctcggtggaggccgacccatccaggagcatcagatccatgctgctgctgactcggagcccc

SEQ ID NO: 759921 - DNA, 50 bp, Homo sapiens
ttcaaatcccttcggcacctggaggtgactcccgcggccctccaaaccat

SEQ ID NO: 759922 - DNA, 80 bp, Homo sapiens
aagtcccacttccgaaaccacaagtttgccgatgatccagaagttgccacggctgctagttgcgtcatccagtggacacc

SEQ ID NO: 759923 - DNA, 100 bp, Homo sapiens
cactttgtggagaaagtcgtcttccacttgcacgaaagctttcctaggccaaaaagaggagactcctgtgctgaccagaatagaaaaacaaaagcgcaaa

SEQ ID NO: 759924 - DNA, 90 bp, Homo sapiens
atcatattaattcttatgaccatgctcataagcagggagaagatgtcaaccggacactagaaggtggaaggaaacctcttcattatgcag

SEQ ID NO: 759925 - DNA, 90 bp, Homo sapiens
aggcgttgaagcgcgcgggcaaggaagtgctgctggaagggaagtctgttagaactgctgtgctgatcaacgggacgctccgtctttgaa

SEQ ID NO: 759926 - DNA, 75 bp, Homo sapiens
cggcatgatccgacacgccggggcgcccgcgcgcggggaccccacggggaaatctggcattttttaaagtttgcg

SEQ ID NO: 759927 - DNA, 82 bp, Homo sapiens
tccaagtcagattctctcgtgggatgctcaggcttcctgaaaaataaactatcaatcttgcccagactggagaaaggactgc

SEQ ID NO: 759928 - DNA, 89 bp, Homo sapiens
gccatccgtgtcgccaccgccctcacgctgatgaccgggctttaccagggttttggccaaattgggcgagggcacaaaataaccactta

SEQ ID NO: 759929 - DNA, 51 bp, Homo sapiens
gccaccggcgtgtgccccgacggcgacgaagtccttcagccaaaccaagga

SEQ ID NO: 759930 - DNA, 83 bp, Homo sapiens
gtgaagagttgtcccagctcggcccgcgggggagccccgggagccgcacgcattttgaaagcgaagcagaagccgtagaatca

SEQ ID NO: 759931 - DNA, 80 bp, Homo sapiens
ttactcggaagattggctttgaggcagtcatgaggattcggtgcaccaaagaaatgagccgtcagactgctacagcatta

SEQ ID NO: 759932 - DNA, 95 bp, Homo sapiens
cggcttctactggtgtctgaccaacggcgatactctctggaggaccaccgtggagatcaagattatcgaaggcgttgacccggacgacacctata

SEQ ID NO: 759933 - DNA, 51 bp, Homo sapiens
gacttgtatatgagtatacattggtgggtcatgataactgggtacgtggag

SEQ ID NO: 759934 - DNA, 50 bp, Homo sapiens
caagatcatgggcaaaggacagatccagatgggggctccggaggtggcgc

SEQ ID NO: 759935 - DNA, 98 bp, Homo sapiens
tctcaatgttgccaaaatgtttcctaaagttcgtgaatctcaacttgtgctcgagtttggcttttcattggtttcatgttgatgtttgggtcacttat

SEQ ID NO: 759936 - DNA, 96 bp, Homo sapiens
ctgaaacagaaattctggaacacctatatggaggacaagtccttgaatgaccttggctgattcagctctccctgctccttcttacaattcttgggc

SEQ ID NO: 759937 - DNA, 100 bp, Homo sapiens
ttgaaattgcaagattcgatgtctatatttaagtatctccgctacttcactcgcactatccttgatgctaggtctctctgcaatgcaatcaatgtttaca

SEQ ID NO: 759938 - DNA, 100 bp, Homo sapiens
actctgtttacgttattatcaacacaggaccagagatgcccgagtggtaaaagacatggcaacaggaaagtctaagggatatggctttgtctcctttttc

SEQ ID NO: 759939 - DNA, 83 bp, Homo sapiens
ccccagacaagatggacaccgcggaggaaggtgtcgtgaaaactacccctaaaagccaaaatgggaaaggaaaagactcatat

SEQ ID NO: 759940 - DNA, 83 bp, Homo sapiens
tctcatctcgctcggctgcgggaaatcgggctgaagcgactgagtccgcgatggaggtataccgctgggccgaccactcaagc

SEQ ID NO: 759941 - DNA, 75 bp, Homo sapiens
cctgaaggatggaactatcttatgcactcttgctctgttgcccaggctggagtgcagtggtgccatcatgccaac

SEQ ID NO: 759942 - DNA, 83 bp, Homo sapiens
gctgggccagggcctggactacttctacgacctgctctaggagtgtggccatctggggccgtgtggtatttgccactcaggag

SEQ ID NO: 759943 - DNA, 80 bp, Homo sapiens
ggcgtcgtctgcgaccgctgccttctcgggtgctggagaatctggtaaaagcaccattgtgaagcagatgaggatcctgc

SEQ ID NO: 759944 - DNA, 98 bp, Homo sapiens
tgaatgctctagttcagctaagtgtcgttgttggtccttctctaaacgaccatctgaagcatctgcttacaagcgtattaattaatcttcgcaaccca

SEQ ID NO: 759945 - DNA, 50 bp, Homo sapiens
ttcggatctactacacctcgagggagtttttcggagctgtacacgctgtc

SEQ ID NO: 759946 - DNA, 87 bp, Homo sapiens
aagagccatggaaacaggaggaagaattcccaagccaaagctttccaggtggagccgccaccaaaatgcagattttcgtgaaaaccc

SEQ ID NO: 759947 - DNA, 130 bp, Homo sapiens
cttttctgcaggtttaatagatgacaatgatctctaccgatgggaagtccttattattggccctccagatacactttatggctgtgacgtgaacagtcccagacaaccaggcgccaatggagaaggagag

SEQ ID NO: 759948 - DNA, 80 bp, Homo sapiens
ctctgagggaggagctggggacggcgaccctaggagagacggaaatggagagctggatttctccacttttctgaccatta

SEQ ID NO: 759949 - DNA, 83 bp, Homo sapiens
gccgaaggggcgtctgcggctctccgccgtccccagccctgcctctccctgggctctggttatcaatactctggctgaccatc

SEQ ID NO: 759950 - DNA, 97 bp, Homo sapiens
gccgccactgccgcagccaggagatggttcgggcctagcggagccgggactggagatagggccagatttgagtgtgtgaatttttgagtgaaacctg

SEQ ID NO: 759951 - DNA, 83 bp, Homo sapiens
cgcaagcccagacaatgccggtggaggaatttgtggctggctggatctctggatgaaactgattccaagacagcctccccgtg

SEQ ID NO: 759952 - DNA, 82 bp, Homo sapiens
acctcctgcgaggcctcccgggctccgggaaaactacactggccagcaaattgtggctactaatttgccccctgaagatcaa

SEQ ID NO: 759953 - DNA, 75 bp, Homo sapiens
gtccttacgtgacctaaagctggagtattttgagattggagaattaaggtgtttcccattaaacactaccaggac

SEQ ID NO: 759954 - DNA, 100 bp, Homo sapiens
cgcggccacttttgccttcccgggcctcccagaagttcctgccgaatcgtcttcgtcacccccggggtccgaggtagcctcccttacacagcctgagaag

SEQ ID NO: 759955 - DNA, 75 bp, Homo sapiens
cacaacatgcacagcctggcgacggctgcgatacctagagatgctgcttgagtaccttcaggattacacagatag

SEQ ID NO: 759956 - DNA, 82 bp, Homo sapiens
gaagaagatgaggaagatgactcggaatcagaagctgaaacagataacaacgaacttgatgcaagtgataggtttgccaagg

SEQ ID NO: 759957 - DNA, 83 bp, Homo sapiens
agggagagcaagaccatcatgctgcgcggccttcccatcaccatcacagagagcgatggcagatgattctggaccagatgaag

SEQ ID NO: 759958 - DNA, 101 bp, Homo sapiens
agtttgagagaagtttaagagaagaaatggacatgattgcctaaatcagccaaacacagggatttgcagatttacagaatggctgcacattaatggaaaga

SEQ ID NO: 759959 - DNA, 90 bp, Homo sapiens
ccaggagcggctccgcgccgcagtccccagttggtgcttcccgtgctgctgttgatgctggctttgttcccaatgacatgcaagttggac

SEQ ID NO: 759960 - DNA, 82 bp, Homo sapiens
agagggttggaattgcagatgtgaggtgagtgtggtccaagattcagtaaacatatcaggacatactaatacaaatactttg

SEQ ID NO: 759961 - DNA, 51 bp, Homo sapiens
ggaagtgaagtcagtgcctcagttgctggaaataatgcaaaaggtgtccca

SEQ ID NO: 759962 - DNA, 82 bp, Homo sapiens
gacaggctaacaccaatggaggctttacttcagacaaggcatttcagaagatggacacaaagaagaaggaggaacagttgaa

SEQ ID NO: 759963 - DNA, 100 bp, Homo sapiens
aatggagatgttgttgggcagcattcatttcctggcaggccagaagcggactcctagaagaggggagcagcaaggatggaatgacagccgtgggccggag

SEQ ID NO: 759964 - DNA, 81 bp, Homo sapiens
gagctccccactggctttggctggggacacccgactccaacctaaggtgactgtatatccttcaaagacccagcccctgca

SEQ ID NO: 759965 - DNA, 100 bp, Homo sapiens
aatgaatcaagaatcaatgcgtggaattctcctacacttcctatttatgaggtggagccgccaccaaaatgcagattttcgtgaaaacccttacggggaa

SEQ ID NO: 759966 - DNA, 100 bp, Homo sapiens
tgctcacagctgcccattgcctaaagaagcaagcaccggaagcaccccggcggccgcggtaatgctggtggtctgcatcaccaccggatcaacttcgaca

SEQ ID NO: 759967 - DNA, 73 bp, Homo sapiens
tgccttagcttccaagaatgctgaggttacagatgccaacgtccggcggtacctccagctgacacagtcagaa

SEQ ID NO: 759968 - DNA, 101 bp, Homo sapiens
gtcgtcttagatgttgattcagttttaaaggcaattggtttacagagaactggaaagcaagaggaagcctttactcttgcacaggaggtggcagcccttga

SEQ ID NO: 759969 - DNA, 74 bp, Homo sapiens
tggaaagttctgagacatcttgtagagtgacttcggtggactctgctccagctgccgtcaaatcagaatctcag

SEQ ID NO: 759970 - DNA, 101 bp, Homo sapiens
tgcaccagtgatctacgggctggagttccaggtacgtcttcaaataccatctcagcaggctgggagccaaatgaagaaaatgaagatgaaagagacagaca

SEQ ID NO: 759971 - DNA, 96 bp, Homo sapiens
attggccaatcatcaagacaagccagcagctcgctcagtacaagagccctggacccatccaaggacccctgcctgaaggtaaaatgcagccctcac

SEQ ID NO: 759972 - DNA, 75 bp, Homo sapiens
cttcatccgaaccctcagcctcaagccgctgctcttcgggatcagtgatgttcagtgatgtgtccatagacttct

SEQ ID NO: 759973 - DNA, 75 bp, Homo sapiens
aatatggtcaagcagaaagccttgcgagttttaaagcaaaagaggatttgggcagatgtacagagtcagctcagg

SEQ ID NO: 759974 - DNA, 100 bp, Homo sapiens
gcgcgctgcccgaggggagcaaggacagccacctggtttccatcgggcctatagttccccactctacagcaaccagcagtacgcttgtgtcaaagatctc

SEQ ID NO: 759975 - DNA, 100 bp, Homo sapiens
gaaaatgaagaaattggaggaggtgcagaaggtggacagggtaaaagaaagagacttttttctaaagaataaatgttgctgaagtgctgctgaaagggcc

SEQ ID NO: 759976 - DNA, 75 bp, Homo sapiens
cctattccactggattgggaaagaccatggcagattacgttaatggatgccaattatgtcatggatgaaactcta

SEQ ID NO: 759977 - DNA, 75 bp, Homo sapiens
cgggagacgagaagcctgaaaagtcgcagcgagctggagccgccggagatttcttcctgaagtccaggctccaag

SEQ ID NO: 759978 - DNA, 82 bp, Homo sapiens
gtaccggagtagcagtgtcctctctcatgaagaggccataggaaaaggatacagagtagagtttcatgaacctgaaacttgg

SEQ ID NO: 759979 - DNA, 90 bp, Homo sapiens
cgccagaaggaagatggcggatctggaggagcagttgtctgatgaagagaaggcgggctgcatgctgttcccccacatctccccctgtga

SEQ ID NO: 759980 - DNA, 97 bp, Homo sapiens
ggacgctggtggggactcgctctcggcttgaccgcattcttcctcccagggcgtgttggagagtttcctgggcactgctgtctctggagccatcttt

SEQ ID NO: 759981 - DNA, 50 bp, Homo sapiens
acactacgacagtgagaaaggagggtgagaaggactggcagaaatacgag

SEQ ID NO: 759982 - DNA, 74 bp, Homo sapiens
accctgaacatcctgatctcttcctgctgactgactctgagaaaggaatcccgttctgcttccagaagtggaag

SEQ ID NO: 759983 - DNA, 88 bp, Homo sapiens
tatgatgaggcaataagcagcttctttagaaatgtggacaccaggtagtgggcagcagtcagtgacaggtgtaacctctgtggatgac

SEQ ID NO: 759984 - DNA, 90 bp, Homo sapiens
cttattttttctcatggatgttcttcttcgagtatttgtagaagggggatcatcgtcttgctcttcttttatctcagtttgtgggtagcc

SEQ ID NO: 759985 - DNA, 75 bp, Homo sapiens
ttttagggtcctttatatagaagggagacaatgtagtagaaaagtgtgttactcatgcctcccgtgctgagagag

SEQ ID NO: 759986 - DNA, 83 bp, Homo sapiens
ggagctgggcgcggattcgccgaggcaccgaggcactcagaggagactcagcccacctgcacccaggtgaaataaacagcttt

SEQ ID NO: 759987 - DNA, 75 bp, Homo sapiens
cgggaactctgaacctcaataacgaggatggggctggtaagtagcaaaaagccggacaaggaaaagccgatcaaa

SEQ ID NO: 759988 - DNA, 75 bp, Homo sapiens
ctgagaaggacgcgcagtccatctctctcagaatcctggagccccactctgcactggccaacccacagagtgcca

SEQ ID NO: 759989 - DNA, 100 bp, Homo sapiens
tcgacatgagtgatgtggaggaaaacaacttcgagggcagacatccgcagtgtcatgcagaagtacctggaggaccggggcgaggtgacctttgagaaga

SEQ ID NO: 759990 - DNA, 75 bp, Homo sapiens
agagattgaaatgttccttagaaaggagcagcagtgtggcaaaggagcagagaactttgacaagttcttcacacg

SEQ ID NO: 759991 - DNA, 98 bp, Homo sapiens
agagaccagacaggatggtgagatacactactgctgcagctcacaaacacctctgcatattacatgtacctcctcctgctcctcaagagtgtggtcta

SEQ ID NO: 759992 - DNA, 98 bp, Homo sapiens
ggcaaggatggatcacctggagaacctggtgcaaatgggcttccaggagctgcaggagaaagggggctgacgtttaccctacgtcctggtgaggtgac

SEQ ID NO: 759993 - DNA, 90 bp, Homo sapiens
tctcctcatcaactggggatgattacagttcttcctaaaaaagggagagcttatggatggagaccaaacatccagatctggagtgccggc

SEQ ID NO: 759994 - DNA, 122 bp, Homo sapiens
atgtgggccctgaaaaacggagacttggatgaggtgaaagactatgtggccaagtgcatttgcacagtataacttggaccagtttactccagtaaaaattgaaggttatgaagatcaggtat

SEQ ID NO: 759995 - DNA, 83 bp, Homo sapiens
tggctactatccctcgggaggcgcctggccagagcctggtcgagccggaggaagccaccagggcctcggcttcacaggatggg

SEQ ID NO: 759996 - DNA, 75 bp, Homo sapiens
agaagaaacaaaagtgccaccgaagaggtagtcgactatgcccaacttgttcagccacgttttgataaagcccgt

SEQ ID NO: 759997 - DNA, 121 bp, Homo sapiens
gtatctcagttaaagaagatgaagaagtcttcaggggagattgtctactgtgggcaggtgtactcagtgcctatggggggtatgatggtaaggcagtcctttgccattggaggctccggga

SEQ ID NO: 759998 - DNA, 147 bp, Homo sapiens
ctcacacccatgcctatgatattcttctcctggttaatcaagaattctctatttctgctccgtcatccatgccactgtgtgacgtatgcagccaaaggctactttgacgccctggtgaagatgggggagctggccagcgagagccag

SEQ ID NO: 759999 - DNA, 98 bp, Homo sapiens
gagcctgggaggccggccggtgccagcacctttcggcttctgagacggcggcagcagcggcattcaggttgcagatattttattccaaactgcccaaa

SEQ ID NO: 760000 - DNA, 101 bp, Homo sapiens
ctctccctctccatggtctgggccaaccatctcttcctaggctgcaggtccagggatggatgggatcatggtgacctggaaagacaactttgactccttct

SEQ ID NO: 760001 - DNA, 89 bp, Homo sapiens
acagctcaacacggcacttccacagcaatgcaggcggggaccttataactaagacggctcttgacttttggcgggccggaagaaagagg

SEQ ID NO: 760002 - DNA, 105 bp, Homo sapiens
ctccgcggtccggcccggggccccgggatctcggctgtccttcctcccgggggatatgagactttctactcggaatatcctgagtgttgcgtggatgtaaaaccc

SEQ ID NO: 760003 - DNA, 74 bp, Homo sapiens
cgatccgctggcgctagtctgaccctccgccaggcaaaaggaagctccatcaagtatgatggtgaaggatgaat

SEQ ID NO: 760004 - DNA, 74 bp, Homo sapiens
tcttcgttatggacagcatccaaacattatcactctaaaggatgtaatgctaatctctctcttggccggaggtg

SEQ ID NO: 760005 - DNA, 89 bp, Homo sapiens
cccgcgtccgccgattcctcctccttggtcgccgcgtccttggctggcgttttgatgaaggccggaacaactttgaaggggaggtcacc

SEQ ID NO: 760006 - DNA, 73 bp, Homo sapiens
agagatgaggaagatccgagaaatcgtgctcagttacagttatattgccatgctagatagacgatcagctgaa

SEQ ID NO: 760007 - DNA, 100 bp, Homo sapiens
accggtgtctggcggatgcggtcgtgaagatagccgagagacacacaagattgcagtattttatgttgctgaaggacaagaagacaaacactccattctc

SEQ ID NO: 760008 - DNA, 101 bp, Homo sapiens
ccatgccgtcggagaagaccttcaagcagcgccgcaccttcgtgctgctcacggccgtgaactgctacagcgtgaaggccgccacccgggtccaggatgcc

SEQ ID NO: 760009 - DNA, 100 bp, Homo sapiens
aggaccccctccggctcaagtgtgtcaagcaagttaactgcctgtatccatggatcagctgctcttctatacccaatgtattggcaacacatatacatcc

SEQ ID NO: 760010 - DNA, 97 bp, Homo sapiens
attccaacgccaccaattccaacctgagtcagaggttccggttgagatcaagttgggagacacacccttgttcattctccttgagaagcagctatta

SEQ ID NO: 760011 - DNA, 96 bp, Homo sapiens
acgccttccagggggtcttcatcttcgtctttcactgcgccttacagaagaagggaaatgtttcaacgtgcgcaagcgttgcggcggcgggcagag

SEQ ID NO: 760012 - DNA, 90 bp, Homo sapiens
agcagccgatcatggcggatggcccccggtgcaagaggcgcaaacaagccaatcccaggaggaaaaacgttcccagaaatgaatgctatg

SEQ ID NO: 760013 - DNA, 100 bp, Homo sapiens
cttgcaaaccttgctttggattttatgtgctacagtctgcggaacggagcagtatttcaatgtggagagcctgccttctggtacaagatgcctgtggaat

SEQ ID NO: 760014 - DNA, 75 bp, Homo sapiens
tcccactgattctacattacggtgtcagctgtgatgcatgtttaaaaggaaattttcgaggtcgcagatataagt

SEQ ID NO: 760015 - DNA, 83 bp, Homo sapiens
atgttgacacgggctgggcgcccccagaagcccgggaacaaacataataacaaggactgttctggtgtgtccttacacctcac

SEQ ID NO: 760016 - DNA, 120 bp, Homo sapiens
gcaagtgagagccggacgggcactgggcgactctgtgcctcgctgagggtgctggagaatctggtaaaagcaccattgtgaagcagatgaggatcctgcatgttaatgggtttaatggag

SEQ ID NO: 760017 - DNA, 100 bp, Homo sapiens
cgttctcaaggagaaggcagacctgggatgaatgctatcaagtaagacaagtgtttgcccagaaacttcacaaaggcctttcccgtttacggcttccact

SEQ ID NO: 760018 - DNA, 100 bp, Homo sapiens
ccaacatcgcggtgcagcgaatcaagcgggagttcaaggaggtgctgaagagcgaggagtttatgcaactactgctgccaaccccagagagtcgtcctac

SEQ ID NO: 760019 - DNA, 75 bp, Homo sapiens
cccgctgcaggacgcgaacctctgctcacgcgtgttcttctgcccattccagatgatgggatttattggcaggcc

SEQ ID NO: 760020 - DNA, 100 bp, Homo sapiens
tcggaatcctatctagagcttacagacaatgcagatcttcgtgaagactctgactggtaagaccatcaccctcgaggttgagcccagtgacaccatcgag

SEQ ID NO: 760021 - DNA, 129 bp, Homo sapiens
gctgtacttgcctcatagctggtgaaggattcttctgaacccccaccctaccccctaaaggtatcacctgattttgatacagcagcaggaagcttgttcccagcctaccagaaacaccaaaaccgggcg

SEQ ID NO: 760022 - DNA, 76 bp, Homo sapiens
agcggccccgcgatgactcggactccacactcaagaagatgaagctgggccggaaggtggtggtcgtacgctgtga

SEQ ID NO: 760023 - DNA, 50 bp, Homo sapiens
ggtgaaggagtgtgtgcagcgatacagccccaagagcccctcgctacagt

SEQ ID NO: 760024 - DNA, 90 bp, Homo sapiens
ctcgcctcggatttgggggcttcctcactcgtggctttccgaaggctgctgatgagtgtgggtcagagagccaaactgactatatctcca

SEQ ID NO: 760025 - DNA, 100 bp, Homo sapiens
aggaatcccccgcaataccagagaagtccttgtaaagaggttcgtgcagcacttcggaagaggcctgaagaggagtatgctgaaattttcttctaaggag

SEQ ID NO: 760026 - DNA, 100 bp, Homo sapiens
tttcagttcttaggctcagcgtcagttacctgagagccaagagcttctttgatgtatgccgagattttgctgtcctggaggaccacaccctggctcacag

SEQ ID NO: 760027 - DNA, 75 bp, Homo sapiens
ggcggctctctggtccgcagcggcaacagtaacgaaaaacagggctgccaagactaaggggctgcagagcggggt

SEQ ID NO: 760028 - DNA, 100 bp, Homo sapiens
cactcttcaccctgcacagccttgttagtactatggactacaaattttggaaaatgtgataaaaacaaggtggaagattcttccaaggaaccagtgcgaa

SEQ ID NO: 760029 - DNA, 78 bp, Homo sapiens
cacgccgcacctgcgcaacctcgccgtggccatgtgcagccgctacgaccaggcctcctcttcccacctgtccagcag

SEQ ID NO: 760030 - DNA, 98 bp, Homo sapiens
gggaacctgatgtcctcatcttggcagtcgatgatgtgaagaaaggttacatcaaagcagaagaaaagtcctatcaattacagaagctatacgaacaa

SEQ ID NO: 760031 - DNA, 90 bp, Homo sapiens
agcgaaattaagggaaaatggatgtagaaaatgagcagatactgaatgtaaaccctgcaggtacttctaagtcaggagtacaatacaaag

SEQ ID NO: 760032 - DNA, 75 bp, Homo sapiens
gatacccttccatttcaaagaacagaatgctaaggaagctgtggcaaaggatgccttctccgggacagattggat

SEQ ID NO: 760033 - DNA, 141 bp, Homo sapiens
atctacgagctgctggagcgcgtggaggagccggtgctgcagaaccagatccgggagcacgtcatcgccatcgaagcaaaagctggcaggctgacagaggcggcctcaggacggaccttctggctactgaccgttttgctg

SEQ ID NO: 760034 - DNA, 75 bp, Homo sapiens
gatgaatatactttacttaccatccacacagtgcatgtaggactatctgctgccaaactcttgactgaatatggc

SEQ ID NO: 760035 - DNA, 75 bp, Homo sapiens
ggggtcttcccgaagccaggtccaagatgctgggctcttgcactgtttggtggaaatggtgagacaggatttgag

SEQ ID NO: 760036 - DNA, 95 bp, Homo sapiens
cggatgatgaagtagtacagagggaactctaatgatccaggacaaagaagttaccctggagtatgtatcaagcctggatttttggtactgcaaac

SEQ ID NO: 760037 - DNA, 115 bp, Homo sapiens
ctcagttctgcgctgctcccgttccccctccccagagcaaggccgccagatcccacccttggacccccatgaaaatggaaacaatggaacaatcaaagttgagaagccaaccatg

SEQ ID NO: 760038 - DNA, 100 bp, Homo sapiens
gaacagggcagacttctctgtgagctcttcattagggcaccaaagcgaagggtggcattgtgtgtcccagagtgccggagcgagtcccagaagagaggcg

SEQ ID NO: 760039 - DNA, 82 bp, Homo sapiens
agccaggagcagcagcctttctcaaattgtggctactaatttgccccctgaagatcaagatggctctggggatgactctgac

SEQ ID NO: 760040 - DNA, 76 bp, Homo sapiens
atcaggtggaacagattcagaaggagcaggattaccaaaggagaatggatcttggagaatgtctgaaagtccatga

SEQ ID NO: 760041 - DNA, 49 bp, Homo sapiens
ggaacccccgcaacatgggcacgaagccacagaagaagtttctttggac

SEQ ID NO: 760042 - DNA, 50 bp, Homo sapiens
atgtggactgcagtgctgcagtgccaggtgaatgaaatcctgtgccgttc

SEQ ID NO: 760043 - DNA, 100 bp, Homo sapiens
gattctctcaggacaaacagtgcttccttctctctggtaatgcccaggaaaccagaaaggatctttggaattagacactccttcacagccagtgaacaat

SEQ ID NO: 760044 - DNA, 75 bp, Homo sapiens
gctgtcaggctacatcagcaaagggcccgaccctgcccgccctggactggcagctgccgtcccactcaggcccgt

SEQ ID NO: 760045 - DNA, 51 bp, Homo sapiens
agatgtattgcaggggaatctgtattgttgcagcatctggcagtgagactg

SEQ ID NO: 760046 - DNA, 85 bp, Homo sapiens
cagcaagcggggccggtggcgcccgtgtcggagaccccgcgccggaccctgaggcagcgaccccctacagaagctaagcagcatg

SEQ ID NO: 760047 - DNA, 75 bp, Homo sapiens
caagcacctcgggatcccattccttcacagggaccctagccaggtttcagcaacatttgctgcaagtttagtcac

SEQ ID NO: 760048 - DNA, 75 bp, Homo sapiens
aagaatcagctggggcagaagcgcgtggtcaaggttggatggcaagcatgtggtgtttggcaaagtgaaagaagg

SEQ ID NO: 760049 - DNA, 90 bp, Homo sapiens
ggagcctccgctgcagcgcgatctgcgcgaccagaccggcccccccgaggaagctcttcgtgggcggtcttgactggagcacgacccaag

SEQ ID NO: 760050 - DNA, 100 bp, Homo sapiens
cgagagcctaactttgcaaccattggtctgcaggacatcactttagatgatggagaatgcagttgaaactaattttgtggatagagaaactgttggaact

SEQ ID NO: 760051 - DNA, 100 bp, Homo sapiens
ccggctctggagtgcgggcgggggcgacagggccgattccggagtgggtacaaagtagatttcatagaagagaaggcatctcagaaccctgagagaatag

SEQ ID NO: 760052 - DNA, 82 bp, Homo sapiens
attgatatatgtaaattacggaagatcatttatatacacatgggttacacatcattttggaatgactgtatatcatctggat

SEQ ID NO: 760053 - DNA, 96 bp, Homo sapiens
gcctcctccagctgttgttgctgctgatcatatactcctatgaaaggaggaatctccaatgtatggtttgacagatttaaaataaccaatgactgc

SEQ ID NO: 760054 - DNA, 82 bp, Homo sapiens
atccgccaggagccctcttccttcaggtttggaaggcgctttgagtccccgctgctgtggcagagcgccatcatgatcctga

SEQ ID NO: 760055 - DNA, 87 bp, Homo sapiens
ccgcagcagtcagggacatttctgaagcgagcgtcttcgatgtttttggctttcacccccaaccagtgaccaaagacttgaccactc

SEQ ID NO: 760056 - DNA, 101 bp, Homo sapiens
aaacttctgttggtacattgttagccaaaatgaagacctgtgttgatacctataccaaccgtttaagaatcatttgctgtttcaaatagagaactgtgcga

SEQ ID NO: 760057 - DNA, 50 bp, Homo sapiens
actctgaaaagatggctaaattaggtactgagcagtacagtgaatacaca

SEQ ID NO: 760058 - DNA, 50 bp, Homo sapiens
ctcccgagtagctggggctacaggaataaagatggctgctgaaccagtag

SEQ ID NO: 760059 - DNA, 102 bp, Homo sapiens
gcgagccagcgagccgccgacccgccgagcaaaatgccagtgttttagaaggagtatgtggaagggcaaggagtacctatagaaccccggaggagggtgagg

SEQ ID NO: 760060 - DNA, 75 bp, Homo sapiens
aaaaacaagactggggctgctcccatcattgatgtggtgcgatcgtttggaaattttagcattcaggtgccagga

SEQ ID NO: 760061 - DNA, 97 bp, Homo sapiens
caggaattcacacctgacctcggtgacctcagagagtgagcaggcatttctggtagagttcacaagtaaagtgtactactggatcggtctcactgac

SEQ ID NO: 760062 - DNA, 101 bp, Homo sapiens
cggagaggtagccatgatgccccacttggtgaatggagatgcagctcagcaggagccagcaccgctctttgaccttgccatgcttgccttagatagtccag

SEQ ID NO: 760063 - DNA, 100 bp, Homo sapiens
taaaggacagccaagctcagcggatggccgaaaatctaggcttcgttgggcctttgaaaagccagagggagaaccgaagattacaggaggccagcatgag

SEQ ID NO: 760064 - DNA, 49 bp, Homo sapiens
acggcaacgtcaccttgacggcagccttgttagatgacttggataaaga

SEQ ID NO: 760065 - DNA, 73 bp, Homo sapiens
gcagcttgcgtttggggctttcgacatgacaggtcactagaggtggacccccaaaagtacaagggcatattta

SEQ ID NO: 760066 - DNA, 82 bp, Homo sapiens
tctgaggctgtcgggtctttgcgggttgcggaagggggccccaatacccttcttcttcagagacgtctcccacaacctgctc

SEQ ID NO: 760067 - DNA, 90 bp, Homo sapiens
ctttaaagaaggcaaggagagaatgtatgaagaacagtcacaggacagagcctaatgggaggtgactggatcatgggagcagagttctct

SEQ ID NO: 760068 - DNA, 112 bp, Homo sapiens
gggcaagtgagagccggacgggcactgggcgactctgtgcctcgctgaggacaatgcagatcttcgtgaagactctgactggtaagaccatcaccctcgaggttgagcccag

SEQ ID NO: 760069 - DNA, 74 bp, Homo sapiens
aacaattggaaaacaattacttaaggtgcttttcagtgggaagaattggaagaagatatcaggaagaagttgaa

SEQ ID NO: 760070 - DNA, 101 bp, Homo sapiens
gctgggaaggcgtgggcgacccggtgtgtggcgcgcccagagccccgcgtttcagccctagggaagggtgaaaatgtttgccattaaactcacatgaagta

SEQ ID NO: 760071 - DNA, 50 bp, Homo sapiens
ggggagttaactgattctgacaaggaaagagctccagagattatattggg

SEQ ID NO: 760072 - DNA, 100 bp, Homo sapiens
gaatctgtcacagagggagatgtcaggtgggagaaagagttcacccagggcatgatcttacctacaatgaatggagagtcagtagacccagtggggcagc

SEQ ID NO: 760073 - DNA, 74 bp, Homo sapiens
cctgtagacaccttcagctgggacctgcccatcaaggaaaaagagcctgtggatttctcagtcaaatctcaagc

SEQ ID NO: 760074 - DNA, 82 bp, Homo sapiens
gaagaccccgaaggaaaaggaggaattcgccgtgcccgagaatagctccgtccagcaggcccagattattcatcagcatggc

SEQ ID NO: 760075 - DNA, 114 bp, Homo sapiens
ttcgtcgtggcaacgttgctggtgacagcaaaaatgacccaccaatggaagcagctggcttcactgctcaggtgatctgtgaaaatggttcgctattcacttgacccggagaac

SEQ ID NO: 760076 - DNA, 100 bp, Homo sapiens
tcgatttggatctgggatgaacatgggcaggataaatggtgtgatccctcacatccacaaatctctgattggaaagaagggacagcagaaaactgcttag

SEQ ID NO: 760077 - DNA, 82 bp, Homo sapiens
tcaagtacaccatgcacaaggtcttccagtttctgaacctagctctaagcgaaagacatgaggcctcagcctgaaatgaggt

SEQ ID NO: 760078 - DNA, 100 bp, Homo sapiens
aagccagcgagctcctcagcctcagcaattctgtggtgttcttggtcacacatttatggagtttctgaagggcagtggagattactgccaggcacagcac

SEQ ID NO: 760079 - DNA, 75 bp, Homo sapiens
cggccagccagtcatcaaacgggcattgacgttgtgaggaataaaattaaaatgtttgctcaacaaaaagtcact

SEQ ID NO: 760080 - DNA, 90 bp, Homo sapiens
cccacgcggcgccagttctccggcgggaaggaaaaccgcgcagagagtgttctctgtcttcatcagaagaagaaagatttatttccatca

SEQ ID NO: 760081 - DNA, 100 bp, Homo sapiens
gcaaagtgaattgcagagtcagaaagccaaacttggccctgctggcaacaaagtcatcagtccctctgaagacaggaaacaaccttccaacaaccttgac

SEQ ID NO: 760082 - DNA, 87 bp, Homo sapiens
ttcttgaaaggaaatgtattaagaacgaagcaatatccttagaagaaataagaattagagtagtacaaatgcttggatctctaggag

SEQ ID NO: 760083 - DNA, 75 bp, Homo sapiens
acagaaggcatatgaatccaaaattgattatgacaaggatgatgatgctgaagctatccttgctgcagacttcga

SEQ ID NO: 760084 - DNA, 100 bp, Homo sapiens
attttgaatgttgttggaatgagatgtgaatggcagatggataaaggaagacgacctcttcagctcggatgcccggcagtgtcatacccccgcccctggt

SEQ ID NO: 760085 - DNA, 82 bp, Homo sapiens
cgggtgcgctgctcaaggacacggtctacaccgacttcgacggtatcatgatattagctggtttgacatcaagtcatttgtg

SEQ ID NO: 760086 - DNA, 73 bp, Homo sapiens
gccagttgaggagattgtaacctttctaaagattggtgcttcccgtgctgctgttgatgctggctttgttccc

SEQ ID NO: 760087 - DNA, 50 bp, Homo sapiens
aggagtcatgcccagtgtgtgaaggaatccggtcagtgagtttctacgag

SEQ ID NO: 760088 - DNA, 119 bp, Homo sapiens
ataagattagcaccattgaaagaggagcattccaggatcttaaagaactagagagacttttcactgttacatgccttgaagtgatgaggaggtttctgttactatatgctacacagcag

SEQ ID NO: 760089 - DNA, 90 bp, Homo sapiens
agcagatagcatactttttctatgttcaccaagtgaaagtaatttttctcccaagtttaacgaaaaggatgggcatgttgagagaaagag

SEQ ID NO: 760090 - DNA, 75 bp, Homo sapiens
cgggacccggtgtctgctcctgtcgccttcgcctcctaatccctagccactatgtttgtttcgacgccggaccgc

SEQ ID NO: 760091 - DNA, 82 bp, Homo sapiens
cgtccgagtctccgccgctgcgggcccgctccgacgcggaagctgctgatgcaaggaatcccctgggctcccgtccactcca

SEQ ID NO: 760092 - DNA, 100 bp, Homo sapiens
tgattttcaagctcttgcattagaatctcggggaatgggagagtttttgcctgtatacatgcacattcgagttctggttgctgcatatttatttcagaca

SEQ ID NO: 760093 - DNA, 101 bp, Homo sapiens
ggtgtttccaggaagttcagagagaacagtgaatccctgttgttactatccatgccagcaccagggcatctgtgtccgcttcggccttgaccgctaccagt

SEQ ID NO: 760094 - DNA, 90 bp, Homo sapiens
aggaagtactgagcctgttggaggaactggcccggaaacaggaggaccagggagagcaacaagccccggccctcagagctcagccggatg

SEQ ID NO: 760095 - DNA, 75 bp, Homo sapiens
ttctaatccaagcaataacccaagcaaaacttcagatgcaattcttctttactgccaaccaggtaaagatttaca

SEQ ID NO: 760096 - DNA, 100 bp, Homo sapiens
aaacggagacttggatgaggtgaaagactatgtggccaagtcccctccagggcaggtgactgaggccgtgaaggtggccattgacgtcgggtaccgccac

SEQ ID NO: 760097 - DNA, 74 bp, Homo sapiens
ataaatggcgccgaagcaggacccgaagcctaaattccaggaggggggacttgatctcatcttcatgccaggcc

SEQ ID NO: 760098 - DNA, 82 bp, Homo sapiens
gatccgtatactgcagcaggattggctgcagcagctacattagcaggtacagtctttgcccgctgcctgatttttcctctca

SEQ ID NO: 760099 - DNA, 95 bp, Homo sapiens
gtacccctatgatggcatccacccggacgacttgtctttcaagaaaggagagaagatgaaagtcctggaggagccaaatttgagtttcatcatgg

SEQ ID NO: 760100 - DNA, 74 bp, Homo sapiens
ggcctgaccgggataagctccaggtagttccaatttgccagcagaatgagtacagaaagagactcagaaacgac

SEQ ID NO: 760101 - DNA, 100 bp, Homo sapiens
ctctggttcagactgcagtaaccatcctcaagtaccgtaagggtgatgaagatagccttatggagaaaatttccaaactgaacatccactccatcatcaa

SEQ ID NO: 760102 - DNA, 83 bp, Homo sapiens
ccggccccggacggagcgccggccgcaccaccgccctctggccgttgcctcaccggggactttgaacatgtcggggatcgccc

SEQ ID NO: 760103 - DNA, 96 bp, Homo sapiens
ctttttcaccatttggacaaataatggaaattcgagtctttccagataaaggatattcatttgttcggatatgctgcaggctgctagtcattatcg

SEQ ID NO: 760104 - DNA, 100 bp, Homo sapiens
gatggctaaatgacttggtgaccaaaaacatgacctttgacctgccatcagatgccacagtggtgctcaaccgcagctcctgtggaaaagagaacacttc

SEQ ID NO: 760105 - DNA, 100 bp, Homo sapiens
ggaaggagccacctcgtgcacctgtgaccgaggctttttcagagctgacaacgatgctgcctctatgccctgcacccgtgagaacccagaagaaaggcgg

SEQ ID NO: 760106 - DNA, 90 bp, Homo sapiens
agtcaatccgccgagtcatatggggacctttcggaggaggtgcaatggatgagcttcatagtctggatccaagaaggcaagagttattgg

SEQ ID NO: 760107 - DNA, 100 bp, Homo sapiens
ttcaacgacaccaagctggacgctgtcctggaggaattcaagcgaggtgtcctctccctccccgcatacttcagcccctacaacggcgggtccctgggcc

SEQ ID NO: 760108 - DNA, 74 bp, Homo sapiens
caggtgaccggcgcgcgggagcgctacggccccaacgggcagctggtggaatttttgaagaaaatggaatctcg

SEQ ID NO: 760109 - DNA, 91 bp, Homo sapiens
ggggactgcacgtagcccggcgctcggcatggctctcctggtgctcggttgacatcatggacatatgtgagtccatcctggagaggaagcg

SEQ ID NO: 760110 - DNA, 49 bp, Homo sapiens
ctcacatcaacttctaccagctgcatagttgttgcccaaatctcttggt

SEQ ID NO: 760111 - DNA, 100 bp, Homo sapiens
ccagggtgtcaggactaagagaagtcacaaaacagcagatttcccaagagcagcggaaaatgatccagtcacagattcaagtccagcatccagcggccaa

SEQ ID NO: 760112 - DNA, 101 bp, Homo sapiens
ccacaagatccactatgcggcctccagtctgatccccccagaggccatcgaacggagcctgaaagccatccgggacaggctggcctgacatggaaggtgaa

SEQ ID NO: 760113 - DNA, 96 bp, Homo sapiens
ctgggatgttggcagccacttcaaaatcagacctctgtggcagcattttttccagaacacaaaagagagagctgcaggtctctgctgccgcctagt

SEQ ID NO: 760114 - DNA, 100 bp, Homo sapiens
gcgtcggaaagcgacaccgaggaattctatgatgcccctgaagatgtgcacctagggggcggctaccccgtggggaaaatggcattcctatgaagaaagc

SEQ ID NO: 760115 - DNA, 73 bp, Homo sapiens
ccttggtctgagtggactgtcctgcaggagcgagaacccgagcagcgccatgagcaacactaccgtcgtcccc

SEQ ID NO: 760116 - DNA, 98 bp, Homo sapiens
aatttcacctttgaattcagccagtggtcacagctggatgtttgcgacatcccagagagcttccagagtctgagaaacatcttacctattacaacagc

SEQ ID NO: 760117 - DNA, 98 bp, Homo sapiens
ggaggttggcatctacaggatatcgggcgtggccacggacatccaggcgctcaaggccgtcttcgatgccaagccactgctggtgaagctggtctcgg

SEQ ID NO: 760118 - DNA, 98 bp, Homo sapiens
accctgctccacgatgcggtaatgaatccagcagaagatccgatcacataggacagtatgcaccttaagatcctgaagaaacggcacaaaatgttcaa

SEQ ID NO: 760119 - DNA, 75 bp, Homo sapiens
agaaacaccaaaaggaatccgcaggctgacgttcctcagggagtgattcgagtgcaagctccccatctttcgaaa

SEQ ID NO: 760120 - DNA, 74 bp, Homo sapiens
tctctacatcccatctcaatcagaattactagattttctctcaaactacgaggcaatttttacccagaaaagca

SEQ ID NO: 760121 - DNA, 100 bp, Homo sapiens
gcgctgcaacacaagatcaagaactccatctggtggaggagaaccgccagtaccgcatgcacagcctgcagcacaaggccgccagctccatctacatcaa

SEQ ID NO: 760122 - DNA, 75 bp, Homo sapiens
ggcagctaagggccctttcctgctgacttcaggcccgcatagctcataggatacaagaactggaaaatctgcctg

SEQ ID NO: 760123 - DNA, 51 bp, Homo sapiens
aagtctacaagaaagcagtggaaagttggtgagatggcaaagcagtatata

SEQ ID NO: 760124 - DNA, 74 bp, Homo sapiens
acgggcatccatggctccaccttctccagcaccacactcgaggcttcgtgacggagttatcagagacattgaga

SEQ ID NO: 760125 - DNA, 89 bp, Homo sapiens
catgagcaagaaaagcctctgggagcagaagggaggctccaagacctcatcaacaattaaggcttgctatgggtgttctccaggatcaa

SEQ ID NO: 760126 - DNA, 83 bp, Homo sapiens
ggtctcaatctctggaaaaacttcttgccaaccaaaatcatccagacttgaaacatatcgacccagtggttttaaaacattgt

SEQ ID NO: 760127 - DNA, 74 bp, Homo sapiens
cagctggctggcttcagtggaccaaaatgagccgtcagactgctacagcattacctaccggtacctcgaagtgt

SEQ ID NO: 760128 - DNA, 100 bp, Homo sapiens
gaaggagaacaccccgagcgaggccaaccttcaggaggaggagatggggcgcctacccttcttcagcaagatgggaacagctgagtctgaaggaagagaa

SEQ ID NO: 760129 - DNA, 101 bp, Homo sapiens
caatgctaccctgctttttctggtgtcctgaacctggaagttgtgctttttaaggaggctgttattgaaaatcgagccctgtggatgatgattaaaagatg

SEQ ID NO: 760130 - DNA, 87 bp, Homo sapiens
ctgctttgcacagctttgccacaaagcccagtctgtgtctcaaatcaaccacaagctggaggcaatgcatgaaccattgcaaacttg

SEQ ID NO: 760131 - DNA, 99 bp, Homo sapiens
gcggcgtgtcaggtggttgcggagctggtaagattcttggtgccaccattgagaactccaggattgtcctgcagatcgacaatgcccgtctggctgcag

SEQ ID NO: 760132 - DNA, 100 bp, Homo sapiens
cggggagttgcggagcccgcccgccggcagcgccgctccccagggagggagtccgcagcctgagggtatttgaagtataccatacaactgttttgaaaat

SEQ ID NO: 760133 - DNA, 75 bp, Homo sapiens
cccagctgagcgggcggtcattcgcatcgcagacaatgcagatcttcgtgaagactctgactggtaagaccatca

SEQ ID NO: 760134 - DNA, 80 bp, Homo sapiens
agcctcccaagaagctgggactacaggggccggggctgttcctgaggatgcagctggtgccctccatagaagagagggag

SEQ ID NO: 760135 - DNA, 100 bp, Homo sapiens
cgcctacttcctgtcccactgccacaaagttggtcgcattatgtttcagctcttctcagacatatgtccaaaaacatgcaaaaacttcctttgcttgtgc

SEQ ID NO: 760136 - DNA, 88 bp, Homo sapiens
caccaacagatgaagacagatgcaccaacgaggttgtttacattcagagctctatcaataagaggaatacatattacagtgaattcga

SEQ ID NO: 760137 - DNA, 100 bp, Homo sapiens
ctgtcctccgtttagtctcctcctcggcgggagccctcgcgacgcgcccggcccggagcccccagcgcagcggccgcgacaagttggatggcttgaggac

SEQ ID NO: 760138 - DNA, 75 bp, Homo sapiens
ggaaggtggcggtggtgaaggtgcaggccgttggggcggctcagaggcaggaattgaatgatctggcacgggacc

SEQ ID NO: 760139 - DNA, 98 bp, Homo sapiens
agaagaggctggaaaagagggtggaaaaagcagggaggttatgaggcttaataaagaaggccccttcacagatgtagtcactacaaatcttaaattgc

SEQ ID NO: 760140 - DNA, 82 bp, Homo sapiens
aggagaagtttttatcaacaaaggcaaaggattcggatttattaagcttgttgttcatcgagacctgaagccgagtaacatc

SEQ ID NO: 760141 - DNA, 75 bp, Homo sapiens
acccggaaaaggtcttcatctgagagtacttcttcaacagagtgttgaatttcatgaaagaggaaagaatcataa

SEQ ID NO: 760142 - DNA, 100 bp, Homo sapiens
acagaaatatcccaagcttattcagggacctctacaaggaaaggtatgctgtaagcatcatgtgggaactggataaagcctcttatgaaattaagaaagt

SEQ ID NO: 760143 - DNA, 101 bp, Homo sapiens
gaaacttctgagcaacagatctaaagccctggtggtaactgtgacatttgatgatgtggccttatatttttcggaacaagagtgggagatcctggagaagt

SEQ ID NO: 760144 - DNA, 100 bp, Homo sapiens
ctgcgagccttcttcccggggcgccataaacgcccccaatttcccagctgctaaaggaagaggaaggtctccatcatcaccagttccagtagtgaaaaac

SEQ ID NO: 760145 - DNA, 80 bp, Homo sapiens
tggctggaacaagaagagtctaggacagtgcagagaggtgatttccaaggatgcccggccatccacccccgctgccgctg

SEQ ID NO: 760146 - DNA, 83 bp, Homo sapiens
ctttggaggatgcggctttgatggagttatgcccagccaagtcttcagtatatccaggggcaacagattttcacagctcatcc

SEQ ID NO: 760147 - DNA, 98 bp, Homo sapiens
ccattccggaggacaaaggaaagtgtgctaataaggaccttaaagaagccaacttcgacatcaatcagctatatgactgcaattgggttgttgtcaac

SEQ ID NO: 760148 - DNA, 100 bp, Homo sapiens
cagccttgaggtcataagcatcctcaggaaaatgcaccagggacacttgacattcagggacgtggccatagaattctctcaggaggagtggaaatgcctg

SEQ ID NO: 760149 - DNA, 100 bp, Homo sapiens
cacacctggatccaggataacggaggctggcttaaccagctcgaaaaagcagtggaagcagctcacacatttttcgtggctaaccctgagcacatggaaa

SEQ ID NO: 760150 - DNA, 100 bp, Homo sapiens
gctcccagcaatgtcaggggaaacgcagaacaccatgtggcacatcgagatccaggaggggcgactcgaggccttccggacagctgaccgtgaggaggtg

SEQ ID NO: 760151 - DNA, 83 bp, Homo sapiens
ccgggcgctcgagacttaccagagccacaagatggtgatggaatttcctgataatgtgttaaatctcgatggacatcagaata

SEQ ID NO: 760152 - DNA, 75 bp, Homo sapiens
cagattcgcagtggtcgcttcttctccttggagctggccctcagcgcactcctgaagttcgtgcagctggaagga

SEQ ID NO: 760153 - DNA, 75 bp, Homo sapiens
gcccggcagacggctcagggaatggagtaaaagttttgtttgtgagaaacttggctactacggtgacagaagaaa

SEQ ID NO: 760154 - DNA, 97 bp, Homo sapiens
tttgaagtcatccctgagaatacggtgatctatggtgcagactgccttcgtcgggtgcagactgagcgaccgcaggatttacttaaatccattgttt

SEQ ID NO: 760155 - DNA, 83 bp, Homo sapiens
cccgacctgttcatcacaggatacccaactttaagcaaattgtggctactaatttgccccctgaagatcaagatggctctggg

SEQ ID NO: 760156 - DNA, 75 bp, Homo sapiens
cagaatgtctttgcaccaagaaacaagaacttcaacatccatggaacgattcaattagcagagcctcacagacaa

SEQ ID NO: 760157 - DNA, 98 bp, Homo sapiens
gccgagcaggctgagcgatacgacgcatgcagccagtaaagatcccagagaagttcgagaagctagagatcataaggaaccaaaagaggagatcaaca

SEQ ID NO: 760158 - DNA, 90 bp, Homo sapiens
gtcagtcagaggggcgagcaggagcgattccgtcgccaaacaggttcatcatgcctagtggcgtataagaagaccccgccaccggtccct

SEQ ID NO: 760159 - DNA, 101 bp, Homo sapiens
accacatagacatttacgcggatgtcggcgaagagttcaaccaggtacatgtcccagagcaagcacacggaggcccgggagctcatgtactcgggagccct

SEQ ID NO: 760160 - DNA, 96 bp, Homo sapiens
caggggcccccgctcccgggctcggcggcgcgggtgaacgtgagcggtaccaggatcatctatgaccggaaattcctgatggagtgtcggaactca

SEQ ID NO: 760161 - DNA, 71 bp, Homo sapiens
tggatgaagttgttcattgtttgtcaccacaaaaaggacagttgaagagcaatgttcttaatgtcaataat

SEQ ID NO: 760162 - DNA, 98 bp, Homo sapiens
tttattatgcaggtggtctgtgaagccacacagtgtccagatacgaggttattagaggaagtaacacaaggggatatgagtgcagcagacacatttct

SEQ ID NO: 760163 - DNA, 100 bp, Homo sapiens
gcgctacctgcacgtacgcccccagcctttggctggagaggatccccctgcttaccaggcccgcttgttacaggtaaacgagatcaactttgagaacatg

SEQ ID NO: 760164 - DNA, 98 bp, Homo sapiens
taacaagttggactgaacacattgtatctcaggaattaagaatttttcctaaaagaaggcaccgaccgtcacgagctaacttcctggaagagctttcc

SEQ ID NO: 760165 - DNA, 82 bp, Homo sapiens
aactcaggaggcaggatcagcggctccattttacagaaagaagatgctgatatgctacaacacggatgaacctggaggacgt

SEQ ID NO: 760166 - DNA, 100 bp, Homo sapiens
ctcaaccggatcatccaggcgctgaagggcaccatcgacccgaagttgcggattgcagccgagaacgagctcaaccagtttccgttactatggcaatgac

SEQ ID NO: 760167 - DNA, 88 bp, Homo sapiens
acatgcgtttcatacagaagtacctgcttcagagacatgagaagattcatactgatggtactgtctagttgcaggaaaacaagctcag

SEQ ID NO: 760168 - DNA, 74 bp, Homo sapiens
gactgttgagtatgctccatgtagatcactgccgcagaatggaattcggcattgttcctacacagcttctcggc

SEQ ID NO: 760169 - DNA, 51 bp, Homo sapiens
agcttcctgagtagctggaactacagcatgtgtttgatgatctcagaggct

SEQ ID NO: 760170 - DNA, 83 bp, Homo sapiens
agaccggcacccagacaggtggcgacggcagaggagtactggctgtgatcgaacttctcaaccctcagagacttagatcttcc

SEQ ID NO: 760171 - DNA, 99 bp, Homo sapiens
cgccgcgtcttcccggtctcctttcccggccgcacaggctcttccaccaaagccacctaagccaatgacttcagcagttccaaatggaatgaaggacag

SEQ ID NO: 760172 - DNA, 100 bp, Homo sapiens
caaattgtacatttgcccattctcaggaagagcttgaaaaatgcctgggaaccactcacctccttctgtgccatgaggccacctcagccctgacaccaac

SEQ ID NO: 760173 - DNA, 75 bp, Homo sapiens
gaatcttcaatcaatcatatttcacaagggaatccgtaccagagtaccagatggcttttcagacagaggttggaa

SEQ ID NO: 760174 - DNA, 100 bp, Homo sapiens
gtagacaaaaccataataaatgcagataaggatggagatggaagaatatcctttgaagaattctgtgctgatcttatggttggtgatgaggcaagtgaat

SEQ ID NO: 760175 - DNA, 95 bp, Homo sapiens
caagatggaggggcctttgtccgtgttcggtgaccgcagcactggggaaacgatccgctcccaaaacgcgacttgaggagattatgaaaagaacc

SEQ ID NO: 760176 - DNA, 100 bp, Homo sapiens
acaagatcatgggcaaaggacagatccagttatggctgcagcttcgattgccaatattgtaaaaagttctcttggtccagttggcttggataaaatgttg

SEQ ID NO: 760177 - DNA, 88 bp, Homo sapiens
ggaactccgccatgtcatccacttcgcccaacctccagagccataagtgtgatccttggtgacaggtggaagaaaatgaagaatgaag

SEQ ID NO: 760178 - DNA, 100 bp, Homo sapiens
tcgtgcttcctgtatagctgcagaacttgttatagttttgccgctggactcttccctcccttcccccaccccatcaggatgatatgagacttgaaagaag

SEQ ID NO: 760179 - DNA, 75 bp, Homo sapiens
ttgctcattaacagaaaagaagaggagaatgctaagcagagatgtttggatctggccgagaacataactttacac

SEQ ID NO: 760180 - DNA, 83 bp, Homo sapiens
ggatatcgacgtcgtgatccagaagtccagagctgaggactgcctgtttgcaggtctcggcgcggaagatggccggcggcgtg

SEQ ID NO: 760181 - DNA, 100 bp, Homo sapiens
aggccatcgacccccagagcaacaatagcctaacatggcagaccagagacagcgctcactgtctacctctggggagtcattgtaccacgtccttgggttg

SEQ ID NO: 760182 - DNA, 100 bp, Homo sapiens
ctttggtcgcctccgtgggcctcaatgagccagcccctgggcaacaaagtggaaatggagattgtgagcatgttggaaaaaaacgcaacacttctcaaat

SEQ ID NO: 760183 - DNA, 73 bp, Homo sapiens
aactatggatgctgggaaactgcttcgagctggtccatttgatgagttccagattgctaccatgctaaaggaa

SEQ ID NO: 760184 - DNA, 82 bp, Homo sapiens
tcaccactcatttgcaacttatatcgccagtccagcagctaaggatattttgtgcagaaagttcaggagccctggaaaggag

SEQ ID NO: 760185 - DNA, 101 bp, Homo sapiens
ctcaccaagaagatgaagaagattgtggatgccgtgatcaagtacaaggacagatcccagatgcagtgactggttactacctgaaccgtgctggctttgag

SEQ ID NO: 760186 - DNA, 100 bp, Homo sapiens
ctagactccatcactgtccctccgcagaatacaaagggcagagcggcttgggtaaatccaccttaatcaacaccctcttcaaatccaaaatcagccggaa

SEQ ID NO: 760187 - DNA, 100 bp, Homo sapiens
gggggatggtattacttttggagtgtttggaagtaaattcagggcctgccttaagtgtgaaagtaatgactgatgaaagtggaaaatccaaaggatttgg

SEQ ID NO: 760188 - DNA, 100 bp, Homo sapiens
gagcacttcctattccactggattgggaaagaccatggcaggacctagatgtgaaggctggtggaggctgtgtaatgaccattggagaaatgctacgatc

SEQ ID NO: 760189 - DNA, 75 bp, Homo sapiens
gggagaaggactgcgagggtggagcggatgaggccggctgtgctacctcacgctggcagcgaaggggaactctac

SEQ ID NO: 760190 - DNA, 85 bp, Homo sapiens
ggtcaaagcagatcgtgaggaggaagctgggtttgactgccgatgtggaaatttgttttgtggacttcaccgttactctgacaag

SEQ ID NO: 760191 - DNA, 74 bp, Homo sapiens
ctgagccgggagcgctgactggcccggctgggcagggaatcaaccctgcctaccggactgaggatgccaatgag

SEQ ID NO: 760192 - DNA, 75 bp, Homo sapiens
cattaagtcaaatataagagtctgactacttgacacactggctcgtgaccacaactgaaatcactcatcatggaa

SEQ ID NO: 760193 - DNA, 51 bp, Homo sapiens
gacaccgcacagccgggaaatgaacacactgttgcagcagctaggagtggc

SEQ ID NO: 760194 - DNA, 75 bp, Homo sapiens
tgctgctggtggccaacattttgcggatactcttctgtttcatgatcaacatgggagactcccacgtggacacca

SEQ ID NO: 760195 - DNA, 100 bp, Homo sapiens
agaggtcagtaactaaattggagaaaagcattgatgacttagaaggcgtcctgcctctgcggctctgccccctgcatcctgtgcagctgctgccccgcca

SEQ ID NO: 760196 - DNA, 82 bp, Homo sapiens
tgcccttcacctgcagaagcgtgtcgttctgcaccagcgccttgatcgagtacttgagaggctgggaggcggcagaatgcag

SEQ ID NO: 760197 - DNA, 100 bp, Homo sapiens
agcacagcaatgcactggtggacgtgctgccccccgaagccgacagcagcatcatgatgctcacctcaggtaaattgggatattcacaatgtatggaaac

SEQ ID NO: 760198 - DNA, 52 bp, Homo sapiens
gccaacttctgctacagacgactcaaaactggcgatggaatatgagaggagc

SEQ ID NO: 760199 - DNA, 100 bp, Homo sapiens
cttgaatgttgaagatgtccttaccagctttgacaatacaggaaatgtttacagcccacctgaggatattgaccataaggactcatatctcattacaaga

SEQ ID NO: 760200 - DNA, 75 bp, Homo sapiens
cagttggaagcagccgatccagcctgcggagcctgtggggcaggcaagagggcacattgggagattcagcttgca

SEQ ID NO: 760201 - DNA, 100 bp, Homo sapiens
cgcagacctggtggaggtgttaaatgaaaactgaacattcttcacgatctgaaaggaaaagaagagattctttcgggatgtttgacggttatgatagctg

SEQ ID NO: 760202 - DNA, 88 bp, Homo sapiens
ttacatgcttgattttggcttggctcgacaatttaccaattcctgtggtgacgtcagaccagagtttggagacacggagctgacgcag

SEQ ID NO: 760203 - DNA, 96 bp, Homo sapiens
gttgtctatcccgtctacctggccatcctctttctcttctggatgtcccggagcaaggcatagatcaagatcccgatcccgggagcgtcgttctcg

SEQ ID NO: 760204 - DNA, 101 bp, Homo sapiens
ggattatttactcgatgatggaactctggtggtttcaggaagcggtctgtatggacccaggcttgtcaaactgtactatacacatcgtgacagtcaccatt

SEQ ID NO: 760205 - DNA, 74 bp, Homo sapiens
gccatcacagacaccgcctacaggagtatgatgcaagtgtctagtgaactagaaaatcacccaatgaatgaaga

SEQ ID NO: 760206 - DNA, 100 bp, Homo sapiens
tgatgtagaaaccaaatatggtttgcttcagcatgctacaagtgaaaactgatgagaaactgaatgtgtctgatgagaatacagcaagttgccctttgag

SEQ ID NO: 760207 - DNA, 110 bp, Homo sapiens
aaagctgcacttgaggcccagaatgcactgcacaatattaaaactttacctggggaactctaatgaatcattgattgaccagcactattttaccagttggaatgaatgat

SEQ ID NO: 760208 - DNA, 75 bp, Homo sapiens
ggagcgcgtcgtgcgcctgggggtgcgcgcctgcgacctgcccgcctggattgggctaatggatactacagacaa

SEQ ID NO: 760209 - DNA, 74 bp, Homo sapiens
tggtcttgaaggacactgggatcctgtaacacagtttgagttcctgagatctagttggtgagagacatgatgtt

SEQ ID NO: 760210 - DNA, 83 bp, Homo sapiens
gatctgaggcaggagatgcctcccccgcgggtgttcaagagctttctgagcatctgcatctgggaccgacctcctgggctggc

SEQ ID NO: 760211 - DNA, 75 bp, Homo sapiens
tgcggctgcgggtgcggcgggtcctggccgaaggtgctggagaatctggtaaaagcaccattgtgaagcagatga

SEQ ID NO: 760212 - DNA, 115 bp, Homo sapiens
tttgttcggggctgtccaaaggacgctagctgttgcacctgttcctccctgcgcgtaagacaatgcagatcttcgtgaagactctgactggtaagaccatcaccctcgaggttga

SEQ ID NO: 760213 - DNA, 50 bp, Homo sapiens
gtgagtgatcactctcaatcccgggtgcttgaagtttctgggaagtcggc

SEQ ID NO: 760214 - DNA, 100 bp, Homo sapiens
ggcacaccgaggacatggacctgtacagcatcaactacctgcactttggggagcctaagtcctgcgccgtgccgtccctgcagtgacaccgaggtgctcc

SEQ ID NO: 760215 - DNA, 100 bp, Homo sapiens
gggtgtgtgctgaatgactcaaggattttttggtgaatggtagtgtctagaaagggtatgtcccttcaagagagaggtgccaatgtccaaccggcctaat

SEQ ID NO: 760216 - DNA, 75 bp, Homo sapiens
ggtctgcgttgctcttgcttttcctcgctggggtgtacggctaaaagagatgctaagagaatgcctgcaaaagaa

SEQ ID NO: 760217 - DNA, 98 bp, Homo sapiens
ctgagcctgtcctgcagcatggacctgcaactttcctgaagcatctccagggctggatgccatggtgcggccgggtgtgtggcaacattacttcatga

SEQ ID NO: 760218 - DNA, 90 bp, Homo sapiens
attaatactcatcttgtccagaactctgtcaaatgaagaacactttcaagaaccaggtgctggagaatctggtaaaagcaccattgtgaa

SEQ ID NO: 760219 - DNA, 90 bp, Homo sapiens
gccggagtgcgggcgcgccccaccaccgccctcaccatggagtctccccaggacagtgctatcacccgggatattaaccgaacattccca

SEQ ID NO: 760220 - DNA, 100 bp, Homo sapiens
gagaattatgagcccaaagagatcctgggcagggagccaagaaccatggggtagtcatgccagatgccaataaggaaaataccctgaaccagctggttgg

SEQ ID NO: 760221 - DNA, 74 bp, Homo sapiens
tccaaggagagtaatgatctggctaccactggacagaaagaatttactttcaggttttcttacctaaagggagc

SEQ ID NO: 760222 - DNA, 75 bp, Homo sapiens
ggaccaccgggcgctggtctgctcccagccgttggtccaggcgcaatgttcagcgtatttgaggaaatcacaaga

SEQ ID NO: 760223 - DNA, 51 bp, Homo sapiens
atggtgaaacaccactgaagcattgccaagagtgcctggaagagctgggat

SEQ ID NO: 760224 - DNA, 75 bp, Homo sapiens
aaatatgataaagcatgccgaaatggagaggacatctgtcttagagaaacaagcaaagggtggaggttatgaaag

SEQ ID NO: 760225 - DNA, 97 bp, Homo sapiens
atttcatgagagaagaaatacaggatgcctctcagctgccacctgcctttgacctttttgaagcctttgcaaaagttatcaatactctggctgacca

SEQ ID NO: 760226 - DNA, 98 bp, Homo sapiens
ttgacatttaattttagggtcctttatatagaagggagagtacaggtttgcagattccgccagcagcacagcaagctctacagatgagtggctctttg

SEQ ID NO: 760227 - DNA, 97 bp, Homo sapiens
tcagcaacatcggccacatccgcccgcagaggaccattctggcttttgtctctggcatcttcttcatactatcgggacacattcagctaacgtattt

SEQ ID NO: 760228 - DNA, 98 bp, Homo sapiens
gaacgattgggctgagcagaggacgacatgttgcttttcgtggaggatttaaaccggatgaggagtgaattgctggtgcctgggtcacagcttatttt

SEQ ID NO: 760229 - DNA, 50 bp, Homo sapiens
cagatacgggaatatcattgcatgcattaaaagctgtgaccccaaaggcc

SEQ ID NO: 760230 - DNA, 100 bp, Homo sapiens
ttccaccaggagatgatgcagcaagaaggccttctccaggtgttaccccctccagcttagacttcctggcctccagaatgtgtcttgctctgttgcccag

SEQ ID NO: 760231 - DNA, 100 bp, Homo sapiens
cacagtacttctgggaagaggaggaagagctgaatgactcaagtctggacctgggacccactgcagccaacaacatctgcttctacggcgagtgttccta

SEQ ID NO: 760232 - DNA, 74 bp, Homo sapiens
ttttcttcaatgataagagctgtcagttttctgtggatgaagatggagtgaaggtacctgagcgcaggaaccat

SEQ ID NO: 760233 - DNA, 100 bp, Homo sapiens
ctcaaagaggccaagcacattgcggaagaggctgaccgcaaatacgaggagggctacttctacaagtccgaacagccagtccagcaaaatgaacagcatt

SEQ ID NO: 760234 - DNA, 100 bp, Homo sapiens
gtggtgttacgtgccaccaaagtgacaaagggggcctttggtgacatgcatggaacaaattccactgagctatcctcaaggtcacggattccatcctctg

SEQ ID NO: 760235 - DNA, 87 bp, Homo sapiens
gggctttctgctgccgcccgcaagcagagtttcaccagtgatcattaaagaatgggcagcttacaaaggaaagtctcctcaaacccc

SEQ ID NO: 760236 - DNA, 82 bp, Homo sapiens
cgcccatacacagtgcccaacaagaaggggaccagtctaaggttgtgggtgacagagagaacggcagtgacaacctcccttc

SEQ ID NO: 760237 - DNA, 50 bp, Homo sapiens
gggacaccaagaagcagggaaatggacccagtggcttttaaggatgtggc

SEQ ID NO: 760238 - DNA, 100 bp, Homo sapiens
ctttttccgacgtcttatcatgaatcccagtgcgggagttggccggactggttgcttcatcgtcatagatgccatgttagaaagaataaagcatgaaaaa

SEQ ID NO: 760239 - DNA, 75 bp, Homo sapiens
agagcgctttctccatccagctggccgtcatgccgctccttgccggcagcacgctggctcttctcctgaacttcc

SEQ ID NO: 760240 - DNA, 75 bp, Homo sapiens
cttcgaagaaaagctgaaagggagacgtttgcaatattccgagtggtgtgcatctgtttgggtaatccaccagag

SEQ ID NO: 760241 - DNA, 90 bp, Homo sapiens
atcccctaccagcgagggcgcctccgagtttctctactcggacgaggtgcagattggcccggagacggtgatgaccacgctatacaccgc

SEQ ID NO: 760242 - DNA, 78 bp, Homo sapiens
tacggcggccccgcgcagcccccggccgcagcgcaggcagcccagcagatcaggatcctcatgaccagccaaagagaa

SEQ ID NO: 760243 - DNA, 115 bp, Homo sapiens
ctgtgaggggatccgacttgccggcagaacttacgctgcgggaccccgggcactgttgctgctgcgggaggtatagacacgtgtggccgtttacgctgtaggatcctcattccca

SEQ ID NO: 760244 - DNA, 80 bp, Homo sapiens
ggcaggaagatggtggccgcaaagaagacggttttgatgatgatggttcagaatttcatgaacatatatttctggagaaa

SEQ ID NO: 760245 - DNA, 100 bp, Homo sapiens
cgagaaaaaatttatttacagctcttaatgcaggcgctcgaggactgtgcccaggagcagatgcggctcagagcccaggtgcgcctgcttgagacccggg

SEQ ID NO: 760246 - DNA, 74 bp, Homo sapiens
atcaagttcttcaggaatggagacacggcttcccccaaggaatatacagttttgctgctgcagcccattgagag

SEQ ID NO: 760247 - DNA, 100 bp, Homo sapiens
agagaacaatgataaagaagaagaagagaagaaagatgaaacttcgagctcctctgcaaaccagtccagctacgggggcccagccagccagcagctgagt

SEQ ID NO: 760248 - DNA, 88 bp, Homo sapiens
accaaccaaattgtcgccattaagaaattggtagctggcagtgttgtgatggcttttgaagaagtatgcccggacagaatagatctga

SEQ ID NO: 760249 - DNA, 83 bp, Homo sapiens
tgaagagttgtcccagctcggcccgcgggggagccccgggagccgcacggattcctacaggaagcaagtagtaattgatggag

SEQ ID NO: 760250 - DNA, 82 bp, Homo sapiens
cagcggaaagctctggaagccaaggcagctgccttcgagaagcaggtcctgcagctgcagctggtcagtgagaaggtcggag

SEQ ID NO: 760251 - DNA, 75 bp, Homo sapiens
gtccaacttgcctggaccagcttaatggttctggtgcagacccctgacaagtcagtgagcccccctctgcctgtg

SEQ ID NO: 760252 - DNA, 100 bp, Homo sapiens
gtcccttccggatttggctttactttaagaggagattcagacatagacaagaatgattacccagaacagtgctcggcatggcagggattccagggctcct

SEQ ID NO: 760253 - DNA, 76 bp, Homo sapiens
gtccagggcagcatctctggtgcatgctgatgacgaaaaacgtgtttcactctgaaaaagagacgaagagctcaag

SEQ ID NO: 760254 - DNA, 97 bp, Homo sapiens
ctgaacaaaagaagctggaagccgcagaccttgtgatattccaggtgcctttcctgaagactatcttctggtctcgaaatggacatgatagatccag

SEQ ID NO: 760255 - DNA, 90 bp, Homo sapiens
acgcctggacaaatactatatggtctgtttctgtcgactgtggaccacttatgtgcgatccgtggaccacttgcgtgcgatctgtcggcc

SEQ ID NO: 760256 - DNA, 75 bp, Homo sapiens
aaccaatatttgctatttgtcttttccagattcaaattcaggaagttggtgaaccatctaaagaagagaaggctg

SEQ ID NO: 760257 - DNA, 100 bp, Homo sapiens
ccgcaccacagcgccatcctcaagcgcgaagctgacgggtcgcctcatgctggccgtgggaggagcagtgcttggctccctgcagtttggctacaacact

SEQ ID NO: 760258 - DNA, 96 bp, Homo sapiens
tgaaaacgtacgctctccaactggccaatacaaatcccttgtatccgtaactgaagcaatacaagctgttctcttggcggaagttcaacaacacat

SEQ ID NO: 760259 - DNA, 73 bp, Homo sapiens
catcctcctcactcgctacacagcccagcagttccgaaatgcctgaactctttgcttccggaatccgggattg

SEQ ID NO: 760260 - DNA, 97 bp, Homo sapiens
gcggcccctggagatgattgagccgcgcacgctacagtacaaggcattccatgaagaatactccaggctctatcagcttgccaaagagacccccacc

SEQ ID NO: 760261 - DNA, 90 bp, Homo sapiens
cagcacttcattatgcagctaaggccagcgagaccgaggagaatggctccgacagcttcatgcattccatggacccacagctggaacggc

SEQ ID NO: 760262 - DNA, 117 bp, Homo sapiens
gtccttattatcggaccccgaggatcaggaaaaactatgatattcttactgattctccgggctctgcagctcttgacccggctggtattgtctctacagccaattcctctgaagtca

SEQ ID NO: 760263 - DNA, 74 bp, Homo sapiens
aggagggagaggtgccaagaagcagcggtacacaacatctaaatatattgctgtttgggttagcacaaaacctg

SEQ ID NO: 760264 - DNA, 100 bp, Homo sapiens
tgagtctcacccaaggcccatggatgaccagtgtcccagtgaaggaacgagtgaaggtgtctcagaactggagactggggcgctgccgagaggggattct

SEQ ID NO: 760265 - DNA, 50 bp, Homo sapiens
tggccgagcaggctgagcgatacgacggttcacagaatgattgcagagtt

SEQ ID NO: 760266 - DNA, 80 bp, Homo sapiens
tgccctccagaacatgctacaaaactgctccagggtctggctgttcatccaggctggggtgtagcggtgcgatctcagct

SEQ ID NO: 760267 - DNA, 75 bp, Homo sapiens
gcttcgtcctacacttgcgcaaatgtctccgtttgaaggatgacctctaggaagaaagtgttgctgaaggttatc

SEQ ID NO: 760268 - DNA, 50 bp, Homo sapiens
gaagagaatctgagtacaaacagcattgcagtgtcgagatggctatgaac

SEQ ID NO: 760269 - DNA, 82 bp, Homo sapiens
gatgattgaagtggaaatatccaaacaggccctccagaatgagctggagagactgaaagagatactgggtcgtcaggatgga

SEQ ID NO: 760270 - DNA, 82 bp, Homo sapiens
cagagtcccacctccagcacagtcttcattactggccatggcagggaggagtacagcgtgtgaaggcaaagaagaatgctgc

SEQ ID NO: 760271 - DNA, 90 bp, Homo sapiens
cgagaaagcagacatcccggccaagtatgcggaggcctcctcatcagaaacatccaatcaatcacagaatccatcgttaacagaaccacc

SEQ ID NO: 760272 - DNA, 75 bp, Homo sapiens
cggattatgaaagtgcagaagactcggaaggatttatcaaagatgttcatgaagactcccttacagttgtttttg

SEQ ID NO: 760273 - DNA, 102 bp, Homo sapiens
gggaagcaacctaaatgtccatcgatgggtgaatctggattgggaaagtcgacattaatcaactcattattcctcacagatttgtattctccagagtatcca

SEQ ID NO: 760274 - DNA, 78 bp, Homo sapiens
cttgacagagatgagtttgcagttatttctcactatgtgcaatagacactttggcagtgttgtggcacaaaccattcg

SEQ ID NO: 760275 - DNA, 98 bp, Homo sapiens
gtacatccacaggttcactaacgggggcaagagccatttcctgcttttaagtcttggcaggaggactctgagtctggagaagctcagctgtctccaca

SEQ ID NO: 760276 - DNA, 75 bp, Homo sapiens
gacccctcccacctctccagaacaggctatcctaggttctttcagagcacggcttcggccccatcactaccgaca

SEQ ID NO: 760277 - DNA, 100 bp, Homo sapiens
ggctgaggcgcggggatggagcccctgcgggtgctggagctatacagcggcgtgggcggcatgcaccacgcgctgagagacatgggaaagcggaaccacc

SEQ ID NO: 760278 - DNA, 100 bp, Homo sapiens
tggctacatctgaatatccttactcggagtgccaaaatgctgcacagatctaccgtcgcgtgaccagtgtaagaatgattgatgttggctgatattggag

SEQ ID NO: 760279 - DNA, 75 bp, Homo sapiens
aggactatgagctgctgcagattctctcagatgaccggagaaagaccacagcaagattctttcattcgtctcctc

SEQ ID NO: 760280 - DNA, 101 bp, Homo sapiens
ctcccagagccctccgtgattgttggaatggcttaaaagacaaccttcttgcttctgggacatccagcctgacagccaccaaacagttgcatcgtccaaga

SEQ ID NO: 760281 - DNA, 80 bp, Homo sapiens
aggcgatccgctggcgctagtctgaccctccgccaggcaaaaggaaggatgataatgaagataattcaaatgatgggacc

SEQ ID NO: 760282 - DNA, 100 bp, Homo sapiens
tctcagaacacaaacaaaacctgtgaagagtgcctgaagaacgtctccggaaaagcttcactctgaccatcactgtcttcacaaacccaccgcaagtcgc

SEQ ID NO: 760283 - DNA, 92 bp, Homo sapiens
agggatcgtgaaggacgccagcatcatacaccggctgttcgaggccttgactgtaggtactccaaagattcaggtttactcacgtcatccag

SEQ ID NO: 760284 - DNA, 83 bp, Homo sapiens
gtggagaacctgaatcgggagctgaccagcaggagatggacagagacgtatgtgcgttggtctcctaagggcacctacctggc

SEQ ID NO: 760285 - DNA, 100 bp, Homo sapiens
cttagatctcattccattcgatggggatctcttatccatggaatcagagggtgcattcaaagatttgcatgcagccactgttaacccggaccccagttta

SEQ ID NO: 760286 - DNA, 101 bp, Homo sapiens
agaaacacaagaagcagccagaaccatcacctgcattggttccatccttgactgttactacagaaaaaaaagagctatctggtcacaaaaatattgtgggc

SEQ ID NO: 760287 - DNA, 100 bp, Homo sapiens
agagacatctggaagccggagctagtggaagaatcccacccctggggaagcactactcccagcgctgggcccaggaggacctgctggaggagcagaagga

SEQ ID NO: 760288 - DNA, 100 bp, Homo sapiens
cttcgcctgtcgcaggccacccgccagcgcctgagcatccccgtcatggtggtcaccctggatgaggacggggacttggttgccttttccagtgacgagg

SEQ ID NO: 760289 - DNA, 74 bp, Homo sapiens
gggttggagttttggcgagagtttgtggaagatggcgcctgttgtgacagggttggaaaagagactgttcaaac

SEQ ID NO: 760290 - DNA, 75 bp, Homo sapiens
ctgggtctcggagtgggagacgtggagtgcagcatccacccgttttgtcaagtgtgaaaagtgtcatcatttttt

SEQ ID NO: 760291 - DNA, 100 bp, Homo sapiens
cctggagcactcggtcatgtacccggtggactcggtgaaggacactcatgaggaccatgatacttccactgagaatacagacgagtccaaccatgaccct

SEQ ID NO: 760292 - DNA, 80 bp, Homo sapiens
tttaggcggtatcaaatggaaagtttttccaaatattcatctgtacaggttatttcaaagttaaagacagaactctcaag

SEQ ID NO: 760293 - DNA, 80 bp, Homo sapiens
gagattcgggccgtcaccctgcctcccctgcgtcccgccaccggccgcttctgtcctcgacctgcctagagctggaacgt

SEQ ID NO: 760294 - DNA, 100 bp, Homo sapiens
gaacaccatggctggagccagtgtcaaccgagtagtgtctcccggacctcttcattgcctaaagcccggattgcatttctacaaggcgaaagaaaaggtc

SEQ ID NO: 760295 - DNA, 88 bp, Homo sapiens
gcagcggcggcggcggcaccccgggcgcggtggtgatgatgtccagcaactctgtgaagcaggagaagaggagtttttggaaatcatg

SEQ ID NO: 760296 - DNA, 96 bp, Homo sapiens
ctgaattggatgaaagataaagcccttaaggacaaggaactggaagaggaggcaacagtatttggggcaagaagtttgaggatgaatacagtgaat

SEQ ID NO: 760297 - DNA, 83 bp, Homo sapiens
tcctgctgggcttcgtccagatcgggaagggctgagccagcaacctccttggcacctggggacagtcgcttcctcagtttctg

SEQ ID NO: 760298 - DNA, 75 bp, Homo sapiens
atagcagagtacgatactcaggtcaaagatgagcaatgtgaagagactacggccacggctcagtgctattctctt

SEQ ID NO: 760299 - DNA, 100 bp, Homo sapiens
ctccttgtgccacattcttgcagctgcctacaaattcaagagtgaccagggatggtgaaatgacaatggatgctctgttggctcgattgaaacttctgaa

SEQ ID NO: 760300 - DNA, 49 bp, Homo sapiens
tggatgtcggcgaagccgcgggcgaggttgaaggtcgaggagctggaag

SEQ ID NO: 760301 - DNA, 75 bp, Homo sapiens
tgtggatgaatttgcttttctggaagcttcaagtctggatagtcagaagtttgtgacagtgccctccagtaatga

SEQ ID NO: 760302 - DNA, 98 bp, Homo sapiens
atggccagagcagctattcttcttatggccagagccagaacagaatgcccttcaatcagctgggcaccctggcaggcagcaagtactataatgtggaa

SEQ ID NO: 760303 - DNA, 75 bp, Homo sapiens
gcagagcaatggaagcattgttgtcgtctcctctctggctggagacaaggacggcagcaaggtgacaacagtggt

SEQ ID NO: 760304 - DNA, 75 bp, Homo sapiens
taacatcagcagatatcctgtctcagatgaagagcggagcccagggagaatatgctggactggccactatccgag

SEQ ID NO: 760305 - DNA, 100 bp, Homo sapiens
gcaggcacccgggcgccgggcctcccagccgacatgtctctagtggcggaagccttcgtctcccagattgcaggtatcattgcccagtgcctaagatctt

SEQ ID NO: 760306 - DNA, 100 bp, Homo sapiens
tgagggaaaagcgaggcaaggcaggcgggtcatatatcagttatgtgcatgctctgatacatctggtcctactatgaggtacttgagaaccagccaggat

SEQ ID NO: 760307 - DNA, 100 bp, Homo sapiens
gtccgagccagccgctgttttgccggaggagcccctcaggccgtagcaaaccatgtgatttcttctgactctatttcctcttctgccagtagtttcctga

SEQ ID NO: 760308 - DNA, 75 bp, Homo sapiens
agatgataaagcatgtcagggaacttgctgagcaactattcaaaaatgagtctactcttcatcttgtgttgagac

SEQ ID NO: 760309 - DNA, 98 bp, Homo sapiens
ggcatctagtctttccgcttcttgaatttctctctgtaaaggagcttgcaaaccatactgggtacatcaaagttgactggcaacgagtggagaaggac

SEQ ID NO: 760310 - DNA, 75 bp, Homo sapiens
atctggaggagcagttgtctgatgaagagaaggttgatgtcgagcaacatactttggccaaatacctgatggaac

SEQ ID NO: 760311 - DNA, 83 bp, Homo sapiens
ggtggagcaaaacacaccaagcctggtgccaatcattgacaatattatgatcatgtttgagaccttcaacaccccagccatgt

SEQ ID NO: 760312 - DNA, 83 bp, Homo sapiens
tgccccatggacagggccccacagagacagcaccgagcctcacggggcgcagacggggaagcggagccaacatgccagtggcc

SEQ ID NO: 760313 - DNA, 100 bp, Homo sapiens
gaagtaatgaccaaattaagtcattttcgagaatcgggagatacagatgacccaccaagaattactcagaaccctgtgatcaatgggaatgtggccctga

SEQ ID NO: 760314 - DNA, 83 bp, Homo sapiens
cttcgactctcaaagcaataccaggatagctgttgtttcagagaaaggttatggaggttttgatgactatggtggctataata

SEQ ID NO: 760315 - DNA, 75 bp, Homo sapiens
ccccacctcagcctggggaggagaagctggcagccctcactgcaggaggaaggctgattcaccccaagagtggcc

SEQ ID NO: 760316 - DNA, 75 bp, Homo sapiens
gcagagtgctgatgtgaaaaataccacgacaaaaccaccctaggctcaagggttcttgttgatgcacgagataag

SEQ ID NO: 760317 - DNA, 101 bp, Homo sapiens
gccgctggagatcctttcctgcttttggtttccctggcaggggttgaactgtggagtgtgtgggtaatcattaccaaatgaggaggaaaggacgatgtcat

SEQ ID NO: 760318 - DNA, 75 bp, Homo sapiens
aaactcgactttggagaaaccaccgtgctggaccgcttttacaatgcagatatgggcaaaagaaatggctgaata

SEQ ID NO: 760319 - DNA, 96 bp, Homo sapiens
ttgatttatcacatttctggagcaagtacagctctcaataaacaagactgggtagatggtgagcccacagaagccgagaaggatttttgggaactt

SEQ ID NO: 760320 - DNA, 80 bp, Homo sapiens
ttgatataggtggacttttttacagtgtgatcacagtgtgcgtttgtgagatgctgaccttgggtgttcaatagaacaga

SEQ ID NO: 760321 - DNA, 100 bp, Homo sapiens
tgtagacaatggttagagaagaattttccaaatgaatttgcaaaacttactgtagggtgtgtccgcagccggccaggtggtatccctgaaggtgtggctg

SEQ ID NO: 760322 - DNA, 83 bp, Homo sapiens
cggccgcaaggccaacgtgaacctggcatatctgggcgccaagccgcggagcctccagacggtcacctttctctccagtgcca

SEQ ID NO: 760323 - DNA, 90 bp, Homo sapiens
ggagaacctggaggaggaggccatcatcatgaaggacgtgcccgactggaagagcagcccgacggccatggaggctgaagagacgatgga

SEQ ID NO: 760324 - DNA, 101 bp, Homo sapiens
ggatgatggagaccatgtgttcccgaaagtggcagctggggtttgaaagtattcttgaagggctgtttggacctgcattattaaaagatctcagtttattt

SEQ ID NO: 760325 - DNA, 91 bp, Homo sapiens
aggaccagcagatggccagtcacgagaacccagccgccgccatgtctgcgcatctgcaatggatggtcgtgcggaactgctccagtttcct

SEQ ID NO: 760326 - DNA, 100 bp, Homo sapiens
tgctggaatgtgcccatccaaagcatcttcatgatacagttaagaggaatcttgacagcgccacttcccctcagaatggcgatcaacagaatggctacgg

SEQ ID NO: 760327 - DNA, 83 bp, Homo sapiens
atttttcacccgagtcagcaccctcccagcaaccaggtcaaaatgcagatcttcgtgaaaacccttaccggcaagaccatcac

SEQ ID NO: 760328 - DNA, 75 bp, Homo sapiens
cctgaccatggctccctgcagtaccctttaacgaaataacatctgctttgctgccgagctcagaggagaccccag

SEQ ID NO: 760329 - DNA, 98 bp, Homo sapiens
ggaaaaacttaaaatggatatgaaaagtgaagaaagtgatcataggagaaaaccatttcagggttctgtggaaaatctgatgtgccaagaagtgttcc

SEQ ID NO: 760330 - DNA, 88 bp, Homo sapiens
aagagtgagagatggaacccgaagaagaaaggattcgttacagccagagattgagcatcatctactacgtgagccgctcaccaaagct

SEQ ID NO: 760331 - DNA, 88 bp, Homo sapiens
ttccacaatggaaccaattgttttacagtctgttccacatgatcattgtaataaggtgaccaagaatatggcccaggtgaccaaagcc

SEQ ID NO: 760332 - DNA, 99 bp, Homo sapiens
tgacacgtagtcactgggaaggatttgcctctgtttgggacccactctggaacctgaggaagtggtaaacaggctgatgcatgggattctgactgagca

SEQ ID NO: 760333 - DNA, 82 bp, Homo sapiens
gctggccaaggccaaggctgtccgcgtgatgaacactcattcagatcatggaagggaagtggttgctgtgtatgttactggt

SEQ ID NO: 760334 - DNA, 100 bp, Homo sapiens
ggagtatctggcctccatcttcggcaccgagaaagacaatgttatagttttgccgctggactcttccctcccttcccccaccccatcaggatgatatgag

SEQ ID NO: 760335 - DNA, 75 bp, Homo sapiens
tcgggataacgcctgcaacgacatggggaaagcaggcaggatgggagagtcgccgatagaaccacctcttccctg

SEQ ID NO: 760336 - DNA, 99 bp, Homo sapiens
tactggttgcctaattttatggatgtcttcacgtggtctttaccgtttgttggagaaaaaggtcttatatccagatggccaggctcagatgattcaccc

SEQ ID NO: 760337 - DNA, 50 bp, Homo sapiens
cgggagttcaagaagaacactccagagtgtccacaggatgaaatgtccga

SEQ ID NO: 760338 - DNA, 100 bp, Homo sapiens
ggctgctgcgctgaacctctcggctctccacagccccgcgcacaggcctccggggatatcagtatgaacaacattactcagttgccagaagatgcattta

SEQ ID NO: 760339 - DNA, 75 bp, Homo sapiens
cagcaatcctcagacgcctcacttaggacaaaacactggaactattttggggctgatgagaatcttggtccagtg

SEQ ID NO: 760340 - DNA, 50 bp, Homo sapiens
aaatcttagataagaaggttgagaaggtggttgtgtcaaaccgattggtg

SEQ ID NO: 760341 - DNA, 90 bp, Homo sapiens
cgagtaggtcggcagcgttgctgggtggcagttacagttacatgatcgacaacgtgatcctgctcatcacaggcacgctgcaccagcgct

SEQ ID NO: 760342 - DNA, 100 bp, Homo sapiens
aattacgaggtctccaggttgtagcagtgaagaagctgacgaggactcaggtacaggtttgcagattccgccagcagcacagcaagctctacagatgagt

SEQ ID NO: 760343 - DNA, 87 bp, Homo sapiens
cgccccgaacgggggtcttcctcctccgccgttgacagactatctgttatagtccctgggtcaagacaacaatttttataccttcgt

SEQ ID NO: 760344 - DNA, 101 bp, Homo sapiens
cgggccgggggacccgcccgccatggccaccaaggcctccggtgtggctgtctctgatggtgtcatcaaggtgttcaacgacatgaaggtgcgtaagtctt

SEQ ID NO: 760345 - DNA, 86 bp, Homo sapiens
gagaaaagcgagaccgcgtgcgaggaccggagcaggccgggctctcgccatgggtcactgtcgcctctgccacgggaagttttcct

SEQ ID NO: 760346 - DNA, 101 bp, Homo sapiens
agcaatccagacctctctggagacgagaatgagtaaacatggaagtactaacttcattccagaacaatttttggatgacttcattgatcttgttatctggg

SEQ ID NO: 760347 - DNA, 75 bp, Homo sapiens
ctggaagctgatgctgctggacgccactttccggggtgcacagcaagtggtgattgaagatagtactggagtccg

SEQ ID NO: 760348 - DNA, 83 bp, Homo sapiens
ggcgcgcgcttggctgtcgcctctgccgctgtgtttgggaggactcgaactggcgccagagcgactactcaagcgacacagag

SEQ ID NO: 760349 - DNA, 75 bp, Homo sapiens
gcaataaaacgcttccatctttatccagaggaaagaccacagcaagattctttcattcgtctcctcctagcctgg

SEQ ID NO: 760350 - DNA, 75 bp, Homo sapiens
caaagtttaaggaaacaggtgtaattaccccagaagagaaaatgttaatctatgatccagccaaacgaatttctg

SEQ ID NO: 760351 - DNA, 74 bp, Homo sapiens
ttaaagatgcatgctgatggcgataagtcattaccacagtataagccacccgcacttaaaaagtcaaattctcc

SEQ ID NO: 760352 - DNA, 139 bp, Homo sapiens
caaacagggacataccaaagtattgagttttacgattccatctttatccaaaccatctgtataccatgaagtacagacagtgtttgtgtgttcctgttgtggctaactttaagaagcggtgtttctcagaattgataag

SEQ ID NO: 760353 - DNA, 75 bp, Homo sapiens
gaagagtgggagtttgccgcccgagggggcttgaaggaacctcaagaaggcatgaagccagcccctgcagtgccg

SEQ ID NO: 760354 - DNA, 75 bp, Homo sapiens
acatctatgctcacatattcatcctgaagtgttggcgggagtcggagaaggaatggaagttggatacactttgtg

SEQ ID NO: 760355 - DNA, 96 bp, Homo sapiens
cggcgcacgcccccacctcctcccgcgcgggcgctgggcgccggcccagctgcaggttattcagcttctcaaggctggaaaagcgaaggaagtttc

SEQ ID NO: 760356 - DNA, 50 bp, Homo sapiens
cttcaaggcccacttcttctcagacatgagcaccagcctccaggaaggcc

SEQ ID NO: 760357 - DNA, 98 bp, Homo sapiens
tgagatgtttcatcccaacagttgcactgatgacatcgtcaccagcgaccattcccccgtgtttgggacatttgaggttggagttacctcccagttca

SEQ ID NO: 760358 - DNA, 101 bp, Homo sapiens
actcatgagagcgcggccggaggacagctggcggaggcagtgacctcagactctggacggtgaacggggatctcgttggacatgtccactgcagggagatc

SEQ ID NO: 760359 - DNA, 89 bp, Homo sapiens
ggagctgtcaaccctggagacaactgctactccgtgggcagcgtcggggatgtccccttcacgatcatcagctgtaaagcagagtatat

SEQ ID NO: 760360 - DNA, 75 bp, Homo sapiens
gttgtaaggatgaaactacgtttgcaacacagtattgaaagggaactgtggctgcaccatctgtcttcatcttcc

SEQ ID NO: 760361 - DNA, 51 bp, Homo sapiens
ctgggaggaggaggaggagagctggaactctccggagtcctttctgtattg

SEQ ID NO: 760362 - DNA, 100 bp, Homo sapiens
cgtaccttagaactctatggagttgaattccactatgcaaggcaaattgtggctactaatttgccccctgaagatcaagatggctctggggatgactctg

SEQ ID NO: 760363 - DNA, 75 bp, Homo sapiens
cttccctggcaagattcttctgaattgtgctgccttggccaaaagaggccttgctgtctctaaccctgatctgat

SEQ ID NO: 760364 - DNA, 90 bp, Homo sapiens
aaagtctgagagagggaagtcgcctctgtgctcgtgagtgcatggggtataaggtatgtgccagtcaaagatctactgggaatttatgag

SEQ ID NO: 760365 - DNA, 90 bp, Homo sapiens
ggggctgcccctgctgctcatctcgctggccttcgcgcaggagatctcgattgtgttcctgatgacgtgcaaaccccccctatatatggg

SEQ ID NO: 760366 - DNA, 75 bp, Homo sapiens
cacccttctgcagtgaatgtcctcacggaacacaggcagacatctggtccctgggcataacagctattgaacttg

SEQ ID NO: 760367 - DNA, 95 bp, Homo sapiens
cggatcgcctggagaggcactcggacctgagcccgcagcttcatctcccagctcaaacaacacagcggccacaacagcagctattgtcccgggct

SEQ ID NO: 760368 - DNA, 89 bp, Homo sapiens
gacgggtcccgcggcgagcgagctcctgaggtacggcgtcgggtactatactggcaattgctggagaagattttgcaattgttgcttct

SEQ ID NO: 760369 - DNA, 99 bp, Homo sapiens
caggaacagggcagacgttagcgtgagtgatcactctcaatcccggatacactctgtgcagttttagagagagacacactcagtattcgagaaagtcga

SEQ ID NO: 760370 - DNA, 103 bp, Homo sapiens
agccgcgctgcgcagccgacgcgggaatgaagcgggcgctgggcagacaatgcagatcttcgtgaagactctgactggtaagaccatcaccctcgaggttgag

SEQ ID NO: 760371 - DNA, 82 bp, Homo sapiens
tcccgaggtttcggaaccgagagctggaggccactcgacgccagaggatggattacccagttactgccaaatctgtcgaaag

SEQ ID NO: 760372 - DNA, 100 bp, Homo sapiens
aattcgaatcaccctaacaagccgcaacgtaaaatccttggaaaagggccagaagcggactcctagaagaggggagcagcaaggatggaatgacagccgt

SEQ ID NO: 760373 - DNA, 74 bp, Homo sapiens
cagactttctcaactcgttcgagtctcactgtgtcacccaggctggagtgcagtggcgtgtgatcttggctcac

SEQ ID NO: 760374 - DNA, 100 bp, Homo sapiens
tagtcatattaatgagacaagaagcaacagttaactacctcaaagaattagagcataaagatgcctatcaagtgatattggatggtgtgaaaggtggtac

SEQ ID NO: 760375 - DNA, 75 bp, Homo sapiens
aagggccccgtaaattggaaggatgcacaagttccaaggttacgtttcaatctgaagaggaatgattatacgcct

SEQ ID NO: 760376 - DNA, 90 bp, Homo sapiens
cctctgcgccggcccgctcactccgcccggccccagccctagcgctggccgcgaccccggcgaaaaatggctacaaacttcctagcacat

SEQ ID NO: 760377 - DNA, 96 bp, Homo sapiens
ctcaccccttcagcgtcgctgcccccagctcagctcttactgcgggccgctccgacggcggtccatcctgacaatgcagatcttcgtgaagactct

SEQ ID NO: 760378 - DNA, 123 bp, Homo sapiens
gatcgctgtagtgggcggccagagcgccggcaagagctcggtgctggagaacttcgtgggccgggctgggtataagtaagcaagaagagggcctgggagaagagtctgacgagcaaggggaag

SEQ ID NO: 760379 - DNA, 100 bp, Homo sapiens
cgtggttccagcgccggttttgaccgccacattaccattttttcacccgagggtcggctctaccaagtaggtttttaacaagttaatcaggcgctacaaa

SEQ ID NO: 760380 - DNA, 75 bp, Homo sapiens
gagtggacgcctaccgcatctacttggagtggagtcaacatatcaatggagcaagtcacagtcgtcgatgccagc

SEQ ID NO: 760381 - DNA, 75 bp, Homo sapiens
gccgccgctacgggaccgcctgagctttctacaccgggtctcctccgggctggggctgagcaagccctcggagtg

SEQ ID NO: 760382 - DNA, 98 bp, Homo sapiens
gtgactgcagccatggccacaggcttagctgttaacgggaaagaaggccagggctttgtaagtgaggatgagtacctggagatctctgacatcaagcg

SEQ ID NO: 760383 - DNA, 71 bp, Homo sapiens
gcaagtacctggtcattggtgacctgctcttctcagctctcagtgaccccgactgtctcctgacttagccg

SEQ ID NO: 760384 - DNA, 75 bp, Homo sapiens
tacaagtgtgcctgcttggcaggctatactgggcagcgctgtgaaaatctggaaattttgctcagccgacaaaag

SEQ ID NO: 760385 - DNA, 87 bp, Homo sapiens
atgtgcgaacatgtaacaagaatccaaagaaaacaaaatggtggtatcatgatctagaaatggccattgcctactggaacttagtgc

SEQ ID NO: 760386 - DNA, 100 bp, Homo sapiens
ggatatagcacaccatccccagccagtgctcagagccagaccctggtttgaggagccccccaaggctgtggaactggaggggttggcggcctgtgagggc

SEQ ID NO: 760387 - DNA, 50 bp, Homo sapiens
gaccgagcgcctcgacctcggtctgagcctttctgagaaaagtctacagc

SEQ ID NO: 760388 - DNA, 100 bp, Homo sapiens
cctgctggccgcctggacggctcgggcgctggagggcgccctgcgtccggcagaggaggcgagcatcccgctcaggtgatgaggaacccctcgcgcaccc

SEQ ID NO: 760389 - DNA, 90 bp, Homo sapiens
atcgagcagctgcgtcgctgcgagctcatcaaggagagcgaagtcaaggccctgtgcgctaaggccaggatgatcacggacgtgcagctc

SEQ ID NO: 760390 - DNA, 74 bp, Homo sapiens
ggatatttaagtacaatggtgggcttaattttagaggcgtggagctatttcctatgacagttctgatcagactg

SEQ ID NO: 760391 - DNA, 82 bp, Homo sapiens
gagaaattcagaacctcaagcttttcaggcatcctcatataattaaactatggacttcagcagaaatctttatgatattggg

SEQ ID NO: 760392 - DNA, 83 bp, Homo sapiens
tcagcgggggaccccctcgcttcctgctcgacctgcggcagtacttggtgcctacaccaactaatgttacaattgaatcctat

SEQ ID NO: 760393 - DNA, 98 bp, Homo sapiens
gacatcctggaagctgggaaatggtgctagactggatcgagaaccacggagaagcatttctgagcaaacatacaggtgtggggaaatctcttcatcgg

SEQ ID NO: 760394 - DNA, 87 bp, Homo sapiens
gatcaaatggcacttcattggccacctacagaaacaaaatgtcaacaaattgatggaacagatctcggcccctttccaaacactcct

SEQ ID NO: 760395 - DNA, 96 bp, Homo sapiens
ccgacggtcacccgaatcgcagggagtcgccgctggagaggggctcggcgcccggcggggactgcagtgaagacctaggaaaggacgttgaatttg

SEQ ID NO: 760396 - DNA, 83 bp, Homo sapiens
gtgctggccacttgcttgggatcctttatcctggtcatcttctatttccaaagtgttggagagcacaatggctgaacaagtcc

SEQ ID NO: 760397 - DNA, 50 bp, Homo sapiens
gagagaagcatctttttgtagatctcgtttcgaccacttggcacagtaac

SEQ ID NO: 760398 - DNA, 90 bp, Homo sapiens
gtccagatggacagagttgatcaggtgctacagctcgagagggcagagccacagtccctggacggcgtggactgaggccggttccttcct

SEQ ID NO: 760399 - DNA, 100 bp, Homo sapiens
agaagaaaacctgaatctctgagaatgtgaaggctgtgtctgagactcctgcagtgccaccagtttcagaagatgaggatgatgatgatgatgatgctac

SEQ ID NO: 760400 - DNA, 100 bp, Homo sapiens
tcaactttgaagagatcgactacaaggagatcgaggtggaagagtttctccttggaccaagatgactgatggaaaactctccacctctacaaatggcgta

SEQ ID NO: 760401 - DNA, 100 bp, Homo sapiens
atgaatagttctactccttctacaggtgtgtatgggagaaaactggttgtcctggatgtttgaaaagttggtcgttgtcatggtgtgttacttcatccta

SEQ ID NO: 760402 - DNA, 50 bp, Homo sapiens
caaatgcttcagaggacacaaagagattcacacaaaagatgttggacaat

SEQ ID NO: 760403 - DNA, 100 bp, Homo sapiens
gtatggtcaacattgatggaaaacaaatcaaactgcaaatctgggatacgaatgagtccctggaacgccagatgcgtgaaatggaagagaactttgccgt

SEQ ID NO: 760404 - DNA, 100 bp, Homo sapiens
ctgagaacaggctgcagaccatgaaggaggaactggacttccagaagaacatctacagtgaggagctgctgcaggaggagaaccggcagaagctgagcct

SEQ ID NO: 760405 - DNA, 90 bp, Homo sapiens
gagaaattgcgggatgcacgcctgtgtcctcattgctccaaactgtgttgtttcagctgtattagggtggctagaggtgcaggtagctaa

SEQ ID NO: 760406 - DNA, 98 bp, Homo sapiens
ccatgtccggcaccgccatccccatttctatggtcctcctcacctatggccgctggcagtttccaaccggaggccctatcggcagtactacgtggagg

SEQ ID NO: 760407 - DNA, 85 bp, Homo sapiens
atagcagcagaagagaagaagaagcaggatgaactgaaacggattgccagagaattggcagaagagtgtcaatccatatctacaa

SEQ ID NO: 760408 - DNA, 100 bp, Homo sapiens
attaagatttttggatccaacaaaaacagaccagaagattaccaaggtactaggttttgacaagcttgcatcatgcgtgagtataagctagtcgttcttg

SEQ ID NO: 760409 - DNA, 83 bp, Homo sapiens
caaggtccggctgctggatggaggggattttgtcagcttgtcgtcaaggaggcaagtgaggcctatctggttggcctttttga

SEQ ID NO: 760410 - DNA, 98 bp, Homo sapiens
gagattccatacactactaccctggtaatgatctccaccctgacctggaggagccatcctctctaggggtgtaaggttgttaaaattacacactgtcc

SEQ ID NO: 760411 - DNA, 82 bp, Homo sapiens
gaagttcctgaatctgagtcttgagtttttgaccaatatctcaattttattactttggaagatgatatgtttgtattatgta

SEQ ID NO: 760412 - DNA, 100 bp, Homo sapiens
attacctttcaaaatggacatttaaaaataattttagaatgatactaaagctacaatagagggtttggaaagaaatcccggcctgcaatgtatgatgtga

SEQ ID NO: 760413 - DNA, 110 bp, Homo sapiens
ttgctgatcaagtggaagagattttaagtgtggcatacaagaaagggaattacttttaaacgtgtaggtgttccttctacaatggatttagttaaatctaaaagcatgga

SEQ ID NO: 760414 - DNA, 76 bp, Homo sapiens
agaaaatcattcaagtggccaagacctctgctgcacagcctgcagaattttcttcctgccccttgaactctgatga

SEQ ID NO: 760415 - DNA, 100 bp, Homo sapiens
agattcgcagtggtcgcttcttctccttgtgaaaggagatgaccttcaggccattaagaaggagctgacccagataaaacaaaaagtggattctctcctg

SEQ ID NO: 760416 - DNA, 97 bp, Homo sapiens
ggacttcaacatgaatatgcagctcctgctgatgcacacatataatcttagataatgctgatgttctgagtcagtaccaactgaattctatccaaaa

SEQ ID NO: 760417 - DNA, 75 bp, Homo sapiens
gccaggaatttcccttagggatagagttactctcaaagatgaagacttttgtaaacgtgtatctttggctactgt

SEQ ID NO: 760418 - DNA, 100 bp, Homo sapiens
cgcagccggaccacatcctccagcagcaactgtagcgccaaaaaggaagggagcttctggaagaggtgaagaaggaattgcagaaagtgaaagaggaaat

SEQ ID NO: 760419 - DNA, 100 bp, Homo sapiens
agaaaaggcgcgagcggccaggagggctcaggccgagacaccttgcagctgccgccgccgccaccgagccgccgcgtggctgaatatactattctagaag

SEQ ID NO: 760420 - DNA, 50 bp, Homo sapiens
tgtgggctggtgtgtggaactgatatttgggttctgggtctggatcctgg

SEQ ID NO: 760421 - DNA, 75 bp, Homo sapiens
tccacagctaagacgccaggacccactggaagcctagaaatggggtagaagataaggagtcttggcatgggaagc

SEQ ID NO: 760422 - DNA, 100 bp, Homo sapiens
gaaggcagcgcgttgtacccgaggccaaacgtaccaagaaagtcgggatcgtcggtaaatacgggacccgctatggggcctccctccggaaaatggtgaa

SEQ ID NO: 760423 - DNA, 100 bp, Homo sapiens
gagtaatcgcctgctttgattcattgaaagtcctggcctggcaatcagagtaatatgtgctgaagaaccttatatttgtaaggactttcctgaaaccaac

SEQ ID NO: 760424 - DNA, 100 bp, Homo sapiens
gagacattacatcaggaagatactgcagagatattctactccatctcattcattgtacagggaagctgccaaagaatgtcgacgtcgaaagaaagaatat

SEQ ID NO: 760425 - DNA, 100 bp, Homo sapiens
aattaatgaaccttgacccacaccaagctatctctgaagggcacaaatcagaaggcaccatgcctcctaataaagaggccagcggtctcagtagttcacc

SEQ ID NO: 760426 - DNA, 100 bp, Homo sapiens
cagagggtctggagggctgagcagtcaactcaaatgcaagtccaagaggaggaggaggcggaggtccaagcggaaaggaggaacatatgcagcagaaaaa

SEQ ID NO: 760427 - DNA, 100 bp, Homo sapiens
tgccgctgctgctgctgcccgccggctgccgggcgctggaagcttcggaaccaaaaagaagcttcccagagccggggccaggagccccaagcgccctcta

SEQ ID NO: 760428 - DNA, 75 bp, Homo sapiens
agtgtctcatcttcttcaagataacttgccaaaatgtgcggtacgggtcactaaaatacaaagtgaagaaacgac

SEQ ID NO: 760429 - DNA, 96 bp, Homo sapiens
tgagaatacgcattttgacaaaatccctgagtcctgtgcactcaaaagttggagacatccaggtctgcaccatgaatgccagaggattcaacatga

SEQ ID NO: 760430 - DNA, 98 bp, Homo sapiens
gtctctctgctgcggcgcggggaccgctgtgctctcggtgacgcatccaaagaagacattgacactgctatgaaattaggagccggttaccccatggg

SEQ ID NO: 760431 - DNA, 100 bp, Homo sapiens
ggccatggcagcctcactgacatcagccagacctgcctagagctggaacgttacctccagagcgagccctgctatgtttcagcctcagaaatcaaatttg

SEQ ID NO: 760432 - DNA, 100 bp, Homo sapiens
agccggaccgtcacccgctatcctgccaactctatcgtggtcgtaggaggctgtcctgtctgcaggtgtcatggagaaactccagctgggcccagagatt

SEQ ID NO: 760433 - DNA, 90 bp, Homo sapiens
cacgctgcacccagcctcctccagcctccactactccctgcagaggccagaccaggagctgaccgggagctggggccacgggcctaggag

SEQ ID NO: 760434 - DNA, 50 bp, Homo sapiens
atgccctcaaacgcgccaacgacatgggaaagcggaaccaccaaaaggag

SEQ ID NO: 760435 - DNA, 106 bp, Homo sapiens
cctctactccgtgtgcccgtcgctggtcgtgcgacccaagcccctgcattcctgtacgggctcagtagatgaaggcgtttctgagggcttgcctacacttcaaagc

SEQ ID NO: 760436 - DNA, 90 bp, Homo sapiens
cagccacctgcagccatcacccaggtcatgttgctggccaatccactgaaggccaaggtgatccgtgacaagcgcacaggcaagaccaag

SEQ ID NO: 760437 - DNA, 100 bp, Homo sapiens
tccaggtggccgtgaagcacctgcacatccacactccgctgctcgacaggggcggcctgtggtaatttgtgataaggaggatactgagaccattaagaac

SEQ ID NO: 760438 - DNA, 75 bp, Homo sapiens
gtccccggccgccatggagcagccgccggcgcctaagagcatgttggcagataaattgaacatgactccagaaga

SEQ ID NO: 760439 - DNA, 75 bp, Homo sapiens
ctcttggcccatggacctgaaggagaagcacctggaagctcttcgtgggcggtcttgactggagcacgacccaag

SEQ ID NO: 760440 - DNA, 56 bp, Homo sapiens
cttccttctcttgtctgtgtgataacaggcaaagggcctctgagggagtattacag

SEQ ID NO: 760441 - DNA, 75 bp, Homo sapiens
gtttcctgtgtccagcgctgccggagccgcctgagatgcttgtggttggtggcatcgaccgggtttatgaaattg

SEQ ID NO: 760442 - DNA, 100 bp, Homo sapiens
gccaccgcaggtcgaggacggtcggactcccgcggcgggaggagcctgttcccctgagcttcctaatgaagatcctgagatttttgatgtttcatccaag

SEQ ID NO: 760443 - DNA, 75 bp, Homo sapiens
aaaactgtcacttcaagtacagaaaagggcttgattggtgactctgacatcattagaagcatgccagaacagact

SEQ ID NO: 760444 - DNA, 75 bp, Homo sapiens
agcaagattataatcaggaagtggatgcctccatttttaagctccagcggcgccatgagcaaatgaaaaagaatt

SEQ ID NO: 760445 - DNA, 83 bp, Homo sapiens
agtgatggtcagctaggactcatgactactgaggattctgtggcagtgcccagataaccacctgcctcaaagataatctgctc

SEQ ID NO: 760446 - DNA, 90 bp, Homo sapiens
ccgcggcccccggacaagggcagcttcccgctggatcacttaggatgaaatctttgacatggtaaaaccaaaggatcctttgaaaatctc

SEQ ID NO: 760447 - DNA, 97 bp, Homo sapiens
gaaccagcctgcacgcgctggctccgggtgacagccgcgcgcctcggccagtgggtaattccagaattgattggccataccattgtcactgtattac

SEQ ID NO: 760448 - DNA, 100 bp, Homo sapiens
gactcagtaccgggccaaggatggcagcgggaccggcggctctaaggaagagctaaggagcaaatccaagatctgtgccaatgtgttttgtggagccggc

SEQ ID NO: 760449 - DNA, 100 bp, Homo sapiens
gggggcgccctccggacgcggcagagtgatcagcagctggactgtgccttggacctaatgaggcgcctgcctccccagcaaatcgagaaaaacctcagcg

SEQ ID NO: 760450 - DNA, 100 bp, Homo sapiens
ccctgctcctctgttctccgcagcctgatgtggaggccatagtggagtttgactaccaggcccagcacgatgatgagctgacgatcagcgtgggtgaaat

SEQ ID NO: 760451 - DNA, 89 bp, Homo sapiens
gcgacaagccgctggcagccgcggatctcaccgccgctcaggtaatttctatgcagcccccgacccagagccgagctccacttctgctc

SEQ ID NO: 760452 - DNA, 50 bp, Homo sapiens
ccatgagggccgggcccagtcaccgaccaaatggaatctatttggaattt

SEQ ID NO: 760453 - DNA, 82 bp, Homo sapiens
aaacctgaagtttctgaccaggacgagaagcaccgtggctgagtctgtgagccagcagcatacttccacaggctgcactcga

SEQ ID NO: 760454 - DNA, 75 bp, Homo sapiens
aaccggccagaggacgagtgtggtcagatggacaatcggagcaagctccggaacatcgtggagctgcgcctggca

SEQ ID NO: 760455 - DNA, 78 bp, Homo sapiens
cacaggccaggatgggtggaagtgaaggagtacatgtcccagagcaagcacacggaggcccgggagctcatgtactcg

SEQ ID NO: 760456 - DNA, 51 bp, Homo sapiens
gcaggttctcggagggaccgggatagccacctgtctttaccagtttccaag

SEQ ID NO: 760457 - DNA, 101 bp, Homo sapiens
accccagccctaggctggggttctttccattatagaggagacggattcagaagggctacagactcgcagggcaatgacattaaagtcactgctgagagcac

SEQ ID NO: 760458 - DNA, 101 bp, Homo sapiens
gaagtgatcttacagaaggcagccacagtgaaatcagacatctacagcttttctatgatcatgcaggagattttaacaggagccggtgaaacctgaagaag

SEQ ID NO: 760459 - DNA, 74 bp, Homo sapiens
cctcgaatttcagcgtaaactgcagcatgatgttctgaagcttgaggcatccaggctggagaagcagaacagca

SEQ ID NO: 760460 - DNA, 75 bp, Homo sapiens
aagaatttgtacacatgtacaatgcccaatgcgatgctttgcatcctaaatcagaccagcatctcagacatgtcg

SEQ ID NO: 760461 - DNA, 101 bp, Homo sapiens
cagccccggtcacagagtgcaccgtatcctgtcacttctggatgtgagagtgagcgattacagtctgacctggtagtatgcattgtaattggtgtgctgta

SEQ ID NO: 760462 - DNA, 75 bp, Homo sapiens
ggggtgtcggcgcctcattcgggtggagctgagccggagacaggaactgtggctgcaccatctgtcttcatcttc

SEQ ID NO: 760463 - DNA, 89 bp, Homo sapiens
aaatccgaaatttcttgggtgaaaaatatatccgcagggttcggatgagaccaggactcctagaaggaccccatccccctccccccacc

SEQ ID NO: 760464 - DNA, 83 bp, Homo sapiens
cccaaatcccggaaactccagcgtgtctccagccgtgcctcccgcgacgatgcccctcaacgttagcttcaccaacaggaact

SEQ ID NO: 760465 - DNA, 90 bp, Homo sapiens
ttggaaatggctgcaggttcagaactctaaaatagagctcaagcttgagaagagagaaccactaaagggcagagcaaagactccagtaac

SEQ ID NO: 760466 - DNA, 74 bp, Homo sapiens
tgaaatgtgaggcgtgtcaccagtttatcacagggaaagtcctggagaacgatgccaacgggactgcaaagccg

SEQ ID NO: 760467 - DNA, 74 bp, Homo sapiens
cctcagcagcatttggatcttcataccacaggctcatggacacagcacggattgcagttgtcggggcaggtgtg

SEQ ID NO: 760468 - DNA, 82 bp, Homo sapiens
gctatccagaacctccactctttcgccaacatgcccatcactcggatgcgcatgagaccctggctagagatgcagattaatt

SEQ ID NO: 760469 - DNA, 97 bp, Homo sapiens
atcttatttctgttgaattgtatttagtaactcaaaaggcatataccaagctgtcagaagcagcttcatttaaaagacatcgctattgcggttccga

SEQ ID NO: 760470 - DNA, 83 bp, Homo sapiens
tgataacaagaagaataaagggcagctcactaataacagatcaactcctagcaatcatgatcggatacagcgtctgaggcaag

SEQ ID NO: 760471 - DNA, 75 bp, Homo sapiens
ggagacctacctgcggcgtcggcagctgctgctccgagaacctcaagaaggcatgaagccagcccctgcagtgcc

SEQ ID NO: 760472 - DNA, 74 bp, Homo sapiens
tgtggcaagacaagctcagaactgagaagctgtcaccacagctggtgccgacaagaaagccgaggctggggctg

SEQ ID NO: 760473 - DNA, 75 bp, Homo sapiens
cctccctcaatcctcatagcttctctttgggatgatgattattccccaccttctaagagacaaagaccaacgagc

SEQ ID NO: 760474 - DNA, 82 bp, Homo sapiens
cgtgggggaccggctgttggcgggctgcaaggtgtgactgttgtaaatctcaaggaactcttaaagagcgagttcagtggcg

SEQ ID NO: 760475 - DNA, 51 bp, Homo sapiens
ttaaaagtggtgatgaacttcaggatgagttactccacaggatccgctgaa

SEQ ID NO: 760476 - DNA, 100 bp, Homo sapiens
gggaagagaaaaccagcgtggttctgagcacacggttaatttcaaagcttttcccatggagagacaaagcatggaggacacaagaatgggaggaaaggcg

SEQ ID NO: 760477 - DNA, 119 bp, Homo sapiens
ggccgggagtccccactgtctctctacaatgaggagctggtgagtgcaggtcgtaatctgaaggagtggctgagggagcaattttgtgatcatccgctggagcactgtgaggacacgag

SEQ ID NO: 760478 - DNA, 90 bp, Homo sapiens
ccgggagcgagctgggagggagccgcgcgcctttgtgcgcgcgccgagagatgaaaagatgggccaggagtccagtttctggaaggccaa

SEQ ID NO: 760479 - DNA, 100 bp, Homo sapiens
gagaacttctggagctggccaacgtgcaggagacggtgaacctgctcctcaacaagggagccagcctgaatgtctgtgacaaaaaggagcggcagcctct

SEQ ID NO: 760480 - DNA, 98 bp, Homo sapiens
gttggtggaggaggtggcaggcctcggcggattctgaaaccttccttgtatccctcctgagacatctttgctgcaagatcgaggctgtcctctggtga

SEQ ID NO: 760481 - DNA, 95 bp, Homo sapiens
agattatacggaaccagaagcagattgccaacattgaccgtattacaaaagaccatcatgcagacatcagagactgggtcggacacaggctcgac

SEQ ID NO: 760482 - DNA, 127 bp, Homo sapiens
gccgccacactttcctgggagcggcggccacggaggcaccatgaagaagtcttactcagatgccatggacaatattaccaggcagaaccaattctacgatacccaagtcatcaaacaagaaaacgag

SEQ ID NO: 760483 - DNA, 119 bp, Homo sapiens
atggaacccgaagaagaaaggattcgttacagccagagattgcctccacaaatgggaagtgttcctgtaatgacgcaaccaaccttaatatacagccagcctgtcatgagacctccaaa

SEQ ID NO: 760484 - DNA, 96 bp, Homo sapiens
ccaggaatgtgctgctgttcctgcaggacaaggtcagaatggcggcagtggagcatcgtcattcttcaggattgccctactggccctacctcacag

SEQ ID NO: 760485 - DNA, 100 bp, Homo sapiens
aagctatagactacttctactccaccaggaagtggcccgttgccgacaagccctggtgccgcgtgccttccatgcttcagctgtggggctaaggtcttca

SEQ ID NO: 760486 - DNA, 80 bp, Homo sapiens
aggagtcgtagcggtcgaggcttttgcggctccggcgtgccggaaactgactacacagacttagtcttctccactccgtg

SEQ ID NO: 760487 - DNA, 100 bp, Homo sapiens
aaccaatggcgagaccacccagaaggaggggacccaggccactgagaatgcaaaggaggaagtgaggcgaattctggggctgctggatgcttacttgaag

SEQ ID NO: 760488 - DNA, 98 bp, Homo sapiens
gacagagctggcctggagtccgcggctggccgcgtgagtaggctcccagccccattgccaataccttcctccactatcgaaccagcaaggtgagggtg

SEQ ID NO: 760489 - DNA, 75 bp, Homo sapiens
ctgcagctgctgcagctgctgcacagaaattaatgcgaacagacagacttgaggaagttggtgaaccatctaaag

SEQ ID NO: 760490 - DNA, 100 bp, Homo sapiens
gaattatgcagctttcaagaggaaattcgaaagcggtctaaccatagaagattactgacagccctgtcctaggagcacaacgtccgagaaatgctcagct

SEQ ID NO: 760491 - DNA, 90 bp, Homo sapiens
gccccttccgattgggagggacaagtgccggtggtggtgtgcacattgagccccggtatagacagttcccccagctgaccagatcccagg

SEQ ID NO: 760492 - DNA, 50 bp, Homo sapiens
aaagtgagtcagctgtacatggccaatttaacctttgacccagctgctct

SEQ ID NO: 760493 - DNA, 100 bp, Homo sapiens
catgtagttggagtagatgtcggatttgaaaatccaatgtttgcttgtctggaaatggattatgagtgtaactatgttttcaccaaagaccaacatcaag

SEQ ID NO: 760494 - DNA, 100 bp, Homo sapiens
aaaagagccctggatggtgaagaaggagggaacaagaggcccatgccctgactttgagcaaagcatggtcctggttgcctgtggaccatacaccacatct

SEQ ID NO: 760495 - DNA, 100 bp, Homo sapiens
gctgtccgggctgtgacgcgcatgggcatttatgtgggtgccaaagtcttcctcatctacgagggccttcaccgccctgtgctactctgcagacggccac

SEQ ID NO: 760496 - DNA, 100 bp, Homo sapiens
cgacgagaccggcgggcggacagcgactccggagccatgtggctagaaatcctcctcacttcagtgctgggctttgccatctactggttcatctcccggg

SEQ ID NO: 760497 - DNA, 75 bp, Homo sapiens
cggggcctccgcagcgacaacatggaggccgtgaagaccttcaatagcgaggctgccttggagttttcataagaa

SEQ ID NO: 760498 - DNA, 75 bp, Homo sapiens
gtctctgcagtttataccgtcctggccaggcgcaggatgggcaacactccagattcagcctcagacaacctcggt

SEQ ID NO: 760499 - DNA, 75 bp, Homo sapiens
ggctgggtctcggagtgggagacgtggagtgcagctgctggagccagttctgcttctcggcaaggagcgatttgc

SEQ ID NO: 760500 - DNA, 100 bp, Homo sapiens
gcctttccagtgactggaataaaaacagagtccgatgaaaggaatgggtctgggaccttaacagggagccatgtgagaaagatcagtctaaagaaaagga

SEQ ID NO: 760501 - DNA, 73 bp, Homo sapiens
cacctcttcaatgactgcttgctgctctctcggcggaaggacaaattgaagaagttcgacaggtgggatccta

SEQ ID NO: 760502 - DNA, 100 bp, Homo sapiens
gggacttctgctacgttggggagcagtactgtgtagccaggatgctgcactcctgtaggaggcctgctgatggcatttcagaagtactctggtgagactg

SEQ ID NO: 760503 - DNA, 90 bp, Homo sapiens
ccttttgtgctgagccaactcgagccaggctgcaaaaagccaagacaatgcaaactccagtgaacattcccgtgcctgtgctccggctgc

SEQ ID NO: 760504 - DNA, 82 bp, Homo sapiens
agcctgcacagccgcggcggcagcagcagtgagaggccccagggagcgccatggcccgcgcacgccaggagggcagctcccc

SEQ ID NO: 760505 - DNA, 83 bp, Homo sapiens
ggctcgagagctcgccccgaacgggggtcttcctcctccgccgttgacaggttttgagcaaaattttggactgtgaagcaagg

SEQ ID NO: 760506 - DNA, 75 bp, Homo sapiens
agcaagtatgtcagtgaggagacttgtcacatgcatcaggaccagaggcatcattcttaacaaagaagttaaata

SEQ ID NO: 760507 - DNA, 100 bp, Homo sapiens
gggatcccagcctcaggcgtgcgcggacggtgtgcgggagctgaacaagcggctcactgctcctcctgcagctttcctctgtcatttggataatctcctt

SEQ ID NO: 760508 - DNA, 101 bp, Homo sapiens
acggcgactggacttacgaggagcagtttaagcaggtgagcacctgcggatctgtccccagggctacacctgctgcaccagcgagatggaggagaacctgg

SEQ ID NO: 760509 - DNA, 75 bp, Homo sapiens
ccttcactctctccagcaacatcatcatggacacctccaccttcctgctcaggctttccggcagctgtcgcaccg

SEQ ID NO: 760510 - DNA, 97 bp, Homo sapiens
tccgctaccaccaccacaccagaaactagcaccagccccaaatttcatatgattgacaatctgctgtccccagatcttattgatggtgtgctcacca

SEQ ID NO: 760511 - DNA, 50 bp, Homo sapiens
ctggatttccgtagtattgatggtcggattgtttgtgctgaacgaactgt

SEQ ID NO: 760512 - DNA, 75 bp, Homo sapiens
ccccgcccagagtcatggcggcagcagccgctctgagggcgcctgctcagggcgaccattgacgaggtggagacg

SEQ ID NO: 760513 - DNA, 108 bp, Homo sapiens
gtgaaactccatgatgaaaccctaacgtatctcaatcaagcccttagagatttgtttgattccatggataaaacttcttccagtattccacctattattctactgcag

SEQ ID NO: 760514 - DNA, 100 bp, Homo sapiens
gagagaatgctgacagtcctgcagggccatcgatgcacccctcggagctaatagcggagatgagaaacagtgggtttgcactgaaacgaaatgtactggg

SEQ ID NO: 760515 - DNA, 80 bp, Homo sapiens
gatcgtcagaattatcgggcacttctttgctagccagggagaccctgcagcgtcatggtgctggagctggtggcacccgc

SEQ ID NO: 760516 - DNA, 74 bp, Homo sapiens
atcgccatgtgacacactggcatcaaggtttttagaacttcagccataaaaatgggcagaattttccttgatca

SEQ ID NO: 760517 - DNA, 87 bp, Homo sapiens
ttagagcctggctactcacagttgaagcctgattgcagggtgtcaaattgagaaccaggtagatccccaccacctacagtaaaaagg

SEQ ID NO: 760518 - DNA, 96 bp, Homo sapiens
cggcaaataacacagccagtcagcaagcagcatcacaagctcagcctggacagcaacagacttgggaagatccccatgaaaaagataagagcacga

SEQ ID NO: 760519 - DNA, 74 bp, Homo sapiens
caaaagccaagaggaggacagttcgctacacagcaatgcatcgagtgttcctggaaaacaatggaaaggacaat

SEQ ID NO: 760520 - DNA, 83 bp, Homo sapiens
ctggaagctactactacgtggtgcttggaaagcaatgtctcaggctgtgcagacaaacggaactcaaccattaagcaaaacat

SEQ ID NO: 760521 - DNA, 82 bp, Homo sapiens
aaaccgagggcgatgaagaagcagaggaagaacaagaagagaaccttgaagcaagtgttacatgggaataggactctcggct

SEQ ID NO: 760522 - DNA, 123 bp, Homo sapiens
acaggccatgcctttcaagtgcatgcagctcactgatttcatcctcaagtttccgcacagtttcacttctccgaaccctgaggcagtgtgtgaagctgggacgccagccatgttccagaccgc

SEQ ID NO: 760523 - DNA, 75 bp, Homo sapiens
gaaaagaatacattcctgattacctgccacccattgtgtcttctcaagaagactgtggatattcataaggagaaa

SEQ ID NO: 760524 - DNA, 101 bp, Homo sapiens
ctggctctgctgctgccgccggcgaaggaggaggcgttgccgggatagctgccgcccgggagaggtgacccgggcgccctgctagggtgaaggcccctgcc

SEQ ID NO: 760525 - DNA, 98 bp, Homo sapiens
cgatgtttcaatattggaagcgctttgatttacagcagctgcagagtttatgtggccgaggcagacaagtggaattaggccttgctgcaggggacttc

SEQ ID NO: 760526 - DNA, 73 bp, Homo sapiens
ttggatcctggttccgtccgctaggagtctgcgtgcgagccgtcatttcaccaagctgataatgttcggggaa

SEQ ID NO: 760527 - DNA, 90 bp, Homo sapiens
gactgcgaagaactcctaaacaggtggatccagatccataatgagatggcatcaacatcagataaaggtgcccaaggaagaaatgacaag

SEQ ID NO: 760528 - DNA, 98 bp, Homo sapiens
tctcaaggaaccacacatgtattaagatttgatcatggaagggaagtggttgctgtgtatgttactggtgcttggaactgctattgttgaggctcatg

SEQ ID NO: 760529 - DNA, 100 bp, Homo sapiens
cgagcatctccccgcagccaacggcaagggcggcgaggctccggccaacgggctgcgcagagccgcggcgccggagattcccgacagttaagcaatgggg

SEQ ID NO: 760530 - DNA, 98 bp, Homo sapiens
atcttcagctcttgggtttagcaaaagttcatctccttctgcatccttaactgagaatgaggcatgtaatgaatttactacacatgtgatgaaccttc

SEQ ID NO: 760531 - DNA, 98 bp, Homo sapiens
ttccactacgaccggccctggcagcgcgccacagcccgcgaagccaacgagtgcgtggaaggacagaataacgggctcccagattcacaagccccacc

SEQ ID NO: 760532 - DNA, 74 bp, Homo sapiens
tgatagactccttccagaataactcaaaggatgaaaactttcggaagagaaagttgcctgtggtaagttcagtt

SEQ ID NO: 760533 - DNA, 80 bp, Homo sapiens
caaacccggtggaccatatgtaggcactggagatattattgctgtcatgataacagaattgaggggtaaggatattttga

SEQ ID NO: 760534 - DNA, 100 bp, Homo sapiens
ggagcaggaaaaccggaagggcctgatagccgccatctgtgcaggtgtttccaagccaggaccctctagatcgagcagatttcaatgctgttgagtatat

SEQ ID NO: 760535 - DNA, 129 bp, Homo sapiens
aggaaatccatatcccaaaggaagacctagccgcataaatggaattttcccaattaaatctcttgatgaacagtgtgtggttggcaaaatttccaagcactggactggaattttgagagaggcatttac

SEQ ID NO: 760536 - DNA, 100 bp, Homo sapiens
aaacgtcaggccgtagccgaagcctcggaaggagcggcccacggcaaagcttattctaccagattccatgaaagtattgccagtgtacatgaattgcttg

SEQ ID NO: 760537 - DNA, 100 bp, Homo sapiens
gccgcccggggcagggctcgggagagcgggaacttgctactaccagcaccatgccctaccaatatccagcactgaccccggagcagaagaaggagctgtc

SEQ ID NO: 760538 - DNA, 100 bp, Homo sapiens
caagaactgaggagcaccaggagacgcaactcatcgggtgacagatcagtcagtgaaagcatttgctgaacactgtcctgagcttcaatatgtaggcttc

SEQ ID NO: 760539 - DNA, 75 bp, Homo sapiens
tggatttttttcgggtagtggaaaaccagttttgctacttgagaagatagaacatgatgacatctgcaataaaac

SEQ ID NO: 760540 - DNA, 75 bp, Homo sapiens
agtctaagggatatggctttgtctcctttttcaacaaatggatggatagagatctgatggtaggaaagctggaaa

SEQ ID NO: 760541 - DNA, 83 bp, Homo sapiens
cgacaagccgctggcagccgcggatctcaccgccgctcaggtttaagctatgaagaaggacatccctcacactctgaaacaga

SEQ ID NO: 760542 - DNA, 100 bp, Homo sapiens
gtcatgtggcagtggaaaatgcgctcgggctggaccagcagggccaattcctgtccccccagcagcatggcatcgtgtgctgaaccctctgagccctctg

SEQ ID NO: 760543 - DNA, 100 bp, Homo sapiens
cgcaatcctcagcaacatcttaatgcacagccacaagttacaatgcaacaggaagctgcagtaaaggaagatgaagaagaagtttcagataagggcagtg

SEQ ID NO: 760544 - DNA, 100 bp, Homo sapiens
gaaacctgacggtgctgtacggggggctgctggagcatctggccaggtgaaatgacaatggatgctctgttggctcgattgaaacttctgaatccagatg

SEQ ID NO: 760545 - DNA, 98 bp, Homo sapiens
ggagggcggggagaggaccatgtgagtgggctccggagcctcagcgccgcgcagaaccacgaagctgccctgagacgctcactcacgctgtggggatg

SEQ ID NO: 760546 - DNA, 83 bp, Homo sapiens
agacactgcgtcaagcaggtgccccgaataacgtaaggggcctggataccaagaagtgactgctcatctaatccataaagcta

SEQ ID NO: 760547 - DNA, 75 bp, Homo sapiens
ggcaatggcacaaagttctctcgatcagggcatacatctttcttcgacaaagggagtgtcaaagccagccacatc

SEQ ID NO: 760548 - DNA, 76 bp, Homo sapiens
ctttcctacccagtgcagatcgcccggacgcacacgagatggggtgatgattatgatgaagaaggtgaagaagcag

SEQ ID NO: 760549 - DNA, 73 bp, Homo sapiens
caaaatgtggccacagcttttgtgaacagagtatctgtcaggcaagagctgctgtgatggtttatgatgatgc

SEQ ID NO: 760550 - DNA, 50 bp, Homo sapiens
gatgcatcagatttgtgcacagatgcctttgagtaatggacagatgggcc

SEQ ID NO: 760551 - DNA, 49 bp, Homo sapiens
cctcccaaagtgctggggttacaggcaaacacagagcagcccaagctga

SEQ ID NO: 760552 - DNA, 75 bp, Homo sapiens
ctctcatctacatcgccttcatcctgggcaggagctgggaatcccaagtgcaaaattgcaattgttttgggaaga

SEQ ID NO: 760553 - DNA, 80 bp, Homo sapiens
ccatcctgctcctgaacttcctgcgctcgcactgtcataccatgggcagttttaccgggaccactgccatggcctgggta

SEQ ID NO: 760554 - DNA, 82 bp, Homo sapiens
gtacatccactggacctaaaatatgaccctgatccagggtgaggtggctttgaccccgggttgcccggccagcacgaccgag

SEQ ID NO: 760555 - DNA, 75 bp, Homo sapiens
caatgaggaggagacggagcacgccaaaggacctgcctagagctggaacgttacctccagagcgagccctgctat

SEQ ID NO: 760556 - DNA, 128 bp, Homo sapiens
ctcttcccagaaacttcaacatctggaacatgtgatggaaaattatactcagtggctgcaaaaaaccctggaagctgtcctgaatttcaaatactctggaggcccgggccacactgaaggatattaca

SEQ ID NO: 760557 - DNA, 74 bp, Homo sapiens
gagagggactacgtgggcaccttgcgcttcttgcagtcgaaactatgttccaacttcctgtcaacaatcttggc

SEQ ID NO: 760558 - DNA, 74 bp, Homo sapiens
gttcagcagcgcggcagagtcatggggattcatgttacatgtaaagctgtcctcatttgtgactatggacctat

SEQ ID NO: 760559 - DNA, 100 bp, Homo sapiens
agttggaatttgtgcaatgtttagccaacccaaattaccttaattatggaacttgctaaggaagaaaagtgtgaatttctgccattcctgtccccacgga

SEQ ID NO: 760560 - DNA, 83 bp, Homo sapiens
ccgtggggcgcggaaggcctcccggcgctcttcctcccggagtatgggttctccaaaaaatgtggaatcctttgcatctatgc

SEQ ID NO: 760561 - DNA, 82 bp, Homo sapiens
gaggccgcctggggtagcggcggcgggagtcctggcgctctgcaggctttatcctgtggataaacgcagagtgaacgagttt

SEQ ID NO: 760562 - DNA, 75 bp, Homo sapiens
cgcaaactggctttgaagatggctccgtgggccagaaatatcttcccttccaacctggtgtcagcagcctttcgc

SEQ ID NO: 760563 - DNA, 75 bp, Homo sapiens
aaaaagagaagacgctttacccgactctttgggccgttatctcacacgtgccaccttgcttagcgcccgtcaagg

SEQ ID NO: 760564 - DNA, 75 bp, Homo sapiens
ccaaccactgtctacgtggacatgagagccctgagacacgacaggttgattcttcaccacactgaaaccattagg

SEQ ID NO: 760565 - DNA, 83 bp, Homo sapiens
cattgcttctgctttcggggatgcagctggccaagctgatccgacagagaaagaaggggtagaagagccatccaaaaaacgag

SEQ ID NO: 760566 - DNA, 99 bp, Homo sapiens
cgaacagcccctgctggaccggctacaggacatccggcagtcctgttacgagcacatccagaaagaagacatgaggctgcaccgcttacctggccactg

SEQ ID NO: 760567 - DNA, 100 bp, Homo sapiens
cgcccagaggatgagcttgagcacctgaccaaaaagatgctgtatgacatggaaaatccacctgctgacgaatactttgatacaaggcagatccaaccat

SEQ ID NO: 760568 - DNA, 90 bp, Homo sapiens
tttcagcagtgagctgcatccataaagctggaatccttcatagatcacagattctgctggccatattctctactccaaagaggatgcaac

SEQ ID NO: 760569 - DNA, 100 bp, Homo sapiens
ctgcattttcagaagattgtgattcagcctctactaaagttgtcatccgtggagcaggaaaccaggtgtacgaagccatcgacagcagagatggagcatc

SEQ ID NO: 760570 - DNA, 75 bp, Homo sapiens
agaaacccagccgaagcatttaaaagccgattccacgactcttctttgcgggagaacatacgatccgtaactacc

SEQ ID NO: 760571 - DNA, 100 bp, Homo sapiens
gttgggtgcccgcggccacttttgccttcccggcctgcctagggtagttaaaagacgagtgaatgctctcaaaaacctgcaagttaaatgtgcacagata

SEQ ID NO: 760572 - DNA, 75 bp, Homo sapiens
gcagccgggtccaggcaggggctggatggcccgccccccacaggtgagaagccctaccactgcaactgggacggc

SEQ ID NO: 760573 - DNA, 75 bp, Homo sapiens
cttctagtagatcacctattcaaatacgcctgtcaccaggctttctgtgaagaattggaatcaatgatacaggag

SEQ ID NO: 760574 - DNA, 83 bp, Homo sapiens
gcctcagttggaagcagccgatccagcctgcggagcctgtggggcagctatcagttgagggatttgcagttgataaaatggct

SEQ ID NO: 760575 - DNA, 87 bp, Homo sapiens
cgtagataacagcttccgccaggcggtgatgaagaatccccccgaaaggaccccccaggtatcgtcagatcctggaaaaagccattc

SEQ ID NO: 760576 - DNA, 100 bp, Homo sapiens
ttttgggatttgagattgacgcggtgaactctgtccagttttcaaaccacacaggaagcgcaacaggaaaggagagaagaatggcaagggcctacggcat

SEQ ID NO: 760577 - DNA, 76 bp, Homo sapiens
ttcgatggcaattttttgtggaacagaattggagcaggtgaacacacagtgttcatcccctcaggaggacacagct

SEQ ID NO: 760578 - DNA, 101 bp, Homo sapiens
tttgcggaacctgaaaaattcaagaagttgaaaaacgcttttcacgtcacctggagagatgcacaggtccttctctggcctcaattcccgtctcaaggcca

SEQ ID NO: 760579 - DNA, 100 bp, Homo sapiens
cttttgccagacattactacttcctaggcagaatgcttggaaaggtcacgtgttgctgcttgagccctttgaaagcatttttactgtttgccggaacagc

SEQ ID NO: 760580 - DNA, 50 bp, Homo sapiens
cccgggccatggccgccgccgatgccgagctctgcttatgataatgtcaa

SEQ ID NO: 760581 - DNA, 51 bp, Homo sapiens
gccctgaggagtccccgctgcttggaaggagatcgccttagcgatgaagac

SEQ ID NO: 760582 - DNA, 83 bp, Homo sapiens
gtggggctacagattcaccgtgacggccggacacctggggcggttccagacaggtctatgcctctcagcgaatgagagctggc

SEQ ID NO: 760583 - DNA, 83 bp, Homo sapiens
ctgagatgagcagcagcgcagaggaggtgcccctctcttactacaccaacttcagtctattatcctcccagtccacaacgctg

SEQ ID NO: 760584 - DNA, 83 bp, Homo sapiens
gggcccgggtggcagagttgccaaccccagagctgccgagcaaggatgcctgagacccttctgcagaggccgggctggaggag

SEQ ID NO: 760585 - DNA, 75 bp, Homo sapiens
accaagtcttgaagagcttgctggagattgcctttctgggcctgacctcccatgagagaatcagcctgcagaagc

SEQ ID NO: 760586 - DNA, 83 bp, Homo sapiens
attttcttctgcacttctgtctggagaggtgtctgtgacctttgaggatgtggctgtgacattcacccaggaggagtggggac

SEQ ID NO: 760587 - DNA, 89 bp, Homo sapiens
gctgggcgacgagctgaccctgggagacatcgacggggctgcagtgaacctcactctggtcactccagagaaggccatcaagctggcgg

SEQ ID NO: 760588 - DNA, 75 bp, Homo sapiens
cgtctgtgtcgcagcttggtctcagaggagcatcgctgggcaattctgtggtgttcttggtcacacatttatgga

SEQ ID NO: 760589 - DNA, 87 bp, Homo sapiens
gccggggactaaggcgagccggagaccgagcccgaacagcagctcccgtggaagtcgctgaccagcatcattgagtactactacatg

SEQ ID NO: 760590 - DNA, 75 bp, Homo sapiens
ctatggccgtgccctggggctgagccctcagctgggagtgtccactcgccttccaccagcatggcaacgtcttca

SEQ ID NO: 760591 - DNA, 103 bp, Homo sapiens
aagatggggagaaggaagcgagactcatacgcaacctcaatgacaatgcagatcttcgtgaagactctgactggtaagaccatcaccctcgaggttgagccca

SEQ ID NO: 760592 - DNA, 100 bp, Homo sapiens
acactgtgggggtgtcctggtgcacccccagtgggtgctcacagctgcccattgcctaaagaagtttaagtattgaacagacaatgttgaaagatctaaa

SEQ ID NO: 760593 - DNA, 89 bp, Homo sapiens
gacagtctatggatctacattataccaataacgagattgatgtacagctatatattttgtcctttctttcacctcatgatctgtgtcag

SEQ ID NO: 760594 - DNA, 75 bp, Homo sapiens
cttcgtacccgtcttgattgagattttaggtgatgggcaagtcagaaagtcagatggatataactgatatcaaca

SEQ ID NO: 760595 - DNA, 83 bp, Homo sapiens
gttttaacaacctggatcttcgaacttttgacacggctttggaaacgacgtcatgtgttagtacgagctcaactggaggcagt

SEQ ID NO: 760596 - DNA, 75 bp, Homo sapiens
tgctgatgtcagtgggacccattcaggagttgatccccctcatattgtgtacagcatgtctacatcctgagccta

SEQ ID NO: 760597 - DNA, 75 bp, Homo sapiens
gggcactgctgatgctgctttcgctggggtaagaagacatgttggataacaagaagaggtgtagagtttgcatat

SEQ ID NO: 760598 - DNA, 100 bp, Homo sapiens
gctttctgtacagcctgcagaactgcaggatgacgcaaaacacggtgattgtgaatggagttgctatggcctctaggccatcccagcccacccacgtcaa

SEQ ID NO: 760599 - DNA, 88 bp, Homo sapiens
ctgctcgctgggctgctcccgccggtgcccgctcagaagttctcggcgctcacggtactgtctgatgagcgtgaaaggttgtttcacc

SEQ ID NO: 760600 - DNA, 88 bp, Homo sapiens
ctgacaactgcctttactactttgagtataccacggtagtactgaaatatactgtcccaggctacaggaattctctggaattttttac

SEQ ID NO: 760601 - DNA, 100 bp, Homo sapiens
cagctaatggatgcggagcggagggcccgctgaccgctctccgcgcctgggataaaattgtccatggaccacgtgtgccttggtcactactgaagagctg

SEQ ID NO: 760602 - DNA, 129 bp, Homo sapiens
aggaaggttgtgcctgcgggctgcgaacaagctccgggaggggccccaaaggaaggcttcggtgactcaggtgctggagaatctggtaaaagcaccattgtgaagcagatgaggatcctgcatgttaat

SEQ ID NO: 760603 - DNA, 101 bp, Homo sapiens
cccagcatcgcctcggacatctcgctgcccatcgccacccaggagctgcggcaaaggctgaggcagctggaaaatgagaaagatcagtctaaagaaaagga

SEQ ID NO: 760604 - DNA, 73 bp, Homo sapiens
tgacatatttttggacctgaaacagaaattctggaacacctatatgccccaggatgactactcggtcctgttt

SEQ ID NO: 760605 - DNA, 82 bp, Homo sapiens
ccggggagggcccagcgcatccgacagggaaccttctgaccagcctcatgggctcctcagagcaggaggatggggaggagag

SEQ ID NO: 760606 - DNA, 100 bp, Homo sapiens
ctcttctatgctgtgttcagtcggagccagtaaagcagttagcatggcctcattgaaagaactagatcaaagactctttgaaaattacatcgagttgaaa

SEQ ID NO: 760607 - DNA, 73 bp, Homo sapiens
ggcacccagacaggtggcgacggcagaggagttgtgtgatagctgagctttttacagaaggtgtaccattatt

SEQ ID NO: 760608 - DNA, 83 bp, Homo sapiens
catggggcagccccagtggccaccggagctgtgtgagcaagtgacagacctgcctagagctggaacgttacctccagagcgag

SEQ ID NO: 760609 - DNA, 80 bp, Homo sapiens
gccgatccagcctgcggagcctgtggggcaggcgggtgccacgtctatgtgggcttcgtgctgtgggctgctgaatgaag

SEQ ID NO: 760610 - DNA, 75 bp, Homo sapiens
gaagacgggtaggagaataacactggtattgctcgagttccacttgctggagctgccgggggcccagggatcggc

SEQ ID NO: 760611 - DNA, 100 bp, Homo sapiens
tgctcccatccctgcagcatgaacaagggtggttctcttcccaaagtggaagccaaattcatcaattatgtgaagaattgcttccggatgactgaccaag

SEQ ID NO: 760612 - DNA, 89 bp, Homo sapiens
cggggagcgtccggagctagctggatcctctaggcagatgccttcaattaagttgcagagttctgatggagagatatttgaagttgatg

SEQ ID NO: 760613 - DNA, 51 bp, Homo sapiens
aatggtgccacgtgtggtctgtaagtagttttcggctttgtgagaaacctt

SEQ ID NO: 760614 - DNA, 100 bp, Homo sapiens
gtgtcttccccggccggtccctcgcctcccggccgagctgacgaacactctgctccagccaaggtggtgagggcagctgttcctaaacagcgcaaaggca

SEQ ID NO: 760615 - DNA, 82 bp, Homo sapiens
cgtatttgtgtgacttgactcttcaaacacaaaggaatgggtaccacagaccatgtcatcgtcctggcgtccacgaaccgag

SEQ ID NO: 760616 - DNA, 51 bp, Homo sapiens
acatggagattctcttaaaaagctgcccctgagcctggacctgcccagccc

SEQ ID NO: 760617 - DNA, 50 bp, Homo sapiens
agtcagaaccctccgcagagtaaaggtctgtgtatgatgaccaaccaaat

SEQ ID NO: 760618 - DNA, 100 bp, Homo sapiens
gggtcggacgcgtccggctgtggaagagagcggcggccgctcacaacatgcacagcctggcgacggctgcgttttcggctttgtgagaaaccttaccatc

SEQ ID NO: 760619 - DNA, 90 bp, Homo sapiens
ttacgatcaggacggcgagcctattcagacgtttcactttcagatcgacgacatcgcggatggcgccgtgaagcccccacccaacaagta

SEQ ID NO: 760620 - DNA, 96 bp, Homo sapiens
ggggactatgtggagaacctgaacaagtcccagctgaagctgggcatctggggcggggtggcactgaatcaacaagacaagcaactcaattgatta

SEQ ID NO: 760621 - DNA, 100 bp, Homo sapiens
gaaccatgacaggcatgttgtataaatgtacagcttcccatcgacggtcagtgcgcacgttgtaatcagctgaggccatgtcaggagacggagccacgga

SEQ ID NO: 760622 - DNA, 82 bp, Homo sapiens
agaaacgtccacatgtgggtactgcattcctaccggtgtgacaggtcgccatgggctactcacactccttggtgatagcaag

SEQ ID NO: 760623 - DNA, 96 bp, Homo sapiens
ggactatcctctggaggctgtgcgcatgcagcacctgcaatcagaaacggagactgttcatctgtttatcccagctctatcagtcggtgccatcat

SEQ ID NO: 760624 - DNA, 106 bp, Homo sapiens
cgggaccctccccttggaccgagccgatcgccgcggggcagttcgggccggctgtcctggcgcgctggacccacaaaccgtggagaccaagaactggcacacggac

SEQ ID NO: 760625 - DNA, 89 bp, Homo sapiens
ggaagtggctgcgtcgtcgacgctgggctttcgggtcccgcgcccaggctgctcccggcagatcggcttctcctttgtacgacccaagc

SEQ ID NO: 760626 - DNA, 119 bp, Homo sapiens
atggcgctgagtgaacccatcctgccgtccttctccactttcgccagcccgtgccgcgagcgcggcctgcaggaggtcaaaatgcagatcttcgtgaaaacccttaccggcaagaccat

SEQ ID NO: 760627 - DNA, 98 bp, Homo sapiens
gaaaaaaagcagacaatctgaggatgatgttgacttggggatccaaaggcacagaaagtgactgagaccgaagatgatagtgatagtgacagcgatga

SEQ ID NO: 760628 - DNA, 76 bp, Homo sapiens
cgggtccggcactcaagtgattgttttaccacccttcagtttggaaacctgcagaattatgattgccatgttggat

SEQ ID NO: 760629 - DNA, 100 bp, Homo sapiens
agccatctgtggtgccaattgaagagatggacagagacgtatgtgcgttggtctcctaagggcacctacctggctacctttcatcaaagaggcattgctc

SEQ ID NO: 760630 - DNA, 74 bp, Homo sapiens
tctgtcgagcagcggacgccggtctctgttccgcaggatgcttctgatcaagaatctgaagaatgagatcacca

SEQ ID NO: 760631 - DNA, 100 bp, Homo sapiens
ccggaatccgcgcgcagcccggatctgaagaaaacccttgctgtgttattagataacattttgcagcgcattggcaagttggagtcgaaggtggacaatc

SEQ ID NO: 760632 - DNA, 99 bp, Homo sapiens
gctgtaactcttttaaagtatatgtatgacttttaaaagagagagcttgtgaaactgagggaataggtgtccctggccagtgtccttccacctgtccac

SEQ ID NO: 760633 - DNA, 100 bp, Homo sapiens
tgatgggcacctcccgggacgaagaagctcattcacacagaagacccatttaatgatgaacatcaggagaggcaagaggtggaaatgttggctaagaagt

SEQ ID NO: 760634 - DNA, 74 bp, Homo sapiens
caccacctgctgcttttctggagcgcttaccaggtcaatgagctgaaggagaaaggcaacaaggccctgagcgt

SEQ ID NO: 760635 - DNA, 75 bp, Homo sapiens
attttcttatggagaactgtccttgttgccataggaaaaggatacagagtagagtttcatgaacctgaaacttgg

SEQ ID NO: 760636 - DNA, 74 bp, Homo sapiens
gagaaaaatagcacttgaggatgttcctgaaaagcagaaagctgtggaaaatctctgttctcacaaagtctccc

SEQ ID NO: 760637 - DNA, 100 bp, Homo sapiens
tcaaaacgcccgtgcggaccacggcctgtcagcacgtgactcacaccacccggcaagaactgctcactacggctccctgccccagaagtcacacggccgg

SEQ ID NO: 760638 - DNA, 90 bp, Homo sapiens
gaggtcgctccccatccactctcacaagataaagtcctgtttatgaccacagctgtagatttggtaataacagaagtacaggagcctgtt

SEQ ID NO: 760639 - DNA, 97 bp, Homo sapiens
caagaaggacgtggaagaggcagtctcggagtctactcttcatcttgtgttgagacttcgtggtggtgctaagaaaaggaagaagaagtcttacacc

SEQ ID NO: 760640 - DNA, 100 bp, Homo sapiens
ccggcctgtctgccgcgatggatgacagtaaggtacatggaaaacttggggatttcacaataatttcttggacaataatgaggctacagacataaatgca

SEQ ID NO: 760641 - DNA, 75 bp, Homo sapiens
ggccagggccaggcgatttatgggaaagaggcagacattttcctgggcgcgcctcaagttccccatcgactaccc

SEQ ID NO: 760642 - DNA, 51 bp, Homo sapiens
ggagcaggcagagcagccgagccaggtctgtgcttttaataggactgtctc

SEQ ID NO: 760643 - DNA, 82 bp, Homo sapiens
ctgcaggaggagaaccgcgacctgcgcaaagccagcgtgaccatctctctggctgatgaacttgctcttgtggatgttttgg

SEQ ID NO: 760644 - DNA, 74 bp, Homo sapiens
tggaggtggccgtggaggcagaggtggcatggggccttcatggtgaaacacctcttggagtatacccaggcaac

SEQ ID NO: 760645 - DNA, 75 bp, Homo sapiens
cgtcgtcggatgttgtgttgcccgccaccatgagctacacagactgtgccctgtccacggtgcctcctgcatgtc

SEQ ID NO: 760646 - DNA, 90 bp, Homo sapiens
ccacagccaagatgccgggaccccttagaagcctagaaatgcacagtgaacactagtctgaatgtataccgaaataaagatgccttaagc

SEQ ID NO: 760647 - DNA, 85 bp, Homo sapiens
tcaccacaaaagcgaaatgggcacaccacagagtctttggatttgtggcccggaagcagggcagtgccacggataatgtgtgcca

SEQ ID NO: 760648 - DNA, 75 bp, Homo sapiens
cagatctgtgtccttcaccatgagatcatctggcctgctgggtgatctgtgaaaatggttcgctattcacttgac

SEQ ID NO: 760649 - DNA, 98 bp, Homo sapiens
ctgcagaatccactcatgatcaaaatcaaccaggatcccttaggcatccagggacgcaggattcacaagtagagacagggtttcaccacgttggccag

SEQ ID NO: 760650 - DNA, 75 bp, Homo sapiens
tcagcttttgcggcacttggaggtgaaaggtgtagcagtcactcggcctacacccacagcatcgaccttgtgaac

SEQ ID NO: 760651 - DNA, 98 bp, Homo sapiens
ctggtggtgcttccaactgcgggacaggaagtggccgtagcggcttgttggataaggctgattcaccccaagagtggccgttcctaccacgaggagtt

SEQ ID NO: 760652 - DNA, 98 bp, Homo sapiens
atggcagtgtgtgtgtttggaatcatgaaacacagaactgctatgatcttctggtcagaaagaaaagacttattgttctcttcagccactggttactt

SEQ ID NO: 760653 - DNA, 90 bp, Homo sapiens
gaatggaatgctcctaaatgatcgcaaagtactgttccaccaacaacccctcccaggctaagctgcggcgggagctcgacgaatccctcc

SEQ ID NO: 760654 - DNA, 87 bp, Homo sapiens
gtggccatgtgcagccgctacgagcgggacggtatgcgggccatcctggggtcctacgacagcgagctgaccccggccgagtactca

SEQ ID NO: 760655 - DNA, 133 bp, Homo sapiens
aggctgccggatgtctgatctccgaataactgaggcgtttctgtacatggattatctgggctgatcccttatccaacatggttctaaccttcagtactaaagaagatgcagtttcctttgcagaaaaaaatgg

SEQ ID NO: 760656 - DNA, 90 bp, Homo sapiens
ctgcagtggcgcctaaagtctgagagagggaagtcgcctctgtgctcgtgagtgcatggggtataagaaatggtggagtcaatgaagaaa

SEQ ID NO: 760657 - DNA, 50 bp, Homo sapiens
acgagatgatcaaacgcctgaaggaattctcacactcaagaaagcaaatg

SEQ ID NO: 760658 - DNA, 83 bp, Homo sapiens
gacgacatgttgcttttcgtggaggtgctggagaatctggtaaaagcaccattgtgaagcagatgaggatcctgcatgttaat

SEQ ID NO: 760659 - DNA, 51 bp, Homo sapiens
aggaaattgaactaagaaatggagaggcagaaacggaattacagagagctg

SEQ ID NO: 760660 - DNA, 133 bp, Homo sapiens
caccaaaaacaggagtattaaatgaaaacacagtttctgcaggaaaagatctctctacttctcctaagcattacaacacctccttgcttgccgctgcagcagcagcagtttcagatgatcaagacctcctaca

SEQ ID NO: 760661 - DNA, 83 bp, Homo sapiens
tggcgccacaagctcattcactgtgtaggagaaccaggtgcatcagcgcattgcggagctgaggaaagcaggtctgtggtccc

SEQ ID NO: 760662 - DNA, 100 bp, Homo sapiens
ggcagcaacagtcgcaggagatgatggagggtcaggatttaagtttacctcaaaaatggaagattttaacatggagagtgacagctttgaagatttctgg

SEQ ID NO: 760663 - DNA, 75 bp, Homo sapiens
cagtcctcctgcctcagtctcccaaagtgctggaattacaggggtgctgctagctgaggaggggatagctcctct

SEQ ID NO: 760664 - DNA, 100 bp, Homo sapiens
atctggcactgtggttcctgcatgaagacagtggctggcggtgcctggacgtacaattggacatgatataggtcgtggatgtatggggaatctaagagag

SEQ ID NO: 760665 - DNA, 74 bp, Homo sapiens
cagtcctcctgcctcagtctcccaaagtgctggaattacaggggtgcatggaggactgcaacagaggagtgggg

SEQ ID NO: 760666 - DNA, 99 bp, Homo sapiens
gggctggatgacccagaagcatgagcggaagagtctgccgaaggtgaaggccatggacttcatcacctccacagccatcctgcccctgctgttcggctg

SEQ ID NO: 760667 - DNA, 99 bp, Homo sapiens
cttggtttgcctatgtcaagatcacagaaatttgaagatgctaaacttgctgctgccatctctgaagtggtttcccaaaccccagcttcaacgacccaa

SEQ ID NO: 760668 - DNA, 78 bp, Homo sapiens
caggctctgcgggaggtggagcacctgaagagatgccagcaggggttcggtccgagcccggtgggaggctcccggagc

SEQ ID NO: 760669 - DNA, 99 bp, Homo sapiens
aattcagaaggagctagctgaaataacccttgatcctcctcctaattgcagtactatactggcaattgctggagaagattttgcaattgttgcttctga

SEQ ID NO: 760670 - DNA, 100 bp, Homo sapiens
ggtcacagtaaggccaaaaatgtgcatactcacagagttagagagagggatggtggtaaacctagcctttaagcaacctggaaagaggctagaacaccaa

SEQ ID NO: 760671 - DNA, 98 bp, Homo sapiens
gactcgctcgacccgtccttcactcacgccatgcagctgctgacggcaggccatgttggggccccgatgccgtgcaatttgataaaacttgttgatgt

SEQ ID NO: 760672 - DNA, 100 bp, Homo sapiens
ccagcttcaagctcatgtggacaagcacatacccccggcctcatgagtacctgtccccagcggatctgcccaagagctgggactggcgcaatgtggatgg

SEQ ID NO: 760673 - DNA, 83 bp, Homo sapiens
cagaatctaatcaagcgagacccgccggcctacatcgaggaggaaaattgcctaagaattatgacccaaaagttaccccagat

SEQ ID NO: 760674 - DNA, 96 bp, Homo sapiens
ggatagccaatcggaccaaaaattcactcactttgcaatggaaggtccggcgggcggtggcctccgtggtgggcggctggctgctgtgtctgcgtg

SEQ ID NO: 760675 - DNA, 100 bp, Homo sapiens
acaacatttcctctcgggaagagatagatcatgcagagtattacctttacaactggggcacccagggtgacttctccacaacccatgcactgccagctgt

SEQ ID NO: 760676 - DNA, 51 bp, Homo sapiens
gagcaggctgatctactgcaggagcatccagagctgctgttggcggattgt

SEQ ID NO: 760677 - DNA, 82 bp, Homo sapiens
tggagtgccctgcctggagggagccctcctggctgggggcaagaagctccaccatgaggcgaggtggatggaggaagcgagc

SEQ ID NO: 760678 - DNA, 121 bp, Homo sapiens
gcgggcgggtcggcgctgccccgtgggctcgctggggagccacggcggagacccccgccctcaactgaggtgctggagaatctggtaaaagcaccattgtgaagcagatgaggatcctgca

SEQ ID NO: 760679 - DNA, 75 bp, Homo sapiens
gtgcgcgaggtcaaggccagcggatattgtacctgtggatgcatcttatgaagtaaaagaactatatgtgccaga

SEQ ID NO: 760680 - DNA, 75 bp, Homo sapiens
cggctgcggaggaggatggactcggggagaaagaacaggccgcgtgaattatgtaacctcattacgctggatgta

SEQ ID NO: 760681 - DNA, 100 bp, Homo sapiens
acagagttccttgagctcggaaccaggatatcaagaccaaatggaggatgttaagcaagtttttggacagaccacaattcatcaacatattccatttaac

SEQ ID NO: 760682 - DNA, 81 bp, Homo sapiens
tttttttctccagccgagaggacgcggctgtgatatacgaaggaatccctttgcccacgtccagctgaagccgacagtgac

SEQ ID NO: 760683 - DNA, 75 bp, Homo sapiens
ggggccagggaaccctggtcaccgtctcctcagggtgagaactctgtctcagtcgacgggaagtgcagtgactcc

SEQ ID NO: 760684 - DNA, 100 bp, Homo sapiens
cgcctccacccagcctccgccatggacctcttcggggacctgccggagcccgagcgctcgccgcgcccggctgccggtacagatatttggcagctttagt

SEQ ID NO: 760685 - DNA, 100 bp, Homo sapiens
taagaagagcaaagtaaatgctgtcttttcccaaaagacaggctcttcacctgaagggggaaatttgcagtggtgagaaaatgtataaagaaagattctg

SEQ ID NO: 760686 - DNA, 100 bp, Homo sapiens
atttcgcagagctgaagatcaagcgcctgagaaagaagtttgcccaaaagatgatatgtgaaagaggccaaagaagcaactaagaatggagacctggaag

SEQ ID NO: 760687 - DNA, 100 bp, Homo sapiens
ctccagtcggtgttgagcacggcgagcagtctcaggcctttagtgatgatgactttatattcagagcaccaatcaaattaagcaagcctggggaacttcg

SEQ ID NO: 760688 - DNA, 75 bp, Homo sapiens
gaaagaggcacgcatttttgacaggtgtcaagctagggatgcggtccattcccattgccactgcttgcaccattt

SEQ ID NO: 760689 - DNA, 49 bp, Homo sapiens
ttcctttcttgaagtgcccttatcagacagagtcttgccctgttgccca

SEQ ID NO: 760690 - DNA, 100 bp, Homo sapiens
cgatagtgccaggcctatgttggagtgtgaagaccagaaggtggaatgcctgtacgaggcgctgaagagagctggagacaggctcctgggctccttcccc

SEQ ID NO: 760691 - DNA, 100 bp, Homo sapiens
gggaactttcccagtccccgaggcggatccggtgttgcatccttggagcgagctgagagctcgagacaaactgggaagattgagcctgtggtcctgccgc

SEQ ID NO: 760692 - DNA, 82 bp, Homo sapiens
ctgcagagctgtggcttaccagtgtgccctgctttacaccagctgtgcagggcagcgtcggctccgcatccataatctggcc

SEQ ID NO: 760693 - DNA, 97 bp, Homo sapiens
ggatcaaagagcaaacagattcagtggcctgcattgatgatgaataaggtatttggaggtactgtgcacaaaaaaagtgtcagagaagatggagttt

SEQ ID NO: 760694 - DNA, 97 bp, Homo sapiens
aagggggattccctatatattactatatcgtagtcctgctgagttatgctttacatcagagcatgaataatctttcatttagtgagctatgttgcct

SEQ ID NO: 760695 - DNA, 100 bp, Homo sapiens
ttggcctctctggtttccaggcagcgggggagagagccgggaagcactggggcattgccatgctgttaccttttcgacaaaatgattcatctagtcattg

SEQ ID NO: 760696 - DNA, 50 bp, Homo sapiens
tcctgcgcagggcctggcgatcagttccttcctgtgtacagcccttctga

SEQ ID NO: 760697 - DNA, 75 bp, Homo sapiens
cctggaggaatgtcagcaccagaccaagactttgtgttgctgaaagagcggactctggacgaggcccctcggcct

SEQ ID NO: 760698 - DNA, 126 bp, Homo sapiens
ctcatttcatcttgggggaccagcagttggaccaagaggaaatctgggaatgatgagaagacagcagctgattacaagattttaggtggttcagtccttcacctggtgttggctctgagaggagga

SEQ ID NO: 760699 - DNA, 100 bp, Homo sapiens
caggttcggctggaaggaaccgctctcgcttcgtcctacacttgcgcaaatgtctccggatatccgacatgaagccagtgacttcccatgtagagtggcc

SEQ ID NO: 760700 - DNA, 100 bp, Homo sapiens
agctgtggacgcttgtggaggaaacccacactaacgagttcatcacctggagccagatattgcggtggtggagatgagcgatgccttccggcagccgtcc

SEQ ID NO: 760701 - DNA, 87 bp, Homo sapiens
cgggagtcgctgggtgcgtggggctgcctcgccgcgtctcgccacggatctctgctgtctcttggatcccatctgcctagatggaag

SEQ ID NO: 760702 - DNA, 50 bp, Homo sapiens
ctaggaccgcttcccccgagccagcaggctgaccaactgactgaagagca

SEQ ID NO: 760703 - DNA, 95 bp, Homo sapiens
ccgtcatggtggtcaccctggtttacctgtacggcgaggcagccaggatggacagtcgccggaccctgccggccatccgggccggggagtacgag

SEQ ID NO: 760704 - DNA, 51 bp, Homo sapiens
cggctcacctgtgcgggatggaacaaaaggaagattcctgatgttgcaccc

SEQ ID NO: 760705 - DNA, 75 bp, Homo sapiens
tccaggaatcacaaatgatatggtgcctgtgtcagtggccatgatgactccccaggtgatcacccctcagcaaat

SEQ ID NO: 760706 - DNA, 98 bp, Homo sapiens
cgacccgggcgcggcgcggggaggctgaagggacgctcgggtaggcaaggtactagaaatgagaaacgcagaaagccacgtggtccctgaagacccac

SEQ ID NO: 760707 - DNA, 75 bp, Homo sapiens
atccctgcagccttctggtataccatcgtcaccatgacaacactagggtttaaccaccaaggactctgagagctg

SEQ ID NO: 760708 - DNA, 75 bp, Homo sapiens
caagatgttgtcctgtgctggggctgacagctcgggttcatgacgctctcgatattcctgtgcagaaacctggac

SEQ ID NO: 760709 - DNA, 100 bp, Homo sapiens
tcagcctccccagtagctgggattacagtttgaaggaggagtttcctgcctggtatgagaagcttgttctggaaatggttcaccataacacagcctcctt

SEQ ID NO: 760710 - DNA, 75 bp, Homo sapiens
cggcggcggcggctgcggcccaatatagctggaagctctttgacatcctttggaacagaaacatcaaacagtggt

SEQ ID NO: 760711 - DNA, 98 bp, Homo sapiens
tggaatattaccagtcagaggcggaaggactcctggaatgccacaaatgcaaatacttgtgcactgggagagaaaccactcagattgaggatcctcga

SEQ ID NO: 760712 - DNA, 74 bp, Homo sapiens
ttcttgtttgtggatcgctgtgatcgtcacttgttaaacctttgccgccagtctatcttacttttactcgggag

SEQ ID NO: 760713 - DNA, 139 bp, Homo sapiens
cggtcctatccaggaaatactggaatgactgtgagccacctgattccagacgtccatctgaaataagtcacctaaggtcctgcgagtacaagggtcgacccccaaaggcaggggcagagccagcatctgagagggaggt

SEQ ID NO: 760714 - DNA, 97 bp, Homo sapiens
cctgcctcactgccagaagctctttgtgtatgaccttcacgcagtcaagaacgacttccagctcaaatctaatccaagtgaaaatgaagaaaaggaa

SEQ ID NO: 760715 - DNA, 101 bp, Homo sapiens
cctggcgggtgccctggctaccatggaccatcctgctggtcagcactgcggctggcagcggaggaggagaaagagatggacctcccggactcggcctcgag

SEQ ID NO: 760716 - DNA, 83 bp, Homo sapiens
agagtccagaaaagaagcgaaggaagtcaaatactcagcaatggctgccatccggaagaaactggtgattgttggtgatggag

SEQ ID NO: 760717 - DNA, 74 bp, Homo sapiens
tcaggttcttgccagaaggaaatctcgtgattttcattccaagctaaaggtcaaaatgcagatcttcgtgaaaa

SEQ ID NO: 760718 - DNA, 100 bp, Homo sapiens
ggggccccagcagcccccgaaggccctatcaggacatggagtatgaaagacgaaaaatggctacaaacttcctagcacatgagaagatctggttcgacaa

SEQ ID NO: 760719 - DNA, 100 bp, Homo sapiens
aatgcaccacagccatctcacatttccaagtacattctcaggtggagacctgtcccgctggaggaaggtttaaacaaagcaattcactacttccgtaaag

SEQ ID NO: 760720 - DNA, 98 bp, Homo sapiens
cacgtgcacaatgagaagtctgtcctgaaggaagtcagccacccgttcctcatcaggctagagcttggagataattctggtggctgtgtggagtatgt

SEQ ID NO: 760721 - DNA, 87 bp, Homo sapiens
gatcatcttgggagtgatttgcgccatcatcctcatcatcatcataggcagcgctgttcataagatgattgtggacaggcagtatat

SEQ ID NO: 760722 - DNA, 100 bp, Homo sapiens
caacgactaccaccgcagcgacgagcaggagtacgaccccagcaaagcgacctttgtgaaggtggtgccaacccccaacaatggctccacggagctcgtg

SEQ ID NO: 760723 - DNA, 75 bp, Homo sapiens
ttaatgtttgcaaatgcagaggaagaatttttctatgaggttcaaaccttgtactactcagctgatcacaagctg

SEQ ID NO: 760724 - DNA, 75 bp, Homo sapiens
atatgcatgcatgtaccgaccttctgaacaaggccaacacctatgcagtgctctatggagagaggtataatgatc

SEQ ID NO: 760725 - DNA, 96 bp, Homo sapiens
agaagattacaaaacgacaggagcatcccaggaaggggttcccagaagtcagaatccaagatggcctggcagctgcgattcagccacctcgtgggg

SEQ ID NO: 760726 - DNA, 74 bp, Homo sapiens
cacttgttggggagccaggccccaaggaagagaacgttgacatagaaggacccttcgcaggtgttacagtcggg

SEQ ID NO: 760727 - DNA, 50 bp, Homo sapiens
aagatctgcagtgagcaaagagagatgcctgaggaaacccagacccaaga

SEQ ID NO: 760728 - DNA, 50 bp, Homo sapiens
aagatcatcgagcatttcaaacgtgtcttgggacaaggtgcgcattcctg

SEQ ID NO: 760729 - DNA, 90 bp, Homo sapiens
caagttttctactcttacaaaggaactgtccacactgctgaaaaatctgtggcttacagaagagacgaaatgtggtctgagggacgatat

SEQ ID NO: 760730 - DNA, 75 bp, Homo sapiens
gcgggcgcccgccgccgagccgtctcctgcagcggcccccgccggagctgacttttttgaagatgaggcgattga

SEQ ID NO: 760731 - DNA, 100 bp, Homo sapiens
aggtggcggcgctgctgctcgggctgctcttggagccttctttgaatcctggggggagccagtcatctgatgtggtgcttttgaaccactggaaagtgag

SEQ ID NO: 760732 - DNA, 96 bp, Homo sapiens
cgccacctgcagggaagaacccgagtcgaagcgggaagatggctgcagacaagcctgcagcttccttcaaaatgtctactgttcacgaaatcctgt

SEQ ID NO: 760733 - DNA, 95 bp, Homo sapiens
ttggtggtgcggggcggcagccgattcctggccacctccatagcaagcagcaggttacgggcaggacttgagtggcttcggacagggcttctcag

SEQ ID NO: 760734 - DNA, 88 bp, Homo sapiens
ggagcaattaacagcacattaaggacagtcattttgtttactcattcagccctgttgcaggtcccaataaactcttcataaggttgac

SEQ ID NO: 760735 - DNA, 88 bp, Homo sapiens
ggcgggccgcgggagccgcacgcggcgatatggaagaggagggcaagaagggcaagaagggggtgcactatagccatctggagctgag

SEQ ID NO: 760736 - DNA, 50 bp, Homo sapiens
gacaggtctcatcgggaggaaatggaggtattgttgcagcatctggcagt

SEQ ID NO: 760737 - DNA, 95 bp, Homo sapiens
aagcagtcggacgcgtctccccaagaaagggtaccgtgagggttttctctggaagcgtggccgggacaacgggcagtttttgagccggaagtttg

SEQ ID NO: 760738 - DNA, 75 bp, Homo sapiens
attcttcatttagtcatggcagatggagcctaccaagaaggaaacaaagcttagcaggagaggagagccagagaa

SEQ ID NO: 760739 - DNA, 110 bp, Homo sapiens
caccgggggcttcccctgaccccttaggccctccccctgcaggtgccctcgcgcccctcccggggtccccagggaagcaggctgctttagatccattcatactgttgaac

SEQ ID NO: 760740 - DNA, 75 bp, Homo sapiens
cagggatccatatgtcttgcctgcagccagcgagtcttctgctggtgccccagaggctgtatccaggccccgaga

SEQ ID NO: 760741 - DNA, 98 bp, Homo sapiens
gggctgactcaagcggaggcgcgcggaacagtcgccgaggcgattcccgcccaggcaaagccaaagctaattgagccactcgactatgaaaatgtcat

SEQ ID NO: 760742 - DNA, 90 bp, Homo sapiens
gcgcacattttgcagcctgcaccggccaacgctgaagaagcatctgtagggaatccagaaggagcgttcatgaagatgttacaagcccgg

SEQ ID NO: 760743 - DNA, 50 bp, Homo sapiens
cacggggactctcttctggatggaagcggggagaggtggtgagagatgac

SEQ ID NO: 760744 - DNA, 90 bp, Homo sapiens
gcgggttcgcgtctgggaggccaagaccgctgtgtggaggtagccgcagcgccagcaccaggtggcgacatgtctaagaatgtgagccag

SEQ ID NO: 760745 - DNA, 90 bp, Homo sapiens
gagagccccggagtgagcggagtagcgagtcggcaacccggagaaccccacggacatatcgtatgtgtacagtgggtatgccccgctcag

SEQ ID NO: 760746 - DNA, 100 bp, Homo sapiens
tgggactgctgggtgctgctgcgcttgtcaccatcatcaccgtgcccgtggttctgctgaacaaaggcagtttttagaacttcagccataaaaatgggca

SEQ ID NO: 760747 - DNA, 96 bp, Homo sapiens
agtgtatagaagcaatcagaggactcttagatcaaaatggatttacagcagatgatatcaacaagaattttaccttcaatgatgacttcagtccca

SEQ ID NO: 760748 - DNA, 90 bp, Homo sapiens
gccgtggccgctgggggttgcggcggcgctgagccagcggggccggagcctcctcaacaagcccaagagtgagatgaccccagaggagct

SEQ ID NO: 760749 - DNA, 100 bp, Homo sapiens
tacgccctcatggggaaaatctccccggtgactttcagctcaaatagctataactgtaccaaagacatggaagaaaccaaaagatcggacccgaaccact

SEQ ID NO: 760750 - DNA, 74 bp, Homo sapiens
ccgcgccctccgcgcgacgccagatctctggaaacatggctacagaacatgttaatggaaatggtactgaagag

SEQ ID NO: 760751 - DNA, 76 bp, Homo sapiens
gacattcccttcgagctgcgcatcgtggatctgattaaagtccccagcccagggccagagcgacagccccattgtg

SEQ ID NO: 760752 - DNA, 90 bp, Homo sapiens
gaaagcccaggattcatcgctccacatgcgggcagggctgggcagcggcctgagtctcagcggacttgtccacccggagttgagtcggag

SEQ ID NO: 760753 - DNA, 91 bp, Homo sapiens
ctgtggcaccgagcactcacacaccgtccgcgtccaggggtcccgcggcagtgctggtggccatggttcccgtagccagaaggagttgccc

SEQ ID NO: 760754 - DNA, 83 bp, Homo sapiens
ggcggatggcgtgtcctgtgaaggtcagcccaaggccaaccccactgtcactctgttcccgccctcctctgaggagctccaag

SEQ ID NO: 760755 - DNA, 98 bp, Homo sapiens
agaaacttcagtctccagacatgggaggcaatgagtccagcatctacttgcgggagcatccaatcaacttcgagagcgtaggccccacctatcgtggg

SEQ ID NO: 760756 - DNA, 75 bp, Homo sapiens
caacatggggcttgagaaagggactcaggtacttctgccctccctttggtctccctgttcttctatgtggtgaca

SEQ ID NO: 760757 - DNA, 129 bp, Homo sapiens
aagcctttctaattaatggctacacttcgatggacctgttgaaaaaaatctgggaggttgaacttattaatttgaacaagagatttttcaatcaagactttggaactacgaagatggaagagatttgaa

SEQ ID NO: 760758 - DNA, 82 bp, Homo sapiens
ctacgcagagctcatcgtccttggtgctggagaatctggtaaaagcaccattgtgaagcagatgaggatcctgcatgttaat

SEQ ID NO: 760759 - DNA, 83 bp, Homo sapiens
ctagaagacctcaccttgggggagatcgaggtcatgattgcaggctactccattgtcactcaaatcaccggtccaacaacagt

SEQ ID NO: 760760 - DNA, 83 bp, Homo sapiens
aaaagcagcttaatgaggaactccagcggcgctcttcagcattagtttgcagaaaaaacttcagcatgtgccaggaacacaac

SEQ ID NO: 760761 - DNA, 98 bp, Homo sapiens
cagcctgcaggcctccactgcagctccagctcttttgtgcagatggcgagtacaactccatggctgcggccttcttcaacaccccggagaagagcgtg

SEQ ID NO: 760762 - DNA, 99 bp, Homo sapiens
gctacgggcccggtgcgtccgcggaccagcagcgcgggagagcggactcccctcgccaccgcccgagcccaggactctggactgtcttcacactaggtg

SEQ ID NO: 760763 - DNA, 99 bp, Homo sapiens
acaaggagaagatccatggttattagagaaagagaaaggatttctaagcaggaactccccaggtgaccaagaatatggcccaggtgaccaaagccctgg

SEQ ID NO: 760764 - DNA, 83 bp, Homo sapiens
gtagaatgttgttggtactgcagtgagaggcatgcttccttagaccagaatgtcatacccaggctatcccccaacaggctacc

SEQ ID NO: 760765 - DNA, 82 bp, Homo sapiens
taggttctgcggcacgggatggcggaggcgcctcctgtctcagaggctgggaggcggcagaatgcagccagaggagggcaca

SEQ ID NO: 760766 - DNA, 75 bp, Homo sapiens
ctgatgccccaccccggccaacttcctattaccggtataatgggtctctcccaaatggcgatagaggaaggagga

SEQ ID NO: 760767 - DNA, 75 bp, Homo sapiens
actggatgaagaagcgcggccttcacacatcccagccggtgactgcagtgagtgcatacatagagacgtgaagcc

SEQ ID NO: 760768 - DNA, 101 bp, Homo sapiens
ttctacgccatctccaacatcgaggtcatcggcagagagatggaaaacttgatgactagctccaccctaccgcccctttttgcagatgaagacggttccaa

SEQ ID NO: 760769 - DNA, 82 bp, Homo sapiens
cagaaaccttacagcaaagccgttgactgctggtccatcggagtgattgcctacatcttggtcagatgacttgtctgcaaag

SEQ ID NO: 760770 - DNA, 90 bp, Homo sapiens
ggtgtaagacatcacaatcccattattcagagcgcgtatggagtggaaacgcttgtagggcttcaccagagatggaggtcttgctatgtt

SEQ ID NO: 760771 - DNA, 103 bp, Homo sapiens
tgaggcttccccagccatgtggaactgactttggacttgggccggaactacacatcagctctcctgggcctctagcttgccaactacggacactgtgactttt

SEQ ID NO: 760772 - DNA, 100 bp, Homo sapiens
tatgaggccagccgggaggacatctacaagcgggtgatactatcaaccaaagcaccctgccctcacagcagaaccgtttcccagactaccttgaagccat

SEQ ID NO: 760773 - DNA, 75 bp, Homo sapiens
cctggatccaggataacggaggctggaggttgacggatatattcagacgttacgacacggatcaggacggctgga

SEQ ID NO: 760774 - DNA, 100 bp, Homo sapiens
gaaatttagaaagctgctttctaaaggcccagaggcagagctacacaaccatggaatccaaattaattcctgttctgtgcgactggtggatataaaaaag

SEQ ID NO: 760775 - DNA, 82 bp, Homo sapiens
aatggggcggaagaaaatacaaatcacacgcataatggatgaaaggaaccgacagataacaacgaacttgatgcaagtgata

SEQ ID NO: 760776 - DNA, 75 bp, Homo sapiens
tcgacatcatcatcttttcttgaaatcctctgccttgtcaatgttagtcacaatggtgtgagtgaatcagaactg

SEQ ID NO: 760777 - DNA, 100 bp, Homo sapiens
tgagcgggacatggactcaacagatctgtctgcctgcaatctacaagcattttgaaagcgaagcagaagccgtagaatcagcggcgagcctgttgaaaga

SEQ ID NO: 760778 - DNA, 75 bp, Homo sapiens
cgggctgcgtcgcttcgatgccgcgcagatctcaggtgtacatgcaccccagcctgtcaccgcccagcaccatga

SEQ ID NO: 760779 - DNA, 98 bp, Homo sapiens
ggaaactaaaacccagtgcgtacgcattgctacaaaagaaaattgccatctttttgagccttgtctattgaggaaccaagaacacagaaaaggcagta

SEQ ID NO: 760780 - DNA, 98 bp, Homo sapiens
ggaggaagaagaggaggaggaggagggggccggtgtcccagcttgcccgcccaagggcccaggccacagatcgccgtccgactgctggcccacaagat

SEQ ID NO: 760781 - DNA, 96 bp, Homo sapiens
aaaacctccttatgctgatatacatccaatgagggtgtgaaatctaagaatcccctgccaactcttgagggctcaatccagaatgttgaattgaag

SEQ ID NO: 760782 - DNA, 99 bp, Homo sapiens
gtcaccgacttcgagaatgtgcccgaggaggacgggacccgcttccacagacaggtgcgggaatggaaggagcagggtagcaagaccttcatgtgcacg

SEQ ID NO: 760783 - DNA, 100 bp, Homo sapiens
gagtcacacacaacgcttgttatgttttcatcacttctctccagaagattttcagctgaactctcatctctcaacactggcaaatattcataagatctac

SEQ ID NO: 760784 - DNA, 75 bp, Homo sapiens
acaaaacaagctccgaggcagtttaggagaaaggaggacgattgagaggatccagaatccagatctctggaatag

SEQ ID NO: 760785 - DNA, 50 bp, Homo sapiens
gggggcagccagtactcgggcagccttatgaatgacccatattaaatcgc

SEQ ID NO: 760786 - DNA, 99 bp, Homo sapiens
ttacactgtgaaattttatgatggagtagttcagactgtcaaacatattcatgtcaaagctttttccaaagatcaggttctcccatgggcaggtggtct

SEQ ID NO: 760787 - DNA, 75 bp, Homo sapiens
ccgggagcggagcccctgtgggacacgcactggcactaaatccacactgcccatctcggagacaggcggaggaac

SEQ ID NO: 760788 - DNA, 100 bp, Homo sapiens
caggctgctaccgcccctccgcttccagacattctcagctgtcagttggacagagagactctgaagatgtgagcaaaagagactccgataaagagatggc

SEQ ID NO: 760789 - DNA, 93 bp, Homo sapiens
ccagccgcaccatgccgctcctaagcctgcacagccgcggcggcagcagcagtgagaggtcacaccgacaaatctgaagcgggtttgccaggg

SEQ ID NO: 760790 - DNA, 50 bp, Homo sapiens
cattccttatccaatcccttaccggacccagatgatgtggtaccagttgg

SEQ ID NO: 760791 - DNA, 73 bp, Homo sapiens
gaggaggaggaagcggccgccgcggggtccgcggcgcgcccggcccggctcatgatggagcagtccaagaagt

SEQ ID NO: 760792 - DNA, 75 bp, Homo sapiens
cgtgagaacccgcccatgaagccagatttctcccagaacctagaagtcggaatccggaagaagatcgaacatgac

SEQ ID NO: 760793 - DNA, 113 bp, Homo sapiens
tgataagatgcaccttgtcttacaaaacatttacaaggcctcttcagaaacgccagggtgcactgatagagggaattccgatgacttcatcctgatttccaaagatgatgatg

SEQ ID NO: 760794 - DNA, 87 bp, Homo sapiens
gcgcggcgctggcgctgccggagctgtcgacccggcctggcgccggactagaacaagttgaaatcatcgcagaaggataaagttcgt

SEQ ID NO: 760795 - DNA, 100 bp, Homo sapiens
aacagcaagccatctcccctcgcccgccccccgcccccccagtctcggagatctcagaggcaccgactgggagatgaggagcgggaaggcctcctgcacc

SEQ ID NO: 760796 - DNA, 75 bp, Homo sapiens
cgtgaacatggatgaccctaagaaggaaggtgtgcatcaccttcgaccaggccaacctgaccgtcaagctgccag

SEQ ID NO: 760797 - DNA, 100 bp, Homo sapiens
tgaggggagcatgggtgccaaggagtcacggatcggattcctcagctacgaggaggcgctgaggagagcctaaaatgaccaatgtgtgatttcagtggaa

SEQ ID NO: 760798 - DNA, 100 bp, Homo sapiens
ttataaagaagactgtattaaggatgcccctgcatactattattccgttgttacaagaggacagtcattttgtttactcattcagccctgttgcaggtcc

SEQ ID NO: 760799 - DNA, 99 bp, Homo sapiens
gccgggtgtgagctgcctgaaaatgcactcggatgccgccgctgtcagctgacgccaagatggtgtgtgatgtggtgagtcggatggaagacaccgagc

SEQ ID NO: 760800 - DNA, 75 bp, Homo sapiens
atggtgaaggctatctctacagttcagatttttagactctgaggagcagttggagctaatccacattatggaaat

SEQ ID NO: 760801 - DNA, 134 bp, Homo sapiens
aaggcaaaggagtggaagtttgagagaagtttaagagaagaaatggacatgattgcctaaatcagccaaacacaggactggtcgaattgacaaatcttaccctacagtatgtggccacacaggaccagtgctgg

SEQ ID NO: 760802 - DNA, 83 bp, Homo sapiens
cccagagtcaccctgagaaccgcaacggcgcagctcgtgtgggcgctcgtccacaaacactccgtggctgagaggcagcggat

SEQ ID NO: 760803 - DNA, 75 bp, Homo sapiens
ttttctcaggtgaaaggagcagtagatgatgatgtagcagaagctttcagcttatgtggagaagtcgctgtgaag

SEQ ID NO: 760804 - DNA, 82 bp, Homo sapiens
ctggtcgaacagttttttctaatggctattcaagctgccctatgatgactgtgtgtttggaggccagcgtctgacgttatga

SEQ ID NO: 760805 - DNA, 83 bp, Homo sapiens
gtgggtcccgcagtcgcccgcaaccggggcgaatcatggcggccgccaagaaacgatggaaagaactttctaaggaagactta

SEQ ID NO: 760806 - DNA, 73 bp, Homo sapiens
aggaatccaccttcttacgctatggcagcaaaactggatcacaagtctttcggtcggagaactggaaggtctg

SEQ ID NO: 760807 - DNA, 75 bp, Homo sapiens
gttgaaacgctgcctggaaaggaagtaccaggacttgcacagtaaagatgacggcgccttgaggtaagctacagg

SEQ ID NO: 760808 - DNA, 75 bp, Homo sapiens
gccgcctctgccgcagctggaggtggattctccacagttttcctcgtgcgtactcacggtggaatccgatgtgca

SEQ ID NO: 760809 - DNA, 82 bp, Homo sapiens
atcacagcagtgttccaagttctaaagagcatgtgcagtctttgccaacaaaaaaaattaccaagaaacctattccagatga

SEQ ID NO: 760810 - DNA, 74 bp, Homo sapiens
atcatggcaaaacgtgaagtgggagcagacacatcacatggtgttggagtgtggatatgagtcatggaactctg

SEQ ID NO: 760811 - DNA, 75 bp, Homo sapiens
agacagctttcacagtttgcgggactcagtcccatcactccaaggagagaaggttggtcttcctgcaaaatctgg

SEQ ID NO: 760812 - DNA, 82 bp, Homo sapiens
atgaccctagccagactcagggatcaaagagcaaacagattcagtggcctgcattggctaatggtcgatttgaagtgggcaa

SEQ ID NO: 760813 - DNA, 136 bp, Homo sapiens
ccctttccaccaccacctgctcctggccgcctgcatgcacagtggctttaagatcctcaactgccaaaaggcaatggcctcctgacaaggtgatccgggcgggccccgcaggaattttatcccctcaccggcctca

SEQ ID NO: 760814 - DNA, 75 bp, Homo sapiens
tctgagacggcggcagcagcggcattcaggtttattgttggccaaaaccaggctttgattgaaccaggatgaatg

SEQ ID NO: 760815 - DNA, 90 bp, Homo sapiens
ctcagtgtgaagacaaccaggatgaagacctttataatgatccacttccacttgatgaataagacctacagagttgaaacagtgaaacct

SEQ ID NO: 760816 - DNA, 90 bp, Homo sapiens
ttcctgttctgatagcgtggaagggaacaatggcaaaagcctttgatgaagcattttcctctgagacaacagcggcaatacctgaagacc

SEQ ID NO: 760817 - DNA, 100 bp, Homo sapiens
tgtgtcccgcattgcccgcatctgcaaggtgtgggcccatcgctggatggatctgtcagaacacggctttgggctggccctgctcaacgactgcaagtat

SEQ ID NO: 760818 - DNA, 50 bp, Homo sapiens
gagcccgcagcttccctgccgtgtccccaactcctgcccagccagtccac

SEQ ID NO: 760819 - DNA, 75 bp, Homo sapiens
ctaaagagagcagtaccctgatggagtcccttgcagccgccaccggcacggccaggccagcatggtggaccactt

SEQ ID NO: 760820 - DNA, 75 bp, Homo sapiens
cagcacttccggtcacgccatcgttgctgccttcttcgtcaaggtgggccgtaccttgtctaaggtccaacaagt

SEQ ID NO: 760821 - DNA, 80 bp, Homo sapiens
ggactgagtcctgcaggacacagacatatctgaagagatggattaagaatgctttggattaaggattgtggagcacattt

SEQ ID NO: 760822 - DNA, 83 bp, Homo sapiens
ggcggcccgcttcctggaatggcaagcgcagcaacaacagagagcacgtggtacttcaactcccgcccccacctgtgtcccgc

SEQ ID NO: 760823 - DNA, 90 bp, Homo sapiens
ctggtgcatgctgatgacgaaaaacttgacattttgctaaaggctgtgggagacactcctattatgaaaacaaagaagtgggcagtagag

SEQ ID NO: 760824 - DNA, 50 bp, Homo sapiens
agacagtgatcaagaagatcccctaaaatttattgccaaaccctgtgcac

SEQ ID NO: 760825 - DNA, 74 bp, Homo sapiens
ggcgcgtcaggtgaagactgggggctgcaggcgcgctagtgagcaggggtgagcgcagccactgcccaacgcaa

SEQ ID NO: 760826 - DNA, 101 bp, Homo sapiens
cagaaagcaggcgaacccgcggcgcaataacggtgcctgtgtagatcatcctagaatacctgtgtggtgctgtccttcctcaagactacctcattctcact

SEQ ID NO: 760827 - DNA, 90 bp, Homo sapiens
cttggtcacggccgcaggtgaccccttagcccagctccagtgggcgggtggcaggagacttcgtcgtcgtctacactgatggctgctgct

SEQ ID NO: 760828 - DNA, 80 bp, Homo sapiens
ggcatcattaccctggacctggaaaccatttttactgaaactgttgaggagcccatggaggaagaagaagcagccaaaga

SEQ ID NO: 760829 - DNA, 50 bp, Homo sapiens
ccgctggcgcgcagcctcagctaggtttgctggtgaggcccatgacccgc

SEQ ID NO: 760830 - DNA, 98 bp, Homo sapiens
ttggacatgactgaagaggaggtgcagatggcactttccaaagtggatgcctccggggagtcccccccgaagggcgtgaccatcccgtaccggcccaa

SEQ ID NO: 760831 - DNA, 49 bp, Homo sapiens
ttctactccttctacaggtgtgtatgaaatctcctgcaaagaagctgag

SEQ ID NO: 760832 - DNA, 75 bp, Homo sapiens
gcagaacagaacactttctcatgtccagggtcagattacaagtgatgcgatagctgaaattcgagctatttgcat

SEQ ID NO: 760833 - DNA, 118 bp, Homo sapiens
ctattttgagaacctcctctcccacttcttgccccagaaagccccagacggaaagagctacttgctgagaaactactttgcttcgcactttttcatgggaggagagaaattcgacacc

SEQ ID NO: 760834 - DNA, 100 bp, Homo sapiens
gttgaatgagaaccctacttgcctaaatgaggaatgtctttcctaccatctaaaatacgaaggtttctggctggaaaaagttggtgattcaaggaaagca

SEQ ID NO: 760835 - DNA, 140 bp, Homo sapiens
gatcaagcaggttttaaatcaagatttaacattccaacacataaaaattatttatccaacagctcctcccaggtgcttttgaagatgatgatatcacgcacgttgaaggaagtgtagatcctattcgagatatagaaata

SEQ ID NO: 760836 - DNA, 95 bp, Homo sapiens
gaaacaatggcatttacagaaagagtcaacagcagtggcaacagaggcttcggtttcgtcacgttcgcagacccagcaagtgtagataaagtatt

SEQ ID NO: 760837 - DNA, 101 bp, Homo sapiens
actgacctgggagcgagtgagatctcaagttgaccatgtgatatggcctgatggcaagaggatagtactgctggcagagaattgtatagttacactgagaa

SEQ ID NO: 760838 - DNA, 82 bp, Homo sapiens
agacttacaagagaacctcctaagagtcacccaaacaatcggctgagaatgagaagagggagcatcgagtacagctgtccgg

SEQ ID NO: 760839 - DNA, 83 bp, Homo sapiens
gttctgaatcccatgctgggcagcttgaagaagcaaacagcatgctaaccaaagatattgaaatattaagaagagagaatgaa

SEQ ID NO: 760840 - DNA, 83 bp, Homo sapiens
gtcagttgggctgatcactgaactcacatttctggacctgaggcgggcagggctgggcagcggcctgagtctcagcggacttg

SEQ ID NO: 760841 - DNA, 50 bp, Homo sapiens
gacagatctgagagatactgagcaatagtcgtggcagtgctgctgaattt

SEQ ID NO: 760842 - DNA, 104 bp, Homo sapiens
ctcggcccgaggcagaggaacagggaagatggcggctgtggtggagaatgtagtgaagctgtgttcgaatcccgactccagaactggcggcgtcccagtcccgc

SEQ ID NO: 760843 - DNA, 100 bp, Homo sapiens
tttttcagaaagttgctggtgaataaaagcattcggcagcgtcgtcgcttcactgtggctcatacatggatttttttcccaggaagccatcccgtcagag

SEQ ID NO: 760844 - DNA, 100 bp, Homo sapiens
agggtgattctgaagagggtctggaggagccttctcaagaacagaggctgtattcatcaccaaagaaaaaacttacaccaatgcagaaatcggttagtcc

SEQ ID NO: 760845 - DNA, 95 bp, Homo sapiens
taagacgcatggaagaacttcacaatcaagaaatgcagaaacgtaaagaaatgcaattgagggtcttgacaatgttcacaaacagagggtggcag

SEQ ID NO: 760846 - DNA, 100 bp, Homo sapiens
aaagagtttggggtgttccaattcctgtgtttcatcataagaccaaggatgaatacttgatcaacagtgctcctgatatggaagatatattgactgaatc

SEQ ID NO: 760847 - DNA, 100 bp, Homo sapiens
gggcggcggccgaacgatgtgcgagaactgcgcagacctggtggaggtgttaaatgaaaggaaacagtgcttcttagtcctacgtcagcagcagtttaat

SEQ ID NO: 760848 - DNA, 75 bp, Homo sapiens
gctcaggatggaggaagactcgatccgcctgcctgcgcacctgcgtgaagcaaaaaatttattgccatatcttgg

SEQ ID NO: 760849 - DNA, 100 bp, Homo sapiens
acattatcagcatttctgtgcctaggaggactggcttgtcttattgtaatgtttcttccagaaaagaaagaattggggcttgttgatggacaagaactgg

SEQ ID NO: 760850 - DNA, 83 bp, Homo sapiens
ctggcatcattaacggaccttttaccatgaatagttctactccttctacaggtgtgtatggccataaagaatgctgatgggag

SEQ ID NO: 760851 - DNA, 100 bp, Homo sapiens
tgcagatggtgctgaggatggagaacccaccaagccccgctaggagccacctagactggatgcagagcatgcctgcccggctccagggcctgatcctgcg

SEQ ID NO: 760852 - DNA, 74 bp, Homo sapiens
aaaaagtgggatcatcggtaaagcacctaaaaccaggtggccaaagcattctggatggcaatcgggggagacag

SEQ ID NO: 760853 - DNA, 100 bp, Homo sapiens
agaagcagctccacgaaaggcagccgcggatcgccgcgctcagcgacaaacaaatggcatccacagcgtcacggccttctgcaccctgcgtgtcaccatc

SEQ ID NO: 760854 - DNA, 74 bp, Homo sapiens
tgggggtggacaatgctctgttgtgactaccatgccggggatgaagcgagactgcgggggtgctgcggccgtcc

SEQ ID NO: 760855 - DNA, 87 bp, Homo sapiens
agaggagacagcagggcagttctctctcgggttcaaaagttgaggagctcaagcttgggaaaatggtgtgcattccttgtatcgtca

SEQ ID NO: 760856 - DNA, 90 bp, Homo sapiens
agaaaaaaagacgaaagaagaagaagagcaaagggccttctgcaggtggctttttctcaagtatattttccagtctgtttggaactcggg

SEQ ID NO: 760857 - DNA, 100 bp, Homo sapiens
ctagaatctgctggctactacttgaagcgccatgatagcagtggcagtggacattcagcatttgagcccctggtggccaatggagtccccgcttcttttg

SEQ ID NO: 760858 - DNA, 100 bp, Homo sapiens
gtagggggcgcccgcgcctttgcccccgtgcgcacccccgccccgctcaccttagccccgcgcccgaggtggccatggtggaggtgcagctggagagtga

SEQ ID NO: 760859 - DNA, 51 bp, Homo sapiens
ctgaggtctccccaacgcaggacatcagaaagcataacccctactgtagaa

SEQ ID NO: 760860 - DNA, 100 bp, Homo sapiens
cttggagctcctagagggaagcttctggaaaggaaggctcttcaggacctcttaggagccagttcaccaaccgctgcctgctcaagtggctgaagttgtg

SEQ ID NO: 760861 - DNA, 75 bp, Homo sapiens
tgtgcaggatctccactcggccctgacacagatctgccggaggcgctgggcaatgaccccgggactccaggccag

SEQ ID NO: 760862 - DNA, 101 bp, Homo sapiens
ctgggccggagcagccgcgggcgcccgaggggccgagcgagagataattgacgaccttgccaacctagtggagaacacagatgaaaaacttcgcaatgaaa

SEQ ID NO: 760863 - DNA, 83 bp, Homo sapiens
gaggaaacccagccgcttctggggcctcctggcggcaggtgtgaacccacatccctgcccccagggccacctgcaggacgccg

SEQ ID NO: 760864 - DNA, 100 bp, Homo sapiens
gctattgaacgtttgacatgtggcaagtttgaattgagatgtgctgttgagccagtgatacagagaggccatgagagtctggtgcaccacatcctgctct

SEQ ID NO: 760865 - DNA, 75 bp, Homo sapiens
ctgggagtgcagcggcctctcctacagcttggatttacactgggcaacgtggttggaatgtatctggctcagaac

SEQ ID NO: 760866 - DNA, 100 bp, Homo sapiens
atatggagcatttatacgttctcttccaggggtcaaccgagcaacactagcagctatcattgaacacctgtataggagtccaaaactacttacctggaag

SEQ ID NO: 760867 - DNA, 100 bp, Homo sapiens
tctacggggctgacatcagcggctctttgtatgatgacgaggctactcacagtcgaactacaactccccggggtccggccagaactacagtggccctccc

SEQ ID NO: 760868 - DNA, 74 bp, Homo sapiens
ggggaaggtgctcaattcccatacatgcactagaggccttgctgtctctaaccctgatctgatctcctgccttg

SEQ ID NO: 760869 - DNA, 75 bp, Homo sapiens
tcccagtttgacaccacaggctgagctccctgaaccaggtggcagtagagaagagcatcacagaagttgctcagg

SEQ ID NO: 760870 - DNA, 99 bp, Homo sapiens
gggagctcaagtgtgctcagaatgaggtgcttcggtttcagacctcccacagtgtcacccaggtggctgccccctgcgttcctccatccaaccatgagc

SEQ ID NO: 760871 - DNA, 96 bp, Homo sapiens
gcagcagatatgcctgctaacatggataagcatgccctgaaaaagtatcgtcgagaagcctatcatcggtaactaggatttctacctcaaccgcga

SEQ ID NO: 760872 - DNA, 100 bp, Homo sapiens
ggcactagcagatgtggttggaatccttgctgtgctgaatcctggctgtgtgaccccaattccagaaagctgagtctgatctggattacattcaatacag

SEQ ID NO: 760873 - DNA, 97 bp, Homo sapiens
tctgccgcacactgctacatcgatgacagaggattcaggagtagaggattagagaaggggacaccggagccactcccaagggaatgaaggctttctg

SEQ ID NO: 760874 - DNA, 100 bp, Homo sapiens
gccaccatagtctgtagcgtgaagcttttcctatagtctagtgataatcctgcttcgcagcgccgtgttacgtttcatctccctgatggctcccaggaaa

SEQ ID NO: 760875 - DNA, 100 bp, Homo sapiens
cctgcctcaggtttatttgtacaaatagcacaggaggacccctgcagctgcagacatctgcttcaccaaggagctacactcccacttcttcagcttgggc

SEQ ID NO: 760876 - DNA, 100 bp, Homo sapiens
tgcacggtgaacctggaccaggaggaggttttcaggaccaaaattgtggaaaagtcactctgatgtccatgaaggaggtgggtgatggcttacaggatca

SEQ ID NO: 760877 - DNA, 83 bp, Homo sapiens
ccgcgagaagcagcgggggggcaggcgatcgaagccagagagatgacacgggggaaattcctcaatattctagagaagcccaa

SEQ ID NO: 760878 - DNA, 90 bp, Homo sapiens
gacaagactgccttggcattagagatgaacagactagccactttgcattgactggaaacaatggcatttacagaaagagtcaacagcagt

SEQ ID NO: 760879 - DNA, 89 bp, Homo sapiens
ccagaccctggagcctcagttggaagcagccgatccagcctgcggagcctgtggggcagatgatcatgacgcagtcctgaggtttaatg

SEQ ID NO: 760880 - DNA, 90 bp, Homo sapiens
gccaccagttcaagcgccgggaggccgaccagacccacgcacaggagctcctgcccaggggactggacatcaagcaggaggagctggggg

SEQ ID NO: 760881 - DNA, 87 bp, Homo sapiens
tcctgtacagcatcgccgagaagggagttctgggaaatcgttcattcatttacagatgaacagaaaagactcttcttgcagtttaca

SEQ ID NO: 760882 - DNA, 78 bp, Homo sapiens
tgtattcagcatagctattcctgttgatggtgatgaagacagatcaggcctttgtgacactaaccacaaacgatgcct

SEQ ID NO: 760883 - DNA, 90 bp, Homo sapiens
ggtgtaccaggcgaagctggccgagcaggctgagcgatacgacgggccatgatccaaaggaaccagagcagttgagaaaactgtttattg

SEQ ID NO: 760884 - DNA, 100 bp, Homo sapiens
ggaggaggaggaggacgacgacgatggggatatcgtgttgggatctggtgcaacaaacacaaaactacctgaagctgctgctttccttagttaacagtga

SEQ ID NO: 760885 - DNA, 119 bp, Homo sapiens
cggctctactgcgtctaccagagcatggtgctcttcttcttcgagaattacaccggggtccagttcgttcccacatgcagggcagcacaaggagaatgggcgtcatgactgatgtccac

SEQ ID NO: 760886 - DNA, 82 bp, Homo sapiens
gaagccaacctggctgtcctgaagctgtacgccatgaagtgcctggacaaaaagcgcatcaagatgaagcagggggagaccc

SEQ ID NO: 760887 - DNA, 82 bp, Homo sapiens
gaaccgaagagagctctgttgttgcagaggaattttgttgtcagagaataaaaggaggttgtccataattgactttaagcag

SEQ ID NO: 760888 - DNA, 100 bp, Homo sapiens
caaaccgagacaagttcaccccgaagtctgccggttacccttaagttacaggagtcccagctgcctgggccagaccagttacagcagtttcaggtggtct

SEQ ID NO: 760889 - DNA, 82 bp, Homo sapiens
ctggggctgccaccctcgttcccccgattggggccgcagttcaaggagcagggacaagttacaggaatgttctccaagcagc

SEQ ID NO: 760890 - DNA, 83 bp, Homo sapiens
aagagccaagcagctatggaggaaaatcagatcttcgtgaagactctgactggtaagaccatcaccctcgaggttgagcccag

SEQ ID NO: 760891 - DNA, 83 bp, Homo sapiens
atccaagttaacccttaccacccagcagcagggcatcaaggccagggagctggagagcagagaggcagagctaagacgccgtg

SEQ ID NO: 760892 - DNA, 120 bp, Homo sapiens
acgcgcagcatggcggtggaggacgaggggctccgggtcttccagagcgtgaagatcaagatcgttccagggtctccctccactgctgtagtaacccgggtccggggcctcggtggtgct

SEQ ID NO: 760893 - DNA, 107 bp, Homo sapiens
ggtttggttgaagttggagaagtatccaatagggatattgtagaaactgtctttaacctgacaatgattgaagctcacgttgatgtcaagactaccgatggttactt

SEQ ID NO: 760894 - DNA, 96 bp, Homo sapiens
aaactcctggcctcaagtgatcctctcgtctcagcctctcaaactgctgggattacagagccctatgagtttgtctctctggaatggctgcaaaag

SEQ ID NO: 760895 - DNA, 51 bp, Homo sapiens
agctacagctgtggctctacaggtggagataagtaattaacatttcgaaac

SEQ ID NO: 760896 - DNA, 98 bp, Homo sapiens
ccgacacctactggtgcatgagcaagctgctggatggcattcagggggacttgatctcatcttcatgccaggccttgggtttgacaaacatggcaacc

SEQ ID NO: 760897 - DNA, 83 bp, Homo sapiens
gtagcagcgatggttctgaactaagtgaagagacctcatggcctgcttttgaaagttttgagcagcaccaggagacttgccgg

SEQ ID NO: 760898 - DNA, 90 bp, Homo sapiens
ctattgcctttctgcgcttgatcaccacccttgtcaagaaacacgaagacaccgactgtccctgcgtggtggtgtcctgccctcacaagt

SEQ ID NO: 760899 - DNA, 97 bp, Homo sapiens
ttctcacgtactctttttacattgcaatgcacagacgcagtcttcagcaaggaagtgctgggaacgccctggagtgaacccaggaagatgcctgcag

SEQ ID NO: 760900 - DNA, 98 bp, Homo sapiens
aggactcctaaggcttgcaacaagtgttgttaaacacaaaccaccctttaaattttcaagggaaggacaggatctgaagaagatgatgaagttgtggc

SEQ ID NO: 760901 - DNA, 83 bp, Homo sapiens
tcgggtctcgggggccgctctgggatcccggccaccagcaattgtccgacagttgaatttctgaatgaaaagctggaaaaaag

SEQ ID NO: 760902 - DNA, 83 bp, Homo sapiens
gtgggcaagatcctgtgcactgactgcgggggatatgagactttctactcggaatatcctgagtgttgcgtggatgtaaaacc

SEQ ID NO: 760903 - DNA, 96 bp, Homo sapiens
ggacatcggcttctgcctggtgctctgcgtcctcatcgggcttatgttcgaggtggaatacatgttggtatcttttgatcatgaaaataaaaaagt

SEQ ID NO: 760904 - DNA, 75 bp, Homo sapiens
tgctaataagcaggacctgcctggagcactgtcctctaacgccatccgcgaggcagcctggcatcctcgctacaa

SEQ ID NO: 760905 - DNA, 75 bp, Homo sapiens
tcactttcttcctccgcacggatgctgagatgcacttgcaggaaagacatggtgaagatttcaatggatatcttt

SEQ ID NO: 760906 - DNA, 75 bp, Homo sapiens
gcctaggcattttgctgtctcctcctaatacgctataaagcgttaacagccagtgagatagaagatcttaagctg

SEQ ID NO: 760907 - DNA, 100 bp, Homo sapiens
ggaatacagtgaccgggttgtatcaccgtccaggcccccccgtgaatgtggcccttgccctggaggtggccagcatcgaccacatctcagaggccaacat

SEQ ID NO: 760908 - DNA, 83 bp, Homo sapiens
agaaccatgcttcctgtaaatcctgcagaatctgacgcattggccctgcggctggcctgcatcggggacgagatggacgtgag

SEQ ID NO: 760909 - DNA, 100 bp, Homo sapiens
cagaggacgacatgttgcttttcgtggagacctttgtagtattaaacagagggaaaactctcttcagatttagtgccacgcctgccttgtacattttaag

SEQ ID NO: 760910 - DNA, 100 bp, Homo sapiens
ggaggcaagcgctgcccgcgagctgagccgccggaggaggagccgcgggcaacgagatagtcgtgcaagcactgcagtgttcccattattcgattctttg

SEQ ID NO: 760911 - DNA, 98 bp, Homo sapiens
tagccttggtgccaaaatggtagctatcgttggtctgtcacggaaaagtcgcagtgcttctcagctcagccaaacggatattaataaggcagcggaaa

SEQ ID NO: 760912 - DNA, 74 bp, Homo sapiens
cccatcgagagggtcaaactgctgctgcaggcatgcttccagaagagtggtgcatcagtggttgctattcgaaa

SEQ ID NO: 760913 - DNA, 100 bp, Homo sapiens
agaactccgtgcccagatgctcataaggattgtcctctttctacaaaaggtggaaacttcagaacattttcgtatagatggtccagtaatttcagagagt

SEQ ID NO: 760914 - DNA, 100 bp, Homo sapiens
tgcgcaggagtaaggcaggaaaccgacgagaggacctcagctccaagtcaccttcaggccattcagaggaggaaagagaggggaatatgaagtcagccaa

SEQ ID NO: 760915 - DNA, 100 bp, Homo sapiens
ggcttccggaagttcctggtccacaacgtcaaggagctggaagtgctgctgatgtgcaacaaggaaggatcgaatcatatttgtaaccaaagaagatcat

SEQ ID NO: 760916 - DNA, 82 bp, Homo sapiens
acgacttcagcatgagacccgccttcggagtgttcatcatttgccacttaagctacttgcagtcacgtcacaccttggatct

SEQ ID NO: 760917 - DNA, 75 bp, Homo sapiens
agcagtccagcacggccaagtcagccacctggacggttgttcggaatcctataattgaaaaacagtaaagatgga

SEQ ID NO: 760918 - DNA, 111 bp, Homo sapiens
gactttattgattgcttcctgatcaaaatggagaaggtatccgttacagcactgatgtgagtgtagatgaagtaaaagctttggcttctctgatgacatacaagtgtgcag

SEQ ID NO: 760919 - DNA, 90 bp, Homo sapiens
gaggtcaccgtgcggggcttccggatctatggctccccatgagtgtgaacatggctacgcctcttcattcccgtccatgccgagcccccg

SEQ ID NO: 760920 - DNA, 87 bp, Homo sapiens
ccagtgcatcttttgcacagctgaatgtatcctgtcaggtataatgtcagtgaatggcaagaaagttcttcatatggatcgaaaccc

SEQ ID NO: 760921 - DNA, 51 bp, Homo sapiens
cctcatccgagcctttgatttgagtggattcctgttcatcctgtacccgat

SEQ ID NO: 760922 - DNA, 101 bp, Homo sapiens
gtgatagatgaatgtgtggagatggcgactagtggacaacagaacaatattggaatggtgtgtcctggcaggttacaatggtaccatctttgcatatgggc

SEQ ID NO: 760923 - DNA, 101 bp, Homo sapiens
agaggccacgtggggcctgagccccaaacctcagctgctgttccaggtatgtgccgtccaggtgaaaaacactgggaagatgtatgcctgtaagaaactgg

SEQ ID NO: 760924 - DNA, 99 bp, Homo sapiens
cgagcaagcagcgggtcctggacgaggaagagtatatcgagtaatccagtccctcatagcactggtgaatgacccccagcctgagcacccgcttcgggc

SEQ ID NO: 760925 - DNA, 100 bp, Homo sapiens
gattaacgtccctgtcgtgtgacattttctggtccaggaggcccaggaggtcctgggggacccatgggtcgcatgggaggccgtggaggagatagaggag

SEQ ID NO: 760926 - DNA, 50 bp, Homo sapiens
atctcgcagaacgccatcaaccagctgtaaatatgcagaggacatttttg

SEQ ID NO: 760927 - DNA, 75 bp, Homo sapiens
aatatgggaagttttaaagacagaggagaacccgatcatcagccagttcttccccaccctcctgctctggtcctt

SEQ ID NO: 760928 - DNA, 101 bp, Homo sapiens
gtttcccgcctgagcgcaactagcggcgggtcgtgggcacctccaggtacatgtcccagagcaagcacacggaggcccgggagctcatgtactcgggagcc

SEQ ID NO: 760929 - DNA, 51 bp, Homo sapiens
tggacagctgtgctattcctgggcacaccttcaccctctctctgccccgcc

SEQ ID NO: 760930 - DNA, 83 bp, Homo sapiens
cccaatctgccttcagaaggacagccggccttggtggaggtccacagcatggagttggaatcgaagcctcttaaaatggcaga

SEQ ID NO: 760931 - DNA, 75 bp, Homo sapiens
cagagatatcttggatggagtcagaataataatggcagataaggaggtgcacttacagagtgctacgatgaactg

SEQ ID NO: 760932 - DNA, 121 bp, Homo sapiens
tgagcccccgaactctgcaaagcctccagaggacataccacctccaggatcaggatgcagagggctcaggatgctgttgctgggagctgttctactgctattagctctgcccggtcatgac

SEQ ID NO: 760933 - DNA, 75 bp, Homo sapiens
ccagatcaacgtcctccgggaccggagtcagaaccctccgcagagtaaagctgaaccaataacgtttccatctgg

SEQ ID NO: 760934 - DNA, 86 bp, Homo sapiens
ccgtggcagcctgaacggagtgtgcgacggattgggaggttccagtagctggctcggtgctcttctcggccacctgccatggcccg

SEQ ID NO: 760935 - DNA, 100 bp, Homo sapiens
agcacacaggaaatggattactctttggatataacaccaccttcaaaaatttctacatttgaagacagtgatttgttccatttgattggtgttatctgtg

SEQ ID NO: 760936 - DNA, 96 bp, Homo sapiens
aacattgggagtggaaaaattttcaagtaacattaacgaaaagaagagccatgcagctcctgccatataaaatgccggctcctgctttgcctttca

SEQ ID NO: 760937 - DNA, 96 bp, Homo sapiens
tccaggctctccagtttttcgtcgagagattcactatggaatcgtgcctatgattacacaataccacctatggagaaagctgttgtgaaaacggac

SEQ ID NO: 760938 - DNA, 82 bp, Homo sapiens
tccctgctgtgcacctgggggtacaggtactccaaagattcaggtttactcacgtcatccagcagagaatggaaagtcaaat

SEQ ID NO: 760939 - DNA, 96 bp, Homo sapiens
tgcaacgctggcaagtctcaaagtcgccacaggttcttctgagctatgaaggggcccagatttaagggctatttttgacaccctaaatgtgctgag

SEQ ID NO: 760940 - DNA, 82 bp, Homo sapiens
tggattttccttttggctattttaaaagccgaggaggagctggtggaggctgacgaggcgggcagtgtgtatgcaggcatcc

SEQ ID NO: 760941 - DNA, 100 bp, Homo sapiens
ccaggacccccaagccgccgcggacgcaggtttgaagactgcttcattctgcctctagtaccagcggtttctctgttctgtgatcaatgtgattcacagg

SEQ ID NO: 760942 - DNA, 100 bp, Homo sapiens
ctttgaaaaaaatgttggaagccattgggaaacatctgggaacagattttacgaatacccttcatcttggaaataattaatgcagttcccttcattatct

SEQ ID NO: 760943 - DNA, 75 bp, Homo sapiens
gaaactgctggtgtccaatctggattttggagtctcagacgccgatattcagcaggatcaggcaaaaatgatcat

SEQ ID NO: 760944 - DNA, 51 bp, Homo sapiens
ctgctcatagacgtcagctgcttcctgcactgccagtgaaagatgtagaag

SEQ ID NO: 760945 - DNA, 100 bp, Homo sapiens
ctgacctgcctgtcgtcgtggtggccaacaagcaggtgaccttgggaaaggtgttgaaagtgatcgtcgtcatgcggagcctgttcattgatcgaacaat

SEQ ID NO: 760946 - DNA, 100 bp, Homo sapiens
ggagagaactgctggaaggagactggatgatagaattgtttggttgggatgttccagtaattctgagaaattcagaagagacccagttcagcacaagagt

SEQ ID NO: 760947 - DNA, 75 bp, Homo sapiens
tggttcgggcctagcggagccgggactggaggcccagcagcaaagaaacctggataacatcgtcttgcaacaacc

SEQ ID NO: 760948 - DNA, 81 bp, Homo sapiens
gccctcctgcagtgaccagtaatggcactttacactcggggcataaggaaatggtggcaggcacttcctcctaacaagaag

SEQ ID NO: 760949 - DNA, 50 bp, Homo sapiens
gccactcagagtcgcccgagaagccaggaatagttgctgaacaccccagg

SEQ ID NO: 760950 - DNA, 75 bp, Homo sapiens
aggatgaggcgtgcaggcctgggcaagttggacaaatgcaagtaaaaagcaacgtgaaaagctccttgagttgat

SEQ ID NO: 760951 - DNA, 50 bp, Homo sapiens
gagagagctgccgacaaacagacgttctttatagctccaagctctacaga

SEQ ID NO: 760952 - DNA, 74 bp, Homo sapiens
ggtgccacagctcagcactggaactgctgcagttgcagctccatgaaagaggactgaaattacaccaaacaatt

SEQ ID NO: 760953 - DNA, 75 bp, Homo sapiens
tgcattcaaaaggactaataccatactgcaccatttggtcatggctattggtcgtacctttgaggagagtttcca

SEQ ID NO: 760954 - DNA, 102 bp, Homo sapiens
gggattcgcagggaggatgtcgggacaccccggaagctgggaaatggatataagtatccagtatatggtgtccagtggcatccagagaaagcaccttatgag

SEQ ID NO: 760955 - DNA, 75 bp, Homo sapiens
tggcccttttggttcactacaaggagcatttcagccgaaggtgctggtgaatctggtaaaagtacaattgtgaag

SEQ ID NO: 760956 - DNA, 74 bp, Homo sapiens
aaggagtcacggatcggattcctcagctacgaggaggcgctgaggagaggtgctgctggtgagtagcagccggt

SEQ ID NO: 760957 - DNA, 50 bp, Homo sapiens
atgacagagaagatctttttgcaggcaccccctgtaatggcctatcctgc

SEQ ID NO: 760958 - DNA, 73 bp, Homo sapiens
agaggtcgtggaggtggccgtggaggcagaggtggcatggggttagagccacagctgaaacaactacaaacaa

SEQ ID NO: 760959 - DNA, 74 bp, Homo sapiens
gccggatccagcatctctccaccatcgactacgtggaggacgtggtagagctttgtgttcagtatggacagaat

SEQ ID NO: 760960 - DNA, 107 bp, Homo sapiens
caaagatggtacaaaagagtctttggaggatgcggctttgatggatagaagatggtgagatttttgcaagtattaaccagaaggacggtatggtcagtttccatgat

SEQ ID NO: 760961 - DNA, 75 bp, Homo sapiens
attcatttagagctgcggaacaggacgccctctgatgctctgacgcccgctctgcggcttcggtgtttgaacagg

SEQ ID NO: 760962 - DNA, 94 bp, Homo sapiens
ccgggtggcagagttgccaaccccagagctgccgagcaaggatgcctgagagacacactgaataataattctctgggcaaaaagcacagttggc

SEQ ID NO: 760963 - DNA, 75 bp, Homo sapiens
gttttcaggccacaaatgctttcacaggagtccaaaactacttacctggaagaccttccaccaccccctgagtat

SEQ ID NO: 760964 - DNA, 74 bp, Homo sapiens
ctgggtcagtccgccgctcaccccgcggccgcaccttcccgccttctcagggactttgaacatgtcggggatcg

SEQ ID NO: 760965 - DNA, 145 bp, Homo sapiens
ctgccgctgccgccctgagtcactgcctgcgcagctccggccgcctggctccccatactagtcgccggatgtacagttacccagcacgtgtacctcctcctcctcctattgctcgggctgtagtgccctcgaaacgtcagcgtgt

SEQ ID NO: 760966 - DNA, 90 bp, Homo sapiens
ggcctattcagctgtaccagtccgccattttgctaccaagaaagccaaagataaccatgatgactacacagacttctactatgacatttg

SEQ ID NO: 760967 - DNA, 95 bp, Homo sapiens
aacccgcccatgaagccagatttctcccagctctggattaatcgaattacagctgctagccaggaacatggactgaagtatccagcgctcattgg

SEQ ID NO: 760968 - DNA, 95 bp, Homo sapiens
acggttgcaaaactggaaaagacaattgatgacctggaagagaaagtggctcatgccaaagaagaaaaccttagtatgcatcagatgctggatca

SEQ ID NO: 760969 - DNA, 82 bp, Homo sapiens
aaagcccacatcaacctggtgagttaccggtattgtaagaacaagccgtacccaaagtctcgcttctgccgaggtgtccctg

SEQ ID NO: 760970 - DNA, 100 bp, Homo sapiens
tacaatggcacttcaatatggctcagaaagtgaagaagatgctgctttagctggtttttcacgactgaaaacaacatagcaaaataagccaagatgtctg

SEQ ID NO: 760971 - DNA, 75 bp, Homo sapiens
gcgagcccttccttataggcgtcagcgggggaacagctagcggcaagcacggccttgctacgatgtcataatgtt

SEQ ID NO: 760972 - DNA, 90 bp, Homo sapiens
aagaaaaccaaggctgaaggggatcgtctaaaagagggttgcccccaagtttcctggcagtgtgtgatactgaggaggtgagcttgtttc

SEQ ID NO: 760973 - DNA, 100 bp, Homo sapiens
ctttattttaatgtatgacattacaaatgaagaatccttcaatgcagtacaagattggatcctcagtcttccacaatgaaccctgtttacagccccgtgc

SEQ ID NO: 760974 - DNA, 82 bp, Homo sapiens
gtagccctggacggcattcagtgttttggagccttgaacctggatagtccatggctgatggtctctgcagctcacaggctat

SEQ ID NO: 760975 - DNA, 100 bp, Homo sapiens
gaaatggtagaatatatcacccataatcggaatgtgatcacagagcctatttacccagaagtagtccatatggtctggagaaaatgatgtggaatataac

SEQ ID NO: 760976 - DNA, 100 bp, Homo sapiens
ctagtaaacggggctgctggtgggccgcgtcgaagacatggaccagggctacggagctctccctgtccagccgcctgcagctgaccctgtaccagtacaa

SEQ ID NO: 760977 - DNA, 100 bp, Homo sapiens
actgagagatggctattatatccaagaaccccacggacatatcgtatgtgtacagtgggtatgccccgctcagtgtgcggctggcccagctgctttcccg

SEQ ID NO: 760978 - DNA, 82 bp, Homo sapiens
ctgagctctgcccggaccgctgcatccacagcaaacggggattcagcgtccgatcctttggaacagggactcacgtgaagct

SEQ ID NO: 760979 - DNA, 100 bp, Homo sapiens
cggagaagctgcatcccagaggagcgcgtccaggagcggacccggtctcctctgagcctccggcctccataagacccaaaacagatgacacctcttccca

SEQ ID NO: 760980 - DNA, 75 bp, Homo sapiens
ttaacatcaggcacgataaaagccatgttgagtggcccagtcatgatgctatggactcctactacgactacatat

SEQ ID NO: 760981 - DNA, 88 bp, Homo sapiens
ctgcttcctcgtcctagtgatccacgcgcagttcctcaaagaaggttctgggaagttctggattgtttaataaccatggactccaagt

SEQ ID NO: 760982 - DNA, 95 bp, Homo sapiens
atatctttgaaggattttctatgtttgcacatgcccccctgaccaatattgggaaaatgaggtacgttagtgttcgcgattttaaaggcaaagtg

SEQ ID NO: 760983 - DNA, 96 bp, Homo sapiens
ggcgcggagaatctgctgtcgcctgcagctgctcgcctgtctccgtcggaagggagcccaagctttgcagaggaaatgaaacacgatttccaaaat

SEQ ID NO: 760984 - DNA, 75 bp, Homo sapiens
tcagatcttgtgaatgaagaagcaactggacagttccatgtataccgctgtgggcagaatcctgttagacaagcc

SEQ ID NO: 760985 - DNA, 82 bp, Homo sapiens
aaatcacaagccctccccagaccagccttatgccagcctggaccatcttggaggcagtgtaggatcatggaagaactttgaa

SEQ ID NO: 760986 - DNA, 100 bp, Homo sapiens
cgcttcactcctggaaccttcactaaccagatccagagtttgtacaaatgatgacagcaaagtgaagaccttgtacagaatgtgttaaatttcttgtaca

SEQ ID NO: 760987 - DNA, 98 bp, Homo sapiens
cattgcccgaggcctgcggtacctgcactccaaaggtgtatttcaccgcgacctcacatccaagtgggatccgagttggctacaccccagatgtcctg

SEQ ID NO: 760988 - DNA, 76 bp, Homo sapiens
cttcttaaaattggatgccctctcaaacttccactttatccctaaaccggcttacctagaaatggaatttaaagag

SEQ ID NO: 760989 - DNA, 100 bp, Homo sapiens
cggctcgacaggcggcgcgggcggcggactcacaccacccggcaagaactgctcactacggctccctgccccagaagtcacacggccggacccaagatga

SEQ ID NO: 760990 - DNA, 100 bp, Homo sapiens
ggtcgcgagtatctccgtttcctggatgtgaacgaatggaagttggatacactttgtgacttgtacgagacactgaccattacacaggctgttatttttc

SEQ ID NO: 760991 - DNA, 78 bp, Homo sapiens
ttcagtgtgctgctcaaaaacagggagtgcctgcagggcaccatccgcaacagccaggaggcggaggtctcctgcccc

SEQ ID NO: 760992 - DNA, 100 bp, Homo sapiens
gagccgaaggagcccaatggtctgatcgtgctgtatgaagtgagttatcggcgatatggtgatgaggttgcaaaagcttctcatttcagagagatgccag

SEQ ID NO: 760993 - DNA, 95 bp, Homo sapiens
gagaacttgggggaagaatatctgggtcagtggcttggagagtagcccgaggtgaaatgggtctacaggttcgttaccgtgaacgcatcaccatt

SEQ ID NO: 760994 - DNA, 100 bp, Homo sapiens
cgagaattaaatgccgagaaggccagtacggccacagaaagcgaggctggtgatatggacctgagtgggttgccagaaacagcagtggattccgaagacg

SEQ ID NO: 760995 - DNA, 98 bp, Homo sapiens
gcctgggccgccgctctcgctcctctggccaccgcccctgggaagcccttttggaaagaatacttcagagagtcagagttgtgccagaagtctcttaa

SEQ ID NO: 760996 - DNA, 75 bp, Homo sapiens
gcagaagtgaaccggcaaatgctgcaggaactggtgaacgcaggatgcgaccagtgctgggcctaaaggagataa

SEQ ID NO: 760997 - DNA, 73 bp, Homo sapiens
tagagtcttcctgcccaacaaacagaggacagtggctggaggcaaagctggaaaggacagtgggaaggccaag

SEQ ID NO: 760998 - DNA, 51 bp, Homo sapiens
gactgcttcaagcaccgcaagggtacactggagaacctagaagaactgtat

SEQ ID NO: 760999 - DNA, 90 bp, Homo sapiens
gcgcagcaaagcgcccagcctgccgcctcgctgtccctgcggcttctggggaccctcctcatcttttccctgccttccatcctcctgtac

SEQ ID NO: 761000 - DNA, 100 bp, Homo sapiens
agacaaaggtggagaaatctgaagccaaagctgcagagctggaaaagaaggcaagaagcctgtggtaggtaagaaaggaaagaaggctgctgttggtgtt

SEQ ID NO: 761001 - DNA, 74 bp, Homo sapiens
agcgactcttctgacctccgcgcgacgtacccgccgccgccgttggctggaggagcctgtgtgaaatgcagcaa

SEQ ID NO: 761002 - DNA, 75 bp, Homo sapiens
acaataacactaaacagtggaacactacagacatttgagattcttccctcactgtatatatgccttatttcctgg

SEQ ID NO: 761003 - DNA, 100 bp, Homo sapiens
tggacctggtcagagcgcggatggccgtaaccccgaaggaaatctgctcagataaagaatttgatgagccagctaggaactaagcaggactcaagcaagc

SEQ ID NO: 761004 - DNA, 100 bp, Homo sapiens
gttttcatggattctaatggaatcaggcagttttgtgtccatgtgaacaactttggtgagtttgtaagtgatgcccttctcgttcctgacaagtgcaaat

SEQ ID NO: 761005 - DNA, 100 bp, Homo sapiens
cacacgaaagtccggctgagcgtctatggagccctgggcatttcacaagtacgcctgcctcacaccttgcgatgcgccaacatcaccatcattgagcacc

SEQ ID NO: 761006 - DNA, 82 bp, Homo sapiens
tctgttccccagggcccagggccctgcagcctccagccagagtgctgaggcaacttctcctagaatctcaatctcagctcga

SEQ ID NO: 761007 - DNA, 87 bp, Homo sapiens
agaaatacagacctgcagagttccactggaagttgaatcaggtctgtaacattgtggcaggacaaagatgtattaaaaaattaacgg

SEQ ID NO: 761008 - DNA, 82 bp, Homo sapiens
gggatctgggcatgagaccccttctcccaggaggggagctgtcgcctggttgggcccggaaatgggacgtcgcgctttctca

SEQ ID NO: 761009 - DNA, 90 bp, Homo sapiens
caccagtttatcacagggaaagtcctggaggcactgggaggatctggatggatgacgttgcctgcaagggcacagaggaaaccatcttcc

SEQ ID NO: 761010 - DNA, 50 bp, Homo sapiens
actgacgaagcttggaagttgcagaaggagatctataaggacaggcagaa

SEQ ID NO: 761011 - DNA, 100 bp, Homo sapiens
ctgttctccgctttcaagaggagtcgcgagatgagccagctggagttgcaacaggcagctttagaagggctggccttgccacatgaccttgctgtacagg

SEQ ID NO: 761012 - DNA, 83 bp, Homo sapiens
agatggccagtcacgagaacccagcaagagtgagccatggagctacgtgtggggaacaagtaccgcctgggacggaagatcgg

SEQ ID NO: 761013 - DNA, 75 bp, Homo sapiens
gcagcccaggactcctcgccctgcttctcagtcagcttcagctttagctgcagctgcctctgttcagccacttgc

SEQ ID NO: 761014 - DNA, 100 bp, Homo sapiens
gagcatagtgatcccattgggggttgatacagcagagacgtcatacttggaaatggctgcaggttcagaatggaccagcttttgggaaatatgattgaaa

SEQ ID NO: 761015 - DNA, 50 bp, Homo sapiens
cgtggagagtatcatctcaccaaagtggactgcagaaagctggaagttta

SEQ ID NO: 761016 - DNA, 100 bp, Homo sapiens
aagaaacactctccttctgccacatttgttttgagctaaatattgagggtggttgcctatcactattgtcaagcagataatgcctacacttgcttggtgc

SEQ ID NO: 761017 - DNA, 75 bp, Homo sapiens
gatgagcaaactcattggtaaccatcctgatgtcctccctgaggagaaggaggaagtgaccatggacacaagtga

SEQ ID NO: 761018 - DNA, 98 bp, Homo sapiens
tttcatgttgggtttagaaacgcatgaccgaaaatcagaagacaaacttgccaaagctacaagagacaggtggcccacaaactctttaacaacttgaa

SEQ ID NO: 761019 - DNA, 100 bp, Homo sapiens
tcagagttgctcatggaggtgcacggaaatgggaagaggcccagtccagagaggtgcttctcagcttcacgggaaagggcctgctgtaccacggaaattg

SEQ ID NO: 761020 - DNA, 82 bp, Homo sapiens
cttcggcagtccacccaccgccgccgcctcccaggtgaaaacttttggcccgtttggaagcggcagccaggacaacctgact

SEQ ID NO: 761021 - DNA, 74 bp, Homo sapiens
tgaacatgaagaatactggaaagttgctatgttttggtggagtatcacttcctctctccctacgtatctccaaa

SEQ ID NO: 761022 - DNA, 80 bp, Homo sapiens
cactgctgcagtccaggctgaagacagagggctctgatctgtgcgacagagaatagctattcagtcagacagaaccactt

SEQ ID NO: 761023 - DNA, 90 bp, Homo sapiens
cggcggccgaacgatgtgcgagaactgcgcagacctggtggaggtgttaaatgaaatttgtgaagtgtggatatgcaggctctaactttc

SEQ ID NO: 761024 - DNA, 100 bp, Homo sapiens
ccgagaaccgtcagtttgagccagatggttttgcactgattgcaaaaataaagtcctccgagcatacaatatccttattggtgaacttgactgcagcaaa

SEQ ID NO: 761025 - DNA, 74 bp, Homo sapiens
agaggtgctaaagggaagaaggaggaaaagcaggaagctggaaaggaagtgaaaaatgtactctgacctgaatc

SEQ ID NO: 761026 - DNA, 50 bp, Homo sapiens
gcttcctgttcgcagctgcggcagtgatgtccactggctccgtgacgcag

SEQ ID NO: 761027 - DNA, 98 bp, Homo sapiens
cagaacagcacgtaccagaggtggaagtccaagtcaaacgcagaaggactgcctcactgagcaaccaagagaatgtatcctgtcaggtataatgtcag

SEQ ID NO: 761028 - DNA, 118 bp, Homo sapiens
tcatgtatgacaatacatcagaaatgcctgggaaagaagattccattatggaggaagagagactcagattgatggacaacttttcttaattaagcaccttttgatacttcgtgaacaa

SEQ ID NO: 761029 - DNA, 83 bp, Homo sapiens
cttccggcagctactcatggggatggctgacaagaacatccagtattatgagaagtgttgttacagatcttataacagtcggt

SEQ ID NO: 761030 - DNA, 100 bp, Homo sapiens
gcaccggacactttgttattggagaaacatgcagattatatcgcatcctatggctcaaagaaagatgattatgctgtatcgcatccattgaatactgtga

SEQ ID NO: 761031 - DNA, 89 bp, Homo sapiens
cgctcgctgggagagaggtacctctccttttccctctccctttccctaaggacgtggcccagtggaacatcgggagcctccggaccatc

SEQ ID NO: 761032 - DNA, 100 bp, Homo sapiens
tcgcgcgctttttggaattcagttatcaagctttagagcctggctactcacagttgaagcctgattgcagtcctcatctagccactgaagcagagtgccc

SEQ ID NO: 761033 - DNA, 98 bp, Homo sapiens
ggcaggctgcggcagacggcgacagtggcggcggcgccatggcagggcttgcaggacatggtccggcgaggagagatcatcgacaatgacaccgagga

SEQ ID NO: 761034 - DNA, 100 bp, Homo sapiens
tgtcaagacatttcttcggcattctgcaacagggcttcagataacagggagcgtgcttatgaacatagtgcctatggacaccatgaacgggggacgggag

SEQ ID NO: 761035 - DNA, 100 bp, Homo sapiens
agggactcaggcagtacgggaagaacttcttcagaattagaaaggagctgcttcccaataaggaaacaatttctacctggacaaggactggtactatacc

SEQ ID NO: 761036 - DNA, 75 bp, Homo sapiens
ccagcgggggcagaagcctggagacctgtacagtcctgacagcagcccccagataccccatgtttccccatcact

SEQ ID NO: 761037 - DNA, 101 bp, Homo sapiens
actgcacggtgaacctggaccaggaggaggttttcaggaccaaaattgtggaaaagtcactctggcatgttatgttacccagagaactttccaaacaagta

SEQ ID NO: 761038 - DNA, 100 bp, Homo sapiens
aacaaccaaccctgatttcctgcttctccttttcatgagtgttcctgtggtctctgcacctcctttctccgtcattgtgtggcactggacggggaatcaa

SEQ ID NO: 761039 - DNA, 83 bp, Homo sapiens
ggaggccatcttacccctggtgcagaacgatcctcgaattcagcacaggtttggtgcacctcgatttggaggaagtagggcag

SEQ ID NO: 761040 - DNA, 98 bp, Homo sapiens
tcatcacaaaagagttgattgaaattatctctggtgctgcagctctgtttttgagtcatgatgcaagaatctgggactgagacaaaaagtaacggttc

SEQ ID NO: 761041 - DNA, 74 bp, Homo sapiens
gtcaaactcgagttctccttcaaggtggtaagttttcttcatacagttcttttgtgtgacaaactggatttcag

SEQ ID NO: 761042 - DNA, 51 bp, Homo sapiens
gggacaccagtagccgcggacctcggtttattcagtcaccatgaagctgct

SEQ ID NO: 761043 - DNA, 100 bp, Homo sapiens
gagtggaagtttgagagaagtttaagagaagaaatggacatgattgcctaaatcagccaaacacagggctctgccgacttccagttctggaacaagatgg

SEQ ID NO: 761044 - DNA, 100 bp, Homo sapiens
tcggaaacatggcactgttgcctatcagaagtcaattcaaaggacctgcccccagagagagaagtatatattcaagcccaggactgtatagtaaaacaat

SEQ ID NO: 761045 - DNA, 100 bp, Homo sapiens
tactgtgctgctctgtcagagatgggcaagtcgtctacttcacagccacttttccattcgccatgctcctggtgctgctggtccgagggctgacgctgcc

SEQ ID NO: 761046 - DNA, 72 bp, Homo sapiens
ggatttcatggactccttggagcatgacattcccaaaggagtacaagcgcaagctagccagagtttccctgg

SEQ ID NO: 761047 - DNA, 100 bp, Homo sapiens
tgcggcgggctgtgccactacctacaacaagcacattaacatcagcttccacaggaatggcggcgctagatagtaaggcatcagggaagatgggaatgcg

SEQ ID NO: 761048 - DNA, 90 bp, Homo sapiens
gaaagcaaaggagtcagggatggctcttcctcaggctctgtgtgctccgggatggagcaggtgtgcagagggtgagaacccagctctggg

SEQ ID NO: 761049 - DNA, 82 bp, Homo sapiens
ctttctccttcaagtacttggcagatcactctcttagcagtcagatatgtacagcttgggtgtggtcctgctagagctcttt

SEQ ID NO: 761050 - DNA, 95 bp, Homo sapiens
gccgccccgtcgtcgtctgccttcgcttcacggcgccgagccgcggtccgagaaatctgaaatagagtactatgctatgttggctaaaactggtg

SEQ ID NO: 761051 - DNA, 75 bp, Homo sapiens
gagagtctttgatgaatcactaagcgtgctaagtgtggtggctcacacctgtaatctcagctacttgggaggctg

SEQ ID NO: 761052 - DNA, 51 bp, Homo sapiens
cacggccgcctccggagcccgacgcgtcatggactcctgccctgtaggtcc

SEQ ID NO: 761053 - DNA, 100 bp, Homo sapiens
gtcccggggccgacccggcccgtagtgtggaagcagcttcagcatgcttttcacttccactgcatctctcgctggctcaaaacacgacaggtgtgtccat

SEQ ID NO: 761054 - DNA, 75 bp, Homo sapiens
acgctccaggatcttgtctacgatctctccacctcagggtctggctcagtctgaagatgatgagaaactgaaaaa

SEQ ID NO: 761055 - DNA, 100 bp, Homo sapiens
gagacaccctctgggggtcctctctgagtcaaatccagtgcactgcggaaggcgcggagggagcagcagctggtcagcaagaggctgctgagaaacgacg

SEQ ID NO: 761056 - DNA, 121 bp, Homo sapiens
gtctgtccccagagcctcagtttgtgcaggacaccgacatggaacagggactcactggggattacaattcctagaccttctgtggcatctacacagtcaacttcaggaagctttcactgtg

SEQ ID NO: 761057 - DNA, 75 bp, Homo sapiens
caccctgtgactccttgctttccctcaacactgagaagattctggtagcgctggtatatggtcaaatgaatgaac

SEQ ID NO: 761058 - DNA, 74 bp, Homo sapiens
cttagaaaaggacggctccttatttcactccaccgagttgaagaatttctcagcaaagatatcagttatcttat

SEQ ID NO: 761059 - DNA, 83 bp, Homo sapiens
cgggcgcggatcgaccggagcagagagctggcgagcaagacatgggaaagcggaaccaccaaaaggagtgatgatcaacgatc

SEQ ID NO: 761060 - DNA, 75 bp, Homo sapiens
ctcagtggttgaatcataggcaagtggtgtgtggcacaaaatgcaacacgaaatgagccgtcagactgctacagc

SEQ ID NO: 761061 - DNA, 100 bp, Homo sapiens
gatgaattgtgaaagagagcagctaaggtgctctggtctggggtctctctgtgaaacacaatcctcagaaagtgggtaaagaccatacgttggaggatga

SEQ ID NO: 761062 - DNA, 100 bp, Homo sapiens
ctcgttacctgcaggtattgggagatccacagctaagacgccaggacccactggaagcctagaaatggtcatggaaaatggaagatttgcaaaatacaaa

SEQ ID NO: 761063 - DNA, 74 bp, Homo sapiens
atgcatgccaacattccagttttttaagaagggacaaaagggtcctgcctcagttggcggaatggcggccacgg

SEQ ID NO: 761064 - DNA, 82 bp, Homo sapiens
cggcggagacgatgcctgagatcagagtcacgcccttgggattttttatcaagcagaaatgcatcgaacaacgagaatcaag

SEQ ID NO: 761065 - DNA, 100 bp, Homo sapiens
aaaggcgcctctttcagctccaaatgtgtgaagtaccttaacatggggaatcttcttaaagttttgacatgcacagaccttgagcaggggccaaattttt

SEQ ID NO: 761066 - DNA, 100 bp, Homo sapiens
gaacgggctcaaagtaggattcaagaactggaggaaaaggtcgcctctttgctgcaccaggtgtcctggagacaggctctattccgttcgctggttcgcc

SEQ ID NO: 761067 - DNA, 82 bp, Homo sapiens
atcagactcctcttttttatccatggcaggttatctgtgctacaattgcatttggaatggggattgacaaaccggacgtgcg

SEQ ID NO: 761068 - DNA, 82 bp, Homo sapiens
gctaaggccgcgttggggtgagaccctcacttcatccggtctccaccgggaaccttctggtcatcctgagtcgacactacca

SEQ ID NO: 761069 - DNA, 75 bp, Homo sapiens
gggggcctcttctggaccaggaaactctccactgctcaagtaaagctctttgtgacagggcttttcagcttaaat

SEQ ID NO: 761070 - DNA, 100 bp, Homo sapiens
atcagtgtaagatgtgacttgcttctccttgtcttctgccacgattgtgaggcctccccaaccacatggaactgacagtcattttgtttactcattcagc

SEQ ID NO: 761071 - DNA, 75 bp, Homo sapiens
aagctcgatcaaatgcccgcctaaagcagctctcatttgcagactccccatccccaggatgtcaacctcagtccc

SEQ ID NO: 761072 - DNA, 51 bp, Homo sapiens
cgttgctgccttcttcgtcaagaccgagacatgggtgcccggcaccgcgcc

SEQ ID NO: 761073 - DNA, 74 bp, Homo sapiens
tatgacttgctaaacaatctgttgtttggtaactctcattcgacatccatctgaactaatgaatgttcctcttc

SEQ ID NO: 761074 - DNA, 85 bp, Homo sapiens
tgtgcagccctcccaggtggagtacacggcagactgcaggatgacgcaaaacacggtgattgtgaatggagttgctatggcctct

SEQ ID NO: 761075 - DNA, 76 bp, Homo sapiens
gctgaagatctggaagacgcgctcctgcgccggtcctaaaaacatcctgagtttctttggcctgccagaaagtcac

SEQ ID NO: 761076 - DNA, 100 bp, Homo sapiens
ggaagcggcccccgcagacgctcggcagtaagactttgaccccgacgcaggcttcagtgattgccgcggatcagaagcctgagcactttggctcgagaca

SEQ ID NO: 761077 - DNA, 134 bp, Homo sapiens
aagagtgcaggaacggaagcctctatgtgagagataacactggcgtcctgagctgtgagctcgccctcccctacctgcggaagagtcaagggaatgtcatcaacatctccagcctggtgggggcaatcggccag

SEQ ID NO: 761078 - DNA, 83 bp, Homo sapiens
gtggccttagctgtgctcgcgctactctctctttctggcctggaggctatccagcgttcatcatgcctagtggcgtataagaa

SEQ ID NO: 761079 - DNA, 83 bp, Homo sapiens
cgatgtgcggcgtccgctgtataagaaagagtttctgtttggagggataaacttcaaggcctttgtgaagaccaaaatggcat

SEQ ID NO: 761080 - DNA, 50 bp, Homo sapiens
tggagttcgaggaatttataagacatttcattaccatccagaagtgtctc

SEQ ID NO: 761081 - DNA, 74 bp, Homo sapiens
cctagtgggtgtaatacatcatgaactgcagggttttcctttggaatatggataaatacaccatgatacggaaa

SEQ ID NO: 761082 - DNA, 82 bp, Homo sapiens
cattaccgtcgccagcggagcgaacccgagagcgtggagcgggctgggccaggtaagaatgattgatgttggctgatattgg

SEQ ID NO: 761083 - DNA, 100 bp, Homo sapiens
tattgccctggtccacctctccagtcccctgcccctcacaggtgcccctgggcgctgggattgctctagcctgtaagtataatggaaaagatgaggtctg

SEQ ID NO: 761084 - DNA, 74 bp, Homo sapiens
ggctcgctcaggaatggagttcagtctgaaaggttcacgcctacatcatcagctccctcaagaaagagatgccc

SEQ ID NO: 761085 - DNA, 75 bp, Homo sapiens
tcagacaccgagcttcagcaagctctctccaacgaaactggcgatggaatatgagaggagccctctggaaagaaa

SEQ ID NO: 761086 - DNA, 88 bp, Homo sapiens
cggcgtcgcgcggcgtgccctgcttgtcacagtgatgggcccccgacatgaaactggcactcagaatgaagaatgccttttccagcct

SEQ ID NO: 761087 - DNA, 101 bp, Homo sapiens
gcggacctccagtggccggctccggaggcttggtgactccagtggcccagctgggagtgtccactcgccttccaccagcatggcaacgtcttcacagtacc

SEQ ID NO: 761088 - DNA, 97 bp, Homo sapiens
ctcctggaagcttaacttcttatccatcccatctcttggacagatgatgccagttaattactttgaatagtaatcaagtcagaggattatatgactt

SEQ ID NO: 761089 - DNA, 83 bp, Homo sapiens
cgggagtgttcgttgtgccagcgactaaaaagagcctactcaatttgaagacattgaggatgaagacctttatgatgatccac

SEQ ID NO: 761090 - DNA, 75 bp, Homo sapiens
ggcggacggtgcaggaggcccgggcgctcctccgctgtcgccgcgctgaaactggcgatggaatatgagaggagc

SEQ ID NO: 761091 - DNA, 90 bp, Homo sapiens
aagccattaaactagactcaggagtcgtcaagaggctctgcaccctggatggaaagcagataaaatttgatgctgggactctccttctta

SEQ ID NO: 761092 - DNA, 74 bp, Homo sapiens
acaacgtgctggagagaccccgcggctgggcgttcatctaccacgctttcgtacccaacatgagtgaagtttcc

SEQ ID NO: 761093 - DNA, 96 bp, Homo sapiens
tgcgagctcctcaagaatctcgtgctcaccggtttctcccacatcgacctgacaagcatgagacgaagctgaagggagtcatctatttccaggcca

SEQ ID NO: 761094 - DNA, 75 bp, Homo sapiens
gtgcagctgcctcagttcttagcgcagaaggtggtcttctgccctgttaaagaagccctggaggtggactggagc

SEQ ID NO: 761095 - DNA, 100 bp, Homo sapiens
ccagtatctgatgccaaagtgtacacgccctccatcagcaaaccgctagcaaagggagaagtctcgggtttgacaaaggcaacagcattattgagaaaag

SEQ ID NO: 761096 - DNA, 75 bp, Homo sapiens
atgttttgctacaaatggaggaggaggaggacgacgacgatggggatatcgggccgcaagcttcttatcattggg

SEQ ID NO: 761097 - DNA, 75 bp, Homo sapiens
cagaggagtggaaggctcccccttgactaaagctgtgctggagaatctggtaaaagcaccattgtgaagcagatg

SEQ ID NO: 761098 - DNA, 126 bp, Homo sapiens
ttggacagaacagtcaggcagccgggagctctgccagctttggtgaccttggaaccagtcttcagtatggcatcatgtgtctgaagaggctgaattatgaccggaaggagctggagaagaggcgag

SEQ ID NO: 761099 - DNA, 101 bp, Homo sapiens
ctcgctccgtggccttagctgtgctcgcgctactctctctttctggcctggaggctatccagcgctactgcagcactggggtgtcagttgttggtccgacc

SEQ ID NO: 761100 - DNA, 75 bp, Homo sapiens
gccaggaccaccagccagctgggtgtgagatggcagacaggtttgcaggaaaccctcagaaagggggctggagga

SEQ ID NO: 761101 - DNA, 73 bp, Homo sapiens
aaagacagagaaactatgggacacagatatgttgaaggcaattaagttggaatatgcaaggttggttaagttg

SEQ ID NO: 761102 - DNA, 90 bp, Homo sapiens
ctggctctttggcggctcggaggagcggctgctgctgctgctgctgctgctggtggcccctttgcaggaattgaatgatctggcacggga

SEQ ID NO: 761103 - DNA, 83 bp, Homo sapiens
caattacagcccacctcttgcatcgtcacctacaggattttttatcaagcagaaatgcatcgaacaacgagaatcaagatcac

SEQ ID NO: 761104 - DNA, 100 bp, Homo sapiens
cgaagagccaagagtcagtattccggccagcttcacgaagtcagagagtgagaaagatcagtctaaagaaaaggagaagaaagtgaaaaaaacaattcct

SEQ ID NO: 761105 - DNA, 100 bp, Homo sapiens
cacagagcctcgcctttgccgatccgccgcccgtccacacccgccgccaggtcacgaacgagatcacgccggtgctgtcgtactcctacctggccgtgct

SEQ ID NO: 761106 - DNA, 97 bp, Homo sapiens
cacactgctggccggagactcggactcccaggaggaagcgcacggcaagctcgtgctctggtcggaccccgtacttctggacaagtaccctgaggcc

SEQ ID NO: 761107 - DNA, 100 bp, Homo sapiens
cactgccagcacccgccgtgccgcatgagcatcgcggagcttgacccgtccatcgctgtggagaccagtatgatgtctgtgccatttgcctggatgaata

SEQ ID NO: 761108 - DNA, 74 bp, Homo sapiens
gtatgccggaagctggttttcaggccacaaatgctttcacaggagccgccctgcctggagctagcctgggggcg

SEQ ID NO: 761109 - DNA, 151 bp, Homo sapiens
gacaactccgcagcaaacaactccgcaaacgaaaaagaacgacatgatgcaatcttcaggaaagtaagaggataagtatgctgtgcgcttcatccctcgggagaatggcgtttacctgattgacgtcaagttcaacggcacccacatccct

SEQ ID NO: 761110 - DNA, 98 bp, Homo sapiens
agttccttacctacatggcactagaagaacgcttagcccaggctatggaggaggttgctcaaagaagtacagtctttaaaacaaccatacctgaagaa

SEQ ID NO: 761111 - DNA, 83 bp, Homo sapiens
tgccaatttaccagagataattgataacaccctgtaacagctgagaggatcagctgatttattcggaggatttgctgactttg

SEQ ID NO: 761112 - DNA, 100 bp, Homo sapiens
ctacatccgggcccccaccagaaggtggacttaggtgctactctgttggcattcctggttgaactacttaaaagttcagtagccatgcaagaacagatgc

SEQ ID NO: 761113 - DNA, 50 bp, Homo sapiens
gaaaatgcgctcgggctggaccagcaggcataatcaccagcaacacccgg

SEQ ID NO: 761114 - DNA, 100 bp, Homo sapiens
agatttctacaggctgagtggaaatgtcctgtcctatacattccaggtgaccttaatgctgctcgaccagaataaccgggagcacgtgattgacgccttc

SEQ ID NO: 761115 - DNA, 100 bp, Homo sapiens
gggcagccggctctggtgctcccagaagagtgccggtggtggtgtgcacattgagccccggtatagacagttcccccagctgaccagatcccaggtgttc

SEQ ID NO: 761116 - DNA, 75 bp, Homo sapiens
ccgcgcgcctggcggctacatggagagtgtcagggtccctgtgttcatgatgaggactctggcctatcgctcatt

SEQ ID NO: 761117 - DNA, 117 bp, Homo sapiens
cagctgtgttgagcttttcatggattatcttacgtagataagacactgcaacaggcggctgtgagtgtggaccccttctatgagatgctggcagcgagaaagaagcggatttcagtc

SEQ ID NO: 761118 - DNA, 82 bp, Homo sapiens
ctcggagaaacaggcgccgcgggctccgcgcccggccggacccgggcccgaggttgatgccggcccaggatggatcagacct

SEQ ID NO: 761119 - DNA, 50 bp, Homo sapiens
cctggaagtgttggcggaggaagtctgctcccagttttcgagaggagtct

SEQ ID NO: 761120 - DNA, 100 bp, Homo sapiens
cttggatgaagtgtgtgaagggacagcctcatgatcacaaacatttaatgccaacccaaattatacctggttctggcaatctgaaagcaaatcctgttta

SEQ ID NO: 761121 - DNA, 80 bp, Homo sapiens
gaaagccaggcatggaaggatgcagaaacgtgacgagcaatgatgaaggattaatgaaaatcaagttccatcctcagaca

SEQ ID NO: 761122 - DNA, 83 bp, Homo sapiens
cctacccgggatacggaggagggagccagccccagtgcctgctgagccgtttgacaacactacctacaagaacctgcagcatc

SEQ ID NO: 761123 - DNA, 90 bp, Homo sapiens
tccagcagcagcagtagctatggcagtggcagaagattttaattaggtgaccacccgccggcggaagaaggaaggagaatacaacgtcca

SEQ ID NO: 761124 - DNA, 100 bp, Homo sapiens
acctgtgtccgaaatgccggtgcgaggagaccgcgggtttccaccccggcgggagctgtcaggttggctccgccttgaggcagccctaggtgaggccaag

SEQ ID NO: 761125 - DNA, 75 bp, Homo sapiens
aaacatttttccccaaccataagccaatgcacgcactcctggctttaaagtttatacttgcatttgccatacctg

SEQ ID NO: 761126 - DNA, 100 bp, Homo sapiens
gccatctgatctataaatgcggtggcatcgacaaaagaaccattgaaaaatttgagaaggaggctgctgagatggaagcagagccagcagagcctctcgc

SEQ ID NO: 761127 - DNA, 75 bp, Homo sapiens
gggaactagggagcgtctccggctgcacagcgctcagcaaagaagtttgtcatcctgatattggtggcaagatca

SEQ ID NO: 761128 - DNA, 101 bp, Homo sapiens
atgttcacgcacgggatccagagcgccgcgcacttcgtcatgttcttcgcgccctgcacggggtcactctggtgcccattgaggagttcagcccggagttc

SEQ ID NO: 761129 - DNA, 100 bp, Homo sapiens
cgctgcgcggactgcggcgccccggaagcccccgagcgcccacagcatgaaggaggaggccttcctccggcgccgcttctccctgtgtccaccttcctcc

SEQ ID NO: 761130 - DNA, 100 bp, Homo sapiens
tccgtggactttcatgctttagaacaagatgccagcaaagaacagcagcttaggtggcccacaaactctttaacaacttgaaataaatgtgtggacttaa

SEQ ID NO: 761131 - DNA, 100 bp, Homo sapiens
gaattataggaacctggtctccctggaatgctgcttctaaattacttgggcaaaattgggtccaaaacgcctttgatggcagctgcaactttttccgttg

SEQ ID NO: 761132 - DNA, 100 bp, Homo sapiens
tcggaaggaatcgattgaaatgccgtatcaaaggtccatcatcaaaacaccaaagactcaagacacagaagatgatgagggagctcagtggaattgtacc

SEQ ID NO: 761133 - DNA, 99 bp, Homo sapiens
tgtttccaaagaattttttcagctggttgtggaggaaatcttcaatccagatattgatatccttggaacagaagatcttattgtggaagtgacttccaa

SEQ ID NO: 761134 - DNA, 100 bp, Homo sapiens
cggcacccagacaggtggcgaaggcagaggatccggttccagttgttggcaaaggagaggaagaggaagaggaagatggcatgcggctttgtctgccagc

SEQ ID NO: 761135 - DNA, 88 bp, Homo sapiens
aggtctggacactgaaaccaccgtggaagtcgcctggtgtgaactgcagaccgagacatgggtgcccggcaccgcgcccgagcccact

SEQ ID NO: 761136 - DNA, 82 bp, Homo sapiens
caaaagtggcatgatcctttgcagaaatgactacattagatatgaagatcaatgatgcagactgatggttttgatgaagctg

SEQ ID NO: 761137 - DNA, 98 bp, Homo sapiens
ttgttttggaaaaaagaaagatgctgccgctaatcagtggatgaaaggttttggccaaattgggcgagggcacaaaataaccacttaccccttctcac

SEQ ID NO: 761138 - DNA, 75 bp, Homo sapiens
tagagacagccaacaaaatattcatggttcttgaggggaagctggtggcagactccgccaagcacctgggtctga

SEQ ID NO: 761139 - DNA, 85 bp, Homo sapiens
aggcggggttggcctaggcgaagatccggactctgggtgttttgctaccgtgaccgtttagggaaatgcaataccttatttccag

SEQ ID NO: 761140 - DNA, 82 bp, Homo sapiens
gataaaaccatccatcaattactaccaagactgggccggggtctgcagggctcagctgagcccatgagctcccagagctaac

SEQ ID NO: 761141 - DNA, 75 bp, Homo sapiens
tgttaaggattccaagtaactcttatttgatcccaagcactgcaagtccagatgcaacgggagcctggctcaagg

SEQ ID NO: 761142 - DNA, 107 bp, Homo sapiens
tgacatcaaggatatcactgtgtgtgaacctccgaaagctcagcacacactcccgcaggatcccgccattgttcaggttggtgttcgaggaagagacattgttgttc

SEQ ID NO: 761143 - DNA, 74 bp, Homo sapiens
gacgtgcgcttccccacgtcgcttgggggccacggcgcggacgccatgatcttcttcagcagtatcgttctgct

SEQ ID NO: 761144 - DNA, 75 bp, Homo sapiens
atattcggaagtcatatggaaatttttacaagcaagtctggaaaagtttgaaattccagtaaaaattcgtttgag

SEQ ID NO: 761145 - DNA, 83 bp, Homo sapiens
cagcaaggtcggcagagcaaggggcttacgcagaaggacctggccacgaggctgggaggcggcagaatgcagccagaggaggg

SEQ ID NO: 761146 - DNA, 85 bp, Homo sapiens
tggtagaaaaagcaagagtttgttatatagcacccaatagaatcctgccagaatttctacaaagatttcacattacagatcgaca

SEQ ID NO: 761147 - DNA, 75 bp, Homo sapiens
ccgacatggaacagggactcactgggggttccccagaacagcaaaagaaactatgggtaggacagctgctacagc

SEQ ID NO: 761148 - DNA, 101 bp, Homo sapiens
taaagcagtgccattccagaatgccatcttgaatgtaaaagaacttggaggtagttcctgaaatgactgagatattgaagaaaaaatgaatcaggatcatg

SEQ ID NO: 761149 - DNA, 75 bp, Homo sapiens
accatcctcgacaccctcgttgctcgtattggcagtaactcccgggattcttctctaatacttgatgttcctctg

SEQ ID NO: 761150 - DNA, 100 bp, Homo sapiens
gggatgtgatgctggagaactataggaacctggtctcactgggacagtcattttgtttactcattcagccctgttgcaggtcccaataaactcttcataa

SEQ ID NO: 761151 - DNA, 75 bp, Homo sapiens
ttgtcctccgttttatgagtcagatcatcctgtcagagaccccttgttgaaatgggacagttggcagcggctctg

SEQ ID NO: 761152 - DNA, 100 bp, Homo sapiens
gtcaactcaaatgcaagtccaagaggaggaggaggcggaggtccaagcggaaagagaccatcatgcagacatcagagactgggtcggacacaggctcgac

SEQ ID NO: 761153 - DNA, 100 bp, Homo sapiens
ggtgaacttggcagcaagatacctgtgcatcccaacgatcatgttaataaaagccaggtggcccacaaactctttaacaacttgaaataaatgtgtggac

SEQ ID NO: 761154 - DNA, 90 bp, Homo sapiens
cttcatgcttagatacatgtataacaagggattaaagcctgtggtttccacagaagcaccacctatcatatttgccacaccaactaaact

SEQ ID NO: 761155 - DNA, 124 bp, Homo sapiens
cctgcatgagtatgacatgaccaagatgcccgagtgctacttctactccaagttcggctcacagaacatttcctgcctgttgctcacactctgttgtccacagcatacccgcaccctagatggc

SEQ ID NO: 761156 - DNA, 75 bp, Homo sapiens
ctgcagtgcagacgaggtggatgaggccgagggcggcgacaagaaccgcatgatgccttcttctgtagagtgggc

SEQ ID NO: 761157 - DNA, 88 bp, Homo sapiens
ataaactgcctggccgaatcagccttttcacgctcaagaagacttgcactatctgccagatgctgcttcctaaccagtgcagttatgc

SEQ ID NO: 761158 - DNA, 88 bp, Homo sapiens
tcagttggaagcagccgatccagcctgcggagcctgtggggcaggtccagcccagaatcaaatgcaggttccatctggatatggattg

SEQ ID NO: 761159 - DNA, 80 bp, Homo sapiens
tatctgtcttcggtggactccttcggcagtccacccaccgccgccgcctcccagttcagaggaatatccttgacttcccc

SEQ ID NO: 761160 - DNA, 76 bp, Homo sapiens
tgtaggcttggagcagaatcaccaagcatcgccagcaccaggggccacctacagatgctcctgcagtggacacagc

SEQ ID NO: 761161 - DNA, 50 bp, Homo sapiens
aaggcctaagaattttggcattgacgctatgtccagcaaaggctccgtgg

SEQ ID NO: 761162 - DNA, 75 bp, Homo sapiens
cagcgagatccgggccgtgaacgaaagcagtgacggaggagcttgtaccaccggattgcaagtcaagtagctgct

SEQ ID NO: 761163 - DNA, 98 bp, Homo sapiens
agcctggaaggtgcgtgtggggctgggtctcggagtgggagacgtggagtgcaggtgcgtctaatgctagtgttggcacctgttatgtgcattctctc

SEQ ID NO: 761164 - DNA, 49 bp, Homo sapiens
cagttttttctaatggctattcaaggcagaaaccactaatactagcctc

SEQ ID NO: 761165 - DNA, 100 bp, Homo sapiens
cttaggagaaatcttgagagtggacagcaattgtgaagatcgccagagagttctgtgtttcatcaccgccgaaaggctccaggtggcactgaatcgcagt

SEQ ID NO: 761166 - DNA, 100 bp, Homo sapiens
tcccctgcgtcccgccaccggccgcttctgtcctcgtgccggtggtggtgtgcacattgagccccggtatagacagttcccccagctgaccagatcccag

SEQ ID NO: 761167 - DNA, 98 bp, Homo sapiens
atgggccttgctttagggatgtttctctctcgcttgtgtgaagagaaactcagtgtgggatgagttggcctactacgaagaaaacacacgagattttc

SEQ ID NO: 761168 - DNA, 83 bp, Homo sapiens
gtcacggtgagctgcggcgagcggagcttcgcggggatcctgctggactgcacgaaaaaacatccggctccgggttcgagcag

SEQ ID NO: 761169 - DNA, 100 bp, Homo sapiens
cacggatatcctctgttgggggagaaggtaactgcaaaaacaatggctcagcatgaagaactgatgaagaaaactgaaacaatgaatgtagttatggaga

SEQ ID NO: 761170 - DNA, 50 bp, Homo sapiens
ccgagaccgcggccgggaccgaggaatagagacattgaagtttgggacaa

SEQ ID NO: 761171 - DNA, 75 bp, Homo sapiens
ccggtacatctgaaagccgggaaatgatatggaatgtgcagatgtcccactattaactccaagcagcaaagaaat

SEQ ID NO: 761172 - DNA, 87 bp, Homo sapiens
aggcagaaaacggacggaagaaaaggtctggccggctgaagactttaagtgacaagtcaagagaagcaaaagtgaaaagcaaaccca

SEQ ID NO: 761173 - DNA, 82 bp, Homo sapiens
cgagagaccagcaaggaatccaaatgcatcattcagatgcaaggcaactcgaccaacaaatttacatgtattggagaccaga

SEQ ID NO: 761174 - DNA, 83 bp, Homo sapiens
cgccaggcggtgatgaagaatccccccgaaaggaccccccaggatgaatattctatctttcctcagacatactccatagatat

SEQ ID NO: 761175 - DNA, 90 bp, Homo sapiens
aagagctgcaaaaaacaaaaaacgaagaagaatacatggtcaatacattcattgtcatgcaaagcttttctataggagaaaaccaaaagg

SEQ ID NO: 761176 - DNA, 100 bp, Homo sapiens
atgcactcggatgccgccgctgtcaggctgtgtggtctttgaggatgtgtttgtatacttctctcgggaagaatgggagcttcttgatgatgctcagaga

SEQ ID NO: 761177 - DNA, 100 bp, Homo sapiens
atcttcttcagaagcttcaagtctcatctgcattaaagctctccattgaaccctctcacaaaagccgcaatgtttaccgaatgctttttaagagcaaagc

SEQ ID NO: 761178 - DNA, 74 bp, Homo sapiens
ctagtttggatgtggaggggaatagactccatctatccatatgaggccaagatagccaggttaaccaaacgctt

SEQ ID NO: 761179 - DNA, 141 bp, Homo sapiens
cccaagaagaccattcagatgggatctttccggatcaatccagatggcagccagtcagtggtggaggattctcaaagttggattggtggaaacaatgaaccattgacaggctttacatggcgaggtggctgtgaaagagaa

SEQ ID NO: 761180 - DNA, 102 bp, Homo sapiens
gcggcaccaaggcccccaagccctccttcgtgtcgtacgtacgccctgaggtcagcccaaggccaaccccactgtcactctgttcccgccctcctctgagga

SEQ ID NO: 761181 - DNA, 82 bp, Homo sapiens
cacctttgtctccccgatctacggggctgacatcagcggctctttgtatgatgactggtgctcatcggggactcaggcgtgg

SEQ ID NO: 761182 - DNA, 82 bp, Homo sapiens
ccagacgctgcccgcgggcccggccacggcggagccaagacagtcttgcactgtttcctaggctggagtgcagtggcacaat

SEQ ID NO: 761183 - DNA, 82 bp, Homo sapiens
aaatgctagtgccaccaccacggagcctcttccagaaaagacacaggagagcctgtgctgactgggttacttttttaaacac

SEQ ID NO: 761184 - DNA, 51 bp, Homo sapiens
tttggctgaggagttttcaatcccagttgggagccacgtgtaccagtgtgt

SEQ ID NO: 761185 - DNA, 75 bp, Homo sapiens
cctcagctgggagaaatgttggaaatggtttaaacacattatcagggcccactgatgatggtgaagaagagatgg

SEQ ID NO: 761186 - DNA, 75 bp, Homo sapiens
ctcggccccgccagcagcactgtggaggccgtcctcgcagcagccgctcttctaaaacattcaaaccaaagaaga

SEQ ID NO: 761187 - DNA, 82 bp, Homo sapiens
ctacggggccttctacagtgacggggagatcagcatttgcatggaacacatggtcaaaatgcagatcttcgtgaaaaccctt

SEQ ID NO: 761188 - DNA, 83 bp, Homo sapiens
aggtggagcacctgaagagatgccagcagcgctcctttaccctcatcgtggaggcctgggactgggacaacgataccaccccg

SEQ ID NO: 761189 - DNA, 95 bp, Homo sapiens
cagcaccacagtccttctgcagtccctcgtccagccacccccagagacgagttgtactgctgtcacaggaaatggacgctggattacaagcatgg

SEQ ID NO: 761190 - DNA, 101 bp, Homo sapiens
ctgggcatgtcctgtgatggccccttcaagccggatcactaccgctactgagagccagtgccctctggtggtcagaagatgctgtgctgtctcgttaggat

SEQ ID NO: 761191 - DNA, 83 bp, Homo sapiens
caggtgatggataggagcaaccctgtaaaaccagccttagactatttttcaaacaactaaatgtgttaaatgggcttgccaac

SEQ ID NO: 761192 - DNA, 96 bp, Homo sapiens
agctgcagggccactgcaagtctataaagaacacgctcaggagcaactggaacagatccagaaggagctaagtgttttggaagaggatattaagag

SEQ ID NO: 761193 - DNA, 50 bp, Homo sapiens
cccgcggccgcaccttcccgccttctcagaggctgtgatcaatagccagg

SEQ ID NO: 761194 - DNA, 100 bp, Homo sapiens
tatcagccactaatgaagttgggaactcagaccgtaccttgcaacaaggcccagctactccagacttctatgctttggtggcccagcggctggaacagct

SEQ ID NO: 761195 - DNA, 113 bp, Homo sapiens
cccacacgggcgagaagccctacgagtgcaacatctgcaaggtccgcttcaccagacaatgcagatcttcgtgaagactctgactggtaagaccatcaccctcgaggttgagc

SEQ ID NO: 761196 - DNA, 97 bp, Homo sapiens
tgatgtgcgacaaggagttcatgtgggccctgaaaaacggagacttggatgaggtgaaagactatgtggccaagacagtgatctgacacaaacacag

SEQ ID NO: 761197 - DNA, 74 bp, Homo sapiens
ccagatggtgttacctggagcttaaaaagctgcacgcaagtgttaaacttctgaattacatgatgcgtaatgct

SEQ ID NO: 761198 - DNA, 83 bp, Homo sapiens
cactgctgggccctgaggctgcaccaagtggcgaaggagccggctccaaggttctgcttggattctgctagacagacccgaca

SEQ ID NO: 761199 - DNA, 82 bp, Homo sapiens
cgcgctcacctgcgccggtagcgaagaaatcgccccgggacatgatggcctgatatgaaggagtcacgcctcccgcctcccg

SEQ ID NO: 761200 - DNA, 76 bp, Homo sapiens
gtggtggtgaagttaaatgtgaaataacgtggttagaaggccattcactggcacagacagtatttacgtgccttta

SEQ ID NO: 761201 - DNA, 50 bp, Homo sapiens
ccggaacaccctggaagccgagaaatggagttcaaagaaggacgcagagc

SEQ ID NO: 761202 - DNA, 90 bp, Homo sapiens
ggggaacatcactcagaagtttgatgtaggcggcgactggcggcgcgatggacctgaccgggctcctgctggacgaagaaggcaccttct

SEQ ID NO: 761203 - DNA, 98 bp, Homo sapiens
cagaaagcaagtgaatacgagtcagaagaagatgcttataagacccaggtcaggattgacaatgagccagcttacttggacatcttggacactgctgg

SEQ ID NO: 761204 - DNA, 95 bp, Homo sapiens
ctgatctctttttcatgctcctccttgctccaaagaaaagccggatggcaaaagagcccagaacctattgcacatatctgaatgagaagtcgctc

SEQ ID NO: 761205 - DNA, 100 bp, Homo sapiens
cggtctgtgagcaaggaatcagttgcctcaatgggagctgactcaggagatgactttaatacaaatcatattcccctgaagccctctggagatacctcac

SEQ ID NO: 761206 - DNA, 100 bp, Homo sapiens
tttggatctgttgctgatgatcagaaacttatgatgtacactgaggaggggacggctccgtcttcacattgtgcacagatctgaggatgggattagcgaa

SEQ ID NO: 761207 - DNA, 96 bp, Homo sapiens
ttcacttccctcggtctgggcttctctgaggcggcgagagatggtcaggtctggagctcgaccgggccagggtctcctatggacagaagtgcgggc

SEQ ID NO: 761208 - DNA, 74 bp, Homo sapiens
gccgcatgactccccggtactggaggtgtacgtggccatctgcaggatccaccagaagatatgaagcaggaccg

SEQ ID NO: 761209 - DNA, 75 bp, Homo sapiens
aagggaccaaggtggaaatcaaacaatcgggaccagtattcacatctgctaagtgatcattttctgccataccaa

SEQ ID NO: 761210 - DNA, 75 bp, Homo sapiens
gccatggcgtacgcctatctcttcaagtacatcataatcggcgacacagttgtcgccgtgatcctgaaggcgctg

SEQ ID NO: 761211 - DNA, 100 bp, Homo sapiens
agcagcttcagaaccagagctggcttccagattctatggtgtcagtaaagaggaaggctgagaacattgcttctgtggaggaagcagaagaagacctgag

SEQ ID NO: 761212 - DNA, 75 bp, Homo sapiens
atataatccattctcggattctagaacagtgagttgggaatcagactcttgagttgacagctggcctatggtttc

SEQ ID NO: 761213 - DNA, 75 bp, Homo sapiens
aagggaagtcatttctactggacttcatgcttagatacatgtataacaagaactttcacgatggccgtaaagcac

SEQ ID NO: 761214 - DNA, 101 bp, Homo sapiens
gatgaacgatttgaacaaagcgctagcaacttctaccaacaacaggtacctagtcgatagtcgctggttcaaacagtggaaaaaatatgttggctttgaca

SEQ ID NO: 761215 - DNA, 80 bp, Homo sapiens
agtgaccaactcagtgccaaaaccaggtattgggagagttgctgctacatctttaggaaatttgactaaccatggttctg

SEQ ID NO: 761216 - DNA, 90 bp, Homo sapiens
ttcaccagcactgtctccaccctagagccttcaaagaaaaacctcggtatccaccaagtcaggctcaagcagctcttcaagacagtcccc

SEQ ID NO: 761217 - DNA, 89 bp, Homo sapiens
gggaattcaagcaatggaaatagtggctctaacagattgatcgtactaaaaaaccagcagtcaaattgcctgaagagcatagaataaaa

SEQ ID NO: 761218 - DNA, 80 bp, Homo sapiens
cgagcacccgcctccgggcatcttcaactacggcgatctcgatgtcgtgtttgcctcttcctctaagtgcggaaaggata

SEQ ID NO: 761219 - DNA, 95 bp, Homo sapiens
ttagctggccacgatatcaactatttggctttgtcagatattacagtgacagagagaaacacagaaaactggatgatcacaggagtagagatcac

SEQ ID NO: 761220 - DNA, 100 bp, Homo sapiens
cttcgacctcatgaacggaggcccacacctcggtgccggtggtggtgtgcacattgagccccggtatagacagttcccccagctgaccagatcccaggtg

SEQ ID NO: 761221 - DNA, 101 bp, Homo sapiens
gtttggcttatatatgtcagacgtatgagcgtttctcccatgttgccatgatcttggagcttcggaggaagatcctggtgaaggggaagaagttaacactt

SEQ ID NO: 761222 - DNA, 100 bp, Homo sapiens
caaggggcatccaaatcttgcggcaacgcccccgggacatgcatcgtcccctggactctctcaagtagatgacattaatgctgataagaatatctcttct

SEQ ID NO: 761223 - DNA, 98 bp, Homo sapiens
cgctgccgctgccgcacctccgtagctgactcgccttatgatctcctcattgcgtccccctctgcccactggacttggacttcagatctgaccccaga

SEQ ID NO: 761224 - DNA, 100 bp, Homo sapiens
agccagtccacagattgtagcggcattcacctctcaggctgtaggtgtcagttgtacccgaggcgttctcagcagcagcaagtacctgtggtggatttcc

SEQ ID NO: 761225 - DNA, 89 bp, Homo sapiens
tacctcccaacaccattatggaatacaaaactcacaccgacagcatcaagtctctctgcaatgcaatcaatgtttacaacctcacctgc

SEQ ID NO: 761226 - DNA, 90 bp, Homo sapiens
aactaaagcaaattaaaaacaggatgaaaaagactgattggctcttcctcaatgcttgtgtggtgttttaaccaaacagttgtggctact

SEQ ID NO: 761227 - DNA, 80 bp, Homo sapiens
agaagatattcacagacatgcggaatttgaggttttgcgtgtgaagctgtgtggaaatgtgaaatactaccagtcacacc

SEQ ID NO: 761228 - DNA, 82 bp, Homo sapiens
ttttttctaatggctattcaaggtgttgacttcaaaatcaaaactgtagagctaagaggaaagaaaattagattacagatct

SEQ ID NO: 761229 - DNA, 98 bp, Homo sapiens
tcacctaacaccgcagcagcaaccgggcccggccaggttcggcgttccgtgagtgaacggagttactgcaagagctcaggcacctcaaaatcaaagtg

SEQ ID NO: 761230 - DNA, 100 bp, Homo sapiens
atcaacagtatgaaaaattatttcataaatggatgctgcaattacagacagtcattttgtttactcattcagccctgttgcaggtcccaataaactcttc

SEQ ID NO: 761231 - DNA, 88 bp, Homo sapiens
ggcacatatgtccaggaggagtctccggaaggtgatgttcgaaatgatatctatgtaacattagttcaaggagattttgataaaggaa

SEQ ID NO: 761232 - DNA, 75 bp, Homo sapiens
tggtgcccacaggagaggtttttgaacagcagggccaattcctgtccccccagcagcatggcatcgtgtgctgaa

SEQ ID NO: 761233 - DNA, 126 bp, Homo sapiens
gttgctcccgcctgagcccagcccccagaaaggattgtgacatatcgttggacccagaattgagccgggggccattgagactgccatggaagacttgaaaggtcacgtagctgagacttctggaga

SEQ ID NO: 761234 - DNA, 74 bp, Homo sapiens
gagttactcatgagaccagtgcccatgaaggtcagactgagcttggtgatccagctatttttcctgccgtaatt

SEQ ID NO: 761235 - DNA, 90 bp, Homo sapiens
tgctgagctcataggggatggcatgagtgaccccacgcctcccagtaatgcctgcacagggctgtgaacaaccggtccatccaactcccc

SEQ ID NO: 761236 - DNA, 82 bp, Homo sapiens
gcagggtctgaggtcatcggggatgtggacgaaggggccgacctcctaggttacttttcacatagaaccatatagcaatcga

SEQ ID NO: 761237 - DNA, 75 bp, Homo sapiens
cagctctgcggctcgggccctgaggaccatggccaacctggagcgcaccttcatcgccatcaagccggacggcgt

SEQ ID NO: 761238 - DNA, 100 bp, Homo sapiens
ctgaaaccactcaagagtcataggattagatgatccaagtcaccaagaaattactgtctcaagtgatacggattttttatcaagcagaaatgcatcgaac

SEQ ID NO: 761239 - DNA, 82 bp, Homo sapiens
cgggacccggtgtctgctcctgtcgccttcgcctcctaatccctagccactatgaaaggacctaagtgtgaaataccccgaa

SEQ ID NO: 761240 - DNA, 100 bp, Homo sapiens
cagtgcatggcttgtttgccacaggaaccatagaggggcagcttcatgacttctgggtaccagattcttaataggagttgcagcagcaaaaatatgaacc

SEQ ID NO: 761241 - DNA, 101 bp, Homo sapiens
gacggccgcctagagtggttcagccacaaggagaaaattacttggggcacacagcaaaaaatgctgtgatcacagtcccagcttatttcaatgactcgcag

SEQ ID NO: 761242 - DNA, 112 bp, Homo sapiens
caaatcgaagtagagagcgaaaccatcttcaagttagcagcgtttattttacaggtttctgagtcccttcaacatgatcctgggaggaatcgtggtggtgctggtgttcaca

SEQ ID NO: 761243 - DNA, 76 bp, Homo sapiens
ccaaagaaacaagccgtggaataggtgtatcaagtaatggtgcaaagcctgaacaaagaatggccgagtggattct

SEQ ID NO: 761244 - DNA, 97 bp, Homo sapiens
ccccctgactatggtgatggttacgtgatccccaactacgatgacaatgcaccgtggcctggcggcgagcccccggtcaccttcctccgcacggaag

SEQ ID NO: 761245 - DNA, 100 bp, Homo sapiens
gtctgaacgaactaaggatactccgctttcattggcatgttctggtggacgtcaggagggtgaagagtctttgcaggttggtggtcaacagggtcagaga

SEQ ID NO: 761246 - DNA, 75 bp, Homo sapiens
cgggggcgggccggggtcaccacgcctgccccagggaaccgcacaggactgatcctttgaaatactccagccatg

SEQ ID NO: 761247 - DNA, 82 bp, Homo sapiens
gccaacgccgtgttcgacatcctggccgtgctgcaggcccagcgcttgagaagtcggaggccaaggccgggccggtgcccaa

SEQ ID NO: 761248 - DNA, 90 bp, Homo sapiens
gaacagcactaccaccggggtctccgtcatcatgggcgtctctggccgagcctctttttgtggaaaacgacagcagcagcagtggcctgg

SEQ ID NO: 761249 - DNA, 97 bp, Homo sapiens
gcagcggcgggggcccgagggagcctgtgtggtgcccctatctccttgttccaagggcctctcttgccttgaaagccttcttattacaccagccttg

SEQ ID NO: 761250 - DNA, 83 bp, Homo sapiens
ataagtgtttcgaaaatgtgtgtgaattggatttgatcttccatatggataaggtagcagtagctgatgtgcagtttggcccc

SEQ ID NO: 761251 - DNA, 100 bp, Homo sapiens
aaactcagacccggttgaagaagcaatcagatttgctcagagagtttcagggcagcttgtgcagctggaagagaaagggcagggttcagtgccctggtca

SEQ ID NO: 761252 - DNA, 138 bp, Homo sapiens
gttggaggcttcgcccggctttgcagcggggacttcggcggcggcgcctcaggcacctcggcccgggtgctggagaatctggtaaaagcaccattgtgaagcagatgaggatcctgcatgttaatgggtttaatggag

SEQ ID NO: 761253 - DNA, 50 bp, Homo sapiens
cggtcttcccaggcgtcgcggagagcagggcgccctgcgtccggcagagg

SEQ ID NO: 761254 - DNA, 100 bp, Homo sapiens
ggaggctgtgcgggccccgctccgcttcgaatgggtaaaataccatgaagattttgaaaaaacaaaggggagaggctttactcccgtcgtggacgatcct

SEQ ID NO: 761255 - DNA, 75 bp, Homo sapiens
aggctgtcaagtatgtggagtgttctgcacttacacaggcacattcaggaccccgcgagccagcggctgacgtgg

SEQ ID NO: 761256 - DNA, 112 bp, Homo sapiens
agaccctggagcctcagttggaagcagccgatccagcctgcggagcctgtggggcaggatttaagtgccctgtatgctcaaaatttgtatcctcagatgaaatggatttgca

SEQ ID NO: 761257 - DNA, 100 bp, Homo sapiens
gtgacctgcatgtactgggggattcgcagggaggatgtcgggacaccccggaagctgggaaatggaacggtaatggtaggagagagagagcagggattgg

SEQ ID NO: 761258 - DNA, 75 bp, Homo sapiens
ccccagtcctgggttcatgatgtacgcgaaaatgtttataggaggccttagctgggacactacaaagaaagatct

SEQ ID NO: 761259 - DNA, 150 bp, Homo sapiens
aaggaccatacaactcattgtcacgccagcgatcatgccaaccaactgtccattcacattcctggctggagttacagggcaggggtgagcttatggaaccaaggaagagctgatgaagttgtcagtgcctctgttgggagtggggacctc

SEQ ID NO: 761260 - DNA, 90 bp, Homo sapiens
agcagcggaaaatgatccagtcacagatggtttgtgcttgtcggaatcagaaacagtcaacaaagagcgagcgaacagttacaaaaatcc

SEQ ID NO: 761261 - DNA, 102 bp, Homo sapiens
gcaccgggatcgtgaccgagaccgtgaccgagagcgtgaccgagagcgcgaatatcgtcatcgttagaaggatttacttaaatccattgtttcaagaatgaa

SEQ ID NO: 761262 - DNA, 99 bp, Homo sapiens
cctcatgaaacggctggtgggctccaggacgcttcccgtggatttccacatcaaggatgaaagcgtgactcagcttggtcaggagctggcccagaaact

SEQ ID NO: 761263 - DNA, 100 bp, Homo sapiens
ccagccacgtatgacactgccggtctcaccatgcccacagcaacactgggtggtgggcacatcaaagaggtcatcgtggctgctgaggcggagctgggag

SEQ ID NO: 761264 - DNA, 101 bp, Homo sapiens
cccttggacaaagcctgaaaccagcgtccaagccatatttcctacgccggatcctgctgctttaaaagacagacggatggaaaacctagttgcatatgctc

SEQ ID NO: 761265 - DNA, 100 bp, Homo sapiens
ccgattatggattggcaacctggaccccaaaattaccgagaccctgatgctcccataagacagaaaatgccccttgatgatctggatagagaagatgaag

SEQ ID NO: 761266 - DNA, 100 bp, Homo sapiens
ggagcgcgtccccggggaaatgagggccggtgcataaacttctcccgagttccatctcagtaaaagggaagcaggaagaccaagaaggtacgaagatggc

SEQ ID NO: 761267 - DNA, 75 bp, Homo sapiens
cctcactgcagaggtgctggagctggcagtccttcagtgaatctacagacctattttctcaggagctcagcctgg

SEQ ID NO: 761268 - DNA, 75 bp, Homo sapiens
atgcaggacatcgtgtataagctggtgcctggcttgcaagacagatgtgtactctggcacacccaccaaggtgag

SEQ ID NO: 761269 - DNA, 100 bp, Homo sapiens
ggcaaccgccccgtctgagaaagggagacgtggtgggcggtccttcctgtgacacgacccttgagtgacagttctatttgattgcctccggtactgtgag

SEQ ID NO: 761270 - DNA, 100 bp, Homo sapiens
aggtgtcggtgttccacgtgaagctcaccgacagtgccctgagggccttcgagagctaccgcgccagacagccaaggccacctttgatgccatttctaag

SEQ ID NO: 761271 - DNA, 98 bp, Homo sapiens
cattgatctcctatttttggcttcaagattttgtgccaaccaggctgctttgctggctctgcaagaaaatggactagacgcaactacagtgaaacaag

SEQ ID NO: 761272 - DNA, 75 bp, Homo sapiens
atgatcctggcggcaggcaaagtgagccccaagcagcgggagctggcaggagccccctggtgaaggccatcttcc

SEQ ID NO: 761273 - DNA, 75 bp, Homo sapiens
gctctctctccagtccttgctgaagagactttccgttacatgagtacaggtgaacaaaggcagagtaaactgtca

SEQ ID NO: 761274 - DNA, 100 bp, Homo sapiens
ctgtttgagaaaaggcctaagaattttggcattgccgagttcatgcccattctgggcaccaacctgaacccagagttcatctccgtctgcaacaacgcca

SEQ ID NO: 761275 - DNA, 97 bp, Homo sapiens
agtggaaggatgccagagtgtgattcagtatgctacctcttctattgaaggatgaactcctaatgccctctgttgtgacaacaatggcattttttat

SEQ ID NO: 761276 - DNA, 83 bp, Homo sapiens
atcggtggtaacgacggcctcagcaggcggggaagatgaaaggatatggctcgtggacagcagaaaattcagtctcagcagaa

SEQ ID NO: 761277 - DNA, 50 bp, Homo sapiens
gaaaaaggtttgaggagagaagagtgctgcagcagctcccagtccagtgc

SEQ ID NO: 761278 - DNA, 99 bp, Homo sapiens
ataaagtcaagtgtccattttctttcaactatatttgagcatacccaggcgccaagcccatctttgtgtgcttgcatccaactgtgatgagcctatgta

SEQ ID NO: 761279 - DNA, 82 bp, Homo sapiens
gccatctgctgcagactggagcctgagagcagccccagtggaccacctgcatttgccgcccacccctccgagcagtcacggc

SEQ ID NO: 761280 - DNA, 90 bp, Homo sapiens
tgcggcccctctttctcaacccagagcaaattgagacgtccgggcacaacagcaacgccatgaaagagacttggccctcttgaaactaaa

SEQ ID NO: 761281 - DNA, 74 bp, Homo sapiens
atgcatctcctcggcccctggctcctgctcctgggatcaccattaacaaggacaccaaggtacccaatgcctgt

SEQ ID NO: 761282 - DNA, 88 bp, Homo sapiens
ggagcaaggaaaaaaaccttcgactatgcagagacatgagatggtagccaacccctcaggaattacatgaacgacagccttcgcaccg

SEQ ID NO: 761283 - DNA, 95 bp, Homo sapiens
caaaagactgctaaagtgagagtgaccaggcttgttctggatccctatttattaaaggtattattctcactaaggttggttactatactattcca

SEQ ID NO: 761284 - DNA, 90 bp, Homo sapiens
gcaactactttagaagaaacgacaccattgtttttagacatgtcatgctgcccaaggacatagccaagctggtccctaaaacccatctga

SEQ ID NO: 761285 - DNA, 75 bp, Homo sapiens
ggcaagatgatccaccagcggttccatcctacacttggacacgatgaggcgagtggtacgacagagcaagtttcg

SEQ ID NO: 761286 - DNA, 80 bp, Homo sapiens
attttttaaccctagatctcgatcatggaagggaagtggttgctgtgtatgttactggtgcttggaactgctattgttga

SEQ ID NO: 761287 - DNA, 75 bp, Homo sapiens
aggtccagatgaaagagaagtttctggtcactccccaggattatgcgcgcaaaagactgttgaagtagagagcat

SEQ ID NO: 761288 - DNA, 83 bp, Homo sapiens
ggccgttcagcagccgagactcaagtcaaaatgcagatcttcgtgaaaacccttaccggcaagaccatcacccttgaggtgga

SEQ ID NO: 761289 - DNA, 50 bp, Homo sapiens
tgaagaacactttcaagaaccaggagagcgacttgcagttgtggaggtac

SEQ ID NO: 761290 - DNA, 76 bp, Homo sapiens
aacgtgttcaataccatccttaccaccagaagctatccacaacttcgcagaggggagagtacggtttccatgaata

SEQ ID NO: 761291 - DNA, 90 bp, Homo sapiens
cgcgtgtgcaggccgcgcgcctgctggagcagatcctggtggctgagaaccgacttcaagaactagtgcgcagggggaacagccagtacc

SEQ ID NO: 761292 - DNA, 75 bp, Homo sapiens
ccagccccctgtggctgaggctacaccccggagccaggaggcctcctccagctggtgatctcgggtcccgtgcag

SEQ ID NO: 761293 - DNA, 101 bp, Homo sapiens
gcccaaccccaaaagagccaaactcagctcgcccggtttctcggcgaatgacagcacagacttcccaagtaagaagcggaagaggagccgctggaaccaag

SEQ ID NO: 761294 - DNA, 76 bp, Homo sapiens
ggaaatctggctgagtgtgaaagtgtcttgggacaaggtgcgcattcctggtgtgctgcagcgattgggagtgaca

SEQ ID NO: 761295 - DNA, 98 bp, Homo sapiens
cccaaacccagctttcacagagcatttcactttccctgaaggtgcccaacaaccagcatgtgaaggtgcgcttcaaattcttctacctgctggagccc

SEQ ID NO: 761296 - DNA, 100 bp, Homo sapiens
gtttgttcaggaaccaccagtgacagattcgtaagaaggcaacaagttcttctcctctacagaaggattttgcaaacaattcggcaagttccaaatgatt

SEQ ID NO: 761297 - DNA, 74 bp, Homo sapiens
ggccgccctgggagcgagcggaggagcaggcgccggaggttatcaccaatctagtgaaaatgttgaagtccaga

SEQ ID NO: 761298 - DNA, 50 bp, Homo sapiens
agtacatcataatcggcgacacaggtctacttcaggaaaggaaaagtact

SEQ ID NO: 761299 - DNA, 74 bp, Homo sapiens
tacagtaaggctgaaatcattgaagtgcttggagtgcagaactgaaagagatgccatggacaatattaccaggc

SEQ ID NO: 761300 - DNA, 99 bp, Homo sapiens
gagagagcgagctgagtggttgtgtggtcgcgtctcggaaaccggtagcgcttgcagcatgagattatggagaagtctggcgaggaaggaatgcctgat

SEQ ID NO: 761301 - DNA, 51 bp, Homo sapiens
agattacagcgatggggacacagaagagatgtggtatggtgtattcctgtg

SEQ ID NO: 761302 - DNA, 90 bp, Homo sapiens
cccaactatacccctgggaagaaggaggacctctacctgaagccaatccagagacttcacagagaatgcagttgtcttgacttcaggtct

SEQ ID NO: 761303 - DNA, 75 bp, Homo sapiens
ccaaccatacacatggcaccacctcacacagggaaacgacttggaacgcagtgctgctgcgctatttcaacccca

SEQ ID NO: 761304 - DNA, 100 bp, Homo sapiens
gagaattcaaagaagctcctggcagcagcaaaactcttagctgactccactgctcgcatggtggaagctgcaaaggccctgttaaacctggcagagcgac

SEQ ID NO: 761305 - DNA, 75 bp, Homo sapiens
attcctgtattcttggacaagtacactggtgacatgtagctgtattcagaggattcctacaggaagcaagtagta

SEQ ID NO: 761306 - DNA, 90 bp, Homo sapiens
ctgaagcgtgtaagcacctctggaaatgtggaatcgagaaccaagccttctacaagctgaccggttccctgatgtgttacctgcttctgc

SEQ ID NO: 761307 - DNA, 101 bp, Homo sapiens
gctgcagtccaagtgcagcgatggggagcgggcccgggcggagctcaatgacaaagtccacaagctgcaggtggctgctgccaaggtggaagccgggcata

SEQ ID NO: 761308 - DNA, 51 bp, Homo sapiens
tcatgagagcgcggccggaggacaggtgagatcggactggaactgttcggc

SEQ ID NO: 761309 - DNA, 74 bp, Homo sapiens
cctggaagaagctgatgctgagcaatggccaatgtacatggtggactatgccggcctgaacgtgcagctcccgg

SEQ ID NO: 761310 - DNA, 98 bp, Homo sapiens
agtctgtactctggtggcttccagtggaaaaggcattttggaggcaggggcagtcccggagagttcaagtcgaagtgaagtcagtgcaggaatctggg

SEQ ID NO: 761311 - DNA, 82 bp, Homo sapiens
gctggagagaacagttcattgaagctatcactgtcagtgctggtgtggccgacgacgatgccctcgctgaggagcgcatgcg

SEQ ID NO: 761312 - DNA, 100 bp, Homo sapiens
ccgcaccatgccgctcctaagcctgcacagccgcggcggcagcagcagtgagaggtgcgcctcctgtgcgggaaagagaccatggtgaccagcaccacag

SEQ ID NO: 761313 - DNA, 83 bp, Homo sapiens
gttggagtgcaccaagaaatggctgaagggtatgtgattggcagctgtattaaacacattccaatcgcaggacgagatataac

SEQ ID NO: 761314 - DNA, 75 bp, Homo sapiens
aggaaagcagctgagatccagaggagtggaaggctcccccttgactaaagctgggcaagattcttgccaagagaa

SEQ ID NO: 761315 - DNA, 75 bp, Homo sapiens
gcctcaccatgaaatcacagcttcagatcactggacctggagacccgcaatgcggagttggagcaccagctgcgg

SEQ ID NO: 761316 - DNA, 83 bp, Homo sapiens
ccgatccagcctgcggagcctgtggggcagtgcaatcaaactgaggccgaaggaaggggagacatactttgatgttgtggctg

SEQ ID NO: 761317 - DNA, 75 bp, Homo sapiens
cgcaacaataagaaactcctgggccgcgtgaaggccttcgataggactcagaattcatgattgaagaaatgcagg

SEQ ID NO: 761318 - DNA, 96 bp, Homo sapiens
tattcagagtgatagtttgtggcttgtagaattctatgctccatggaaaatgtttataggaggccttagctgggacactacaaagaaagatctgaa

SEQ ID NO: 761319 - DNA, 71 bp, Homo sapiens
cggtttctacctcaaggacatggagcgcttgaaagagatctgttcagcctgtgtgcgctgtaagagctgtg

SEQ ID NO: 761320 - DNA, 82 bp, Homo sapiens
cccagaaacccctactcatgatccggaccctgagactcccctaaaggccagaaagcaaggtgtccctgccttcactgtgctc

SEQ ID NO: 761321 - DNA, 74 bp, Homo sapiens
aagagcttgctccctacgatgagaactggttctacacgcgagctgttcgctcccaggaccccgggcagcggcgg

SEQ ID NO: 761322 - DNA, 89 bp, Homo sapiens
tctttatcctgaggacatagtggcagaaaaggctggcatggttcatttgttggatttcctaggtatgattttcctcacaatgatttggg

SEQ ID NO: 761323 - DNA, 83 bp, Homo sapiens
ggaggaggtgaccacgcgcgagtcgaccgtgtgtgagaagatcatggagttgctgggacagaacgaggtggaacagcggcagc

SEQ ID NO: 761324 - DNA, 100 bp, Homo sapiens
atacccttgcaacagcagctgaccgtcctccttctaatatttggaagaaaatagatcaatccagggactataaaaatggcaatcaactcagggaatatca

SEQ ID NO: 761325 - DNA, 98 bp, Homo sapiens
ctcgcgccggctatggccgtgccctggggctgagccctcaggtgtggacactgccagcggctgcagccgacttggaatgacctgggagacaaatacaa

SEQ ID NO: 761326 - DNA, 75 bp, Homo sapiens
ctgcatggagcaagtctgtcagcaccatctttctaacagtatatgtctcgagtccacggtatgcaccctaaagag

SEQ ID NO: 761327 - DNA, 80 bp, Homo sapiens
cctcctggcatctgccggctgctccgcaccccggggtcccaggaagggcggcccaggacccttgaacatctgtgaagaaa

SEQ ID NO: 761328 - DNA, 100 bp, Homo sapiens
tccagagaagccaggagcacccggcgtcccagacaagtgaaatgacaatggatgctctgttggctcgattgaaacttctgaatccagatgaccttagaga

SEQ ID NO: 761329 - DNA, 75 bp, Homo sapiens
ctcagaatatgactctctgcctgaaaatagcgagacaggtcatacagcatatttgacaataatcgccaggatccc

SEQ ID NO: 761330 - DNA, 75 bp, Homo sapiens
ggttgccgggaggtgaaccgaggtctcctctgagcctccggcctccataagacccaaaacagatgacacctcttc

SEQ ID NO: 761331 - DNA, 75 bp, Homo sapiens
tcgactgaaagtgaaggacccagactctagttgtgttctattactcaacaggaatcttcaaggatgcaggtgttc

SEQ ID NO: 761332 - DNA, 101 bp, Homo sapiens
ggatggaacccatattacaagaatacgaagaagtctatgactgcttttcaggaagccttggacgctgcaggtgataaacttgtagtagttgacttctcagc

SEQ ID NO: 761333 - DNA, 100 bp, Homo sapiens
ccggaatcccgcgcgctgcccacgattcgcttctgagtggatatgctgctgatgaaatcactcactgcatacggcctcaggacatcaaggagcgccgagc

SEQ ID NO: 761334 - DNA, 75 bp, Homo sapiens
ggcggagctgacggtggaggttcgcggctctaacggggctttctacaagatgagtgccaaaccaaatatggaaat

SEQ ID NO: 761335 - DNA, 100 bp, Homo sapiens
tcagatgcagagagagtggagctttgcgcggacacaccctctgctcacctcactgtaccgcaggaccggggaaatggaggtgcgcaaccctctgttcgac

SEQ ID NO: 761336 - DNA, 54 bp, Homo sapiens
cccggcctgggagaagcagcagcgcaagacttctgcctggtgtcgaaggtggtg

SEQ ID NO: 761337 - DNA, 82 bp, Homo sapiens
accctggagcctcagttggaagcagccgatccagcctgcggagcctgtggggcaggtatccagctcacatagaagacattga

SEQ ID NO: 761338 - DNA, 95 bp, Homo sapiens
gccggagctgggcgcggattcgccgaggcaccgaggcactcagaggaggatttttagactctgaggagcagttggagctaatccacattatggaa

SEQ ID NO: 761339 - DNA, 106 bp, Homo sapiens
cacagtccagcaacttcagattttgtggaaagctattaactgtcctgaaggaaagcttgtggctcttgcagttattgatgagaaaaatacatcagttgaacatacc

SEQ ID NO: 761340 - DNA, 88 bp, Homo sapiens
gggaatggccgcggtgtggcagcaagtcttagcagtggacgcgaggtacactgcagcctgctcccggctcctggtccaatacaaagct

SEQ ID NO: 761341 - DNA, 75 bp, Homo sapiens
gaactgggatttcaacctgaaagtggaggctgcgaaaataggcacacggcacagcaggagaccaacaagaccatt

SEQ ID NO: 761342 - DNA, 51 bp, Homo sapiens
gggctccggctggtctgtggtgaggattgtggctgcacggctcaacggttc

SEQ ID NO: 761343 - DNA, 100 bp, Homo sapiens
ccatctacatcagctcgtgcccgtcttattgatcctggctttggaatatataaggaccctgatgctcccataagacagaaaatgccccttgatgatctgg

SEQ ID NO: 761344 - DNA, 90 bp, Homo sapiens
cgggccagcgacccgctgctcagcgtcctcatgtggggggtaaaccactcggtatcttgcaatatattcagaactctccctcctagtgac

SEQ ID NO: 761345 - DNA, 87 bp, Homo sapiens
cctacgtccaggacagcttcctgaccaatgacatccttcacgagatgctgctgtcggggccgtgtttggcctcaccacctgcatcag

SEQ ID NO: 761346 - DNA, 100 bp, Homo sapiens
ctcgagaaaagattttctattacttcagcaacagtccttcaaaggaaccactcgttttgactattattttatcactctttgtgaaacttcacaatgttcg

SEQ ID NO: 761347 - DNA, 98 bp, Homo sapiens
ccagaaggaaccaattccggacacataacaagcagcagtgaggacaccaaaggccaactgtgatttgagacggcagattgatgaacagcaaaagatgc

SEQ ID NO: 761348 - DNA, 50 bp, Homo sapiens
gcctgatctaacccctagaaacaggcaattgttgacacagtggacaacct

SEQ ID NO: 761349 - DNA, 78 bp, Homo sapiens
tggtgtctggctctgagctcctgcagctcgtcagcccatttctgggatgaagactggcccatttgcagagcactccaa

SEQ ID NO: 761350 - DNA, 98 bp, Homo sapiens
agatgatgctggagcagaagttagcgcttctctctcgaaatcatgaggtccaatggattttgtttagcaaataccgaaacaatagttattgaccacag

SEQ ID NO: 761351 - DNA, 117 bp, Homo sapiens
cacagcccatccccagaagatcctggtcccctgctttaaccatcgaaaatgagatggcccactgcgtgaccttggttcagctgtccatttcctgtgaccatctcattgacaaggaca

SEQ ID NO: 761352 - DNA, 98 bp, Homo sapiens
cttatcagagattgagaatgtccatggatttgtttctcattctcatatttcaccaataaaggacttggaccctctgtggaacacccgagtacctagcc

SEQ ID NO: 761353 - DNA, 100 bp, Homo sapiens
catgccccagggccccccacctgtgcagcggaatcccgactgtgcctgggaaggtgaccctgcagaaggatgctcagaacctgatcgggatcagcattgg

SEQ ID NO: 761354 - DNA, 75 bp, Homo sapiens
cccgagactacggtgtgctgttagaaggttctggtcttgcactaagagcttactcacatagcatattggtatatc

SEQ ID NO: 761355 - DNA, 90 bp, Homo sapiens
gcagccgcgagctcctggaggcggcgggatggaggcggcggccggagcacccagtggtgctgacaaaatttgttgaaggggcccgagaag

SEQ ID NO: 761356 - DNA, 51 bp, Homo sapiens
aagagtgaagaggaaaacttcttgcgatgagcccataggcagcatgtcatc

SEQ ID NO: 761357 - DNA, 98 bp, Homo sapiens
ctgtatatattgatattctcttcctattgacttgctgcctcaacagatctgcaaaggacaaccagccagaggccagtaagcttgtcatgtcctatgtg

SEQ ID NO: 761358 - DNA, 76 bp, Homo sapiens
gctgaaataacccttgatcctcctcctaattgcagagtgttgcggagataggaacatgggagagaaacaatctggg

SEQ ID NO: 761359 - DNA, 83 bp, Homo sapiens
gcgggagcagggttacgtcctcgtgggattcgttggcggtggctgagcaccgaacaagatttgtgatgaaatggagcctggaa

SEQ ID NO: 761360 - DNA, 90 bp, Homo sapiens
gagtatgattggctgtgattttaggtactaggttttgacaagcttgcatcatgcgtgagtataagctagtcgttcttggctcaggaggcg

SEQ ID NO: 761361 - DNA, 74 bp, Homo sapiens
agaatgaagtggaacggctgaagaagcaactgagagctgctcagttacagcgaaacttggatttaactggccag

SEQ ID NO: 761362 - DNA, 80 bp, Homo sapiens
ggcttctggggctgactcaactggcacttaagtattcatcgaagagtcaccccagtagcggtgatcacagacatgaaaag

SEQ ID NO: 761363 - DNA, 83 bp, Homo sapiens
ccgggaggaaggaacgaggcaaggagctaaagcagcgtgcgttcagccctggggcctgggttctgaggaaaacgcaatggtgg

SEQ ID NO: 761364 - DNA, 123 bp, Homo sapiens
cgaagctcgtgtgtgcacccccgatcccgccagccactcgcccctggcctcgcgggccgtgtctccggcatcatgtgtgttgatgcggatgaaattaaaaggctaggaaagagatttaagaag

SEQ ID NO: 761365 - DNA, 100 bp, Homo sapiens
ccgggtaggctcctccctgcgacagaccttcagcttcctctcgggcatgaccggaaaggccaaggagccagcaccgctctttgaccttgccatgcttgcc

SEQ ID NO: 761366 - DNA, 75 bp, Homo sapiens
ctcaggcgtgcgcggacggtgtgcggactaataatcattattggagaggagttgtctgctaatgtaactactttg

SEQ ID NO: 761367 - DNA, 122 bp, Homo sapiens
ccatatgaatttacgtgcgaggggatgctacagagaatcaatgctttcattgaaaaacaggtgatgatgaacagtctacacagatggctgcaagttgggaagatgataaagttacagaagca

SEQ ID NO: 761368 - DNA, 95 bp, Homo sapiens
tccagtcggcccaggcgccgcggcgaggagcgagcgctgcgaggtggcggcctgagagccaagattttcttcttcactcctcgcttggtggctcc

SEQ ID NO: 761369 - DNA, 90 bp, Homo sapiens
ggacggtgtttccctcccgtgagttctggcacaggagcgagaacccgagcagcgccatgagcaacactaccgtcgtccccagcactgcag

SEQ ID NO: 761370 - DNA, 76 bp, Homo sapiens
tgctggtttcattcgaggtttcgggccgtcagcctgggcttctgcccaccacagccctaccgggagccggaaccct

SEQ ID NO: 761371 - DNA, 50 bp, Homo sapiens
ctgcctggatccacgtcttctacaagagaaacctctgcgccatgagagcc

SEQ ID NO: 761372 - DNA, 75 bp, Homo sapiens
ggtcgccacctcccttccccacagctaggaaccaagggagaaaactggttgtcctggatgtttgaaaagttggtc

SEQ ID NO: 761373 - DNA, 90 bp, Homo sapiens
cttgggctgagtaccgcggcgggcgcgagcgaggcgccctagacatcttctccctcccttgcctcagtcgcccatgtttgatggaaaagt

SEQ ID NO: 761374 - DNA, 82 bp, Homo sapiens
tgatttgcaacccttccgggaagccatagctctgcatgctatggaagagagagcaattcaacgagctgaatgtaggcggatc

SEQ ID NO: 761375 - DNA, 82 bp, Homo sapiens
cagtgggaggagcaatgagaggcaatcctggcgtctctggccgagcctctttttgtggaaaacgacagcagcagcagtggcc

SEQ ID NO: 761376 - DNA, 75 bp, Homo sapiens
gccccaccaccgccctcaccatgacctgcctagagctggaacgttacctccagagcgagccctgctatgtttcag

SEQ ID NO: 761377 - DNA, 49 bp, Homo sapiens
gaggtgtgggtgttcgtttctcagacaaactttctgcctccttggaaag

SEQ ID NO: 761378 - DNA, 88 bp, Homo sapiens
cccacatgttgtggagggaccctgtggaaggtaattcatttgcacacctgttagcaagaaacagaagttgaaggactggaacaagtga

SEQ ID NO: 761379 - DNA, 75 bp, Homo sapiens
cgaaccgcagtatcatgctggccaagaagatcatcattaaggacggaggcacgctttcagcttatgtggagaagt

SEQ ID NO: 761380 - DNA, 100 bp, Homo sapiens
ccgggtcttccagaaggctgtagaccagagtatcgagaaggaccgtataatagacgctggccccaaaggaaactactctcgatttatgaatcacagctgc

SEQ ID NO: 761381 - DNA, 98 bp, Homo sapiens
gcgcgattcgcggcagcgccccgatggaacctcctggtcctgtgagcccgtggaccgggagcccgtggaccgggagccggtggtgtgccaccccgacc

SEQ ID NO: 761382 - DNA, 80 bp, Homo sapiens
ccggctccgtggggccgtcttcccggcgagtccgcgacggtcgccgcccacggcgagaacatgacctttgacctgccatc

SEQ ID NO: 761383 - DNA, 100 bp, Homo sapiens
tggggtccatgcctcttaagaactcttttcgaggaactatccgattttgttggcccccatttgaccaaaaaagtgacactgaattccgaaaacattgctg

SEQ ID NO: 761384 - DNA, 109 bp, Homo sapiens
cctctacttccaggactcggggctctcacgctttctgctcaagtcctgtcctcttctgaccaaagagtgggatcagcaatatgtaatccaactcacctccatgttcaag

SEQ ID NO: 761385 - DNA, 90 bp, Homo sapiens
cacaatggcagctgggtccacctcaccatcaacgatcctggctctgcagagagaacagcccagaaaagaaagttccccagccctccacat

SEQ ID NO: 761386 - DNA, 75 bp, Homo sapiens
tgggaagaaaaacagaggagttctattaagacgcttggtgtaaaaattgccaaagcagttgcctgccacaacttt

SEQ ID NO: 761387 - DNA, 75 bp, Homo sapiens
ctgtcgcttgtcttctattcaccatggcttcttctgacctctgctcttccaggcaagtgaacatgtagccagtag

SEQ ID NO: 761388 - DNA, 100 bp, Homo sapiens
gaagccacacaaagaacaaattgcagttgtttgaggacagagcgggatgccaccagcttgtccaaagggaagttccaggagctcctggtgggcatcgttg

SEQ ID NO: 761389 - DNA, 83 bp, Homo sapiens
ccgaggaggaggattcgcaagccgagaccaaatccttgagtttcaggtacaatgactcttcttgcttttcacctaagttgaat

SEQ ID NO: 761390 - DNA, 100 bp, Homo sapiens
tgtgtcatcctcaagatgcagtctcatgggcagtggtttgagttaacagccaggtccttgcctgctgtgcagtctgatgaaagacttcagcctctgctca

SEQ ID NO: 761391 - DNA, 100 bp, Homo sapiens
attgtttgaccacaacaagggccggattctcacccaggaatcagagaagatcattgctgagttgaatgaaacttgggaagagaagcttcgtaaaacagag

SEQ ID NO: 761392 - DNA, 82 bp, Homo sapiens
agcagtcagaaggggaacggatctgtgtgcccacagctcctggagccccacaggctgagccagcaacctccttggcacctgg

SEQ ID NO: 761393 - DNA, 100 bp, Homo sapiens
gttcctcatctcgtcagtgactttctttactccactgggaaacgatttgaacagcagcaaaaactcttagaagaagaaagaaaaagacgccagtttgaag

SEQ ID NO: 761394 - DNA, 98 bp, Homo sapiens
tgagcagtcaactcaaatgcaagtccaagaggaggaggaggcggaggtccaagcggaaaggtgccagcgagatttcagattcctgtaaacctctaaag

SEQ ID NO: 761395 - DNA, 101 bp, Homo sapiens
agagggaagacacgcggaaacagaaccttcgagatctgcggtctggggtctggttgaaagatggcggccctcactaccctgtttaagtacatagatgaaaa

SEQ ID NO: 761396 - DNA, 100 bp, Homo sapiens
ctcagctcaggaccgcgcgccgtggtctgaggtccgcggcagggtcccgcatggcggcgcacaggaagcacgttgactggattgttgctgacatcttggc

SEQ ID NO: 761397 - DNA, 85 bp, Homo sapiens
ttgttaaggattccaagtaactcttatttgggcaacaaaccatggatttctcttccccgaggaaagggtatccgcctcaccattg

SEQ ID NO: 761398 - DNA, 74 bp, Homo sapiens
tcagacacatgatccgcaagaacaagtaccgccccgacctgcgcatgcaacaaactaccaacactgtagaggag

SEQ ID NO: 761399 - DNA, 100 bp, Homo sapiens
ggcgctggccccaaggcgctgccctgcgcaggcattgcagtgtcgagatggctatgaaccctgtgtaaatgaaggaatgtgtgttacctaccacaatggc

SEQ ID NO: 761400 - DNA, 100 bp, Homo sapiens
caagggaccgtgagccaggcccaggagcgggtgcagctgcagatgtctacatggggaggacagagaagcgcaaagaacaagagaaaagatgcatccatct

SEQ ID NO: 761401 - DNA, 89 bp, Homo sapiens
gtcagctgcgctcccctaggagtgctgagcccgcggaaccgcagccatgaccgagaaggacatcctgctgcgacctgagctggaggaac

SEQ ID NO: 761402 - DNA, 75 bp, Homo sapiens
cattctcaatgagagcctcacagacccagccatcgttaaggtcatgcttcaccccttcctccatctgctgcacct

SEQ ID NO: 761403 - DNA, 100 bp, Homo sapiens
ttttatcagaaaagtgcaaggaggagtgttctctccctacagctatggctgatgtccttggtgatggtggaaactcctcgctcactatctctgaaggtcc

SEQ ID NO: 761404 - DNA, 51 bp, Homo sapiens
ctcgacttctcaatcccaagtggccaaagaggccccacagtatcaaatatc

SEQ ID NO: 761405 - DNA, 90 bp, Homo sapiens
gatggatccctctgtgcttctggaggcaaggtggatagatacttctcaagacatcacacagcgtgagtcaatcaaggagggaagccacaa

SEQ ID NO: 761406 - DNA, 52 bp, Homo sapiens
aggcaacattaagaaggagctgtttaagatatacgagaacgccatgattgct

SEQ ID NO: 761407 - DNA, 96 bp, Homo sapiens
aagaagacagccatcatttgaaaggcttgcattgatgacaatgttgatatggtgaagtttctggtagaaaatggagcaaatattaatcaacctgat

SEQ ID NO: 761408 - DNA, 74 bp, Homo sapiens
tttgtatagagatgtgatgttggagaactacagaaacctggtctccctaggcatccgtgtcattctggacctta

SEQ ID NO: 761409 - DNA, 75 bp, Homo sapiens
gccacacacaccatcatggtcctgggaccattgcaatttagagatgtggccatagaattctctctggaggagtgg

SEQ ID NO: 761410 - DNA, 83 bp, Homo sapiens
tgcagggtggctgcgtgtgctccgtacatcacacccatatttcagggggatatgagactttctactcggaatatcctgagtgt

SEQ ID NO: 761411 - DNA, 83 bp, Homo sapiens
cggatattttactctccagagtaaaccaaatcaccatgagtgatcttttgccaactttccaattaaaggttgacattcctgca

SEQ ID NO: 761412 - DNA, 74 bp, Homo sapiens
tccagagaagagaagctttactggtgttccagccctaagctccatcaagtatgatggtgaaggatgaatatgtg

SEQ ID NO: 761413 - DNA, 98 bp, Homo sapiens
gcctgctgatgtgaatttatcccagaagcctcaggtcctgggtccagagaagcaggatggatcttgcgagatgatgaggagtctgatgaggaagctgt

SEQ ID NO: 761414 - DNA, 100 bp, Homo sapiens
tcttccatcaatcatatctcacagatcttggcatatacagaagggctgcatggaaaatggctgttcacagagatacgatcaatcttttctcgtcgttatc

SEQ ID NO: 761415 - DNA, 100 bp, Homo sapiens
atcatcatctgcacctaccgccaggtgagttgcctttgcctggaggaaaatgtggaaaatgatccctgtaaatttgctctgacatcgaggacgggtgacg

SEQ ID NO: 761416 - DNA, 100 bp, Homo sapiens
tatacattgcatcgtttgggcaaagtacttgttcaagtatccgttacagcactgatgtgagtgtagatgaagtaaaagctttggcttctctgatgacata

SEQ ID NO: 761417 - DNA, 100 bp, Homo sapiens
cagaaatgctgccctcagtaggataatgggaagacaactgttagttttgtggcttactgctgctccacccagtgtctgcagacttttgacctgctgagtt

SEQ ID NO: 761418 - DNA, 74 bp, Homo sapiens
agaaagatggcatatcagatatgcaagtctgtgaatttgataactcttctgatagcagcttatttaaaactcag

SEQ ID NO: 761419 - DNA, 82 bp, Homo sapiens
tgggcgacccggtgtgtggcgcgcccagagccccgcgtttcagccctagggaaggccaagactaaggggctgcagagcgggg

SEQ ID NO: 761420 - DNA, 90 bp, Homo sapiens
ctctggagctgacagcgcgcacttcacccgcagttggtgacttaagagattaaaattaatttggttgctgttggttctgaacaaataatg

SEQ ID NO: 761421 - DNA, 100 bp, Homo sapiens
aaattccgcgggcggtgtagaggcggcggacgggccggagggaggatgttaaagccccgcggtttacccaaggtccagcctagcccctaggcaccatgtc

SEQ ID NO: 761422 - DNA, 123 bp, Homo sapiens
tgagctgtaacaaagcactctgtgctagtgatgtgagcaaatgcctcattcagagcagtcattatggcgaaccttggctgctggatgctggttctctttgtggccacatggagtgacctgggc

SEQ ID NO: 761423 - DNA, 82 bp, Homo sapiens
ctatctcttcaagtacatcataatcggcgacacagctatggcattgctggttctaccaacgtgacaggtgatcaagttaaga

SEQ ID NO: 761424 - DNA, 74 bp, Homo sapiens
gactttggagaaaccaccgtgctggaccgcttttacaatgcaggaccactatgagacctcagtccttctatgat

SEQ ID NO: 761425 - DNA, 75 bp, Homo sapiens
accttttgtacctgctacctggcttcttacctcacgaacaagtattatgcagatatgccagcagaagaaagagaa

SEQ ID NO: 761426 - DNA, 75 bp, Homo sapiens
gcgagatccgcatgaaggagctggagcggcagcagaaggagggaccagttactctccacaagaaaattcacacaa

SEQ ID NO: 761427 - DNA, 100 bp, Homo sapiens
ccataatcctcaggccttgagtcctcagttcacagatttggtgcttccagatgtgagttatcaggtggaatccagtgaggaggatcagtctcagactatg

SEQ ID NO: 761428 - DNA, 75 bp, Homo sapiens
cacctcaggacacggcctacaacaccaagaggtgatgtgtccaatctagatcccaacttctcatttgaaggcacc

SEQ ID NO: 761429 - DNA, 75 bp, Homo sapiens
gtgtgatattactgaatattgtactggagactctggtcagtgcccaccagaagtatgtccgacaagcctggcaga

SEQ ID NO: 761430 - DNA, 100 bp, Homo sapiens
tggagctcaagttcttaattattcagaatgctgcggttttccaaggtggagccgccaccaaaatgcagattttcgtgaaaacccttacggggaagaccat

SEQ ID NO: 761431 - DNA, 82 bp, Homo sapiens
ggcgtcgttgtcgccccctcctcgtcgggaagaatcgtttggtctcctgccgtgcccgctatcaagcccagagagagacgtg

SEQ ID NO: 761432 - DNA, 83 bp, Homo sapiens
gaagaccctcctggatattcctgcaaacccaacaggtgctggagaatctggtaaaagcaccattgtgaagcagatgaggatcc

SEQ ID NO: 761433 - DNA, 75 bp, Homo sapiens
gaaactgtgtgtgatccagtaagaaggccctggtcctggatcaggactgcaccgtgctggcggatcaggaagtgc

SEQ ID NO: 761434 - DNA, 100 bp, Homo sapiens
gcgcgcctggcggatctgagtgtgttgcccgggcagcggcgcgcgggaccaacgcaagctggtagctggtgttgcattcaagaagactttctcttacgct

SEQ ID NO: 761435 - DNA, 100 bp, Homo sapiens
cttgccggaagcggagagcggctgatcgcagtccggaggtgaggcggaactctgagatatgaggccccaggattcctggcgaggtcctcctccccttttc

SEQ ID NO: 761436 - DNA, 96 bp, Homo sapiens
tttatacttacaacaaggaagggactttaatcactgaccatcccaatatacagcttaatcctgattatcgagatgcccaaaatgaaggaaaaaatg

SEQ ID NO: 761437 - DNA, 50 bp, Homo sapiens
ggagtttcatggcactaagtcaagatgagtggaagctggacacactatgt

SEQ ID NO: 761438 - DNA, 82 bp, Homo sapiens
ctccgccgccccgaaactttcaccgcgagcgggttaaccccaaagattggctttccttggagtgaaatcaggaacatctctt

SEQ ID NO: 761439 - DNA, 88 bp, Homo sapiens
tcatatttttggtgctgatggtgcaaggaaactagcacagacccttggtcttgaagttctaggtatttacatgaggaatttccagagt

SEQ ID NO: 761440 - DNA, 51 bp, Homo sapiens
ctggtctttctcaacctcatcttctggggctaaggaatatgagagtttaat

SEQ ID NO: 761441 - DNA, 100 bp, Homo sapiens
gtaggctccccaccctcctactccgaggccttgctggaccagaggtgttggctacgtttgtggttttaagaaagcctgagggcctgaaggcagcccctgg

SEQ ID NO: 761442 - DNA, 75 bp, Homo sapiens
atctactcgctggtgactgaaaacattcagtggcccaatggcatcaccctagatttggagcaagaggtggtggtg

SEQ ID NO: 761443 - DNA, 101 bp, Homo sapiens
gcggatctggaggagcagttgtctgatgaagagaaggtactccaaagattcaggtttactcacgtcatccagcagagaatggaaagtcaaatttcctgaat

SEQ ID NO: 761444 - DNA, 90 bp, Homo sapiens
gacgttatttccatcaaaaattggtggattctccacagttttcctcgtgcgtactcacggtggaatccgatgtgcattgaagcgaatgta

SEQ ID NO: 761445 - DNA, 73 bp, Homo sapiens
cccaacgcatcatgccagggagccaagcgtcctgcccggccatgaaggtcaccgtgtccaaagggggcgaccg

SEQ ID NO: 761446 - DNA, 100 bp, Homo sapiens
ggcgggagagctgagcgctcggaagaaccaaggcaatcttgctgccaatgatctctccccgtcccgaatagccagactacagaagatccttcacagctat

SEQ ID NO: 761447 - DNA, 100 bp, Homo sapiens
atcacacgcccactaaagcccagaagaatgtggctaccagcgaagttggcctttaccagagtttgatccaagccagattcgactgattgtatatcaagac

SEQ ID NO: 761448 - DNA, 100 bp, Homo sapiens
ccgccggaagcgccaggacaatggggacccgggacgacgagtacgactacctattcaaaggccccaggggaagtcctatctgtacttcacacagttcaag

SEQ ID NO: 761449 - DNA, 109 bp, Homo sapiens
caagaagactgatggagcaggcttgcaatattaaagaggaatcttcgagtatgcggacggccccaacgcccaggtcatgaatgccgaggagcatgcctttcgattttct

SEQ ID NO: 761450 - DNA, 100 bp, Homo sapiens
agaagctcaactccccagaagtctgtcactttggtttgtgattcagacactatgcttgacccagcctcatctgtggagatggtaaaagttttagaagaag

SEQ ID NO: 761451 - DNA, 99 bp, Homo sapiens
ctgctgagaccgctccggacgtgcgaagcgttcgcggtgcggtagtttgtgaagtgtggatatgcaggctctaactttccagaacacatcttcccagct

SEQ ID NO: 761452 - DNA, 80 bp, Homo sapiens
caaagacattcacaacatggatggatgagatggccttctgctacacccaggctccccacaagacaacgtccttgatcctc

SEQ ID NO: 761453 - DNA, 100 bp, Homo sapiens
ctgctgtattgcagaacagcctcagcctgaagattcttacctctgaagacaatgttaggaccaagatatgatagtcaagttgctgaagaaaatcggttcc

SEQ ID NO: 761454 - DNA, 83 bp, Homo sapiens
cattgctacacatgctaaaagatgacagacttggacaacatgtcccaacattacatcccaggagcactcaacatcagtgatag

SEQ ID NO: 761455 - DNA, 80 bp, Homo sapiens
attacatcaggaagatactgcagagatattctactccatctcattcattgtacagcagtctctggtcccagcccacccca

SEQ ID NO: 761456 - DNA, 100 bp, Homo sapiens
aagacctattatcagatcaaccaccaaagtgggaaacattgaaatcaaggagctggtgtccgatgccaaccaacatgtcaagtctgccctggcctcagtc

SEQ ID NO: 761457 - DNA, 100 bp, Homo sapiens
cggcgtcggagcccgaggcgggagccatgccggagaagcgcgcgggcgcgcaggccgcggggagcacctggaaggccaatgatgaggccaatcagagtga

SEQ ID NO: 761458 - DNA, 73 bp, Homo sapiens
gtttgcaaatgcagaggaagaatttttctatgagcgcaaatctgtccaaggctgcctggggagcattggagaa

SEQ ID NO: 761459 - DNA, 122 bp, Homo sapiens
ggaaggagctggatcttcacggtctctacaccagagtcactactttaggcggattcgcgaagacaatgcagatcttcgtgaagactctgactggtaagaccatcaccctcgaggttgagccc

SEQ ID NO: 761460 - DNA, 51 bp, Homo sapiens
gttcactccagcatgggggctccagggtctcactctgtcaaccaggctgga

SEQ ID NO: 761461 - DNA, 116 bp, Homo sapiens
cgttcctgggcaagctgggcggcaccctggccaggaagcggagggcgcgcgaggacaatgcagatcttcgtgaagactctgactggtaagaccatcaccctcgaggttgagcccag

SEQ ID NO: 761462 - DNA, 99 bp, Homo sapiens
agtcaaaacggatgtaaataagattgaggaatttcttgaagaagtcttatgccctcccaaattccaaaggttttcctaaaaatataaccaacaacaggg

SEQ ID NO: 761463 - DNA, 73 bp, Homo sapiens
aacaaaataaaagatctcagtacagtagaagctctgaacctcaagaaggcatgaagccagcccctgcagtgcc

SEQ ID NO: 761464 - DNA, 98 bp, Homo sapiens
gccgcgccgagggtctggcgggccgcagttttgcacagtaataagttgactcacacagacttaaagcctgaaaacatcttatttgtgcagtctgacta

SEQ ID NO: 761465 - DNA, 124 bp, Homo sapiens
gcctactccaaagcggccgggagtcgcgcttcttccccactcccgagacaggtagttaaaccagagagcaatgacaaagaaacagaagctgcgtatgaatcagatatccccgaggagctctgtg

SEQ ID NO: 761466 - DNA, 100 bp, Homo sapiens
atgaaaaagcagagcgactcggttaagggaaagcgccgagatgacgggctttctgctgccgcccgcaagcagagatcccgtacaaggtggtggcacggcg

SEQ ID NO: 761467 - DNA, 80 bp, Homo sapiens
gataataagcttatctcagctaactcctcggaggacagtactgcttttaaagagacagtgttagggatcttggaagcaca

SEQ ID NO: 761468 - DNA, 75 bp, Homo sapiens
tgggcttgtccttgctggtgcatgcgtcgtcggcctctgggcagcagtgtgacagtgacagtgaccaggaagaga

SEQ ID NO: 761469 - DNA, 82 bp, Homo sapiens
gggcctgccccccacgccgagctggccgcgccgaccaccatcccggtcaccacgagatgtgaagttcatttccaatccgccc

SEQ ID NO: 761470 - DNA, 85 bp, Homo sapiens
ggagctgtgcagccgcgaggaggcgcgggaggtgttcgagaacgaccccgagacggtgcgcgcggagccatggttatcatgtcgg

SEQ ID NO: 761471 - DNA, 74 bp, Homo sapiens
aagaaggccctggacacagcaatatctctgggctttcacagctgtcaccactgactaaagaagagaaaactgcg

SEQ ID NO: 761472 - DNA, 83 bp, Homo sapiens
gagcttcatcaaaaatagtgatagctttgataagtttgagaaatttctgtggttcattagctcagagaactatctaattatag

SEQ ID NO: 761473 - DNA, 98 bp, Homo sapiens
cggaggctgcctcggcggagcagaggaaccacacgctgatcatgggctgaagaagatgcagagcagcctgaagctggtggactgtatcatcgaggtcc

SEQ ID NO: 761474 - DNA, 83 bp, Homo sapiens
tgcagcaaggaaataggatttaaccgctctctgcctcccagataacgtggttagaaggccattcactggcacagacagtattt

SEQ ID NO: 761475 - DNA, 90 bp, Homo sapiens
tagcgaaggccgccgaacctgcctggctagccggcgacttgagtgacgacacggtgtcttggaaaatggaaagaattgggagccttccta

SEQ ID NO: 761476 - DNA, 78 bp, Homo sapiens
tctactggaatttctgaaaacatcagaagtgcccacaaagtggctacgagctataagccaagccgtagatcaggcttt

SEQ ID NO: 761477 - DNA, 82 bp, Homo sapiens
acatgcctcaccctcatctatatcctttggcagctcacagatgtgaagttcatttccaatccgccctccatggtggcagcgg

SEQ ID NO: 761478 - DNA, 75 bp, Homo sapiens
atcaaagacttcatgatccaaggaggtgacccaacagggacagaaatgcatcgtgattcctgtccattggactgt

SEQ ID NO: 761479 - DNA, 82 bp, Homo sapiens
cctcagtatcggctctgattggaggttggcaaaagcagcttttgatgatgcaattgcagaactggatacgctgagtgaagaa

SEQ ID NO: 761480 - DNA, 75 bp, Homo sapiens
cattcccaaatgccccaaggatgaagaacggagacgattaaagagtctattgttggggaaatcagacgggaaatt

SEQ ID NO: 761481 - DNA, 100 bp, Homo sapiens
aggaagctgggacacccgggagtcaggaaatgggtatggctctctcggcatgatgaccagcgtgctggtttgtccagatggcaagacagtagaagcagag

SEQ ID NO: 761482 - DNA, 100 bp, Homo sapiens
caaccctgaccggagatgcaccgaactggacatggctcgaggatgtgaggtctggaacagctgcagccattttgccaccatgggaaacctgggacatctg

SEQ ID NO: 761483 - DNA, 100 bp, Homo sapiens
gtcattcctgcctttgagcggactcccttttaaggtgccagatgccagttttagattctggctccaccactgacacagctgggtgaccttgatccagtcc

SEQ ID NO: 761484 - DNA, 100 bp, Homo sapiens
cttgagctccaggagttcgtctcttacgtctgcggaagtgcagctgcctcagttcttagcgcagctgagtcagtgctgattctctcaaatagagcttgaa

SEQ ID NO: 761485 - DNA, 100 bp, Homo sapiens
gtgattagcttcgcagtctggaaagctttaggagttcacagtgttgataacactgatgctgaggggaggctcatactggctgatgcgctctgttacgcac

SEQ ID NO: 761486 - DNA, 49 bp, Homo sapiens
cacgattttcccgagagttcacagagctcccagctcctccagcagccga

SEQ ID NO: 761487 - DNA, 100 bp, Homo sapiens
atgtgtccgcagtacctatctcagagcccaaatccttcctgccccacagccttctcctggaacctgccttgggtgtctttcctgaagactatcttcccgt

SEQ ID NO: 761488 - DNA, 90 bp, Homo sapiens
ctggactgaagagagggagaatagaagcccaagactaagattctcaaaatgtccgctctatcaagctgaaggaagacattctgtcctgca

SEQ ID NO: 761489 - DNA, 75 bp, Homo sapiens
tccgggatcggccaggaactgggtgctggtgcctatagcatgaggctgaggccccagcttgtggccaccacaacg

SEQ ID NO: 761490 - DNA, 98 bp, Homo sapiens
aggtagccctggacggcattcagtgttttggaggtcccagatcccacaaagtattttgtcactcggtggagcacagacccatggatccagatggcata

SEQ ID NO: 761491 - DNA, 100 bp, Homo sapiens
cgagtggactcctgcgcctccatgtacagccgctccatccagggccaccatgtctgcctcctggtgaaaaaggtggcctgtgagtacggcatggtgcacg

SEQ ID NO: 761492 - DNA, 51 bp, Homo sapiens
taaccaactgcaattcctacctccaggatgagctttctgatgttagccaag

SEQ ID NO: 761493 - DNA, 100 bp, Homo sapiens
cctctgaggtggagcctttcttatcctggcccaagatccagactcctcagacccctgcacaattgagagaaaagcccgaagaattagcgtgacctccaaa

SEQ ID NO: 761494 - DNA, 98 bp, Homo sapiens
ctggcggacatcactttagaccctccacctaattgcagagatcctgcatattttgatgaaaattggctaaacagaatcaaaactgaagtaggagataa

SEQ ID NO: 761495 - DNA, 100 bp, Homo sapiens
tgatcttggcctgcaggaacatggcaagggcgagtgaagcagtgtcacgcattttagaagaatgggtggctttctagaagatgaccatagaggaccttcc

SEQ ID NO: 761496 - DNA, 100 bp, Homo sapiens
aagaataagcacaagagaaagaaggttaagctggctgtcctgaaatattataagggaggtggggaagacagggctccagctaccacaggacgggctctgg

SEQ ID NO: 761497 - DNA, 75 bp, Homo sapiens
ctgtcctcggggaccccagcacctcatcatcagcattgctggagccaagggacacagcattgttggttttgccat

SEQ ID NO: 761498 - DNA, 98 bp, Homo sapiens
cccctccccgcacggatgccgaaggtgaaggcgctgcagtgcgccctggcgctggagatcagctcagactcacaccacccggcaagaactgctcacta

SEQ ID NO: 761499 - DNA, 82 bp, Homo sapiens
tatcagcgcctcaatctctactcgaagaagaaagagaagaaacgttttctcaggctgctttgtaccgcctcagtggagactg

SEQ ID NO: 761500 - DNA, 84 bp, Homo sapiens
ggcaacgagcacaacaggagctacgaggagttgtgttatagttttgccgctggactcttccctcccttcccccaccccatcagg

SEQ ID NO: 761501 - DNA, 83 bp, Homo sapiens
aaggtgaccgtggacggaccccgggagcccagacgagcatcagatccatgctgctgctgactcggagccccacagcttggcac

SEQ ID NO: 761502 - DNA, 50 bp, Homo sapiens
caaccacgagacggccttccaagggaaatcgtggaacacatggtccagca

SEQ ID NO: 761503 - DNA, 100 bp, Homo sapiens
ggaattctctcggtgcccgccgttgccatgcactcggctactgcttttcaggaagccttggacgctgcaggtgataaacttgtagtagttgacttctcag

SEQ ID NO: 761504 - DNA, 100 bp, Homo sapiens
gcaggaaatactggtggaaccagaaccattatttggtggtgtcatggagaaactccagctgggcccagagattctgcagcgggaaaatccaaggcttatt

SEQ ID NO: 761505 - DNA, 75 bp, Homo sapiens
atcgattcctacgagtcttctagcttcatgttcctggtgtttgaccttctctggcatctctatcccctatgaggc

SEQ ID NO: 761506 - DNA, 78 bp, Homo sapiens
cacatattctgtctgtccacgatagtgccaggcctatgttggaggtaggtagccatccaagcttcctgaaggaggttc

SEQ ID NO: 761507 - DNA, 98 bp, Homo sapiens
ctgctctccagaatgttgagattgcccgagaagtgaccccagcaaaagaaaaatattgctgtacctaaattcaattggagtcattcgttgcccagttt

SEQ ID NO: 761508 - DNA, 100 bp, Homo sapiens
gaagtgcagctgcctcagttcttagcgcagctcgccctcccctacctgcggaagagtcaagggaatgtcatcaacatctccagcctggtgggggcaatcg

SEQ ID NO: 761509 - DNA, 83 bp, Homo sapiens
aaagctgctagcagaaaatcaaaacgctgattaaaagaagcacgacaatgcagatcttcgtgaagactctgactggtaagacc

SEQ ID NO: 761510 - DNA, 75 bp, Homo sapiens
aaaatttcagaaccatcacaaactgggaaagagtgttataagtgggggtttggatgccttagaattcattggaaa

SEQ ID NO: 761511 - DNA, 120 bp, Homo sapiens
cctcgacagatgaaacgcatgtcaaccaaacatcagaggaataatgtggggaggccagccagtcggtctaatttgaaagcgatctagggcagccctgcagaggtacctgttctactgtaa

SEQ ID NO: 761512 - DNA, 100 bp, Homo sapiens
ctccaggtgaagtagatttttattggtgagcagggcagcatttccttctcccactgctgctgagatggcagaaattagtcgaattcagtacgaaatggaa

SEQ ID NO: 761513 - DNA, 83 bp, Homo sapiens
taaagtcatcacctcctgggatcagatgtgcattgagaaactaatctggattcactccctctggttgatacccactcaaaaag

SEQ ID NO: 761514 - DNA, 90 bp, Homo sapiens
cgtatgtccgctatccagaacctccactctttcgggactttgaacatgtcggggatcgccctcagcagactcgcccaggagaggaaagca

SEQ ID NO: 761515 - DNA, 101 bp, Homo sapiens
gagtaatttacctgaagagtgacaccattgattttgaaactactaagcattcctgcgtaaatactgctgtaatactgtcatgcaaagtgtatcctttcttg

SEQ ID NO: 761516 - DNA, 119 bp, Homo sapiens
tttttcttgggttggatgatgtgttcccgcgtctactacatggactatcggacaaaacctttctgctgcagcgcttgtccattttcctcaaaattcttctctgcctacaaaagtcattt

SEQ ID NO: 761517 - DNA, 83 bp, Homo sapiens
cggcagaataagagactggacgctgtgaggttacgggcaggacttgagtggcttcggacagggcttctcagaccccagccagc

SEQ ID NO: 761518 - DNA, 100 bp, Homo sapiens
tccatttgccaatatataggcatctccgaagatttattttgtcagtggtatcagcagatgttgcacacaaacttggtataccttgctacaatagcagatt

SEQ ID NO: 761519 - DNA, 111 bp, Homo sapiens
attccagatacctatcattactcgatgctgttgataacagcaagatggctttgaactcatatctcagagatgttaactgtcctttcaagattcaagatcgacaagaagcta

SEQ ID NO: 761520 - DNA, 100 bp, Homo sapiens
tctccgggccgcctgacctccgcacgggtatatgggatggaagcgggaccctcgggagcagacaggggcaagtgtccgagtggtgaatcagctacttaca

SEQ ID NO: 761521 - DNA, 87 bp, Homo sapiens
cacctcgggatcccattccttcacagggaccctagccagaatggcttcctttgggtggaagaggaaaattggtgagaaggtctcaaa

SEQ ID NO: 761522 - DNA, 75 bp, Homo sapiens
ccgaatcttccttcaggatatcaaggtattgctattaaggagtcagcaaaagtgggtgatcaagctcaaaggagg

SEQ ID NO: 761523 - DNA, 100 bp, Homo sapiens
ccagagacctgagcagctctgcaaggttctaacagtattctaccttgtaaatactgttatttgtatatactgtaaatgatgacatcggtgggcactaacc

SEQ ID NO: 761524 - DNA, 100 bp, Homo sapiens
acagcatcaactacctgcactttggggagcctaagtcctgggatgattctctgaacgactgtcggatcatcttcgtggacgaagtcttcaagattgagcg

SEQ ID NO: 761525 - DNA, 101 bp, Homo sapiens
gcgaggaaaggtgtgctgtgcctgaggccagttttgatggcgacgactttgatgatgtggaggaggatgaagggctagatgacttggagaatgccgaagag

SEQ ID NO: 761526 - DNA, 83 bp, Homo sapiens
cgcggccgcggacgaagatggcgaccgccatgtacttggagcactatctggacagaggtgtgattgcctatatcagttcttcc

SEQ ID NO: 761527 - DNA, 82 bp, Homo sapiens
tttttggtgcatatgttacccaaagtgtaacttggacccatttctcttgcgtgaatattgaacatcgaggagcggaattcct

SEQ ID NO: 761528 - DNA, 75 bp, Homo sapiens
gaaaaaatgacatccagcgacaaggactttagattgcttcctgaggaggctggcacttctgaagatcctgaagac

SEQ ID NO: 761529 - DNA, 82 bp, Homo sapiens
gtgagcctccgcgcccggccggtttggtgcacctcgatttggaggaagtagggcagggcccttatctggaaagaagtttgga

SEQ ID NO: 761530 - DNA, 100 bp, Homo sapiens
tggatttaacatctacgtcagtgataaaatctccttgaatcgctctctcccagatatccggcacccaaagtctctgaaagaagatgaatttggctgagat

SEQ ID NO: 761531 - DNA, 88 bp, Homo sapiens
cgagaggaagattcttacctctttgatctcgacaataagaaaaagatgttgctggtccatttgacgaagaagtccagagcggcttgtg

SEQ ID NO: 761532 - DNA, 100 bp, Homo sapiens
ccccatggagctggtggagaagaacatccttcctgttgagtccagcctgaaggaagccatcattggtctctaattaacagaagatggcaaagcccagcca

SEQ ID NO: 761533 - DNA, 95 bp, Homo sapiens
gatgactgattctcctccgccagcaaacggggattcagcgtccgatcctttggaacagggactcacgtgaagcttccaggaccagctcccgacaa

SEQ ID NO: 761534 - DNA, 100 bp, Homo sapiens
aacgagtaaatctgtctgcagcccagacactgagagccgctttcatcaaggtgggaacctaaattattctgcaagacaaagggaagaaataaaattttcc

SEQ ID NO: 761535 - DNA, 75 bp, Homo sapiens
tgcgctgtgatgcctgcagagctgtggcttaccagcatggagatatggaccaaaaggaacgagacgtgattatga

SEQ ID NO: 761536 - DNA, 74 bp, Homo sapiens
gcaacatgacagaggaccatgtgatgcacctgctccagataatagaggagttggcagatgccctgacctactgc

SEQ ID NO: 761537 - DNA, 100 bp, Homo sapiens
agattgaccggggtgtcacccacctcaacgtttgggtacccagaccccacctacctgacccgggtgcaagaggagctgagagcgaagggtatcacagatg

SEQ ID NO: 761538 - DNA, 100 bp, Homo sapiens
acagaaattgaaaggcttcaaagctagcagaatactcctgagaatttacatgaaatggctaaacataatctcttacttcatttgaaaaaactagaaaaag

SEQ ID NO: 761539 - DNA, 49 bp, Homo sapiens
cagcctcatcacccggctgctggaggatcaaatttttggctctcatctg

SEQ ID NO: 761540 - DNA, 50 bp, Homo sapiens
ctcctgaatagctgggattacaggccattctgcttcagacaaggttcaac

SEQ ID NO: 761541 - DNA, 82 bp, Homo sapiens
aaaaagccaccgcggctccaggagtcctgtgactcaggttttaaaatcaaagatgggaaaatcggagaaaattgcccttccc

SEQ ID NO: 761542 - DNA, 98 bp, Homo sapiens
tactgacgcgccctcgcttcttcctctttctcgactccatcttcgcggtagctgggaccgccgttcagtgagaaagatcagtctaaagaaaaggagaa

SEQ ID NO: 761543 - DNA, 80 bp, Homo sapiens
gagaaactcggagtgtactccgcctgcaaggactatgctgagaaggaaaataccatagcaaaagctctggaagatctgaa

SEQ ID NO: 761544 - DNA, 101 bp, Homo sapiens
caagtcggcgccccagagcggacgagcacttttgtgtaatggaaaatttcacaaacacttgcaagaaatctttgtacccttggttgtccgctatgtggatc

SEQ ID NO: 761545 - DNA, 50 bp, Homo sapiens
aaggactgcctcactgagcaaccaagacttttgtctggccctctgagccc

SEQ ID NO: 761546 - DNA, 83 bp, Homo sapiens
ggagaccccaagctgcatcgccgagtgggtcaaaatgcagatcttcgtgaaaacccttaccggcaagaccatcacccttgagg

SEQ ID NO: 761547 - DNA, 74 bp, Homo sapiens
tccaacagatttgattgcctccagtggagatatcatcaagactcaagtaggacgttttgctcctcaattttctg

SEQ ID NO: 761548 - DNA, 100 bp, Homo sapiens
gacgtgctgacccgcctgaagcacctgcgggcgctgctgggttgtggcagcactgcctgaaggtatgagaccagattctaatctttatggttttccatgg

SEQ ID NO: 761549 - DNA, 83 bp, Homo sapiens
gacccaccgctgccctcagctccgagtccagggcgagggggatcctggaccgttggcacccaaaggtaagctactcctaatgt

SEQ ID NO: 761550 - DNA, 90 bp, Homo sapiens
gacgacatgggatcaaaaggcctgagttttacagaaggcgacacatgttgttcagagtgaagtggacaaatatgtagatgatattatgaa

SEQ ID NO: 761551 - DNA, 74 bp, Homo sapiens
cagtctcctgtttctcctcctaccttctccatttttctagtccctgcagaattaaacaaccaccatgtcgagca

SEQ ID NO: 761552 - DNA, 90 bp, Homo sapiens
gagtcttctgggtctctctgcctgaggccctggagggagagaagggaacaacctatcttcagcactcgagctcatgtcttccaaattgac

SEQ ID NO: 761553 - DNA, 86 bp, Homo sapiens
aagaatggcccttgtggataagcacaaagtcaagagacagcgattggacagaatttgtgaaggtagacgtcgtggacactggttca

SEQ ID NO: 761554 - DNA, 100 bp, Homo sapiens
tatctgcaaaagttgcacaaatacctaataaccagaacagaaagaaatgttgcagtatatgaacggaaagatgctgaaggatgggagaccgttcagagag

SEQ ID NO: 761555 - DNA, 50 bp, Homo sapiens
gagggccacagccactcagctcctgcaggcaggggaaatggaaggtgatg

SEQ ID NO: 761556 - DNA, 124 bp, Homo sapiens
agcacactctgtgcggagactgggcggccggccgacccttcctgtcgctgacggcgactgcgggaggccagatctcacattcttgaaggtggcattgaagagcactaagatcggaagatgagtg

SEQ ID NO: 761557 - DNA, 100 bp, Homo sapiens
gggactgcctcgactggcagcgcgggaaacgtcaaactcgagcgctttgaacttcaagattcaggaagctctctacttcctaaagagattgtaaaagtag

SEQ ID NO: 761558 - DNA, 100 bp, Homo sapiens
gggatccgacttgccggcagaacttacgctgcgggaccccgggcactgttgctgctgcgggagaattcccgtactgattagtcaacagtggaaaatctga

SEQ ID NO: 761559 - DNA, 82 bp, Homo sapiens
cgagaatccactcaccggagagatgtcgagtgacatctatgtgaagaggacaaggcagacgtgcagtccatcatcggcctgc

SEQ ID NO: 761560 - DNA, 99 bp, Homo sapiens
ggaaaacctttcaatgaactgtgggattatgaaggagagaacattgaaagtattctctaagctatttgaagagagtgactaaatgcacctgggtcaggc

SEQ ID NO: 761561 - DNA, 122 bp, Homo sapiens
ggcgagtgaagctgcgctttttctaaagaagtctggcctctcggacattatccttgggaaggttgatggcttcacacacctgtacactctaattttaagaccagatctttcttatgatgtga

SEQ ID NO: 761562 - DNA, 82 bp, Homo sapiens
gaagatgtccgacttattcgagagcagcatccaaccaaaatcccgatgcagaggccaggatgtgggcccagccctgtgccag

SEQ ID NO: 761563 - DNA, 90 bp, Homo sapiens
aagtattgacggaaagcttgaattacctacatgaaaggggagtgtgtttgcctacagtgtctctctggatcctctttgtttatattgaag

SEQ ID NO: 761564 - DNA, 75 bp, Homo sapiens
ggagttccagaatgtcatgacctacctcaccagcatccccagggtgtgaagaagtttgatgtgccgtgtggagga

SEQ ID NO: 761565 - DNA, 100 bp, Homo sapiens
gctgcgggaggaggccatcctgcagatggagaccctctttcccagctgcccgctcctcagcacccgaagattcgcctgtacaacgcagagcaggtcctga

SEQ ID NO: 761566 - DNA, 83 bp, Homo sapiens
cgactactacgaggcgcaccagatgtaccggaccctgttcttcagattcagagcattcttcactccagaataatgagcaaccc

SEQ ID NO: 761567 - DNA, 82 bp, Homo sapiens
agtgggggaagacaaatatggaaacaaatactatgaagacaacaagcaattttttggtaactataactacccaatattgcag

SEQ ID NO: 761568 - DNA, 85 bp, Homo sapiens
agcggttccgctgccctgaggcactcttccagccttccttcctgggtatggaatcttgcggcatccacgagaccaccttcaactc

SEQ ID NO: 761569 - DNA, 75 bp, Homo sapiens
tgactctgtggtgggtccctcagcccttctgagctctgtgctgaacaaggttatcaatactctggctgaccatca

SEQ ID NO: 761570 - DNA, 95 bp, Homo sapiens
cgtcgatccagctgccagcgcagccgccagcgccggtatgaagtgtaacagaacagactttaccacctgaaactgctgcttcaagttcagatcag

SEQ ID NO: 761571 - DNA, 82 bp, Homo sapiens
ctgtgtaggcacctgagttaacggacgctaagcggggtaggggaaggacctctttgtttttagacatgaattggccataatg

SEQ ID NO: 761572 - DNA, 82 bp, Homo sapiens
ttacgcgcacgttggaaccgaagagagctctgttgttgcagtaaaaagaacgtattctcatggtacttacagagctggccca

SEQ ID NO: 761573 - DNA, 75 bp, Homo sapiens
atcgggtggcggctcgggacggaggacgcgctagtactgtgccctgtccacggtgcctcctgcatgtcctgctgc

SEQ ID NO: 761574 - DNA, 75 bp, Homo sapiens
ggctgttcttgggtgctgcaccaaaactccagcagtgggctttcttcaaggtgttggggatgtcctttgcactga

SEQ ID NO: 761575 - DNA, 75 bp, Homo sapiens
gccttccaggtgacccagggaacgggaccggagcttcatgcctgcaaagaggttgcaccattactcagacttcta

SEQ ID NO: 761576 - DNA, 51 bp, Homo sapiens
atttaattgactgccttaatgaaaaggtgccaaactgcggtaaatttttta

SEQ ID NO: 761577 - DNA, 83 bp, Homo sapiens
ggtgcagcagctgcaccccaccttgatccagcggacttacgggagagaacattgaaagtattctctaagctatttgaagagag

SEQ ID NO: 761578 - DNA, 83 bp, Homo sapiens
gcagagaaattcagaacctcaagcttttcaggcatcctcatataattaaactgtgcactacatcctccaggaggtggtgatgg

SEQ ID NO: 761579 - DNA, 51 bp, Homo sapiens
cagagcccacagaagcatggaaggagctgtacttcagcaccgtggacactt

SEQ ID NO: 761580 - DNA, 100 bp, Homo sapiens
gtaagcccaccagagggaaaccaggaaattagcagggacaacattctatgcaagattacatatgtagctaatggtgtgagatcaaccatgagttccgttg

SEQ ID NO: 761581 - DNA, 90 bp, Homo sapiens
cctgctgcacccacgaatctgcccacccctcctgtaacccagcctgtttcacttcttggtgatgatgaacagtctacacagatggctgca

SEQ ID NO: 761582 - DNA, 75 bp, Homo sapiens
aatttctcttcaccagcaaaaggattctgcgtttcaagaaggaatacccggccctgcagcccaaggagcccccgc

SEQ ID NO: 761583 - DNA, 74 bp, Homo sapiens
agaagggagacgacgctgctgggtccgctgagcggggcgacccgagagtccgatgggtggtccttttattcctg

SEQ ID NO: 761584 - DNA, 100 bp, Homo sapiens
caggtttattctcccatagcatgtggatagaatttttgcggcatttgaagagctttttccagattatgtttaaaattgaaaccaagccatgtggtgaaga

SEQ ID NO: 761585 - DNA, 72 bp, Homo sapiens
gacagctctgcggctcgggccctgaggctcatgcacaattagttcgagaagttgatgtggagaaggtgtctg

SEQ ID NO: 761586 - DNA, 100 bp, Homo sapiens
gatgtgttccctgatgcctgcaaagagtttcaagatgcaggtgaacagattcacaatgacatcctttcaagaagtcccattgcagacttccaactttgcc

SEQ ID NO: 761587 - DNA, 51 bp, Homo sapiens
ttcagcaaatcagagactagcaagctgggagaggaattcatagcagtgtgc

SEQ ID NO: 761588 - DNA, 100 bp, Homo sapiens
cttggagcacttcctattccactggattgggaaagaccatggcaggtaaaccggagcactgctcttctgaagagcttgtctgctgaacgtgaacgatggg

SEQ ID NO: 761589 - DNA, 75 bp, Homo sapiens
ccagtgctcatggtcaccggcttcgtcttcatccagggcatcggtctctaattaacagaagatggcaaagcccag

SEQ ID NO: 761590 - DNA, 97 bp, Homo sapiens
cagggccacggctttagcggtgtcttttgcgctgcctgctgaagatgaagtcttactacagaaattaagagaggaatcaagagctgtctttctacaa

SEQ ID NO: 761591 - DNA, 75 bp, Homo sapiens
cttgctctacgtcctcctgctggccttttgcccactcccatggttcaagctttgactacaaccagaattcagagg

SEQ ID NO: 761592 - DNA, 97 bp, Homo sapiens
tcttcatcaccttcgtggtcgtctggtcctactacgcgtacgtggtggagctctgcgtgtgtgtcatggagaaactccagctgggcccagagattct

SEQ ID NO: 761593 - DNA, 100 bp, Homo sapiens
cccttctctgatttgctgtcagccatgaacggatggatgtgatgcctgctagccaaaagggctccatgacaattcaaaaggtgaagggattgctgtcacg

SEQ ID NO: 761594 - DNA, 138 bp, Homo sapiens
ccacgaggctgctgaccagaagaggtttagtgccctcctgagtgactgcgtcaggcatctcaatcatgcaatgtctcaggctgtgcagacaaacggaactcaaccattaagcaaaacatgggaactcagtttatatga

SEQ ID NO: 761595 - DNA, 75 bp, Homo sapiens
agctctcctgggaccctccaagagcactagtgtctagaaggcactaagggagatctgaatctcaatgtggtagca

SEQ ID NO: 761596 - DNA, 100 bp, Homo sapiens
gtcttcccgcgtccgccgattcctcctccttggtcgccgcgtccttggctggcgtgcctctggctgtacctggcagggagcagcctgccctgtctcacgc

SEQ ID NO: 761597 - DNA, 100 bp, Homo sapiens
catggtggttgagatagtggccactattctttcatggacaggcttggccactccaacagatgagtactgtttctacaatggcaaaacgcaccgggagtgt

SEQ ID NO: 761598 - DNA, 100 bp, Homo sapiens
ctcttgccatattggcttggataagtcagggcttatactcctgtcttgtattggaccaggtacagacatttctcccacagatggcacgggcaaatgaaaa

SEQ ID NO: 761599 - DNA, 50 bp, Homo sapiens
aaggattggattggcatctttagacaataggagtgaaacatccacatctg

SEQ ID NO: 761600 - DNA, 107 bp, Homo sapiens
aggcaccgggatcgtgaccgagaccgtgaccgagagcgtgaccgagagcgcgaatatcgtcatcgttagaaggtggtgagcttcttctccctcaagtcggactcggc

SEQ ID NO: 761601 - DNA, 74 bp, Homo sapiens
gttgtcgacgaccgacagggtggtgaaagatgatgatgtgcctgcagatatggttgcagaagaatcaggtcctg

SEQ ID NO: 761602 - DNA, 100 bp, Homo sapiens
ggtgtaaatgttgagcctttttggcctggcttgtttgcaaaggtggagtgcagcaacaaagacctccattctggggtgtacgggggctcggtgcatgagg

SEQ ID NO: 761603 - DNA, 100 bp, Homo sapiens
cgaccgagacacctactcagagaagtccctccaccggctctgtgtacgtagagaaatcgacactcttaatgaacgtttagctgctgaaggacaagcgatt

SEQ ID NO: 761604 - DNA, 76 bp, Homo sapiens
ttcaactacagatactttgaagtagaagaagctgatgatggagcagcatattgtatgggacgtatgaattctgact

SEQ ID NO: 761605 - DNA, 74 bp, Homo sapiens
cccgtaccgcagcccccgggcacgacctctcggacacggtgcaggcaggctgctctttggcgtaaattgcaatc

SEQ ID NO: 761606 - DNA, 75 bp, Homo sapiens
agcaagtcacctgttatctccaggcagaagctcctcctggggtagagacagatcttattgatgttggattcacag

SEQ ID NO: 761607 - DNA, 90 bp, Homo sapiens
cagaatgtctgctttccatggttgaagagggaaatcctcatcattattttgtggcaacacaggtggtattaaagataatcaaacattatc

SEQ ID NO: 761608 - DNA, 59 bp, Homo sapiens
caaccacagcagttggttttgcgattaagatcaggtcttaattacaaaaagctgacaga

SEQ ID NO: 761609 - DNA, 100 bp, Homo sapiens
ggaaaatactatgctatgaagattctgaagaaagaagtcattattgcaaagtttcttatcaccacaggagaaaatctagattatcttgatggtgtccata

SEQ ID NO: 761610 - DNA, 96 bp, Homo sapiens
caaggacttcaagaaccacgtgatcaagtaccttgagacactcctttactcacagcagcagggcggcgactggcggcgcgatggacctgaccgggc

SEQ ID NO: 761611 - DNA, 90 bp, Homo sapiens
cgcaggaacaatggcgctgtcttcagtggcacagtggagcagctctgaagatgcaaagcatacctcatctcagaactagaagctgccaga

SEQ ID NO: 761612 - DNA, 100 bp, Homo sapiens
tagaccctccacctaattgcagcaggatgaagttaaaggaagtagatcgtacagccatgcaggcatggagccctgcccagaatcaccccatttacctagc

SEQ ID NO: 761613 - DNA, 97 bp, Homo sapiens
gcgcgcccccgggcacgaccccggagtctccgcgggcggccagggcgcgcgtgcgcggagaaaatttgaagccattacttccagctggtatacagga

SEQ ID NO: 761614 - DNA, 75 bp, Homo sapiens
cccaagatggccgacttcgatgatcgtgtgtcggatgaggagaaggaaccttagtcatttctgctttatattttg

SEQ ID NO: 761615 - DNA, 100 bp, Homo sapiens
acacaatggaagtagtagttgttgagcagagggaaagggataggagaaggatgtggactgcagtgctgcagtgccagagcaaagatggtcgacctttgcc

SEQ ID NO: 761616 - DNA, 100 bp, Homo sapiens
aaaacgtcacttttaaaaaataagtaatgccatctgttttcctaaaagactgaaatgggggcgaccattcttagtacaaaactttttaccaacaaaaaaa

SEQ ID NO: 761617 - DNA, 83 bp, Homo sapiens
gggcgctgctggcgctctggctgtgctgcgcgacccccgcgcatggaatgtatcctgtcaggtataatgtcagtgaatggcaa

SEQ ID NO: 761618 - DNA, 99 bp, Homo sapiens
cacacaaatgtagaattgaaaaaagctgcactttcagccctggaatcctttctgaaacaggaaatggctagtgatgagctgaaagagatgcggaaaaac

SEQ ID NO: 761619 - DNA, 82 bp, Homo sapiens
cccggcgccgccgtggctcgacggagaccagctaggatcatgatgctgccgccaccgccgccaccacggagcgagaagccca

SEQ ID NO: 761620 - DNA, 75 bp, Homo sapiens
tacagcttcagaagaccgaagcgttcgtatctggaaggttttaaaatcaaagatgggaaaatcggagaaaattgc

SEQ ID NO: 761621 - DNA, 103 bp, Homo sapiens
cttcggtggactccttcggcagtccacccaccgccgccgcctcccagccatgccagtgacggtaacccgcaccaccatcacaaccaccacgacgtcatcttcg

SEQ ID NO: 761622 - DNA, 87 bp, Homo sapiens
aggaggatgggctgcagacacagcaggctgagcagctgcaaacccccgaaaaaggatcaagtcttccataccagggaccaggccaaa

SEQ ID NO: 761623 - DNA, 102 bp, Homo sapiens
cccaaaatgaatcccctacactacagtctaatgaatgggaggagtctgctactagtcttatcagctcttaaaaacagaaactcatctgtccaagttcgtggc

SEQ ID NO: 761624 - DNA, 83 bp, Homo sapiens
ctttaccatcctgaaccccatttattcgatcaccacgagggagacgctgttgcggcagctggagacgaaccagctggacatgg

SEQ ID NO: 761625 - DNA, 50 bp, Homo sapiens
cacggagccctttctgccaaaaatcttgctctgtcgcccaggctggagta

SEQ ID NO: 761626 - DNA, 100 bp, Homo sapiens
cgcgtggctggggaggcgaggccggacgcacctctgtttgggggtcctcagatggcagttgaattcctgcatgaactgaatgttccatttttcaaagttg

SEQ ID NO: 761627 - DNA, 83 bp, Homo sapiens
atttttttctattttccctacgaaaaacagatctttttaaggtcctggagatgtggctgagctacctgcagccgtggcggtac

SEQ ID NO: 761628 - DNA, 100 bp, Homo sapiens
catgaggacagcaatggttgtatcaactatgaaggtgcagctggctggtgacgaaggccggagctgggaccagcagctcccactgggtatggtggtttct

SEQ ID NO: 761629 - DNA, 80 bp, Homo sapiens
ataagggtgacagcaacagctcggcgggctggaaggagtacgaccccagcaaagcgacctttgtgaaggtggtgccaacc

SEQ ID NO: 761630 - DNA, 100 bp, Homo sapiens
agaaggtgggagcggagagcgcaggcgtgactgcaaaattcaaaatggggctcaaggtattcgtttcatctacaccagagaaggcagaccaagtggcgag

SEQ ID NO: 761631 - DNA, 100 bp, Homo sapiens
caagagccggcggcatgacgactggctatgctgaggactacaccacgggagccgtgatgaattttgccagcgtctttgctgtcctctttaacggctgtac

SEQ ID NO: 761632 - DNA, 126 bp, Homo sapiens
ataggatcaactaacaaccatgtggtgaggaattcaagagctgaaggacaaacactggttcagctcgttcgaccagtcaccatggtgcctagtgttccaggaatcccaggtccttcctctccccaa

SEQ ID NO: 761633 - DNA, 74 bp, Homo sapiens
cgagccgatcctcagcgtcctgatgtggggggtgaaccacacgacactaccccaagcagtccttcaccatggtg

SEQ ID NO: 761634 - DNA, 98 bp, Homo sapiens
gttggatttatgcaaacttgggccaaaggacagttagaagacagtagtggaaaataaagagactctgaagcatttggcatctctttatgcaaataatc

SEQ ID NO: 761635 - DNA, 90 bp, Homo sapiens
ccagcagatgcaggaaaatttcgatattgaagtgtcaaaatccatagatggaaaagatggatgtgaagttaccccagatgtaaacatttc

SEQ ID NO: 761636 - DNA, 75 bp, Homo sapiens
aaggataaggagatcatagcagagtacgatactcaggtcaaaggttagtggatgacagatgtgtggtgcacccag

SEQ ID NO: 761637 - DNA, 75 bp, Homo sapiens
cagtggtcgaatccagtagaaaactggtcaaggaagctatgccttcaattaagttgcagagttctgatggagaga

SEQ ID NO: 761638 - DNA, 100 bp, Homo sapiens
cctgtatgaagcggttggcaccactgaagtgaccgaatgagatcctgatggccagtgctacggtggtgtcgcttctgcccaagatgaggagcccctggcc

SEQ ID NO: 761639 - DNA, 75 bp, Homo sapiens
atgccctgggttctgcccgcacggacccccatatcagtgtgcgtgtgaccaccatggatgcagagctggagtttg

SEQ ID NO: 761640 - DNA, 138 bp, Homo sapiens
ggaagcagcgtgagcagccggaggatcgcggagtcccaatgaaacgggcagccatggccctccacagcccgcaggcctggcctcgccctgtggatgatgatggccttgcccccgtgagctacaacctggccttcagca

SEQ ID NO: 761641 - DNA, 76 bp, Homo sapiens
atatctgcattgaacctgacaccatcagcaaaggagactttataactataggatgccgctcctacgaggactgctg

SEQ ID NO: 761642 - DNA, 100 bp, Homo sapiens
attgtgagctatttcagaactgttctcaggactcattattttaacatttgggagaaacacagccagaaggtggaggagttactgatggccatggagaagg

SEQ ID NO: 761643 - DNA, 90 bp, Homo sapiens
agattatttggccttatggaactggtgaggttttcctttggaatatggataaatacaccatgatacggaaactagaaggacatcaccatg

SEQ ID NO: 761644 - DNA, 95 bp, Homo sapiens
gtttgcagtacacaactcccagctgaaagtgagaagaggggatgtcctggcagcatggagtggaatccgtcctcttgttacagaccccaaatctg

SEQ ID NO: 761645 - DNA, 51 bp, Homo sapiens
gcgagaaaagatgaaacggacccttgctccatgtgcatccctcttgaagct

SEQ ID NO: 761646 - DNA, 82 bp, Homo sapiens
ccatggctgcggcggcccagctctctctgacacaggtgtcgtgaaaactacccctaaaagccaaaatgggaaaggaaaagac

SEQ ID NO: 761647 - DNA, 68 bp, Homo sapiens
ccactggcgtcttcaccaccatggagaaggctgggttccccccaggttggcttccttcgattcctttt

SEQ ID NO: 761648 - DNA, 99 bp, Homo sapiens
ggagcctagaatgcatcagtgcccttgtggcgaatggggctcacgtcgagcttgcccagagccggcaacagcaacaaaatgtggaggatgcaatgaaag

SEQ ID NO: 761649 - DNA, 100 bp, Homo sapiens
atggacacagtgatgaagaaagtgttagaaacagtagtggagaatcaaggaaaatgtttataggaggccttagctgggacactacaaagaaagatctgaa

SEQ ID NO: 761650 - DNA, 100 bp, Homo sapiens
gtggtgaccaggtgactccgtgcgtgggccaagaaagctacatccatattggaattttaccgggaacttggattgccgccgaaacagacagttaaaatct

SEQ ID NO: 761651 - DNA, 105 bp, Homo sapiens
atcaaacagctatggtgatgattagagacatactaatgtacatgattgactggatggttcctgaggctcacagacagaactgtaggaagaaaggcaagaaagagg

SEQ ID NO: 761652 - DNA, 89 bp, Homo sapiens
gactctctgcgggagaggctgcagcggaggcggaagcaggactcggggcacttgggcacctctaagatactgatggctctgcagaggac

SEQ ID NO: 761653 - DNA, 82 bp, Homo sapiens
ctcaagttgctactcgggacgctgcacctcccgcgccgcacggtggacgagctcctgtccaaatatgacccccagaaggagg

SEQ ID NO: 761654 - DNA, 75 bp, Homo sapiens
tgctgccttgtggggtgactgaggaaccccagcgactcttttatggaaatctggcattttttaaagtttgcgccc

SEQ ID NO: 761655 - DNA, 82 bp, Homo sapiens
gccggcctcctcagtgcgaagaagctgcagccgcacctggccaaggggtgaggacgcttgagcggaagttagaagcaaaaat

SEQ ID NO: 761656 - DNA, 106 bp, Homo sapiens
catgtcgggttattcgagtgaccgagaccgcggccgggaccgaggacgagccaaactcaggctgtaccttgagcagctcaagcaactggtgcccctgggccccgac

SEQ ID NO: 761657 - DNA, 87 bp, Homo sapiens
gcaggctgaggagaaagcggcgcgcggagcccgagaccgaggacgagaagaagcgctttgaggaaggcaaagggcggtacctgcaga

SEQ ID NO: 761658 - DNA, 100 bp, Homo sapiens
ccagctgtcaaagccatcatatatcagtatatggaagagattggccatctgcaagcttcccttctccgtggagagcaggaagacagtcatgggacctcag

SEQ ID NO: 761659 - DNA, 75 bp, Homo sapiens
ggccgttgggactttgagtggtgatgcttttttacaccttcttccacatcaagatctctgtaccttcttgatatc

SEQ ID NO: 761660 - DNA, 100 bp, Homo sapiens
gagcaagtccttcgcttcgtcatggagggcggccttctggacaagccagacaactgtcctgacatgctatttaggtcgatctcgagaactacagtatgta

SEQ ID NO: 761661 - DNA, 100 bp, Homo sapiens
cacagcttctgcaaagacaggaggagtgggccctttgtggtacatgtactgggcagattggggtgagacgccctggatcgagcaggtggggatggacgac

SEQ ID NO: 761662 - DNA, 74 bp, Homo sapiens
ctggaacagttgcagggtcacagaaacatcgttggagcagtgccagtcctttccaaagaatgtgcatcagggga

SEQ ID NO: 761663 - DNA, 90 bp, Homo sapiens
cagctgcttcctcaacagtgccctgcagccttcaaatgtttatctggtgtgactgtattatgccctcagagagtactgtatgttgcccag

SEQ ID NO: 761664 - DNA, 100 bp, Homo sapiens
gactggataagaaatcaaaaatctggtgaaattgccggcaagagggagttaaggacattccaggcagaggcaagaaacaggtgagaatgaccactttaac

SEQ ID NO: 761665 - DNA, 88 bp, Homo sapiens
ggtggaagctgagcgcgtggtggagttttcctgtgagctagagccggtgcaggccacgcagaacaagacagggaagtatgtgccgccg

SEQ ID NO: 761666 - DNA, 100 bp, Homo sapiens
cgtggagacggcgccttcagcttgagatactttaatgcgcccaaatgtgggcggggcaaaccggctcttgtgcgacggcacacgctggaggaccgcagtg

SEQ ID NO: 761667 - DNA, 83 bp, Homo sapiens
ggagtacctggagaaagctttaaacaatctcaaaccatgaattatgtgggacagctggctgggcaggtgattgtcactgtgaa

SEQ ID NO: 761668 - DNA, 90 bp, Homo sapiens
ctacgagctgtatgacgatgtggaacccagagatgactccagccccagccccaagggcagagcgagaattagaactgcagcgtcagcgtg

SEQ ID NO: 761669 - DNA, 100 bp, Homo sapiens
acagacagaagatcacctcctggatggagccgatagtcaagttcccgggggccgtggacggcaatttgcatatttctccaaagaaccatccagaacctga

SEQ ID NO: 761670 - DNA, 75 bp, Homo sapiens
cgttcggccaagggaccaaggtggaaatcaaacgaatgtctgatcacagatacggggatggtggctctactttcc

SEQ ID NO: 761671 - DNA, 50 bp, Homo sapiens
cccttggatgaggaactggacagacagtgacaataccctcccctcccttg

SEQ ID NO: 761672 - DNA, 97 bp, Homo sapiens
gaccacttaatagtgagtcttccaaccagagcttgtgtagcgtcagatccttgagtgataaaggagtagaggtggaaggaacagcatatttaagttc

SEQ ID NO: 761673 - DNA, 100 bp, Homo sapiens
ggtaaaaccccagacgccatgaaagctgccatggccctggagaaaaagctgaaccaggcctgctgggaacgggacttctaaaaggaactatgtctggaag

SEQ ID NO: 761674 - DNA, 123 bp, Homo sapiens
cgccggtggacagtcctgatgacacagccctcagcgagagtgccaaccaggccttcctgtttgacagggacagggatggacgaattacggtggcggagctgcgggaggcggtaccggctctgc

SEQ ID NO: 761675 - DNA, 50 bp, Homo sapiens
ctttggaatggctcaaaccactctgagtcagtgctgattctctcaaatag

SEQ ID NO: 761676 - DNA, 78 bp, Homo sapiens
ttttaaagaatcaacatgtattcacaggtcttgtccagaaggctaaaaaagcaaaggacaggttgttgaaacgagaag

SEQ ID NO: 761677 - DNA, 89 bp, Homo sapiens
caccatggtggacacttttcttcagaagctggtcgccgccggcaggtttccatgctgagctcctgcccatcttcagtcctgaactctct

SEQ ID NO: 761678 - DNA, 100 bp, Homo sapiens
gcagaacagtgtttttccaatgaccttgcctcatagtattcgatcagattcagaagatatctgtttatttacgaaggatgaacccaattcaactcctgaa

SEQ ID NO: 761679 - DNA, 101 bp, Homo sapiens
agaccaaaaagggtgtggatctgctgcagaatcttataaagtattaccatgcacagtgcaaatgcccagcctacagagtctgagaaggaaatttataatca

SEQ ID NO: 761680 - DNA, 134 bp, Homo sapiens
aggattatgaagtattaattcttccactgatatctcaaaaggtgatctggacaaaggaacaggtatctcagagatctaaaattgcagtgtttgataaaatgtggacctacatgcggagtgcggagccctctgtg

SEQ ID NO: 761681 - DNA, 75 bp, Homo sapiens
tcacccggcggccaaaggccagtgactaccaacgtttggaccagaaggctgtgggtgagcgtggaggatgctcag

SEQ ID NO: 761682 - DNA, 110 bp, Homo sapiens
gaagccaaagaggagctggccaagaaatgcagcatcacagtgtcacaggccctcagtaccgcctggagaagcagagcgagcccaatgtcgccgttgacctggacagcact

SEQ ID NO: 761683 - DNA, 75 bp, Homo sapiens
gcctacaggaggaaaggccagactcacagaagggattgagccatgtacccagaaagggcaatgcccaccgccccc

SEQ ID NO: 761684 - DNA, 75 bp, Homo sapiens
aacctttgaatatctgcacacaaattcggaacgtgctcagtcactttcaatgggcaccaggagaaaggttttggt

SEQ ID NO: 761685 - DNA, 89 bp, Homo sapiens
cggggccaggaagtcggagtttgagccccggaggcagagcggctgccatgctccaccgggggacggctacgtgcaggcggacgcccggg

SEQ ID NO: 761686 - DNA, 100 bp, Homo sapiens
agatttgatggccttcacaatccaagttccacaatatattgactactgccacaattccgcctcatgggaccagaatcgcatgggacaggactcctatgtc

SEQ ID NO: 761687 - DNA, 100 bp, Homo sapiens
tgaactgaggaagccattagtgctctggtctctgacccttgcagtcttcaggtgctcccactctttcccggcttttagaagctggtcctacacagttcac

SEQ ID NO: 761688 - DNA, 75 bp, Homo sapiens
cgccagcagctggactatggcatctatgttatcaaccaggcttctggagttacagtgaatgatgaagtcatcaaa

SEQ ID NO: 761689 - DNA, 85 bp, Homo sapiens
cgccacttaccgcaagctgctggagggcgaggaatgcagactgacagatcccattcccaccacagagacttcaattgcaccccgc

SEQ ID NO: 761690 - DNA, 83 bp, Homo sapiens
tttggctctgcgtgagtgtggtctacgagctgtttctcatctttatactcttccaggtgagaagccctaccactgcaactggg

SEQ ID NO: 761691 - DNA, 51 bp, Homo sapiens
cggcctggaccttgcagccgcaatggggaaggtgtggctcattgactttaa

SEQ ID NO: 761692 - DNA, 95 bp, Homo sapiens
aacacttcctataaatctcgcccaaacaggaaagaaggccaatgatgaggccaatcagagtgatacaagtgtctccttgtcagaacccaagagca

SEQ ID NO: 761693 - DNA, 83 bp, Homo sapiens
ccgctttgttcagctgcagcatggagagatagataaacggaacgctgtaaatgtaagcctattagagctacacagaagaccta

SEQ ID NO: 761694 - DNA, 82 bp, Homo sapiens
cgacagcgtcctcagcacccccaagccgaagctgcggctgaccccgcactacatctacccaccagccatcgtgcagcccagc

SEQ ID NO: 761695 - DNA, 82 bp, Homo sapiens
tccttcacagctataccaaacttaaaggaactgtggctgcaccatctgtcttcatcttcccgccatctgatgagcagttgaa

SEQ ID NO: 761696 - DNA, 100 bp, Homo sapiens
tttcttggcccttgttcccccaaatgtctgactctgactctcggactgagaaacgcaaggaagctcttcgtgggcggtcttgactggagcacgacccaag

SEQ ID NO: 761697 - DNA, 100 bp, Homo sapiens
gtgagcgtcgcgggagcctcgggcaccatgagcgacgtggctattgtgaaggagggttggctgcacaaacgaggacaaagcccacaaacgctatctgcta

SEQ ID NO: 761698 - DNA, 82 bp, Homo sapiens
gttcagtttgcctggagatgtagacagagctcgacagtatgtactacagatcatgacaagatgtttaagatgagtgaaaaga

SEQ ID NO: 761699 - DNA, 129 bp, Homo sapiens
gccgcctgaagtgcgggcgcagctggcggagctggagctggagctctcggagggtactaggttttgacaagcttgcatcatgcgtgagtataagctagtcgttcttggctcaggaggcgttggaaagtc

SEQ ID NO: 761700 - DNA, 123 bp, Homo sapiens
ccgacatgttcacgcacgggatccagagcgccgcgcacttcgtcatgttcttcgcgccctgggatcttctgcagaaatagcgctggaagctagagtgaggcctgagtactgccttggcctagg

SEQ ID NO: 761701 - DNA, 74 bp, Homo sapiens
cagctatatttgcccatgttattcaaggatcagttccatgacaagaccccttatacgattatgtttggtccaga

SEQ ID NO: 761702 - DNA, 75 bp, Homo sapiens
agaatggcagtgctcaaactcaccgaccagggtgtttgtgaaccgaagtttagcaatggaaaagataaagtgttt

SEQ ID NO: 761703 - DNA, 89 bp, Homo sapiens
ggcagctgctctgaaccaggacctggacccggacccaaagtgccatgtctttaatggcccaccagctctgagcagatcatgaagacagg

SEQ ID NO: 761704 - DNA, 90 bp, Homo sapiens
ggaattagcctgcaacatgaagaatagttctgtcccaagaagaactctgaagatgattcagccttctgcatctggatctcttgttggaag

SEQ ID NO: 761705 - DNA, 100 bp, Homo sapiens
ggaatggtgctgcttccagtggccagccagatggaagcatcctgcctcgtcatccagttggcctgtatccggtgtccgaggcgaactcagtaagatgatg

SEQ ID NO: 761706 - DNA, 130 bp, Homo sapiens
gcaatatactgttacgatccagttgaagattactggatgcacgtacagaatacattcagccgtcagcaatcaatgctatgattgatcctgatggaactttggaggctctgaacaacatgggatttcccag

SEQ ID NO: 761707 - DNA, 73 bp, Homo sapiens
gggagatcgactgtttgagcccggaagcgcagaagctgagatgcaaatagatccctggatatttttgatgaga

SEQ ID NO: 761708 - DNA, 82 bp, Homo sapiens
cgggacctgagcagcctgaggcggctggcacagagcttccggcccgccatgcggaggggtttggacagaggagccaaaggcc

SEQ ID NO: 761709 - DNA, 76 bp, Homo sapiens
ccttctccccaggataagtccagaagatatccaggaatgattttcagagtatttgagaaaatgagaggtgcagatg

SEQ ID NO: 761710 - DNA, 75 bp, Homo sapiens
gcttcgcccaggtagcggtacatggccacaagcggaggggaggtcctggtgcttgatggtcgaggccatctcctg

SEQ ID NO: 761711 - DNA, 82 bp, Homo sapiens
accactagacccacagctgttaaagcaacaggctaccaacctggctcctgcagaccccaatggcaaagcagacccttacgtg

SEQ ID NO: 761712 - DNA, 75 bp, Homo sapiens
cggcaacttcggggagctccgcctaggtcgcaatggaagaagagatcgccgcgctggtcattgacaatggctccg

SEQ ID NO: 761713 - DNA, 98 bp, Homo sapiens
cggagatctctggagcagacctcaaggctagagcaggctgacctcattctggccatgctggatgcttctgacctggcctctccctccagttgcaactt

SEQ ID NO: 761714 - DNA, 75 bp, Homo sapiens
gccagagactgagacagccgagctgcaagctacagcgactgcaaacatgaacgattggatgcccatcgccaagga

SEQ ID NO: 761715 - DNA, 100 bp, Homo sapiens
cagtggcggattacttcaagcagtggattaatctgaaaaagagtgatagattcgtgtggcctttcaaatgattgtgaagtggtggaaatggatccaaaat

SEQ ID NO: 761716 - DNA, 75 bp, Homo sapiens
gaccgcctccgggagctgtttggcaaagatatacgctcaacggcaagaaagtggaagttgccgtcaaacagatca

SEQ ID NO: 761717 - DNA, 110 bp, Homo sapiens
gtttggtgttttgcttcaggttatagatggagagacctataaagacatgtcatgctgcccaaggacatagccaagctggtccctaaaacccatctgatgtctgaatctga

SEQ ID NO: 761718 - DNA, 75 bp, Homo sapiens
tggagaagccttggggtcaatttgttgtatagctgaggaactgcctcctgagcgtggagcctgccattagcacca

SEQ ID NO: 761719 - DNA, 90 bp, Homo sapiens
cgtccagtcctcgtgcgaccgcgctgggtcggaagtgagcagaccactctgcttcatttttgggagaaaacttctcacactatggcagcc

SEQ ID NO: 761720 - DNA, 100 bp, Homo sapiens
cccgccaagctgtcatcacaaaagagttgattgaaattatctctggtgctgcagctctgaagctcttactcctcagaaatgtattcctcacatcatcgtc

SEQ ID NO: 761721 - DNA, 101 bp, Homo sapiens
ccgtttccacgactttctgggagactcactacacttgctgctttgaaggatgaagttgtatctgttgaaaatgaactctcagaattgcaagaagtagaaaa

SEQ ID NO: 761722 - DNA, 75 bp, Homo sapiens
gagggtggccctaggggcagcgagcaagacagcaagcaggtgccagaaccctgtggagcatcatgaactgggaag

SEQ ID NO: 761723 - DNA, 100 bp, Homo sapiens
ccagagcctggagtctgcgaaggccgggacccggttccccggcccacagtgggggtgtgcaaacccgagagaactgggttcagaggtccaaagaggtgac

SEQ ID NO: 761724 - DNA, 97 bp, Homo sapiens
cacggccggaccgaaggtgcggcggcggaggggagccagggcgccccagcaggtgagaattatgaagatgatgacctagtaaattctgatgaggtta

SEQ ID NO: 761725 - DNA, 80 bp, Homo sapiens
tcgacggcaggaacgtgaccgtcactgacgtggacatcgtcttcagcaagatcaagaacaagcacatcatgattgacttg

SEQ ID NO: 761726 - DNA, 87 bp, Homo sapiens
tgcccttatggaattggacaaagtgggtaattccagaattgattggccataccattgtcactgtattactgctcatgtcattgcact

SEQ ID NO: 761727 - DNA, 90 bp, Homo sapiens
ctttccttacctgtttttccagctcacccactgccagcagaggtgtcgttatttgtgcaacaacattgaaaaacaagcagaaataaaaca

SEQ ID NO: 761728 - DNA, 100 bp, Homo sapiens
caagaatgaaattgtagtaacggacttccataaccattcagtgaagattccttctggaaccccaacgccttcgagacggattccgacctgccggctggat

SEQ ID NO: 761729 - DNA, 98 bp, Homo sapiens
gcactaccatttcgagggtgaagctcctcgacaccatggtggacacttttcttcagaagctggtcgccgccggcagcgccctcacaaagccaatgctg

SEQ ID NO: 761730 - DNA, 100 bp, Homo sapiens
atctttcagcagttggcacacatggttaaggaacaggaggaaaccattcagaggtcatcatcagatttgaaatatttaaagtggatacaaaactatttca

SEQ ID NO: 761731 - DNA, 100 bp, Homo sapiens
cccgtcatggagatggaaaaggagttcgagcagatcgacaagtccgggagctgggcggccatttaccaggtctcggtgattcagaatacacctacttttg

SEQ ID NO: 761732 - DNA, 75 bp, Homo sapiens
ctttgcaaccattggtctgcaggacatcactttagatgatggacagtcattttgtttactcattcagccctgttg

SEQ ID NO: 761733 - DNA, 100 bp, Homo sapiens
agtgctcctgcagtctctctgtgtggctgtaacttacgtgtactttaccaacgagctgaagcaggatgttcacggaagaccagggtgtagatgacaggct

SEQ ID NO: 761734 - DNA, 82 bp, Homo sapiens
ctacgcatagaagccgggattgagcgcatcaagcaaattgtggctactaatttgccccctgaagatcaagatggctctgggg

SEQ ID NO: 761735 - DNA, 100 bp, Homo sapiens
ctgaatgcaggttcctatgcgtcactagactgggctggcttagatgaagatgaagatgcacatgtctgggaggataattgggatgatgacaatgtagagg

SEQ ID NO: 761736 - DNA, 80 bp, Homo sapiens
agccttggcttttcttcctgacaacaccaaccagtaaaatgtttattggaggcttgagctgggatacaagcaaaaaagat

SEQ ID NO: 761737 - DNA, 74 bp, Homo sapiens
ctacagaaacctggtctccctaggaggtatctttaaaatagcttcctgggcagatctagtaaatgctcacgtgg

SEQ ID NO: 761738 - DNA, 125 bp, Homo sapiens
tcaatatctgtcttcggtggactccttcggcagtccacccaccgccgccgcctcccaggaagcggggagaggtggtgagagatgacccctgttgaggatttcattggtgtctgccacaggccgcc

SEQ ID NO: 761739 - DNA, 100 bp, Homo sapiens
tggtgcggctcatcttcgagagaaggagcatatcccagcgctcttgggaatggcaacggcttatatgatcttgaaacagactccacgagccagaaaccag

SEQ ID NO: 761740 - DNA, 101 bp, Homo sapiens
cgagaacgtgcgggaagagaagatcatcgagcatttcaaacggtggtgcaaaggatcaaggctgtggaggggcagactcggctgctggtggtggaccagga

SEQ ID NO: 761741 - DNA, 83 bp, Homo sapiens
agactgcatccccgagacgatggcggagggagataatcgcagcaccaacctgctgcattttgaaagcgaagcagaagccgtag

SEQ ID NO: 761742 - DNA, 74 bp, Homo sapiens
aataacattaccatgagagtttggcttggattatctcaacattctgttggactcagaattcatgattgaagaaa

SEQ ID NO: 761743 - DNA, 74 bp, Homo sapiens
caggaggccgtcaagaagggctcgaccgcgctgcaagctttcttcctggtggcagatgacatcatggattcatc

SEQ ID NO: 761744 - DNA, 99 bp, Homo sapiens
cgagtttgtcctgggagattgtatggaggatctctctaggagctgacactcgaaccttcacgacccattcggatttttccaggactcaggagtggcact

SEQ ID NO: 761745 - DNA, 87 bp, Homo sapiens
aagctcaagttgctactcgggacgctgcacctcccgcgccgcacggtggacgaggtctcggacagcccgggagacgagccctcggag

SEQ ID NO: 761746 - DNA, 90 bp, Homo sapiens
gccaaagccgggggaagcggtggcgccggcgtcactctggatgaggccaggggggaacacacctgaaactagaggaacagcttatgtggt

SEQ ID NO: 761747 - DNA, 49 bp, Homo sapiens
gggagctcaaagtgtgccttctcggggaggcaagtgaggcctatctggt

SEQ ID NO: 761748 - DNA, 95 bp, Homo sapiens
tcaagatggccatgtggcagggagtcagtggatcggtggggaaaatgctgcttaccctgggccctgggctgtagaaagaagacaccaaaggcaaa

SEQ ID NO: 761749 - DNA, 75 bp, Homo sapiens
gaatacaaattaaaagcaattgaatatgtgcatggatacttttctagtgaacagtatgtcattgaaagtgcccga

SEQ ID NO: 761750 - DNA, 99 bp, Homo sapiens
cgggcagagcgcggcggcgcgggcgagaaccactgtctctgatcaacgtgcggaagaggaacgtggaatctggggaagaagagctggcgtccaagctgg

SEQ ID NO: 761751 - DNA, 75 bp, Homo sapiens
atgtccctgtgggacacaatgcccccaagagattggaaaggtgtatgagcattgtgacatcgatgactgctggtg

SEQ ID NO: 761752 - DNA, 80 bp, Homo sapiens
ggaatagaacttggcacaattacatgatgcagagaagaggcgatggcggcgatggcatctctcggcgccctggcgctgct

SEQ ID NO: 761753 - DNA, 96 bp, Homo sapiens
ccagtgtcccttcttccacatgaaaaggataagttttgtaccaatggctagaagcagatcgtcatggcaagagccaaggtgctgcaaatacgactt

SEQ ID NO: 761754 - DNA, 82 bp, Homo sapiens
cagagtcttgctccggccgcggccagcggagccctgggctggggcaggagccggtaagtaaggaggtctctgtaccatggct

SEQ ID NO: 761755 - DNA, 74 bp, Homo sapiens
ggtgatccagcagcagctctgcttgagacaatgcagatcttcgtgaagactctgactggtaagaccatcaccct

SEQ ID NO: 761756 - DNA, 83 bp, Homo sapiens
cgggaagactcatcggagcgtgtggatttgagccgccgcattttttaaccctagatctcggtggctttttctcaagtatattt

SEQ ID NO: 761757 - DNA, 101 bp, Homo sapiens
ctcatgttactttgcctgttttttacccacatcttaagcatggtggtgtatgtgctgtatatgtagtaaagctaaatccatcagagagtttgataagcgat

SEQ ID NO: 761758 - DNA, 50 bp, Homo sapiens
ctcaagaaaatcttcgaagacttttcaattgttcctcatgtggttaattt

SEQ ID NO: 761759 - DNA, 100 bp, Homo sapiens
ttacttgaaagagaggacttttttccagattatgaagaaaatggaacagatttatccggggctggtgatccgctgctttgactctcccgcgaagaccttt

SEQ ID NO: 761760 - DNA, 90 bp, Homo sapiens
tggagtccaacatatgatgtatcttctatcttaacatcaattcaggtggttaccctaacagctaatgataagacaagtgtttccttctcc

SEQ ID NO: 761761 - DNA, 90 bp, Homo sapiens
atgcacccggcaggcttggcggcggcggctgcggggacgccccggctgcaaaaagcttgtggtgaaggggggcaaaaaaaagaagcaagt

SEQ ID NO: 761762 - DNA, 98 bp, Homo sapiens
gagcgtcgtgcacgcgggccagaggcggttttgatgatgatggttcagaatttcatgaacatatatttctggagaaacacctggagagctttccaaaa

SEQ ID NO: 761763 - DNA, 75 bp, Homo sapiens
atacctagaagtctactaatggacagttagtcacccacctacatgttgagagtatcactacacagccaacaaaat

SEQ ID NO: 761764 - DNA, 50 bp, Homo sapiens
gcctcactgagcaaccaagagtaatctgtaagtcagatgctccaacaggg

SEQ ID NO: 761765 - DNA, 75 bp, Homo sapiens
acaaagctgaagtctacacgaagcaggcagggaatgtggtaacaggagagatggtagaagagctcatcctttctg

SEQ ID NO: 761766 - DNA, 100 bp, Homo sapiens
caaagccgaggaggagctggatgccgaagtcctggaggtgttccacccgacgcatgagtggcaggcccttcagccagctgcattctgccctggctaagca

SEQ ID NO: 761767 - DNA, 100 bp, Homo sapiens
ggcctttgtatggagaagaccccataacgtttgcaccatttaaaatttcttgttttctctacccacatattgaaagtcatcctcttccagagaaccatct

SEQ ID NO: 761768 - DNA, 97 bp, Homo sapiens
tcttccatcaagatggaggttgggattgaggactgtctgcacattgaatttgagtacaataaatccaaggattaatgaaaatcaagttccatcctca

SEQ ID NO: 761769 - DNA, 100 bp, Homo sapiens
tggcgttccaccagcaaccatgagtggttccatgatgggaagtgacatggtctcctctgagcctccggcctccataagacccaaaacagatgacacctct

SEQ ID NO: 761770 - DNA, 100 bp, Homo sapiens
aaggaaaaatcgagcagaaagaatgtctttcaggaaactcaagagtatacccgaaatgttgttagatattgccttgaagctcttcaagactggtttgatg

SEQ ID NO: 761771 - DNA, 75 bp, Homo sapiens
gctaaggaaaccctattacctccagggccgcgatgggcctcttggaacattggtgtgttcatctgcattcgatgt

SEQ ID NO: 761772 - DNA, 82 bp, Homo sapiens
atggacaccagccgtgtgcagcctatcaagctggccagggattttttatcaagcagaaatgcatcgaacaacgagaatcaag

SEQ ID NO: 761773 - DNA, 99 bp, Homo sapiens
atcgggacaagaagaagaattacaagagctcagggacggtagtgctggcccagtgcacggttacattcacttcgttccctaagtcttcacaataacttg

SEQ ID NO: 761774 - DNA, 99 bp, Homo sapiens
cagaattcttcagattctagttttgagaagaatgtggaaataacggagcaacttgctaatggcaggcattttacaagcttctgcagaaagccgtcatta

SEQ ID NO: 761775 - DNA, 100 bp, Homo sapiens
gcgggcggagacatggccaacatcgcggtgcagcgaatcaagcgggagttcaaggaggtgctgaagagcgaggagagagaaaaggaacagttccgtaagc

SEQ ID NO: 761776 - DNA, 100 bp, Homo sapiens
aagccagttatccacggactggaagatcaaaagaggagattcgtcagcgaactgcagctcaaagaaacctttctccaacaccagcaagccctaaccaggg

SEQ ID NO: 761777 - DNA, 98 bp, Homo sapiens
cagctgttgaaacagaagaagttgagcctgatgaagaagaaaatcagcatgattcttcagaggctcttcaggttctcctctgtcattcggtcagccgt

SEQ ID NO: 761778 - DNA, 50 bp, Homo sapiens
cacaactccagtgctaactcaacaggtctccgaattcaatcctttgacgt

SEQ ID NO: 761779 - DNA, 75 bp, Homo sapiens
gcgaacctctgctcacgcgtgttcttctggctatgactttgcagccgtcctggagtggttcgcggagcgtgtgga

SEQ ID NO: 761780 - DNA, 75 bp, Homo sapiens
ccttcgagtgtttgccaataatgggaaggtgtggctcattgactttaatccatttggtgaagtcacagattcact

SEQ ID NO: 761781 - DNA, 100 bp, Homo sapiens
aagaagtggagcgtgtcctgaaggagttccaccaggccgggaagcccatcggtattaaaggtggaagaaggtccatatctttttctgtgggtgcttcaag

SEQ ID NO: 761782 - DNA, 101 bp, Homo sapiens
ctttgacatggagagaatttcactatattcagttctttccaaatggcaatgcatttgccactggctcagacgacgccacctgcaggctgtttgaccttcgt

SEQ ID NO: 761783 - DNA, 101 bp, Homo sapiens
tgtatggagaaattgcgggatgcacgcctgtgtcctcattgctccaaactgtgttgtttcagctgtattaggctccagaacctgggtatcaacccagcaaa

SEQ ID NO: 761784 - DNA, 132 bp, Homo sapiens
ggcgctttgctgtgaatctccgcggggaggctcttccaaccaggggctgagcttctgcgctgtggagaagccaggttttcctcagcaccaggagaggggcttggatcctgaatcgtgtaggggactacggat

SEQ ID NO: 761785 - DNA, 74 bp, Homo sapiens
cataataaacaagatttcgactatactaatgagtacaggtggaagcctcctccatctcctctgctggcgctgtg

SEQ ID NO: 761786 - DNA, 83 bp, Homo sapiens
ctgcgctgccgccgctctgaggagttaaagagactctgacctgtttttgttggacacccgtgtagtatgggcctcagaagaag

SEQ ID NO: 761787 - DNA, 98 bp, Homo sapiens
ctcctcctccccagttctactcaagccttattgaagagataggaactcttggttgggataagccaccaccacctatcatgacagatggtgaagatgcg

SEQ ID NO: 761788 - DNA, 146 bp, Homo sapiens
gcaccgggatcgtgaccgagaccgtgaccgagagcgtgaccgagagcgcgaatatcgtcatcgttagaagaaaggcctaaagaatgtatttgacgaagcaatattggctgccctggagcctccagaaccgaagaagagccgcaggt

SEQ ID NO: 761789 - DNA, 82 bp, Homo sapiens
gccaggagcaccgccgaggactccagcacaccgaggttgggccggtgcacaaacagcgtggtcaagtatgagctgatgcgcc

SEQ ID NO: 761790 - DNA, 80 bp, Homo sapiens
gctgcagaagaatccattgggatatctggagaggtcacagatgtgacattgatgtgtccactgaagccatgtatgctgca

SEQ ID NO: 761791 - DNA, 75 bp, Homo sapiens
cagctatgcatgctgcttttgatgtctgacaacgtggatcgttgttttgaaacactctgggacatctggagaaag

SEQ ID NO: 761792 - DNA, 98 bp, Homo sapiens
ggatgagagtcagacaaccccaaatcgagctaattcaaggtagtgcctggtggtgtggaacaatcattttgaaatttctgacatctaaaatcttaggc

SEQ ID NO: 761793 - DNA, 73 bp, Homo sapiens
aatattccaaggaatttttcaccaaaaaaggtatcctggatacagccatcgttgatcgggggaggaatgtggt

SEQ ID NO: 761794 - DNA, 82 bp, Homo sapiens
ggcaaagtggaaaaatgtgcgactgatgaagtatttctggaagcccagattcagaatatgacaacctcacctatgtttatgg

SEQ ID NO: 761795 - DNA, 75 bp, Homo sapiens
ttccataccattcagaggccaggttaaagagaatgtcaccaatggcacagtgggcggcacagcagagccggggca

SEQ ID NO: 761796 - DNA, 98 bp, Homo sapiens
ctgccctcacaagtgcagcgtccagactctcctgaggagcgagatgagcagcaccagcagtaagagggctccgaccacggcaacccagaggctgaagc

SEQ ID NO: 761797 - DNA, 100 bp, Homo sapiens
taagcagagtgctgagccatcactgtttcagtgtaaacaggaacatcgataagtagtgtaaaaacttgcacaatgaaatccgaagccaaggatggagagg

SEQ ID NO: 761798 - DNA, 82 bp, Homo sapiens
agtcgggaccatcgccggagcctgaggacacttctctgtcgtcacagttaggtgtcagttgtacccgaggcgttctcagcag

SEQ ID NO: 761799 - DNA, 80 bp, Homo sapiens
gtaatggaaggacccctcaacctgcaattctgtggtgttcttggtcacacatttatggagtttctgaagggcagtggaga

SEQ ID NO: 761800 - DNA, 75 bp, Homo sapiens
gggagacaaagttgaaaacaaagtgctgggatatggttttaagcctaaatatgatggagaagatcttgcttacac

SEQ ID NO: 761801 - DNA, 96 bp, Homo sapiens
ccagcccaaccgtgttgtatgtctccaccagctcctggccgggttcgaggacaagtcagcctatgcgctctgcacgtttgcactcagcaccgggga

SEQ ID NO: 761802 - DNA, 100 bp, Homo sapiens
tcactcaatgaatataaactgcacttactggcatgctcaaggaatgggctattaagaggaagaatacaagcgattgagtgaagcactagcagaggatggg

SEQ ID NO: 761803 - DNA, 100 bp, Homo sapiens
actatgacctatctgacaagagcatcaaccctctggtgaaattcgatgctactgtgatgctgcccactgtgtagccactggttatatgtgtaaatctgag

SEQ ID NO: 761804 - DNA, 82 bp, Homo sapiens
cacttccacagccaagtgcgggagtccacgattcggtttatgctagagacgatgttggccctgaagaacaatgacatgcgca

SEQ ID NO: 761805 - DNA, 100 bp, Homo sapiens
ggcggatctggacacccagcggtctgacatcgcgacgctgctcaaaacctcgctccggaaaggggacacctgatgccttcaattaagttgcagagttctg

SEQ ID NO: 761806 - DNA, 75 bp, Homo sapiens
atcttgtccagaactctgtcaaatgaagaacactttcaagaaccaggaattaaggataacctagacgacataaag

SEQ ID NO: 761807 - DNA, 100 bp, Homo sapiens
agaccattcagatgggatctttccggatcaatccagatggcagccagtcagtggtggaggaactgatgaggagtttcaacagagacaggcggattttttg

SEQ ID NO: 761808 - DNA, 50 bp, Homo sapiens
tctgatgtcaaacatagaaccagaggttcgatacaagaggctgttttcct

SEQ ID NO: 761809 - DNA, 100 bp, Homo sapiens
ccggcgctcccttgtcacgcctcgggaagcgcgcacctgccaagcaggaaatctactttcttcaatgtgttaaccaatagtcaggcttcagcagaaaact

SEQ ID NO: 761810 - DNA, 100 bp, Homo sapiens
cgaagcacgtcatcttcagtcgcctctctgtgtctgctgatctcgagtctcgcatctgtgtgactccaaccgggaagactttgacccagcacctgtaaag

SEQ ID NO: 761811 - DNA, 100 bp, Homo sapiens
cgggagctacttccaaattaaccaattctgggaggtgatcagtgatgaacatggcatcgaccccaccggcacctaccacggggacagcgacctgcagctg

SEQ ID NO: 761812 - DNA, 82 bp, Homo sapiens
cggactcggcgggcatcgccctctacagccgtcccgagcagccccgcccaacatggacccagacccccaggcgggcgtgcag

SEQ ID NO: 761813 - DNA, 74 bp, Homo sapiens
gccgatccagcctgcggagcctgtggggcaggtgaccagaagtcagcagcttcccagaagccccgaagccgggg

SEQ ID NO: 761814 - DNA, 82 bp, Homo sapiens
ctgtagcctaccatgctgatgatggcaaacaatgcagatcttcgtgaagactctgactggtaagaccatcaccctcgaggtt

SEQ ID NO: 761815 - DNA, 100 bp, Homo sapiens
cagaaacatatttccgcggaaaacacgaaagtcttaggaaaagtcctcagtgctgtgggcagtgcccagctactgatgtcccagaaattccagcagttcc

SEQ ID NO: 761816 - DNA, 82 bp, Homo sapiens
tgctacctgcatttcatactccctctggaataccttgggcattgctgaatatgaaaagtgaggaaattaaagttcagccaag

SEQ ID NO: 761817 - DNA, 75 bp, Homo sapiens
ggatgtgccaccagaacccaagaagattccgataagaaacacgatcgccaaactgaggcagcaactacaacgcag

SEQ ID NO: 761818 - DNA, 100 bp, Homo sapiens
cactagtctagcttcagatgaacaggcacagactgtggggctcccagtgaccatgcattcaccgaacatgaggctgctgcgatctgccctcctcccccag

SEQ ID NO: 761819 - DNA, 100 bp, Homo sapiens
agattctttgtagcagacactgcaaatgaagctctcgaggctgctaagagactaagtctgcaattaaggccttacgtcctggagggatacttgtatactc

SEQ ID NO: 761820 - DNA, 75 bp, Homo sapiens
ggtaacaagatggcgaccgagacggtggagctccataagctaaaggttacttcctcagaatgttggcctcctgta

SEQ ID NO: 761821 - DNA, 122 bp, Homo sapiens
cgctgaggcgcggccttcgctgtgtggtggggactcacaagaccgacgtcaagatgccaagatgccttctgcatccagtggtgaagaagcagacgctggcagcctcctgcccaccaccaatg

SEQ ID NO: 761822 - DNA, 98 bp, Homo sapiens
tcggagggagcccggcggcttcggaatggcattgtgcccatcgtggagcctgagatcctccctgatggggaccatgacttgaagcgctgccagtatgt

SEQ ID NO: 761823 - DNA, 100 bp, Homo sapiens
gcttgatgacgctcagaggctcctctaccgcaatgtgatgctggagaactttacacttctggcctctctgggacctggccctcagcccctaaaatgttcc

SEQ ID NO: 761824 - DNA, 82 bp, Homo sapiens
gcaagctcgccaaacaggcggaggagcccagagttacagaatgtctgaaggggacagtgtgggagaatccgtccatgggaaa

SEQ ID NO: 761825 - DNA, 87 bp, Homo sapiens
tcacaggtgctactccactgtcacaccttgctcctggagaaggaaggctcagcaacagcctcaccaaggactccatgaatatcaaag

SEQ ID NO: 761826 - DNA, 126 bp, Homo sapiens
gtcaccctgcctcccctgcgtcccgccaccggccgcttctgtcctcggatcttatggttggtgatgaggcaagtgaattacgatcaatgttagaagttaactaccctatggaaaatggcatagtac

SEQ ID NO: 761827 - DNA, 100 bp, Homo sapiens
cggggcgctgactgccggctgcttccctgggctgggcgtcagccgccaccggcagcagcagcaccaccggacggtagcaaattatggagttggaggacag

SEQ ID NO: 761828 - DNA, 74 bp, Homo sapiens
gttctgccctgctctgctctaacaacattttgaagaaaaaatgactgctgcccgcattagaaaatgccacaagt

SEQ ID NO: 761829 - DNA, 100 bp, Homo sapiens
acatggcctccgctatgaaggcgatgacacccccaaccatggttgtgaagatgctagcgacacatcgctgttgggagttcttcctgcctctgaagccaca

SEQ ID NO: 761830 - DNA, 98 bp, Homo sapiens
ctacccgagcggcggcggcggcagcagcggcagcggcaagcaccggttttggccaaattgggcgagggcacaaaataaccacttaccccttctcaccg

SEQ ID NO: 761831 - DNA, 101 bp, Homo sapiens
ggcagaacttatgctgactacgaatctgtgaatgaatgcatggaagtctttccagtgtcagcctgcctttagctaagataattccaatagtaaacggacag

SEQ ID NO: 761832 - DNA, 90 bp, Homo sapiens
agcgtgcctttgggtgataagggccgctgctttgatgggagcacccctgtccatgcagcagcattttcgggcaatcagtggatccttagc

SEQ ID NO: 761833 - DNA, 100 bp, Homo sapiens
cagttttgctgtaacaaacgcctgggctgcgtattgtcagtttatggacatgctgttccctggctccattgccttgaagaaagtgaaattccaagctaag

SEQ ID NO: 761834 - DNA, 128 bp, Homo sapiens
gatggatgaaaggagacgtcagaacgtggcttatgagtacctttgtcatttggaagaagcgaagagggatcgcttacacctgagacgaactacagaacagcacgtaccagaggtggaagtccaagtca

SEQ ID NO: 761835 - DNA, 76 bp, Homo sapiens
cagctcatgggcacggctcgggacgctcagatttcttttatccaagatattggaaggctccctctgaagcgacact

SEQ ID NO: 761836 - DNA, 90 bp, Homo sapiens
accctggagtaaccctcactggagaatccagagtacacattttggaactttatacccaagaatttatttgaacaattcagaagagtagcc

SEQ ID NO: 761837 - DNA, 82 bp, Homo sapiens
tgccagttcccagctccgctaccctgagcaaatgacttacgctccattggattttccatccagtccttctgtggaacttctg

SEQ ID NO: 761838 - DNA, 100 bp, Homo sapiens
gatccttactattttctccagtttaacaaggattttatagctaccttgggaaaactttcaggattacatggccaggacctttttggaatttggagtaaag

SEQ ID NO: 761839 - DNA, 100 bp, Homo sapiens
tgaaccccttacttcgaaggatcataagattcacagatccaggtccagagagcatcgcagacatcgatctcgctccatgtcacgtgaacgcaagaggaga

SEQ ID NO: 761840 - DNA, 100 bp, Homo sapiens
gctaaagttcggatgatgaaaggagaaatgaggtcacccgaagacgaaaagttaccaacaggtcagacgcatttaacatgcaaatgagacaacggaaagg

SEQ ID NO: 761841 - DNA, 100 bp, Homo sapiens
acgaggacggccgggagacgctgcagaccatgggccccctccacggcaccatcaccgttctgatgcggcattccaaaagaactcactgtcctgattggga

SEQ ID NO: 761842 - DNA, 83 bp, Homo sapiens
ggaacagctacgcatagaagccgggattgagcgcatcaaggtgagaagccctaccactgcaactgggacggctgcggctggaa

SEQ ID NO: 761843 - DNA, 83 bp, Homo sapiens
ggacgtccggcttcggagcgggagtgttcgttgtgccagcgactaaaaagagattcccagaagttgtgcatgagttcctgtga

SEQ ID NO: 761844 - DNA, 98 bp, Homo sapiens
gtggctcctccattcaaacatcgacgccatcgacaagcgtattggtaaaggttttcaaggtgtcatgaaaagatggggatttaaaggccagcctgcta

SEQ ID NO: 761845 - DNA, 101 bp, Homo sapiens
accctgcttgagcaaaggaagatggaatccgacgtggtaggcccagagcagatactgtccgcgatttaataaatgaaggagagcattcatccagcagaatc

SEQ ID NO: 761846 - DNA, 50 bp, Homo sapiens
gcgcgaatatcgtcatcgttagaaggtcttcatggaagttcggggaaatt

SEQ ID NO: 761847 - DNA, 88 bp, Homo sapiens
gagatttgggagagacgctctgaactgactgccccgcatcaccggagcgtcccagctgcgaggagaattcccgtactgattagtcaac

SEQ ID NO: 761848 - DNA, 50 bp, Homo sapiens
catggatggctgactttaagagacacagggaatatggaggttctgcacct

SEQ ID NO: 761849 - DNA, 89 bp, Homo sapiens
ggacactatcctggccgagggccttcacttcagattgagaacgggctctgcatctgtgcagccatgcccagcaaagtcgtcattctccg

SEQ ID NO: 761850 - DNA, 90 bp, Homo sapiens
ctttaaaaagaaataataaaatgggagagaatgaagcaagtttacctaacacgtctttgcaaggttgagcatcctgtcacagaatgcatt

SEQ ID NO: 761851 - DNA, 100 bp, Homo sapiens
cctgaccccttcttgccatcgccccagacatggggaacgcggcgaccgccaagaaaggcagcgaggtggagagcggtacccactgatggtaatgctggcc

SEQ ID NO: 761852 - DNA, 100 bp, Homo sapiens
atatagtgcccccagccagtacctgggtgttccccaccttgggcatcatgcaccacaacaaacaggccactgggagacgcaggaggaggacaaggacaca

SEQ ID NO: 761853 - DNA, 83 bp, Homo sapiens
cgaggcggccaggttagtgcagcagcttgtgctgcattgcacctgtcctcgcggccaaggtgctcagaggcgtcgaggtgact

SEQ ID NO: 761854 - DNA, 101 bp, Homo sapiens
cagaacccagctgaaggactgctcatcctgtttgggctcagtaatcagctggctgtgacattccgggaagagaacaccatcgccttccgacacctcttcct

SEQ ID NO: 761855 - DNA, 83 bp, Homo sapiens
ccaagatctcggagaggcgagacatggttgctgattttcagaacagatacccaagctccagtggttccatactggcgcctgcc

SEQ ID NO: 761856 - DNA, 82 bp, Homo sapiens
gtgaaggaaagtggctgcagtgacacagtttggtgccctggttgtcagatgttggaaagcagtaggacggaacatactcttc

SEQ ID NO: 761857 - DNA, 97 bp, Homo sapiens
tggcacctgcgcgaagctggccaaagcctgcccagacggctcacctgtgcgggatggaacaaaagcctggctctgacagtggtacaacagcggtggt

SEQ ID NO: 761858 - DNA, 82 bp, Homo sapiens
acaggctccggctcatggcatcaagtggcatccatcataaggttttgagaacagagtgctgttttagagctggcagcagcat

SEQ ID NO: 761859 - DNA, 100 bp, Homo sapiens
ctgtccattgataatgatgtcagtcctcacgtcagtacacactttcctgattactggcactgtttgaagaagcaaacatggtagcatcaagcattccttg

SEQ ID NO: 761860 - DNA, 100 bp, Homo sapiens
gacagcttaggaccagaagcctttcgcggagaaaaggctgacatgcccgtcctatatgacaggtaaacagtgttgacctcagagctgctagtcatgagca

SEQ ID NO: 761861 - DNA, 83 bp, Homo sapiens
ggctagccggcgacttgagtgacgagtcctcgaggccacacgggttaatcgaagaaagagcgcactggctttgcgctgggaag

SEQ ID NO: 761862 - DNA, 75 bp, Homo sapiens
cagtttttggtcttctgtcaaaaacacagggatgaggctttctgtgaagaattggaatcaatgatacaggagcaa

SEQ ID NO: 761863 - DNA, 88 bp, Homo sapiens
gtttcaagacaacagatgaattgtgaaagagagcagctaaggtgccggtggtggtgtgcacattgagccccggtatagacagttcccc

SEQ ID NO: 761864 - DNA, 48 bp, Homo sapiens
caaagcctggcccagcactggtgaagcatttcacaggacatgcaacgc

SEQ ID NO: 761865 - DNA, 98 bp, Homo sapiens
ctgtcaagaatgatcatgattttcttgaaaaggaccttgtagaacctctttgcaggtatctttcagatgaaggcattgaagcttgcacaagctctcca

SEQ ID NO: 761866 - DNA, 82 bp, Homo sapiens
atttgctgtcagccatgaacggatggatgtgatgcctgctagccaaaaggcacaaacacagagcagtctaaagcaaccgagc

SEQ ID NO: 761867 - DNA, 98 bp, Homo sapiens
tcccaagcaaggttccttggaagaagatgtctgcagagggaagatggagagttggaagaaggtgaattggaagatgatggggcagaggagacccagga

SEQ ID NO: 761868 - DNA, 100 bp, Homo sapiens
cttcacccgcgggccgtcagcacctcgttcggttgcagggtgaacctggcgatttgcttgcagtgttctagaacagatcagacattttgtaatgatgcct

SEQ ID NO: 761869 - DNA, 75 bp, Homo sapiens
gttcgaagtggctgtgggtattgctgcggctggtgcgtcgtcgctctagggctattgagtggccagacttcccca

SEQ ID NO: 761870 - DNA, 51 bp, Homo sapiens
ctggggagaccccgacgtggagtgccgaggccagctacagatgcatgcata

SEQ ID NO: 761871 - DNA, 82 bp, Homo sapiens
gccgctctagcggccgggactctgaactatggcggtgtaatgtctttgctgagaactcttcttctggacgtggtcccaacaa

SEQ ID NO: 761872 - DNA, 100 bp, Homo sapiens
ctggcagcccagcgggaggatctggagacagccatggagttctacttagagatcttcaaagctgctgcgggcattctatgtccccttcctgtcagatcag

SEQ ID NO: 761873 - DNA, 75 bp, Homo sapiens
agcccatcgtgcgggtcttgcaaagatcaaattttctccggtggctaaaaagttgtttgtggtaactgcagtgag

SEQ ID NO: 761874 - DNA, 76 bp, Homo sapiens
cacggaggagggcgccagctacttcatcgagtccattttagcttcctatctcctgaaggaaaagctcaacatcttg

SEQ ID NO: 761875 - DNA, 100 bp, Homo sapiens
ggcggagcgcgggtacagcttttcgctgactacattcagtgcatgcaagatatgggaaatactaaagcaagactactctatgaagccaatcttccagaga

SEQ ID NO: 761876 - DNA, 100 bp, Homo sapiens
cagatccgcaggcgcaaggcttcaggcgacccgtactgggcctactctgacttgtgcaccatggacaattttgctgagggagatttcactgtggcggatt

SEQ ID NO: 761877 - DNA, 76 bp, Homo sapiens
ctcaacaccacagtcagctaagaatgcagtaatagtggccttgtcttcaaaatcatgggatgtagagactgcaaca

SEQ ID NO: 761878 - DNA, 100 bp, Homo sapiens
gatgtccttaccagctttgacaatacaggaaatgtttgcagcacacttctgcttttgttccttcatcaggacgaatttactcttttgggcttggtggtaa

SEQ ID NO: 761879 - DNA, 74 bp, Homo sapiens
ctctcttccctggctggacttgcggagtccccgccgaagaacccgagtgtattatgcgtcagggtgcagcatcg

SEQ ID NO: 761880 - DNA, 98 bp, Homo sapiens
cgggagtccgcaccaggggccctcagggaagagaccctgcaaagatcctgggagaccaaggactcagacttacgcctagtggtaggagacagcttgaa

SEQ ID NO: 761881 - DNA, 75 bp, Homo sapiens
atcagcccttagcagtccgggaactgcttatcctccagggaggaccaccccaggaattgaatgatctggcacggg

SEQ ID NO: 761882 - DNA, 82 bp, Homo sapiens
tcaaccaactgttacaatcaaggtctatgaaggagagaagatgactgaggaggaggtggagaccgttctggcaggacacgag

SEQ ID NO: 761883 - DNA, 99 bp, Homo sapiens
gtcttctgattatgtggagattcactacgaaaatgggaaaccacagtactctaaggggaggacccgcagatcctgtagactatctgccagcagcacctc

SEQ ID NO: 761884 - DNA, 74 bp, Homo sapiens
cgcccagtggctgcgctgggacaaggaggataagatcaatgccctcattaaagcagccggtgtaaatgttgagc

SEQ ID NO: 761885 - DNA, 74 bp, Homo sapiens
gagccagaggccaactgcagaggaactggaacagaggaacattttgaaaccatgaacttacgagaggtgttaaa

SEQ ID NO: 761886 - DNA, 75 bp, Homo sapiens
tcctgaaggagttccaccaggccgggaagcccatcgggttcgagaacttgtcttggacaattgcaaatcaaatga

SEQ ID NO: 761887 - DNA, 90 bp, Homo sapiens
cccaagcaaggttccttggaagaagatgtctgcagaggtgcagtagacattgttgcaatcatgatcggcaatctgaaaggcacaaaaatt

SEQ ID NO: 761888 - DNA, 75 bp, Homo sapiens
gatgatgatgaagatattgatgacaaagcagaagccactggagaaaaacggccaagaggcagacctaggaaatgg

SEQ ID NO: 761889 - DNA, 100 bp, Homo sapiens
ttaaaatgtgatagtgtctgtgtgaatccatatcactacgaacgagttgtatcacctggaattgggtgagaaaattcatgaagacatctttgacatcata

SEQ ID NO: 761890 - DNA, 100 bp, Homo sapiens
caggaaatctttggaaagagaagactttgaaaaaacaattgcagagcaagcagttgcagcaggttattcagcaaagaaatgaagaatgtgatcatactca

SEQ ID NO: 761891 - DNA, 75 bp, Homo sapiens
aatgttgccaaaatgtttcctaaagttcgtgaatctcaacttatgtgtagcactttgtagtttaggtatttggat

SEQ ID NO: 761892 - DNA, 75 bp, Homo sapiens
ttctataatcaggcaattatgtcttctaaaaatattgcacagtctttcccagggaactccgatgaagtgttccaa

SEQ ID NO: 761893 - DNA, 100 bp, Homo sapiens
ctggtgtcgccaggctctggagcagttccatcagctcagccaggtcttgtttggtgcacctcgatttggaggaagtagggcagggcccttatctggaaag

SEQ ID NO: 761894 - DNA, 74 bp, Homo sapiens
cattatgaacccaccactgggcaaagaaagtatccctttaattataatctgaaggttactctgcctggcttaaa

SEQ ID NO: 761895 - DNA, 73 bp, Homo sapiens
tattggggtaaagaatctcctgatatgactaaaaacttccaacagaattggcagagggggtcgatttgggagg

SEQ ID NO: 761896 - DNA, 82 bp, Homo sapiens
gctggaagagagaaggaagttgtaccggattttttatcaagcagaaatgcatcgaacaacgagaatcaagatcactgagcta

SEQ ID NO: 761897 - DNA, 100 bp, Homo sapiens
aaactatggcttacaacatcacacccctgcgcagggccacagtggaatgtgtgaaagatcaggctaaagaacgtgccaatggaatggagcttgatgggcg

SEQ ID NO: 761898 - DNA, 100 bp, Homo sapiens
ccaagatgatgtgcggggcgccctccgccacgcagccggccaccgccgagacccagcacatcgccgaccaggtctagtgacggagcccgcgcgcggcgcc

SEQ ID NO: 761899 - DNA, 100 bp, Homo sapiens
gcaagtggagccagacggccttccccaagcagtaccccctgttccgcccccctgcgcagtggtcttcgctgctgggtctgagcaaataaggtgtataaaa

SEQ ID NO: 761900 - DNA, 100 bp, Homo sapiens
ggagatggccattgacatcatcccaccttacatgatcgcagccaaggcttgcgaggatccctggaacgcctccagctgggatacgtggacattgtctttg

SEQ ID NO: 761901 - DNA, 106 bp, Homo sapiens
cttcaccgccccacactggcggatgaagcagctggtggggctctactgcgacaagacaatgcagatcttcgtgaagactctgactggtaagaccatcaccctcgag

SEQ ID NO: 761902 - DNA, 100 bp, Homo sapiens
aatgtgtacagccccagtctttgcaatttatcatcgatgcgtttaagggacagtatatcaagctgtcttccattaaagtggacacgcggtacaccaccac

SEQ ID NO: 761903 - DNA, 100 bp, Homo sapiens
ggtctccctgagtctttgaggacacagcctcgctggaggcagtttctgggaccctccattttccatatccaggaaaatgtgatgcgccacaggtatcagc

SEQ ID NO: 761904 - DNA, 50 bp, Homo sapiens
tggcttcggcttcatccgcttgagaaccatggagtctggcagtaccgccg

SEQ ID NO: 761905 - DNA, 100 bp, Homo sapiens
cctcagctgcggctgctgctggaagtcacctatgaagccatcgtggacggaggcctagttccccgagagcgttcagacagtgggggctcaagctcagagc

SEQ ID NO: 761906 - DNA, 90 bp, Homo sapiens
cgacgatgaggtgacagtcacggacctcagcagccatgtcgaagccccatagtgaagccgggactgccttcattcagacccagcagctgc

SEQ ID NO: 761907 - DNA, 98 bp, Homo sapiens
ggaactgaaggattccatgggggacctctattccttctcagctctcatgaaagccctggaaatgccacagattgcttccaagtatgatcatcaggcag

SEQ ID NO: 761908 - DNA, 50 bp, Homo sapiens
cgacgtcttgaagacttccgagtagatctgcagagaacaagtttgccaag

SEQ ID NO: 761909 - DNA, 100 bp, Homo sapiens
acgataccgaagcgggctgtgtgccccttctccacccagaggaggaggaagccaagaatctggtgagcgaagccatcgcagctggcatcttcaacgacct

SEQ ID NO: 761910 - DNA, 98 bp, Homo sapiens
gggtagaggcgggcggcgcgcggcggcggcgctcggcgatggtaggcgtccctggagcggccgccttccagcgtgttcatgaagtctgtgaagctgga

SEQ ID NO: 761911 - DNA, 75 bp, Homo sapiens
gcaagttcatgtgtctggacccagtgctttgccaaagatcattaaggctgggtttgcagcactccaactagaata

SEQ ID NO: 761912 - DNA, 95 bp, Homo sapiens
cgaattcagaaggatatcgacgtcgtgatccagaagtccagagctgaggactgcctgtttgcagccaactgggtacatggaaaactcagtctcct

SEQ ID NO: 761913 - DNA, 87 bp, Homo sapiens
attcgattctttggcagttggtgaaaattactgatggctctccttccaaaagcaggaaagtccaatccaaccttttatctccagaag

SEQ ID NO: 761914 - DNA, 98 bp, Homo sapiens
gggagccccggcgggccgcgcctggtgatcggctccttaccagctcacctctcaccgcgcatgtttggagggtcagtatagaccttctgatttgctgt

SEQ ID NO: 761915 - DNA, 75 bp, Homo sapiens
ttttgaggaaaaactacagtttgccttgccaggtagaagaatcagacttgtgcaccatggacaattttgctgagg

SEQ ID NO: 761916 - DNA, 98 bp, Homo sapiens
ggaagatcctggaggtggatctgaagaacgggtactgaacgacacctgggtctccttcccttcctggtctgaggactccacgttcgtcagctccaaga

SEQ ID NO: 761917 - DNA, 83 bp, Homo sapiens
tggagctgttcctcgcgggccgccgggtgctggtcaccggggcaggcaaagagcagcaagatgggcatggaggcggtgatggc

SEQ ID NO: 761918 - DNA, 74 bp, Homo sapiens
agccaatgaagatgaagacataggagcgaaaactagaagctgaacttcttcaaatagaggaacgacaccaggag

SEQ ID NO: 761919 - DNA, 100 bp, Homo sapiens
caaagaaaatcattgactctgagattaaagagtctattgttggggaaatcagacgggaaattgtaagtggacttttggcagcagtatcttcaagtaaagc

SEQ ID NO: 761920 - DNA, 75 bp, Homo sapiens
gccagctccacgctaaggagggtgctggagtgagtcccccacttatcactcaggaatcagagatcattgatttct

SEQ ID NO: 761921 - DNA, 74 bp, Homo sapiens
gaacatttgtagcattgatttcccggatctggtaacatggcaaaagatctcattgctatggacagtgctatcac

SEQ ID NO: 761922 - DNA, 83 bp, Homo sapiens
aagaagaggagcaggccgggacgcccaccgatatatttttgccatcatggatcagtttggagatatattagaaggtgaagtgg

SEQ ID NO: 761923 - DNA, 75 bp, Homo sapiens
actcaaccaagtggccatctctcaggaacttgacagtccccgagacctcatggtgacagcctcctcggagacctc

SEQ ID NO: 761924 - DNA, 101 bp, Homo sapiens
gaagcgacgccccggggcgggggcgatggcggcggcggcggccggagcttctctcagccgagattatggagaagtctggcgaggaaggaatgcctgatctt

SEQ ID NO: 761925 - DNA, 75 bp, Homo sapiens
atatcgacgtcgtgatccagaagtccagagctgaggactgcctgtttgcagatttggagcaagaggtggtggtgg

SEQ ID NO: 761926 - DNA, 83 bp, Homo sapiens
ctgggactcgtacgagaacctcagtgcagatggagaagagatgccctgtatccaagcccaatatgggacaccagcaccgagtc

SEQ ID NO: 761927 - DNA, 100 bp, Homo sapiens
ggaccacatcaaagacagctttcacagtttgcgggactcagtcccatcactccaaggagagaaggtctataatgacggatctatactacctcagtcagac

SEQ ID NO: 761928 - DNA, 50 bp, Homo sapiens
caggaacaatattgatgatgtagtaagggcggtggccagtttgaatactc

SEQ ID NO: 761929 - DNA, 98 bp, Homo sapiens
ctacatcgagatcccgggcggcgcgctgcccgaggggagcaaggacaggaatagccaggtctggctgggtcggcacaacctgtttgagcctgaagaca

SEQ ID NO: 761930 - DNA, 100 bp, Homo sapiens
gcaccctttttgtcagattatcaggatgaggggccgttgctccagggagaactgcaaatatcttcatccacccccacatttaaaaacgcagttggagata

SEQ ID NO: 761931 - DNA, 83 bp, Homo sapiens
ctcagctctcggcgcacggcccagactacaaactcacacatacggtgtcccatttaaaacgtattccagagactttcacagac

SEQ ID NO: 761932 - DNA, 98 bp, Homo sapiens
gcgcagtgagcggccccccatctttgagatccgaatgtatgatgcccagcagcagcaaggttgacacgaatgaacagctgaaaagaatagcccaaatg

SEQ ID NO: 761933 - DNA, 100 bp, Homo sapiens
acagaaggactgggatgatacaccttttccacagggaattgagttggtgaaaggaaagcaagccaggatggatatttacgacactcaaaccttgggggtt

SEQ ID NO: 761934 - DNA, 100 bp, Homo sapiens
aactgcaggagatgcagctgaaggaggccaagcacatcgctgaggattcagaccgcaaatatgaagaggtggcccgccggtggggaaagaggaaaaataa

SEQ ID NO: 761935 - DNA, 100 bp, Homo sapiens
agagtccctggactcctcaacctagggagctactcgcgagtcccctgcagagagctgtgacctgctgggtgacatccagacctgcatcaggaaaagtctg

SEQ ID NO: 761936 - DNA, 100 bp, Homo sapiens
gatcgcccgtcctggtatcacagtgcttctgttcagccactacttccttcattggactgcaaggtatttctgtttggaaaagtaatggagtccagtcaac

SEQ ID NO: 761937 - DNA, 101 bp, Homo sapiens
cgttcggtcctgctgttgcggccgctgccccagggctgcggggacggtaaacactacacgtgaagagtggtgaaagggaacattgattactgaagtgccct

SEQ ID NO: 761938 - DNA, 100 bp, Homo sapiens
tttcagagggctctctgcaggaaggacaccgattatggattggcaacctggaccccaaaattaccgaagttcattgccaaattttaaacaaaacgagttt

SEQ ID NO: 761939 - DNA, 95 bp, Homo sapiens
gtcaagatggaggagtacgcgcgagagccttggccagctgcgggccgtccagcggctgtgccacttctacagcgccgtcatgcccagcgaggccc

SEQ ID NO: 761940 - DNA, 74 bp, Homo sapiens
ttagaggcagaagttaagttctgcaagtggtcaaatgtcgatttccagtagtcgaaaatggaaaacagatatca

SEQ ID NO: 761941 - DNA, 74 bp, Homo sapiens
tccttattgcagtggctggactgcttcttggacacttaatgattgttggcaagaaatgtgctgctgatctgggc

SEQ ID NO: 761942 - DNA, 131 bp, Homo sapiens
gtacatagattttggtggaaagtttcattgtgtatgtagaagaccagaagtggatggagagacttaaagagagatctacttcagagccagcagtcccgccagaagaggctgagccacacactgagcccgag

SEQ ID NO: 761943 - DNA, 98 bp, Homo sapiens
atggaagcctcctatgattgacaatcccagttaccagaacctgtcccgggggctggtgaacgtggccgccaagctgacccacaataaagatgtcagag

SEQ ID NO: 761944 - DNA, 100 bp, Homo sapiens
cgagtttctcctcgccttactcactctctcgggattattgccgattgccagggtgctgaccgtgggagccgaccgaggcatgtggagaccccaaggcaaa

SEQ ID NO: 761945 - DNA, 88 bp, Homo sapiens
cccgcagccccccaacatcctgctcctgctcatggacgacggtgtcttttatgaataatcaaaagcagcaaaagccaacgctatcagg

SEQ ID NO: 761946 - DNA, 96 bp, Homo sapiens
ggcgctgcctgtggagatccgcggaggccgacaggattcgttggctgccgtccccgctgctgtgcattgggacatgacaccagtggcatatcacgg

SEQ ID NO: 761947 - DNA, 97 bp, Homo sapiens
caacatggagcctcttgcagcttacccgctaaaatgttccgggcccagagcaaaggggtcctcaagattcgagatggcagcaaggaacccaggtcga

SEQ ID NO: 761948 - DNA, 74 bp, Homo sapiens
tagtcacaggagctgtagagaggaccccggtacatctgaaagccgggaaatgagcaagtgcaccggcacctgga

SEQ ID NO: 761949 - DNA, 83 bp, Homo sapiens
gcagaggacaggccgggagttttccgggaacggaggaagagcagtggagggtgtttgagaagtcccccctgcgggtgaagaac

SEQ ID NO: 761950 - DNA, 50 bp, Homo sapiens
aacagctcctaccttggacgggagccacatgaaatgaagatcacctctgc

SEQ ID NO: 761951 - DNA, 75 bp, Homo sapiens
ttctggaaggaggcaacaccaccatccagtcaggtcaattcagtgaagatatgatacccacagtgggcttcaaca

SEQ ID NO: 761952 - DNA, 82 bp, Homo sapiens
catgttcacactgggtgaaggaagctgaaaccacagacatgactgagtcctccatgaagaaccccccacccaacctgcctta

SEQ ID NO: 761953 - DNA, 87 bp, Homo sapiens
aagcgatctgctggcctcggcctctcaagcgagtgctaacattcagggatgtggctgtagaattctccccagaagagtgggaatgcc

SEQ ID NO: 761954 - DNA, 87 bp, Homo sapiens
tccccggatccagcttcctggacttgggggatctgaacgagtcggacttcctcaacaatgcgatgggtctgtgaagaaatcccggat

SEQ ID NO: 761955 - DNA, 82 bp, Homo sapiens
tcaccaacctcaaggacacctcctccaaggtcatccagtccgtcgctaagtttggtgcacctcgatttggaggaagtagggc

SEQ ID NO: 761956 - DNA, 83 bp, Homo sapiens
ggtgaacaggtgaccataactctgccaaatatagaactttggggccatttggatcacacgatgttttttcaagattttagacc

SEQ ID NO: 761957 - DNA, 100 bp, Homo sapiens
gtcatctttgcgaagattcagctggaacatcacatctcccctggggactttcctgattgccagaaaatgcagttaattggccttggtcctcacagctcca

SEQ ID NO: 761958 - DNA, 100 bp, Homo sapiens
cgcccgtggccgctgccgcctccgccccaggcatcccgggcccaaatcctagacaaagccacagaatatatccagtatatgcgaaggaaaaaccacacac

SEQ ID NO: 761959 - DNA, 100 bp, Homo sapiens
tggatgtagccgactcattattgcgataattgtatggaagagatacagtgattttaagaaactacacaaagaactatggcaaattcacaaaaacttattc

SEQ ID NO: 761960 - DNA, 109 bp, Homo sapiens
tgcagatcgggagcgcaaggtcgccctcaaggccatgatcaaaacgttgcttatggaaccacagagaacagtcccgtgacattcgcgcacttccctgaggacactgtgg

SEQ ID NO: 761961 - DNA, 74 bp, Homo sapiens
cgacctcgacgtcttgcctgtgtcccacttgttcgcggcctataggtatgcaaccactcatgtattcggttcag

SEQ ID NO: 761962 - DNA, 99 bp, Homo sapiens
cggagcgcaggcctcgtgccgttacggccatcacggcggccgcagtggcgtcctggagccctcctcagacgaagttatacggaagcgtctcctcattga

SEQ ID NO: 761963 - DNA, 90 bp, Homo sapiens
tggctcagatgctgcatcggctcctgggtcacatcaagaacgtgcctgtgaattcacataaaagggcatcagaaaaatacaaagacaacc

SEQ ID NO: 761964 - DNA, 83 bp, Homo sapiens
ctccttcagcctcctggcgcccatccgcagcaaggacgtccgcagcagacaatgcagatcttcgtgaagactctgactggtaa

SEQ ID NO: 761965 - DNA, 75 bp, Homo sapiens
gaaaaaaacccttcactgtgaagagacatgagatgattgccaaatccccagttccaaaagctgagacaagatctt

SEQ ID NO: 761966 - DNA, 51 bp, Homo sapiens
ctgtactatgtcgattcgacagcaaaagtactttgactcaggagactacaa

SEQ ID NO: 761967 - DNA, 75 bp, Homo sapiens
ctcgggccggcggacagtgagggcgcgatgcacaagtctggcgttctgaggaaggccattgattacatcaaatac

SEQ ID NO: 761968 - DNA, 75 bp, Homo sapiens
ctgtccatcgtgtgcctgatgatcacgcagctggctggcttcagtggaccaggactgtgagagtgtctgcttcat

SEQ ID NO: 761969 - DNA, 100 bp, Homo sapiens
cattgacatgtcctctttcacaaagtttgagataacaaccatagaggttgtgaagctgaggatactctactccaacatggccaacatggtactgatgggt

SEQ ID NO: 761970 - DNA, 75 bp, Homo sapiens
cacacacaggtgaatttaaaggagcagccctggtgtcacctatcagtaaaagccctggaagaaagcgggactttt

SEQ ID NO: 761971 - DNA, 97 bp, Homo sapiens
tttcaaaaattttagaaaatggacctgctgacagagcagatggcctggagattcatgacaaaatcatggaggaagatttcgatgtcgatcattttgt

SEQ ID NO: 761972 - DNA, 95 bp, Homo sapiens
tccaaatcttctcctgtcagtaagtaaagtttgtgtattgccaagtctgttgtgagcccttccacaagttttgtttagaggagaacgagcgccct

SEQ ID NO: 761973 - DNA, 50 bp, Homo sapiens
agccagtgtagccccagtatttactgtgtgcctccggagccagcgtggtg

SEQ ID NO: 761974 - DNA, 100 bp, Homo sapiens
agtgttttggttttgatatggattatacccttgctgggaaatcctcattgacgattcaatttgttgaaggccaatttgtggactcctacgatccaaccat

SEQ ID NO: 761975 - DNA, 100 bp, Homo sapiens
aggaggtgacacggctgaaggaccttcttcgtgctcagggcctgggagatattattgatagtgtcatggagaaactccagctgggcccagagattctgca

SEQ ID NO: 761976 - DNA, 74 bp, Homo sapiens
gctgcaacacgaggctgccgttcagcacccgtcgagcgggaacgcccttttgcttgtgactggcagggctgcga

SEQ ID NO: 761977 - DNA, 83 bp, Homo sapiens
ccacatgcagctggccaaacaactggctggaatattgcaggtgcctttagagctggaggaaagcaggaatgttcagaggcaaa

SEQ ID NO: 761978 - DNA, 75 bp, Homo sapiens
caatgtgactgtccactacatttcactggccgcttctgtgaaaaagaccaaatacacgctgatcgatgagcagga

SEQ ID NO: 761979 - DNA, 101 bp, Homo sapiens
gtcctgttccaccttcagagcgtcacggcgtacgccctcatggggaaaatctccccggtgactttcaggtcagaaagcaacattgaatgcagaagaaatgg

SEQ ID NO: 761980 - DNA, 100 bp, Homo sapiens
gtgaagaagtgcttcaagtgttgctgcaaggagaaaaacatggagtcttctgtctgctgttgaattgaccaaagcaatggtgatggagaagcctagtccc

SEQ ID NO: 761981 - DNA, 97 bp, Homo sapiens
aatccaattcactgtcaagaaaactcagcaagtttggatccatacgttataagcaccgctacagttccaaagaactactggttcagattttagctct

SEQ ID NO: 761982 - DNA, 107 bp, Homo sapiens
gttggagattgagttcaaggagacccaagcactagtattggcccccaccagagaactggctcaacaggagtttgggctttgcaaaactgagaacaaagccaagtcgg

SEQ ID NO: 761983 - DNA, 100 bp, Homo sapiens
tagaagggcttcagaaggaactgatgaacttggacttccatgagaagccaggagtggtggctcacacctgtaatcccagctctgggaggccaaggccagt

SEQ ID NO: 761984 - DNA, 100 bp, Homo sapiens
ggaaagagccggtgaaggggcagaacaggcagtctctggatggtcgtcagatccgtgtggatcatgcaggcaagtctgctcggggaaccagaggaggtgg

SEQ ID NO: 761985 - DNA, 75 bp, Homo sapiens
tggagagcaaggagaaggatcgccaggtgctggaggacttcccaacgctggaggaaagcaggaatgttcagaggc

SEQ ID NO: 761986 - DNA, 82 bp, Homo sapiens
cgacaagccgctggcagccgcggatctcaccgccgctcaggctctaagcgaaagacatgaggcctcagcctgaaatgaggtt

SEQ ID NO: 761987 - DNA, 98 bp, Homo sapiens
cagactcttcaaaacgcactcattcagtttgctactagtttgccaaggcacgagtaacaagctcacgcagttgggcacttttgaagatcattttctca

SEQ ID NO: 761988 - DNA, 101 bp, Homo sapiens
aatagcagaagaataccatgaggtcaaaaaggaaatcaccctgcttgagcaaaggaaatttatgtgatcagtttggctgaaccccgtctgcccctgcagct

SEQ ID NO: 761989 - DNA, 83 bp, Homo sapiens
tcaaagaggaacaaagtcatcaagctagtggacatcacggacatccagaagcgggctgacgcacgaggcacacaggaaggagg

SEQ ID NO: 761990 - DNA, 74 bp, Homo sapiens
gctccttcccaaggaagtgctccagaagcatcagaagagctaacaattgctggaatgacctttacaacttttga

SEQ ID NO: 761991 - DNA, 74 bp, Homo sapiens
gctatagtcattatcaccacatcccctggcatccaattccctgtacctgggtgtggtgctatcagccgttgtaa

SEQ ID NO: 761992 - DNA, 123 bp, Homo sapiens
tgcgtgggcgtggcgggccgcgcgcgggtctccgtggaagtccgtttcgtgagcagcgccaagcgaggatgccatgaggaaagctggtgtggcacacagtaaatccagcaaggatatggagag

SEQ ID NO: 761993 - DNA, 98 bp, Homo sapiens
tgcctgttactcctggtgttggtggactgtttggtgctgcagctgcaccgggttggggagcagctggagaaaatgaatgggcagcgcatggatgagct

SEQ ID NO: 761994 - DNA, 142 bp, Homo sapiens
ctggaggcaaagctggaaaggacagtgggaaggccaaggctaaggcagtatctcgctcacagagagctgggctacaggttcaaaccttgtactactcagctgatcacaagctgcttgatgggaacctactagatggacaggc

SEQ ID NO: 761995 - DNA, 101 bp, Homo sapiens
gtcgggccgcagccgccggcaatgccgcgaaggaaggtttcatatacactggagaagtcgtacatcgaatgctaacagccacacagtacatagcaccttta

SEQ ID NO: 761996 - DNA, 100 bp, Homo sapiens
ctgttaccggctcaggaaaagccggccacgcagtggagctggtacatacactacctcttctttgagcacaaaatctacaaccacatcggaccctccaaat

SEQ ID NO: 761997 - DNA, 83 bp, Homo sapiens
gggccagggaaccctggtcaccgtctcctcagatcttcgtgaagactctgactggtaagaccatcaccctcgaggttgagccc

SEQ ID NO: 761998 - DNA, 83 bp, Homo sapiens
cctactccataaagacttcaaacaatgcagatcttcgtgaagactctgactggtaagaccatcaccctcgaggttgagcccag

SEQ ID NO: 761999 - DNA, 82 bp, Homo sapiens
ccgcatctggctggagccctgcattcgcggcgtgtgcaggtgtggacactgccagcggctgcagccgacttggaatgacctg

SEQ ID NO: 762000 - DNA, 90 bp, Homo sapiens
cagattcgcagtggtcgcttcttctccttgcaccgacgagagtgctggggaataaaaaggggatcttcactcggcagagacaaccaaaaa

SEQ ID NO: 762001 - DNA, 100 bp, Homo sapiens
ggtgcgggcccggcgccgcaccagcagaacgagcttctttgaagggcagtctgcaccatgggactcggctaagaaagatgagaacagaatgaagaacaga

SEQ ID NO: 762002 - DNA, 100 bp, Homo sapiens
tcatatttaaggaactgggctcatccacaaatgccttgagacagctacaaggatttccattttatggtaaaccaatgttgttgaagtccgaagaggattc

SEQ ID NO: 762003 - DNA, 100 bp, Homo sapiens
ccgggatcctggagcactcggtcatgtacccggtggactcggtgaaggtctcctctgagcctccggcctccataagacccaaaacagatgacacctcttc

SEQ ID NO: 762004 - DNA, 90 bp, Homo sapiens
ccatgcagcaaaagaaggagggtcctctcagtgattaagatagggccagatttgagtgtgtgaatttttgagtgaaacctggaacccaaa

SEQ ID NO: 762005 - DNA, 100 bp, Homo sapiens
aaagcaaatgagacaagtcaagaatccttttggcttagagatcactaatccatcttcagcttcaattacaagccagaaatgtacacacaggagagctggc

SEQ ID NO: 762006 - DNA, 80 bp, Homo sapiens
tcctccgaaaccggtttgcaagtccttgtagaggctcttgtcaggatggtgaagctgttcatcggaaacctgccccggga

SEQ ID NO: 762007 - DNA, 83 bp, Homo sapiens
ggagccgggggaagctggccttggggagctagagttaatgccaaagacagcaaatggttgacacctttacacagagcagttgc

SEQ ID NO: 762008 - DNA, 75 bp, Homo sapiens
cttcttcgagtatttgtagaaggaatatggttgagccccttatacccacgaattgctgatggaacccacaaatct

SEQ ID NO: 762009 - DNA, 100 bp, Homo sapiens
ctctgcgcggctttttgagcggtcccgcatcaaggctctggcaggtatggcatttcaaatatagatacaaccattgaaggaacgtcagatgacctgactg

SEQ ID NO: 762010 - DNA, 90 bp, Homo sapiens
gccagcagcacagcaagctctacagatgagtggctctttggcatttggtgctgtggcagctgtttgcagacaaggtcccaaagacagcag

SEQ ID NO: 762011 - DNA, 75 bp, Homo sapiens
gcagaagctctatgacctggatcagattctctcgggcctagccgtccttggaacccgatattcgggctgggcggt

SEQ ID NO: 762012 - DNA, 98 bp, Homo sapiens
ataatctgtcatcagaagaaattcaacagagagctcaccagattactgatgaggtgccagcgagatttcagattcctgtaaacctctaaagaaaagga

SEQ ID NO: 762013 - DNA, 74 bp, Homo sapiens
ccttgcaaatttacatacgagaatggcttgtgaaatcatgcctctgcaaaggcgccccaagttggagaagaagg

SEQ ID NO: 762014 - DNA, 80 bp, Homo sapiens
tctagtttcaggaaaacaagctcaggtcttccactgattcttcattgtgccttttggccataaccagtctcagcaagaca

SEQ ID NO: 762015 - DNA, 87 bp, Homo sapiens
ccgcagcagatcagggaccggctgctgcaggccatcgacccccagagcaacgtgctggagaatctggtaaaagcaccattgtgaagc

SEQ ID NO: 762016 - DNA, 97 bp, Homo sapiens
ggccacaattgtgacaattgtgttgctccatatgctgctttctgtgggctgcttggtgaaaggtgtagcagtcactcggcctacacccacagcatcg

SEQ ID NO: 762017 - DNA, 82 bp, Homo sapiens
ggagcctctgccttgtacagttcccatcacgttgtttgcattcgctccacttggaatgctctctctccaaagctgagttgtg

SEQ ID NO: 762018 - DNA, 100 bp, Homo sapiens
cagttgcacatttcctgcaaggactccaaagtggtgaggcactggtgaggtggattgatgatgaatcttctggcacacctggagcaactccagaacacag

SEQ ID NO: 762019 - DNA, 100 bp, Homo sapiens
ctcgactttggagaaaccaccgtgctggaccgcttttacaatgcaggatgtgatcttcgtggtggaaagctaaattttaaaaccaccccaatggatgcag

SEQ ID NO: 762020 - DNA, 90 bp, Homo sapiens
gcaggagcagcgtcttctgcgcatgttgactgtgaagtgctgaccacactcaccccagacactggccgtatcctgtccaagctacatact

SEQ ID NO: 762021 - DNA, 87 bp, Homo sapiens
gccaccgtttctgcgatacctgcctgcaggagttcctcaggtgtactattgactggaagaaaggaaagaatgttactgtcaaaacca

SEQ ID NO: 762022 - DNA, 103 bp, Homo sapiens
ctggagcctcagttggaagcagccgatccagcctgcggagcctgtggggcagaattaaatgtgagggagtctgacgtaagagtttgtgatgagtcatcatgta

SEQ ID NO: 762023 - DNA, 100 bp, Homo sapiens
cgcgcagatacccgcggtgcaccgcctgctgggagcgccgctcaagtgtcctcggggagtctcaagcagcccggaggagactgacggtccctgggaccct

SEQ ID NO: 762024 - DNA, 97 bp, Homo sapiens
gggaggatgtcgggacaccccggaagctgggaaatgatgcctgtgaggagccaccaacatttgaagctatggagctcattggtaaaccaaaacccta

SEQ ID NO: 762025 - DNA, 102 bp, Homo sapiens
ccacgagatcatggggcccaagaaaaagcacctggactaagtctctattatctgggggaatgtatcagaatttgtgagacggcagttaaccctgcacaaggt

SEQ ID NO: 762026 - DNA, 80 bp, Homo sapiens
actaatttatgaatatgaaagaaagaaacatgaagagctttctataaatagcaatccagatctattaatgagatgaagcg

SEQ ID NO: 762027 - DNA, 96 bp, Homo sapiens
caaaatcaaggatgtggatgagaaagcagacatcgcactcatcaaaattgaccaccagccttacggacatccaaaaattgcttggaactgacttca

SEQ ID NO: 762028 - DNA, 75 bp, Homo sapiens
agactcaaaagaccttcacgcttctggagctggactggccattatggaggaggagctgcagcattcccattgtgt

SEQ ID NO: 762029 - DNA, 73 bp, Homo sapiens
caaccagacagggcagcacgccgtcattgacatcaatgccttcccaggtgagcacctgcggatctgtccccag

SEQ ID NO: 762030 - DNA, 75 bp, Homo sapiens
ccaccgtaaaggctggctgtcgctgcacacaggtcttcgatgccaagaacatgatggctgcctgtgacccccgcc

SEQ ID NO: 762031 - DNA, 82 bp, Homo sapiens
gatttctgcccctccaagcttcctttccaggggcgtgatggtgggcatgggtcagaaggattcctatgtgggcgacgaggcc

SEQ ID NO: 762032 - DNA, 97 bp, Homo sapiens
gccacatccaggactccttccacagaggatttctggtaggtcctactttaggacaagatgtggtaccgttgaagcgtcagtctttgattcacagaca

SEQ ID NO: 762033 - DNA, 83 bp, Homo sapiens
aaagtcatgggacccggggtttcctacttggttcggaggccacggagcgccggttctcagggcttctggacccgctgctgccc

SEQ ID NO: 762034 - DNA, 82 bp, Homo sapiens
agctgtcccaggacatggacacctgtgaggccagcaccaggagctgctgctgaaacagctggctgagggacgacaggctcag

SEQ ID NO: 762035 - DNA, 100 bp, Homo sapiens
tctccatacccgtgacctggggatcgctacggaccttaaaatacccgcaacagccccttcgtcccaaatgccataagttctgctaacccgagggtcatcg

SEQ ID NO: 762036 - DNA, 75 bp, Homo sapiens
tccagaaggagctttccgggccagctttgaggataagctgctgatgagcggagtgggaatagctttgcgaaaaat

SEQ ID NO: 762037 - DNA, 100 bp, Homo sapiens
ctgctactatgacaaatccaagtcgttcttcgacaacatctcttctgaactcaagaccagggcaactccaacaacattgccaccgtggacatctccgcag

SEQ ID NO: 762038 - DNA, 90 bp, Homo sapiens
gattggaccagcttgtgatctccgctttcgaagcattgtacagtgtggacatttcatatatatggatttcacagctacactcgatccacg

SEQ ID NO: 762039 - DNA, 100 bp, Homo sapiens
gaagcaacttctgtctgtcagtgtgaaaagggttatttccgagctgaaaaagacccaccttctatggcatgtaccacatcaaacacttggcttgttccag

SEQ ID NO: 762040 - DNA, 83 bp, Homo sapiens
ccaccgtgcaggtcgtcatcttcataggctcgctgctcgtgcctccggagccagcgtggtggccatagacaacaagatcgaac

SEQ ID NO: 762041 - DNA, 101 bp, Homo sapiens
atttggagttcttacaacatggcagacattgacaatgtggcaaagcgctccctggcctttcaaagcaagaggactgctgtggaactgtgggtacctcctgg

SEQ ID NO: 762042 - DNA, 74 bp, Homo sapiens
tgggccgggtgttgcgcctggcctacagcgaggctggtactctgtggatatccccttggacaaaactgtcgtca

SEQ ID NO: 762043 - DNA, 50 bp, Homo sapiens
agtcttcggagcgaccccggcagacaggggcaagtgtccgagtggtgaat

SEQ ID NO: 762044 - DNA, 90 bp, Homo sapiens
gaagaacccatcgggcagctacacatcttgaaagagaagctcttcctgtgagctctgtatgaaaaagctgatatcaaggggcctgaagac

SEQ ID NO: 762045 - DNA, 75 bp, Homo sapiens
ttattgtaatgtttcttccagaaaagaaaggtgctgggcgtcctcttctttgccatagcctgcttcttatacaag

SEQ ID NO: 762046 - DNA, 97 bp, Homo sapiens
gagagagcgagctgagtggttgtgtggtcgcgtctcggaaaccggtagcgcttgcagcatggtgtggtcactcacctgtctaccactcccgtgaaat

SEQ ID NO: 762047 - DNA, 89 bp, Homo sapiens
ggccactccagtcggtgttgagcacggcgagcagtctcaggcctttagtgatgatggtaagaatgattgatgttggctgatattggagt

SEQ ID NO: 762048 - DNA, 75 bp, Homo sapiens
ttggcgagtagtagcgaggagacgaaggaggtggaagaattcagttttatcacccagctgtccggcctgacggac

SEQ ID NO: 762049 - DNA, 100 bp, Homo sapiens
cttcaggtgaggatgaactgagctttcacactggagatgttttgaagggccgttgctccagggagaactgcaaatatcttcatccacccccacatttaaa

SEQ ID NO: 762050 - DNA, 100 bp, Homo sapiens
gaagaataatgggaggagacaggacctttttcaacttgacaaatagccgtggatacagaaatctctgcaggcaagttgctccagagcatattgcaggaca

SEQ ID NO: 762051 - DNA, 74 bp, Homo sapiens
aggaccagcgggcgggggcccacgacttccccgggcgctgcctggacaggcctgcctgcgtgctgggacatgtc

SEQ ID NO: 762052 - DNA, 100 bp, Homo sapiens
ccccgtgtcctgcaggtattgggagatccacagctaagacaccgggacctcctggaagccaaaaatggactgtgtgcagctgaatcagtataccctgaag

SEQ ID NO: 762053 - DNA, 106 bp, Homo sapiens
gttaaggattccaagtaactcttatttgatgaggtttatataactttccaagacaaggaagttgtgcaaagcctcacagctactaagaggctgggctgggactcag

SEQ ID NO: 762054 - DNA, 75 bp, Homo sapiens
tggagatgggcagacggattcatttagagctgcggaacaggacgccctctgattgctgctcacggccgtgaactg

SEQ ID NO: 762055 - DNA, 82 bp, Homo sapiens
gactcatacgcaacctcaatgtacctggagtagaacagaaaaattattatgtctgtgttcccttgggactcattggaaattg

SEQ ID NO: 762056 - DNA, 98 bp, Homo sapiens
tgcagcagttctgtgaggcagcctagtttgcatatgagtgctgctgcagcttcccgagacatcaccttggagggagctctgacagcctttcgcaagac

SEQ ID NO: 762057 - DNA, 98 bp, Homo sapiens
cgaattcagaaggatatcgacgtcgtgatccagaagtccagagctgaggactgcctgtttgcaggctcatcagattcaagagatgtttccccaggttc

SEQ ID NO: 762058 - DNA, 75 bp, Homo sapiens
ggctctggaacaacacggtgttcatcttttctacagatcaaatttttggctctcatctgcacaaagtgtgtgaac

SEQ ID NO: 762059 - DNA, 75 bp, Homo sapiens
actgatttgcaacccttccgggaagccatagctctgcatggctggactctgtgaagctgagcaggagcagatgcg

SEQ ID NO: 762060 - DNA, 100 bp, Homo sapiens
aaaaattaaagaagatgatgctccaagaacaatagcttgccctcataaaggaagtcgagacaacatgagtgtgattttgatctgttttccaaatgcaccc

SEQ ID NO: 762061 - DNA, 75 bp, Homo sapiens
cccgtttctggctccgggctgagcttcctggagaagaggaaggctgtcccactgcaaactccctgacgcggtctg

SEQ ID NO: 762062 - DNA, 83 bp, Homo sapiens
cagctagagaccatacagacctaccggtctgtcagtgagatggcttctaacaagggcctctgaaaaatggaaccaaattctct

SEQ ID NO: 762063 - DNA, 90 bp, Homo sapiens
agagctcgccccgaacgggggtcttcctcctccgccgttgacaggatgaagtcattgctgtttccgaaaaggtgattgtgaagcttgaag

SEQ ID NO: 762064 - DNA, 100 bp, Homo sapiens
ctctctatagaaggttctttgttcctgaagatgggtctccggcacagaaaactgaatctgtagataacgagggagaatgaattgtcatgaaaaattgggg

SEQ ID NO: 762065 - DNA, 82 bp, Homo sapiens
ccggagagtacatccccaccgtcaagagtgagccatggagctacgtgtggggaacaagtaccgcctgggacggaagatcggg

SEQ ID NO: 762066 - DNA, 100 bp, Homo sapiens
aaaacattgcggcaacaccatggctgggtagttcgaggggtttttgcgctttcatagtaaccgtccaagcaaaaggttttgtatttttaagaagcattca

SEQ ID NO: 762067 - DNA, 105 bp, Homo sapiens
cggaattgggaagtgctcagaagcttacaaagctgcctcgagcagaagaatcccagacttcttagagaacccagtgactttttgcaccttaaatctgtgaaatcc

SEQ ID NO: 762068 - DNA, 50 bp, Homo sapiens
ggacaagcgaggaagtttctttaagatggactcaccctgtcacccaggtt

SEQ ID NO: 762069 - DNA, 98 bp, Homo sapiens
tactggctggatacctctgaggcctgcgcgaggtactgcaagcatctggccctgtctcagccattcagcttcacccagcaggacatgcccaaacttcg

SEQ ID NO: 762070 - DNA, 82 bp, Homo sapiens
ctaaaaataacaagaatgggaggagaagggctgacgttcctcagggagtgattcgagtgcaagctccccatctttcgaaagt

SEQ ID NO: 762071 - DNA, 87 bp, Homo sapiens
gcgacgccggcgccgagggacaccgcagtatgaggcagaggttgtctgcattcaaaagagcattctattaaagctaccttaatttgg

SEQ ID NO: 762072 - DNA, 90 bp, Homo sapiens
cacacctacggcggatcggaaggttcaggcacgtgtggttctcaaatataggcattctgatgggaacttgtgtgttaaagtaacagatga

SEQ ID NO: 762073 - DNA, 100 bp, Homo sapiens
cctcttccaccccgagtgggtggtcaaggagtcgggcatcctggtgctgggcgccattgctgagggtggtcgtcggttttctgagggtacttcagctgac

SEQ ID NO: 762074 - DNA, 80 bp, Homo sapiens
caaagatcttgtctcgctggcctgcgacccagccagccagcaacctggaccgcctggtgcctgctgaagccagtcctgga

SEQ ID NO: 762075 - DNA, 75 bp, Homo sapiens
tgcaatgaacatgggccacactgccaagcaggctttatcctgtggataaacgcagagtgaacgagtttggggagt

SEQ ID NO: 762076 - DNA, 75 bp, Homo sapiens
gttaatgtttacggcgaagtctactcaacgtttccaagtgagaagcgccaccttcaagtgaacgtcaccaaccca

SEQ ID NO: 762077 - DNA, 100 bp, Homo sapiens
gccagagaacagcctcctggaggagaccctacactttgaccatgctgtccggatgggattgatttccagagacttatgttacttgaggaagacaccaaga

SEQ ID NO: 762078 - DNA, 100 bp, Homo sapiens
gcacaaggatgagttcttcttcggcagtggtggtatctccagctgccccccgacagcacccaagaaaacctcatttggctcgctgaaggatgaagaccgg

SEQ ID NO: 762079 - DNA, 101 bp, Homo sapiens
ttttaatctcgtccccaatagtgcaaaagtcatggcaacttctggatgtgcagcaatcagatttatcattcggggggaacttgaacggcagcttttgcaag

SEQ ID NO: 762080 - DNA, 112 bp, Homo sapiens
aggaaaagaggagtcagacacggggcaggctgagttcctcttgctcacagagctctgtaaaggcgtccgacctccgatcatgaacgggcccctgcacccgcggcccctggtg

SEQ ID NO: 762081 - DNA, 100 bp, Homo sapiens
tctgggagaatatttaatggaaaatcgcttggttaaaacctgacacttttaacaggttgggggccgtcccgctcctaaggcaggaagatggtggccgcaa

SEQ ID NO: 762082 - DNA, 82 bp, Homo sapiens
gctagggaagatcgcaccgcggacgcccgctgagcttggcgcacgggccgaccagcccagctcaacattggcaatgtgctcc

SEQ ID NO: 762083 - DNA, 75 bp, Homo sapiens
gaggtaaacagaacaccaggacatcccagagtctgggaaatgggaaatcctcattgacgattcaatttgttgaag

SEQ ID NO: 762084 - DNA, 100 bp, Homo sapiens
ctgctgctctgcctgctccacaagcggcgccgcgccctcggcctgcacgggttgaagctccattcataccaaagtttagaggctctggagataccagcaa

SEQ ID NO: 762085 - DNA, 82 bp, Homo sapiens
acaatctattctgctgattcacaattatggagactgtgaagtacatttgaagaacgcaagtagagggagtgcaggaaacaag

SEQ ID NO: 762086 - DNA, 73 bp, Homo sapiens
cgacattgacaatgatggctttgaagatgggaaactcttgtctagtgatgtgactcattacgtgatcccagac

SEQ ID NO: 762087 - DNA, 75 bp, Homo sapiens
tcgcccgtccccctgccccgttcacaatgtgtgaacccacatccctgcccccagggccacctgcaggacgccgac

SEQ ID NO: 762088 - DNA, 102 bp, Homo sapiens
ctggaggtggacgccatcgtcaacgccgataaggatgacattcggctgctgccgtcagcattgggtgtgaagaagagaaaacgaggacccaagaagcagaag

SEQ ID NO: 762089 - DNA, 101 bp, Homo sapiens
gccctgccccctcctgcgggtcccaactctctctttcccatcgtgcgtcctctggagaagtgcgcgcgtaccacaccaccccagagccaagtgcaccgagg

SEQ ID NO: 762090 - DNA, 76 bp, Homo sapiens
acactcaagctgttgaaaatgagcagctgtcctcatgtctctccagcaggggctggagaggcagagggagacagag

SEQ ID NO: 762091 - DNA, 95 bp, Homo sapiens
gttcttcacaatctcaccccacagacattgggtttgcctatcacagatgaacaaatccaggagatgaaatcaaacctggagaacatcgacttcaa

SEQ ID NO: 762092 - DNA, 82 bp, Homo sapiens
aacttagcgtctttttccgaaacaaccactttagcaccatgactaagcataaggttttggctacgggcctccacctccaccg

SEQ ID NO: 762093 - DNA, 82 bp, Homo sapiens
tttgactcagatgccgaagatgaactttgcgaatgtatttattggtgccaatcccctgggtttctaagcatgaattgaggaa

SEQ ID NO: 762094 - DNA, 75 bp, Homo sapiens
cggaatgtgatcacagagcctatttacccagaagtagtccatatgctgaaccttagccggccgatcgaggagcag

SEQ ID NO: 762095 - DNA, 100 bp, Homo sapiens
tcccaccagagcacggcaagcgcctggagcggctggccatcgaggtccagttccggccgtaccgcacagacgacttcatcacgcgcctgtactatgagac

SEQ ID NO: 762096 - DNA, 90 bp, Homo sapiens
gaaacagcctctgcatcagtttgtacaaagaccacttttcccactacctgcagccttttatcacccagctcagcgacccttccctctatg

SEQ ID NO: 762097 - DNA, 98 bp, Homo sapiens
tttgccaccgtttacaaggccagagataagaacaccaaccaaattgtcgccattaagaaagatgatgcacgccaactctttgtgctagctggagctgc

SEQ ID NO: 762098 - DNA, 98 bp, Homo sapiens
ggcacagcatctgcgaacccactgcccgcccacacagtccctggaagatgcttttactgactctgctatcagtgctaaagtgaatggcgaacacaaag

SEQ ID NO: 762099 - DNA, 101 bp, Homo sapiens
caccttcccctgacctgagtagtcgccatggcacagttacagaatgtctgaaggggacagtgtgggagaatccgtccatgggaaaccttcggtggtgtaca

SEQ ID NO: 762100 - DNA, 82 bp, Homo sapiens
cagaagaaacagttaatcgtgatatcccaccccttacagccatcactggtgcaagctatatttaacggagatcctgatgaag

SEQ ID NO: 762101 - DNA, 98 bp, Homo sapiens
gttggatggcggtgactgcgtggtccttggatgtggctgtgttgcccaagctattctcagtcgaggacgttttggaggggtcatcactatcaatgttg

SEQ ID NO: 762102 - DNA, 96 bp, Homo sapiens
catgaatgccacagttcagtgtattcgttctgtgcctgaactcaaagatgcccttaaaagcatattgagtatcagtgctgatattgaaacaattgg

SEQ ID NO: 762103 - DNA, 101 bp, Homo sapiens
gatgaagaagtcagagtgcgaagtcccacaaggtctccttcagggacttcatctgcagcatcctcaccattaaaaaaagaacagcccttatttactctacg

SEQ ID NO: 762104 - DNA, 75 bp, Homo sapiens
ctgggtcaggagggcctggacaagatcctagaggcctgtcccctcagttcccaggtgccatgaggaagcctcgtc

SEQ ID NO: 762105 - DNA, 75 bp, Homo sapiens
agtgaataaagccaagagagaccttggagtaattcgtcgacagatccctaaagaagtggctgacatctttaacgc

SEQ ID NO: 762106 - DNA, 100 bp, Homo sapiens
atgatggaactctggtggtttcaggaagccggtggcagcaggttccgggatacccgaggtcaaatgctatctgaatggcgtaaaggtgccaggaatcgtc

SEQ ID NO: 762107 - DNA, 100 bp, Homo sapiens
gctatgccctgctgtagtcacaggaggtgtagagaggaccccgggacatctgaaagccaggaaatgcctcttccttggttgtgccactactgagttctcc

SEQ ID NO: 762108 - DNA, 75 bp, Homo sapiens
cttccagagcgtgaagatcaagatcgaagcccccgagcgcccacagcatgaaggaggaggccttcctccggcgcc

SEQ ID NO: 762109 - DNA, 97 bp, Homo sapiens
gcagacaaaaacctttccaagcaagcatgggacaccaagaagggtgacatccagcagctgctctttgtctcggaccaccgggcagcttatgattact

SEQ ID NO: 762110 - DNA, 50 bp, Homo sapiens
ctcaaggccatgatcaaaacgagcccaggtgcggcccggagcccactgaa

SEQ ID NO: 762111 - DNA, 90 bp, Homo sapiens
gtttgatggctgatcttgaaggtttacacttgtcaacttcctcttcagtcatcagtgaaagaccacagcaagattctttcattcgtctcc

SEQ ID NO: 762112 - DNA, 100 bp, Homo sapiens
cgggaggggacctggatcatggctgccgcgccgccgctacgggaccgcctgagctttctacaccggtccctgaagaggaaggagaaggaatatgagcatg

SEQ ID NO: 762113 - DNA, 98 bp, Homo sapiens
gaaggggaaggcgcctgaagaggacgaaggtacaccttgactgtccctggagacagcccctgtgctcgagttggccacagctgttcatatttaccccc

SEQ ID NO: 762114 - DNA, 75 bp, Homo sapiens
agcaagtgtctgcagtgccaaatgtgtgacccagatattgatgatgttaagaagttcaaaccgggttacctggaa

SEQ ID NO: 762115 - DNA, 75 bp, Homo sapiens
ggaacttcctgttctgatagcgtggaagaaatacactttcgggaaatggcctctaaatcctggctgaatttttta

SEQ ID NO: 762116 - DNA, 87 bp, Homo sapiens
aatggatgagctggctgaaatgctgcctcctgttcttacccacctaaggaaagtggagaatgaggacatgaataaagaccagatctt

SEQ ID NO: 762117 - DNA, 50 bp, Homo sapiens
tctgtctctaggaatttcactactctagatggtgatggaatttcctgata

SEQ ID NO: 762118 - DNA, 100 bp, Homo sapiens
cgccccctcccccctccggcgcggaccccgcgtgcgccttgctcgcccgcagccccgagaccgcaggtcttcagaggagcagctgagccgcgcctaccgc

SEQ ID NO: 762119 - DNA, 83 bp, Homo sapiens
caaacatacaagcagtctcacctcaggtaaagccaacaagaacgtgcagtgggacgaggactccgtggagtacatgccagcca

SEQ ID NO: 762120 - DNA, 83 bp, Homo sapiens
aggcaacatcctgtcacaggccatgctctggcaaaaacgattatattccatcacaacaagatattctgcttgccagaagaccc

SEQ ID NO: 762121 - DNA, 75 bp, Homo sapiens
aactccaatgggcctttccagcccgtggtccttctccatattcgaggtcaccgacgatgagggcgcacctgctgt

SEQ ID NO: 762122 - DNA, 100 bp, Homo sapiens
agctccagatggcgtcttccgtgggcaacgtggccgacagcacagagtctcgcattgtctcccgggctggggtgcagtagcgcgatctcagctcactgca

SEQ ID NO: 762123 - DNA, 82 bp, Homo sapiens
agagaccctatggctgtgatgagtgattgattcctaaagactcatgttacgtgaggaagcagctcagaagaggaaaggaaag

SEQ ID NO: 762124 - DNA, 100 bp, Homo sapiens
ggcaacgtgttggaccttccggagcttctcagaagacagagggttttcttttgagaatctccagccaagtcctccgtgctcgtggtgggaatcgtcatcg

SEQ ID NO: 762125 - DNA, 100 bp, Homo sapiens
gcttcttttctccgcgggcgccgaccaggcctggctcgcgcctctcccaggacccgcctggctgcgagatatataacgaaggaggcccaacttcattcaa

SEQ ID NO: 762126 - DNA, 115 bp, Homo sapiens
cttcggccttggtcccagcgccttcccacggagcagcactcttcaccctgcacagccttgttaggtctccacctctgggcaggagagttgccgaccacctcgggggtgctttctc

SEQ ID NO: 762127 - DNA, 75 bp, Homo sapiens
cacgctttgttgcttctaaacctctggaggaggagttctgggaggtgatcagtgatgaacatggcatcgacccca

SEQ ID NO: 762128 - DNA, 96 bp, Homo sapiens
ctgggaggtctggtagggctgagcttgcaagaggatcaacatgcctgtcattgaatctttgggaattattatttataaagcactggactatggttt

SEQ ID NO: 762129 - DNA, 75 bp, Homo sapiens
gcagcccgagtcccagaaggcggcgatcctgggctgcgggcaaggcggagccctctggcacaaatggaagaagaa

SEQ ID NO: 762130 - DNA, 132 bp, Homo sapiens
cgttccccgccaaccgcaaccattgacgccatgtcgggttattcgagtgaccgagaccgcggccgggaccgagggccctggccaacgtcaacattgggagcctcatctgcaatgtaggggccggtggacctg

SEQ ID NO: 762131 - DNA, 100 bp, Homo sapiens
gagcggatctccggaccccccgccagcagcgataggctgaccacagtggccgagaagtcgcgcgtgctgcagctggaggaggagctcaccctgcgccgag

SEQ ID NO: 762132 - DNA, 140 bp, Homo sapiens
caaccttctgtgagcctagggacccatttctcctcctttgacagggacatcagtggagccttctcagacccacaggtcacaatttgggtctgcagcagaaatgctttcagaacagacagcagcgctggggacaggatggg

SEQ ID NO: 762133 - DNA, 100 bp, Homo sapiens
ctattcccagaggcaggtggtgctgaccctgtaacccaaaggaggaaacagctggctaagctcatcattgttactgaagatggcagtgaacgtatactca

SEQ ID NO: 762134 - DNA, 97 bp, Homo sapiens
cattgaggaagaaaaagaagacttgcttcagcatttctcagtaaaccccacagcccagtgtacccatgccctgttgaagatgatctactgctcccac

SEQ ID NO: 762135 - DNA, 90 bp, Homo sapiens
caaaggcatggggctgtccatgggcaccatgatctgtggctgggataagagaggccctgatgaggtttatataactttccaagacaagga

SEQ ID NO: 762136 - DNA, 88 bp, Homo sapiens
gacccccaagccgccgcggacgcaggtcaaaatgcagatcttcgtgaaaacccttaccggcaagaccatcacccttgaggtggagccc

SEQ ID NO: 762137 - DNA, 113 bp, Homo sapiens
tcttgctcccagcagcctccgcggtggatacgtcgccatcttggatccgcgggacaagaaaattcatgcgcgtgagtgcatctccatccacgttggccaggctggtgtccaga

SEQ ID NO: 762138 - DNA, 75 bp, Homo sapiens
aacatcctcctggccaccgactcctacaagctgctgatgcaaggaatcccctgggctcccgtccactccactgct

SEQ ID NO: 762139 - DNA, 100 bp, Homo sapiens
acaggatgctgatagtctccagcgggcctggactgtgggctggtgtgtggaactgaattcagatcaggaaggaggtggaaagaaaaagaagaaaaagaag

SEQ ID NO: 762140 - DNA, 100 bp, Homo sapiens
gaacacaagaagtgctttaagagggatgtgacagatgatgaatcctttgttgatgaactgagaataacattacgtttttttgcatctgtcttaataagaa

SEQ ID NO: 762141 - DNA, 75 bp, Homo sapiens
agcgggagctggacggcgagcgcgagcggcgcgagaaaaggacaagaattttgggcagatttgaatgccatgaac

SEQ ID NO: 762142 - DNA, 100 bp, Homo sapiens
ctggtgcccagccgggaactccccatcgcgttttgccagcgataatacgcctcaggccagctgcgggccgtccagcggctgtgccacttctacagcgccg

SEQ ID NO: 762143 - DNA, 90 bp, Homo sapiens
cttctatagaaatggctgaaggaaaacctccttatgctgatatacatccaatgagggttttgattcccaccatggccatcacccagtttc

SEQ ID NO: 762144 - DNA, 101 bp, Homo sapiens
gctgaagaaagaaggtgggagcggagagcgcaggcgtggtatctcgggggagctttgtgccttgatggatcaagttcatcatatgcagcactcaaaatggc

SEQ ID NO: 762145 - DNA, 83 bp, Homo sapiens
aggcaacatcctgtcacaggccatgctctggcaaaaacgctcttcgactaccggggccgtctgtcgcccgtgccagtgcccag

SEQ ID NO: 762146 - DNA, 82 bp, Homo sapiens
ggccatccgcctcctcatgcggagggacaagaccctgaagatctgtgccaaccactacagagtacgagagggcctccaaagt

SEQ ID NO: 762147 - DNA, 100 bp, Homo sapiens
ggtggagccaccagcctctccctggtgtacgtgaacggagagtgggtgaccaacatcagcgagggaggcagcttcggggagctggcgctcatctacggca

SEQ ID NO: 762148 - DNA, 74 bp, Homo sapiens
ccatgctgctttcatttttgtgatgactatgtacacacagctttatcatcgggaccttgctaagcagtactctg

SEQ ID NO: 762149 - DNA, 100 bp, Homo sapiens
gtggctatggcggttccagcagcagcagtagctatggcagtggcagaagattttaattaggtcctcatgctgataccgccagtggatgccagaatttgca

SEQ ID NO: 762150 - DNA, 100 bp, Homo sapiens
ctccgtggccttagctgtgctcgcgctactctctctttctggcctggaggctatccagctgaacttcgaccacttccagatccttcgggccattgggaag

SEQ ID NO: 762151 - DNA, 100 bp, Homo sapiens
ggaggacagctcatgagacaagcagcgaccgtggcagccatgtattacagctactacatgctaccggacggcacttactgcctggcgccgccccctcccg

SEQ ID NO: 762152 - DNA, 83 bp, Homo sapiens
cgcggattcgccgaggcaccgaggcactcagaggagcttgcgcgatctctggcctcttcaactgcatcaccatccaccctctg

SEQ ID NO: 762153 - DNA, 98 bp, Homo sapiens
agtttagtaataggtgactgccggaaaaaagggaactttgaatattgtcaagaattcaattcgtcataatctgtccctacacagcaagttcattcgtg

SEQ ID NO: 762154 - DNA, 75 bp, Homo sapiens
cggtttctcatcactccaaccagagctggaagtcgagtgtgctactcaactcaggagatttggagacaaactgaa

SEQ ID NO: 762155 - DNA, 82 bp, Homo sapiens
cagacgctgcccgcgggcccggccacggcggagccaaggcaagagcggtgagcggggcgcctatgcctccttcgggagagac

SEQ ID NO: 762156 - DNA, 100 bp, Homo sapiens
aaacgggactaaactggcgggctccgtggaagcgtggccggcagcgtcccggacgaggaggcctttgaactggccacaggtgactatttgtttgaacctc

SEQ ID NO: 762157 - DNA, 75 bp, Homo sapiens
gtaggagacaagtgtatggcagtctggagtgaagatggacagacaaaatgtttcacttttgggtaaatacattct

SEQ ID NO: 762158 - DNA, 98 bp, Homo sapiens
ctacgcgtccctttgggtttagcacgatgagctcaatcggcactgggggccatgaagcccccaggaggagaatcgagcaatctttttggaagtccaga

SEQ ID NO: 762159 - DNA, 100 bp, Homo sapiens
caaaagagagatggaaccaagagtttactaagcaccagccaggtctaaactgcagtaatccatttactcagctggagaggagacatcaagaacatgccag

SEQ ID NO: 762160 - DNA, 100 bp, Homo sapiens
cggctaccggcggcggcgcgcagcgtgtcaggcggagagacccgccgccagacaaaagctgaccgtatgtcctatcatcaatggggaagaccaccttcgt

SEQ ID NO: 762161 - DNA, 101 bp, Homo sapiens
agtgcgtcatcctaaggaacatcgacatgctgcagttggagaagaaacttgaacgtgaacttgaggatgatgcacgagttattgcttgccggttccctttc

SEQ ID NO: 762162 - DNA, 75 bp, Homo sapiens
agtttaatgagaggaatatactcatcatcagtctatttagaagaggtttcagaaaagggatccctaacatcagaa

SEQ ID NO: 762163 - DNA, 100 bp, Homo sapiens
cttgaggccagcagcttcacggaccttgagaccatcgccaacctgggtctgggtgactgcttagaaaactgcacagcatctgatgaaattagcgaataag

SEQ ID NO: 762164 - DNA, 74 bp, Homo sapiens
gtgttggctatgcttttataaaggtcaccggattgaaactgtctcaggaccttgatgatcttgccattctctac

SEQ ID NO: 762165 - DNA, 90 bp, Homo sapiens
ccgtggagagatcataatttggggttcaagattccagtgagattacgtactataggtgaacttttagctcctgcagctccttttgacaag

SEQ ID NO: 762166 - DNA, 50 bp, Homo sapiens
cgcaaagcttgcgaggtggcgttaggctattttggcattctgctggatat

SEQ ID NO: 762167 - DNA, 75 bp, Homo sapiens
ttgccggcgtcaccgccgcggacttcgctttgggccatgaccaggcatgtactggcattgaaaacattgacgaag

SEQ ID NO: 762168 - DNA, 89 bp, Homo sapiens
gaaaggaattgttttggcctaggatcatccaggatgctgaaaacgccattcaacagatgggtggccagtggcttggtggaagacaaatc

SEQ ID NO: 762169 - DNA, 75 bp, Homo sapiens
atcccagaaggtcgcgaaggcagtaccgtttcctcagcggcggggggagcagcctctgggagtgacagtgctgac

SEQ ID NO: 762170 - DNA, 83 bp, Homo sapiens
cctggatgggactgtctatgatgtcatgtttgtcagcacaggtgatgtgtccaatctagatcccaacttctcatttgaaggca

SEQ ID NO: 762171 - DNA, 75 bp, Homo sapiens
cgcaagaagaagaagcagctgaagccgtggtgctgtttggaagagacttttggatgtgggtacctgaatgacttc

SEQ ID NO: 762172 - DNA, 110 bp, Homo sapiens
agaaccaacacaccccagggtgtgctgccatcttcacagctgaaatctcagggcagctcaaatgtggcacctgatacagatccacgggttttagaaaaacaagaattaca

SEQ ID NO: 762173 - DNA, 142 bp, Homo sapiens
gcgcggcttcctcaacttcacgctggcgcgagccccgtcctccttcgccgccgcgcacaaccgcacgtgcagaacaccttccaccatgaccacctcagcaagttcccacttaaataaaggcatcaagcaggtgtacatgtcc

SEQ ID NO: 762174 - DNA, 100 bp, Homo sapiens
agaccagtctggcaactactcccaggagtgtggcagctttctcctggctgagagcaaaggaaggggagttcaccctgcacggccgggccatcctggagat

SEQ ID NO: 762175 - DNA, 51 bp, Homo sapiens
ggcggaggtcgataagctggaactgatgggataagagttggtgtccttgtt

SEQ ID NO: 762176 - DNA, 100 bp, Homo sapiens
cggtttttctcttccttcgctaacgcctcccggctctcgtcagcctcccgccggccgtctccttaacaccgaacaccgtcgttgaggacttccacatgga

SEQ ID NO: 762177 - DNA, 100 bp, Homo sapiens
actaaagcttgaaatgctacatttccaaggtctcctctgagcctccggcctccataagacccaaaacagatgacacctcttcccagtcccccgcgccttc

SEQ ID NO: 762178 - DNA, 100 bp, Homo sapiens
ggaagtgaggtgaaaagcttctgcagcgagaagtgctttgcggcctgccgacgagcctacttcaagagaaataaggacatagttgacggcaaggaaaaag

SEQ ID NO: 762179 - DNA, 100 bp, Homo sapiens
tcaaacggcaagatgtccagtaatgtcccggcggatatggaatgtgttccagaagatctagaactgaagaagaagatttttgctcagttagattccatca

SEQ ID NO: 762180 - DNA, 100 bp, Homo sapiens
tttcttcaatgccgaacatcactgttggtacccaggtggttgtgtcaaaccgattggtgacatctccatgctgtattgtcacaagcacatatggctggac

SEQ ID NO: 762181 - DNA, 90 bp, Homo sapiens
cgccgctcggcgccggggcgcagcaggagcaggacatcgagactttacatggctctgttcacgtcacgctgtgtgggactcccaagggaa

SEQ ID NO: 762182 - DNA, 82 bp, Homo sapiens
gcagaaccttccctgattacagaatcttggaaccaaaaacttttgctagaaaatcagcttttacgagagaaaactcatggcc

SEQ ID NO: 762183 - DNA, 100 bp, Homo sapiens
gaagagcgaccagctcactaagaacatgatgtctttggtggacttgggaaagaggttgctagaagcagcaagaaaaggccaagatgatgaagtgagaacg

SEQ ID NO: 762184 - DNA, 82 bp, Homo sapiens
ggatgacatatttttggacctgaaacagaaattctggaacacctatatgataaagcgatctaaacttcatgaacaagtttta

SEQ ID NO: 762185 - DNA, 98 bp, Homo sapiens
ggtcagaatttgaacatatcagggactgcttggatactggaatgattgataacctctccctgaaaagcaaaggcctcatctccatggcacaggtgatg

SEQ ID NO: 762186 - DNA, 100 bp, Homo sapiens
ctttgatgtcatgaagtcgggtgatgcccgtgtggcgctgattggatttccctctgtgggtaagagatgctgcccccacccccttaggcccgagggatca

SEQ ID NO: 762187 - DNA, 75 bp, Homo sapiens
gcttggcgtccgtcggtctccgtccgtcggtccgggggatattaccttccaaatgatgatggagaattttatcag

SEQ ID NO: 762188 - DNA, 83 bp, Homo sapiens
catcagcgccctcaagacctacctggtgtcggggatggccatgagctacccccaccaattgcctttgatgttgaagcccccac

SEQ ID NO: 762189 - DNA, 100 bp, Homo sapiens
gcagccaagatggtgaagcagatcgagagcaagggtcggcactcttcaccctcccgagccctgcccgtctcggccccatgcccccaccagtcagccccgg

SEQ ID NO: 762190 - DNA, 100 bp, Homo sapiens
cccgagcattgtgggcctcatcatcttcctcctgtgcaccctcttcatcaggtacggacattgctgcaggagaagaggttgccatcaagcttgaatgtgt

SEQ ID NO: 762191 - DNA, 83 bp, Homo sapiens
ccctggaggagattctggggcagtatcaacggagtctccgggacatatgtagagtgtgtcggtcagaaggaacacctgagaaa

SEQ ID NO: 762192 - DNA, 100 bp, Homo sapiens
cctggatctgcgatctgtttgtgacttggaatggaaaattatctatgtgggctctgcagaaagtgaagaatacgatcaagttttagactctgttttagtg

SEQ ID NO: 762193 - DNA, 110 bp, Homo sapiens
ggcgagaagaccatctctgtggtcctacagagacccctggagaagcccgacggcctggacgtgtccgaccagagcaaggagcacccgcagcacctctgcgagaagtgcaa

SEQ ID NO: 762194 - DNA, 90 bp, Homo sapiens
tcacggtccagcggtcacctacccccagcaccacctccagcccctgcgcctcgttcctccgtgtcacaaagcagtacctgccccacgtgg

SEQ ID NO: 762195 - DNA, 75 bp, Homo sapiens
cataaaattaatgggaaaccccttccaggagccacacctgtgctgggtaggccaggtttcagcatcgcagacaag

SEQ ID NO: 762196 - DNA, 75 bp, Homo sapiens
tttgaatttgctagtaacgtcatggaggatgaacgacagggtcttactgaagtaacacaaagcttaaaaatggaa

SEQ ID NO: 762197 - DNA, 100 bp, Homo sapiens
aaactctcccctgctcaggcttgcacccagacacgacaccatgcatctcctcggcccctggctcctgctcctggaattccttcgacaatcctgagtggtt

SEQ ID NO: 762198 - DNA, 102 bp, Homo sapiens
cagccgcaccatgccgctcctaagcctgcacagccgcggcggcagcagcagtgagagcacatgattaagtaccggtacatcccgttcacacatgggaagaga

SEQ ID NO: 762199 - DNA, 75 bp, Homo sapiens
aaaaagagatcggggtccaaaatcatgataagttcttcagattattaaggaatcccagcagcagcatggtttacg

SEQ ID NO: 762200 - DNA, 82 bp, Homo sapiens
tgtacaacgtgctggagagaccccgcggctgggcgttcatctaccacgctttcgtaacaagtaagaagtttgcgacagagca

SEQ ID NO: 762201 - DNA, 98 bp, Homo sapiens
ttcaagctctacctgaccatcatcctgctcctgggtgccgtggcatgtcgatttgtccttcactacagttttaacaacctgggcatccagtgtgtgag

SEQ ID NO: 762202 - DNA, 49 bp, Homo sapiens
cagtgccctagaggcgttggaaggtcctaggcctacttacaagcctcca

SEQ ID NO: 762203 - DNA, 101 bp, Homo sapiens
ttggagtcggagcttcgcgacggcagcggcaagaaggaggaacctgcagccagccctgagagccagaagcttctgcagggagcacatgcagctgtttcgat

SEQ ID NO: 762204 - DNA, 89 bp, Homo sapiens
ggccggtgccagcacctttcggcttctgagacggcggcagcagcggcattcaggcttgcacagaaatctggaggcagtatcacctaacg

SEQ ID NO: 762205 - DNA, 100 bp, Homo sapiens
caatgcacgcaagatgaaatttgctctgctaaaaggctccttcagtgagcaaggcatcaacgagtttctcaggtcacatgtgccaatttaacgaacggtg

SEQ ID NO: 762206 - DNA, 100 bp, Homo sapiens
agaagatccgcagctccacgcagcaagacccgcgccgccgggacccccaggacgacgtgtacctggacatcaccgtgaagctgtggtctaccaatctaga

SEQ ID NO: 762207 - DNA, 75 bp, Homo sapiens
caagggatcacagagaccatattctacggggctttcagcaaatcaaagccaggtcacagggattatggacccaga

SEQ ID NO: 762208 - DNA, 110 bp, Homo sapiens
aaaatgacgacacgccccacaggtcttgggaggattaagtgaggggacatgagacaatgcagatcttcgtgaagactctgactggtaagaccatcaccctcgaggttgag

SEQ ID NO: 762209 - DNA, 100 bp, Homo sapiens
gagttgctgcagcagcaggaggaggaccgcagcaagcacctgttccgcgagcctgagaagaggccccccaccgtggtgtccaatacattcactgccctga

SEQ ID NO: 762210 - DNA, 76 bp, Homo sapiens
cggagtccgccccgtgaggagaatgtgccctctggtggtcagaagatgctgtgctgtctcgttaggatgaatggat

SEQ ID NO: 762211 - DNA, 125 bp, Homo sapiens
aacacatactcctgtatgattgaaaatgacattgccaaagcaacaggggatatcaaagtgacaggcggcagaagaaaacgacttaccacaccatggtggacctaaaagacttgaaaggctacagc

SEQ ID NO: 762212 - DNA, 49 bp, Homo sapiens
acgggacacagacccccagcccgcccaactgagtctcgctctgtcaccc

SEQ ID NO: 762213 - DNA, 74 bp, Homo sapiens
agagaagttttccaagagcaagaaatcacccattggctacctgggatcatagacggtatttctatgtaaacgaa

SEQ ID NO: 762214 - DNA, 90 bp, Homo sapiens
tggacggctggggccacttgtggtcgccgggaggtgtgtgcagtggcctcagggatccggaaagtctaggactgaacttctcctaacatc

SEQ ID NO: 762215 - DNA, 82 bp, Homo sapiens
agtgcctcagttttcccttccacaaaatgaggctgtcaccttgaactgtgcccacagtttctgctcctactgtatcaatgaa

SEQ ID NO: 762216 - DNA, 75 bp, Homo sapiens
ctcatggacatgaagattttctacaaggggaagaacactggtactgcttctccgagatggccccagtgtgtgcgg

SEQ ID NO: 762217 - DNA, 100 bp, Homo sapiens
caaatccaggctcgcagaaccgtgaaaaaggagtggcaggatcaactcactatcctgaaggtccattctcccaagaagaggggacagaaagacagatcta

SEQ ID NO: 762218 - DNA, 82 bp, Homo sapiens
cgagcatgtgtcccgggcgctgtgcatccacactggacgcgagctgcgctgcaaggtgagaagccctaccactgcaactggg

SEQ ID NO: 762219 - DNA, 100 bp, Homo sapiens
gatttctgcatttccatctgagatggacactgacgtcgttgtcctcacaacaggcgtcttggtgttgataaccatgctaccaatgattccacagtctggg

SEQ ID NO: 762220 - DNA, 50 bp, Homo sapiens
accatggaaaaagtgacttgagcaggtgtgagttcttgatacgaatgaaa

SEQ ID NO: 762221 - DNA, 100 bp, Homo sapiens
gggagggtccgagccagccgctgttttgccggaggagcccctcaggccggccaggtctggattaatggctttaaccttggccgctattggccagcccggg

SEQ ID NO: 762222 - DNA, 88 bp, Homo sapiens
cgtgttccctgccactgtcttgttccgaggcggccccagagctgtgagttctttggaattgtgaacattcttttgaaatatggagccc

SEQ ID NO: 762223 - DNA, 98 bp, Homo sapiens
gcctgctaggggctgaattctgactcagccatttactaactgtgtgaccttaggatgaatgctatcaagtaagacaagtgtttgcccagaaacttcac

SEQ ID NO: 762224 - DNA, 75 bp, Homo sapiens
gcaagaagaaattcccacctgtcaaagagggccgttgctccagggagaactgcaaatatcttcatccacccccac

SEQ ID NO: 762225 - DNA, 100 bp, Homo sapiens
gaagattcgaggcggcgggggacaagtcggcgccccagagcggacgaggttaaacccatccagagtaatggctgcggccttacccaggaccctgggggag

SEQ ID NO: 762226 - DNA, 50 bp, Homo sapiens
aaagaaatcctgataagaactgcttttacaaggtgaatatcttaaccaga

SEQ ID NO: 762227 - DNA, 75 bp, Homo sapiens
caccaaccttgcctcctacctttcatccggaagaagctgaaggtgatgtggccgccctcaaccgacgcatccagc

SEQ ID NO: 762228 - DNA, 75 bp, Homo sapiens
ttaaagctgagctgcgaggaaaatggcggcgggagtgtttctaatgctgctatggaggatttgttaacagctgca

SEQ ID NO: 762229 - DNA, 80 bp, Homo sapiens
gggccaccgagatacctctatggttcatgagcttaatagctattgacctgaaaagtggttctggaaaagtgtaccaaggc

SEQ ID NO: 762230 - DNA, 96 bp, Homo sapiens
ggacacagcaatatctctgggctttcacaggtcaacagaagaggtgaatccatttaccttcataaccgagccaactgggtgaccgtaggcatctgt

SEQ ID NO: 762231 - DNA, 82 bp, Homo sapiens
gaacgagaagagccgcagtgagttgggcaggttcttggccaagcaggcatcacgttgggtggtttccatttagaccgaggcc

SEQ ID NO: 762232 - DNA, 99 bp, Homo sapiens
tactctcataatttatgggatggtgcaaggaaaacagtggcaactctgtgggatggacatgcagccgtttggcatgccaagttctatagaaattttaga

SEQ ID NO: 762233 - DNA, 87 bp, Homo sapiens
ctttgttcaccgccaaccccttcgagcaagacgtggggtaattgggatacttctggcagcgaactgagtgaaggggaattggaaaag

SEQ ID NO: 762234 - DNA, 100 bp, Homo sapiens
tttcaacagtgtgatggccaggaccaagatgaaacgcatgagggatgaaacaaagagtcctcttcgtggaaaagaaaaaaatacgctccctttaaacggt

SEQ ID NO: 762235 - DNA, 98 bp, Homo sapiens
gaccggaagagctgtggcaaccggaatgagacgccctcagaccccgtcatcattgacagatcctgaggaggatgaaggggctggccctggaggccgag

SEQ ID NO: 762236 - DNA, 98 bp, Homo sapiens
cacagatcccgacgtgatcagaacagtgctagtgaaagaatgttattctgtcttcacaaatcgaagggctgcctctaagaatcaaacttcactcttgg

SEQ ID NO: 762237 - DNA, 100 bp, Homo sapiens
aacaccatcacctatggctactacaataaggatggatagaatgacagaagatgctcttcgcttgaatctgttgaagcggagcttggacccagcagatgag

SEQ ID NO: 762238 - DNA, 100 bp, Homo sapiens
gatgagacaccgctatcacagctgctgcaatcgcttgggagagctcctgggccacccctcctttcaggtcaagaaaactttagaaactgttcctttggag

SEQ ID NO: 762239 - DNA, 74 bp, Homo sapiens
ttgtagcagagcaagccatcaagcacttgaaggaactggaagaggaggcaacagtatttggggcaagaagtttg

SEQ ID NO: 762240 - DNA, 101 bp, Homo sapiens
caagcgggtgaaatctggcatattagcgctagccctgcagacagaggtgtgctgacgacctgctacaacagaaaaaccaaggtgtatgttggtaacctggg

SEQ ID NO: 762241 - DNA, 125 bp, Homo sapiens
tttggacaggaggtcatacagctgatactacccacccccggttacgcctgtcacataaagactaaaggttctcaaaccatgacatcctctggagcccagaaaaaagttaaaagaactctgccaaa

SEQ ID NO: 762242 - DNA, 101 bp, Homo sapiens
ctagttccacgattaagtgttggtgctgttagtagcaaacctactactcctactatagaaggagcgatatatagttatcagcaaagtagatgaagaagaac

SEQ ID NO: 762243 - DNA, 75 bp, Homo sapiens
caaattgtcgccattaagaaaggctgatcccttatccaacatggttctaaccttcagtactaaagaagatgcagt

SEQ ID NO: 762244 - DNA, 100 bp, Homo sapiens
ggcggcggcggcggaggatgagcctgcagagcgcgcagtacctccgggatcgtgggactttaccagatcggtttgtaataacacctcgaagacgctatcc

SEQ ID NO: 762245 - DNA, 50 bp, Homo sapiens
gatgcttatggaatgtgcgagaacacggatatgtgtcctaaaaatgctag

SEQ ID NO: 762246 - DNA, 90 bp, Homo sapiens
gctaagctagcgccgtcgtcgtctcccttcagtcgccatcatgattatctaccgggacctcatcagccgcctggagctgctgaagactgc

SEQ ID NO: 762247 - DNA, 100 bp, Homo sapiens
tagagttagacctaccagagaaatcttagagtttcccgcaagggatgtttatgttccaaacactacttacagattcaagtcaatctgaaagtcccagcca

SEQ ID NO: 762248 - DNA, 97 bp, Homo sapiens
gaaggaaaagaaggcagtcacgtttttcgatgatgtcacagtctacctgtttgaccagtttttgagacagtgtccttgagttcagactctctcttcc

SEQ ID NO: 762249 - DNA, 100 bp, Homo sapiens
gggcgccctggagacggaggatcctgcgttaatctatgactatgccattgtgctattcaaggatgtgtcagaactaaggaatgaattacagcggaaagat

SEQ ID NO: 762250 - DNA, 100 bp, Homo sapiens
cgggtcttccagaaggctgtagaccagagtatcgagaaggtctccacctctgggcaggagagttgccgaccacctcgggggtgctttctctgcgcttgaa

SEQ ID NO: 762251 - DNA, 83 bp, Homo sapiens
aatgaggagggcccttcacagaaccgggttgatattcactgatggactccaaagaatcattaactcctggtagagaagaaaac

SEQ ID NO: 762252 - DNA, 50 bp, Homo sapiens
agggccctgcaggcagagttctgggtcctggtcctggacaaaggagtagt

SEQ ID NO: 762253 - DNA, 90 bp, Homo sapiens
ctgggtcagtccgccgctcaccccgcggccgcaccttcccgccttctcagtcaggatggctaaaggtgaccccaagaaaccaaagggcaa

SEQ ID NO: 762254 - DNA, 100 bp, Homo sapiens
tggattcacgggtagagattggcttcgggctgagctagcagtgagcaccttttggcccaatgaatatcaggctgaagccgacgtagcttctctgaacaga

SEQ ID NO: 762255 - DNA, 74 bp, Homo sapiens
aagtgggcagatggcaaaatgatcaagaatgaagtggacatgcaggttggatggcaagcatgtggtgtttggca

SEQ ID NO: 762256 - DNA, 60 bp, Homo sapiens
gaccctggccgccccgagcggagcctggaggcgccatgtcagaaccggctggggatgtcc

SEQ ID NO: 762257 - DNA, 89 bp, Homo sapiens
agtttggcgtgcaacatggggcttgagaaaggggcttttttccagacttcaagctcccattccaacagtaagagcttcttccacatcac

SEQ ID NO: 762258 - DNA, 73 bp, Homo sapiens
cgtgaccgagagcgtgaccgagagcgcgaatatcgtcatcgttagaaggtcttcaaagcttcacctttctcca

SEQ ID NO: 762259 - DNA, 97 bp, Homo sapiens
cgaagaagcatcgttaaagtctctcttcaccctgccgtcatgtctaagtcagagatcatgtttgagaccttcaacaccccagccatgtacgttgcta

SEQ ID NO: 762260 - DNA, 100 bp, Homo sapiens
tcccgctcgtcatggcctacccgggatacggaggagggacaatgcagatcttcgtgaagactctgactggtaagaccatcaccctcgaggttgagcccag

SEQ ID NO: 762261 - DNA, 82 bp, Homo sapiens
ggattccacagtgtcctctggaaaatggtagttgatgtcacttggcgatattcctgcaaacatgaagaggtgattgccagaa

SEQ ID NO: 762262 - DNA, 100 bp, Homo sapiens
agttttgtgtccatgtgaacaactattgtggtggtgccatgcagcaagaatcagagagatgcagagttagagccagaaggcctgacatggcactttatgt

SEQ ID NO: 762263 - DNA, 83 bp, Homo sapiens
aaggattcaaatgctagcagacacggtggctactctgcctcggggacgaaagcaggaacaagcacatcatgattgacttgggg

SEQ ID NO: 762264 - DNA, 90 bp, Homo sapiens
gagcaatgaaagaagatgctgggatgatggatgtccattatagtgaagtatgcagtggaactgatgaagaccctgatgataaaaacgcac

SEQ ID NO: 762265 - DNA, 75 bp, Homo sapiens
ttctttacctgcttcccaatcccactgatgaggatcagcccatgctttccagttctcagggaacaatagaaacca

SEQ ID NO: 762266 - DNA, 100 bp, Homo sapiens
ctggcttcccagtgcatggcgctcaagtctgtgcgccgtgaggcaatggaacaaggtttacgagactgctgtcgatccatacgaattggaaagatcctga

SEQ ID NO: 762267 - DNA, 100 bp, Homo sapiens
ggggcatctccgcggtccggcccggggccccgggatctcggctgtccttcctcccggtgccctacgagacgctgaacaaacgctttcgcgccgctcagaa

SEQ ID NO: 762268 - DNA, 99 bp, Homo sapiens
cgcgcccgtggccgctgccgcctccgccccagggagagtcacaccgggacagctcatgtcctatattcagctcttcaagaacaacctcaaagctctaat

SEQ ID NO: 762269 - DNA, 136 bp, Homo sapiens
gcaaggagcgcgtggcgcggtgcgcagtgggtggctccacctcgactgcgaattactgtttatgaggcgcagacggggaagcggagccaacatgccagtggcccggagctgggtttgtcgcaaaacttatgtgacc

SEQ ID NO: 762270 - DNA, 82 bp, Homo sapiens
attttcagcactaattttaggattgggaaaatgaggtacgttagtgttcgcgattttaaaggcaaagtgctaattgatatta

SEQ ID NO: 762271 - DNA, 75 bp, Homo sapiens
agaacactaaagtgttacatgacagatgtatgaggaagatgagaatgtgcctactgctcctgatcctccaagtca

SEQ ID NO: 762272 - DNA, 100 bp, Homo sapiens
gacagtcgtagatacaaatttttggatgatgatggatccatttctcctattgaggagtcaactattggtaaaggttttcaaggtgtcatgaaaagatggg

SEQ ID NO: 762273 - DNA, 100 bp, Homo sapiens
ctgctgctcaaagctgctgccgccccttgggctaaaaggtgctccatacttgcttgcagtgcctacgtggctctggctttgggtgataacctcatggctt

SEQ ID NO: 762274 - DNA, 82 bp, Homo sapiens
acagtttggaaacaagcaggatccaaaataccagtagatctttagtacaccacggtatcatcccaaaagccaaccatttgtg

SEQ ID NO: 762275 - DNA, 100 bp, Homo sapiens
aagcaaagagaggcgacggagccgctcaagaagtcgagatcgaagatttagaggccgctacagaagtccttactgatgtcaattttgcattggaacttag

SEQ ID NO: 762276 - DNA, 100 bp, Homo sapiens
tttcagctacagtgttcacaatcccaaagagaagattgatattgggctgcctccacccaaagtctcccggacccaacagctactggaacggaaacaggcc

SEQ ID NO: 762277 - DNA, 96 bp, Homo sapiens
tgcgctaaggaatgaaacccttccagctcgatctgctcttcgtctgcttcttcctcttcagtcaaggtgttacacataatattgcattacttcgag

SEQ ID NO: 762278 - DNA, 100 bp, Homo sapiens
ctactgccgcttcagttctcccggtgtggccacgagtcgggttgcagaggcagtgttaacatcccaactgaaagcacatcaagagaaaccaaattttatt

SEQ ID NO: 762279 - DNA, 75 bp, Homo sapiens
gaagagctgcttctgtatcttaagatttggaatccagatatgacactaaaaagttatttcaaggaaaggatattt

SEQ ID NO: 762280 - DNA, 82 bp, Homo sapiens
gcggactgagcgctcccaattgggcaagagtgagccatggagctacgtgtggggaacaagtaccgcctgggacggaagatcg

SEQ ID NO: 762281 - DNA, 98 bp, Homo sapiens
gtccatcatccgcctcaccacgagctacctgaagatgcgcgccgtcttccccgaaggctactgcagcactggggtgtcagttgttggtccgacccaga

SEQ ID NO: 762282 - DNA, 83 bp, Homo sapiens
gtcagctgatcagctctcctaccttcaatgccccagtgcctccggagccagcgtggtggccatagacaacaagatcgaacagg

SEQ ID NO: 762283 - DNA, 100 bp, Homo sapiens
cacagtactggtcagtatcaggaatgcctacagttagcagatatggtatcctctgagcgccacaaactgtacctggctgactgtgctgtcctgattgttg

SEQ ID NO: 762284 - DNA, 100 bp, Homo sapiens
gaaaagcaggaagctggaaaggaaggtactgcaccatctgaaaatggtgaaactaaagctgaagaggctgtggtggaggagagaacagtctcattcaaac

SEQ ID NO: 762285 - DNA, 100 bp, Homo sapiens
atgaaatccaaaggtgaatcttttggttggtgattttgatgatagccacaaagcaagcagggttgatcccccaagtcccagggctgatactttattggga

SEQ ID NO: 762286 - DNA, 74 bp, Homo sapiens
cccaggaaaggaaaaacccacaaacatgttcacaacgggcatgttcagagaagccgaactgggattaccatgca

SEQ ID NO: 762287 - DNA, 82 bp, Homo sapiens
ggacagcgggctggagcctgacgagctggcgggttcgagaacttgtcttggacaattgcaaatcaaatgatggaaaaattga

SEQ ID NO: 762288 - DNA, 50 bp, Homo sapiens
ctcccgggagtcgctgtggcaaaaggtgctcctgacctctgataaagctg

SEQ ID NO: 762289 - DNA, 97 bp, Homo sapiens
ctgctcttcccagaccaccagtaacacatcccgttatgccgctgcactctacaggcaaggtccaaagaagtcgatgtttccaaacagcttcattcag

SEQ ID NO: 762290 - DNA, 100 bp, Homo sapiens
ctctgggacacacctccattggatttaaaagacagtcctcgtcagcactgactttcagctatggaatcggccaaatagttgcatcacatgtatctaatcc

SEQ ID NO: 762291 - DNA, 100 bp, Homo sapiens
cttttttggaactcatgagacaacaactctgctcatggtgattacatgcaaaataacgagagcagcttaatagagcaagctccaatacctcaggacggac

SEQ ID NO: 762292 - DNA, 75 bp, Homo sapiens
gaagtttctggtcactccccaggattatgcgcggttggcattgctccagcatcatgccctgtaatttctgatgaa

SEQ ID NO: 762293 - DNA, 83 bp, Homo sapiens
cagaagccgagttcaacatcctcctggccaccgactcctacaaggcgcctgtgtctggcagagctggtgtgagacgagacaat

SEQ ID NO: 762294 - DNA, 80 bp, Homo sapiens
caacagtgtagtggcgtattccacatagcaaacaggtcgttgaggacttccacatggagattggcacaggaccagactca

SEQ ID NO: 762295 - DNA, 101 bp, Homo sapiens
ccggagcttctcagaagacagagggttttcttttgaggcaatgaatcgctccctggctaatgtgattcttggaggctatggcaccacttcaacagctggtg

SEQ ID NO: 762296 - DNA, 98 bp, Homo sapiens
agaaggcctctctcctgatacagcaggcgctcaccatgttccctggaggtcctgctggttggggcagacaacttcacgctgcttggcaagccactcct

SEQ ID NO: 762297 - DNA, 75 bp, Homo sapiens
cggcggccgaggcggcggtgtgggcgcgtcaggccgcgacgagggcgctgaggcttcaacggaccacaccaaaat

SEQ ID NO: 762298 - DNA, 124 bp, Homo sapiens
ccgagtctcaatatctgtcttcggtggactccttcggcagtccacccaccgccgccgcctcccaggtgtcgtgaaaactacccctaaaagccaaaatgggaaaggaaaagactcatatcaacat

SEQ ID NO: 762299 - DNA, 90 bp, Homo sapiens
gtgatatcagacaccgagcttcagcaagctctctccaacggtactccaaagattcaggtttactcacgtcatccagcagagaatggaaag

SEQ ID NO: 762300 - DNA, 83 bp, Homo sapiens
cttttacctacgttggcggccccagaagctgttcatcaaagaaaaagggttcttttggtcacccaccactggccccatggctg

SEQ ID NO: 762301 - DNA, 83 bp, Homo sapiens
atcggcttcatgctgtgcagcaagaacccgttacagcaattggaacttgcacagatacagcatagagacgctaatctcacagc

SEQ ID NO: 762302 - DNA, 100 bp, Homo sapiens
aaagagttccttgctcatctaaaagaggcaatcaccgttcagttggttgaatctggcgatgtggaacccatggatatggagggctgactatatacaccat

SEQ ID NO: 762303 - DNA, 97 bp, Homo sapiens
agcaagtaccagccagcgccagctgcagccctggccgcgcactcgcctcagctgagcctggcatggcctgtatgagaagaaaaagacctcaagaaag

SEQ ID NO: 762304 - DNA, 87 bp, Homo sapiens
ttgcgtctgttgacgcggccgactacaatcccgaggttatcaatactctggctgaccatcatcatcgtgggactgactttggtggaa

SEQ ID NO: 762305 - DNA, 83 bp, Homo sapiens
gccacctactattacccccagtatctgcaagccaaggttcgtgctggccgtgggcagcgccgtctttgatgccatgttcaacg

SEQ ID NO: 762306 - DNA, 100 bp, Homo sapiens
atttgtggcaatagtgatcacattcattttaattttgccggaatatttcaagacaccgaaagaaatcatgagtggaggatctcaagtccacattttttgg

SEQ ID NO: 762307 - DNA, 90 bp, Homo sapiens
gatcatcctgctgggcttcgtccagatcgggaagggtgacgatgcctggggagcctgtggacgtggcatgtggcgtggaccacatggtga

SEQ ID NO: 762308 - DNA, 51 bp, Homo sapiens
cctcctggctgtgctcatatacacctggaccagttacagaagtggatccgc

SEQ ID NO: 762309 - DNA, 82 bp, Homo sapiens
ccctggagcctcagttggaagcagccgatccagcctgcggagcctgtggggcaggcctctgtgtcctttgtcccaatagtaa

SEQ ID NO: 762310 - DNA, 99 bp, Homo sapiens
gaatgaagtaattgaagctgcaaatgaagcattacttactaaacactgcggaaggcgcggagggagcagcagctggtcagcaagaggctgctgagaaac

SEQ ID NO: 762311 - DNA, 100 bp, Homo sapiens
attattatggtgttattaaggaacctatggaatcccacgtggcgaagtctcgattttggaattatgccagaccgtcttgatacatctgtgtcttgtttcg

SEQ ID NO: 762312 - DNA, 97 bp, Homo sapiens
agagctgggttctattttccctcctcaaactgactttgcagccacggagaggtgtatgtgctcaagaggccttatgtggatgagttcctgagacgca

SEQ ID NO: 762313 - DNA, 100 bp, Homo sapiens
gctgtcttctattagacaaaccagaggtgtcactctgcaaacctgaatggtgtatactacagcggcccctacacggctaaaacagacaatgggattgtct

SEQ ID NO: 762314 - DNA, 80 bp, Homo sapiens
actgagactcaggagtcccaggctttccaggagagagactaggactcaatgaaattgctgcccccatgttcctgaggctc

SEQ ID NO: 762315 - DNA, 100 bp, Homo sapiens
gaagcaggatggatcttgcgagttggtagctggcagtgttgtgatggcttttgaagaagtatgcccggacagaatagatctgattcataaaaattaccgc

SEQ ID NO: 762316 - DNA, 101 bp, Homo sapiens
attattttgaaaataccgatattcttgttgggtggcccagaccccttggactatgttagcatgtacaggaatgtggggagcccttctgctaacatccccga

SEQ ID NO: 762317 - DNA, 80 bp, Homo sapiens
agcctctattgcatcttccagcagtactccctcctccaaatccaaagaacttagccttgctggctgttgctccaggcccc

SEQ ID NO: 762318 - DNA, 83 bp, Homo sapiens
ggagatatcgaagtatgggatcaagctgagaaagacctgtgtatatgtacttgggctcatagctaaaaccaaacaaggctgtg

SEQ ID NO: 762319 - DNA, 100 bp, Homo sapiens
tatgaagccaacggacaagctggaaatttggatatgtgcagtgcatctcctcgaagatgctgatggtggaaatttcttgaaaccgctctcgtaatttgcc

SEQ ID NO: 762320 - DNA, 83 bp, Homo sapiens
tcgggggtgtaggttatggggctgacatagcccagagatacaggataagcaaatacccaaccctcaaattgtttcgtaatggg

SEQ ID NO: 762321 - DNA, 74 bp, Homo sapiens
gatgcagaaggagatcaccgccctggcgcccagcaccatgaagatcaagcctcacttctaaacttctggaaccc

SEQ ID NO: 762322 - DNA, 74 bp, Homo sapiens
gtacttgcaagaaagcagccccagagctgcctgaagatgccggcctaagcctggagtccaggcatggacttccc

SEQ ID NO: 762323 - DNA, 100 bp, Homo sapiens
agaagacagtgacagtgaacctgagccagaggataatgtcagcggatggtttctcgctctttgggcgcaaatccagatgacctgaaggacccaattaaaa

SEQ ID NO: 762324 - DNA, 100 bp, Homo sapiens
tctgggtgttttgctaccgtgaccgtttaggctcttgtcaggatggtgaagctgttcatcggaaacctgccccgggaggctacagagcaggagattcgct

SEQ ID NO: 762325 - DNA, 100 bp, Homo sapiens
gtcactgggactggaggaggaattagcttgaagcatgggacttggatgttgtgggtgatggtatgcagtgtcctccttcacctttgctttttgatccttc

SEQ ID NO: 762326 - DNA, 100 bp, Homo sapiens
gagtgacctactcgcccgtcagtggttataataagcatcattctgaaaggctacaagcgtcctctgacactcgaggatgtctgggaagttgatgaagaga

SEQ ID NO: 762327 - DNA, 82 bp, Homo sapiens
ctgaaattgaacagtaccgcctgcagagggagaaagaattcaaggccaaggaagctgcgctgaagaaaaggtgactggtctc

SEQ ID NO: 762328 - DNA, 103 bp, Homo sapiens
ctcgacaccatggtggacacttttcttcagaagctggtcgccgccggcagagagtaaaacttgtctcggcacagagtcaagtaaagaaagccaacatacagtg

SEQ ID NO: 762329 - DNA, 83 bp, Homo sapiens
ctgagcttggcctcggcgtcctcgggtgtccctggccagtgtccttccacctgtccacaagcatggggaacatcttcgccaac

SEQ ID NO: 762330 - DNA, 101 bp, Homo sapiens
gatccgcccacagacctcaaattcaaaggtgctcagaattttgatgtcatacgactatcaacttacagaacagcctgcaaattacgatttgtacaaaaacg

SEQ ID NO: 762331 - DNA, 75 bp, Homo sapiens
ggacagtgcgtcgacacattgaaggcacgtgtggttctcaaatataggcattctgatgggaacttgtgtgttaaa

SEQ ID NO: 762332 - DNA, 87 bp, Homo sapiens
tctttgtgcacatttacatcaaggaatgtcgttgtctgctgggtcttcccctcttcattcccccaagattactccacatacttctcc

SEQ ID NO: 762333 - DNA, 78 bp, Homo sapiens
agaaaaagaaaacagattattattgcaacaaaggggctatcaacagcaggacgcccatgaattcatgcgctacctttt

SEQ ID NO: 762334 - DNA, 98 bp, Homo sapiens
atgagatgatcgacgtcatcggggtgaccaagggcaaaggctacaaaggcctctgggaacatccttcaaaggaaaatatgggtgtgtagactactggg

SEQ ID NO: 762335 - DNA, 100 bp, Homo sapiens
gttccattgtgccagatggctggaaaaccacccacctgctctttagcctgggagctgtgtgtctggacagcaacacagtcactcctggcggcaaaccaaa

SEQ ID NO: 762336 - DNA, 50 bp, Homo sapiens
aaggtcatcactgtgttagtggtgcacagccagagaacaacacatcacac

SEQ ID NO: 762337 - DNA, 75 bp, Homo sapiens
tcatccccaaggaggacggcgtgatcacggccagcgaggacagcttccccggcctcagagatttcctgaatctta

SEQ ID NO: 762338 - DNA, 83 bp, Homo sapiens
gcctaggcattttgctgtctcctcctaatacgaaacccagtacagcagtggaatatctagccgcccacctctccaaaatccat

SEQ ID NO: 762339 - DNA, 74 bp, Homo sapiens
ctattgtggctgccatcaatggatcctgcctgggaggaggacttgagctccctgcggtttctgagttctccacc

SEQ ID NO: 762340 - DNA, 80 bp, Homo sapiens
gaaacactgcctgggaggaagagaatttgtccaaatacaaagacaggttggtcaaagaaaaagtgatgtatgaaaaagag

SEQ ID NO: 762341 - DNA, 100 bp, Homo sapiens
tcaagcttagttacagtaatagcccttctgtttgggatacttttattgaaggattgaaagactataatgtaactgcaaactccaagctggtcattatcac

SEQ ID NO: 762342 - DNA, 75 bp, Homo sapiens
gaaaaatctgaggttatcaatgacgaggaatccagcactacgccctgccctctactgactggaggcaggcctctg

SEQ ID NO: 762343 - DNA, 85 bp, Homo sapiens
gccgcgagcagaccggcctggaagcctacgccctggggctggacaccgttgtttacattcagagctctatcaataagaggaatac

SEQ ID NO: 762344 - DNA, 100 bp, Homo sapiens
aaccagcatggctacttcatattttggaaagcagtttttaagacaacttctggctagcaaggaggacgaggacacgatcaaaattggggaggatgacgag

SEQ ID NO: 762345 - DNA, 90 bp, Homo sapiens
gattttgacagtcgtagatacaaatttttggatgatgatggatccatttctcctattgaggagtcaacttcccttggtaatgaagaccca

SEQ ID NO: 762346 - DNA, 100 bp, Homo sapiens
gttagcgtgagtgatcactctcaatcccggggaagaaatgatttcccttggggatggagacatcaggaccatgtgcccccttctgtctatgaaacctgga

SEQ ID NO: 762347 - DNA, 87 bp, Homo sapiens
tgaggactgtgggcactggacacagatggacaaggatttagtgcaagaagaagaacagttgatggaagaaaagaaaaagaaaaaaga

SEQ ID NO: 762348 - DNA, 101 bp, Homo sapiens
ctccagcctgtgaagaagttaactgagagaagctgcatgaggccaataatgaactacagaagaagagagccattattgaagatctcgagccaagatttaac

SEQ ID NO: 762349 - DNA, 87 bp, Homo sapiens
cgctgatggactgccgtagaccttcagggtaaatctgcagagaccagagaaagcacacagctgagccctgcagatctcacagaaggg

SEQ ID NO: 762350 - DNA, 75 bp, Homo sapiens
cgaggacttccgcaggacccgcaacagcgcagaggaaaatggtgtgaatggaacattaacttcaaatgtagcaga

SEQ ID NO: 762351 - DNA, 128 bp, Homo sapiens
ccaggacagaaaagacagtgttctgctttcatggagttcacagaagagtcgaggagccagtctcagttggagggctgatagtaaaccttattggtatctgtgcctttagccatgcccatagccatgcc

SEQ ID NO: 762352 - DNA, 100 bp, Homo sapiens
cttctagaagagagaaggaggaaaagaagcagttcctgatgttacaaatgaacaaggatctcccagtcagttgcagggctgggacctattatgatggagc

SEQ ID NO: 762353 - DNA, 100 bp, Homo sapiens
tttctgccaacatccccgctcaccaggagccccttgccaggagtgttcaagatgctctctctggaccgatcccactgatgaaaactttcggaagagaaag

SEQ ID NO: 762354 - DNA, 80 bp, Homo sapiens
cacccgtggaaagtacaggtcctgacagctgcctcccgcgacgatgcccctcaacgttagcttcaccaacaggaactatg

SEQ ID NO: 762355 - DNA, 50 bp, Homo sapiens
agctctaagtacactcgtcttgaatagcagtcctgcgttaactgcggccg

SEQ ID NO: 762356 - DNA, 97 bp, Homo sapiens
agaggacgccggaacaccctggaagccgagaaatggacgtcttgcatggctggtatacttagttgggacagttgtaggaggaagattaacatatacc

SEQ ID NO: 762357 - DNA, 90 bp, Homo sapiens
ccctttgcctcatcccaggttgccttggaaaatgccaacgccgtgtctgaaggaggtgttgcccatggcccccggggccccacaagttac

SEQ ID NO: 762358 - DNA, 83 bp, Homo sapiens
ccggagagttctgcatgttgattcgagtccaaaactacttacctggaagaccttccaccaccccctgagtatgaattggcccc

SEQ ID NO: 762359 - DNA, 100 bp, Homo sapiens
tggcgctctccgttcggcggcgctcccatggcgcacattaccattaaccagtacctgcagcagctgaagaagcatctgtagggaatccagaaggagcgtt

SEQ ID NO: 762360 - DNA, 100 bp, Homo sapiens
aggcgaacctcacggccagctccgagggttacatgcacaagtgaccaagaatatggcccaggtgaccaaagccctggacaaggccctgagcaccatggac

SEQ ID NO: 762361 - DNA, 129 bp, Homo sapiens
accgagggaatgatccttactaaccacgaccatcaaatccgtgtcggagtccttacagacaagttggatggcttgaggactggtactaaaaggaaacgtgactgggaggccattgccagcagaatggag

SEQ ID NO: 762362 - DNA, 98 bp, Homo sapiens
ttcaggctgtccagaagtaaaaggctccgggaagcagtttgttcgctatataaacatgttgataaacgacacgacgtttttgctcgatgaaagtctgg

SEQ ID NO: 762363 - DNA, 100 bp, Homo sapiens
caattctggaacccagagcagacacagacaaggcgcctctgtcgaagagccttctgctggtccccagtgccctctccctcctgctcgccctcctcctgcc

SEQ ID NO: 762364 - DNA, 95 bp, Homo sapiens
ctgctggttttgaggacttgccgaacctacaggaagtatacgtaggtaacctttccagagatgtgacagaagtccttatacttcagttgttcagt

SEQ ID NO: 762365 - DNA, 142 bp, Homo sapiens
ctactgcacggtgaacctggaccaggaggaggttttcaggaccaaaattgtggaaaagtcactctgatcgtcagtatttaaacagatcacatcatgcgtgagtacaagctagtggtccttggttcaggaggcgttgggaagt

SEQ ID NO: 762366 - DNA, 100 bp, Homo sapiens
tggcttccgtgctgtcctacgaaagcctggtccacgccgtggccggagccgtgaaagctctgggtgtgcggcagtaccatgtggcctcagtcctgtgcca

SEQ ID NO: 762367 - DNA, 75 bp, Homo sapiens
cattggagggccaagcagaaggtgacagtggtgaatgcaaaggtcaacgtggagcacatgacggagaagatgaag

SEQ ID NO: 762368 - DNA, 83 bp, Homo sapiens
acaactacacgttacgctattcgttgtggtccaaaacagtttacctcttatctaacaggaaatctggcattttttaaagtttg

SEQ ID NO: 762369 - DNA, 98 bp, Homo sapiens
gccatctcttcagttaattttggatccgtctaacacagcatgggcctcctacatgaccaactccccgactctgatcgttatgattggtttgccagccc

SEQ ID NO: 762370 - DNA, 100 bp, Homo sapiens
ggacatcaggaccatgtcaagtagagatttgctcaatgcattgaagtcagtcattaatgaccctgtggaccacgggatcattcgaactctggatttaccc

SEQ ID NO: 762371 - DNA, 75 bp, Homo sapiens
cagaatttactacagcatgtgatttcagagccagccccagtgcctgctgagccgtttgacaacactacctacaag

SEQ ID NO: 762372 - DNA, 88 bp, Homo sapiens
tcaggccacaccggtggtctgggctgtggcgcgcgggtcggggcccgaggcgggcggccaggaaggattacattgcagtgaaggagaa

SEQ ID NO: 762373 - DNA, 100 bp, Homo sapiens
gtgcaataccaacatgtctgtacctactgatggtgctgtaaccacctcacagattccagcttcggaacaagagaccctgttttcttacaggaaacggtta

SEQ ID NO: 762374 - DNA, 131 bp, Homo sapiens
caacagaatctcccatccagtccggcacccagtaccatattctctggaggttttagacacgttaaccccaaagattggctttccttggagtgaaatcaggaacatctctttcaatgacaaaaagtttgtca

SEQ ID NO: 762375 - DNA, 75 bp, Homo sapiens
ccagtttctttacttcaacagtgcaccaatattctttcacaggaggagatgttaaagtaacccatcttgcaggac

SEQ ID NO: 762376 - DNA, 96 bp, Homo sapiens
ccgctgcgtgggggtgaggggatcaggatcacccagtatactccataccagcctgaggtgtctcaggggaggctggagagtttactcaactaccag

SEQ ID NO: 762377 - DNA, 98 bp, Homo sapiens
caccatccgccctcggcttccgcggggcgctgggccgccagcctcggcaccgtcctttcctttctccctcgcgttagcggagctggagtttgttcaga

SEQ ID NO: 762378 - DNA, 100 bp, Homo sapiens
agaaaatggaccagtttgttcgttacgaggttgactatagtcaatggggccaatggagccaagtgtatggaaacccacaacagtatggacagtatatggc

SEQ ID NO: 762379 - DNA, 50 bp, Homo sapiens
acatcccagagagcttccagagtgatttccatggtgatggtggctgtggg

SEQ ID NO: 762380 - DNA, 100 bp, Homo sapiens
tccatctcagatgttgttgatgaagtaatacagaactgccccatcgatgtgcggcgcccgctgtataagaaaacgttgtgtgacgtgatcctcatggtcc

SEQ ID NO: 762381 - DNA, 90 bp, Homo sapiens
ttctctgccacaaaaaaatataataaggctgagtgcggagccaagtggccacagatgtctttaattccaaaaacctggccgttcaggcac

SEQ ID NO: 762382 - DNA, 100 bp, Homo sapiens
ggagtagcgaggaatctgattccaagcaaaaaccaggtgatctttgcagagctgtttcaacttccagcaccccctcacattgatgtgatgtacacaacac

SEQ ID NO: 762383 - DNA, 90 bp, Homo sapiens
gacgaggctgcggtgtctgctgctattctccgagcttcgcaatgaccgagacatgggtgcccggcaccgcgcccgagcccactccattca

SEQ ID NO: 762384 - DNA, 51 bp, Homo sapiens
cgatacctcagcagcagagttaccaacagatgaggacggggacttggttgc

SEQ ID NO: 762385 - DNA, 75 bp, Homo sapiens
attggatttgatcttccatatggataagctatgaagtcttacactccatatttcattctcctgtggagtgctgtt

SEQ ID NO: 762386 - DNA, 75 bp, Homo sapiens
aatgtggaaaggagattgacagtcacaattttgtaataaggtaatgctggaggatggaagaagcaaagggtttgg

SEQ ID NO: 762387 - DNA, 100 bp, Homo sapiens
tggaggtgaagaagtttgtgaagatcggccgcccgggctacaaagagttgcacacgctgtggcagaacgaggagcgggctgctgtatcctctgggaaaat

SEQ ID NO: 762388 - DNA, 90 bp, Homo sapiens
gaagaacttctctgctgaagaagcatcttttagggatcagcctgtgttttttagaaacctgctcctccaaagccagagcccaagcctaaa

SEQ ID NO: 762389 - DNA, 90 bp, Homo sapiens
actagctcatctgtagagactgatttgcaacccttccgggaagccatagctctgcatggtatccaagcccaccaatgggatctgtctcag

SEQ ID NO: 762390 - DNA, 100 bp, Homo sapiens
ggacaacggcacagctgccaactaccgctgctccggggcttacgacctccgcatcctggacagcgcgcccaccgatggatacacaactgatgacattgag

SEQ ID NO: 762391 - DNA, 100 bp, Homo sapiens
gctgtgggtattgctgcggctggtgcgtcgtcgctctaggttgcagagaacacatcttagaagatgaaaaacctgaatctatcagtgacactactgactt

SEQ ID NO: 762392 - DNA, 100 bp, Homo sapiens
gttgtctctgctgctgttgcacactgggttgcagcctatggcctgttatttgtctcaacaaaagaattccagactccatcatttctcgtggtgttcaggt

SEQ ID NO: 762393 - DNA, 75 bp, Homo sapiens
gccgcctccggagcccgacgcggaaatctactttcttcaatgtgttaaccaatagtcaggcttcagcagaaaact

SEQ ID NO: 762394 - DNA, 75 bp, Homo sapiens
tggaggagggctgtccggggctttgggtgaaagaactcttttcttctttgggagtcgaatgtaatgtcttggaac

SEQ ID NO: 762395 - DNA, 100 bp, Homo sapiens
cgaccacccctacattgtgaagctcctgggagcctactatcacgacgggaagctgtggaaacgatcttcaagacacagaaataagtccaagacagaatcg

SEQ ID NO: 762396 - DNA, 82 bp, Homo sapiens
ggatgactgagtacctgaaccggcacctgcacacctggatccaggataacggaggctggggcgaactttctgaccaagtata

SEQ ID NO: 762397 - DNA, 100 bp, Homo sapiens
ctacaaacccatttcagaccaatgccagaggagcaacaggtaaatatgctgaagatatatttggagaattattcaatgaagcacatagtttttccttcag

SEQ ID NO: 762398 - DNA, 100 bp, Homo sapiens
tggactatctgaggacacttgtccagcgagccccactgctcggggaggaggagccacggccggggacaggtaatggatgtgaagaacagaaaccccagag

SEQ ID NO: 762399 - DNA, 100 bp, Homo sapiens
ctcactggcggtgcgcgacctgggctggctccgggggtggcgggcgcagctgctgtgacagagtaaacatcagtctccaaagataactacatcccttctt

SEQ ID NO: 762400 - DNA, 74 bp, Homo sapiens
ggagcccatggaatcggtcctggaggacagagcctgtggggcccggatagtcagccgaccagaggaactgagag

SEQ ID NO: 762401 - DNA, 75 bp, Homo sapiens
gacttttcctgtggtaataataggtgacagagctgaatgaacctctctccaatgaagatcgaaatctcctctctg

SEQ ID NO: 762402 - DNA, 75 bp, Homo sapiens
catcgacctgcagtccatgcaccagtttcgccaggacacagcattgacttccaaagactcctggcacatgaggaa

SEQ ID NO: 762403 - DNA, 74 bp, Homo sapiens
cggagaggtagccatgatgccccacttggtgaatggagatgcagctcagcagatgcagctggaaacagagaagg

SEQ ID NO: 762404 - DNA, 100 bp, Homo sapiens
gccggagcccgagtggatcggggacggagagaacacgagcccatcagctgatcttgcatctttaatggataaaacatttgagagaaagttgcctgttagt

SEQ ID NO: 762405 - DNA, 82 bp, Homo sapiens
tggtcctcgatccgcccacagacctcaaattcaaagcttttctgggagaagaggctacaaggacttagtgcatcagatgtaa

SEQ ID NO: 762406 - DNA, 75 bp, Homo sapiens
gtattgattctactcttctctacaaatatagactccgttccctaccacagcctttacccggcagtgtcacctgct

SEQ ID NO: 762407 - DNA, 74 bp, Homo sapiens
aagattgccaggatggccgggacgaggccaattgccatgctgcagttggagaagaaacttgaacgtgaacttga

SEQ ID NO: 762408 - DNA, 75 bp, Homo sapiens
atgtctgaggtgatccaggcctatgaaactctgcatggatgaagtacattgagacagagctaaagaagaggaaag

SEQ ID NO: 762409 - DNA, 74 bp, Homo sapiens
acagagtgaaggggaggtgccagcccgcgaatccggccggaggatcacgcagatttgcgaagccatttcttcac

SEQ ID NO: 762410 - DNA, 80 bp, Homo sapiens
gtccacccaccgccgccgcctcccagggtctcttgcaacgtgtgagctgcctcttgccaagagtgagtggcaaaagaaac

SEQ ID NO: 762411 - DNA, 82 bp, Homo sapiens
cctccactggcaaagagtcacctaaagttaggcggcactccagccccagctcgtctccacaaaccggaggactacccccaga

SEQ ID NO: 762412 - DNA, 75 bp, Homo sapiens
cgggatctcggtgctgcagacggcgagacctcctgcacagttccggaactttaagatcatttaccgccgctatgc

SEQ ID NO: 762413 - DNA, 110 bp, Homo sapiens
gaaagatacttgaaatcaacaggaaagagaggttcttgatcgctgcagcaaatggcaacttgtgcagtccaagccttatgcatttgatcgggtgttccagtcaagcacat

SEQ ID NO: 762414 - DNA, 82 bp, Homo sapiens
tgcctcagcctcccgagtggctgggactacagttggaggtccccctccccactaagtgcctctttgcatagcaccagtcccc

SEQ ID NO: 762415 - DNA, 90 bp, Homo sapiens
cgttgcctgctcccggagggagacgcgctgccgaggagaacccagcgggtttgcctcggagcgtgtgaacattcctccgctcggttttca

SEQ ID NO: 762416 - DNA, 75 bp, Homo sapiens
ccaagcccctcttcaggagtaagagcgccagtggaacatgtggatcccaggatttggctctgaagaaatccgacc

SEQ ID NO: 762417 - DNA, 82 bp, Homo sapiens
tcggggtccggaaccagacgatgagacagagttgcgaccgcgcggcagctttcggcagctggggtaccccaggcagaggcag

SEQ ID NO: 762418 - DNA, 83 bp, Homo sapiens
gagcaaccctgtaaaaccagccttagactatttttcaaacagaactgtggctgcaccatctgtcttcatcttcccgccatctg

SEQ ID NO: 762419 - DNA, 90 bp, Homo sapiens
cgacgtcttgcctgtgtcccacttgttcgcggcctatagcgtgaagcctctgcgggccttcttttcgtcttatttgaagtcattgccgga

SEQ ID NO: 762420 - DNA, 75 bp, Homo sapiens
cgacagcttccacagcttccaccaaagggaacgttggatagaattcattcggctcctaaagaagtagcagtgtcc

SEQ ID NO: 762421 - DNA, 100 bp, Homo sapiens
ggctttggctcagcagtaactcctccataaaaacaagtgtgtgcatctggctgttagaagaattcatgctcatccgggtcggtgcccactttctggaggc

SEQ ID NO: 762422 - DNA, 100 bp, Homo sapiens
acaggacagcatcctcaatcaatccaacagcatattcggttgcatcttctacacactacagctattgttagaccatgctcgacagctgaccaaggccatg

SEQ ID NO: 762423 - DNA, 106 bp, Homo sapiens
taaaaggaggacctctcgccaagggccccaatgagtggcacacagtctactatcaccgacagaaaatttttactactggagatgtcaacaaagatgggaagctgga

SEQ ID NO: 762424 - DNA, 74 bp, Homo sapiens
aatgagactccctcagatccagtgataattgacagtttgaggtggtatcaacatcctacagaagaagaattaag

SEQ ID NO: 762425 - DNA, 75 bp, Homo sapiens
agctgcttatttcggctgtgaaggacctgtttggggagttggaatcgaagcctcttaaaatggcagatgacttgg

SEQ ID NO: 762426 - DNA, 100 bp, Homo sapiens
cggccgagttctccagcctgctgcgcaggataaaaggcaaactcttcacctgaccccaagactgcttctgagacagaaacagatatctgtgctgaatggg

SEQ ID NO: 762427 - DNA, 100 bp, Homo sapiens
ctgttggtctcggccctgcggaagagtaatcaagtcagaggattatatgacttttatctgcctagagaagaactatggatctacaacatggagactggaa

SEQ ID NO: 762428 - DNA, 100 bp, Homo sapiens
tgcaccggggcggtccgttgccaaagccagaatcaggaaacccaggcccaacggcaggtggatgcaagaagaaatgttccccaaaacgacccagtgacag

SEQ ID NO: 762429 - DNA, 82 bp, Homo sapiens
cgccgctctagcggccgggactctgaactatggcgaaaacctcggatcaattctcagctggtggcacaacaagtggcacaac

SEQ ID NO: 762430 - DNA, 96 bp, Homo sapiens
gggtgtgacgttgaagatgtcggccttctgagccgactgcggtggtcaagagttcaaaagaatgctgaaccgggagctgacacacctctcagagat

SEQ ID NO: 762431 - DNA, 75 bp, Homo sapiens
cgcccgccgccgagccgtctcctgcagcggcccccgccgggtttggtgcacctcgatttggaggaagtagggcag

SEQ ID NO: 762432 - DNA, 101 bp, Homo sapiens
aaggcagacagcgagtggcgacgatttgtattccctgaatgactataaaccacccatttcgaaagcgaaaatgacccaaattactaaggcagccatcaaag

SEQ ID NO: 762433 - DNA, 100 bp, Homo sapiens
cggcggcggctgcgggctgagcggcgagtttccgatttaaagctgagctgcgaggaaaatggcggcgggaggcaaagtgtttcatggatttcaaagctgg

SEQ ID NO: 762434 - DNA, 100 bp, Homo sapiens
gtgccgcggcggccgcgcagggagctctcgaggcaacgccggggcgcccgaggtctggaaggcgcaggttcgccatcggtggtgtgaactcattgttaag

SEQ ID NO: 762435 - DNA, 75 bp, Homo sapiens
gtgttccaagcacagatgaagctctggggggccactaaagatgctggccagatatctggactgaatgtgcttcgg

SEQ ID NO: 762436 - DNA, 80 bp, Homo sapiens
ggcagcgggagggcgcgcggccgagcggaggcggagtcggcgccgagaacatggtcctaggcctacttacaagcctccag

SEQ ID NO: 762437 - DNA, 76 bp, Homo sapiens
cagcatctttgtctagccccagtgcaggaggagacatcacagctttcccagatcgggaggaaaaatatggaatgtg

SEQ ID NO: 762438 - DNA, 83 bp, Homo sapiens
cggacggggcggacggcgacgcagcccgcggcagaagtgcctccggagccagcgtggtggccatagacaacaagatcgaacag

SEQ ID NO: 762439 - DNA, 90 bp, Homo sapiens
caacaggaaagtctaagggatatggctttgtctcctttttcaacaaatgggtcctttggcttgggagaatcctggtaactgcagaaggag

SEQ ID NO: 762440 - DNA, 74 bp, Homo sapiens
tgacaagaaggtgaagcaggcggccaaggagaagggcggcgactggcggcgcgatggacctgaccgggctcctg

SEQ ID NO: 762441 - DNA, 83 bp, Homo sapiens
gtggaggggaatagactccatctatccatatgagcctccagcaggagcagtggatgaatgtctgtgttggtgatattatcaag

SEQ ID NO: 762442 - DNA, 74 bp, Homo sapiens
atgaagaccaatttttacgtctagatttccatgcccatggaaggacaccatgtaaaattgaacctagtataaac

SEQ ID NO: 762443 - DNA, 98 bp, Homo sapiens
tcttcctcgttagaagaaatcaggataacaaaggcatattgggcacccctacaaaagggctatcaaaaggagatgtgagagagggtattgagtctggc

SEQ ID NO: 762444 - DNA, 90 bp, Homo sapiens
gccggctgctgctactactaccactttgggctgatggcaactgggaaatcctcattgacgattcaatttgttgaaggccaatttgtggac

SEQ ID NO: 762445 - DNA, 75 bp, Homo sapiens
gtggaaaatgcgctcgggctggaccagcaggtttacccaaggtccagcctagcccctaggcaccatgtcggacag

SEQ ID NO: 762446 - DNA, 75 bp, Homo sapiens
agctggggcagctctcgtgttcgtattctctagtggacaggtgtatggaatgattcggttctcaggcaccacagg

SEQ ID NO: 762447 - DNA, 96 bp, Homo sapiens
aaacttcgccaactccgctgcctttgccgccaccatgcccaaaacgattgaagagggcagtaaagccgcggcggtcgacaagttactggctggaga

SEQ ID NO: 762448 - DNA, 100 bp, Homo sapiens
gagaaagcggggcccgaggaggccaaggcgccagtgagaggcgtgctacaaggtgagctgcctggaaatccctgggccctctggccccaagggctaccgt

SEQ ID NO: 762449 - DNA, 88 bp, Homo sapiens
ggtggtgctcctttcctacactctgaagaccactttccagaatggagatctcctctcatcagtctcacctcctgcagcaactgaacga

SEQ ID NO: 762450 - DNA, 140 bp, Homo sapiens
cggcccgcctggcctgcagcgctcccacccccggcggcggcacgatgccctttgacttcaggaggcattgaagttgatatcgatgtggagcacggagggaaaagaagccgcctgacccccgtctctccagagagttccag

SEQ ID NO: 762451 - DNA, 100 bp, Homo sapiens
tatagagcaactgttgaactcagctgcctgtaggtttgggagaaggttcgtgctcagatggtgttacctccaggttgccattgttggcacctgtgcagcc

SEQ ID NO: 762452 - DNA, 88 bp, Homo sapiens
cgacagcacagacagaatccctgctaccatggcactaaggaaaacagatcatctctccctagacaaagccaccatcccgcccgaaatc

SEQ ID NO: 762453 - DNA, 96 bp, Homo sapiens
tggtgctggtgatccccttccagaaccctgaagagcaggaatgtcatccacgccagcgactccgtggagggggcccagcgggagatccagctgtgg

SEQ ID NO: 762454 - DNA, 100 bp, Homo sapiens
tgctgggattcgcgctgctgggcacccacggagcctccggggctggccctcagtctccgaggaggatctcaaggtcctgttttccagcaatgggggcgtc

SEQ ID NO: 762455 - DNA, 100 bp, Homo sapiens
gctcaagttagtagaacagatcagtctggtccatcgaactcatatgtcatcctgtcgggtggataagccctctgagatagtagatgttggagataaagtg

SEQ ID NO: 762456 - DNA, 51 bp, Homo sapiens
agcctcccaagtagctgggactacaggtgcccgccaccatgcccggctaat

SEQ ID NO: 762457 - DNA, 101 bp, Homo sapiens
ctcagggcagttcctacagatgaagcaagagcttttgcaggaattactctgcttaatgtaagcaagctgaacattttgaagcttgctcctggtgggcatgt

SEQ ID NO: 762458 - DNA, 75 bp, Homo sapiens
tttgccaatgttggagccgtctgcaaagtgtccccggcaagaagagccagtcttggtgctctgtgttcacctggt

SEQ ID NO: 762459 - DNA, 89 bp, Homo sapiens
tcgctggctctgctgctgccgccggcgaaggaggaggcgttgccgggaaaatcatcagcgtgttagcattttctttgactatgcaagat

SEQ ID NO: 762460 - DNA, 100 bp, Homo sapiens
gattactgctactggtcagtcaacccagaggatccccagtatgcatctcaagatgtgctcctctggtgcaagtgtggtagctattgacaacaaaatcgag

SEQ ID NO: 762461 - DNA, 90 bp, Homo sapiens
ctcctagctcatttcgacagccttattcaattagcagagcctcacagacaatggccaaatgtgtcaaagctgtcacagagggtgcccagg

SEQ ID NO: 762462 - DNA, 96 bp, Homo sapiens
cggctcctccagctaccggcccaaggccatctacctggacatcgatggacgcattcagaagctcaaactggaggattataaggatcgcctgaaaag

SEQ ID NO: 762463 - DNA, 74 bp, Homo sapiens
cttatctacaatcatatcacaaacaaaatccagtctcatagcagaggagaatataatgtttacagcaccttcca

SEQ ID NO: 762464 - DNA, 96 bp, Homo sapiens
agctggattacacacagcaagttcctgcttctgggacagctctactgacgaaatcatgaccaccccaggaaaagagaactttcgcctgaaaagtta

SEQ ID NO: 762465 - DNA, 82 bp, Homo sapiens
cttatctgtgtctccttcctttcagaatggaaaaaggccctcttcaagcctggaactgtggctgcaccatctgtcttcatct

SEQ ID NO: 762466 - DNA, 75 bp, Homo sapiens
gtggatgggctagtgttggacacactggcagtaatacggactcttgtagataactactcagctgcttaagctggc

SEQ ID NO: 762467 - DNA, 82 bp, Homo sapiens
acggaggaagagccgggcagtccctggagcgggccagatgtggacgagtgctcactagcagaaaaaacctgtgtgaggaaaa

SEQ ID NO: 762468 - DNA, 82 bp, Homo sapiens
attcgaactgttgtaagaggtcagacgaacgtggggcaggatggacggcaaaaatggtggagtcaatgaagaaagtagcagg

SEQ ID NO: 762469 - DNA, 100 bp, Homo sapiens
gtgggtgctcacagctgcccattgcctaaagaaagaagaagaagttggatgggataccgagattaaggatgatgtgattgaagaatgtaataaacatgga

SEQ ID NO: 762470 - DNA, 101 bp, Homo sapiens
taaccctcactggagaatccagaggttacgaagtgacagtgctggtgcgggactcctccaggctgccatcagaggggccccggccggcccacgtggtagtg

SEQ ID NO: 762471 - DNA, 90 bp, Homo sapiens
gttcctacagagattcatatgagagttatggactttgtttggagaagctgcctatttcttcttctaccagtaatctccatgtggaccggg

SEQ ID NO: 762472 - DNA, 75 bp, Homo sapiens
aggtcacttctgcctttccagtgacaaaatggtgtggattacaccagcggagccatgctcaccggtgagctcaag

SEQ ID NO: 762473 - DNA, 75 bp, Homo sapiens
ttatatagagatgtgatgttggagaactacagaaacctcgtctccctgggtggagccgccaccaaaatgcagatt

SEQ ID NO: 762474 - DNA, 98 bp, Homo sapiens
ctgggcctcatttccgcaacttttcggctccgaactgctgtcccaagtcatttgcaaaggcattttccagtggctatctacttggagaagttctacac

SEQ ID NO: 762475 - DNA, 100 bp, Homo sapiens
taacagaaaaacccattgttctaaaggctgagtcaagggatgagaccgtgaatccctgactccagaacgcactcagctcctctatctccttgctgttgct

SEQ ID NO: 762476 - DNA, 101 bp, Homo sapiens
ctcttcggtttcctggctttcatgatattcatgtgctgggtgggggacgtgtaccctgtctaccagcctgtggaaggtggacttttaaatattctccactg

SEQ ID NO: 762477 - DNA, 50 bp, Homo sapiens
gcttgcagaaaaattggtgtacctcagggtggagccagccatcctgagac

SEQ ID NO: 762478 - DNA, 75 bp, Homo sapiens
ctacctgacgggcctgcgagggttgaagattgtgaagcaatagcctaaggtgtttgatatacagaggaaagtcac

SEQ ID NO: 762479 - DNA, 145 bp, Homo sapiens
aggtttcaacctgcgcattgggaggccgaagggtccccgggacccgcctgctgagtggacccgggtgagatcatgcacgccctgaagatgacctggcacgtgcactgctttacctgtgctgcctgcaagacgcccatccggaaca

SEQ ID NO: 762480 - DNA, 74 bp, Homo sapiens
gcttcagctcatctttggcaggaaggcgaggcttccgcccggcacagggggtcgcaatggaagaagagatcgcc

SEQ ID NO: 762481 - DNA, 76 bp, Homo sapiens
ctttgcctcaagacccagctattgttcagccaatggagatcttcgtggatgatgagacgaagttgacgctgcatgg

SEQ ID NO: 762482 - DNA, 74 bp, Homo sapiens
gttagaaggttctggtcttgcactaagcaagggcaagtattttgtaaccttcccatatccatatatgaatggac

SEQ ID NO: 762483 - DNA, 74 bp, Homo sapiens
aaggagagaatgtatgaagaacagtcacaggacaggattcagtggtcccaatttaaaggctattttattttcaa

SEQ ID NO: 762484 - DNA, 99 bp, Homo sapiens
tggggttcggcgctatggaggagctcgatggcgagccaacagtcactcaaaccagtccagctacgggggcccagccagccagcagctgagtgggggtta

SEQ ID NO: 762485 - DNA, 76 bp, Homo sapiens
ctctggatggaagccatggatggccgggaacctggcccagcactagaagatttcagtcatctgccaccagaacaga

SEQ ID NO: 762486 - DNA, 95 bp, Homo sapiens
gttagcccgtcagtccctgctctgtgcgcgcctccatctgggccatggatggtgcacgatctgattttctggagagatgtgaagaagactgggtt

SEQ ID NO: 762487 - DNA, 82 bp, Homo sapiens
gttcctttgtcaagagcatactttggaccctgttttcagaaagcaggaaaatatatgcagatgatgaacattcttaagccaa

SEQ ID NO: 762488 - DNA, 80 bp, Homo sapiens
cttttcttcaatgataagagctgtcagttttctgtggatgaaggcgaccactttatcaagttcttcgctccgtggtgtgg

SEQ ID NO: 762489 - DNA, 51 bp, Homo sapiens
actgcttcttcagctcaaacaagagaaccaaaaacttttgctagaaaatca

SEQ ID NO: 762490 - DNA, 100 bp, Homo sapiens
ctggatccagcagtacatgaagttccctttcctgccaatattgggaccagaggaagaccgagaggcagaatccgagttaacagtaacacagttgaaggaa

SEQ ID NO: 762491 - DNA, 83 bp, Homo sapiens
gtgtgagcagggctgagatgggcaccgcggatctggggccgtcctcaggtgctcttacagcctgttccaagtgtggcttaatc

SEQ ID NO: 762492 - DNA, 135 bp, Homo sapiens
cgggagcctgggcggcgagccgggtgtgagctgcctgaaaatgcactcggatgccgccgctgtcaacaatgcagatcttcgtgaagactctgactggtaagaccatcaccctcgaggttgagcccagtgacacca

SEQ ID NO: 762493 - DNA, 100 bp, Homo sapiens
cagatcctctggttccggggcctgaaccgtatccagactcagagaatggatcttggagaatgtctgaaagtccatgacctggctttaagagcggattatg

SEQ ID NO: 762494 - DNA, 83 bp, Homo sapiens
ctccactccgtcccccgcgggtctgctctgtgtgccatggacgggtctcctccgggctggggctgagcaagccctcggagtga

SEQ ID NO: 762495 - DNA, 75 bp, Homo sapiens
gtccgggccccggggggtccaggagccatgggaccacaccaccaccaccacaaccaataggccaggaaccaccag

SEQ ID NO: 762496 - DNA, 100 bp, Homo sapiens
tcgtagcgcagaaagtgaagctgtttcgggccagcgacccgctgctcagcgtcctcatgtggggggtaaaccactcggtcttgagtcaccacgtccgaat

SEQ ID NO: 762497 - DNA, 100 bp, Homo sapiens
ccaagtttgacctcagttggtctgacttcagatccctccctcttgcctactttgtgtccttacccctggtgctggagaatctggtaaaagcaccattgtg

SEQ ID NO: 762498 - DNA, 90 bp, Homo sapiens
cctcttgtcctcctcagcctcgttccagggtctccctccactgctgtagtaacccgggtccggggcctcggtggtgctcctgatgcccct

SEQ ID NO: 762499 - DNA, 100 bp, Homo sapiens
tatccacaactggccacagctgtgcttcttggtccttttggaataaatcatgggattgagcttcattcagatgtggtggaatatgccaaggaaaaactgg

SEQ ID NO: 762500 - DNA, 82 bp, Homo sapiens
cgccgtgttcgacatcctggccgtgctgcaggcgagaaccactgtctctgatcaacgtgcggaagaggaacgtggaatctgg

SEQ ID NO: 762501 - DNA, 100 bp, Homo sapiens
caggcgctcaccatgttccctggagcaactgaagcagcagcgggacaagctgaggcagtaccagaagaggatcgcccagcagctggagcgcgagcgcgcc

SEQ ID NO: 762502 - DNA, 75 bp, Homo sapiens
acgagtcctcactgaactggcctcagactttgagaatcactacaagaaaaactccttgtggtgaaggttctaaga

SEQ ID NO: 762503 - DNA, 100 bp, Homo sapiens
tggacgagccccgtgccattgcactgcatcccgagatgggcaaagaacagtctgaacttgatcaagatttggatgatgttgaagaagtagaagaagagga

SEQ ID NO: 762504 - DNA, 74 bp, Homo sapiens
ttggagcgaagagctcggaccaagcgctcagttacttacacattgggcatgcaaaagctgctcttctgaaccag

SEQ ID NO: 762505 - DNA, 111 bp, Homo sapiens
gaagagggtctggaggagccttctcaagaacagagcaggacctgggagcgcccgctgcgcccagtctccagagatgtcatcgtccgctggtttaaggaggagcagctgcct

SEQ ID NO: 762506 - DNA, 98 bp, Homo sapiens
tacagagcaacttgatgaaggtacacccaatagagagaaatctcctgcaaagaagctgagccatgcaattagtaaatctttggggtgtgtacccacga

SEQ ID NO: 762507 - DNA, 100 bp, Homo sapiens
cgcttcccctttccagagagccagaaagaaaaaccaatagagccatggcgactccctctgctgccttcgaggcccttatgaatggtgtgacaagctggga

SEQ ID NO: 762508 - DNA, 100 bp, Homo sapiens
gggagcgcagatcggcgcccagcaatcacagaagccgacaaggcgttcaagcgaaaacatgaccgctgagcccatgagatttcaggaaaccttactgtgc

SEQ ID NO: 762509 - DNA, 101 bp, Homo sapiens
agatcgggatttacgtggagatcaagcgcagcgatgatcgtcagtatttaaacagatcacatcatgcgtgagtacaagctagtggtccttggttcaggagg

SEQ ID NO: 762510 - DNA, 129 bp, Homo sapiens
agccggggcctccgtattgaatgaaagacccagtgcaaagacatcaccatgaacactagcagcatagaatgtcaagctaaccaggcgtccgctacttcagaagagtgtactgtcgcatggggagtctgt

SEQ ID NO: 762511 - DNA, 96 bp, Homo sapiens
cgtattctcagagtaaaagttgtttctggaattgatctcgccaaaaaggacatctttggagccagccacctgtctttaccagtttccaagactatg

SEQ ID NO: 762512 - DNA, 111 bp, Homo sapiens
accggtttggttgaagttggagaagtatccaatagggatattgtagaaactgtctttaacctggagtctaccatggctcaagaatctcccaaaaattcagcagcagaaatt

SEQ ID NO: 762513 - DNA, 75 bp, Homo sapiens
agcctatgggtgaaatttggctttcattcatgaatgagaattcagtaattggatcataacgagacttctgcggat

SEQ ID NO: 762514 - DNA, 90 bp, Homo sapiens
agcatcgactggaccaagatcgagcccagcgtcaacttcctcaagtcgcccaaagaggttggaaagaaccatgactgtattcaggaaggc

SEQ ID NO: 762515 - DNA, 90 bp, Homo sapiens
ggcggcccgggctgtagtgccggcgccgccgcgtcttcccggtctcctttcccggccgcacaggcaatcatttggggaagaatctacagt

SEQ ID NO: 762516 - DNA, 83 bp, Homo sapiens
gcttgatgtgcgcggagagcaatcgccgggacagctgcaagcaattctgtggtgttcttggtcacacatttatggagtttctg

SEQ ID NO: 762517 - DNA, 51 bp, Homo sapiens
catagctgttatcaaaggaatgtaccagatgggatctcactctgtcggcca

SEQ ID NO: 762518 - DNA, 100 bp, Homo sapiens
ggtgccttggttcatccctaagggtcctaaccggggatatctcttccaaacacatgatgaaggaggtcttgtcaacagggcaaggcaatagagaagtgat

SEQ ID NO: 762519 - DNA, 97 bp, Homo sapiens
ggactccaggtggccacaagccctgactttgatgggaaattaaaagggagagcttatggatggagaccaaacatccagatctggagtgccggcacag

SEQ ID NO: 762520 - DNA, 90 bp, Homo sapiens
tttggggctgcttttcattaaaaggaaaaccttgccaaggacttctgtaccctcaatatctgcaattcaattcgtcataatctgtcccta

SEQ ID NO: 762521 - DNA, 80 bp, Homo sapiens
cctcaaggctcccctcacaaagatatgtgtcacaaagatgtctacacggaactgccagggaatggactcagtgatcaaac

SEQ ID NO: 762522 - DNA, 75 bp, Homo sapiens
aaaccccgccatggaggcttcattctggacgaggctggtcttctcagtacagcatggtggctggggcaggccgag

SEQ ID NO: 762523 - DNA, 100 bp, Homo sapiens
ggatggcttacatcttcctgaatcgagcagagaaactcaaaagcggcgccaggaaattgaacaaaaacttgaagttcaggcagaagaagagagaaagcag

SEQ ID NO: 762524 - DNA, 75 bp, Homo sapiens
cctggctgcctcagccctaccagcactggtcatgtctaaaggtacaactccaaaaggagacattggagaagaacc

SEQ ID NO: 762525 - DNA, 82 bp, Homo sapiens
gctgctccactggcccctcatgtaacctcagagatctgggcagatcttcttcagcagtatcgttctgctgtgtgcaaactag

SEQ ID NO: 762526 - DNA, 100 bp, Homo sapiens
atgagtgatgtggaggaaaacaacttcgagggcagaacccaatgtctgtggatcacgttataatgcttactgttgccctggatggaaaaccttacctggc

SEQ ID NO: 762527 - DNA, 75 bp, Homo sapiens
tttccatttgatcctccatttgttcgagtggtgttacctgttctctcaggaggatgaggaaaatgaggcccaaag

SEQ ID NO: 762528 - DNA, 90 bp, Homo sapiens
ccggctccggacgcttccggtcttagctggacccgtctgggaggatactggtatcgggatgacacaggaagagctggtgtccaacctggg

SEQ ID NO: 762529 - DNA, 90 bp, Homo sapiens
tgagatttttcagggaacattaactaatgaaaccagatgtcttacttgtgaaactgtggatgcagaccaagttatcctctctcacagccc

SEQ ID NO: 762530 - DNA, 90 bp, Homo sapiens
atcttgttctcgagttttctctgccatgttgctattgcaggacggagctcccctgcaaactttgctgtgtacactgccctggtggaaccc

SEQ ID NO: 762531 - DNA, 88 bp, Homo sapiens
tcatcctccacagctccagggaaggcactcaaaagtggggggcaggaaagggaaaaggacttggaggccaagttcattattcagatgg

SEQ ID NO: 762532 - DNA, 75 bp, Homo sapiens
acagacactgacctgtacacaggaccctgtgggcattgaaatccaactcactcatgcttatttcctgtaatggac

SEQ ID NO: 762533 - DNA, 87 bp, Homo sapiens
tttgtggaactactctacggcatctggagcaactggtgtcatgtgattctctgagggagcagctgcgtgagtggagatgctttcagt

SEQ ID NO: 762534 - DNA, 80 bp, Homo sapiens
cggcgaacgcggagagcacgccatgaaggcctcgggcacgataccggggagaccacgacgctgcctcctgggcgccatga

SEQ ID NO: 762535 - DNA, 73 bp, Homo sapiens
gtgaacgtgctgtggaatatatggaaagcagagagacacagtgtgaaatcgctgctctcagatcagcacacgg

SEQ ID NO: 762536 - DNA, 100 bp, Homo sapiens
aaaaactaacagggatcttgaaattaaagatcagaccccaagactgcttctgagacagaaacagatatctgtgctgaatgggagataaagaccatcacta

SEQ ID NO: 762537 - DNA, 100 bp, Homo sapiens
acagaagcaactcacaacaaggaaagtcccctgattacctaaaaccagatccatggatgatcttctttctgcctgtgacacaagcagccccctgactcgt

SEQ ID NO: 762538 - DNA, 75 bp, Homo sapiens
gagcgacagcggcgagcagaactacggcgagcggggccaattcctgtccccccagcagcatggcatcgtgtgctg

SEQ ID NO: 762539 - DNA, 116 bp, Homo sapiens
gccactgcagccggtcctcttggggaaggctgtgtgggccagcccagccatgcgtttgcctcagcatggagggcggggccgcggcagccacccccacagcactgccttactacgtg

SEQ ID NO: 762540 - DNA, 82 bp, Homo sapiens
attgacagaaaaggattctgtgaaggaggagtttgtttacgaggacatggaggccctctgcagtgtcctgcgcactctggcc

SEQ ID NO: 762541 - DNA, 75 bp, Homo sapiens
gagttgtctgtgcagatgtacgcccaagccgccctggatggagactcccaggctactctgaacgcccggacgtcc

SEQ ID NO: 762542 - DNA, 75 bp, Homo sapiens
tggtgcatgtgaagttatcaaaaacagcttcagaggatgattccgaagaagacggagaccataacaggacatttg

SEQ ID NO: 762543 - DNA, 75 bp, Homo sapiens
ccacattcaggggaaccgcctcaccgttctgcccccagaactagattcacagaagtcttcaggagcaaacacaag

SEQ ID NO: 762544 - DNA, 100 bp, Homo sapiens
ggaagaggcactgctgagggggcgcgaggggaacggaggccagagctgcggagagggagctggagctgcagaaggaacagcggcggcaggaggagaacga

SEQ ID NO: 762545 - DNA, 50 bp, Homo sapiens
ggaggtgctccgactgtccctgagtgtggccaaacgtggacaactatgag

SEQ ID NO: 762546 - DNA, 82 bp, Homo sapiens
cggcctacagcaaggcctacggcaggatgggtgttctaagaacggaagcatctgggctggatggaatttagcatcaagcaga

SEQ ID NO: 762547 - DNA, 51 bp, Homo sapiens
agatgatgtagacactggactattaggttttagctaaagaagatactgagg

SEQ ID NO: 762548 - DNA, 96 bp, Homo sapiens
ggtggtgttgtcgtggccggagcggcccgcgcctgggctgccggcacttcgcggcaggtgtcatggagaaactccagctgggcccagagattctgc

SEQ ID NO: 762549 - DNA, 88 bp, Homo sapiens
aggaggctcgggtcgttgtggtgcgctgtcttcccgcttgcgtcagggacctgcccgactcagtgtttgatgaaggccggaacaactt

SEQ ID NO: 762550 - DNA, 87 bp, Homo sapiens
aagccttaaggaaggaagcagagcgccaggcattagcgcagctcgagaaggccaagacaagcaagcagttggcagcagccttccaag

SEQ ID NO: 762551 - DNA, 101 bp, Homo sapiens
cacgtcggatgttgcagcagagccagcagctagcgcagagcaaatcatggaggaagataaaaaacatggtgcactggtctcccttcgtcatgtccttcaag

SEQ ID NO: 762552 - DNA, 82 bp, Homo sapiens
taccacagccctgtactacctggtgttcaccctgatgaagatctccttcaacgacaaaagcctgcagaccacatttgagtac

SEQ ID NO: 762553 - DNA, 102 bp, Homo sapiens
gcctaagcaagtgtctgcagtgccaaatgtgtgacccagggaaggtgctgagctactggtgcttcagtcccggccacagcatgcacgagctggtccgccagg

SEQ ID NO: 762554 - DNA, 100 bp, Homo sapiens
agtacctgcagaaggtctctggagacatcttcagcaggcagttccggcgaggggggagcctcagcaggattgctgtgtgaaaaccgagctgctgggagaa

SEQ ID NO: 762555 - DNA, 94 bp, Homo sapiens
gctgctcaaagctgctgccgccccttgggctaaaaggtgtggacactgccagcggctgcagccgacttggaatgacctgggagacaaatacaac

SEQ ID NO: 762556 - DNA, 90 bp, Homo sapiens
ccctggttgtgagaagacgtctgtgtcgtgcgactctcagcgttctcatctctcttccttcaccatgaagctgatggacaaattccactc

SEQ ID NO: 762557 - DNA, 98 bp, Homo sapiens
ctcccgggcggattccagccccgagcgggacagcgcggcggggagcgacgagcctttgaactggccacaggtgactatttgtttgaacctcattcagg

SEQ ID NO: 762558 - DNA, 50 bp, Homo sapiens
ggagactaaggaccttagcatgtcaaaaaactttagaaactgttcctttg

SEQ ID NO: 762559 - DNA, 100 bp, Homo sapiens
atgggatctttccggatcaatccagatggcagccagtcagtggtggagctgcccctgagcctggacctgcccagcccccggcccttcgctttgcctctgg

SEQ ID NO: 762560 - DNA, 75 bp, Homo sapiens
agaagaagaagcaggatgaactgaaacggattgccagagaattggcagaaggtcctggcattgatgtgcctgctc

SEQ ID NO: 762561 - DNA, 75 bp, Homo sapiens
agacagttcctgtcataccttttaaaggtatttgtggaatcgatgaatttgataagatggggaatcaacatcaag

SEQ ID NO: 762562 - DNA, 50 bp, Homo sapiens
ttccgtgtcaagacccccacaggacaatcatatcctgattcagcccttcc

SEQ ID NO: 762563 - DNA, 73 bp, Homo sapiens
tccggccgtgtcccgaggaagtgcaagacccggaatttttcacagacaacctatgggacacactcccttgctc

SEQ ID NO: 762564 - DNA, 78 bp, Homo sapiens
gtcaggtctggagctcgaccgggccaggcacaacttcctgaatggaccatgactcccaccaaagatccctgtctctga

SEQ ID NO: 762565 - DNA, 116 bp, Homo sapiens
agaaggcgtctcatggcgttggaataccggctctcagcggctccttcctacagcaacttcccactccaggtggccagacgggagttccagaccagtgttgtctcccgggacattga

SEQ ID NO: 762566 - DNA, 98 bp, Homo sapiens
ctattatcagggaccttgtggatgatatcttcactgtcacagaggatgaaattaaggaactgtatcggcagtcaggacccctactgcgggtgggcccc

SEQ ID NO: 762567 - DNA, 75 bp, Homo sapiens
aaatgagaagctggctatggttaaagcggggatatgcaacgaagcatgttgttgaaggtctggaaccaaggacgc

SEQ ID NO: 762568 - DNA, 100 bp, Homo sapiens
aaaagttaaaacaattgctgcacgaaacactgaaattttggcagctattcaggattatgaaactgctcaggaacacaatgaaaatgatcagcagattcga

SEQ ID NO: 762569 - DNA, 100 bp, Homo sapiens
atcatggcggctgcgctgttcgtgctgctgggattcgcgctgctgggcacccacggagcctccggggctgtaatctatgccagcaattatgacaatgtta

SEQ ID NO: 762570 - DNA, 99 bp, Homo sapiens
gctcggtgcgactgcgcagctcctcggcgcttcctcggtggcttccccgggtcgagcaaacaggtgcccgagatcgtgagcgtcctgcgctccaagctt

SEQ ID NO: 762571 - DNA, 100 bp, Homo sapiens
aggaagccatggactctaccaagtctgaacccctgaagggatcaccagagatccccaaaatggatggaagaatgcgcctaaattgagctgtcaggcactt

SEQ ID NO: 762572 - DNA, 75 bp, Homo sapiens
cccggggctggtgggcctttctgtgtcctactccttgcagtcaccaccaagtaagcgaagaaaattagagaaacc

SEQ ID NO: 762573 - DNA, 100 bp, Homo sapiens
ctaggttctgtgcgctcccgcccaggccggtgcccgccgcccgcctgcgccccaggctggtgcagacatctccatgattgggcagtttggtgttggcttt

SEQ ID NO: 762574 - DNA, 80 bp, Homo sapiens
aagaaaagctgtggcaaccgaaatgagactccctcagatccagtgataattgacaggttggtcaaagaaaaagtgatgta

SEQ ID NO: 762575 - DNA, 51 bp, Homo sapiens
caagtaatggtgcaaagcctgaagaaaatgtttcaacgtgcgcaagagttg

SEQ ID NO: 762576 - DNA, 100 bp, Homo sapiens
gtcccgccccggccggctggcggtcacctggcacaccagcgcccgcaggatgcccagaccccctggttgtggaatacgaggcattgctggtacaactacc

SEQ ID NO: 762577 - DNA, 83 bp, Homo sapiens
ctggtgaacctgaagcttcaccgagtgcagatacaactatactgtttgtaaaaggagaaggttgctccttgagggcaggacag

SEQ ID NO: 762578 - DNA, 75 bp, Homo sapiens
tcgctttgttttcccacgctaggagctaccacaacaggctccagcccccttttggacatcgttggcggccggaag

SEQ ID NO: 762579 - DNA, 83 bp, Homo sapiens
cagattatgatgtttctgttgtgctgcctgaaaagttcgtgtaaattcattagtgtgcttaggaaagattttggaatacttgg

SEQ ID NO: 762580 - DNA, 50 bp, Homo sapiens
ctggcggagcagaacggattgcagggcccagacccatggaaagtggcctg

SEQ ID NO: 762581 - DNA, 98 bp, Homo sapiens
ggcaaaatggcggaccgcttctcccgcttcaacgaagaccgagactttcagtggggagaagacagagagccagaagagctgggattaagccctgggtc

SEQ ID NO: 762582 - DNA, 88 bp, Homo sapiens
aaaatcttagctctctcaatctctgtctgaactggatcataaatgacaggcctttctgtatagagcccacaaacatcgtgaatgtgaa

SEQ ID NO: 762583 - DNA, 100 bp, Homo sapiens
ccgccaatggtgcccccttaccagggtgggcctcctcgacctccgatgggaatgagacctcctgtaatgtcgcaagtgagaaagatcagtctaaagaaaa

SEQ ID NO: 762584 - DNA, 50 bp, Homo sapiens
cgcctgctttgattcattgaaagcacaaatatttaaacatggaaaacgtg

SEQ ID NO: 762585 - DNA, 98 bp, Homo sapiens
aaagaagcccccatactcccggtgaaaaagattgcattcacagagtggattgaaccacctaaacgagaaagaaaagccaactatgccgttgatgcata

SEQ ID NO: 762586 - DNA, 75 bp, Homo sapiens
tcaaactctatttgccaaaggaaacttgccttatcaccttcttgcttgcagtttcaccagtgatcattaaagaat

SEQ ID NO: 762587 - DNA, 75 bp, Homo sapiens
ggaggactctggagctgacagcgcgcacttcacccgcagttgtggagcggaggcggagggacaagatcaacaact

SEQ ID NO: 762588 - DNA, 75 bp, Homo sapiens
gaactgagaagctgtcaccacagatatgaaacacaggcctccttgtcaggcccctacttaacctccgtgatgggg

SEQ ID NO: 762589 - DNA, 75 bp, Homo sapiens
ggcagatggcagggagtgataaggcagataaaacgtcactgtgcagagccttttacagaatattggacttgcatt

SEQ ID NO: 762590 - DNA, 101 bp, Homo sapiens
gaagattgtcagcaaaggaagagatgggaatggaagttggatacactttgtgacttgtacgagacactgaccattacacaggctgttatttttctcaatac

SEQ ID NO: 762591 - DNA, 98 bp, Homo sapiens
tggtgaacttggccatgaccatctggattctcaaagtcatgaacttcacaattaaccttaagcgggtggccgaagtgtggatggatgagtacgcagag

SEQ ID NO: 762592 - DNA, 100 bp, Homo sapiens
cagccgcgcagtcccgaagagtgtaagatgttcgcctgcgccaagctcgcctgcaccccctctctgcttgtctgggttctatactgtgatctcatttgcc

SEQ ID NO: 762593 - DNA, 96 bp, Homo sapiens
aaggtggtggtgtgcgacaacggcaccgggctgaagagacttgctttgacaagtacactgggaacacttaccgagtgggtgacacttatgagcgtc

SEQ ID NO: 762594 - DNA, 100 bp, Homo sapiens
aagatccttcaggtgctggaaaggaatgaggagttacagagggccgagaaggacaggatcaggccccttcacagatgtagtcactacaaatcttaaattg

SEQ ID NO: 762595 - DNA, 110 bp, Homo sapiens
gatctttgataagaatgattcagattttgaagctaaagttaagcaggtggggaacgccaagcacaacgtgcatgtcatgaacatctccacaggcaagaaagtgaaggggg

SEQ ID NO: 762596 - DNA, 100 bp, Homo sapiens
gcagaagacctatctgcatttgagccctcaaagactggcattgcggactgacctccagggagaggcccagatctgatctgcagagatctcccttccggct

SEQ ID NO: 762597 - DNA, 51 bp, Homo sapiens
cttctagatttccctcatagcaaccaggactttaggtgggttgttcagcca

SEQ ID NO: 762598 - DNA, 75 bp, Homo sapiens
gcatgctccccagcggagtactttctggagggaagcaaaccctgcaaagcgggtgcggtggctcacacctgtaat

SEQ ID NO: 762599 - DNA, 75 bp, Homo sapiens
gcttgggccgccgagctggacccggaccggttttgggatcatccagcagctcgtcaacggcatcatcacgcccgc

SEQ ID NO: 762600 - DNA, 100 bp, Homo sapiens
cgggccgcctccgcctctctctttactgcggcgcggggcaaggtattgttgcagcatctggcagtgagactgaggatgaggacagcatggacattccctt

SEQ ID NO: 762601 - DNA, 83 bp, Homo sapiens
cttggacattcagacttcagaatgttgcatttgctggtctggcctttgcgtccttctacctggcagggaagttacactgcttc

SEQ ID NO: 762602 - DNA, 75 bp, Homo sapiens
aaactggagagcttcatcaaaaatagtgatagctttgataaccgaatttgccacatacctgaatttctgccgttc

SEQ ID NO: 762603 - DNA, 100 bp, Homo sapiens
acccttggtgatgagcctcggaaagtgctcctgcggctgtatggagcgattttgcagatgtttttcagaagaagtgaagtcaagatgaagaaccatttgc

SEQ ID NO: 762604 - DNA, 102 bp, Homo sapiens
tgaggtccaggcagtgttctctgacggagctgtctctttgcacacgaggagcctgaaatatggaaaaatgttgccgatgactatatccacaccgcagcctgc

SEQ ID NO: 762605 - DNA, 98 bp, Homo sapiens
gggaaagggataggagaaggatgtggactgcagtgctgcagtgccagcactgccagtgaaagatgtagaagataaacctgaacaacaaaccagaacaa

SEQ ID NO: 762606 - DNA, 50 bp, Homo sapiens
ctcactgtcaagcacgagctgcggactggagatctattgggaaactgatt

SEQ ID NO: 762607 - DNA, 88 bp, Homo sapiens
ccatgaacaactccttcatctacataaagattccacaggttccactgtgtgtcagctacaagggtgagtggaagccccggcagatcga

SEQ ID NO: 762608 - DNA, 98 bp, Homo sapiens
ctggaaagtcggccaagaaagacaaagacccagtgaacaaatccgggggcaaggccaaaaagaagggatttcgcgttgatctgcccattaagtcggcc

SEQ ID NO: 762609 - DNA, 90 bp, Homo sapiens
gcgagccctggtggaggaagagcctttgaagaagatggtggagagaattcgcaagttccagattctcaatgatgagatcatcaccatcct

SEQ ID NO: 762610 - DNA, 75 bp, Homo sapiens
ggaaggcatttccagcccgcccacccagctgcggttggatttctcacgatgtccagtgttatctccatgtctgcc

SEQ ID NO: 762611 - DNA, 90 bp, Homo sapiens
gtacaccgaaactggcttgctatcactcacagtttgccaatatcacagtggtattatgaggtttgcatcgccagcttctatatattacgg

SEQ ID NO: 762612 - DNA, 51 bp, Homo sapiens
gcctcccaaggtgctggaattacaggttttttgccctgacatctcttcgtc

SEQ ID NO: 762613 - DNA, 96 bp, Homo sapiens
cttggtgttgaaagtgaaatgtcatgcctctgaaaatgaagcaatggctgccatccggaagaaactggtgattgttggtgatggagcctgtggaaa

SEQ ID NO: 762614 - DNA, 100 bp, Homo sapiens
agccaaggtgtttccaggaagttcagagagaacaggtgcagctaaatcaagtccagcagctaaaccaggatccacaccttctcgaccctcatcagccaaa

SEQ ID NO: 762615 - DNA, 98 bp, Homo sapiens
ggtgtcgtcgggtgagggtactgagaatcagccgggcatatttgatgagaccttctataatattttttgatgaaatagatggattagctccagttcgc

SEQ ID NO: 762616 - DNA, 100 bp, Homo sapiens
caggcttccgcgtggtgggcagtgtgggcatcccagcactgagttctgcccggttacagatgtagagctaaaacgactgaaggatgctttcaagaggacc

SEQ ID NO: 762617 - DNA, 74 bp, Homo sapiens
tggaaggaaccgctctcgcttcgtcctacacttgcgcaaatgtctccgtggaagatagatgataagcctgtaaa

SEQ ID NO: 762618 - DNA, 100 bp, Homo sapiens
gtgcattacctgcccatcctgttcatcgaccagctcagcaaccgcgtgaaggacctgatgatgtacggagcgcaagaggacggcagcgtcggcgaaggtg

SEQ ID NO: 762619 - DNA, 74 bp, Homo sapiens
agcgcttatggtcaatggtgtcctcaaacagtaccagattagcctgaggcctgctcagtcgttcctaatgaata

SEQ ID NO: 762620 - DNA, 101 bp, Homo sapiens
cggaaagcggcggactatgtccgaagcaaggatttccgggactacctcatgagtggtgcttcatgccccacctccaaccaagatcaaacgggagctgcaca

SEQ ID NO: 762621 - DNA, 50 bp, Homo sapiens
gcccttctctgccgtccctgggagctacgagagtacaaggtagtgggtcg

SEQ ID NO: 762622 - DNA, 96 bp, Homo sapiens
ctgagtacggtctcacagacaacgttgaggtgtttggagaagagggattgaccctgaatcttgaagacgttcagcctcatgacttaggaaaagttg

SEQ ID NO: 762623 - DNA, 88 bp, Homo sapiens
agcaccacgagaagcggaaacatcagccaaccaagatggtccagcacattcgaaagaagcatccagagttcgcccagctctccaacac

SEQ ID NO: 762624 - DNA, 100 bp, Homo sapiens
gctccgtggccttagctgtgctcgcgctactctctctttctggcctggaggctatccagccggagcgggcactggacacaatgaactttgagatgctcaa

SEQ ID NO: 762625 - DNA, 100 bp, Homo sapiens
atccgtctgtccatccgcccactcagctatctgtttatcaagctgaccacagtggccgagaagtcgcgcgtgctgcagctggaggaggagctcaccctgc

SEQ ID NO: 762626 - DNA, 133 bp, Homo sapiens
cgcgggcctacggggcgggggcggggcggcagtgagctcggccggcaaccgagggacccgcgtccagaatgatatggaacctagcaaagctgttccactgaatgcatctaagcaagatggacctatgccaaaa

SEQ ID NO: 762627 - DNA, 100 bp, Homo sapiens
ttggttccaggtgatacagtttgcctttctgttggggatagagttcctgctgacttacgcttgtttgagagtgcacatttggccatgatcgataccctca

SEQ ID NO: 762628 - DNA, 75 bp, Homo sapiens
accaaaggcctgtgtgctgcagaacccccagaccatcatgtcaaaatgcagatcttcgtgaaaacccttaccggc

SEQ ID NO: 762629 - DNA, 125 bp, Homo sapiens
atgacattgtggacagtgacagcgatgctgaggatcgaggaacgttgtctgagtgtgaacatggctacgcctcttcattcccgtccatgccgagcccccgactgcagcattcaaagcccccacgg

SEQ ID NO: 762630 - DNA, 106 bp, Homo sapiens
gtttatatcagccagggatttagttatagaccacatggttgagaaaggagaaagagaaaatgattacttgtagagaaaaatccatttctgcagtggtatggttaag

SEQ ID NO: 762631 - DNA, 75 bp, Homo sapiens
tgatgacaacgtgaagatcatctgcctgggagacagcgcagtgggcaaatccaacaggttcaggagaagtggcac

SEQ ID NO: 762632 - DNA, 75 bp, Homo sapiens
ctcagcacatggtgggggccacaccatttgccgtggccaggctagagcttgaactcagtgaaaatagaatctttg

SEQ ID NO: 762633 - DNA, 50 bp, Homo sapiens
cctcgctgtccctgcggcttctggggggaaatcctcattgacgattcaat

SEQ ID NO: 762634 - DNA, 99 bp, Homo sapiens
atctccatcacccaccaacaacaccacaataatccacagccaagagcatccgggcatcgggccttatcctgttggaaacgatcctttttggatctctgc

SEQ ID NO: 762635 - DNA, 82 bp, Homo sapiens
ctaggggcagcgagcaagacagcaagcagatgtgaagttcatttccaatccgccctccatggtggcagcggggagcgtggtg

SEQ ID NO: 762636 - DNA, 83 bp, Homo sapiens
ccttcatgcccaaatcccggaaactccagcgtgtctccagccgtgagtctcactgtcgcccaggctgcagtgcagtggtgcca

SEQ ID NO: 762637 - DNA, 90 bp, Homo sapiens
gcagaagggtttactgatattgatatagcggccctccaggcactgaagcgtaagaagaggtatgagaagcagctggcgcagatcgacggc

SEQ ID NO: 762638 - DNA, 100 bp, Homo sapiens
gccagggcaggaaggtggtggtgtgcgacaacggcaccgggtgacctgaaaaaaatgtctggatttctagagggcttgagatgctcagaatgcattgact

SEQ ID NO: 762639 - DNA, 100 bp, Homo sapiens
gcggcggcgaggaggggaatttccttgtgcctccattcccgggaggggggagcggcgttggaggccaccgtttccaggactgagcacggaaggcatctac

SEQ ID NO: 762640 - DNA, 90 bp, Homo sapiens
ctgggtagcctctaggaagcgctagacacatagctcttcagtatccccatcagccagtttccgaggtgctgagaagcacagaaactccgc

SEQ ID NO: 762641 - DNA, 74 bp, Homo sapiens
atggaactcattattgcacatggacgagttcaagctgaagaagatgtggaaaagtcccaatggaactatccgga

SEQ ID NO: 762642 - DNA, 83 bp, Homo sapiens
tgcaaactcaacttgctgggccggtgcaactattcgcagtccgagcgcgccaaatcttaaaggcagaccacgcaaaaagaaac

SEQ ID NO: 762643 - DNA, 100 bp, Homo sapiens
tcaagaatcacatggctgttcactataataaaatcctttcagccaaagcaaatgatggctcagacattcattctgctgtgctctccacaattagaaaact

SEQ ID NO: 762644 - DNA, 80 bp, Homo sapiens
gtggagtgtaggtcatatcgccgcgtctgcccagtcaagcccgtccaactccagctccagctcagactccagctcagact

SEQ ID NO: 762645 - DNA, 100 bp, Homo sapiens
gcggatcggatcccgcagatcggagacggggcctggagcacatcccgctctgggctttaaacgtgacccctcgcctcgactcgccctgccctgtgaaaat

SEQ ID NO: 762646 - DNA, 97 bp, Homo sapiens
ccacgcctggcctcactcaaacagtaaacgagttttcggctttgtgagaaaccttaccatcaaacacgatggccagcaacgttaccaacaagacaga

SEQ ID NO: 762647 - DNA, 82 bp, Homo sapiens
ctccagagcctcccaaacgacgtggaaaccctgatagattggtgtgatgaaaaggaacttaatttgatattaacaactggag

SEQ ID NO: 762648 - DNA, 75 bp, Homo sapiens
catcgggcccaagatcgacatccccctgcagtacccagtgctgaagctgctgaaagatggcagaagaagtggtgg

SEQ ID NO: 762649 - DNA, 100 bp, Homo sapiens
tcttcgatgagctctcggattccttatgcagagtggccgacttgatgcagacagacatgctgaactatctggaagtccactgaaaagcaaaagcactagg

SEQ ID NO: 762650 - DNA, 82 bp, Homo sapiens
aacattcccaacagccaccaccaccaccagatgaaactaatctggattcactccctctggttgatacccactcaaaaaggac

SEQ ID NO: 762651 - DNA, 100 bp, Homo sapiens
ccagaacccaagagcagtggattcccagtgtccccacgagctgtgtggtccatgatgaggtttgtaaccaaattattggaagatctcatattctttgttg

SEQ ID NO: 762652 - DNA, 100 bp, Homo sapiens
gtgcatgttagtgctcaagagcctcattatctaccacccgagatgccccaagatggccctgctgtggcaccagtgaccaacgggaacacaacggtgccac

SEQ ID NO: 762653 - DNA, 51 bp, Homo sapiens
gaatcattctacacatggctagaaggcgtaagttggacttatttgccaacg

SEQ ID NO: 762654 - DNA, 100 bp, Homo sapiens
ttgtatagagatgtgatgttggagaactacagaaacctggtctccctagtaacaaatgtggcaattattttggatctatcacctgtcatcataactggct

SEQ ID NO: 762655 - DNA, 90 bp, Homo sapiens
ccggagggacgctccgaccgcggccgggaggctcctgggggccggggctccgagggcgggaaaggacgcataggagtggtcatatcatcc

SEQ ID NO: 762656 - DNA, 100 bp, Homo sapiens
gccgcttctgcgcggagccccgggccctttaaggaaagccccttcccagctgcctgcctgccctagccagctcccaggtgaagagactctcggcttccag

SEQ ID NO: 762657 - DNA, 90 bp, Homo sapiens
cttcctttccgccactgcccaaactgctgaagcagctcccgcgaggaccacccgatgtcctaaacgatgctatatttgatgaagatcatg

SEQ ID NO: 762658 - DNA, 83 bp, Homo sapiens
aacgacgcggacatggtcatgagctttgtgaacctggtgggtaattccagaattgattggccataccattgtcactgtattac

SEQ ID NO: 762659 - DNA, 98 bp, Homo sapiens
ctaaaaacaagactggggctgctcccatcattgatgtggtgcgatcgatcgttagacacggtggcagtctgggccttggtttggcagccatgggaact

SEQ ID NO: 762660 - DNA, 95 bp, Homo sapiens
gagaagaagagatgttgaaggaggagtttgctgttttctcagtctcctgagaaattccagataaatttgcgcctcattttggtaagcggaaaaac

SEQ ID NO: 762661 - DNA, 80 bp, Homo sapiens
cttacagccgctcgtcagactccagcagccaagatggtgaagcagatcgagagcaaggtgagaagccctaccactgcaac

SEQ ID NO: 762662 - DNA, 88 bp, Homo sapiens
tgcagcgactcggaagattcgaggcggcgggggacaagtcggcgccccagagcggacgagccagagactgctgctactttgaaacgta

SEQ ID NO: 762663 - DNA, 102 bp, Homo sapiens
gtgatcttcacagtgctcctgcagtctctctgtgtggctgtaacttacgtgtactttaccaacgagctgaagcagcgggctgacgcacgaggcacacaggaa

SEQ ID NO: 762664 - DNA, 106 bp, Homo sapiens
tggattcaagtcccaggagtcctgaccagagagcaggctctgaagagtgttgtactctatgttatcctggctccttttgacaatgaacagtcagatttggttcacc

SEQ ID NO: 762665 - DNA, 100 bp, Homo sapiens
cggccccacagcactggctcctcccagcaagtcacctgctctcaccaaaaagaagcagcatccaacgtacaaagttgtggaagatatcaataagcgcaga

SEQ ID NO: 762666 - DNA, 58 bp, Homo sapiens
accattgaaaagccttcagagctgagaggtgtggttgacctgcctgaggaaaatcggg

SEQ ID NO: 762667 - DNA, 89 bp, Homo sapiens
tctaagaaatttgctgttaaagtgcttgaggaatccaaagccctcgtgcgctgcaacatgaagatggagctggagcaggccaacgagag

SEQ ID NO: 762668 - DNA, 100 bp, Homo sapiens
caagcctggaagaactcgtcatgctctttgtagcgtggtgcttctgttgctcacaggaaattgacaatggcccttcagctatgctaggtctataatggga

SEQ ID NO: 762669 - DNA, 90 bp, Homo sapiens
cggctttagtggcagcatgaagcgcaccccgactgccgaggaacgagagcgcgaagctaaggtgtgataaagcggaattgggaatatata

SEQ ID NO: 762670 - DNA, 100 bp, Homo sapiens
cccgactgcaactgctggattgctgcaaggctgagggacgagaacgaggtaatatttctaaagcatgtctaatattgagaagcatagaggagttaaagca

SEQ ID NO: 762671 - DNA, 82 bp, Homo sapiens
cggggaagtaatggtatccggccaattgagattcggagttaaaacagcaattctgtggtgttcttggtcacacatttatgga

SEQ ID NO: 762672 - DNA, 100 bp, Homo sapiens
cgaaaacggaagcgcagggagaaggaagaggtgtttgaaaaggtaacttgggtttttactcctgtaacaactgaaataacaagtcttgatacagagaata

SEQ ID NO: 762673 - DNA, 99 bp, Homo sapiens
gccagtccaggcgcccgctagcttcggcggcgacccagacggggaaagcggaaggaatgtcgcgtggtttgcacatccttatcaatatgaactaaatca

SEQ ID NO: 762674 - DNA, 100 bp, Homo sapiens
gaggcaacagggacatggccacctgggacgaaaaggcttctttgctaaagaatgatgagactaaggccctcactccagcttccttgcagaaggaattaaa

SEQ ID NO: 762675 - DNA, 75 bp, Homo sapiens
tagaactcagttgtgcgttgcggccagtcgccactgctgtttattttcttgaaaaggctccaggcttcggcttgg

SEQ ID NO: 762676 - DNA, 100 bp, Homo sapiens
gtcgtcgtactcgaagcggcgcccgcaggtctctctcctcctgggcgagccgttcttcactaccagcctgctgccgtggcacaacctctacttctggtac

SEQ ID NO: 762677 - DNA, 75 bp, Homo sapiens
tttggtggaccaaaaatcgtgacaccagaagaatattataatgtcacagttcagcatccgtgtacaagatttgca

SEQ ID NO: 762678 - DNA, 100 bp, Homo sapiens
tggaagagatgcatcaacatttgatggagttttaacattgaatgcggagaacactaattatgcctatcaagttccaaacttccataaatgtgaaatctgt

SEQ ID NO: 762679 - DNA, 78 bp, Homo sapiens
gcagagcggctggcagatgtgcagctggaagggagtgcatccgccccaacccttttccccctcgtctcctgtgagaat

SEQ ID NO: 762680 - DNA, 102 bp, Homo sapiens
gtctgatcccttgctcccatccctgcagcatgaacaaggatttaagtgccctgtatgctcaaaatttgtatcctcagatgaaatggatttgcatcttgtaat

SEQ ID NO: 762681 - DNA, 50 bp, Homo sapiens
cgagtgtgcgaagctagccaaggagagcttgtttcatatccatatcccac

SEQ ID NO: 762682 - DNA, 90 bp, Homo sapiens
cgcgggtgtgacgttgaagatgtcggccttctgagccgactgcggtggtcaagagactccactccacttggctgtgatcaccaaccagcc

SEQ ID NO: 762683 - DNA, 50 bp, Homo sapiens
cagttttccaacactagtaacagggaacagtgttgataaagactgctgaa

SEQ ID NO: 762684 - DNA, 74 bp, Homo sapiens
ggcgctatggcacccggctgcaaaacttctggaatgtggtggaaatttgtttgatgccatttccattgctgtaa

SEQ ID NO: 762685 - DNA, 75 bp, Homo sapiens
catggatcttacccgtgacaaaatgtgttccatggtcaaaaaatggcagcattgtcttcagtgttaagaaatgtg

SEQ ID NO: 762686 - DNA, 75 bp, Homo sapiens
gccaagttcatctcctccgtcaccagccacatctaccagagcaaacgccctggaggagcagctgaaggagcagga

SEQ ID NO: 762687 - DNA, 100 bp, Homo sapiens
gccctcctgaagaggcggcgctcagacaggtgttcaggcgcttcgtggaggttggccgggtggcctatgtctcctttggacctcatgccggaaaattggt

SEQ ID NO: 762688 - DNA, 75 bp, Homo sapiens
cttggtttcgggatctcggtgctgcagacggcgagacctcctgcacagagccaaggattgtcaccagtgaagagg

SEQ ID NO: 762689 - DNA, 82 bp, Homo sapiens
gcgcctgcacttagccccgcgcccgagggggatatgagactttctactcggaatatcctgagtgttgcgtggatgtaaaacc

SEQ ID NO: 762690 - DNA, 79 bp, Homo sapiens
agaatcctgtcggagttgtagccatgccctagctgcgtcgtggacgagatggacttctctaccatggagctggatgagg

SEQ ID NO: 762691 - DNA, 100 bp, Homo sapiens
ccaagaatgagtatgggaaggatgagaaacagatttctgctcacttcatgggctggcctggaattgacgatgcttccttcaaaatgtctactgttcacga

SEQ ID NO: 762692 - DNA, 100 bp, Homo sapiens
cgcggtgactgccgccgcggcctcggacgactcgccttcagaaggcaaggttgaagactgggatagtttccaagctattttggatcatacctacaaaatg

SEQ ID NO: 762693 - DNA, 100 bp, Homo sapiens
cgcaccccgactgccgaggaacgagagcgcgaagctaagtaagagatgctaaaaaccttgtacctatggaccccaatggcctgtcagatccctacgtaaa

SEQ ID NO: 762694 - DNA, 96 bp, Homo sapiens
ggaaaagagccctggaatataaagagacatgagatggtagccaaacccccaggtagcaatgaagtgatgaggatactgatctctagaagcctgctt

SEQ ID NO: 762695 - DNA, 75 bp, Homo sapiens
ctcggcgctgccgtctctggaggagtactggcaacaggtccctgtgcgttttattgcgacctgccggtgggaact

SEQ ID NO: 762696 - DNA, 83 bp, Homo sapiens
ctcttggcttcgagatggcttcgttaatatgatcctctgttgaagcaagaagacaaactgtatggtggagaaagaagtgggaa

SEQ ID NO: 762697 - DNA, 82 bp, Homo sapiens
ggatggctataatgggtatggaggaggacctggagagatgccctgtatccaagcccaatatgggacaccagcaccgagtccg

SEQ ID NO: 762698 - DNA, 83 bp, Homo sapiens
gacgaggagtcggaggagccgcgggcggcgcggcccagctcgttccagctctggcaggctgccctgagcacgctcaaccccaa

SEQ ID NO: 762699 - DNA, 75 bp, Homo sapiens
ccaccagccacctccacagtgactttgttgagtgtcaaaacatcctcaagattttcagctgaactctcatctctc

SEQ ID NO: 762700 - DNA, 101 bp, Homo sapiens
ttgagaaaagggactttggaaaaaggctgtctctagacagcagtcttgtgaccatgtaaatggacactgcacaagtccaacttctcagagttgcagttctg

SEQ ID NO: 762701 - DNA, 100 bp, Homo sapiens
aaaagctgcaggccatgcacctggagcgatggtgccacacctccctggatgatccaagatgaagaatacattgctgggaaccaagaaataggaccatcct

SEQ ID NO: 762702 - DNA, 83 bp, Homo sapiens
gaagacgacttcgaccctgcccagcacgaccagctcatgcagctggaaaacctcatgctggacaaagatggccacatcaagat

SEQ ID NO: 762703 - DNA, 98 bp, Homo sapiens
gtgtcgcagcttggtctcagaggagcatcgctgggataggaaccaaggctttagccttctcaactcattgactggaacaaaccatagcattgggtcag

SEQ ID NO: 762704 - DNA, 82 bp, Homo sapiens
ctgtttgagagtgggaacatgacgcaggtgcaggtgtctcttctcgccctggcggggaagaagtccattggaatattaagcc

SEQ ID NO: 762705 - DNA, 100 bp, Homo sapiens
gaaagcgagaagcgcctgctccagaagcagaaagcttggattccttagcaccaccacagctcagccagaacagaaggcctcgaatctcattggcacatac

SEQ ID NO: 762706 - DNA, 83 bp, Homo sapiens
acctcaaaatatgatggtggttggacagtcagcatttgcagactttgatcccgggggcataactgctggcagcaccgacgaac

SEQ ID NO: 762707 - DNA, 75 bp, Homo sapiens
atatgatacccacagtgggcttcaacatgaggaagaagtcgttggcttcgtaagagcagggtctatgggaagcct

SEQ ID NO: 762708 - DNA, 100 bp, Homo sapiens
gacttcttgaagaaagacagatcctgtgtcacccggcaactcagaaacatcaggtccaaggtgaaagaacttgtcctggacaacagtcggtcgaatgaag

SEQ ID NO: 762709 - DNA, 101 bp, Homo sapiens
ggctgcgaggagccggcgcggtcgcagtctccacggcgcaggcccacggtagcgcagccgctctgaggccatggatcatctgcagtcattcattgcagatt

SEQ ID NO: 762710 - DNA, 109 bp, Homo sapiens
tttaattttagggtcctttatatagaagggagagtagaaatttggagagcttgtaatgaccaaagaatcaaaggccttgatgggactctaccatggtcaggtcctgtgc

SEQ ID NO: 762711 - DNA, 83 bp, Homo sapiens
atacgtggttggagagctcatctggaattttgccgatttcatgactaaccagtatgtgttccagctgccaagaagccggggcc

SEQ ID NO: 762712 - DNA, 98 bp, Homo sapiens
gcagttgcaaaatattcaggagaccgtcgttgccttgtatttccagagaacagattcttggatctcccagtcagcttcatttccccgtaatcagaaac

SEQ ID NO: 762713 - DNA, 100 bp, Homo sapiens
caaccattggtctgcaggacatcactttagatgatgctacatcaaatgggtctttggagggcctggataaccaggagggaggggtgtgccagacaagagc

SEQ ID NO: 762714 - DNA, 100 bp, Homo sapiens
gcggaaggttaagaaactgcgcctggacaaggagaacaccggaagttggagaagatgtcggtctcgaaacgagcccgaaaggcctccagcgacctggatc

SEQ ID NO: 762715 - DNA, 100 bp, Homo sapiens
actgcctgccagacctcagcgtgtgggctgagatgctggacaaatcgcccatcagatacatccctcaggtgcgcgtggaattcatggacgacacgagccg

SEQ ID NO: 762716 - DNA, 100 bp, Homo sapiens
attacagccaggaggactcttcggacggggacagagagctgatgaaggcaccccagcctgcggtccatgtgcaggggcaggagccactgactgcctccat

SEQ ID NO: 762717 - DNA, 50 bp, Homo sapiens
ctgggagaagcagcagcgcaaggcacaaatatttaaacatggaaaacgtg

SEQ ID NO: 762718 - DNA, 75 bp, Homo sapiens
atgctaccctgctttttctggtgtcctgaacctggaagttgtgctttttaaggcatgttatttgaaagcaattga

SEQ ID NO: 762719 - DNA, 100 bp, Homo sapiens
tgggtctccaggcccgcgaccgtccgccagtcgtcccgaggacggggaggtttactgcatcgacgcgcggttctacgggaacgtcagccggttcatcaac

SEQ ID NO: 762720 - DNA, 51 bp, Homo sapiens
aggaggaaggagaagagaaacttgaggctgacccgcggctgattgagtccc

SEQ ID NO: 762721 - DNA, 90 bp, Homo sapiens
gcaaaatggcggatcatgtgcagatgaagtggccattctgcctgcccctcagaacctctctgtactctcaaccaacatgaagcatctctt

SEQ ID NO: 762722 - DNA, 82 bp, Homo sapiens
ctcacctgttcctgccagggaatgttacagatgttgggatacgacatcagctgggccgccttcaacatcatagaagtgatga

SEQ ID NO: 762723 - DNA, 51 bp, Homo sapiens
tggagcggacattgtttactgtgagttcaacacaagtcattggttgggagt

SEQ ID NO: 762724 - DNA, 75 bp, Homo sapiens
actggaccagaccatgggcctgagcatcagaggaaaggccatgtgaggacacagtgagaaggtggccgtctgcaa

SEQ ID NO: 762725 - DNA, 50 bp, Homo sapiens
aatcgcccaagtccctctactcgcgaggctcgggctcaagttcactacag

SEQ ID NO: 762726 - DNA, 100 bp, Homo sapiens
caggagcccagacaccagccccccaccatgatgccagcttggagagtcacgtgagagcaagagagtagctttctggttgtcctggtgccctgctcaggca

SEQ ID NO: 762727 - DNA, 100 bp, Homo sapiens
aagggtggccgccccgccagcagaaagaattatgactttggtgtgaagaatagattgggataagaaagtgaagggaggttgagttgtggtaatcatccag

SEQ ID NO: 762728 - DNA, 83 bp, Homo sapiens
cgccgggaccctcgcgcgcgaccgccgaatcgctcctgcagcagaggtgtcgtgaaaactacccctaaaagccaaaatgggaa

SEQ ID NO: 762729 - DNA, 75 bp, Homo sapiens
gtgaggaagattttgaagacaatcgtcacttatacaggttttgatgatgatggttcagaatttcatgaacatata

SEQ ID NO: 762730 - DNA, 75 bp, Homo sapiens
tgaagaagcagttctacaaggcgagccagcaaaagctggcaggctgacagaggcggcctcaggacggaccttctg

SEQ ID NO: 762731 - DNA, 73 bp, Homo sapiens
acgggccggagggaggatgttaaagccccgcggtatcgagaaccttccctgcgaacttcagaggaacttccag

SEQ ID NO: 762732 - DNA, 83 bp, Homo sapiens
ctggcacccagtggtgacccctgccctcgtgtgcctcagtcagctgctcaccaagccggtggctgctggcagcggaatccccc

SEQ ID NO: 762733 - DNA, 50 bp, Homo sapiens
tcctgagtagctaggattacagtacagaacctgctaaggccatcaaacct

SEQ ID NO: 762734 - DNA, 100 bp, Homo sapiens
ggaaaaggccggagaaggtgaaattctgtgtgctccctccggcgagagactttgtcagctcccgcacagtaacgccaagtcatcaaggcatgggacattg

SEQ ID NO: 762735 - DNA, 90 bp, Homo sapiens
ctcgtacagcagcagaaaatgaccatgttacagaatgagtccctggaacgccagatgcgtgaaatggaagagaactttgccgttgaagct

SEQ ID NO: 762736 - DNA, 75 bp, Homo sapiens
ccagggctgtgaacgtggctttcctcgtcacgccgatgatggagctgaagcccaacgcaggtagcgaccgtgcct

SEQ ID NO: 762737 - DNA, 82 bp, Homo sapiens
cagctctctagaaactcgctctaaagacggaaccgccacagcactcaaggaaatcctcattgacgattcaatttgttgaagg

SEQ ID NO: 762738 - DNA, 101 bp, Homo sapiens
ccgcgctccagcctcgctctccgccgcccgcaccgccgcccgcgccctcaccagacaatgcagatcttcgtgaagactctgactggtaagaccatcaccct

SEQ ID NO: 762739 - DNA, 100 bp, Homo sapiens
gagaaaattccatccttggacagttaaaagcagagcactctcttgagcctgagggatccattacagtttcaatgggtattgacttttgtgattctactca

SEQ ID NO: 762740 - DNA, 101 bp, Homo sapiens
attttccacttcagtcaaacctgatgttgtagtacaagaatctgagttgcaagaactctctgaagtgcttgaactcctttctgctcctgaactaaaatccc

SEQ ID NO: 762741 - DNA, 90 bp, Homo sapiens
ctgggttacaagcagcaagtgcgcggttggggccactgcgaggccgttttagtttggacactactttgaaacaacatatgatacaagcta

SEQ ID NO: 762742 - DNA, 95 bp, Homo sapiens
ccgcggtggagcgggacacgaacgtggaggaagccagtgaaggtggaggaaatgatcgtgtgcggaacctgcaaagtgaggtggagggagttaag

SEQ ID NO: 762743 - DNA, 75 bp, Homo sapiens
gacgaaccttggagagaggagaacgaacatcttctggacctttgtccaggctccagtgatcattctacatatatt

SEQ ID NO: 762744 - DNA, 100 bp, Homo sapiens
aaaacattcaagttgagcagatgacaaaacttcaagccaaacatcaagcagaatgtgatttgcttgaagatatgagatcaatgtccgagttaccaccatg

SEQ ID NO: 762745 - DNA, 83 bp, Homo sapiens
tccgcagacgccgccaccgccatgggctcctgaggttttaaaatcaaagatgggaaaatcggagaaaattgcccttccccatg

SEQ ID NO: 762746 - DNA, 99 bp, Homo sapiens
ccactacctgtaccagcgcagccagccggtggattacttcattctcatcctgcaggatgtagatgatcccctcttggatatgaagactccagtcctctt

SEQ ID NO: 762747 - DNA, 74 bp, Homo sapiens
ggatgtggagatcatcacacggaaagatgaccaaggtggacagcagcaaggaatcagctgaagcagcttgtgat

SEQ ID NO: 762748 - DNA, 100 bp, Homo sapiens
ggacgtgcttcctgcttcatagataagagtgatttcctgaaggaaatataatgatctgttcatcgaagtagaagatattgttggccacgtgggatcgaag

SEQ ID NO: 762749 - DNA, 98 bp, Homo sapiens
tcagtcctcaatctccttttccttggctaccccaaagtacccacgtttgttcgaatgctggccccagagggagccctgaatatacacgagaaagcctg

SEQ ID NO: 762750 - DNA, 100 bp, Homo sapiens
gcggtttgtcgccagaaggaagatggcggatctggaggagcagttgtctgatgaagagaagggcaggcatccctcatcgacctcctggtttccaagggcg

SEQ ID NO: 762751 - DNA, 90 bp, Homo sapiens
cacacgcctaatgatgtccgagttggagaacaggcgtggccagcactggctccttgatggtggttctaactttgatggtttgagaccaaa

SEQ ID NO: 762752 - DNA, 98 bp, Homo sapiens
cggaaaggagattgagattgacattgaacctacagacaaggctgagcggaaggaggagaaaaaggcggctgcccctgctcctgaggaggagatggatg

SEQ ID NO: 762753 - DNA, 100 bp, Homo sapiens
aggagaactaaatgggagaagaggaatgttccctgacaatttcgttaagactcctcgtgaagtggcccagcaggctgtggatgcggatgtgcatgctgtg

SEQ ID NO: 762754 - DNA, 100 bp, Homo sapiens
gtgcagctgcctcagttcttagcgcagcattcttgttatttaacacgggaaggaggtgacttcgcctgtgatggacttccagtgtgagcactggccagag

SEQ ID NO: 762755 - DNA, 80 bp, Homo sapiens
gaactacaggctttacttttgtggtagaccgtctaagagaaggctaaaataaatgaagctgtagaatgcttactgtccct

SEQ ID NO: 762756 - DNA, 75 bp, Homo sapiens
gcgagagaagaggagcggcgagtgcgggagaccgtgcgcagggagtggagcttggtttcgggatctcggtgctgc

SEQ ID NO: 762757 - DNA, 100 bp, Homo sapiens
gacagagccaaggtgcagggcaacacctctacaaggatctgcagccatttatattgcttaggctactgattcccagaaaatctaagctggcagttcatag

SEQ ID NO: 762758 - DNA, 50 bp, Homo sapiens
caagccccccctcgttgagctgggctgccgctcagctttgatggaacaac

SEQ ID NO: 762759 - DNA, 98 bp, Homo sapiens
gggaggcagcgcgggatcccagcctcaggcgtgcgcggacggtgtgcgggatttgaactcagaggatcaaaaagccttcagtgttgaacatacaagct

SEQ ID NO: 762760 - DNA, 100 bp, Homo sapiens
attatatcgcatcctatggctcaaagaaagatgattatagctccaaacgagaatggaagccgctggaggaccgtagctgcacagacataccatggctgct

SEQ ID NO: 762761 - DNA, 90 bp, Homo sapiens
gaactacagcataatgcgtggcttcaacctgctcctcttctggggttcatgggcgggggtggtgagagctgcagcctcatcgcggaagga

SEQ ID NO: 762762 - DNA, 100 bp, Homo sapiens
cccgttccctccgccctatggaccccaggggccttaccgataccccactcctgatgggcccagcctaactatgggacagctttacgagaaggaaaaagat

SEQ ID NO: 762763 - DNA, 101 bp, Homo sapiens
tccctgaccatggctccctgcagtaccctttaacggttaaatggaagctgatcggcgttcacatggaatcctcctcacgtagctcagatggatggccacag

SEQ ID NO: 762764 - DNA, 50 bp, Homo sapiens
ccccgccgctcccgggggccgtgacggtacagcagttgcaaggagtttac

SEQ ID NO: 762765 - DNA, 80 bp, Homo sapiens
caggaagagcggccccgcggggggcgatgaccgtgcgctgaccctgactcactccaggttatcaatactctggctgacca

SEQ ID NO: 762766 - DNA, 96 bp, Homo sapiens
cggagctgggcgcggattcgccgaggcaccgaggcactcagaggaggtgcgtagtttctctgaaaagcatcacccaggtcagaatgaaaggaaact

SEQ ID NO: 762767 - DNA, 101 bp, Homo sapiens
gaggggcgggggcgctgcggcacagctggtttgagcaactgaactggaaacaagatgcaggtatcatgatattagctggtttgacatcaagtcatttgtga

SEQ ID NO: 762768 - DNA, 100 bp, Homo sapiens
atatatgcgaatctataagaaaggtgatattgtagacatcaaggttatcaatactctggctgaccatcatcatcgtgggactgactttggtggaagtcct

SEQ ID NO: 762769 - DNA, 73 bp, Homo sapiens
gttgccggtgccggcctagcgtcctggaattacttcaatcaaattagtgatgatgaaccaggttatgaccttg

SEQ ID NO: 762770 - DNA, 107 bp, Homo sapiens
gtctagtgaatctgcacagaaggcccttaagttcacagaagaaaagcttggccaggctgagaagacagaattggatgctcacttagagaacctccttagcaaagctg

SEQ ID NO: 762771 - DNA, 87 bp, Homo sapiens
aatccacgaactgctggacgacctcggcgaggtgcccaccatcgagtccctgataggtaggagcattgcttttcgtggtgaaagagg

SEQ ID NO: 762772 - DNA, 100 bp, Homo sapiens
ctctggccctgtccctggctccctcattaccgtcgccagcggagcgaacccgagagcgtggagcgggctgggccaggccatcgaagacggcaatttggag

SEQ ID NO: 762773 - DNA, 75 bp, Homo sapiens
gggcctcgtcgtcatccccttccagttcgcctggccggcctccggtgtggctgtctctgatggtgtcatcaaggt

SEQ ID NO: 762774 - DNA, 100 bp, Homo sapiens
agtatgttcacgatcggggtcagacctgcaggctgggacaatgaaaagaaaatagctattttacatgaaaattttacaaccgtgaagccggaagatgcat

SEQ ID NO: 762775 - DNA, 78 bp, Homo sapiens
tgaccctgtgggcaggtgggctcggccctgcatctggccttgcccctggcacacggtcctaaaaacatcctgagtttc

SEQ ID NO: 762776 - DNA, 75 bp, Homo sapiens
atggcctccgctatgaaggcggtcacttcacccaggcctcggtgtcatcacggacagctttcagaaaggggagac

SEQ ID NO: 762777 - DNA, 75 bp, Homo sapiens
gagctccccagctggtggctggagcgaccccttgttctttggtggcgctggaaaattgcctaagaattatgaccc

SEQ ID NO: 762778 - DNA, 100 bp, Homo sapiens
ctagtgagaaccgagtcagtgctcttacccaggtgacagatcagtcagtgaaagcatttgctgaacactgtcctgagcttcaatatgtaggcttcatggg

SEQ ID NO: 762779 - DNA, 96 bp, Homo sapiens
gcagcgcaggcgcaagcgcagagagcggaggcggtggtggtggcggccgctggccagtgttcctggagagccactggtttgtgtgggtcacacaga

SEQ ID NO: 762780 - DNA, 100 bp, Homo sapiens
ctgagctacccgagcggcggcggcggcagcagcggcagcggcaagcaccatacatcgagatatttccaagcagaaggaatgaagttcgaacacatgtcgg

SEQ ID NO: 762781 - DNA, 98 bp, Homo sapiens
caccaccactctcattagtgagaatggtcatgctgccgacaccctgacggccacgaacttccgagtgggacagaatgacttggaagataacggagctt

SEQ ID NO: 762782 - DNA, 99 bp, Homo sapiens
tcaaagaccaggtgcccacttaactgtgaaaaagatatttgttggtggaagaagagcccgaagaagaacctgaagagacagcagaagacacaacagaag

SEQ ID NO: 762783 - DNA, 82 bp, Homo sapiens
gcccaaagacccctggagacatgcaagagtgagccatggagctacgtgtggggaacaagtaccgcctgggacggaagatcgg

SEQ ID NO: 762784 - DNA, 100 bp, Homo sapiens
gtgaaactagcagcattatgcagaaactgaagaaaatgagaagccgcatggatgaaaaacgccctcctgcaaaacggcccaactacgttaagcttggcac

SEQ ID NO: 762785 - DNA, 100 bp, Homo sapiens
gcgagccagcgcccggagcaagcggagctcccccaagagccggaaagggtgcttcaaggatgaccgcatcgtcttctggacttggatgttctccacctac

SEQ ID NO: 762786 - DNA, 82 bp, Homo sapiens
ccgcgcccgcaggacgccccagccaggtgacagtggatagtggaaacaggagatcgtggatcctccttcaaaaatggaggat

SEQ ID NO: 762787 - DNA, 100 bp, Homo sapiens
ttcctgacacaaacttcaggaaaggattttgcacttgtgcagaccgggcgagcagagtaagaagcagatcttcctcagaactgtgatcctaacattcccc

SEQ ID NO: 762788 - DNA, 75 bp, Homo sapiens
ccagtcacccaatggtgggcaagtggctggagaaacaagaacaggtcattgagactgcctcttctcaaagggaca

SEQ ID NO: 762789 - DNA, 75 bp, Homo sapiens
ccagtccaagctgcctggagtcaaggaagagctcttcagaaaccaggctgctttcaggaacattgctgtggattc

SEQ ID NO: 762790 - DNA, 75 bp, Homo sapiens
ccggcccacagtgggggtgtgcaaacccgagagaactgggcggctgccgagtgatagagcagaaggaggttccca

SEQ ID NO: 762791 - DNA, 51 bp, Homo sapiens
gacttgtgcattcaaacatagcaactgagcacccagtcagcttgaagagtt

SEQ ID NO: 762792 - DNA, 74 bp, Homo sapiens
gggctcctactgttcttagagatgtacctttctcaggtgtttcaagaataaggggttggttccctagaaaatgt

SEQ ID NO: 762793 - DNA, 100 bp, Homo sapiens
cccacttccgaaaccacaagtttgccgatgctcattggcggggttataggcagcggaagatttacctggagtggttgcagtattttaaagcaaacctgga

SEQ ID NO: 762794 - DNA, 82 bp, Homo sapiens
gattcaagtcagaaagatgaacacttggacatccgactagatgcattctggttgaagacatatctgaagagatggattaaga

SEQ ID NO: 762795 - DNA, 75 bp, Homo sapiens
ccttcgacttggagtctttgtccaggacgatctgccgccgccttaatggggtccggttcaccagctgcaagagcg

SEQ ID NO: 762796 - DNA, 98 bp, Homo sapiens
acaacaacagctatgaaaccaaaaccccaaatcttcgaatgtcagagaagaaatgttgaagcaatgcctgtgtgcccaggccatgcagcctgctgtgc

SEQ ID NO: 762797 - DNA, 98 bp, Homo sapiens
gaaaggagtcagaagtggtttcctttctcaccactgccattgaagcatcaagtgtacctgatttgtgaacctatcttgcttcagttggtttcctccta

SEQ ID NO: 762798 - DNA, 100 bp, Homo sapiens
ttcagtacgacctttagccacattgtcatatgctagtgatctctataatggttccagtatagtctctaggtccggcgccagctgccagtcgaggaaccga

SEQ ID NO: 762799 - DNA, 100 bp, Homo sapiens
atcccaccgaagcagcgtgtcctccgtgggagcccgagccaacattggtactcagaccacaggacccagtggggtaggatgctgtacaccaggccggccg

SEQ ID NO: 762800 - DNA, 75 bp, Homo sapiens
tacggaggtggcagccatctccttctcgcagagtccgcaaggaacctagagtatgtttcagtgtctccaacgaac

SEQ ID NO: 762801 - DNA, 82 bp, Homo sapiens
aacggggagccgagctggagctgccgcggcgcagccaggtgacttaagagattaaaattaatttggttgctgttggttctga

SEQ ID NO: 762802 - DNA, 104 bp, Homo sapiens
ctcgtgctggcggcggcggcggcggcggcggcggcgctgctcccgggggcgacgggttgggcccgaaggcatcctgcagaacggggctgtggacgacagtgtag

SEQ ID NO: 762803 - DNA, 100 bp, Homo sapiens
acttcaggatgatttttcagaatttttggacagcagatgtgaatttcttcggagtaagaaatcctcagaggaaattacccagtatattcaaagctacaag

SEQ ID NO: 762804 - DNA, 100 bp, Homo sapiens
caggcctcaggcctgagctccccagggaacaatgacagcaaacagtctgcctctgctgtgcaggtaccattgttggatactggtgacatcatcattgacg

SEQ ID NO: 762805 - DNA, 100 bp, Homo sapiens
catgagagcatggctcttccagcatctcacactgatcctacagttaaagacttaatcggaggcttcacggctcttcactatgcagccatgcatggccggg

SEQ ID NO: 762806 - DNA, 100 bp, Homo sapiens
tgatcaggagtgaattcacagtctaccatgaattggaagagaacttccctcagtgtgtgctagaaatctctgaccaagaagtgttggaatggtatactgc

SEQ ID NO: 762807 - DNA, 74 bp, Homo sapiens
ctatctgcactttctttgacctgtaacagcactaacattgttgaaagaagaagacttcccaaatcttggctgcc

SEQ ID NO: 762808 - DNA, 97 bp, Homo sapiens
gggttgcttctggcggccatggtgttgctgctgtactccttctccgcactgtgacttctgccgtgttcaccgtgggagacaacgtggtttcaggcag

SEQ ID NO: 762809 - DNA, 75 bp, Homo sapiens
aaggaagagagcactgcagccagtgaaaccactgagaaactggcgatggaatatgagaggagccctctggaaaga

SEQ ID NO: 762810 - DNA, 88 bp, Homo sapiens
acagcttttttaaatgaccttcttgaaagaatggatattggtcctaaacagacacaggaggactcagagagagtaatgataattaccg

SEQ ID NO: 762811 - DNA, 75 bp, Homo sapiens
attttactaggtcatgaagggaagatggctgtggaaggtgttttaaaggaactggttcagacagtaagtttggga

SEQ ID NO: 762812 - DNA, 75 bp, Homo sapiens
cgcagccgccggcgtcgccgccatggacctaggtgaagcaaatcatggaggaggctgtcaccaggaagtttgtgc

SEQ ID NO: 762813 - DNA, 75 bp, Homo sapiens
tctgggagttgggggcaaggagaagatcctggtagcagaaggtcaagaaatttgtgtgattgaagccatgaaaat

SEQ ID NO: 762814 - DNA, 100 bp, Homo sapiens
gagaccgcaccacccgcctctgggccccagacagactctgctaacaccagatagtggaaagaaaccatgtgctgaaatgtttgacgacactgatggtttg

SEQ ID NO: 762815 - DNA, 100 bp, Homo sapiens
catagaaccaccaaaaagtgtcccttctcaggatattggtgctggaaaaggcaaatactatgctgtcaattttccaatgagagatggtatagatgatgag

SEQ ID NO: 762816 - DNA, 100 bp, Homo sapiens
gtggctggcacgctggaaaagggaggctgctgatactttggctgtgaggcaaaaaaggagaatttatgatatcaccaatgtcttagagggaattgacttg

SEQ ID NO: 762817 - DNA, 75 bp, Homo sapiens
ggaagcttatacacccaagttaactcagacgtttaaggaatcctgtcttcaattctaccatgctgagctgaagga

SEQ ID NO: 762818 - DNA, 75 bp, Homo sapiens
ccttggatccaggagaacggcggctgggtgaggaaaatagcagctgaatactatgacaacctccctcactacaat

SEQ ID NO: 762819 - DNA, 51 bp, Homo sapiens
cctaacagccccttcactgtcatgcaacttgtagagacagtttcatgtgga

SEQ ID NO: 762820 - DNA, 100 bp, Homo sapiens
aagacagagcgctactcctggcagtgcgtcaatcagagcgtcctgtgcgagcctcagctcaaaggcatcgtcaccaaactgttctgccgccagggtttct

SEQ ID NO: 762821 - DNA, 80 bp, Homo sapiens
gtctcggaaaccggtagcgcttgcagcatggcccagcccgagttcccggacgccgcgggactggagtgccagccggtgtt

SEQ ID NO: 762822 - DNA, 101 bp, Homo sapiens
agaggggagtcatcatgagcgatgttaccattgtgaaagaaggttgggttcagaagagggggttattatgtgtaccgtgacatgctaggcgaaaaaggaga

SEQ ID NO: 762823 - DNA, 100 bp, Homo sapiens
cctatggggcatacctatggctttattgacctcgactcccatgcggcccaggatgttttggtgcaggagatggaagtggttaaacaaggaatgagccatg

SEQ ID NO: 762824 - DNA, 100 bp, Homo sapiens
tggagggggctcctgccaccgccccggagcctcacagcctgggcatcctccatgcctcctacagcgtcaggttcttcagctctgagcagtacagaacagg

SEQ ID NO: 762825 - DNA, 75 bp, Homo sapiens
attgaaatctttccctcgcgaatgagccttttgtggcagatgaatatattgaacgtcttgtatggagaaccccag

SEQ ID NO: 762826 - DNA, 97 bp, Homo sapiens
cagcctcccgagtaactgggactacaggcacctgccaccatgctcggctagtttttgctctagaggacaaaatcccagtccttggcacaaactcagg

SEQ ID NO: 762827 - DNA, 98 bp, Homo sapiens
tgcatcaaaggtgtgaacacagtgattcgcctttgccagtctcatctcgtgtctgctttgttaagttccatgatccagactcagcagttgtggcacag

SEQ ID NO: 762828 - DNA, 83 bp, Homo sapiens
ctaaactctcatctccggccctctcggcgtccgccagcgatggcacagagtccctgtgaagcaggaagagtgagggcaggttc

SEQ ID NO: 762829 - DNA, 75 bp, Homo sapiens
acagtttttgtttcaaaagaaacatgttggaagatcaaaggcacaggagccgtgtaaagccagtggaatatagtc

SEQ ID NO: 762830 - DNA, 98 bp, Homo sapiens
ccaaagataacacctgtgacagttaaagctcagactaaagcccctcccaaaccaggtttgccaagatggtggataagaatatttacatcattcaaggg

SEQ ID NO: 762831 - DNA, 82 bp, Homo sapiens
gccgcggccctgggagctggaggaaccgcgggattacatggatcgtcttctagacgaaagtgaaagtgctgcatctagtcga

SEQ ID NO: 762832 - DNA, 101 bp, Homo sapiens
tgcttttcctcgctggggtgtacggaatgtatacaaagactatcgcttccttgagctggcatgtgattcccaggaggatgtcgacagctggaaggcatctc

SEQ ID NO: 762833 - DNA, 58 bp, Homo sapiens
aatggctgacatcaacggccaataccaacatagccctttttgattatgacaagactaa

SEQ ID NO: 762834 - DNA, 88 bp, Homo sapiens
cacagcgttgtgcaaatgaatgccttccactgaaccgagagaatggatcttggagaatgtctgaaagtccatgacctggctttaagag

SEQ ID NO: 762835 - DNA, 100 bp, Homo sapiens
ctcacccaaaccaggttgcagaagatctggattccacacagcagcggcagcagcaggctgcaacggagaaggggctgatttttcaagccacattcaattg

SEQ ID NO: 762836 - DNA, 100 bp, Homo sapiens
cccatctacagcaagaagacggaaatccaaaggcagacagtacgggctcccttcgccaaactcttcattttctctaaacccaccttgtcccatccacatc

SEQ ID NO: 762837 - DNA, 82 bp, Homo sapiens
gcagcagtggcggcgcttcccattcgccatgcgccgggggtgggtgcccgaaggattgcacctctgcctccacctcccctac

SEQ ID NO: 762838 - DNA, 100 bp, Homo sapiens
ccctgcatcggatcaccggcgtgccccaccatgtcagacgcagccgtagacaccagctccgaaatcaccaccaaggacttcgcggaggtctgcaagcggg

SEQ ID NO: 762839 - DNA, 100 bp, Homo sapiens
ttcgggcaggaatctggaccttcagcagaaaagtatagcgtggcaacccagctgttcattggaggtgtcactggatggaaatctgaaatagagtactatg

SEQ ID NO: 762840 - DNA, 73 bp, Homo sapiens
tgccggcaagagggagttaaggacattccaggcagaggcaagatgatatcatcaagttgaatcgaaaggaagg

SEQ ID NO: 762841 - DNA, 123 bp, Homo sapiens
cacagaaatagactcatcaaagcttatgaaaaagttggatgtcagttaaggactatgaagaaatcgggagtgcactttttgactgtagattgttcgaagacacatttgtaaattttcaagcag

SEQ ID NO: 762842 - DNA, 75 bp, Homo sapiens
ccacccgtatccgccaggagatccaagagctcaaggccaggcaccgaggaactgtgctgtgtagctgaactcgac

SEQ ID NO: 762843 - DNA, 98 bp, Homo sapiens
caagaagttggtgaagggccatgcctactctgtgaccggggccaagcagagccagacccagggccctccagattaccccaggtttgtggagtctgtgg

SEQ ID NO: 762844 - DNA, 76 bp, Homo sapiens
gagaaattcaaaatctaaaactctttcgtcatcctcatattatcaaactgggcccttccgagatatcaccgaagta

SEQ ID NO: 762845 - DNA, 85 bp, Homo sapiens
ttatgtggtaccctgggagaaaaaaatttaccctactgtcaactgtcaaccactgggaatggagtccgaagcctttctctcaaat

SEQ ID NO: 762846 - DNA, 82 bp, Homo sapiens
ccagcaatcacagaagccgacaaggcgttcaagcgaaaacatgaccgctgagcccatgagtcaggatggctaaaggtgaccc

SEQ ID NO: 762847 - DNA, 123 bp, Homo sapiens
ggcgccgaggcgcggcggcaggacgggaaccacgcgagctgcagccaggcctctccttccgatgaaaagagaaaggaagaatggactacagccaccaaacgtccctagtcccatgtggacaag

SEQ ID NO: 762848 - DNA, 51 bp, Homo sapiens
ggtggagtcggagctgggacggatagtggccaaagcctccaagaacctcat

SEQ ID NO: 762849 - DNA, 75 bp, Homo sapiens
cgaggagcttccggaagagaccagaaagaagttttcccatttccagaagttagccaagatgaacttaatgaaatc

SEQ ID NO: 762850 - DNA, 82 bp, Homo sapiens
ccaggagaaattcgccctcaaattatctccagaagaagaagagaaaaggagaatccgaagggaaaggaataagatggctgca

SEQ ID NO: 762851 - DNA, 76 bp, Homo sapiens
atgctgctcaacaacggcttcagggagtcggaccagcttttcaaacaatacagggtcctgatgaagaagctgttgt

SEQ ID NO: 762852 - DNA, 98 bp, Homo sapiens
cggcggccgcagctgccacaaaccagttgaagactgggatagtttccaagctattttggatcatacctacaaaatgcatgtcaaatcagaagccagtc

SEQ ID NO: 762853 - DNA, 76 bp, Homo sapiens
cacagcactggttgtttctggtgggatcgttggctatgtaaaaacagattccagttcttcagacaaacaatggtcc

SEQ ID NO: 762854 - DNA, 100 bp, Homo sapiens
gaagagattggctggtcctatacagcgttttaccaacgaggatcatttggctgtccataaacataaacatgagatgacactgaaatttggtccagcacgt

SEQ ID NO: 762855 - DNA, 100 bp, Homo sapiens
cagtcatatggcatggacaatcacagtggtggtggtgggggtagcaggcgggtttcttccctaatgtgggaagttcgatatatagagcataatacacgaa

SEQ ID NO: 762856 - DNA, 75 bp, Homo sapiens
gcatttgaggaagaaggcaaaggccacggaaaggtatgatatatttgatccaagacagtccattccagtccggga

SEQ ID NO: 762857 - DNA, 74 bp, Homo sapiens
gcagcagcgctgccgccgcgtcctcagccaccgctccctcttcccacggtgacagtggatagtggaaacaggag

SEQ ID NO: 762858 - DNA, 90 bp, Homo sapiens
ctgggattggagattccacccaaacttgctggtcactgggagatccggaagaccacggccagccaggtgtacgagacattgctcacctac

SEQ ID NO: 762859 - DNA, 75 bp, Homo sapiens
gagaagtccctgattgaattggaactttcctactgtattgaaattggagagacctctattgctgagtgcttgaca

SEQ ID NO: 762860 - DNA, 82 bp, Homo sapiens
gaaagcctctaacacccacagatccctctatgactgcaatgtgaggagctctttgttcaatgcctagccacctattcctaca

SEQ ID NO: 762861 - DNA, 75 bp, Homo sapiens
aaagaatttttttgcacattattttacattaggttcaaaattccggtactggactaatgtttcaagccagactcc

SEQ ID NO: 762862 - DNA, 90 bp, Homo sapiens
ttaccgtcgagggttactggcagatcaccgtggacagcacctgaactcctggggggaccgtcagtcttcctcttccccccaaaacccaag

SEQ ID NO: 762863 - DNA, 76 bp, Homo sapiens
gaagcgggctgtgtgccccttctccacccagaggaggcaaaaccttcaactgaggacttgggggataagaaggaag

SEQ ID NO: 762864 - DNA, 99 bp, Homo sapiens
cctgtttgagaaaaggcctaagaattttggcattggtttctgccacctctttctgccagatgaacagtttcctgaagggttccagtttgacactgacga

SEQ ID NO: 762865 - DNA, 80 bp, Homo sapiens
atacgatagaaaatgtaaaggccaagatccaggataaggaaggtactgggcctaatcgctacgtgcctctttggctatga

SEQ ID NO: 762866 - DNA, 75 bp, Homo sapiens
ctgccggttagctggccacgatatcaactatttggctttgtcaggccctcgggaccaaggatcacgtcatgactc

SEQ ID NO: 762867 - DNA, 50 bp, Homo sapiens
attaatcagaaggtgaagtttcagctgtgtgactggctacgtgttaatga

SEQ ID NO: 762868 - DNA, 100 bp, Homo sapiens
ctgcttttcgcccctgactgttttttctgtttctggccatggaggaagagaaagatgacagcccacaggtgtggacatgatcagtaaaatgctgaagatg

SEQ ID NO: 762869 - DNA, 74 bp, Homo sapiens
ggacgcagggcgctgggccgggtttcggcttcggccacaggcaccaccttccatggtcaataatgaacaacgcc

SEQ ID NO: 762870 - DNA, 100 bp, Homo sapiens
tcagacagcatatttgagtcatttccttcgtacccacagtgcttcatgagaggttcctaagtggtagcagagatggaacagcacggatttggagatttga

SEQ ID NO: 762871 - DNA, 75 bp, Homo sapiens
gcaacatgagatggtggatgaacccacaggacactgcccatctctaagataagaacctggaaaggggactctgtt

SEQ ID NO: 762872 - DNA, 75 bp, Homo sapiens
ccaactttagggacaagcaatgtcttcatcgagaggcacatcacatccccaaagatacgtaggtaacctttccag

SEQ ID NO: 762873 - DNA, 97 bp, Homo sapiens
ctgctccctctcagcacctgggcggacgactgggctggcttagatgaagatgaagatgcacatgtctgggaggataattgggatgatgacaatgtag

SEQ ID NO: 762874 - DNA, 100 bp, Homo sapiens
ccggcaccgccgagccctggacaccaactattgcttcaggaatctatcttctggatttaatctacattgattctgcatatcctgcctcaggcagtatcat

SEQ ID NO: 762875 - DNA, 51 bp, Homo sapiens
aggagattagacgtagcagattaggccagacgggtgcagggaacaactggg

SEQ ID NO: 762876 - DNA, 88 bp, Homo sapiens
aaaactcaaatctgaatttaatgagcctggttgcacgttttcaaaaaatacctaatggtgaaaatgagacaatgattcctgtattgac

SEQ ID NO: 762877 - DNA, 97 bp, Homo sapiens
tcaacatgattgcatttgaaataattgtatggaagagatacagtgattttaagaaactacacaaagaactatggcaaattcacaaaaacttattccg

SEQ ID NO: 762878 - DNA, 75 bp, Homo sapiens
gcctgtacctgttttatacttgcttttgcttcagcgttctgtggttgtcaacagcactgaacctaccagatgtat

SEQ ID NO: 762879 - DNA, 98 bp, Homo sapiens
gcacttcgcattttggcattgacatttaattttagggtcctttatatagaagggagaggtgttgaaagcagcaggggcctagaagacattaaaccgat

SEQ ID NO: 762880 - DNA, 75 bp, Homo sapiens
ctccgaaccgccggcgcccggccatggcggtctccagtcatgacaagaaataattggcttgtgagaatcaacatt

SEQ ID NO: 762881 - DNA, 51 bp, Homo sapiens
cttccccttgccgagcactggggtgagttctgcatcctggtacttcctcaa

SEQ ID NO: 762882 - DNA, 100 bp, Homo sapiens
gcagctgcgatggccgtggccgtggggagaccgtctagcttggggcttccttggtcgcacccaccacctgcctgcccactggtcagccttcagggaccct

SEQ ID NO: 762883 - DNA, 75 bp, Homo sapiens
acggactctccgttattttaggaggctccccaaaaaggccacaaagacagccccacctgccctgcctacaggtta

SEQ ID NO: 762884 - DNA, 142 bp, Homo sapiens
aaggttctgctagaaatataacagtgaaagtccagtttatgtatggagaggatccaagcaatgccatgccggctgtcagccagatgaaacagcaaaaatatccaacaaaagtctccttcagttcacaagagataccattagc

SEQ ID NO: 762885 - DNA, 138 bp, Homo sapiens
atcggcggccgccatgttaggagcgcagtggcggcgcaaccagccttctagggcggcggaggctggacgtaaagaaagaagtgatgcactcaattctgcaatagataaaatgaccaagaagaccagggacttgcgtag

SEQ ID NO: 762886 - DNA, 51 bp, Homo sapiens
ccgagcagcccggggatccagcacgcagcatttgacattgtgcagcaaaga

SEQ ID NO: 762887 - DNA, 100 bp, Homo sapiens
gcgttgtgatgggttctgattcccgagtgtctgcaggaaagtgaagtcactgcttttgctgtcttggatcaagaccagaaagaaattattgataccaatg

SEQ ID NO: 762888 - DNA, 100 bp, Homo sapiens
gtagcttttctgagaatacttgctgaaaaggaagttttctggaatggattacagtagaatgcacattccttgactatataatgggaggatgtcagctgaa

SEQ ID NO: 762889 - DNA, 80 bp, Homo sapiens
ccatcgactacaaacggaacttgccgcgtcgaggactgtcgggaactgtggctgcaccatctgtcttcatcttcccgcca

SEQ ID NO: 762890 - DNA, 100 bp, Homo sapiens
gtactacaagcccaccaagctaaagaggctgcccagaaagcagttaacagtgccaccggtgttccaactgtttaaagaaaatgtttataggaggccttag

SEQ ID NO: 762891 - DNA, 75 bp, Homo sapiens
tctggacctggaggtgctgctgctgagtacttttggctatgatgatgaagctggaggatcaggagcagcgggccc

SEQ ID NO: 762892 - DNA, 75 bp, Homo sapiens
ttcagcgtcccggcgccgtcgcgccactcctccgatatatgaaaatgatgatcagctcctgtgggaccctgagta

SEQ ID NO: 762893 - DNA, 82 bp, Homo sapiens
cacattctcatgcatttattgatctgactgaagattttacagcaggccaaaaggtgtgttttgctgacttcaagcatccctg

SEQ ID NO: 762894 - DNA, 100 bp, Homo sapiens
ccgcgggtgcgtggtcgtgcggcaagtgagcgatttggtgaacagacactcccttctgtagaacaactctgctcatggtgattacatgcaaaataacgag

SEQ ID NO: 762895 - DNA, 99 bp, Homo sapiens
tactgtgacactgaccaccaggccaacttaacatcagcagatatcctgtctcagatgaagaggtcggtggacatcagccccacccgactgcacagcctc

SEQ ID NO: 762896 - DNA, 83 bp, Homo sapiens
ccgattttgcgtgaattagaaaaggtggccataaaatgcagtaaaaacaaatccagttcccaagaagctgtacaaatgctttc

SEQ ID NO: 762897 - DNA, 98 bp, Homo sapiens
acccgggagtggtgcgtgatgtggctaagatgctgccgactctgggcggcgaggaaggcgtctcccgggcgcatattaaatttcctattgactacccc

SEQ ID NO: 762898 - DNA, 96 bp, Homo sapiens
ggaaaatcgactctcataaacagcctattcctaactgatctgtacccagaaagagtcatacctggagcagcaggccctcgggaccaaggatcacgt

SEQ ID NO: 762899 - DNA, 90 bp, Homo sapiens
agtaccgacccgagttatgcccaccctccaactttgcgacggaaatgtgtcatcgaaagccagaatatatacagccctgctctgggacac

SEQ ID NO: 762900 - DNA, 100 bp, Homo sapiens
gggaagccatggacgtcgagaggctccaggaggcgctgaaaggcctcaggagtgcaagtagctgatgaagtatgtcgcattttttatgacatgaaagttc

SEQ ID NO: 762901 - DNA, 80 bp, Homo sapiens
agcgacggcggcagcggccggagccgggccgggcagctagcagggcgcttcggctcctctctgctatatgaaatatggga

SEQ ID NO: 762902 - DNA, 75 bp, Homo sapiens
tggggaacagggtcacagctctcacccaggtgttgacatcccactcttgttctgaggaaggcttagaggatgcag

SEQ ID NO: 762903 - DNA, 100 bp, Homo sapiens
ggactttgttgtcccggtcccagaccaccctcctccaccgtcgcctcccactgcaaaaaggcctggaaggatgccctgcagtggtctcgccatccagcta

SEQ ID NO: 762904 - DNA, 96 bp, Homo sapiens
cagagagggcctgggagcttgctgcagcttcagtgtcaacagcatctccaccctggagcctgtgagccggtgccagcgcctgagtgagctgtacct

SEQ ID NO: 762905 - DNA, 83 bp, Homo sapiens
cagaaacaagaagaagagaaccctgcggaggagaccggcgaggagaagcagcagaagatggctgtgccacccacgtatgccga

SEQ ID NO: 762906 - DNA, 100 bp, Homo sapiens
tcagccaaagaaacaagccgtggaataggtgtatcaagtaatggtgcaaagcctgaagctagagtaccgtggcacaatctcagctcattgcaacctctgc

SEQ ID NO: 762907 - DNA, 100 bp, Homo sapiens
gggcgtggacggtgtggggcggtcccggccccgcagttctccaaggagaagtacatcctggactcatcgccagagaaactccacaaggaattggaggagg

SEQ ID NO: 762908 - DNA, 50 bp, Homo sapiens
tcccttcgaatattctcgagtgacccccagaggagcccaccacctggacc

SEQ ID NO: 762909 - DNA, 100 bp, Homo sapiens
gagcaactgcaccaggcagccatactggaggccgtgggcacccgcagtgccaacttccccgctccaggaggccagagctctactgaagcggcggcggccc

SEQ ID NO: 762910 - DNA, 100 bp, Homo sapiens
cttattcctgcatctcggcctcctggccctgtcctcttgcctccactgcagcccaacagtggttctctcccccaggcaaaccagtccagctacgggggcc

SEQ ID NO: 762911 - DNA, 100 bp, Homo sapiens
gggtgcctgcacctcggccgtcccggcgcccctggggacgccgccctcccggggtctccgtctctccaccgggggcttcatccttccagggaggagaaga

SEQ ID NO: 762912 - DNA, 100 bp, Homo sapiens
aggagctggagacgagcttggctgaactgaggaaccagatgggtgctcagaaccacacgttgcagaggctgcaacaggtgctgcacgcaggctcagggcc

SEQ ID NO: 762913 - DNA, 83 bp, Homo sapiens
ggcggccgctgaggaggaggagcgagaggtggtgcgggtccgagtcaaggttgtgaccgagattcccgacgagagagactgag

SEQ ID NO: 762914 - DNA, 80 bp, Homo sapiens
cgggaggcggcggcggtaggaagccggagacagcagggtgacagaacattctagtatgccagtagaaaaaaatatcactt

SEQ ID NO: 762915 - DNA, 90 bp, Homo sapiens
ggagccgcagtgggtcccggacaaggaggaatgtatcctgtcaggtataatgtcagtgaatggcaagaaagttcttcatatggatcgaaa

SEQ ID NO: 762916 - DNA, 50 bp, Homo sapiens
ggaggaccagtatttcccatggaggagttttccagaaaaagaccttctgc

SEQ ID NO: 762917 - DNA, 75 bp, Homo sapiens
agagaacaagagagtgagaaaccaagccaagagtattgggaaagggtcgttgtggtgcatagacccagagtatag

SEQ ID NO: 762918 - DNA, 99 bp, Homo sapiens
gagattcagcaggaaatgaagcgtgctaaagtgtctcaagcactgtttgcaaaggttgcagcaaccaaaagccaggttaccttccgaacaagaatctat

SEQ ID NO: 762919 - DNA, 74 bp, Homo sapiens
cgaaggtggcggcgctgctgctcgggctgctcttggagcagggaggagagagcgatggcttttttcacccagaa

SEQ ID NO: 762920 - DNA, 96 bp, Homo sapiens
ccagcctaatccaaagactgtggaacttttaagtggagtggtggatcagaccaaagatgggtcccctcttgctgttggctgcacatcaggaaggct

SEQ ID NO: 762921 - DNA, 82 bp, Homo sapiens
agcggagggagccccagacacggtatgtggaggggacaagccttacattgcaccttcagatctggagcgaaaacacttggat

SEQ ID NO: 762922 - DNA, 98 bp, Homo sapiens
ttctcgaatcattctttgtacagaaattgaaaggcttcaaagctagcagctggttgtcttcttgcctgccctgtgtcgtaaaatgggggtcccttact

SEQ ID NO: 762923 - DNA, 83 bp, Homo sapiens
tccagaactatgctattctcaataaagaggattatgagttgcagaaacgaattgctgaaatggaaactcaaaaggaaaaaatt

SEQ ID NO: 762924 - DNA, 76 bp, Homo sapiens
gggacggagagagcacgagcccatcaggaatgatttcctgaaagaggtgaagatcatgtcgaggctcaaggaccca

SEQ ID NO: 762925 - DNA, 117 bp, Homo sapiens
ccaccgtgattgtgagtttcctgaggccttccctagccatgcttcctgtatagtctgtggaacggtactgaagaagacctggaattttatgtcaggaagtgtggtgatattcttgga

SEQ ID NO: 762926 - DNA, 85 bp, Homo sapiens
ttgtagccgctgtgcttgtcaaggtggatcacacaataataatgtacttgattggaccagatggtgagtttctagattattttgg

SEQ ID NO: 762927 - DNA, 100 bp, Homo sapiens
gaagagatgctggcgtgaagggagaatttggatggagagacccggaactgccggaagtgattcagatgttgcagcaccagtttccctcggtccagtctaa

SEQ ID NO: 762928 - DNA, 75 bp, Homo sapiens
cggagccctgggctggggcaggagccggaacatgcttaccctgctgatgaactcatgcctttaacctgtagaggt

SEQ ID NO: 762929 - DNA, 87 bp, Homo sapiens
ggacagcgacgacgcggaggcagagaagggaacgcccggcccagccccccatgaagatggacctacagctaaaaaattaaagactga

SEQ ID NO: 762930 - DNA, 50 bp, Homo sapiens
cgacactgccagctggaaccagaccatcctaatagtcccagtgaatattg

SEQ ID NO: 762931 - DNA, 100 bp, Homo sapiens
cccagccgagcgggccatggccaccgccattcagaacccgctcaagtctaagactttgaccccgacgcaggcttcagtgattgccgcggatcagaagcct

SEQ ID NO: 762932 - DNA, 83 bp, Homo sapiens
tggacggcgagcgcgagcggcgcgagaaagcaggtgacagcagggacatgtctcgggagatgcaggatgtagacctcgctgag

SEQ ID NO: 762933 - DNA, 100 bp, Homo sapiens
taccacttccgggcccccagccgcatcttctggcggaccgtgcgagtaatgagctgagcatgaagacagattcccgcctaaacttgctggacgatgggac

SEQ ID NO: 762934 - DNA, 102 bp, Homo sapiens
tcttcgctgtcgtttgtggtctcgcgcagggcggccccggttctggtgtttggcgtcggatcttcttcagcagtatcgttctgctgtgtgcaaactagacag

SEQ ID NO: 762935 - DNA, 87 bp, Homo sapiens
cagctattgctggacggccagtgggagagcgaggcctgagcctctgcgtctagaatgatatggaacctagcaaagctgttccactga

SEQ ID NO: 762936 - DNA, 82 bp, Homo sapiens
ctggcggccatcgtcatcctgctgctgaagatctggaagacgcgctcctgcgccgacagtactactggtatgacgagcgggg

SEQ ID NO: 762937 - DNA, 96 bp, Homo sapiens
acgaaaggaagaagtttcaagagattttggagaggcaaccaaaggaatggtaggaatcattctcactgctgggattattggatggtgtagtttttc

SEQ ID NO: 762938 - DNA, 50 bp, Homo sapiens
tgggaaggagcacccaggagctgaagattctgctcctaagtgtaggagag

SEQ ID NO: 762939 - DNA, 124 bp, Homo sapiens
caccgggatcgtgaccgagaccgtgaccgagagcgtgaccgagagcgcgaatatcgtcatcgttagaagacataaccagtgcggtgcaatccaagcgaagaaaatccaagtaaacaagcaggac

SEQ ID NO: 762940 - DNA, 85 bp, Homo sapiens
aatcgaaaggagagaggccctgaagaagagcatcttggcatcctgggtgggtttggaggatttgggacaacatctacaactgcag

SEQ ID NO: 762941 - DNA, 100 bp, Homo sapiens
gacacggaacttttcttctggacgctggagtatgcagctgtgatcccaagtggacaggatctgactgctcaacaggaagccatgatactacaattcgatt

SEQ ID NO: 762942 - DNA, 125 bp, Homo sapiens
gcaatgctaagaagacgtttggtttaaagaattaaaaggaagaacaacttaagagcttcttcaaagtaatgcaagaagtgtttgtgggaagcagagaagcaagcaactgtatttcttgttctcac

SEQ ID NO: 762943 - DNA, 100 bp, Homo sapiens
ctggactcaagcgatcctcccaccacctcagcctcctgagtagctggaaccatcatatgcaccagcacgcctggctaaaccatccataatgtacgtgaac

SEQ ID NO: 762944 - DNA, 82 bp, Homo sapiens
cgaccaccgtcagcactcagcgcgggccgaatagcctaacatggcagaccagagacagcgctcactgtctacctctggggag

SEQ ID NO: 762945 - DNA, 50 bp, Homo sapiens
atcaagttcaaaaccagcaatttcaaggaagagtgacccattttgcttgt

SEQ ID NO: 762946 - DNA, 100 bp, Homo sapiens
cttccctgcagcgatttcttcgagctcgaaacatctctggcgttgttctggctgaccactctggtgccttccataacaaccttaaagaaggagaggatca

SEQ ID NO: 762947 - DNA, 100 bp, Homo sapiens
atcaactgaaggagaagaagatttgtttgtttctgccagtgaaaaccaccaaaacaatccagctgttccctcaggattctgagaaacgaacccctcttca

SEQ ID NO: 762948 - DNA, 76 bp, Homo sapiens
gcaggtcctcaagaagacaggcaaggaggtggtgctggagggtgctttgaagaagagtctcacagccaagcaggtc

SEQ ID NO: 762949 - DNA, 95 bp, Homo sapiens
gaagtggagcgtgtcctgaaggagttccaccaggccgggaagcccatcgggtcatcatcagatttgaaatatttaaagtggatacaaaactattt

SEQ ID NO: 762950 - DNA, 80 bp, Homo sapiens
aggtcatcagttgggtcaaagatggagctactagccaggcctgagacctgaggtcgtggattcacagataaagtagatcg

SEQ ID NO: 762951 - DNA, 148 bp, Homo sapiens
cagcgcgggtcggagtctgggggttcgcgcccgccgacccgcgccctgctccctctcagcacctgggcggacgaacatgggcctggaattgatatattcacacctggtaaacctggagaatatgacttggaaggtggtatatgggaag

SEQ ID NO: 762952 - DNA, 90 bp, Homo sapiens
attcttggctgagtggcaaaatatcaccaagggcttcagtgaagacaggctttctgtctctggtcgtgatgagaacagtgtggagttaac

SEQ ID NO: 762953 - DNA, 75 bp, Homo sapiens
gcgtccccggcgcgaagaggctggactcggattcgttgcctgaggtgtcccgacccaggctaagcttgagcatgg

SEQ ID NO: 762954 - DNA, 96 bp, Homo sapiens
gaggcccaggtctccgtgcagcccaacttccagcaggacaagacacctagctcccctgtttgacaaccctaagttggataaggagctgcgggcaat

SEQ ID NO: 762955 - DNA, 83 bp, Homo sapiens
gagcgaagcgccgagccatggcgcaccaaacgggcatccacggtgagaagccctaccactgcaactgggacggctgcggctgg

SEQ ID NO: 762956 - DNA, 75 bp, Homo sapiens
agagagacagagaacactggatagacttcgaacatttaaacagcatccggtgaaagacagagatcacatttcaac

SEQ ID NO: 762957 - DNA, 100 bp, Homo sapiens
cgaagcacgagcagatcctggtcctcgatccgcccacagacctcaaattcaaagattccacaccaaatcatccatcacaaacaacgcctgcccaaaagaa

SEQ ID NO: 762958 - DNA, 99 bp, Homo sapiens
agttgacaatttcagatttactcctcgcgtccaaaggctaaatgaactggagatgggcactgtgccccgactgcggcctcgcctcaatgccattctctt

SEQ ID NO: 762959 - DNA, 82 bp, Homo sapiens
tcaacatcagcttcgtcccggagtctcctgatggccaggaaaagaaggaactgtggctgcaccatctgtcttcatcttcccg

SEQ ID NO: 762960 - DNA, 83 bp, Homo sapiens
ctgtggagcagatccgatggagaggctgagctgctccaggacttgggggttttgactctgggaggagggctgccttatttgga

SEQ ID NO: 762961 - DNA, 100 bp, Homo sapiens
aatggactgaacaggagacccttctactcctggagagttatgcccagccaagtcttcagtatatccaggggcaacagattttcacagctcatccacaagg

SEQ ID NO: 762962 - DNA, 75 bp, Homo sapiens
caggactgtgcaggggactctgtcacagatcaagtcttccataccagggaccaggccaaaaccagactgccactg

SEQ ID NO: 762963 - DNA, 73 bp, Homo sapiens
gggtcccctagcagggctctagagaccacgtgaagtctcctcggtggattctccacagttttcctcgtgcgta

SEQ ID NO: 762964 - DNA, 108 bp, Homo sapiens
tataccttattggtgtggacgttgtctaaatttcggtagccatggcacaagaatatagcaagaaaattggatgtatattttgaatatgaagaaaaaataatgagcaaa

SEQ ID NO: 762965 - DNA, 82 bp, Homo sapiens
ttcgagtgaccgagaccgcggccgggaccgagggatgacagtgatgggattccgtggtcagaagaacgggtggtacgtaaag

SEQ ID NO: 762966 - DNA, 90 bp, Homo sapiens
tgccgtcctgcagaacaatataatgctgggcatttatcaactgctttccacttagattcagacctgatatgaaaaacagtagctccgtat

SEQ ID NO: 762967 - DNA, 75 bp, Homo sapiens
gagcggcttttgtctacttggctgacctcctgatgcctcacttggctgatcagctgaccgaagaacagattgctg

SEQ ID NO: 762968 - DNA, 100 bp, Homo sapiens
ccacagagtacaagcacgtggacctcgtgaagctgctgctgtccaagggctctgacatcaacatccgagacaacgacctgaaggagaagaaggagaaggt

SEQ ID NO: 762969 - DNA, 50 bp, Homo sapiens
tgcaggacatctgcaatgatgttctggtttttagaacttcagccataaaa

SEQ ID NO: 762970 - DNA, 90 bp, Homo sapiens
gcctttcaatgtgacacaaggaaagtattctacaggccctgggaggagcggggacactgaggacctctctccaaattggcctctcaactc

SEQ ID NO: 762971 - DNA, 97 bp, Homo sapiens
ctcagagacccctgccaggaccctgcccttcaccacagggcaactccaacaacattgccaccgtggacatctccgcaggcttcgtgggcttagacac

SEQ ID NO: 762972 - DNA, 100 bp, Homo sapiens
tgtgagatatggctgcttcccgttctgccatgatggctttcaacagacctcacatctttcttcttatgaaattataactccttggagattaactagagaa

SEQ ID NO: 762973 - DNA, 50 bp, Homo sapiens
ggtctctataagaagatgatctggatgaggatcgcagtacggaacctgac

SEQ ID NO: 762974 - DNA, 90 bp, Homo sapiens
aaacaaaatgtcaacaaattgatgggtaatctttggtaaatctagctgttcagaattttcaaaggaagcctatacagccgtagtatatca

SEQ ID NO: 762975 - DNA, 82 bp, Homo sapiens
tagcagacacggtggctactctgcctcggggacgaaagcagtttaatggatcgagaagtggcgttgcttgctgaaatggaca

SEQ ID NO: 762976 - DNA, 78 bp, Homo sapiens
cctgcgccgagtggacgcctaccgcatctacttgaccatcctggtgggtgacagtggtgtgggaaagacgtctctgct

SEQ ID NO: 762977 - DNA, 83 bp, Homo sapiens
tctgtttactctgaattaccatcagctgaagggaaaatgaaggcatgttatttgaaagcaattgagacgcaaccgaactttgc

SEQ ID NO: 762978 - DNA, 75 bp, Homo sapiens
gatgttcttcttcgagtatttgtagaaggcccctggcaaccactaatctgctttctatctatggatttgcctatt

SEQ ID NO: 762979 - DNA, 75 bp, Homo sapiens
ctccttgtgaaagccatcaccgtggagagcagcatgatcctcaatgtgctggctcaacagtcactggagcttatc

SEQ ID NO: 762980 - DNA, 74 bp, Homo sapiens
ttggcattgacatttaattttagggtcctttatatagaagggagagttggcgtgcagtggtgtgatctcagctc

SEQ ID NO: 762981 - DNA, 87 bp, Homo sapiens
aagctctcagctttgaaacaatttcagaaaccactaatgattcgataatacatgatgtggttgaaaatcatgttgcagaccaacttt

SEQ ID NO: 762982 - DNA, 90 bp, Homo sapiens
ggaagcagaattccattttactcatctcataatgactttcaagggcacagtcgtagtgccaactctggactctgttttgtatgacaacca

SEQ ID NO: 762983 - DNA, 80 bp, Homo sapiens
tgacctctctgatgagatggatcgagatcctgaaggagctagacgagtgctacgagcgcttcagtcgcgagacagacggg

SEQ ID NO: 762984 - DNA, 75 bp, Homo sapiens
agaatttagcagtgtagacaatattgtccagtaaccctccactgagtgaagaaatgttgcctcctggagagtgga

SEQ ID NO: 762985 - DNA, 82 bp, Homo sapiens
tccacccaccgccgccgcctcccaggctgtacatccttttgaaatcccagagatcttcagtctccctgtggattaaggagat

SEQ ID NO: 762986 - DNA, 134 bp, Homo sapiens
cagaagttcggcaccttatttctctgctgagtgtccagatcctccaaagacagatctggtaaaatgtccagtgatcgagctttgaggaagcagcaacagttgaacaaccttgtctatgtggtaacaaatcaggc

SEQ ID NO: 762987 - DNA, 100 bp, Homo sapiens
ggtgctgcgagggcagaacctggatgaagactggcccatttgcagagcactccaaccagctgtggaacatcagcgccgtcccttcctggtccaaagtgaa

SEQ ID NO: 762988 - DNA, 83 bp, Homo sapiens
caaagcacaggaatctcactctgttaaagctggtctgttctaactgaggtcagcctagcaacaaagaagatgtggatgatctt

SEQ ID NO: 762989 - DNA, 100 bp, Homo sapiens
tagcctacaggatggcttggccttgcacataaggttttgcactgattgcaaaaataaagtcctccgagcatacaatatccttattggtgaacttgactgc

SEQ ID NO: 762990 - DNA, 75 bp, Homo sapiens
tcaccaagcaagtcaccgtgcatgcaaggacactgacaactctgagggaggttctctacttttagagtcgaaaat

SEQ ID NO: 762991 - DNA, 77 bp, Homo sapiens
ccggcgacccctgctgctgctactgctgttgctgctgctcgtcaccttcaggccattcagaggaggaaagagagggg

SEQ ID NO: 762992 - DNA, 51 bp, Homo sapiens
gagagatctccaagaattacagccctactgccaataaagggaaaataagag

SEQ ID NO: 762993 - DNA, 90 bp, Homo sapiens
agcgcatcgaggatttggcgctgcagaaccagatccgggagcacgtcatctccatcgagggaccaagaatcgccttcagccctgtctggt

SEQ ID NO: 762994 - DNA, 101 bp, Homo sapiens
ctggcagaaacagaggactaattttggcagttctaaatttgaatttgaggatgatgcccggcaattatttgttttagctggcagtgctgaagaaggagtca

SEQ ID NO: 762995 - DNA, 100 bp, Homo sapiens
ggctgcggacgctcggtcccgcgctgcgcatccccgcggacgccacagcgctggccatgaagcccccaggaggagaatcgagcaatctttttggaagtcc

SEQ ID NO: 762996 - DNA, 51 bp, Homo sapiens
aagaaaagcagtttttttttcaggcatatcacacctgaaaaattttatgtg

SEQ ID NO: 762997 - DNA, 59 bp, Homo sapiens
ttcattccatgattgctcgaatatgtcctgtcttgttgcagtaggagaaagagcacaaa

SEQ ID NO: 762998 - DNA, 101 bp, Homo sapiens
gtacacaaatgcacgcgacaggaaccagcctcccctggtgaagacacaaactgtcaccatctcagataatgccaatgctgtgaaaagtgaaatcccaacca

SEQ ID NO: 762999 - DNA, 50 bp, Homo sapiens
ggagagaggtgctgaagtccacgaagagggtctcactctgtcacacaggc

SEQ ID NO: 763000 - DNA, 100 bp, Homo sapiens
tttaactgcttggccgtgcttgccctgtcatcccacctgagaaccatgctcaccgaccctggtcctcactgagcagcgagtcgtcccccgtgtcctctcc

SEQ ID NO: 763001 - DNA, 50 bp, Homo sapiens
tccccaagctccccgtcctcgggttttaaaatcaaagatgggaaaatcgg

SEQ ID NO: 763002 - DNA, 83 bp, Homo sapiens
gacagttctgtctgcagaagcccattatggctgtaactggagatgacacagacaatgcagatcttcgtgaagactctgactgg

SEQ ID NO: 763003 - DNA, 75 bp, Homo sapiens
cctggtcatacaccagtactaccaaggacagcttttttcctgcaagtagtcgtgaaaggtgccaaattggcagag

SEQ ID NO: 763004 - DNA, 100 bp, Homo sapiens
gtcctctaatctatcttccttctctccctcacaggccatgaacctgtgggctcgggatgagtttgaaggcctcttcaagcagccagcagaaaatgtcaac

SEQ ID NO: 763005 - DNA, 102 bp, Homo sapiens
ttggagttggaatttgtgcaatgtttagccaacccaaattaccttaattgctttctgtgatgatgcagtgggactgagattcaatcctgtcctgtaccccaa

SEQ ID NO: 763006 - DNA, 98 bp, Homo sapiens
ctcaaagccctgggtcgcttggaagaagccaagaagtggtccaaaggcaaagttcgggacaagctcaataacttagtcttgtttgacaaagctaccta

SEQ ID NO: 763007 - DNA, 90 bp, Homo sapiens
cgctgggaaccttccccagccatggcttccctggggcagatcctcttctggagctgttccaaagacctaatgcgcttgctgtccagcagt

SEQ ID NO: 763008 - DNA, 98 bp, Homo sapiens
aacctgctgctggaggaggataacaagttttgtgcagattgccagtctaaaggtaccttaacatggggaatcttcttaaagttttgacatgcacagac

SEQ ID NO: 763009 - DNA, 95 bp, Homo sapiens
attgagccgttgccgaacgtggtggagctgtggcaggcagaagaaggggaactcctgctgcccactcagaaccagaggcaggagaagtgtcccct

SEQ ID NO: 763010 - DNA, 74 bp, Homo sapiens
tgcagcgcaagcaggagcagcgggaggcccacagaagaggaaacctatggacccttccagatccgcatccagga

SEQ ID NO: 763011 - DNA, 74 bp, Homo sapiens
agagataagaacaccaaccaaattgtcgccattaagaaatgtggcaaaggagcagagaactttgacaagttctt

SEQ ID NO: 763012 - DNA, 100 bp, Homo sapiens
agaggctgcagagcgagggcaggagaacagctttgctgagccatcaaggtctaatggaagcatggttcggcattcttcatctccatatgtagtatatcct

SEQ ID NO: 763013 - DNA, 80 bp, Homo sapiens
gtcacctaaagttaggcggcactccagccccagctcgattgtcagaatggtgaagaatttaaaaggcagcccaataactc

SEQ ID NO: 763014 - DNA, 100 bp, Homo sapiens
agaaagcggcttatcgaacagagccgggagttcaagaagaacactccagaggcatcgttggcttcacagtatgactgatgatcctccaacaacaaaacca

SEQ ID NO: 763015 - DNA, 99 bp, Homo sapiens
gaggtgaccaaggaggagtacaaggacatcctgcgcaaggccgtgcagaaggtgtacatcggtgagctcccgcaggacttcctccgcatcacgcccaca

SEQ ID NO: 763016 - DNA, 100 bp, Homo sapiens
gccgcgcccacccgctccgcgccgagggctggaggatgcgttccctggggtccggactcctttctacgaaaccgttcaagttctgaccatgaagctacag

SEQ ID NO: 763017 - DNA, 50 bp, Homo sapiens
accaaattgtcgccattaagaaagtcgttgaggacttccacatggagatt

SEQ ID NO: 763018 - DNA, 100 bp, Homo sapiens
cgatggcgcagaaaccccgttgacaaggcactgctttttcatgacggggctttgaccacgacctttgaagagcttcattttgagatcaagccccacgatg

SEQ ID NO: 763019 - DNA, 96 bp, Homo sapiens
cggattgtactgtatggggactccaattgcttggatgacagtcaccgacagaagggagatcatgaatcagacagataaaaatcaacaagaaatccc

SEQ ID NO: 763020 - DNA, 96 bp, Homo sapiens
tcatgtggcagtggaaaatgcgctcgggctggaccagcaggttgtgaccgagattcccgacgagagagactgaggggaagagaggaaggaggggcg

SEQ ID NO: 763021 - DNA, 100 bp, Homo sapiens
tctaagaaatttgctgttaaatactatactggcaattgctggagaagattttgcaattgttgcttctgatactcgattgagtgaagggttttcaattcat

SEQ ID NO: 763022 - DNA, 74 bp, Homo sapiens
aggtcctgagcctcgagccgcagcacgagctcaaattccgagcccagcgatctgctcacgagctgcccatggtt

SEQ ID NO: 763023 - DNA, 133 bp, Homo sapiens
aactgttccttcagccaaagaaacaagccgtggaataggtgtatcaagtaatggtgcaaagcctgaagtacttgatgaagaagcagaagtttttatagtcaaaatgtggagattattgatatatgaaacagaa

SEQ ID NO: 763024 - DNA, 90 bp, Homo sapiens
cagataccaaggcaaaatctttgatgaggaaaatattctcaatgaactcaatgatcctctgagagaggtgaaggtacaagtaagaagctg

SEQ ID NO: 763025 - DNA, 100 bp, Homo sapiens
agttttgaacagttttgcataaattatgcaaatgaaaaactacagcaacaattcaatatgaccattaaaaatctcaagtgacgactttgggaaactctgg

SEQ ID NO: 763026 - DNA, 50 bp, Homo sapiens
cagacactgaacgaggagccagtggaatctagaaaactgtatctgaagtt

SEQ ID NO: 763027 - DNA, 100 bp, Homo sapiens
ttgcctgcaagctctgcgaggccatctgccccgcccagggatactcctttgtggcaccctccattctctttgaccacaacaacgcggtgatgaccgatgg

SEQ ID NO: 763028 - DNA, 90 bp, Homo sapiens
caattctatctcttgggcaatcttcacggggctggctgctctgtgtctcttccaaggtgaccaaaagccagccccactgtgagttgaact

SEQ ID NO: 763029 - DNA, 89 bp, Homo sapiens
ggaaaaagcagtaaagccagaggaagattctggggagcaggtcctggtggatgtggagaccaagagcaataaggagatcatggagcaca

SEQ ID NO: 763030 - DNA, 82 bp, Homo sapiens
ccaggcgaagctggccgagcaggctgagcgatacgacgggtcctgccctccggaggagcagcctcgaggctggtggttttca

SEQ ID NO: 763031 - DNA, 100 bp, Homo sapiens
aaagaaagaagccaaagagaaaggtacctgggttcaactaaagcgccaggctgagcggaaggaggagaaaaaggcggctgcccctgctcctgaggaggag

SEQ ID NO: 763032 - DNA, 83 bp, Homo sapiens
gaatgctggggcgtactccaaagttgttcaggaacgtgctctggtctggggtctctctgtgaaacacaatcctcagaaagtgg

SEQ ID NO: 763033 - DNA, 100 bp, Homo sapiens
gccgcaccccaggatggatcccccagagttacatggacacagaacagtatgaagaagcagtacgagactatgaaaaagtataccagacagagaaaacaaa

SEQ ID NO: 763034 - DNA, 50 bp, Homo sapiens
ccaacctcaaggggacagccccggaggtgttccctgtcttggctgcaaag

SEQ ID NO: 763035 - DNA, 98 bp, Homo sapiens
tgatcagttggctactatctgtccaattgttggcaatgtattccaagatgcagtcttcaatcaaacagttacagttattgaaagagaggatgggttag

SEQ ID NO: 763036 - DNA, 98 bp, Homo sapiens
cacgtctccaacaaccaagctccccaaactcctgccaccttatgcttgtcaccaacccttctcctccaaatctgatacaccagactttctgagaacct

SEQ ID NO: 763037 - DNA, 115 bp, Homo sapiens
tgcaacaaccactggttctccaggaaccgaaaaggcgaggagtatagtacggcaaaaaactgtcggtggcgacatgtctaagaatgtgagccagtcacagatggcaaaattgaac

SEQ ID NO: 763038 - DNA, 90 bp, Homo sapiens
ttaccagttcctacagctccactcgaggcatctcacagagaatggatcttggagaatgtctgaaagtccatgacctggctttaagagcgg

SEQ ID NO: 763039 - DNA, 97 bp, Homo sapiens
attgcaatgcattatagcaatcccagacctaagtttgaagattggctttgtaacaagggtgctgtgccgttcctggtcagtgccacctctggcacca

SEQ ID NO: 763040 - DNA, 100 bp, Homo sapiens
aggattcccacgctccactcagggactcaaggtaactaggatttctacctcaaccgcgagacctatgcaaggacggtgtggaccaactcgcgcccgcggc

SEQ ID NO: 763041 - DNA, 100 bp, Homo sapiens
cagatttctgtggcagaagatgatgatgaaagtttttccacctatttccctggatattttgatggtcagtactggctctggtgggtgttccttgttttag

SEQ ID NO: 763042 - DNA, 98 bp, Homo sapiens
gcggcccggcaggacagctccaggtcagatttaatgtactacaatatgttgtcccagaagtgaaagacctttacaattggcttgaagtagaatttaac

SEQ ID NO: 763043 - DNA, 100 bp, Homo sapiens
cagaaagcatttaaccagcatggctacttcatattttggaaagcagtttttaagacaagtttcccaggcagctgcagacttgaaacagttctgtctgcag

SEQ ID NO: 763044 - DNA, 90 bp, Homo sapiens
ttagtctcctcctcggcgggagccctcgcgacgcgcccggcccggagcccccagcgcagcggccgcggagcgatctctctttgagtcggc

SEQ ID NO: 763045 - DNA, 82 bp, Homo sapiens
ccccggtacatctgaaagccgggaaatgctcttttgaaacagatggtcaccatgtttagatattagcagtcccgtatgtgca

SEQ ID NO: 763046 - DNA, 101 bp, Homo sapiens
gcgagtctgagagcctgcgggcgggcggcgcgctgcaggcgagcgggcgagcgggcgcgccctgcaggggaagtgctctctggcgtggtggtcatatcgag

SEQ ID NO: 763047 - DNA, 127 bp, Homo sapiens
ctgctcgccgcgttgaccgcgctcctcgccgccgccgctgctggcggagatgccccgccgggcaaaatcgcaggaaagctgtctgtggcttttcaaaatgcgcctggtagagcatggatggcccatc

SEQ ID NO: 763048 - DNA, 83 bp, Homo sapiens
gcaggacttcatccaggcctacgaggaggtgcgcgagaagtacaaagggcgaactttctgaccaagtatacaactacccagag

SEQ ID NO: 763049 - DNA, 100 bp, Homo sapiens
agcaataccaccagcagcaccagcaacagtggcaatgagaccagtggaagcagcaccatcggggagacaagcaagaaacttttgagaagaactttgaaag

SEQ ID NO: 763050 - DNA, 90 bp, Homo sapiens
caccgttaatccagatcgcatcaaacaaagctcccagctcctccagcagccgacaggaggcccgtcaagatgcaggcaggcattgccacc

SEQ ID NO: 763051 - DNA, 50 bp, Homo sapiens
ggctagttgaggaatggcttcatgagattttcttcaatcacatctgaata

SEQ ID NO: 763052 - DNA, 51 bp, Homo sapiens
ctgaggtgggctgtggaatgccatgtgtctcaatgcttgtacctactgcaa

SEQ ID NO: 763053 - DNA, 51 bp, Homo sapiens
cccctacaagatcgaggccgtgcagactgatggatgtgctgactagtgaga

SEQ ID NO: 763054 - DNA, 98 bp, Homo sapiens
agcctgttggaggaactggcccggaaacaggaggacgaggatgctggtggtggaggtggcgaacggccgctccctggtgtggggagccgaggcggtgc

SEQ ID NO: 763055 - DNA, 96 bp, Homo sapiens
tggagtaaccctcactggagaatccagagactgtgccctgtccacggtgcctcctgcatgtcctgctgccctgagctgtcccgagctaggtgacag

SEQ ID NO: 763056 - DNA, 96 bp, Homo sapiens
acagatgtctggactcttttaaatggaagcaaagatgacttcctcatatatgatagatgctggccagagcaagtgtcgcctggagcgggctcaagc

SEQ ID NO: 763057 - DNA, 76 bp, Homo sapiens
caacaccaagtgcatcaccatccccagctcttgttcagcttctggaatttctgagcagccctcgtcagtacaagat

SEQ ID NO: 763058 - DNA, 100 bp, Homo sapiens
ccactacagggaagtgcatcacatgtcaggaaactttgagggaaattttgagtcactggaccttgcggaatttgctaagaagcagccatggtggcgtaag

SEQ ID NO: 763059 - DNA, 80 bp, Homo sapiens
cacggagcactgcaggcgccggaagccccatgtgccactcccctgatctgcagcttcggtaggccggtggacctggagaa

SEQ ID NO: 763060 - DNA, 75 bp, Homo sapiens
tgaataagcctgaagtgaatcagaaactcaccaaaaaagctcttattaaggctcccggggagctttctgtgaagt

SEQ ID NO: 763061 - DNA, 83 bp, Homo sapiens
cagattcagcccaggatcagcctgtgaagtgactcccgtggactgtggtggcagcagcagtggcagcagcagtggaggaagtg

SEQ ID NO: 763062 - DNA, 96 bp, Homo sapiens
gggctgcagagcatggactgttaaatcttgcacttcttctgagtgaggatccaaactactggatacaggtgcatcgcttggaacatggagatggag

SEQ ID NO: 763063 - DNA, 96 bp, Homo sapiens
cgcaaccattgacgccatgtcgggttattcgagtgaccgagaccgcggccgggaccgagggttgcacactgggccacagaggatccagcaaggatg

SEQ ID NO: 763064 - DNA, 75 bp, Homo sapiens
gccactgccccacgcgcccgcggcccgcgcgccgagactattgcccagaagaaaagatgtttggttttcacaagc

SEQ ID NO: 763065 - DNA, 100 bp, Homo sapiens
gtaaactaccgaagtctgcttctgcttccaaaggagaaccgcagtgaaaggcatgaaggaactgactctcaagcagacctagaagatatcattgttgtat

SEQ ID NO: 763066 - DNA, 99 bp, Homo sapiens
atgaaggtgtattcccttaaaaagacggacagcccatcgtgtgaactatagagtttgtggacagatttatattgagcgatcgcctcaccggcccatcct

SEQ ID NO: 763067 - DNA, 83 bp, Homo sapiens
ctttttgacagcttccgccgggactgcctggccgacgtggacaccaagtctacgcctgcaagctctcagaccgggaacatcca

SEQ ID NO: 763068 - DNA, 90 bp, Homo sapiens
gagcctctgggcccacgggacggtgctgaggaacctcacggctcatttagaggcgagttttgaggaggtagagaacaacctgctgcatct

SEQ ID NO: 763069 - DNA, 100 bp, Homo sapiens
cagaaattgccggtctgggagttgggggcaaggagaagatcctggagattagcagaggcatttcatatcagtgaggattctgatcctttcaatatacgtt

SEQ ID NO: 763070 - DNA, 75 bp, Homo sapiens
tgccatactacattcgcttaaattttgcagagaaaggttcagcagatagatcgtgtggtagaagttgtggaggag

SEQ ID NO: 763071 - DNA, 75 bp, Homo sapiens
ctccaatgggaataccaagggacctgcctagagctggaacgttacctccagagcgagccctgctatgtttcagcc

SEQ ID NO: 763072 - DNA, 73 bp, Homo sapiens
cagtggacgtcaataatgaaagctcttcagaggtctgggaggggctgaacgtggtgaagacaggccgagtgat

SEQ ID NO: 763073 - DNA, 100 bp, Homo sapiens
gcgggcctcaggggctgctctgaggaccgatgactcggaaagcgctcagaagaacgcttcgcccgttggtgctatgtggtgaaattgcctctacctttga

SEQ ID NO: 763074 - DNA, 96 bp, Homo sapiens
aataaactggggaccaaaaatgaacctgtgttaaaacctggagacaggggtttgtgtttagtgaatcagagggatctgcattagaacagtttgaag

SEQ ID NO: 763075 - DNA, 107 bp, Homo sapiens
tccgccgccctacgaggcctccatccacccggacagtgtgttctatgaccctgcagggaagcagtgggacttgcagttccctgaagaagcagaagctgagggcagag

SEQ ID NO: 763076 - DNA, 98 bp, Homo sapiens
gtttgaacaaactcgaagaacagctgtggaaagaagttgcaaaacactggtccttgcctgcattaattgaacaaggagagggattttcccaagttctc

SEQ ID NO: 763077 - DNA, 83 bp, Homo sapiens
gcgggaggtgttcgagaacgaccccgagacgatgccaggatagaagaatttgtttatgagaaactggatagaaaagctccaag

SEQ ID NO: 763078 - DNA, 74 bp, Homo sapiens
ttgagtctttgtaccaggctgtttgtgatcgtatcaggcagcctggcatcctcgctacaacctcattgttgtgg

SEQ ID NO: 763079 - DNA, 96 bp, Homo sapiens
catcgtcatcctgctgctgaagatctggaagacgcgctcctgcgccgtgagatggaagattttcgaggtatagcagaagaatcatttccaagcttt

SEQ ID NO: 763080 - DNA, 96 bp, Homo sapiens
tttggtgcatatgttacccaaaaaactgttcaggttccattatcaaaacgagcaaaatttgttggacctggtggctataacttaaaaaaacttcag

SEQ ID NO: 763081 - DNA, 98 bp, Homo sapiens
ggaggggtgcggcaagcctataagatgagcagcaccagcagtaagagggctccgaccacggcaacccagaggctgaagcaggactaccttcgcattaa

SEQ ID NO: 763082 - DNA, 51 bp, Homo sapiens
gggccttactccttcacagatcgccaggtctccagctggggtggacgtgcc

SEQ ID NO: 763083 - DNA, 90 bp, Homo sapiens
agaaacagagccgtatcataattaccgagcaagaactcccctggagcaggaaattttcaacctcctccataagaacaagcagccagtgac

SEQ ID NO: 763084 - DNA, 100 bp, Homo sapiens
ctgcagacggctgcgaggcgctgggcacagtgaaagatgtcatgtatatctgcccatttatgggagcagtgagtggaaccctgacagtgacggactttaa

SEQ ID NO: 763085 - DNA, 100 bp, Homo sapiens
aaactggacctgcaacagggacagaatttactgcaaggtctgagcaagctcagcccctctacctcagggcctcatctttgtggtggacagtaatgaccgg

SEQ ID NO: 763086 - DNA, 49 bp, Homo sapiens
attcgcagtggtcgcttcttctccttgagatatgaatcaggttcttgat

SEQ ID NO: 763087 - DNA, 133 bp, Homo sapiens
caggacgccgtcacggccgcgctgctcatccccaaggaggacggcgtgatcacggccagcgaggacagggttcaggataagtttgaggtgctgaattacacaagcattcctatctttctcccggaagtcacca

SEQ ID NO: 763088 - DNA, 82 bp, Homo sapiens
ctaccatgcaggatgctaccatcaaagtgcgcccacagcagcaaccttggagcaggcagcttccccgggcgctgcctggaca

SEQ ID NO: 763089 - DNA, 100 bp, Homo sapiens
cgaaagcgttggagaggtgttaccggaacggcggcgacaagggtgttcccgaactagagtgggtgcgtataatttgctctgcgtcgactcctatatcaag

SEQ ID NO: 763090 - DNA, 83 bp, Homo sapiens
cttcacgggcaataagaagcagcctgttatagtgcccatgtatgcagcaggattgaagaatcctgcaaaaatgtctctctatc

SEQ ID NO: 763091 - DNA, 74 bp, Homo sapiens
ttgggagatccacagctaagacgccaggacccactggaagcctagaaatgactgcttttggcttctggatgccc

SEQ ID NO: 763092 - DNA, 76 bp, Homo sapiens
ataacgacccatacatgtcaaatggatctctttctccacccatcccgagaacacgcttctctgaagtagctttgga

SEQ ID NO: 763093 - DNA, 124 bp, Homo sapiens
acttccagaacatctgggagaatatttaatggaaaatcgcttggttaaaacctgacacttttaacagcaatggctgccatccggaagaaactggtgattgttggtgatggagcctgtggaaaga

SEQ ID NO: 763094 - DNA, 100 bp, Homo sapiens
cataaatgtctggctaatggcatttacaggagtgagatggaagattttcgaggtatagcagaagaatcatttccaagctttctcaccaattcattatttg

SEQ ID NO: 763095 - DNA, 73 bp, Homo sapiens
taatgttctgactaatgaactaaggctcattgctcaaagatccagctccaggtcccacaggggctcttcttcc

SEQ ID NO: 763096 - DNA, 97 bp, Homo sapiens
tggtgttcagtacgccacaagcgacacaaatgaacacgccttctcagccccgccaggatatgtttgccttcatgggcagcctggataccaagggtac

SEQ ID NO: 763097 - DNA, 80 bp, Homo sapiens
cttctgtcatagaaactcacatgagacaaatgcgctcagcttcaattgtagacccaaatgatttgtacattgtagaaccc

SEQ ID NO: 763098 - DNA, 90 bp, Homo sapiens
ttacagtcatagcagtacccgagatggaagacgcgacagatccattttcagtcaagaggaatgttgcacggagcttaaacagccagctgg

SEQ ID NO: 763099 - DNA, 96 bp, Homo sapiens
agctcttggaactggctgtagcctttgctgagcaggagcaactatgtctctggttcttaaggattgaaaaggtcgaatgagtgatttgagtgtaat

SEQ ID NO: 763100 - DNA, 100 bp, Homo sapiens
ctcatgacaaatcatttctatgcagcgatcttgggatatgatgaggacttgccggagcagccttacttgcagcctccactcagcatcttggtgattgagc

SEQ ID NO: 763101 - DNA, 80 bp, Homo sapiens
cttcattcctggaaaaagaagttcatcagattcaagcctgtctctcttgctgatcgagaggtgatatcccggcttcggaa

SEQ ID NO: 763102 - DNA, 75 bp, Homo sapiens
tttttcttcaatgggcagcatatgaaagtggattatgggttgctgatcagctctgtgccaagtatagcaaggaat

SEQ ID NO: 763103 - DNA, 98 bp, Homo sapiens
caggatggactttgttgtcccggtcccagaccaccctcctccaccgtcgcctcccactgcaaaaaggcctggggtacagctctgccggggggggaaaa

SEQ ID NO: 763104 - DNA, 75 bp, Homo sapiens
taagatcctcaactgccaaaaggcaatggccatccgggtgacctgcataggttcctgcggggtctccaacaaggc

SEQ ID NO: 763105 - DNA, 100 bp, Homo sapiens
ttctgacgccctcaaggtcgccaaggaggtggacccccagggtaactaggatttctacctcaaccgcgagacctatgcaaggacggtgtggaccaactcg

SEQ ID NO: 763106 - DNA, 100 bp, Homo sapiens
aggaagacccaatggatagatacaaggaagccctcctatgacactgaaacagatcctagtgagggattgatgaatgttctaaagaaaatttatgaagatg

SEQ ID NO: 763107 - DNA, 74 bp, Homo sapiens
tgaaaagcaaggcatgacacaagaatcctttggactttgaagaatatcctgaacatagaacgaactttttctta

SEQ ID NO: 763108 - DNA, 50 bp, Homo sapiens
ttctacggccccggctgccagcgtggggaccaatgccatggacagccccc

SEQ ID NO: 763109 - DNA, 98 bp, Homo sapiens
acggtgccccatagatggccagctttcccccgagggtcaacgagaaagagatcgaaatgacgaagctgggccacgagctgatgctgtgtgcgccagat

SEQ ID NO: 763110 - DNA, 98 bp, Homo sapiens
cacacagcaaaactgggactatcggtggcagcaagtgcccaaaaaagggaaaagagaagtcacctttggaccctcgacctggttttgtctttgccccg

SEQ ID NO: 763111 - DNA, 56 bp, Homo sapiens
ctccatgaccctggaccagcgggactcagcctgacactattagaagcaatcttcac

SEQ ID NO: 763112 - DNA, 102 bp, Homo sapiens
gtccgctgttctgatggggcttctcgaactttgtgccgatgccgagaaacaacttgccaaaatatggttgagccccttatacccacgaattgctgatggaac

SEQ ID NO: 763113 - DNA, 80 bp, Homo sapiens
ttcaaccggctcatccgcaacgagaaaggcgagaatcaggaaacccaggcccaacggcaggtggatgcaagaagaaatgt

SEQ ID NO: 763114 - DNA, 90 bp, Homo sapiens
tttcaacggaccagggcctggtgcagtggctacaggaactgaatgtggattcaggcaccatccaaatggctacttcacccccctcaacac

SEQ ID NO: 763115 - DNA, 98 bp, Homo sapiens
cctggcgcaggatgtgactggggccttggaagatgcccttgccaaggaccgtgcctcagaggatgtggagccatttctggaaagtatcaacgcagggg

SEQ ID NO: 763116 - DNA, 80 bp, Homo sapiens
aaatatcccaaggactaatctgatcgggtcttccttcatatttgagttctgtgaacctgcatttgttgttggtaattgcc

SEQ ID NO: 763117 - DNA, 101 bp, Homo sapiens
ggggcattatgcttcccagactccgacagttagttaatatgtgcatcaacccagatccagagaagcgaccagacgtcacctatgtttatgacgtagcaaag

SEQ ID NO: 763118 - DNA, 95 bp, Homo sapiens
gtgcttctgaaacgtcagctgcgctcccctaggagtgctgagcccgcggaaccgcagccatgcaacacagtcactcctggcggcaaaccaaacaa

SEQ ID NO: 763119 - DNA, 90 bp, Homo sapiens
gtggatttgggagacatttaggagtctcagagaaagatgtcacatctgctaaagcactgtatgaacatttgactgcaaagaatacaaaat

SEQ ID NO: 763120 - DNA, 100 bp, Homo sapiens
agcaaagaagcatagcttttagctctaatgatattggtgctggaaaaggcaaatactatgctgtcaattttccaatgagagatggtatagatgatgagtc

SEQ ID NO: 763121 - DNA, 96 bp, Homo sapiens
cctctccggcagagggcacccaacttcagcctggagcggacactggcagccgagatggatggtgtcggacggcatgacaggcagcaatcctgtgtc

SEQ ID NO: 763122 - DNA, 98 bp, Homo sapiens
acatcacctgcagtcagtccagagctgcccagttcctgggcagcctgcgtgcccgcctgatgcttctgcaccccagccccaactgcagccttcgggcg

SEQ ID NO: 763123 - DNA, 98 bp, Homo sapiens
taatagaggacttgaagcagaaagcaagtgaatacgagtcagaaggaccttttccagtggtgagtttaatggtgggatctgttgttctgagcatggcc

SEQ ID NO: 763124 - DNA, 100 bp, Homo sapiens
ctgtaatggcctttcttatactctagaatatacaaagacaaaaggagattctgatgaagaagttattcaagatggattctggactctacttataatatcc

SEQ ID NO: 763125 - DNA, 75 bp, Homo sapiens
ctccaggaatcctcccaccacagtctctcaaatacttgggactacagatgccgctcctacgaggactgctgtggc

SEQ ID NO: 763126 - DNA, 100 bp, Homo sapiens
tgagatcgtggacaagatcatgggcaaaggacagatccagtgggctcgggatgagtttgaaggcctcttcaagcagccagcagaaaatgtcaaccagtac

SEQ ID NO: 763127 - DNA, 50 bp, Homo sapiens
ccacaggccctcgttgcccagatgaaggtgggagtcaatcattttgacaa

SEQ ID NO: 763128 - DNA, 103 bp, Homo sapiens
ttgataaaaagagatgtggggggattctcgacctgctaacagaactggaccttttcggatggatagaatgacagaagatgctcttcgcttgaatctgttgaag

SEQ ID NO: 763129 - DNA, 98 bp, Homo sapiens
aaaatcttagtcgacatttttatggtatccaaagtgaagtacctggggctgctggcaatgtccaagatcctgaagacccaccccaagtccgtgcagtc

SEQ ID NO: 763130 - DNA, 101 bp, Homo sapiens
tgtgaatccacagattttcactgctcatccggataccatgctgggaaggcagcctggcatcctcgctacaacctcattgttgtgggccgatacccagatcc

SEQ ID NO: 763131 - DNA, 96 bp, Homo sapiens
aattacacctttgatttcaaagttctcctgaaaagaaagctgaacattcatctataaatcaagaaaatggcactgcaaaccctatcaagaacggta

SEQ ID NO: 763132 - DNA, 100 bp, Homo sapiens
gttttgtgaaaggccaatttcatgaatttcaagagagtaccattgggggtatcattaatgggattggaaattttaagtgcctttgtggacagattatcaa

SEQ ID NO: 763133 - DNA, 82 bp, Homo sapiens
gacgaggaagttttctactgtaaagtcaccaacgagatcttccgccactacgaggtcggcactcttcaccctcccgagccct

SEQ ID NO: 763134 - DNA, 83 bp, Homo sapiens
gtggagatatggcgcaactgcggcgcacctgcctagagctggaacgttacctccagagcgagccctgctatgtttcagcctca

SEQ ID NO: 763135 - DNA, 90 bp, Homo sapiens
gtgtgtggtgctgaatgaagggatgaaggaggactgctagcgtctaagatcatgacaagatgtttaagatgagtgaaaagatattactcc

SEQ ID NO: 763136 - DNA, 75 bp, Homo sapiens
agcggcacagaggtgcttctgccaggttgaatgagaaccctacttgcctaaatgaggaatgtctttcctaccatc

SEQ ID NO: 763137 - DNA, 100 bp, Homo sapiens
tctgccttctactccatcgtgggactcagcagccttggtgctcaggtgccagatgcaaagaaccctgatgccaacccacgccccacagcccaggacctgg

SEQ ID NO: 763138 - DNA, 100 bp, Homo sapiens
cttctgaattcccttctgagttaatgtcaaatgacagcaaagcactgtgtggctgaataagcgaccaggacggtgacaagcagctctctgtgcccgagtt

SEQ ID NO: 763139 - DNA, 75 bp, Homo sapiens
tcctcaactatctcgctgacacgcagtgataacaatccatattcctcatttggagcaactctggtgagggatgat

SEQ ID NO: 763140 - DNA, 75 bp, Homo sapiens
tgtggacccgtaaaataaaatggaacagctttgctgagccatcaaggtctaatggaagcatggttcggcattctt

SEQ ID NO: 763141 - DNA, 75 bp, Homo sapiens
cagagctgaggactgcctgtttgcagatgcttcaggactgccccaaggcccgcagggaggtggagctgcactggc

SEQ ID NO: 763142 - DNA, 50 bp, Homo sapiens
gtagctgggatgttagggctcagcttcacagttgactgcaggcattcagc

SEQ ID NO: 763143 - DNA, 96 bp, Homo sapiens
ctttggcatttatccttattccgactatggcaattcttggaaatacttacactgtttcaataaaatcaaggactagtgacacaatagtcctttccc

SEQ ID NO: 763144 - DNA, 100 bp, Homo sapiens
ggctttggggtcaagcagattggtgtacgcatgatcagcctctcctattcccgaatctccttggctgacatcgcccagaagctgcagttggatagccccg

SEQ ID NO: 763145 - DNA, 100 bp, Homo sapiens
gatccaccggcctcggcctcccaaagtgctgggattataggcgtgagccaccgtgcctggctgaaggaaatggatcagacaatggctgccaatgctcaga

SEQ ID NO: 763146 - DNA, 99 bp, Homo sapiens
ctttttaagaggttatttcaagtatggagagaaatacgttttcaatggattgccacagtaaggttaaatggaaaccacccttgggaactggatgcctgt

SEQ ID NO: 763147 - DNA, 90 bp, Homo sapiens
ggaggattgtcactccaacctcttttcgctgtattctaccttgtaaatactgttatttgtatatactgtaaatgatgacatcggtgggca

SEQ ID NO: 763148 - DNA, 100 bp, Homo sapiens
agggaggcctgcagcctgggaactgggagacctgggtcccagtggagaggcctcaccatgtaagttagactggctgagcaacccaagcttttgtgttgga

SEQ ID NO: 763149 - DNA, 90 bp, Homo sapiens
aaacgtcagcaagaagaagaagcagctgctcagatgaaactgctgagaaggaagaatttgaacatcaacagaaagagctggagaaagttt

SEQ ID NO: 763150 - DNA, 90 bp, Homo sapiens
ccccgaggagccctgttccaaagcctcctggaccgtccaagaacctcctgacaaggtgatccgggcgggccccgcaggaattttatcccc

SEQ ID NO: 763151 - DNA, 75 bp, Homo sapiens
aaattttggagcagttggagcactgagtggttttcaaaaccctcggcacagatgtcgtgaagtctgcatttgaag

SEQ ID NO: 763152 - DNA, 75 bp, Homo sapiens
cccaaccacaagacgactcaataggaggaagagatgtctctgagttgacgggatttcctgaaatgttggggggac

SEQ ID NO: 763153 - DNA, 75 bp, Homo sapiens
tccaggccaccactgcggcgggctctggctggtgccgacaagaaagccgaggctggggctgggtcagcaaccgaa

SEQ ID NO: 763154 - DNA, 96 bp, Homo sapiens
caggaacacgaagccccgggcaccttccgggtggagttcagtgaaagggcagaaatcatgaccaccccaggaaaagagaactttcgcctgaaaagt

SEQ ID NO: 763155 - DNA, 100 bp, Homo sapiens
ccctctgccatccagcagcgagccattctaccttgtatcaagggcactgggtgcaagttcctgtgaaatatgccacgaggtgttcaaatcaaaaaacgtg

SEQ ID NO: 763156 - DNA, 100 bp, Homo sapiens
tgaacctatgggagaggaggagattaacccacaaactgttcgtcaaaaaatgttgtatgcagcaacaagagcaactctgaagaaggaatttggaggtggc

SEQ ID NO: 763157 - DNA, 100 bp, Homo sapiens
ctcatcgtccctgccaactttccaagtctggggatggccagaggcatttcatccttcatgaagccattcaggattttgaattgcatatgagtgcttggct

SEQ ID NO: 763158 - DNA, 83 bp, Homo sapiens
cagcgggcccgaagcggatcagccttgtggggtgagaagccctaccactgcaactgggacggctgcggctggaagtttgcgcg

SEQ ID NO: 763159 - DNA, 75 bp, Homo sapiens
ccaggccctgaggtgggccggacctgggagtggcaggatgaaacaggcgcctatttaatcgacagagaccccacc

SEQ ID NO: 763160 - DNA, 75 bp, Homo sapiens
gtgggaggattgcattcagtctagttcctggttgccggctgaaataacctgtacttcctgccataaaactccaga

SEQ ID NO: 763161 - DNA, 83 bp, Homo sapiens
ccccccttccccacgcaaccccagatccatttacactttacaaactccatccggcacaacctgtcactgcatagtcgattcat

SEQ ID NO: 763162 - DNA, 97 bp, Homo sapiens
cgtttccatcgtctcgtagtccgacgcctggggcgatggatccgtttacggagaggtgatgtttcaccatgttgcccgtggctaatcttgaactcct

SEQ ID NO: 763163 - DNA, 98 bp, Homo sapiens
ggcgggctgggggcggcacgactggaggcacaaggaggacgccggcgtcttctgctcaggtgccctacgagacgctgaacaaacgctttcgcgccgct

SEQ ID NO: 763164 - DNA, 75 bp, Homo sapiens
gccgcgttggggtgagaccctcacttcatccgtgttctaagaacggaagcatctgggctggatggaatttagcat

SEQ ID NO: 763165 - DNA, 50 bp, Homo sapiens
agacaattggtcaaaagatgcaaatgcaattggtgctgaaaattcagaaa

SEQ ID NO: 763166 - DNA, 74 bp, Homo sapiens
gccgcggacgcgtcatcgagtgtgacgtggtgaaagggctagtgactatgagagaacacggctgatgtgaggag

SEQ ID NO: 763167 - DNA, 75 bp, Homo sapiens
caacacttccttgaagaaacaagcttacaggttaatgttcgtgaagaaattgaagagttttttccaagaatgtgg

SEQ ID NO: 763168 - DNA, 75 bp, Homo sapiens
ttcgactggctcctgattacgatgctttggatgttgccaacaaaactgctcccagcctaggacgcgacaaagcag

SEQ ID NO: 763169 - DNA, 100 bp, Homo sapiens
ctagtttggatgtggaggggaatagactccatctatccatatgaggttatatcaatcagtgaaaattctatattcctttggcatttttgtgacatattca

SEQ ID NO: 763170 - DNA, 75 bp, Homo sapiens
cgaagaagctgcagccgcacctggccaaggcctcagggatttagagatactgttgttacttctgcatgttcattg

SEQ ID NO: 763171 - DNA, 75 bp, Homo sapiens
tgaaactgagcctaatcagcagaagacaactgttagttttgtggcttactgctgctccacccagtgtctgcagac

SEQ ID NO: 763172 - DNA, 100 bp, Homo sapiens
ctttggggagtatgtggaaccgcaggactgcagggtctctccagaattagaggagacagcactgattgcagtgacagaagcggtgccagctaactcccca

SEQ ID NO: 763173 - DNA, 50 bp, Homo sapiens
ctaagaaatttgctgttaaagaagttggctggaatgtgatgacttaaaag

SEQ ID NO: 763174 - DNA, 83 bp, Homo sapiens
cagccaccctgcccccaagaaggaagtcatcatgggccggcctggaacaggctcgggacgtgtacgaggaggccatccggaca

SEQ ID NO: 763175 - DNA, 75 bp, Homo sapiens
ttatgacaaatcacaacttgtagagggcactgtgtttagtcttgagtcagaggaggaggaataccctggaatcac

SEQ ID NO: 763176 - DNA, 100 bp, Homo sapiens
gtgacacagtacaagaagggcaaggattctctgtacgcccagggtggagcgaatcaaggagcgtgtggaggagaaagagggaatccccccacaacagcag

SEQ ID NO: 763177 - DNA, 75 bp, Homo sapiens
ctgaaggacttcctccccagcctttgggcttctatccgcagagagaaactcatcactgctatatatgcagattat

SEQ ID NO: 763178 - DNA, 83 bp, Homo sapiens
ccatgaccctgaaggtccaggagtacccgaccctcaaggctctccgtgtgaaatggtcccatctcagactgccctgggtagac

SEQ ID NO: 763179 - DNA, 75 bp, Homo sapiens
agagactagtagatctggagaggggcaccaccacgaggcgatttgtgggccataccaaggatgtgctgagtgtgg

SEQ ID NO: 763180 - DNA, 90 bp, Homo sapiens
gcttgatgaaatggctaaacaggcaacagttgtcctcaattgcgtaggaccaattaagatgttctacgaggagcatttgcacttggacga

SEQ ID NO: 763181 - DNA, 82 bp, Homo sapiens
ctgggcttggagatccccgcctatagcagattttgcaagaacgaggctcaaggatgtgagggacacagtattgacagctgaa

SEQ ID NO: 763182 - DNA, 82 bp, Homo sapiens
caggaggccaggggtgtcgccatgtcttgctggaatgagtacctgacaactcggatcgagcagaaccttgttttgaattgca

SEQ ID NO: 763183 - DNA, 100 bp, Homo sapiens
cctttatagattcaccacaatacctaaccaagacagtcagttaggcaaagagaacaaactatattcacctgccaggaaagtggagaatgaggacatgaat

SEQ ID NO: 763184 - DNA, 98 bp, Homo sapiens
gaacatggcgccggggcccccgtcgttgctgccgggattttggaggccggggccgcgctgagggcgcccagctgcttggtgttctcaagagtctgccc

SEQ ID NO: 763185 - DNA, 97 bp, Homo sapiens
tgtgccagcatcaaccgcatctatggtttctacgatgagttggccgcaagaggaagaggacgtggaatgggacgtggaaacatctttcaaaagcgaa

SEQ ID NO: 763186 - DNA, 96 bp, Homo sapiens
gcaaaactttgggcttgcaacttttgttaccaaaggaatcagatgggtcaatgccttcagaaatggaatccagtagaaatgataccaaagatgatc

SEQ ID NO: 763187 - DNA, 75 bp, Homo sapiens
gcatggggaggaccagtcgtgacttaattcagtgcacaaatgagatgaatgtgaacatcccacagttggcagaca

SEQ ID NO: 763188 - DNA, 83 bp, Homo sapiens
acagtctccgaagtctcgagcagaactgcatgaacttgcccccagacaaggtccagctgctgagccagtatgacaacgagaag

SEQ ID NO: 763189 - DNA, 90 bp, Homo sapiens
tgctccccgcccccgagcagccgaggtgtggccgacgacgatgccctcgctgaggagcgcatgcggagaggccagaacgccctgccagcc

SEQ ID NO: 763190 - DNA, 50 bp, Homo sapiens
gagcctccggagcagaggaagaaagctgcagcagttctataacagccagg

SEQ ID NO: 763191 - DNA, 88 bp, Homo sapiens
cgagctgagtggttgtgtggtcgcgtctcggaaaccggtagcgcttgcagcatgaaaaatggctacaaacttcctagcacatgagaag

SEQ ID NO: 763192 - DNA, 97 bp, Homo sapiens
ctctgaaggcgaacgcttcgctggccatttaggagctctgctcaaagccagacgatgaggacggggacttggttgccttttccagtgacgaggaatt

SEQ ID NO: 763193 - DNA, 83 bp, Homo sapiens
ctgccgtccccgctgctgtgcattggggtggcccagttgaaatccttcccttcctctaccttggaagtgcctaccatgcatcc

SEQ ID NO: 763194 - DNA, 101 bp, Homo sapiens
cctggcactgtgatgaaacacttttcccgtgtcgtttgagtgcatcttctcaacaaccctaggaggtgctggagaatctggtaaaagcaccattgtgaagc

SEQ ID NO: 763195 - DNA, 83 bp, Homo sapiens
cgaccgcccgtcctccaactacagggaccgcacggttcattggcatggaaaaatgttcagtgggaggattagagttgactgaa

SEQ ID NO: 763196 - DNA, 89 bp, Homo sapiens
cagtcacagagcaggaggtggctcaggtggccagtgccatcctctccctcaggagtttttcggagctgtacacgctgtcgctgcaggag

SEQ ID NO: 763197 - DNA, 90 bp, Homo sapiens
gctgtatattagcagagttacttctaagggtgtgaaaatcacaaatgtcaaatgatggaagatccaggaatcgggacaggcgctacgatg

SEQ ID NO: 763198 - DNA, 83 bp, Homo sapiens
ctcggcctcgcggcgacggcggcggtggcggcttggacgactcggagagccggtggacgcggatctgtcaacatgggtaaagg

SEQ ID NO: 763199 - DNA, 100 bp, Homo sapiens
cgcatgggaatggacttcagactggtggactgttcatcattctgttgaagaaacgcttaacccaggaatctggaaacatcaaagctggattagaacatct

SEQ ID NO: 763200 - DNA, 74 bp, Homo sapiens
tcccgagtagctgagattacagatgatccagatcctgatgatggatttaactataaacagatgatggttagaga

SEQ ID NO: 763201 - DNA, 122 bp, Homo sapiens
cagggtctgaggtcatcggggatgtggacgaaggggccgacctcctagaccatgctcgacagctgaccaaggccatgatgcgaaaggccacggccagccgcctggtcacgcagcgcgatgcg

SEQ ID NO: 763202 - DNA, 94 bp, Homo sapiens
cggaaagcgcctttagtttcaaaaagttgctggatcagtgcgagaaccaggagctcgagacaatgcagatcttcgtgaagactctgactggtaa

SEQ ID NO: 763203 - DNA, 96 bp, Homo sapiens
ccgcaacagccccttcgtcccaattctcccaggagaaagccatgttcagttcgagcgccaagatcgtgaagcccaatggcgagaagccggacgagt

SEQ ID NO: 763204 - DNA, 101 bp, Homo sapiens
cccagaggaacagttcatttcaacagccagggagaaagcctggatgctcaagatctagaaatggccattgcctactggaacttagtgcttaatggaagatt

SEQ ID NO: 763205 - DNA, 100 bp, Homo sapiens
ttcaagacctatgcacctgtcgccttccgctacttccgggagctctttgggatccggccagatgattacttgctggtcagtgagaaggtcggaggggccg

SEQ ID NO: 763206 - DNA, 76 bp, Homo sapiens
gcgacgggaccctggtcaccgggttgatgctatgaaactgggagtaaaggaaatgaagaaggcatacaagcaagtg

SEQ ID NO: 763207 - DNA, 75 bp, Homo sapiens
ttggaactagcagatgctggcgacctatccagaatgatcaaggtaattaataatgcttgtgctactcaagccata

SEQ ID NO: 763208 - DNA, 75 bp, Homo sapiens
aaaatttatcaagaaagagccagccaggcggagagggagatgcaaggaaggaaaatcacctcggcagtgtttgaa

SEQ ID NO: 763209 - DNA, 100 bp, Homo sapiens
cgcccatcagggggaagaggcgtcctgttcttcctgggggactggcaggtggattctccacagttttcctcgtgcgtactcacggtggaatccgatgtgc

SEQ ID NO: 763210 - DNA, 132 bp, Homo sapiens
catttttattttgacatttctgctgtatgcaagttttcacttatctcgaaagcctatcagcatagttaaggtactccaaagattcaggtttactcacgtcatccagcagagaatggaaagtcaaatttcctg

SEQ ID NO: 763211 - DNA, 142 bp, Homo sapiens
ctcttcataaggttgtagtagcaggagccctctatcttttgttctctggcatggaaggggtcctcagagttactgggtggatgcaactgaagactcaaaaaagaatgagcctatatttaaagttgccccatcaaaatgggaa

SEQ ID NO: 763212 - DNA, 50 bp, Homo sapiens
atccagcgccagctggagataagtatcataactattgtggattcaaaata

SEQ ID NO: 763213 - DNA, 101 bp, Homo sapiens
tcgtcagcctcccgccggccgtctccttaacaccgaacaccgaaacttggatttaactggccagaagcaggtattcaaagcagagaacaatccctgggtga

SEQ ID NO: 763214 - DNA, 74 bp, Homo sapiens
tggtcctggtctacgtcatcggacattccattattgttccattgacctttccctcatcactgagtcctttggag

SEQ ID NO: 763215 - DNA, 90 bp, Homo sapiens
cggcttctcgctggccatgcactggcaactgcagcccgaggacaagcggctatgagtgaccgaggaggtggcgttcctttgaggaaaatt

SEQ ID NO: 763216 - DNA, 82 bp, Homo sapiens
cagaggtgatgtctgggagcccttccttgacagcccgggccgagaagactgtgccctgtccacggtgcctcctgcatgtcct

SEQ ID NO: 763217 - DNA, 100 bp, Homo sapiens
tgatgatggccgctttgaggtgtggaatgcgatgactcgggattggttttcagagacatttcggaaagtgaaggagaaactcaagactgactcatgagga

SEQ ID NO: 763218 - DNA, 75 bp, Homo sapiens
ctgactgccccgcatcaccggagcgtcccagctgcgaggaggatttgaagcctagcaacattgttgtgaaatcag

SEQ ID NO: 763219 - DNA, 74 bp, Homo sapiens
gagtttgtagcctattggaggaaaacacaccaagcttcaggatgagttagagaaaggtgaacgggacaatgcag

SEQ ID NO: 763220 - DNA, 100 bp, Homo sapiens
tgagtggttgtgtggtcgcgtctcggaaaccggtagcgcttgcagcatgcttagaccatgctcagcctccaagcagccttgtcatcgacaaagaatctga

SEQ ID NO: 763221 - DNA, 101 bp, Homo sapiens
aagaattaaacctggtgtttggacttcaacttagcatggctagaattgtactccaaagattcaggtttactcacgtcatccagcagagaatggaaagtcaa

SEQ ID NO: 763222 - DNA, 50 bp, Homo sapiens
gttttggaactgtcaggtacctcaaagcgcctcttcaacctgcgccagat

SEQ ID NO: 763223 - DNA, 100 bp, Homo sapiens
ataagaccgggatggtggactttgctctggaatctggtggtctcctctgagcctccggcctccataagacccaaaacagatgacacctcttcccagtccc

SEQ ID NO: 763224 - DNA, 75 bp, Homo sapiens
ccatttcgcccctcgcgtccggagtccccgtggccaggctggagcattggatttgctaaaggagcttaagaatat

SEQ ID NO: 763225 - DNA, 75 bp, Homo sapiens
gatctgcagctactgctgcatcagaagaaatgggaagtgccagacacagcttcagaatgtgactccttaaattct

SEQ ID NO: 763226 - DNA, 82 bp, Homo sapiens
cccacttcgttcaagacaggtgtttaagcttcgatatctcaatgcctatactggaatagtgctacttcgatgcagaaaagaa

SEQ ID NO: 763227 - DNA, 100 bp, Homo sapiens
ctcttactactgctagtcgctgcaacactcctctacagtttgaggttcatctgcgttgctctaaatgggactgtttcattattttgatggctgaagaata

SEQ ID NO: 763228 - DNA, 100 bp, Homo sapiens
ctgggccgcttcctgcaagaaaacaagcagcttctgcacgacgcactggcccaggacctgcacaaggctcacgaggcccagggaatcctctggaccatca

SEQ ID NO: 763229 - DNA, 75 bp, Homo sapiens
gcatcacaagatggcctaccctcctgtacttgttccaactcaaggagcatgataaagatccagaaagctttttta

SEQ ID NO: 763230 - DNA, 80 bp, Homo sapiens
ggccaggcagaggtctgtggagtggagaggcgaggcctcacggtggaactctcagatatgtatcctccactcctcgctgg

SEQ ID NO: 763231 - DNA, 87 bp, Homo sapiens
cccttctcgggggtcatgatgggcagcaagatggcgtctgctagtagggtcgttcagatgtggaagatgtcaagtttgtgatcaact

SEQ ID NO: 763232 - DNA, 85 bp, Homo sapiens
ggctgatttagaaggaggttcaggctacggtgagccgaagaaaaggattatagcagtctttgtgacaagcaaccgataggaagac

SEQ ID NO: 763233 - DNA, 83 bp, Homo sapiens
tccatttgctatggacaaaaaggcagttcctggtggaggaatgcccaacatgggtccccagccccaccccagccccaaaggag

SEQ ID NO: 763234 - DNA, 83 bp, Homo sapiens
cgcgcctggcctggccgggaccatgggggggccctcagcctcttggccttgaacgggctgttcatcttgattcacaaacacaa

SEQ ID NO: 763235 - DNA, 82 bp, Homo sapiens
gggcgctccaggaggcactcacaggcgaaagggcgtgtggttgcgcctgaggaagatacttttctgtgttttggggttgtac

SEQ ID NO: 763236 - DNA, 98 bp, Homo sapiens
ccggcaccaccgctgcaagagccggggcagcaaggagcgcttccactggcagagccacaacgtgaagcagagcggcgtggatgacatggtgcttcttc

SEQ ID NO: 763237 - DNA, 75 bp, Homo sapiens
gcttgctataatcaagtgaagattcagatggaggagatgtataagaaagctcatgctgctatacgagagaatcca

SEQ ID NO: 763238 - DNA, 82 bp, Homo sapiens
ggggagagacggccaagcagcaccagcgtgcctttgggtgataagggctccagtgatccacaagctcagaaatacatcgcgg

SEQ ID NO: 763239 - DNA, 74 bp, Homo sapiens
ctgtccctgtagcccagcctgcacctagtgggctcgggatgagtttgaaggcctcttcaagcagccagcagaaa

SEQ ID NO: 763240 - DNA, 98 bp, Homo sapiens
gagatctgatcctgattgcagaaccttccctgattacagaatcttgggttatttccgatgttgaagaagatgccggggaactaagcagagagagtatg

SEQ ID NO: 763241 - DNA, 75 bp, Homo sapiens
ggaaaagagccctggaatatgaagagacatgcgatggtagatcaacccccagaaacctctgtagaggagcaggat

SEQ ID NO: 763242 - DNA, 100 bp, Homo sapiens
gaagaatcaacgttattttgttttgcagttcggggccaagctggagggaaggtaatgtttgaaacttaccagttttccggtgtatatgtagccatccagg

SEQ ID NO: 763243 - DNA, 100 bp, Homo sapiens
agagtttggagtgaagtttaatgttgccaatggagattcttctgatgtagagcgactggaaagattcttcgactcagaagatgaagactttgaaatcctg

SEQ ID NO: 763244 - DNA, 74 bp, Homo sapiens
ccctggatggtttcaagggacgtgctgggaggatggtgccgagttaatatgatcctctgttgaagcaagaagac

SEQ ID NO: 763245 - DNA, 100 bp, Homo sapiens
tttatattcatctcaaaaacaaaattctgaactcaggacttggcaacatcaagttcatattgatgagatctgtttatataattgtcactggtgaccagaa

SEQ ID NO: 763246 - DNA, 75 bp, Homo sapiens
agggaaccctggtcaccgtctcctcagactattgcccagaagaaaagatgtttggttttcacaagccaaagatgt

SEQ ID NO: 763247 - DNA, 100 bp, Homo sapiens
cgcagccccggaaacagaactggttcttgggtcacctgggcctggaagaaatgcagagtaacgtggaagtggtccacacctaccgccagcacattgtgaa

SEQ ID NO: 763248 - DNA, 100 bp, Homo sapiens
aaaacagtggttttgcatatagatggccttgatgatacgattaacagccatgcaacagaatggagtcccagccacccaggagaggatgcagtggcgtctt

SEQ ID NO: 763249 - DNA, 145 bp, Homo sapiens
gcgagcggtgacctggaccacggcgcagacgcgggcgagctgcggctcggacgccagcggacacgcgggcgaggtggagctgatcagaataatgttcagcatcaaccccctggagaacctgaaggtgtacatcagcagtcggcct

SEQ ID NO: 763250 - DNA, 100 bp, Homo sapiens
cggggagaaggtgaagctgcagatctgggacacagcggggcaggagcgcttccgcaccatcacctccacggtgtcaaattgagaaccaggtagatcccca

SEQ ID NO: 763251 - DNA, 74 bp, Homo sapiens
gaggaccatgctgggccggagcctccgagaaaaatacaaacctggtcgatgtgatgatattttgaaatggaagc

SEQ ID NO: 763252 - DNA, 75 bp, Homo sapiens
cagccaagtccccccaacactgcatggagcggatccaggcttatccagaatcagatcacagctaaggggactgcc

SEQ ID NO: 763253 - DNA, 80 bp, Homo sapiens
gcatctgaagaccatggatcacaaccggaaccgcagggaggctggtggcatgttgtcctcaatctcgacactactatcgc

SEQ ID NO: 763254 - DNA, 100 bp, Homo sapiens
acgagatactccagaaaatggagaaactgcatggcacattacacttctgtggatttaaagtccttgcccctcagatcagctttgctcctgaaattgcatc

SEQ ID NO: 763255 - DNA, 75 bp, Homo sapiens
aatatttgataaaactactcacccagtttatggagccgtacatctttgggagccgcctggaccacgacatcatcg

SEQ ID NO: 763256 - DNA, 101 bp, Homo sapiens
gctgctgctgctgcgcctgggccagttcatccatgagctcggatttcccacattacaacttcaggatgcctaatattggattccagaatctgcctctcaac

SEQ ID NO: 763257 - DNA, 78 bp, Homo sapiens
gaaggtgcaccctgcacagctataagagaaggcaaagggcgttgtgaatacagctgtgtctgcagcagtccaagctgt

SEQ ID NO: 763258 - DNA, 83 bp, Homo sapiens
cttaagctggtggagaaactcggtggcgacatgtctaagaatgtgagccagtcacagatggcaaaattgaaccaacaaatggc

SEQ ID NO: 763259 - DNA, 50 bp, Homo sapiens
gaaaatcaacgacaacttgagcacaggtggaacaatccaaagttttaatc

SEQ ID NO: 763260 - DNA, 100 bp, Homo sapiens
gtgacttggtgattttcctggaaaattatagcatggaggatgaaaaggaagatagtaaagttatacctacagaatgtgccatcaaggtatttaaaacaac

SEQ ID NO: 763261 - DNA, 99 bp, Homo sapiens
ctcattccttctccagggagagtcgctgcagctgagtcagtgctgattctctcaaatagagcttgaaggataaatcttcatttttgtttcaacaaaact

SEQ ID NO: 763262 - DNA, 97 bp, Homo sapiens
caagcggccgcgcactgaggaggcggcggccgacggtggcggcgggatgcaggacctgaaggagaagaaggagaaggtggaggagaaggcaagccgg

SEQ ID NO: 763263 - DNA, 100 bp, Homo sapiens
acaaagttgaaaacaaagtgctgctcagcaaaacccagcagctcagattcctgccaggcagcgggagattgaaatgaaccgacagcaacgcttcttccgc

SEQ ID NO: 763264 - DNA, 82 bp, Homo sapiens
gaacctctatgccgacatcgacgccgcctggcaggccctgcgcaccagcgtacacagactttactaaaagagtacaaagaaa

SEQ ID NO: 763265 - DNA, 75 bp, Homo sapiens
gaaggataagtcgaaggggaaggcgcctgaagaggacgaagggaagcatgctagagtgaaagaaagagagcacga

SEQ ID NO: 763266 - DNA, 100 bp, Homo sapiens
ggtcgtgcagacctcgatggacgcctacacccctccaggctaagtgctatttatggaggtacctatatgctgaataaacccattgaagaaatcattgtac

SEQ ID NO: 763267 - DNA, 90 bp, Homo sapiens
aactttacaagttaattgaagagtcttgtccacagctggcaaattcagtgcagatcaggtaaaaatgcatttgcaaagggagaaaatgaa

SEQ ID NO: 763268 - DNA, 98 bp, Homo sapiens
agaaagcttacaaaaaagccaaggagcgggagaaatcatctttggacaaaagaaagcaagaccccgagtggaagtttggatttaggtggcgagtagaa

SEQ ID NO: 763269 - DNA, 75 bp, Homo sapiens
cgagaagattagcaaaggtgctaatccagtggaaatcaggagaggagacagatcagttggaggaagaaaaagcag

SEQ ID NO: 763270 - DNA, 100 bp, Homo sapiens
ctccaaaactgcacaggtgggagaaaagctttgacctggaaatactacgcaaaaaaaattctttactacctgcggcaacagaagatcttaaataatctta

SEQ ID NO: 763271 - DNA, 96 bp, Homo sapiens
aagatttagtggaaaagctgagaaagtttcgttttcgcaaagaaacgaacaacgctgctattataacctgtgaacttatgaatcaaggcatcttgg

SEQ ID NO: 763272 - DNA, 101 bp, Homo sapiens
gacccacctgcagccgccgccgcgatgcccaccatgcggaggaccgtgtcggagatccgctcgcgcgccgaagtttttttgaagaagcaggatgctgatct

SEQ ID NO: 763273 - DNA, 100 bp, Homo sapiens
gcgaaagcggcgggaagttcgtactgggcagaacgcgacgggtctgcggcttaggtgtctcaatgagatcttggagtcagcagatgcacccttagaagtc

SEQ ID NO: 763274 - DNA, 75 bp, Homo sapiens
aatgtggaaaatttcctagaagcttgcagaaaaattggtgtacctcagaggcgtcgggagaaggctggaaggggc

SEQ ID NO: 763275 - DNA, 90 bp, Homo sapiens
actacaaggacccccggcggacaggagacaaggacggcagcaaggtgacaacagtggtggcaactcctgggcagggtccagacaggccac

SEQ ID NO: 763276 - DNA, 88 bp, Homo sapiens
gagagggcaataagagcctggtggtggcccacgcgcaggaggctttcgagctacccttggatgattgtgaagtgattgaaactgcagc

SEQ ID NO: 763277 - DNA, 116 bp, Homo sapiens
agttattccctctttcagcactgctctttatgggaaacttctgaaactccccacatgctggatgaagatgagctggattcccacaccatggtgaagactagtgtggagagtgtggg

SEQ ID NO: 763278 - DNA, 98 bp, Homo sapiens
tatattgctgttggaatatctggagccatccaacatttagctgggatgaaagacagcaaggtctcagtggcccttagcagcagctccattcgtgtggc

SEQ ID NO: 763279 - DNA, 75 bp, Homo sapiens
gcacttcgtcatgttcttcgcgccctgagagcgcctgctcgctgtgcccccgggttatgacgacccccaataaag

SEQ ID NO: 763280 - DNA, 83 bp, Homo sapiens
ctctgcacattcattctcaaaaacccacctggaaggcagcaacaactcatctccagtggattttgtaaataacaagaggacag

SEQ ID NO: 763281 - DNA, 118 bp, Homo sapiens
tgcgattacatagagaagactttgaaatattaaaggtgattggtcgaggagcttttggggagtcgcccatgtttgatggaaaagtcccacactggtaccacttctcctgcttctggaa

SEQ ID NO: 763282 - DNA, 83 bp, Homo sapiens
cagcaagcggaggtgctgggagcgagttggctggtgtggacactgccagcggctgcagccgacttggaatgacctgggagaca

SEQ ID NO: 763283 - DNA, 82 bp, Homo sapiens
acaactcgggcgccgacgagatcgggtctcctctgagcctccggcctccataagacccaaaacagatgacacctcttcccag

SEQ ID NO: 763284 - DNA, 75 bp, Homo sapiens
ccgaccagatgtttctcaggaaagccaagcgagaggcttctccagggaaagtgaccgaggcagtgaaagaggcca

SEQ ID NO: 763285 - DNA, 109 bp, Homo sapiens
gagagttcactggatgttgctgaagaagaaatcatagacgatgatgatgatgacatcacccttacaggccgaatacatcaagcaatggtaacatctttaaatgaagata

SEQ ID NO: 763286 - DNA, 74 bp, Homo sapiens
ggaaactatgtagctgatcttggagccatggtggtaacaggtcttgatttcagaggctttgaaaaaatttggta

SEQ ID NO: 763287 - DNA, 98 bp, Homo sapiens
ctcggatctgtgaaccaatagacggaattgatgctgtcctcattgcaacgtggttggatgcatatgaaacagccaagatgctgtgtgaacagtattac

SEQ ID NO: 763288 - DNA, 90 bp, Homo sapiens
ggaaaagggagaacaagccggatcagaagacgaaaactctgcggaagttctgaatcaagaggagagaatagtgacagtggtacaggaaag

SEQ ID NO: 763289 - DNA, 75 bp, Homo sapiens
gcagaatctgcccacagagttcggcaatgatcgtgcgcttcctgaccaagagattcattggagactatgaaccga

SEQ ID NO: 763290 - DNA, 90 bp, Homo sapiens
gagcacagagcctcgcctttgccgatccgccgcccgtccacacccgccgccagctggagaagaagcaggcgctccctccattccagccac

SEQ ID NO: 763291 - DNA, 74 bp, Homo sapiens
tactaccttggtggagagagttatccaacaattggttatggatgatgaatcagatgaaaaagaagcaaactcac

SEQ ID NO: 763292 - DNA, 75 bp, Homo sapiens
tacctcactgcctttggtgctcaaaaagaatttacatagtacatgacgaagttaaggataaagcttttgaactag

SEQ ID NO: 763293 - DNA, 100 bp, Homo sapiens
cgagcgggccctggctcaggaacagggacagcacctcatcccctggatgggggaccacaagatcctcatcgacagcttcagctttagctgcagctgcctc

SEQ ID NO: 763294 - DNA, 100 bp, Homo sapiens
ggagaaggagacgacacatttgaaaacctagtatttgaccaaaggtgaaaggtgtagcagtcactcggcctacacccacagcatcgaccttgtgaaccca

SEQ ID NO: 763295 - DNA, 73 bp, Homo sapiens
gacagagccaaaatcagagctggaacctgaggagagaggtgtggatgaggtcaccattgtcaacattttgacc

SEQ ID NO: 763296 - DNA, 100 bp, Homo sapiens
gttctgcagatcagaaagaaggggttcctggtcatacaccagtactaccaaggacagcttttttcctgcaaggaatataaatagtttctggaaaggacac

SEQ ID NO: 763297 - DNA, 75 bp, Homo sapiens
agtgagcaccttttggcccaatgaatatcaggcaatgctggacgtggctgcaaaccagggctggctggtgactgt

SEQ ID NO: 763298 - DNA, 75 bp, Homo sapiens
caccgttataactttcccaatctcaatatggatgtgcataaaggagtcagtggatcggtggggaaaatgctgctt

SEQ ID NO: 763299 - DNA, 90 bp, Homo sapiens
ctctgccttggccagagaagagaacagctaaagatgtgattaaagagattgaagactttgacagcttggaggctctgcgtctggaaggca

SEQ ID NO: 763300 - DNA, 82 bp, Homo sapiens
gaaagacaaagacccagtgaacaaatccgggggcaaggccaaaaagaaggttttaaaatcaaagatgggaaaatcggagaaa

SEQ ID NO: 763301 - DNA, 100 bp, Homo sapiens
tggagcagagccgctgggcgccggagccgaggcgagcgccgcgcgcaccactggtgtggatgaggtcaccattgtcaacattttgaccaaccgcagcaat

SEQ ID NO: 763302 - DNA, 75 bp, Homo sapiens
gttcgctacacagcaatgcatcgaggactcgggacctggttcgggccggggtgctgaaggagaagcccctgtggt

SEQ ID NO: 763303 - DNA, 108 bp, Homo sapiens
ctgtcttcggtggactccttcggcagtccacccaccgccgccgcctcccagttgatattcactgatggactccaaagaatcattaactcctggtagagaagaaaaccc

SEQ ID NO: 763304 - DNA, 50 bp, Homo sapiens
cagctgctcatgaaccacttggcaaatctattatcctcccagtccacaac

SEQ ID NO: 763305 - DNA, 75 bp, Homo sapiens
cgttgcggcgaaaggaacggctgaaggccctacgggagaaaaccgggcgcaagttggattggatgctgctggcaa

SEQ ID NO: 763306 - DNA, 75 bp, Homo sapiens
cgcgaggccgcgggcgggtggaggcgcgtctccggcacggtgattcctgactctgatgcacatagagcaggactg

SEQ ID NO: 763307 - DNA, 73 bp, Homo sapiens
tcatgggaaaatctccatatgggtctctggacagaggagagcgcagatgcccgggcccccagcgggaaggtgc

SEQ ID NO: 763308 - DNA, 97 bp, Homo sapiens
gccagagaagtgcccgaggagagttaacagctttctgaggaagagaaaattcagcgctacagcatcctctccgagctctatgagctgatcggcttcc

SEQ ID NO: 763309 - DNA, 90 bp, Homo sapiens
ctcaggcttactgtggatctggattctaaggcaacacttccttgaagaaacaagcttacaggttttgattcccaccatggccatcaccca

SEQ ID NO: 763310 - DNA, 96 bp, Homo sapiens
actgctggcagaactacctggggtcctggatatgcccacccaagaactgggcctccccgcctaccgcaagtttgacattgaggcctggatgccagg

SEQ ID NO: 763311 - DNA, 100 bp, Homo sapiens
ggaagcaaaaaaggctaagcaagcatctaaaaagactgcaatggctgctgctaaggctaccgttgaacaactaatgtttgaagagaagaataaagctcag

SEQ ID NO: 763312 - DNA, 83 bp, Homo sapiens
caggagcctcctcgggcagcgagattgctttttttccgggagtgcatccgccccaacccttttccccctcgtctcctgtgaga

SEQ ID NO: 763313 - DNA, 95 bp, Homo sapiens
tgttctagggtcccttggggaaaccaggccttccaggaatgcccggtgctgacggacccccggtggattctccacagttttcctcgtgcgtactc

SEQ ID NO: 763314 - DNA, 98 bp, Homo sapiens
ccgcgtcctcagccaccgctccctcttcccacggctgcggcatgtttaccttcctgtcatctgtcactgctgctgtcagtggcctcctggtgggttat

SEQ ID NO: 763315 - DNA, 75 bp, Homo sapiens
atggaaccaaagcggatcagagagggctaccttgtgaagaaggaaatggagcagtcaatgaatatgctgaattcc

SEQ ID NO: 763316 - DNA, 98 bp, Homo sapiens
ttcctgtgacctctgcctaccatccataaaatactcattcccctctcagatccgccaccgtgatgatgctctaccttttgcccacgtggccattgcag

SEQ ID NO: 763317 - DNA, 97 bp, Homo sapiens
cattgagaagaggttttgctttgatgtggaagcagtagacagattctgtgaggagaccaggaggaattttgaagccaccttaggttggctacaagaa

SEQ ID NO: 763318 - DNA, 90 bp, Homo sapiens
taaagagcaagcctaactcaagccattggcacacagtccgagaatgtcgaccggggcgcgggctccatccgggaagccggtggggccttc

SEQ ID NO: 763319 - DNA, 85 bp, Homo sapiens
gtcttcacccccaccattgaggcccgcacagcccagtccagtcacgagaagagaatgccttctagatgcaaaatcacctccaaac

SEQ ID NO: 763320 - DNA, 75 bp, Homo sapiens
ctctgcccaaccgcacggtcaccctgaaggatcgagatcgagaccgggatcgtgaagatcggtctaaagatcgag

SEQ ID NO: 763321 - DNA, 90 bp, Homo sapiens
gtctagagcaaggaaaagagccctggaatatgaagagacatgcgatggtagatcaacccccaggaggaacatatgcagcagaaaaaagag

SEQ ID NO: 763322 - DNA, 100 bp, Homo sapiens
ctcgagtccttgaatggattgatgacaaagctctggattaatcgaattacagctgctagccaggaacatggactgaagtatccagcgctcattgggaatt

SEQ ID NO: 763323 - DNA, 73 bp, Homo sapiens
gcgcagaaaccccgttgacaaggcactgctttttcatgacggttatgaagacagtatggagtttccagaccat

SEQ ID NO: 763324 - DNA, 100 bp, Homo sapiens
ttcaggagccctggaaaggagaaggaataagacggcaggaggaagagagagagagggaaattctgaaacagccacacctacaaatgtagacttgcctcag

SEQ ID NO: 763325 - DNA, 76 bp, Homo sapiens
tccttttctgtacaacatcacttcttctgtttgcagtgttgacttgctggtgaaggtgggggaggttgtggacaag

SEQ ID NO: 763326 - DNA, 100 bp, Homo sapiens
gctggcccagttgctgggcactagtgaagaggacagcatggtgggcaccctctatgacaagctgaggcaacttctcctagaatctcaatctcagctcgat

SEQ ID NO: 763327 - DNA, 96 bp, Homo sapiens
cctgagcgcactctggagggattctggcatcagggaggctttcagccggagaagcgagtttcagctggtatggaaggctttgttacaagaaatgcc

SEQ ID NO: 763328 - DNA, 73 bp, Homo sapiens
aggaacttaagagtcttaggagtcagttggatgtgacacataaggagtggatgcctggactttggccttttct

SEQ ID NO: 763329 - DNA, 50 bp, Homo sapiens
cttgcagaagctgttcccaccatgaagatccagctatgggacacagcagg

SEQ ID NO: 763330 - DNA, 100 bp, Homo sapiens
cagcaaagaggaaatagttcagttctttcaagggatgtgtttggccaaatgggagagtggttacaacacacgagctacaaactacaatgctggagacaga

SEQ ID NO: 763331 - DNA, 88 bp, Homo sapiens
ttccctcggtctgggcttctctgaggcggcgagagatggtcaggtctggagctcgaccgggccagatgccctccaaatccttggttat

SEQ ID NO: 763332 - DNA, 50 bp, Homo sapiens
ggctttgcggctgggtcctaaactgcgattaactgctgaagtactgatcg

SEQ ID NO: 763333 - DNA, 82 bp, Homo sapiens
atcagcaatctgcagagttcgtgaatgatctaaagcgggccaacaggcagttccttttagtcttgacagtgttgcaaattcc

SEQ ID NO: 763334 - DNA, 99 bp, Homo sapiens
gcagaaggctgctgccgccggacgcctccattgtttgaccacaacaagggccggattctcacccagcccccctcccaactcccaaatcccccggcgtcg

SEQ ID NO: 763335 - DNA, 98 bp, Homo sapiens
gacaccataaagaggccagcattgcaggctaaagaattacctccaaagccattgtcaagaccacagcagtcatctgcaccagtccagctgaactctgg

SEQ ID NO: 763336 - DNA, 74 bp, Homo sapiens
cagactcagatccaagtcaacagtgtgaccattgtgaggtagatattttgttctaattttccagatgaggaagc

SEQ ID NO: 763337 - DNA, 95 bp, Homo sapiens
actaatcttcgggcagagagaaggaaacacttagaggaagttctggagatgaaatacgaacctaaactttcaaaacctgtcagtgattgggttcc

SEQ ID NO: 763338 - DNA, 75 bp, Homo sapiens
ttttctccccatccttggacaagcgcctcaaactcatgtcttggtcttgatgccaagtttgggaaaggagctaag

SEQ ID NO: 763339 - DNA, 75 bp, Homo sapiens
gttggaccttccggagcttctcagaagacagagggttttcttttgagcagtcctgcgttaactgcggccgggagg

SEQ ID NO: 763340 - DNA, 75 bp, Homo sapiens
cgggagcggagacctcgctgcgctcatggcgtcgcccgggtgatcataaacagcacaatcacaccgaatatgacc

SEQ ID NO: 763341 - DNA, 101 bp, Homo sapiens
gtcccatattgaactcgagttggaagaggcgagtccggtctcaaaatggagaaagacgagaatccaggacttgaatcgtatcttcccactttctgaggact

SEQ ID NO: 763342 - DNA, 100 bp, Homo sapiens
ccacggttaatgcatgctagaaacacagacttcacagagaatgcagttgtcttgacttcaggtctgtctgttctgttggcaagtaaatgcagtactgttc

SEQ ID NO: 763343 - DNA, 75 bp, Homo sapiens
aggggcgagagggagccgcagctgatgtcaggaaaatgtttataggaggccttagctgggacactacaaagaaag

SEQ ID NO: 763344 - DNA, 82 bp, Homo sapiens
atgtgttgctaatacccatctttactggcatcctaaagaaggacagaataacgggctcccagattcacaagccccaccaaga

SEQ ID NO: 763345 - DNA, 96 bp, Homo sapiens
agaaccgtcccaaaatatggcaaagaaacctattctgagtgattcgcctttgccagtctcatctcgtgtctgctttgttaagttccatgatccaga

SEQ ID NO: 763346 - DNA, 75 bp, Homo sapiens
aaggatctggggatcttcgcactatcccaagaggaggctgcagacatcagaagcagccctgtcaagcagccaagc

SEQ ID NO: 763347 - DNA, 50 bp, Homo sapiens
acagaggatgagagagagcggatggtgaatgacagcccatatcaaggcgg

SEQ ID NO: 763348 - DNA, 90 bp, Homo sapiens
caacagggacacctggttccagctgcagcacgtggacgctgactcggaagtgcagtactgtaagattgatgttaaaggcatggtgttcac

SEQ ID NO: 763349 - DNA, 100 bp, Homo sapiens
agcatcccccctccactcacccggcagatatccgtgaaggctctagggattctcgcaggagccacagctaacaaggcttctcataacaggacccgggccc

SEQ ID NO: 763350 - DNA, 78 bp, Homo sapiens
attgattttgttgaagatgactcggacattttacatgctgtaagagctcattttggaggaataatggatgaaccatct

SEQ ID NO: 763351 - DNA, 87 bp, Homo sapiens
tccagtcaggccgatccgctccgctcacggaagatgagaatgtgcctactgctcctgatcctccaagtcaacatttacgtgggcatg

SEQ ID NO: 763352 - DNA, 98 bp, Homo sapiens
ccggacggggccctgacacggccaccctactgcctggaggccggggagccgacgcctggacaaagagaaatccctgtcggatcagaggcgctactccc

SEQ ID NO: 763353 - DNA, 74 bp, Homo sapiens
gggatctcggtgctgcagacggcgagacctcctgcacagggatcgcttacacctgagacgaactacagaacagc

SEQ ID NO: 763354 - DNA, 75 bp, Homo sapiens
ccccgggaccccctggagcccccatgatccctaagaagacagcttgaacctaggggctggcaaggtttaattgct

SEQ ID NO: 763355 - DNA, 100 bp, Homo sapiens
gtttgaagaggagaaaaggatttttgcatgtttagaaatcaaggttcagaggccagtaatagtagccatgagtctcgtattggtctagctgaggggttgg

SEQ ID NO: 763356 - DNA, 80 bp, Homo sapiens
gcaatagcccttcagtactgttgtacgaagtgagcttgtagtggacaaaacaaagaggaaaaaaagaagagaactgtctg

SEQ ID NO: 763357 - DNA, 90 bp, Homo sapiens
ggcggatttacctaaaggctgaggttgctgatgaaaagctccatgtcacaggggcctttacaacaactaaacggacaggcattccagccc

SEQ ID NO: 763358 - DNA, 102 bp, Homo sapiens
atgagcaatcacaaggaatgcaagggccacctgttcctcagttccaaccacagatgcctgtgaggagccaccaacatttgaagctatggagctcattggtaa

SEQ ID NO: 763359 - DNA, 83 bp, Homo sapiens
tctgatttttagttttgctgtcatcaccatctcaggattaacaggtgtttatacgggagctgatctccaatgccagcgatgcc

SEQ ID NO: 763360 - DNA, 98 bp, Homo sapiens
tgggagtctggagacatgagtgatcagggttaaagcacgaattgggagctctcagcgacatcaccagtcagcagccaaagacctaactcagtcccctg

SEQ ID NO: 763361 - DNA, 83 bp, Homo sapiens
ttgcagctggacagctagctgatgctttatctcagtttcatgctgccgtagtgccgcagaatggaattcggcattgttcctac

SEQ ID NO: 763362 - DNA, 51 bp, Homo sapiens
atttttgaaagaacatgaccaccttcgaaatttaatgagtggtgttaagaa

SEQ ID NO: 763363 - DNA, 98 bp, Homo sapiens
cccagggtccaggattttattcccaacgcatggcagaccattgccctcttgaacatttaccgtaaccctcaaaactcttcccagtctgctgacggttt

SEQ ID NO: 763364 - DNA, 75 bp, Homo sapiens
cactttccatagctgtaggactgctggaggttgtggcagcactgcctgaaggtatgagaccagattctaatcttt

SEQ ID NO: 763365 - DNA, 98 bp, Homo sapiens
caatggagaaagagtaattcacgcagagccggctttgcagagccacctgagctgaagattcccttgagaacaagtactgtcctgtggtttcatggcct

SEQ ID NO: 763366 - DNA, 100 bp, Homo sapiens
agacgttgtctcatgggtaccgcttgccaactttggaggtcagatggcaaaaatcaagcaaacccttctagacagccggggagtgttcctcgacatgttt

SEQ ID NO: 763367 - DNA, 82 bp, Homo sapiens
gcccccgcagcaccgctactcggagggcgagcggacctccctggagaaggctccactttgaggctctgatgaacattccagt

SEQ ID NO: 763368 - DNA, 98 bp, Homo sapiens
ccgagatgctggcatttgcctgcaaccccttcagatggggcttttgctgctaagtgtggtggtgacctcccggcccgaggccttccaaccccaccacc

SEQ ID NO: 763369 - DNA, 90 bp, Homo sapiens
gcggcggccacggcatcctgtgctgtgggggctacgaggaaaggccaactgtgatttgagacggcagattgatgaacagcaaaagatgct

SEQ ID NO: 763370 - DNA, 100 bp, Homo sapiens
atcaatgagctgaaattccatccaagagatccaaatcttctcctgtcagtaagtaaagatttgatccatatggaaagaataagttctccacttgtagaat

SEQ ID NO: 763371 - DNA, 89 bp, Homo sapiens
gaaaagcagaaagccgcctcttggtttgcgtcctgcactgaaaggaaatgacggattttagtctccacagcctattggctcacttggac

SEQ ID NO: 763372 - DNA, 76 bp, Homo sapiens
ccgatgaagtgcagaggtttttttctggacccactgatctcagcatgaagagacaattggcgactagctcaggatc

SEQ ID NO: 763373 - DNA, 100 bp, Homo sapiens
actgaaattgatgacggagaagttttatatttggtacattactatggatggaatgtcaggtatgtgaatggccatgcaaaaaaacattatgaagatgcac

SEQ ID NO: 763374 - DNA, 74 bp, Homo sapiens
cgctggctgctgagcccaaggccaaggaccccttcgctcacctgcccaagaggggaggaacatcatcgtgttct

SEQ ID NO: 763375 - DNA, 88 bp, Homo sapiens
atcaccatgtcggctttcgacaccaaccccttcgcggacccagtggatgtaaaccccttccagcctccatccctgtgagatcactgcc

SEQ ID NO: 763376 - DNA, 88 bp, Homo sapiens
cggcggggaagatgcgcctcaagaaccaggtccatctgggaagcgggatttgggttgatgaggagaaatggcaccagctacaagtaac

SEQ ID NO: 763377 - DNA, 100 bp, Homo sapiens
gaggaggaggaggaggaggaagatgaactgctggaggagctagaggagctggagcaggaggaattggcccaggagttgttaaatgtgggcgacaaggaag

SEQ ID NO: 763378 - DNA, 100 bp, Homo sapiens
ggaaggtcggcagatcaaaccttataccctcatgagcatggtggccaacctcttgtatgagaaacgcagcaaagtggggcaccaaggccctgtgctaagc

SEQ ID NO: 763379 - DNA, 50 bp, Homo sapiens
ccaggagctctgctctcccctccagtttggtaactctcattcgacatcca

SEQ ID NO: 763380 - DNA, 80 bp, Homo sapiens
ggcaccgcgctcgcctccctcggctcggcccaaagcagcagcttcagccccgaaacggagtttcactcttgtcgcccagg

SEQ ID NO: 763381 - DNA, 75 bp, Homo sapiens
gctggatctctggtgagacatttttcttccttctgtcacatcacacccaatggttacaaaagcaggttggtcact

SEQ ID NO: 763382 - DNA, 82 bp, Homo sapiens
agatactcgacaagactcggatcagtatcttgccacagaaaccatacaaaatatgagttggaagtaaagagggtgcaagaca

SEQ ID NO: 763383 - DNA, 90 bp, Homo sapiens
cagcattggaaactctgtttacgttattatcaacacaggaccaggccatggtaggggaggagtgtgtaggtgccatcgtttgcaagttgg

SEQ ID NO: 763384 - DNA, 82 bp, Homo sapiens
caagaggagcagtccagcggcatgaccattttcttcagcctccttgtcctaggaaggatttgatgccctggatccctttatt

SEQ ID NO: 763385 - DNA, 82 bp, Homo sapiens
agaggacccgcgtgggcaccctgcaggtggtcagacatgtcatcaactcagctgatccacctccgacccttaagccagagac

SEQ ID NO: 763386 - DNA, 75 bp, Homo sapiens
cgtgcggtctgggccttttgggcagcttttccggcctgacaacttcatctttgcctccatcaagaaatcggcgag

SEQ ID NO: 763387 - DNA, 75 bp, Homo sapiens
gaaccccaagatcccacatggaggcatcattcttaacaaagaagttaaatattggtgggaaaagagtaaaccttg

SEQ ID NO: 763388 - DNA, 74 bp, Homo sapiens
ggctcttatccaacacagcactatcatcgggttttctcaggtgtttgagggccacgactgcttcccggtgctgt

SEQ ID NO: 763389 - DNA, 80 bp, Homo sapiens
acaatggcatttacagaaagagtcaacagcagtggcaacaggtttcccaggcagctgcagacttgaaacagttctgtctg

SEQ ID NO: 763390 - DNA, 82 bp, Homo sapiens
cagatctgtggagcagatccgatggagaggctgagctgctccaggacttggggaggaagaacgtgcaaaacgtgaggagcta

SEQ ID NO: 763391 - DNA, 87 bp, Homo sapiens
agcagcagtggggacgagctttgaaagaacttgccagacttaaacagtggccacagatgtctttaattccaaaaacctggccgttca

SEQ ID NO: 763392 - DNA, 75 bp, Homo sapiens
caaaccacttctcagacaagttccatcccacctttgagtcaggccatcgaggagggcacgctggaggagatcgaa

SEQ ID NO: 763393 - DNA, 85 bp, Homo sapiens
aggaggggaaaagcaaagaatgggcatggctcgtatgttttatcataaacatatctgaagagatggattaagaatgctttggatt

SEQ ID NO: 763394 - DNA, 100 bp, Homo sapiens
gcccctgggctggtggacgtacctggtgggcaccctgagcctcaggagtggaggcagcacagacagtgaggacgaagaagaggaggacgaggaggaggag

SEQ ID NO: 763395 - DNA, 90 bp, Homo sapiens
gaactaaataatctcctgtctaaatgaatctgaatggtgcctaccctaagctggtgcctttcagacctgcaggacggctgatctctccac

SEQ ID NO: 763396 - DNA, 89 bp, Homo sapiens
cagtggaaaatattgttttgaagcacctacactggcaacattagatccacctcatacaggtgactctgacatcattagaagcatgccag

SEQ ID NO: 763397 - DNA, 100 bp, Homo sapiens
ggaatcgctgaaccgtgcagtgctcgctgccatggatgccaccaagctgatccgggtcttcctccagcagctcaagggccgcgtagcccgggaggccatt

SEQ ID NO: 763398 - DNA, 83 bp, Homo sapiens
gcgtgttgctgcgagtgggacgcgcactggtcggtgccggctcaggagccgggtcagcttacccgctggccgcctcctgacaa

SEQ ID NO: 763399 - DNA, 75 bp, Homo sapiens
ctgcaacccaggcgtcttccagtccacagttccaaccagaggagcctgaggagtcagaaccaagcagaggccaag

SEQ ID NO: 763400 - DNA, 98 bp, Homo sapiens
gtacttgcaagaaacctcaggacttgagtaacagcaacatggaatttcttcacatggctcctggagaagtgaccatcacagttcgcctcatccgttcc

SEQ ID NO: 763401 - DNA, 100 bp, Homo sapiens
gcgatgcaagcggccaagagggcgaacgttgaccccctgtttacagtgccagcgccaccaccgccgatttccagcagtctcacgcctcagattctaccct

SEQ ID NO: 763402 - DNA, 100 bp, Homo sapiens
gctatgcatgctgcttttgatgtctgacaacgtggatcgttgttttgaaacgactacaggaatatgtggaagctgtctcttttcaacacttcatcaaaac

SEQ ID NO: 763403 - DNA, 96 bp, Homo sapiens
gcaagacccaggaagccgcgggcaaactcagactcgaagagcaatggtggaacaaagcggcaaaagatatcccatcaaaattatatagcctatcaa

SEQ ID NO: 763404 - DNA, 87 bp, Homo sapiens
cgtgcagctcttggcaggagtagctgatcaaaccaaggatgggacactttgccaccatcaccttgaccttcatcgacaagaacggag

SEQ ID NO: 763405 - DNA, 73 bp, Homo sapiens
accactgcagccatgatctccttaacggacacgcagagtgacaaacagcatgtttggtgcttcaagaaagaag

SEQ ID NO: 763406 - DNA, 87 bp, Homo sapiens
aacatcctggaatatccctcagcctggtgagggtgatgttcgggaggaggccttgtccacaggtatgcaaccactcatgtattcggt

SEQ ID NO: 763407 - DNA, 75 bp, Homo sapiens
cgccagccaagaagcatgtgcgactgcaggagagacaggggcaagtgtccgagtggtgaatcagctacttacaga

SEQ ID NO: 763408 - DNA, 87 bp, Homo sapiens
cgagcacctctccgcgcacatcactcccgagtggaggaagcaatacatccagtatgaggcatgtactggcattgaaaacattgacga

SEQ ID NO: 763409 - DNA, 75 bp, Homo sapiens
ggagactggaaggataataggagaatctctacgaagctcatgaatatatttttgaaagactccatcaccacgtgg

SEQ ID NO: 763410 - DNA, 101 bp, Homo sapiens
accaccacccgagactccttaaccgagatcaacctgtctggctgtggatcatatgctgatcccatcacagaccagccctccgttaggttcagtcctcagct

SEQ ID NO: 763411 - DNA, 100 bp, Homo sapiens
cagatggacccaatgataaaattcaagcggtcatcgatgcgggagtatgtaggagacttgtggaactgctgatgtgtttaatgaacgctgccgaattcac

SEQ ID NO: 763412 - DNA, 90 bp, Homo sapiens
catgtgtctcttctaagctgaataaagctgttttggaactgtcaggtacctcaaagcgtaagtttatttcacagagcagtgtacattctt

SEQ ID NO: 763413 - DNA, 50 bp, Homo sapiens
ttggcctcccaaagcgctgggattataggcgtgagccaccgcgcctggcc

SEQ ID NO: 763414 - DNA, 80 bp, Homo sapiens
gttcattggagtgggtgcttgtgcatatatgctaggctgtattcatcaccaaagaaaaaacttacaccaatgcagaaatc

SEQ ID NO: 763415 - DNA, 75 bp, Homo sapiens
ccaagatctacgccatgcactggggcacagactccaggtggagccgccaccaaaatgcagattttcgtgaaaacc

SEQ ID NO: 763416 - DNA, 90 bp, Homo sapiens
ctgctcacagcccgacgaaaggatgccaaatgtatggacgacaaaggcgacccgagcaatgaggaggcacctaaggccatcaaacccacc

SEQ ID NO: 763417 - DNA, 100 bp, Homo sapiens
cggcgagaggcggcgccgctcccaagatgtcgcagacggccatgtccgaaacctacgtttttgagagtggatcaagataaagacaaggattgtagcttgg

SEQ ID NO: 763418 - DNA, 82 bp, Homo sapiens
atcagccgctacgtgactcttttctccaggtttttcacgactgaaaacaacatagcaaaataagccaagatgtctgtggatc

SEQ ID NO: 763419 - DNA, 82 bp, Homo sapiens
ctcagttggaagcagccgatccagcctgcggagcctgtggggcagtgcaggccaaggccccctgcccatggaggtgtgctgc

SEQ ID NO: 763420 - DNA, 97 bp, Homo sapiens
cagtgtcacgcaggacagaaatgaccaacagataactgaggacaatggacctgcctgggcatagacttccttaagtggaagagaaagccaataccca

SEQ ID NO: 763421 - DNA, 75 bp, Homo sapiens
ctgcttcctgctgctctgtctcagcgccgcctccctgcttcttaacagatgaccagctgaactcagaagaaaaaa

SEQ ID NO: 763422 - DNA, 50 bp, Homo sapiens
gctgactgcgtgttaacatcagccgaatttgccacatacctgaatttctg

SEQ ID NO: 763423 - DNA, 75 bp, Homo sapiens
ggacagaagaggcctactcaaatcctttctgaggtacctgttcctgacttttccacggattgtcttcatgctggg

SEQ ID NO: 763424 - DNA, 83 bp, Homo sapiens
gtgaagctcaccgagacggcgatccgggcgctcgagacttaccagagccacaaggagcatcagatccatgctgctgctgactc

SEQ ID NO: 763425 - DNA, 80 bp, Homo sapiens
tttttcggatcatgtctggtggctccgcggattataacaggacgtagacaagtttggcaacgagatcacccagctggccc

SEQ ID NO: 763426 - DNA, 97 bp, Homo sapiens
gcacaactccggacacttgttttccagtgtgatcttacccttaaagctatgggaagcttgaacgtggggccaagacatcaagagtagagcagcagga

SEQ ID NO: 763427 - DNA, 110 bp, Homo sapiens
gacatagatgctgtcactcggcttcttgaggagattgggtggatcacaagaactaatctttcatgatttggaaaccggaaggaaagaagcacttttgtagctgacttacc

SEQ ID NO: 763428 - DNA, 83 bp, Homo sapiens
gcccgattggccccatgtttcagggacaagtgccatcctctttacaggggaagcagctcgagagtgtcgtagaaagaagaaag

SEQ ID NO: 763429 - DNA, 75 bp, Homo sapiens
ccgcctctgcctgccacacctggttgccctcacagctgcggaagccctgacccgggagttctcggtgctcaagat

SEQ ID NO: 763430 - DNA, 90 bp, Homo sapiens
ccaccagtgagatccactgctccagattgctgctaaaattgattcaattcctcacttgaataattccacacctctagtggacccctcagt

SEQ ID NO: 763431 - DNA, 100 bp, Homo sapiens
taaggaaatggaagtgaaacccagttcggtgactgcagccgcaagtcctgtgtaccaggatctcacttgcttatctgaagaagattgtccaggctcatat

SEQ ID NO: 763432 - DNA, 75 bp, Homo sapiens
ggtgaagtggcaggaggaggaggaggggctccggctggtctgtggtgagtgcctccggagccagcgtggtggcca

SEQ ID NO: 763433 - DNA, 90 bp, Homo sapiens
actggaatatctagaggaggtacctccaggaaatgtgctagatggagaacttaatgttctggatgatattttaactgaagtaccagaaca

SEQ ID NO: 763434 - DNA, 100 bp, Homo sapiens
gcttcagttctcaatgcatggccagaagatgtcatcaaggacaagatgaagctcatcatcctggagcactattctcaggcgagcgagtgggcggctaaat

SEQ ID NO: 763435 - DNA, 76 bp, Homo sapiens
cacaggactgaattttatagaaatctcacacacaacccaccaagtgacttcttcctggctggtgccttgttagaag

SEQ ID NO: 763436 - DNA, 101 bp, Homo sapiens
cttgtcatcatttgtcttcatgtcgttctggtaacatccctggaagtggaggccatagtggagtttgactaccaggcccagcacgatgatgagctgacgat

SEQ ID NO: 763437 - DNA, 136 bp, Homo sapiens
ctgctatgctccagaacttcaaagggaaggtcattgtcatcgtggggcatgtggcaaaacacacagctgagatgtgtatatctcatgattgatatggagaaactagtcatgggccaaaggtcaagatacttctctg

SEQ ID NO: 763438 - DNA, 83 bp, Homo sapiens
gccaggacaaaacagcatggttagtcattgtggatgatgatacattaataagggtgatcagcccatgacctaaacctccagac

SEQ ID NO: 763439 - DNA, 83 bp, Homo sapiens
cccatgaggagggacgtgaacggagtgaccaagagcaggtttgagcatcacaggacatggccccctcagccacctagctgggg

SEQ ID NO: 763440 - DNA, 87 bp, Homo sapiens
tcacgtcctgggcttcgtgtctgcaatctccatccagttcctggtgtacaggcgcagcaccgccgcctcggagcttgagcccctcct

SEQ ID NO: 763441 - DNA, 83 bp, Homo sapiens
ctgaacttcaagcggctgggagctggcatgctggagccgccgttcaagcctgactctattatcctcccagtccacaacgctga

SEQ ID NO: 763442 - DNA, 123 bp, Homo sapiens
ggaaagaagaaggggaagaaaagaaggggaagaagatcaaaacccaccatgccccaggcgaatgcgagaggagcagctggcacgggaggccgaggcccgggcggagcgggaggcggaggcccg

SEQ ID NO: 763443 - DNA, 97 bp, Homo sapiens
gcgccgccccggccgtgtcccggaggagcggcctgcgccgccgcgcgagaggaatgtgatggagagtctctgccgtgccatctgggatgcaaaccgt

SEQ ID NO: 763444 - DNA, 80 bp, Homo sapiens
cgacgagcgctgcactaacgcaggatccggctgccgaaggtcctcgccagtcatacccatctaattacatggaatccatg

SEQ ID NO: 763445 - DNA, 100 bp, Homo sapiens
ccaagagtggtggatcggttcgtggagtttctgaagaggaatgagaattgtacattacagtttgaacaaaaaagtggtgcagtttttgatgaaattgtag

SEQ ID NO: 763446 - DNA, 101 bp, Homo sapiens
attttggcagttctaaatttgaatttgaggtggacccaagtggagagattgtggaactggcgaaaggtgcatgtccctggaaggagcatctctaccacctg

SEQ ID NO: 763447 - DNA, 76 bp, Homo sapiens
gctgctagcagaaaatcaaaacgctgattaaaagaagcacgattcctcacctattcctacctcttggccttcaatg

SEQ ID NO: 763448 - DNA, 100 bp, Homo sapiens
gcgtttctggtcctcatcagtcagatatggatcagaaactttcgaagttggtagaagagctcacaacttcaggagaaccccgactaaatcctgagaaaat

SEQ ID NO: 763449 - DNA, 75 bp, Homo sapiens
tatctttgggagaccttcctagcacagcggcagaataagctttccgatttgttggcacccatctcagagcagatc

SEQ ID NO: 763450 - DNA, 100 bp, Homo sapiens
gttaaatgccctcaagtcgacaggggatgggaccctagcctctgaagagccaatccattcaggatgggaaaccacgcaggcaaacgagaattaaatgccg

SEQ ID NO: 763451 - DNA, 90 bp, Homo sapiens
tgagaccacagcagagtctccagtaagctgccactgcagagccccgccatggaagacacgccgttggtgatatcgaagcagaagacggag

SEQ ID NO: 763452 - DNA, 100 bp, Homo sapiens
gcttcgcgctgccaatatggagcacgaaaatcaaattcaggagttcaagaaacgagatgcacaggcatcctctggtatcacgattccaaaacccccaaag

SEQ ID NO: 763453 - DNA, 100 bp, Homo sapiens
aaggaagataccgagtgggagaaaagatcctcttcattaggattgatgttctgccagaaattgtggaggctgtggaagggaaggtggaagtcttcctgga

SEQ ID NO: 763454 - DNA, 90 bp, Homo sapiens
cgactccctcaccgagtacgaagcgggcgtttgcgaaggcaattaagttggaatatgcaaggttggttaagttggcccaagaagacaccc

SEQ ID NO: 763455 - DNA, 90 bp, Homo sapiens
ttttggacctgaaacagaaattctggaacacctatatgatatgaatatcactgggcagatggtactaatattaaaaagccaatcaaatgt

SEQ ID NO: 763456 - DNA, 100 bp, Homo sapiens
ctggactcatggaggctgagcatttattcagatatctacgtctgcatgatctcctttgcgcacaatgtagcagcacaagggaagtacattgctatagtta

SEQ ID NO: 763457 - DNA, 76 bp, Homo sapiens
ccagctttgagctgaatttgctttgtgatacctgatatggtccggaaaaagaacccccctctgagaaacgttgcaa

SEQ ID NO: 763458 - DNA, 82 bp, Homo sapiens
ccttggtgtcatccagccttagcaaaccagagcctggagcaagcttggagcagacgcacatttttgtactggcacatattct

SEQ ID NO: 763459 - DNA, 100 bp, Homo sapiens
acacaaacgcgttctgatcttcccttcctacatgcttgcaaaccatactgggtacatcaaagttgactggcaacgagtggagaaggacatgaagaaagcc

SEQ ID NO: 763460 - DNA, 100 bp, Homo sapiens
cgattggcatcgatctctccatcccttccgaggcccgacttcggtgtggcagagaagacacagcttctgaaattgagtgtacctgctacttttatgcttg

SEQ ID NO: 763461 - DNA, 100 bp, Homo sapiens
cagcacgcgcctgcttcccgtctgcgcgagtccacgcagctccccaggtatgaaatctaaggatgccccctctctggagctgcctgcctgtgtttgaatc

SEQ ID NO: 763462 - DNA, 98 bp, Homo sapiens
gaacggtcaaggagccctaaacagccaggaggaagaagaagtcattgtcacagaggcgggcctccccttcctcatcatcgagacaagcaccatcaagc

SEQ ID NO: 763463 - DNA, 74 bp, Homo sapiens
atgtgattcagcctaatatctcaggtggttgagtttgcctcttatggtgacttaaagaatgctattgaaaaact

SEQ ID NO: 763464 - DNA, 82 bp, Homo sapiens
ctgcgttcacaggtgtttctgcggcaggctgaaggtgatgtggccgccctcaaccgacgcatccagctcgttgaggaggagt

SEQ ID NO: 763465 - DNA, 100 bp, Homo sapiens
ggcactgctgatgctgctttcgctggggttgggccatatggtgctcttcccagtctggttcctgtacagtctgctcatgaagctgttccagcgctccacg

SEQ ID NO: 763466 - DNA, 136 bp, Homo sapiens
caaagtcatcgaccaggagcatgatgtggtgtggaccgaagcttacattgacagcactgaaacagtactgctggagcaccctttcagtgctgtgaaacaagaactgcaaagaaaatggattgaagagttgaataag

SEQ ID NO: 763467 - DNA, 75 bp, Homo sapiens
gacccagacgaggctcgggactttgcagccggccttagtgctcgcgcaggctgatgtttcagacaccgcaggaaa

SEQ ID NO: 763468 - DNA, 100 bp, Homo sapiens
gcggacgggccatacccaataaccaggtgcttggcaaaatcgagcgggccattgggtgctgacggagcttgtgtccaagatgcgggacatgcagatggac

SEQ ID NO: 763469 - DNA, 74 bp, Homo sapiens
aacaggaatttaaagcacattgtcgaattttccgcagatttccagtggccccactgatcccttatccactcatc

SEQ ID NO: 763470 - DNA, 83 bp, Homo sapiens
ctcacatcaacttctaccagctgtgtcactactccatccagaagggagctgcgtttctgggacttggcaccgacagtgtccga

SEQ ID NO: 763471 - DNA, 75 bp, Homo sapiens
ctcccttcatgtctgggtcatggtcaatgagctgaaggagaaaggcaacaaggccctgagcgtgggtaacatcga

SEQ ID NO: 763472 - DNA, 97 bp, Homo sapiens
tggagagaatttcactatattcaggtgtacagtgccaccaacgtggagctggtgacacgcacacgcacggagcacctctctgatcaggacaagtcga

SEQ ID NO: 763473 - DNA, 96 bp, Homo sapiens
tgttggttccaatgctgggattggctgcttttcctgcaccacctcgtgagcgatgacgtctgcctgaaggtggtggagctctacctgaacgagaag

SEQ ID NO: 763474 - DNA, 80 bp, Homo sapiens
atgctctccatcctgctcttcttccacagtgttcggctaatgaatgagttcactaatatgccagtacctccaaaaccccg

SEQ ID NO: 763475 - DNA, 74 bp, Homo sapiens
cggatctcctggaagtgttggcggaggaagatttatcagcaagactgttgaacgcataactgcccaagatgcct

SEQ ID NO: 763476 - DNA, 90 bp, Homo sapiens
ctggaggattcagacagtgaagagcattccagatcagattctgtgacagacaacaccaccccatgttattggtcagttggacaaactcat

SEQ ID NO: 763477 - DNA, 82 bp, Homo sapiens
cagaagctacatgacccctaaacgatattaataaggcagcggaaagaagaaatatgaatacggctccatcaagacccagccc

SEQ ID NO: 763478 - DNA, 95 bp, Homo sapiens
ccagatctcagaggagcctggctaagcaaaaccctgcagaacggctgcctaatttacagcaaccatgagcattcccatggtttggcatggacatc

SEQ ID NO: 763479 - DNA, 90 bp, Homo sapiens
gctcatggacggaagacccctggctctataagctgaattatggcagcccagtcaaggaatgttttaaaggaagttgggctactcacaagt

SEQ ID NO: 763480 - DNA, 85 bp, Homo sapiens
gtgcgcttccggatcgggggcaagcggaaggtgatgcccaagatggaccagaacccagtgacttgattgtaaaaatttacagagc

SEQ ID NO: 763481 - DNA, 97 bp, Homo sapiens
gagaagacgatctgcacttcgcattttggcattgacatttaattttagggtcctttatatagaagggagagtaggtctatgttaacaatgaatgggc

SEQ ID NO: 763482 - DNA, 82 bp, Homo sapiens
ggacgcgtcatcgagtgtgacgtggtgaaagaccacaccaccccagagccaagtgcaccgaggccttggccaagcagagcct

SEQ ID NO: 763483 - DNA, 97 bp, Homo sapiens
gacagacaattgttcagttgcaaaaagaaactggagccaccatcaagctgtctaagtccaaagatttttacccagggttgatggtgcatgttgataa

SEQ ID NO: 763484 - DNA, 98 bp, Homo sapiens
tttaatccggcagtgaccgtgtgtcagaacaatcttgaatcatgaagctactaaccagagccggctctttctcggtagatatagttgtaggtactccg

SEQ ID NO: 763485 - DNA, 90 bp, Homo sapiens
ctcagcagtgcgcagggctgcactgtctccgtctgcggcctgcagtaagcgggggcctcatccacatgctcacccacttggccgaggctc

SEQ ID NO: 763486 - DNA, 97 bp, Homo sapiens
cgcgccttcgtcaactctcagatccaagggcacaaggaggtcctggagtacaatgccattggaggcaagtataaccggggtttgacggtggtagtag

SEQ ID NO: 763487 - DNA, 50 bp, Homo sapiens
tgtcaagaaggatggggagtggaaggcaaagtttgagaacctctgcaagc

SEQ ID NO: 763488 - DNA, 100 bp, Homo sapiens
tcctggaggtggatctgaagaacggatatatttttgccatcatggatcagtttggagatatattagaaggtgaagtggaccattctttctttgacagtga

SEQ ID NO: 763489 - DNA, 50 bp, Homo sapiens
tagaggacttcatcaagaacctccgaggtcagcccaagactaccccgtcg

SEQ ID NO: 763490 - DNA, 82 bp, Homo sapiens
ctggctcttgccctcatcctggttctggaatcctcagttcaaggacatttcattaccatccagaagtgtctcccactgaagg

SEQ ID NO: 763491 - DNA, 82 bp, Homo sapiens
aggaacgaggcaaggagctaaagcagcgtgcgttcagccctggggctgagcagtccaaagtcctgagcgccgtggaggaccg

SEQ ID NO: 763492 - DNA, 50 bp, Homo sapiens
aagtcaaccattggaggacaaataatgctcaggggagagagaaagcccag

SEQ ID NO: 763493 - DNA, 100 bp, Homo sapiens
attcctcagctacgaggaggcgctgaggagaggaatcatattgacaggtcatgaaaatgagaccaaaagatctctggaagcgattaatgataaaatttca

SEQ ID NO: 763494 - DNA, 124 bp, Homo sapiens
acgaggaatcagctttgaagtgggagcccagttggaagcccgggaccgtttaaaaaactgatggcccactgcgtgaccttggttcagctgtccatttcctgtgaccatctcattgacaaggaca

SEQ ID NO: 763495 - DNA, 88 bp, Homo sapiens
ctgcccacattcgtggtgctaagcatcagaaaattcgagtgagggttgaaaaggatccagaacttggatttagcatatcaggtggtgt

SEQ ID NO: 763496 - DNA, 100 bp, Homo sapiens
taaaaacaaagcaaaaccagttaccactaatcttaagaaggcataagattctcaacatgttgactaagaacccaccatttactaagaacatggagtctcc

SEQ ID NO: 763497 - DNA, 98 bp, Homo sapiens
agaagttgctgcttcagcaaacaattcctactgcatcgtgggcatagcgtacaatgccaaaataggaggtcagtatgggaatcctttaaataaatata

SEQ ID NO: 763498 - DNA, 50 bp, Homo sapiens
aggattccaagtaactcttatttgttgggagctgaaagtgccgacagcat

SEQ ID NO: 763499 - DNA, 101 bp, Homo sapiens
aaccagtagtttggagaggccttatggtaatgtcggccattgagaaattgttgaggcagatgccttcaattaagttgcagagttctgatggagagatattt

SEQ ID NO: 763500 - DNA, 82 bp, Homo sapiens
gagtatctccagcctttcaaggacaaactagaggagttcttccaaaaagcacctggctgcagtggaagaaagaaagatcaag

SEQ ID NO: 763501 - DNA, 100 bp, Homo sapiens
taccttgtgtttgatgaagcagatcgaatgtttgacatgggatttgacttcattagaggggtggtagactcggaggatctccctctaaacatatcccgtg

SEQ ID NO: 763502 - DNA, 88 bp, Homo sapiens
cccacagtagcgaccggaaccaagccaaggcgaaagagacgctcagatgcaccttggtgtggagtcaaaagtacacatgctggatcaa

SEQ ID NO: 763503 - DNA, 100 bp, Homo sapiens
cccaggaactgtctttatctgctgtcaaggatcttgtgtgctccatagtttatcaaaagagaatcacattttggaagatgtgaacaaatgtgtcattgct

SEQ ID NO: 763504 - DNA, 76 bp, Homo sapiens
cagcactgtagaacagctttatgaaacagcttgcttcctacaggtgttggggatgtcctttgcactgaccctgaac

SEQ ID NO: 763505 - DNA, 136 bp, Homo sapiens
ctcctagcagcgcctgggcgagtgacatctgggccggaccagctggtgctgcgcggcgcagggctacatgcagccgctgaagcagccagagaactccgtgctctgtgacccttcactggtggacgagatcttcgac

SEQ ID NO: 763506 - DNA, 100 bp, Homo sapiens
accaaaacccaacagaccaccaaatgttgacctgacgaaattccacaaaacctcttctggaaacaaatggcttcctttgggtggaagaggaaaattggtg

SEQ ID NO: 763507 - DNA, 82 bp, Homo sapiens
cttggttctcagaggaggaattctcaaaccagagtcacccaacatttcctgtgttacatctgcaaggaatacgtagaggatc

SEQ ID NO: 763508 - DNA, 83 bp, Homo sapiens
cagtactcgggcaagaccaccttcgtcaatgtcatcgcgatcatctgttacgtactgcaagtcagcattccgatagcagtggt

SEQ ID NO: 763509 - DNA, 90 bp, Homo sapiens
gctaaagagcgtcgtgtggcagaaattcagatcaggaaggaggtggaaagaaaaagaagaaaaagaaggacaagaaacacaaaaaggata

SEQ ID NO: 763510 - DNA, 100 bp, Homo sapiens
tttcctgaagatgtttacagtgcagtcttatcgaaggatgtgcatgaaggacagcctcttctcaatggtctgtacaacccaccctacagtgctcagtcac

SEQ ID NO: 763511 - DNA, 101 bp, Homo sapiens
aacgccagagcccaggtgcccagaggactttcttccagcttctgctgtccttctttgtggagagcaagggatcgtgggactttaccagatcggtttgtaat

SEQ ID NO: 763512 - DNA, 100 bp, Homo sapiens
gtcccttctacttcgttgcagcaactgggatgctgagactctcacagaggaccaggtgacaggaactccctcgaaaggctttgatgagaaggcctacctg

SEQ ID NO: 763513 - DNA, 48 bp, Homo sapiens
gcctgggaagccaacgaccacacgcataaaagcagtctgggcgcaggc

SEQ ID NO: 763514 - DNA, 100 bp, Homo sapiens
gcagcctcgccaaggcaaccacagccccagccaccacccgtaacacaggaattggtggagagaaggcgcaccatgatggaagatttccggaagtaccgga

SEQ ID NO: 763515 - DNA, 80 bp, Homo sapiens
ctgtaaagccacccacaaacaaactacccattttcttttttggaactcatgagacatataattggtgattacaactttcc

SEQ ID NO: 763516 - DNA, 100 bp, Homo sapiens
ggcggcgggccggcgggcggggcgcagagccaggcagcgcagattccagcaagattatggaagagcatagctacatacaaaaggagctagatttacaaaa

SEQ ID NO: 763517 - DNA, 50 bp, Homo sapiens
ctcaacatctctcagagacgaaaggtttggaaggtttgcagttgctgctc

SEQ ID NO: 763518 - DNA, 75 bp, Homo sapiens
gaattcacagtctaccatgaattggaagacatatgtagagtgtgtcggtcagaaggaacacctgagaaaccgctt

SEQ ID NO: 763519 - DNA, 101 bp, Homo sapiens
atgtctccatccccgaccgccctcttctgtcttggattaatgcagtatcgaatggacaagtccgaggtgatagttacagtgaaggttgtctgggtcaaaca

SEQ ID NO: 763520 - DNA, 76 bp, Homo sapiens
ctgctcccgccggtgcccgctcagaagttctcggcgctcacgatcacagattctgctggccatattctctactcca

SEQ ID NO: 763521 - DNA, 82 bp, Homo sapiens
ccatcttggtgagaaacattaagacctactaccaggaaggagtcaagactgagaacaacgatcatattaatttgaaggtggc

SEQ ID NO: 763522 - DNA, 75 bp, Homo sapiens
gccagcgacccgctgctcagcgtcctcatgtggggggtaaaccactcgcacccccaaattcagaaggagtcccag

SEQ ID NO: 763523 - DNA, 100 bp, Homo sapiens
agaacactaaagtgttacatgacagatgtatgaggttcaaaaacttcagcgagcagctctgaagaatcctgtgaaatgtgccgtttcctctaaataccag

SEQ ID NO: 763524 - DNA, 100 bp, Homo sapiens
gctgggtccgctgagcggggcgacccgagatggcccactgcgtgaccttggttcagctgtccatttcctgtgaccatctcattgacaaggacatcggctc

SEQ ID NO: 763525 - DNA, 98 bp, Homo sapiens
ataacctctgcaccctgctagaaaatgccatacaggacactgtgagggaacaagaccagagtttcacggtgggcccatctggggcagggaagagcaca

SEQ ID NO: 763526 - DNA, 82 bp, Homo sapiens
gaccgcgcgcagggcctgcagcgggagctggacggcgagcgcgagcggcgcgagaaagttcgagaacatcatcgaaaattaa

SEQ ID NO: 763527 - DNA, 51 bp, Homo sapiens
ccggggcgccacgggggccatgtaagcaggcagctatcaatggtgtaatac

SEQ ID NO: 763528 - DNA, 100 bp, Homo sapiens
gacatttctgaagcgagcgtcttcgatgaggactttggatttaagcatcgtctctgggtatattctggaaggagaggtgttcattgttgggtctgtgatg

SEQ ID NO: 763529 - DNA, 98 bp, Homo sapiens
cgagccgccgacccgccgagcaaaatgacttgtgtatgcggatacctgcttcagtaccatcaagttaaaagcagaagatgcttctggtagagagcatt

SEQ ID NO: 763530 - DNA, 74 bp, Homo sapiens
tcatggagaagaagagctggagacagagaaagatttcagcaggaagcagaagatgcacctgaaaaactttccag

SEQ ID NO: 763531 - DNA, 83 bp, Homo sapiens
ggagctgctgaggctacaggctgaaaacacagccttgcagaagaacgtggcagaaggaccctctattgtcccaggcctgtgtt

SEQ ID NO: 763532 - DNA, 82 bp, Homo sapiens
caacatagcggtgaaggcgaacgcggtctgcaagctgacgtatgtaattggcgtccgtggtaaccaatcaggaagaggatct

SEQ ID NO: 763533 - DNA, 90 bp, Homo sapiens
gtcatctttaactgcttggccgtgcttgccctgtcatcccacctgagaaccatgctcaccgaccctgactgatcctttgaaatactccag

SEQ ID NO: 763534 - DNA, 98 bp, Homo sapiens
gctaatggcaggcattttacaaggatgaaaactttcggaagagaaagttgcctgtggtaagttcagttgttaaagtaaaaaaattcaatcatgatgga

SEQ ID NO: 763535 - DNA, 50 bp, Homo sapiens
gagctggggagcccttctgcgccacagacacgaagatcgattgagaagtt

SEQ ID NO: 763536 - DNA, 100 bp, Homo sapiens
ctcttctttgacaagagagacaactctgactttgccgcttacaaacacgcagatggcaagaagattgatggcaggagggtccttgtggacgtggagaggg

SEQ ID NO: 763537 - DNA, 100 bp, Homo sapiens
attcatatgctacacaacttgaagctattcttgagcaaaaaatagacattttaactgaactgcggggtgctcctgatccaacagcaggtgctagtataga

SEQ ID NO: 763538 - DNA, 74 bp, Homo sapiens
agctgaccaagatgctatgtgagatcttgaaagtgggcgagttgcaattgatagatgtcacatgtaccctgctg

SEQ ID NO: 763539 - DNA, 111 bp, Homo sapiens
acgcagggaccgcggcggtaactgtggctagggaaacctggagcggtcagagcagatggagtggtttaataattataaaagatctcttgctacttatatgaggtcactggg

SEQ ID NO: 763540 - DNA, 98 bp, Homo sapiens
tcttattcagttccttggtgatgctattgttttgccagcgggagcacttcatcagccctttctaaggcacaaaatgatgtgatggaaatgaagatgca

SEQ ID NO: 763541 - DNA, 90 bp, Homo sapiens
accatgtggacatgctttcgggccttcaggatcttctccagccagtggatgtcgtatatgaatgacctaaaggtacaaataaagacggag

SEQ ID NO: 763542 - DNA, 50 bp, Homo sapiens
gtgaagaacctgaaggacacactaggacctgaaggagaagaaggagaagg

SEQ ID NO: 763543 - DNA, 75 bp, Homo sapiens
aaaatctcctgaagtctttggaaaggaggactactgagcccagccaggctgtatgccattgctgccaaagaaaaa

SEQ ID NO: 763544 - DNA, 100 bp, Homo sapiens
aagcgactgagtccgcgatggaggctcacgaggcccagggaatcctctggaccatcagattaccaatgaaagaggagaatcaagctgtgataggttaacc

SEQ ID NO: 763545 - DNA, 50 bp, Homo sapiens
gtggtcatgatgcacatgaacattcaagaaccatatttatttagagtcag

SEQ ID NO: 763546 - DNA, 88 bp, Homo sapiens
ctgcgcccggggcgcgcccaccgcgccgcatccatgttcgagctacctcggacctgaacagctgcctgactgcctgaaaggttgtgat

SEQ ID NO: 763547 - DNA, 75 bp, Homo sapiens
ctgtccgccaggccctgcaggacctgctttcggagtacatgggcaattggcagatgcctggagagccctcaagaa

SEQ ID NO: 763548 - DNA, 50 bp, Homo sapiens
gtacccacagtgcttcatgagaggagatctggaagccctcaaaaaggaaa

SEQ ID NO: 763549 - DNA, 73 bp, Homo sapiens
acatgagaccatagccaaacccccagcatggagcttttggagagtgtctttattctgagtgaaagaaaaggaa

SEQ ID NO: 763550 - DNA, 75 bp, Homo sapiens
ccgcccgtgcccacggagcccaaacagcaggatcaggcaaaaatgatcatgccgaaaaagtggcggaaaagctag

SEQ ID NO: 763551 - DNA, 76 bp, Homo sapiens
ctacgccagcggcgtcgagaggaccatcctgggtgctggccctgtgctggaggattactacagcatcccatttccc

SEQ ID NO: 763552 - DNA, 100 bp, Homo sapiens
tcttgttcaactgagaacttggagcttcggaagaaggtagaggttctagagaacactaatagaataccaagctgctattttacacttgaagagggagcac

SEQ ID NO: 763553 - DNA, 50 bp, Homo sapiens
cgatgacttcgtcacctatgagcacatgattaagtaccggtacatcccgt

SEQ ID NO: 763554 - DNA, 100 bp, Homo sapiens
caggactttgggtctgggtgagccttctcgtggcggcggggaccgtccagcccagcgattctcagtcagaattaaacaaccaccatgtcgagcaaaaagg

SEQ ID NO: 763555 - DNA, 117 bp, Homo sapiens
gtgacatggaaggggcagtacaagcttacgtctctgctcttcagtacaatcctgaagatttccaacccgcagcagcttcagagaccaactgggaatctgtcacaagctctatttcag

SEQ ID NO: 763556 - DNA, 100 bp, Homo sapiens
tttagggagtccatggccagaaaacttttgggcaccaagcaatatcatttatgctggctgaaatggcaatgaaagttgaactagctagaatgagttacca

SEQ ID NO: 763557 - DNA, 100 bp, Homo sapiens
gccagctggaaccagaccatgttggatggcaagcatgtggtgtttggcaaagtgaaagaaggcatgaatattgtggaggccatggagcgctttgggtcca

SEQ ID NO: 763558 - DNA, 75 bp, Homo sapiens
tactgaaaacaaatctggaacgttgtggaaaagccactggcagtgattcaagtggtgtcattgatctcacaatgg

SEQ ID NO: 763559 - DNA, 74 bp, Homo sapiens
gtggataagcacaaagtcaagagacagcgattggacagaatttgtgaagacaaggagccccaaactgtctcaca

SEQ ID NO: 763560 - DNA, 146 bp, Homo sapiens
cggtggaggaatttgtggctggctggatctctggtgagacatttttcttccttctgtcacatcacacccaatggatcgacgagaacgtgctaggagcccagctggacgttgaggccgcccattcagagatcctcaagtacttccag

SEQ ID NO: 763561 - DNA, 50 bp, Homo sapiens
ttgagtccaagttcaaccaagccattctgctggagccagttctgcttctc

SEQ ID NO: 763562 - DNA, 97 bp, Homo sapiens
ctcctcgctcatccgagccaccattgaacctcaagaaggcatgaagccagcccctgcagtgccgtccacccgcccctctgggcctgcctgtggctct

SEQ ID NO: 763563 - DNA, 83 bp, Homo sapiens
tttgccaccaatcccttcgatcaggatgttgtgctgattcctaaagaaaagcccccaatcacggttgtgggtgatgttggagg

SEQ ID NO: 763564 - DNA, 96 bp, Homo sapiens
ctggaccaggaggaggttttcaggaccaaaattgtggaaaagtcactctggctgaggccgcggaaggagcagggcacatacgccctgtccctcatc

SEQ ID NO: 763565 - DNA, 83 bp, Homo sapiens
aagaagacgaagaagcagaagcgtctgctcaggttgcagcaggagagaggtggacgacatccttggagaaggcagcgacgaca

SEQ ID NO: 763566 - DNA, 99 bp, Homo sapiens
acctcagagtcggtcggggaaggccacccagaataacaagcctttgtattcatttgaagataatgcagactatgtttatgatgttatgtggtcacctac

SEQ ID NO: 763567 - DNA, 75 bp, Homo sapiens
ccatcagctcagccaggtcttctcaccaaccaccaggagctgtgggccttcatcgtcaccaacctggcgagtgtg

SEQ ID NO: 763568 - DNA, 100 bp, Homo sapiens
cgaggcagctgtactaggactgggaacgggatttcagatgcatgccaggtttccactgattgccagaactcgagatcactacacatggatccccaaaatc

SEQ ID NO: 763569 - DNA, 100 bp, Homo sapiens
tatgcagtcacagttatgattggtggagaaccatatactcttggactttttgatactgcagtttggcaccaactggcccgtgtacatgaccaagccggat

SEQ ID NO: 763570 - DNA, 74 bp, Homo sapiens
aggagctgcagcagcatgtaaagtcagtgacagccccatagttgctttaatgtgaagtattttcctggagtcac

SEQ ID NO: 763571 - DNA, 75 bp, Homo sapiens
atgcgaatcgtcagggcattaggaacagtggaggccatgtgtcttttggcagtcagtccagatgggaattggcta

SEQ ID NO: 763572 - DNA, 51 bp, Homo sapiens
aagatcttctgttgtcatggagaatgtgacagtgatgataacatgggtgcc

SEQ ID NO: 763573 - DNA, 100 bp, Homo sapiens
caaagagctggtggcctcaggtgaaaagacttccttcgctgggcatctggctgggattcttgttggactaatgtacactcaagggcctctgaagaaaatc

SEQ ID NO: 763574 - DNA, 101 bp, Homo sapiens
ggtcgcgtctcggaaaccggtagcgcttgcagcatgataacgaaggaggcccaacttcattcaataaggagcctgacggatttatcccagacggtagaaca

SEQ ID NO: 763575 - DNA, 100 bp, Homo sapiens
agaacacaaataacttccacaacctgtatgtgaagcggcatacaaacgtgagggcccactgatgatggtgaagaagagatggaagaagacacagtcacaa

SEQ ID NO: 763576 - DNA, 75 bp, Homo sapiens
gacgcacgctcagctgaggaggacccccaaaggtttggtgcacctcgatttggaggaagtagggcagggccctta

SEQ ID NO: 763577 - DNA, 100 bp, Homo sapiens
aaaagattgaggagtctgaaacaattgaggattctagtaatcaagcagcagccagagaatgggaggtgaccaagaatatggcccaggtgaccaaagccct

SEQ ID NO: 763578 - DNA, 75 bp, Homo sapiens
ctgtgctcaagctggcctctgaggagcctcctgatgatgagaagcggcaccatgtactacagacggctcatccct

SEQ ID NO: 763579 - DNA, 75 bp, Homo sapiens
cctttgcagggaaaattgatgccagccaaacctgtaaacaactttatgagtctctggaatgaatggctgaaacta

SEQ ID NO: 763580 - DNA, 95 bp, Homo sapiens
tcttgctcggccgatgaagtgcagaggtttttttctggagagaagtggatgggccctatacctccagccgtgaatgccagactttaagattgccc

SEQ ID NO: 763581 - DNA, 74 bp, Homo sapiens
ccgcgcctcgcggcatggcgtcggaggggccgcgggagcccgaaagcgaggctgggctaagcagttccaagctt

SEQ ID NO: 763582 - DNA, 100 bp, Homo sapiens
atcttcaacaagaggacccaggagaaattcgccctcaaagtggtataagttgaaatccaaaccaggaaagaaggacaaggagcgaggagaaattgaggtt

SEQ ID NO: 763583 - DNA, 80 bp, Homo sapiens
tggaaggggagactctgctgacacccatcacccacatctcacagcaccatgactcctgtgaggatgcagcactccctggc

SEQ ID NO: 763584 - DNA, 101 bp, Homo sapiens
cacgtcaaggacctctacctgatcccgctgagcgcccaggaccctgttccatccaaactcttgccctttgagggaccagctgtggccagaagagctccgaa

SEQ ID NO: 763585 - DNA, 82 bp, Homo sapiens
gacctcacctgcatggacttccactatgaggggctgaggaagctgccctcgaaaccctccagaagacatctgtcctgcagag

SEQ ID NO: 763586 - DNA, 82 bp, Homo sapiens
cagcagcagccgcggagcagtagccgccgtgggagggagccatgaagcattacgagatgtggaagttcacgcagagccgctg

SEQ ID NO: 763587 - DNA, 82 bp, Homo sapiens
ctccttcggcagtccacccaccgccgccgcctcccagattcccaacctgctgagcatccgcacacccactcaggagttgggg

SEQ ID NO: 763588 - DNA, 75 bp, Homo sapiens
gtggcttcaagagactgatcaaattgtgagaggaaaacagcctacccgtgtatccaaagtgtgtacatcagtaag

SEQ ID NO: 763589 - DNA, 143 bp, Homo sapiens
gtctgtatccgctgctcttgtgacgttgtggagatggggagcgtcctggggctgtgctccatggcgagctggagagtcccacgaactggctgggtatacagaaatgtccagaggccggagagcgtttcagatcacatgtaccg

SEQ ID NO: 763590 - DNA, 100 bp, Homo sapiens
cagcttctatggccctgtgacctgcaggtattgggagattcacaactaagtcgccaggacccccggaagcctagaaatgcagaatcgaagccagaaattc

SEQ ID NO: 763591 - DNA, 100 bp, Homo sapiens
cacgactcctgaagacacacctgcccctggctctgctcccccagactctgttggatcagaaggtcaagttcgatatctcaatgcctatactggaatagtg

SEQ ID NO: 763592 - DNA, 100 bp, Homo sapiens
caacaagaagctgaacacccacaaccggaatgagcctgaatacacaagaagttcctgtgggaggagctggaactggtgcgggaggaggtgaccttcatct

SEQ ID NO: 763593 - DNA, 80 bp, Homo sapiens
accaagaagccaaagaactggctaggcaaataagctttaagaatcagatgggtgactcaaatatctccagccctgggtta

SEQ ID NO: 763594 - DNA, 75 bp, Homo sapiens
acaggaggggcaggaaattctttgaagttgtggacatcggatacccaaggagacgaagctgaagcaggagaagga

SEQ ID NO: 763595 - DNA, 58 bp, Homo sapiens
cgtgcccgaggggctcagcgccttcacccaagcgctttccaccaggtgagaagagtga

SEQ ID NO: 763596 - DNA, 100 bp, Homo sapiens
ccctgacggccacgaacttccgagtggtgcacgatctgattttctggagagatgtgaagaagactgggtttgtctttggcaccacgctgatcatgctgct

SEQ ID NO: 763597 - DNA, 100 bp, Homo sapiens
cagcgtcggagacggaggccctgccctcagagacgcgccccctagtggaagcagagtgggaagcagccaaaatgaagtttaatccctttgtgacttccga

SEQ ID NO: 763598 - DNA, 100 bp, Homo sapiens
gaagtatgatgactcctttgacgacgttgaccgcacactggatgaatggaagcccctggcctcccacgactacatcctgaagattgtgcccacggtttat

SEQ ID NO: 763599 - DNA, 51 bp, Homo sapiens
tgcgtcaatcagagcgtcctgtgcggcatgggcaagaaggacgaccccaag

SEQ ID NO: 763600 - DNA, 51 bp, Homo sapiens
agtataatcagtatgaagttcgaagttatggctcatagttcaccccagagc

SEQ ID NO: 763601 - DNA, 75 bp, Homo sapiens
atttgtgacccttacgcctggcttgaagaccccgacagtgaacagactaagaatatccaaggtatctccaagcac

SEQ ID NO: 763602 - DNA, 100 bp, Homo sapiens
ctgaacttaaaaagcagtctaaacctgtgaccacccctgaagaaattgcacagaaccgaacaatattttgggagtccaagtgacatggcttctactgcag

SEQ ID NO: 763603 - DNA, 75 bp, Homo sapiens
ggcgcctggcgattaccggtctcaccatggagcggaaaggtgatctgcaactctttcaccatctgtaatgcggag

SEQ ID NO: 763604 - DNA, 100 bp, Homo sapiens
attgctgaaaacagtcttatggaaggattttaccaaatgttgcaagaactctggagttcttatggtagtaaaatgccggaaagaaaattctgcattgaaa

SEQ ID NO: 763605 - DNA, 101 bp, Homo sapiens
agagggattcgtggtgaaggtccggggcttgccctggtcttgctcggccgatgaagtgcagaggtttttttctgagtgttgcggagataggaacatgggag

SEQ ID NO: 763606 - DNA, 109 bp, Homo sapiens
agaccgactggcggagcaccgccttccggcagaagctggtcagtcaaatgtcctggctataagtcaccatggcacagcaagctgccgataagtatctctatgtggataa

SEQ ID NO: 763607 - DNA, 97 bp, Homo sapiens
tctgcaagtctctggccccgcaggctggcactgggtgcaggttcgcagccctgtcaaccagctccgagccggcagcgaaacctgaagtggaccctgt

SEQ ID NO: 763608 - DNA, 87 bp, Homo sapiens
caggtccacttcgaaatttgctcttcagactgatggactcaactgtcccagatgaaatccaagagttactctttcaacctgatcaga

SEQ ID NO: 763609 - DNA, 100 bp, Homo sapiens
cctcattcagaacttcattggcagaagttgactgagatcagaggccctgtgatgatcgtgtcagcatacggcggcatcaagaaaggagagcaattttgac

SEQ ID NO: 763610 - DNA, 100 bp, Homo sapiens
ccaagatgccgcagtccaagtcccggaagatcgcgatcctgggctaccggtctgtggtgtcggagatgtatgcagtgtgacgccaagtttgactttctca

SEQ ID NO: 763611 - DNA, 123 bp, Homo sapiens
gccgaggcggtggcgctcaagtaccagcagcaccaggagtccctctccgcccagttacaagaattgttcaacctgaattgaaatcacttgcactgggtttccactcaatggttatacgagcac

SEQ ID NO: 763612 - DNA, 82 bp, Homo sapiens
ctctggtctaaaaagggtccagaagattgctatgctatgccttgtatgactaagacctcttaccaagaatacgtgtcagacc

SEQ ID NO: 763613 - DNA, 90 bp, Homo sapiens
agcttcgtgtccaacctgttcagtcaatgaagcctgtgagtggacacccttttctcaaaaagaacattgatgatggcacctcagatcgcc

SEQ ID NO: 763614 - DNA, 90 bp, Homo sapiens
gaagcagcccgggactgcgcagcgccccgcgtgccgtcctcctgcatatgcccaagaggattgggagtggaatggacaccagcagaagca

SEQ ID NO: 763615 - DNA, 98 bp, Homo sapiens
agatgttggtatatcctactttctggatctgtgcttgtgaaaggctccatggtcttgcctccttgcagccatgtgaagatgtgcttgcttcccctttg

SEQ ID NO: 763616 - DNA, 104 bp, Homo sapiens
aaccgcttcgtgcaactctccgggcggccgcacctgccagaaaccaatagagccatggcgactccctctgctgccttcgaggcccttatgaatggtgtgacaag

SEQ ID NO: 763617 - DNA, 100 bp, Homo sapiens
aacatctcatctcacgtccatcagtaaaaacgagtttgcccagagatcagaacaatggcctagtaactgcaaaaacaatggctcagcatgaagaactgat

SEQ ID NO: 763618 - DNA, 96 bp, Homo sapiens
tgccctcattaaagcagccggtgtaaatgttgagcctttttggcctggcttgtttgcaaaggaagagagaagggcacagttacctaagtatcaacg

SEQ ID NO: 763619 - DNA, 50 bp, Homo sapiens
ctggattccatgtagagacccctggagtttcagctcctggcatcagctct

SEQ ID NO: 763620 - DNA, 75 bp, Homo sapiens
gcactgtattctttacctgcttcccaatcccactgatgaggatcagcccatggcttggaagtcctaagcgatgac

SEQ ID NO: 763621 - DNA, 100 bp, Homo sapiens
aactggactgtcctctacagaaggaagcacaaaaagggacagtcggttacaggaggttccagtggcatcgggaagtgcattgctatcgagtgctataaac

SEQ ID NO: 763622 - DNA, 82 bp, Homo sapiens
tttgatgaaggctctgatgtatttcagatgatatgtgtcacaaagatgtctacacggaactgccagggaatggactcagtga

SEQ ID NO: 763623 - DNA, 100 bp, Homo sapiens
gtgttgaagacagtaaggatgttaatgtaaattttgaaaaatccaaacttacattcagatttgctcccattcatgctgaggctccagagttcatggaaat

SEQ ID NO: 763624 - DNA, 50 bp, Homo sapiens
ggagccggcgcccccggcgcgggtcagcccaagactaccccgtcggtcat

SEQ ID NO: 763625 - DNA, 100 bp, Homo sapiens
tgctgcacccacgaatctgcccacccctcctgtaacccagcctgtttcacttcttggcgcgggtttaagtggacgccaggtgcaccggacacaggctgtg

SEQ ID NO: 763626 - DNA, 146 bp, Homo sapiens
ctccgcgctcgcgctgccagtcgccgccctctctcccgcgcgcgcccggcgcttcggctccgctccctgtgcggtgctggagaatctggtaaaagcaccattgtgaagcagatgaggatcctgcatgttaatgggtttaatggaga

SEQ ID NO: 763627 - DNA, 90 bp, Homo sapiens
agctgtcactttgggagcggttctgtgccaacatcataaaggaaacaggtgagcagattgccatcaagcagtgccggcaggagctcagcc

SEQ ID NO: 763628 - DNA, 119 bp, Homo sapiens
aaaaacagttcctccacatcaaagcagaagaagaccgaagggaagacttccagtagctccaaggaggttaagttgtatcacggactgattcaccgagcccaaccgtactcaactcacat

SEQ ID NO: 763629 - DNA, 100 bp, Homo sapiens
gggccacccgcgagtccagcgtcgccgcagccccccaatgcggccgcgagaagcagcgggggggcaggcgatcgaagcatgtagagcgcatgaagtacag

SEQ ID NO: 763630 - DNA, 100 bp, Homo sapiens
cccgaatcctcatctttaatattgaaattcctatcactaaaggatttcctatcacagattctgctggccatattctctactccaaagaggatgcaaccaa

SEQ ID NO: 763631 - DNA, 152 bp, Homo sapiens
caaatgtgggatgaaaaacttccgtaacatccaggttgatgaagctaatttattgacttggcaagggcttattgttcctagacttcagaacccactcctgagaacagcggagccaggcgcttagaggaagaccaaatgctgccaggacacgg

SEQ ID NO: 763632 - DNA, 99 bp, Homo sapiens
gagaaccccgatcagaatgccaaatgtgtttgcatgctggtgccctgcaggagtcattaaatcaaaacttcatgctgatcatcacccaccgagaagtcc

SEQ ID NO: 763633 - DNA, 100 bp, Homo sapiens
aggctaccatggtctacaagactctcttcgctctttgcatcttaactgcagggtgtcttttatgaataatcaaaagcagcaaaagccaacgctatcaggc

SEQ ID NO: 763634 - DNA, 98 bp, Homo sapiens
agcacctccctctacgccaccaatccgccctggatcttcacccaggaggccccggaggaggggaccgggggcttcgagcatccgaagggtggatgagg

SEQ ID NO: 763635 - DNA, 90 bp, Homo sapiens
acagcatcgttcaaggtttccagtggggaaccagggagggccccctctgtgatgaatgtgcgggccagtgctattgcccaggacgcggac

SEQ ID NO: 763636 - DNA, 100 bp, Homo sapiens
gctggcgaacccgaaattgggcttggaacccgggagccagatcttggaccctgaactgcacctctgtcaagagtccgaaattgaagttcagaggaagaat

SEQ ID NO: 763637 - DNA, 98 bp, Homo sapiens
cgattctgagtgaattggcaccaagccttcccagttatcataaccttgaatggcgactagatgtacagtgtttcctgaggttataggcgggtgtttga

SEQ ID NO: 763638 - DNA, 100 bp, Homo sapiens
tacacaagtggagctccttttcctccacctaccttcccgaggtgttttgaatgctgtatcaaatgcctggggggcattccctatgcctctctgattgcca

SEQ ID NO: 763639 - DNA, 76 bp, Homo sapiens
aagaaattgatattttgatgaacaatattgaacgctatcttaaggctttacagatgccagttttctaacactatta

SEQ ID NO: 763640 - DNA, 100 bp, Homo sapiens
ttggtttgcgtcctgcactgaaaggaaatgacggattttgaatactcccccagttgcaagaggcgcaggaccgtggaagacttcaacaaattctgcacct

SEQ ID NO: 763641 - DNA, 100 bp, Homo sapiens
cccggcggggaggacgagaatcggtgtgttccagatttcggaaggttcacgagtgttgccgacacgccctcccaactgcagacatcctccctggaggacc

SEQ ID NO: 763642 - DNA, 90 bp, Homo sapiens
cagctgggagcggacgaagcgcgaagctggggattcagtttagctgcatttaaaagaaacaagaggaaactagagctggcagaaagggtg

SEQ ID NO: 763643 - DNA, 80 bp, Homo sapiens
ctgtgccccgccagctaccggggggactcatgccagagctcgtccgcatggtgctgaatggctgaggaccttcccagtct

SEQ ID NO: 763644 - DNA, 100 bp, Homo sapiens
tttgcggcacaagcaggtgatacatcctggtcttcaagaaggacaagaagaggcaagcatctcctcatctccaggatgtgaggctggaggggaatccagg

SEQ ID NO: 763645 - DNA, 50 bp, Homo sapiens
cctggccactaccaggaaaaagtccatctgggaagcgggatttgggttga

SEQ ID NO: 763646 - DNA, 75 bp, Homo sapiens
gcggcggagcgggagcgggtaccgggcgcgggcagagcgcggcggcgcggggagtgcctgcagggcaccatccgc

SEQ ID NO: 763647 - DNA, 109 bp, Homo sapiens
cgcggacggcgttggtttgaagaccttcagcgttgccctggcggagcagagacaggccctcggggtggagctttggcagcatgtaagcagctgtttgccaagaacccag

SEQ ID NO: 763648 - DNA, 110 bp, Homo sapiens
tgataaccatatcctgctgtgggatttacaggaaagctcgagccaggctgtggtttttagaacttcagccataaaaatgggcagaattttccttgatcatatcggtggta

SEQ ID NO: 763649 - DNA, 74 bp, Homo sapiens
ctacagacctcacagtgccaaatggagctggaagcagtccagtggatacctgcactcaaataacatagttgtgg

SEQ ID NO: 763650 - DNA, 80 bp, Homo sapiens
caaccccaagatgtcggagacacggtggaaacgcttatggtacaccaggggttggaaaaaccacactaggcaaagaactt

SEQ ID NO: 763651 - DNA, 100 bp, Homo sapiens
gccggacttcaatgcccagtccccagctcgccagcatccggccccacatcgcaactcttcgtaagtacacctatggcaagcacattctggccaagctgga

SEQ ID NO: 763652 - DNA, 75 bp, Homo sapiens
ccagccattgagaaaaatattgttaagaaaatggttgctttcaataaccaacttcttctttaagtggaaacaaag

SEQ ID NO: 763653 - DNA, 100 bp, Homo sapiens
ctcccctgctgaatctgagccacagtgtgatcccagctttaaaggagatgcaggagaaaatacggcattgctagaaaaattttctatctacgagtgaaac

SEQ ID NO: 763654 - DNA, 100 bp, Homo sapiens
ccggcggccgaagacactgcgactccggagacagcccaaatatcctcggaagagcgctcccaggagaaacaagttaatgcttttggaagaagaacatgcc

SEQ ID NO: 763655 - DNA, 100 bp, Homo sapiens
cgagttcgtcaagtctcagacaacctactacgcacagtgctaccgccacatgctggacttgcagaagcagctgggcagtggccacagatgtctttaattc

SEQ ID NO: 763656 - DNA, 98 bp, Homo sapiens
ggaggaccggccaacaggatcgctcaggatggacgtcttctactcaattccagggtctccctccactgctgtagtaacccgggtccggggcctcggtg

SEQ ID NO: 763657 - DNA, 100 bp, Homo sapiens
cttgtggaaacatctagatgtaacagccatgctcaggtacctgacaatgatgagcagtttgtaccagactatcaggctgaaagttgtaagtatagtatga

SEQ ID NO: 763658 - DNA, 82 bp, Homo sapiens
ttggatatttgcttggaaaaacgtgtgggtacgaccttggaattacatgaacgacagccttcgcaccgacgtcttcgtgcgg

SEQ ID NO: 763659 - DNA, 74 bp, Homo sapiens
ttccattcttttccttattcttctgatgtggatccagatggcaagtttggggcctacatgcaggtgcacattca

SEQ ID NO: 763660 - DNA, 96 bp, Homo sapiens
tggactctgcagagtgaagagaaaatagcaaacgatccagacggcagggagtgcatcaaaggtgtgaacacaggggcaattgtcattcagcgatgt

SEQ ID NO: 763661 - DNA, 96 bp, Homo sapiens
tgcccccggcgcgtcccccaggagccatcctgcccgcggggatcccgtcagccgagtcggcctcagctgtgtgcaacttcttcactaaagggctct

SEQ ID NO: 763662 - DNA, 101 bp, Homo sapiens
acggagccaggggcccgagggcggggaccggcggcgctggaggagcgaggcagctgtactaggactgggaacggaagaagaagaggacagtgctccagtga

SEQ ID NO: 763663 - DNA, 50 bp, Homo sapiens
gtgcggtgctgctcagtgcagttcaggaagcagaaaacttggtggccaca

SEQ ID NO: 763664 - DNA, 100 bp, Homo sapiens
cggccaaccaagttgcttttggtgtacagggtctgggatgggtgtacgaaggaagcaaggaggagagggcagtgagagataggaatctcctccaggttca

SEQ ID NO: 763665 - DNA, 75 bp, Homo sapiens
agtgctgtctggtggcccttctatcacttctatgcagcccgatatcagaatgaattagctggcgtagataccgag

SEQ ID NO: 763666 - DNA, 101 bp, Homo sapiens
gagaacgaccggctcctgctcaagatctcagagaaggaggaggtgaccacgcgcgaggtctcggcgcggaagatggccggcggcgtggacggccccatcgg

SEQ ID NO: 763667 - DNA, 82 bp, Homo sapiens
ggctctgggccttgaacattccgaaactgtcaagattggcaagtttaatggatcgagaagtggcgttgcttgctgaaatgga

SEQ ID NO: 763668 - DNA, 100 bp, Homo sapiens
gccggccgcctggtcgtgggactcggcatcgtggcttacagaagagacgaaatgtggtctgagggacgatatgaatatgaaagaattccgagagaacgag

SEQ ID NO: 763669 - DNA, 100 bp, Homo sapiens
aggatcgcaagctggatgagcttctaggcaaggaccacacgcaggtgcagagtctccttggaggtgacatggatatgggcaacccaggaaccctttcgcc

SEQ ID NO: 763670 - DNA, 100 bp, Homo sapiens
tctggaagaggggctggagcccacctgctttgagaagagcaatgacattgggggcctgtggaaattttcagaagcagaatctgaaactttctgaggagag

SEQ ID NO: 763671 - DNA, 90 bp, Homo sapiens
ctttgaagacgtggcttttgatgagaaaaaaaacgtctttgtggagttctggtgaaaatcctatttataagagtgccgtaacaactgtgg

SEQ ID NO: 763672 - DNA, 95 bp, Homo sapiens
cccggccacagcctgcagcggagcccacgagaggcagcgccatggcggagcagacctactcgtgtcaacaacaagtttgggcttcgctgtaagaa

SEQ ID NO: 763673 - DNA, 96 bp, Homo sapiens
gtttagaccacagacataaacagaaagtcttacatgacacaatggatctgaatcatctcttgaaaggattctcagcaagttacagaagtatctttg

SEQ ID NO: 763674 - DNA, 83 bp, Homo sapiens
gagcaatgcgcaggaataaggaagcgacctgcaaccgacgcttaaagcttttcaagccaggccaagaagctgtgaagtaccag

SEQ ID NO: 763675 - DNA, 100 bp, Homo sapiens
ctccaaacacagactgtttgacttagaatcttcccttttttactccattcaagagcagcattcataaatttccagccatgcctttcttggacatccagaa

SEQ ID NO: 763676 - DNA, 83 bp, Homo sapiens
cttcgactctcaaagcaataccaggatagctgttgtttcagagaaagcagccattgtttgatgtcctgtgactgagaaaccag

SEQ ID NO: 763677 - DNA, 83 bp, Homo sapiens
tgccgtctctggaggagtactggcaacagtttgctgacctctctgaggctgccaaccggaacaatgacgccctgcgccaggca

SEQ ID NO: 763678 - DNA, 98 bp, Homo sapiens
ctcgcgctggtggcggtcgcctgggtccgcgccgaggtgaatgaaaactttgccattgatttgatagcagagcagcccgtgagcgaggtggagactcg

SEQ ID NO: 763679 - DNA, 82 bp, Homo sapiens
tcggtgctgctgtgtggctgatcggaccggccactcaatattgcacacctcatatgggaggtgaagaactgaatgtcatcat

SEQ ID NO: 763680 - DNA, 75 bp, Homo sapiens
tggccttcgtacccgtcttgattgagggctgcctgacgcccgcccgcctggagccgcagcccacggaggtcggag

SEQ ID NO: 763681 - DNA, 75 bp, Homo sapiens
cttgggacccaccgctgccctcagctccgagtccagggcgagattgacgtgagtgaattcagatataactcaagc

SEQ ID NO: 763682 - DNA, 100 bp, Homo sapiens
tttgcctttaccactgaagattatgacatgtttgaagtgtgttttgagagcaagggacactttgccaccatcaccttgaccttcatcgacaagaacggag

SEQ ID NO: 763683 - DNA, 75 bp, Homo sapiens
ccggacatcaagtattcaccagttaatagcaccagagtcaccatcatgtctcttctcaccaccctctgaatctgc

SEQ ID NO: 763684 - DNA, 100 bp, Homo sapiens
catctgaaattacctctcagactttctgtaaaggaaaacaagatttggagcaagaggtggtggtggccttcccccgaagaaatttggtaatcctggggag

SEQ ID NO: 763685 - DNA, 75 bp, Homo sapiens
aggaaaaactggagagcttcatcaaaaatagtgatagctttgataatgtgtttcacataacagcagataatcacc

SEQ ID NO: 763686 - DNA, 75 bp, Homo sapiens
gatgcacgttccatccggcgctcagctgggcttgagctgcagatctgggacacggccggccaggagcggttccgc

SEQ ID NO: 763687 - DNA, 75 bp, Homo sapiens
ctcctcctcttgcccgcgcaggcacccctctggctgctcagtcctgcctcaggtttgatgaacttgtgaaaaaat

SEQ ID NO: 763688 - DNA, 82 bp, Homo sapiens
cgacttcgtcttcatgtttctcttcgggggcgtccttatgacccggcgccatcgccctgagtcagggtctgggagccgagag

SEQ ID NO: 763689 - DNA, 100 bp, Homo sapiens
cggatggggcaggatggctgcgttgacacgtcttatttaatccacatcatagggcagagcggcttgggtaaatccaccttaatcaacaccctcttcaaat

SEQ ID NO: 763690 - DNA, 75 bp, Homo sapiens
ggtggacatcaagccggataagtgtccccgtagagtcaaccgcctcacagcatggaaccacaggttactctaaat

SEQ ID NO: 763691 - DNA, 82 bp, Homo sapiens
attgaagagagcagttgaagaagtgaagaaattattggtacctgcagtgagttgcctttgcctggaggaaaatgtggaaaat

SEQ ID NO: 763692 - DNA, 50 bp, Homo sapiens
gcacacagtctactatcaccgacaggtgatgggcagaatctgtttacgaa

SEQ ID NO: 763693 - DNA, 82 bp, Homo sapiens
ccttcggcagtccacccaccgccgccgcctcccaggcctatgaaggggtgctgcagctggtggaggctcgcgggcgctacga

SEQ ID NO: 763694 - DNA, 60 bp, Homo sapiens
agaagtaccaggaggcgttggccaagggagcgagaacccgagcagcgccatgagcaacac

SEQ ID NO: 763695 - DNA, 100 bp, Homo sapiens
cccacaagcgcattctgaagttcctcaaattgtttccgtcatggaaatgatgagtcagaagattcagcagctcacagccctgggggcagctcaggctact

SEQ ID NO: 763696 - DNA, 74 bp, Homo sapiens
aaagtgaggctgctggagggtgacaagctcctcgcacagcacagacgcagtcttcagcaaggaagtgctgggaa

SEQ ID NO: 763697 - DNA, 97 bp, Homo sapiens
gatttctcttggatttggctacacacttatagatcttctgcactgtttacaggcacaggatgtgatcttcgtggtggaaagctaaattttaaaacca

SEQ ID NO: 763698 - DNA, 85 bp, Homo sapiens
acattggtgtgatcaatgcacctcaacaggtacgacaacaattccacgatgccaaattcatggcagacattgatctggatccagg

SEQ ID NO: 763699 - DNA, 75 bp, Homo sapiens
agggagggatcgggttctcctaggaagtttcagaggctaagaatattgtacacaaagattcttgatgttcttgag

SEQ ID NO: 763700 - DNA, 75 bp, Homo sapiens
cgaaggacttcggcgcgggactcaagtacaactcccggcacgaggtggtcctgccatcatggctgtcctctgcaa

SEQ ID NO: 763701 - DNA, 75 bp, Homo sapiens
gacatcgacgccgcctggcaggccctgcgcaccagaaatgcactcggtgatggaaagagagccactattctgaag

SEQ ID NO: 763702 - DNA, 75 bp, Homo sapiens
atcgtcgagaagcctatcatcgggtggttctcttcccaaagtggaagccaaattcatcaattatgtgaagaattg

SEQ ID NO: 763703 - DNA, 75 bp, Homo sapiens
gcaaaggcttggagaagtccagggcgacaacaagaattatatccagatcgagagacagaagattctgaaagggtt

SEQ ID NO: 763704 - DNA, 82 bp, Homo sapiens
cggagcggtccgcgagccaccgaggcccagaaacctctgtagaggagcaggatgcaaccgacaggctgtggccggacagctg

SEQ ID NO: 763705 - DNA, 83 bp, Homo sapiens
cacgcttcctctccagagtgatcaagtgtgacccgtacatccagcagtggtcattcgacaacgaaagtcataccgtagaaaag

SEQ ID NO: 763706 - DNA, 100 bp, Homo sapiens
gaaagaaaagaaaaaaaagagcaagaaacagaaatatgaaaaaaacaatgagtcatctgatagctcatcaggaggtggggaagacagggctccagctacc

SEQ ID NO: 763707 - DNA, 75 bp, Homo sapiens
aggcccttttggatcttcatgccctgggttctgcccgcacggacccccatgttacactcctcttcctgggtccaa

SEQ ID NO: 763708 - DNA, 100 bp, Homo sapiens
gtatctgtatggatgggcgggctgacctcatcctgccttgtgctcacagcttttgtcagaagtgtattgataaatggtgaaaggtgtagcagtcactcgg

SEQ ID NO: 763709 - DNA, 100 bp, Homo sapiens
tgtggggatctggcactgtggttcctgcatgaagacagtggctggcggtgcctggacgtacaaaaacagcacttcttctcagtctcagacaagtactgcc

SEQ ID NO: 763710 - DNA, 75 bp, Homo sapiens
tctaggccttttagaaaacatggtagatttcgggcagacaacttgaacaagctgaagaacctatgcagcaagaca

SEQ ID NO: 763711 - DNA, 83 bp, Homo sapiens
gtttgacaggcgattctcccctcattttgtaccgaggagaaggcattgtatatgggacactagaggaggtgtgggactgtgtg

SEQ ID NO: 763712 - DNA, 51 bp, Homo sapiens
gaggctgagaataccagaaaatgcagataaaacgtcactgtgcagagcctt

SEQ ID NO: 763713 - DNA, 50 bp, Homo sapiens
cttttccccatggcagcccctgttctggagcattgggctcaggatctgaa

SEQ ID NO: 763714 - DNA, 90 bp, Homo sapiens
ccgctgtgttgattgaggacgttcccttcacggagaaagattttgagtgctggagaatctggtaaaagcaccattgtgaagcagatgagg

SEQ ID NO: 763715 - DNA, 83 bp, Homo sapiens
ggaatctgcttttcaagtatgccaccaacagtgaagagatggagaggagaaaacctatggtggctgtgaaggacctgatgcca

SEQ ID NO: 763716 - DNA, 50 bp, Homo sapiens
ctgagagatctccaagaattacaggtaacaaatatactctggagactaga

SEQ ID NO: 763717 - DNA, 91 bp, Homo sapiens
agatcttagacatccctttccatcaagtgtcctacgtaaaggagtattggaatgatgtgttcagcatccagcacgtgtatggtgcccagca

SEQ ID NO: 763718 - DNA, 50 bp, Homo sapiens
ggtcaacaagcttgacatggagcaactgaacgaggaagggatgctgttgg

SEQ ID NO: 763719 - DNA, 100 bp, Homo sapiens
cagaaaatgccaaggcagtttgccccacagagcttgtacaacatgatggtggatccaaacttctacagcaaaaacttacttcttttaggaaagacatact

SEQ ID NO: 763720 - DNA, 96 bp, Homo sapiens
attctgctgttcagcaggagaaaatttcagagctgcaaaattatcagggtgctgaaaagtcacccaccacttcagctgaccttaagtcagacaaag

SEQ ID NO: 763721 - DNA, 100 bp, Homo sapiens
gcggccgccgcggcattcggggaatctgcagggcagggttatgtaccgaaggactctaccgtgtcagcgggaataaaactgaccaagacaatattcaaaa

SEQ ID NO: 763722 - DNA, 96 bp, Homo sapiens
agatgccgacgaaatcctccaggaggagatcaaggagtacaagggtgagaaaattcatgaagacatctttgacatcatagaccgagaagcagatgg

SEQ ID NO: 763723 - DNA, 83 bp, Homo sapiens
ctcgctaggcgccctaagcaacagagtttggtgccctggttgtcagatgttggaaagcagtaggacggaacatactcttcgtg

SEQ ID NO: 763724 - DNA, 100 bp, Homo sapiens
atcattgctttgattctgaatgacataaaccctcttggtaaataccgaatggacctggtgctccagctaaaggtacctgaagctgttcactttcctgccc

SEQ ID NO: 763725 - DNA, 50 bp, Homo sapiens
tgggacggagtgcgagcctggaaaggtaaaaatgttgtacatcagctctc

SEQ ID NO: 763726 - DNA, 100 bp, Homo sapiens
caaataattgtcagtctaacagaatcctgtcggagttgtagccatgccctagctgatgttctaatcatgtcagataaagatgatattgagactccactgc

SEQ ID NO: 763727 - DNA, 83 bp, Homo sapiens
cttcactggtaatgtgtccattcgagggcggatcctctctgaatcttatcttggctttggatcttagaagagaatcactaacc

SEQ ID NO: 763728 - DNA, 100 bp, Homo sapiens
ccgtcagccccacgtcgccggcctggaggggcgaagaggacgagggggccaaggcttcctccgggacccaacatgagtgaagtttcctgcaagaaacggg

SEQ ID NO: 763729 - DNA, 51 bp, Homo sapiens
gcggcgagcggttccttgtgggctaggtttacccaaggtccagcctagccc

SEQ ID NO: 763730 - DNA, 74 bp, Homo sapiens
ctccagtgctacgtgtccctggcattttaggtgtcggttgggtagccggcagcaaaagtggaccaagaaacctt

SEQ ID NO: 763731 - DNA, 75 bp, Homo sapiens
ctcaccgacagtgccctgagggccttcgagagctaccgcgccagacaggtgtccctggccagtgtccttccacct

SEQ ID NO: 763732 - DNA, 83 bp, Homo sapiens
ggaatgtggcgctggatccggcagcagctgccaacaagtcccaaatttggaaaagctgactcatatgaaaagctggaaaaact

SEQ ID NO: 763733 - DNA, 50 bp, Homo sapiens
gagcctgccacgccgaggacgtggatggatttgcagccgctgcaagtgtg

SEQ ID NO: 763734 - DNA, 88 bp, Homo sapiens
cctgcatgtactgggggattcgcagggaggatgtcgggacaccccggaagctgggaaatggtctggcaccttccacgctctgtagttt

SEQ ID NO: 763735 - DNA, 100 bp, Homo sapiens
cgatgccccccggagctctgtgcacctccactgaaacgcaaggagcagacagaacctacaccatccgtgagaactgataaatttcaaacggaagagagtg

SEQ ID NO: 763736 - DNA, 83 bp, Homo sapiens
gcttggacgaagatggggagaaggaagcgagactcatacgcaacctcaatggcacccaggcatgtggaatatgctcatagtgg

SEQ ID NO: 763737 - DNA, 73 bp, Homo sapiens
agaattgcacttggaggacaaggcttttgatgaggccattgctgaacttgatacactgaatgaagactcatac

SEQ ID NO: 763738 - DNA, 95 bp, Homo sapiens
tcttgccaaggattgtgatcttcaggaggatgctggtttaggtgaatttcgaattcgtgacctgaatgatgaaattaacaagctgctaagggaga

SEQ ID NO: 763739 - DNA, 82 bp, Homo sapiens
aggaccgggaggctcccgggcttgcgtggggccatgtttatgagtggactaagtgaaagcaaacaaacccatgtacacctga

SEQ ID NO: 763740 - DNA, 51 bp, Homo sapiens
ttgtgggccaagcaggagggaaagatatttctccctcgagtggctgggaaa

SEQ ID NO: 763741 - DNA, 98 bp, Homo sapiens
aaagatccctggaatatgaagagacacagtatggtagccacacccccaggtcaagtttacccatgggggaactggttccagccaaaccgcaccaacct

SEQ ID NO: 763742 - DNA, 75 bp, Homo sapiens
attccaagtaactcttatttggtaagaactcagggccctatcctcacagcaagtggcaaaaaccctgtaatggag

SEQ ID NO: 763743 - DNA, 82 bp, Homo sapiens
cggcgactggacttacgaggagcagtttaagcagtgcctccggagccagcgtggtggccatagacaacaagatcgaacaggc

SEQ ID NO: 763744 - DNA, 74 bp, Homo sapiens
agcgaagaaccttttccctaatacgtacctcattgtgggagatttggtgcttccagatgtgagttatcaggtgg

SEQ ID NO: 763745 - DNA, 90 bp, Homo sapiens
ctcgccctccgacgctgctcagccataaccagcagaccacagcattcaggcatcctgtgacgggacagttttctccagaaaatagtgaat

SEQ ID NO: 763746 - DNA, 74 bp, Homo sapiens
atcccagcctcaggcgtgcgcggacggtgtgcggttcctggtccagaactttacacagaaaaggtgctcaaagg

SEQ ID NO: 763747 - DNA, 74 bp, Homo sapiens
aagagcagcggaaaatgatccagtcacagacatatctgaagagatggattaagaatgctttggattaaggattg

SEQ ID NO: 763748 - DNA, 75 bp, Homo sapiens
tgcctcctgcctgttcacaaatcgctgggagagctgtacatgatgctggatgagtactttgaggagcagatgaag

SEQ ID NO: 763749 - DNA, 87 bp, Homo sapiens
gtggtcagtgaacctatcgaaggacatgaagactaccacatgatgcaaatgcagccctgaggatttggctactgcatataacaacag

SEQ ID NO: 763750 - DNA, 97 bp, Homo sapiens
cggcgacatactacctctggccccgagatcagaatgccgcttcacggtgatgatatggcatctgccagctctagccgggcaggagtggccctgcctt

SEQ ID NO: 763751 - DNA, 89 bp, Homo sapiens
cgctgagagcctcacgagtcgaggtcctgcaggtggagctccggcagccgccctgactgggctggcttagatgaagatgaagatgcaca

SEQ ID NO: 763752 - DNA, 100 bp, Homo sapiens
ctgccctgcgcccggggcgcgcccaccgcgccgcatccatgttcgagccatctggctgctgtgcacaggcgctcgtgaggctgccttccggaacattaag

SEQ ID NO: 763753 - DNA, 82 bp, Homo sapiens
cgagaagcctgaaaagtcgcagcgagctggagccgccggaggtaatggaactgctggtccatctgaataaacgtataaaaag

SEQ ID NO: 763754 - DNA, 83 bp, Homo sapiens
accccgtggggtggtgcacacagaacaacaaggtgttgatgccgccggacggatctctctaggagctgacactcgaaccttca

SEQ ID NO: 763755 - DNA, 100 bp, Homo sapiens
aggtcccccacggcccttcaggatgaaagctgcggtgctgaccttggccgtgctcttcctgacggggagcacctctccatccgaggcttcatctggtggc

SEQ ID NO: 763756 - DNA, 75 bp, Homo sapiens
agatctgcgtggtcatgttggagcttcccgtggaggatgacattgacctcagtgatgtggagcttgatgacttag

SEQ ID NO: 763757 - DNA, 100 bp, Homo sapiens
cctgaacaagtcccagctgaagctgggcatctggggcggtgctggagaatctggtaaaagcaccattgtgaagcagatgaggatcctgcatgttaatggg

SEQ ID NO: 763758 - DNA, 98 bp, Homo sapiens
caggactcactgaaggagtttgtgcagtttgtgtgctcggatggctcgggccaggccaccggacaggggctgataacatccggaaatactggagccgc

SEQ ID NO: 763759 - DNA, 74 bp, Homo sapiens
aagacgctggggctaagacaatgataaaaagttgattgcagaaggacctggggaaacagtattggttgcagaag

SEQ ID NO: 763760 - DNA, 100 bp, Homo sapiens
tctactgataggcaggttaccatcactggatctgctgccagcattagcctggctcaatatctaatcaatgtcaggtccacgctgcttttatgagctgtaa

SEQ ID NO: 763761 - DNA, 50 bp, Homo sapiens
gagcaagcggaggacctacgccggcctggcttttcctccgcaaccatgtc

SEQ ID NO: 763762 - DNA, 75 bp, Homo sapiens
agctgaggctggagctgagcagagggcagggaggcaagtggtggcctgagagatccaaaacgctaacgatgtatt

SEQ ID NO: 763763 - DNA, 75 bp, Homo sapiens
gtcaggttgaaaatggaagagtaattgcctgctttgattccctaaaggactatgacttgagccagctgcagcagc

SEQ ID NO: 763764 - DNA, 100 bp, Homo sapiens
tggcggcgctggagagggggcgctgagctgttggggttatgaatactgatggcactgggagacgagtactagtggaagacaaaattcctcacatatttgg

SEQ ID NO: 763765 - DNA, 83 bp, Homo sapiens
ccaccgaggaaaaggaatcgtatcgtatgtccgctatccagaacctccactctttcgctctgcttatgataatgtcaacaaag

SEQ ID NO: 763766 - DNA, 100 bp, Homo sapiens
cttaaggaacttacgcacttaaaataattgggcagaagagaagcagtgaaggagtgcagaggcatcacctgaaagaacaccttccaccatgaccacctca

SEQ ID NO: 763767 - DNA, 101 bp, Homo sapiens
aagattttaaaaaaatcccatgaggagaaggcattctaatttaggcaggagtagggctgattggagccattgtacagtgtcgggaacataccaggacactg

SEQ ID NO: 763768 - DNA, 100 bp, Homo sapiens
cgtctcttccatctgctgctcacctcagctgcctgggtccccgacgagagccagctgtcctggataatgaaagacttactgcagaggagatggatgaaag

SEQ ID NO: 763769 - DNA, 90 bp, Homo sapiens
ccctgagcgggcgccccgtcaaaatccgaaagattcgggccagagacgacaacccgggcctccgaggtgctggagaatctggtaaaagca

SEQ ID NO: 763770 - DNA, 83 bp, Homo sapiens
cagcagccgagtctgacggcgccggttcgctgcccggtccgcccgcggtgagaggtgagaagccctaccactgcaactgggac

SEQ ID NO: 763771 - DNA, 100 bp, Homo sapiens
ccgcggagctgctgcagtccttcgcgccctcctcgccctccccaccgacatcatgctccagttcctggaaaaatgaggaagctgtgagtaccagtggaag

SEQ ID NO: 763772 - DNA, 100 bp, Homo sapiens
tgcctcagcctcccgaatagctgggattacagggaaatcctcattgacgattcaatttgttgaaggccaatttgtggactcctacgatccaaccatagaa

SEQ ID NO: 763773 - DNA, 100 bp, Homo sapiens
tctggtggaaaagactttatggctaaaaggcttaacccaggcatttggagggtttctcatttggcctgggttgctcatcacccatggtggtaaaatttgc

SEQ ID NO: 763774 - DNA, 75 bp, Homo sapiens
ggcatttgttgctcagaatacaggcagaggcaaggctggcagcaaaacgggctgcccgggcagaagcaagagata

SEQ ID NO: 763775 - DNA, 89 bp, Homo sapiens
gagactcacgggacgcgacgcgccccgcctcccccgtccggtccctctctccacggtaaggggggacggcaaaacagaacagaaaggcg

SEQ ID NO: 763776 - DNA, 96 bp, Homo sapiens
accacctcagcccccactcccagtggaggcggcaccgggggctggtgaaaaggaagccacaggcctgtgaataccagggcctggtgaagcacacag

SEQ ID NO: 763777 - DNA, 83 bp, Homo sapiens
gcaccaagtggcgaaggagccggctccaaggtgtccttaagtttgctcgcttggtcaagtcctacgaagcccaggatcctgag

SEQ ID NO: 763778 - DNA, 98 bp, Homo sapiens
gcacgatgagctcaatcggcactgggaactgataaatttcaaacggaagagagtggcagcatttagaaagaatctaattgaaatgtctgaactggaaa

SEQ ID NO: 763779 - DNA, 83 bp, Homo sapiens
aagcagccgatccagcctgcggagcctgtggggcaggcattggaatggatacttgtgtcattcctttgaggcacggtgggctt

SEQ ID NO: 763780 - DNA, 75 bp, Homo sapiens
ggctccttaccagctcacctctcaccgcgcatgtttggagttcttcaccaaaggacatggatgaaaatgaaagca

SEQ ID NO: 763781 - DNA, 100 bp, Homo sapiens
cttatccagacccaatggaacatcagcaatgcttctgctctgcttatgataatgtcaacaaagttcgagtagctatcaagaaaatcagcccctttgagca

SEQ ID NO: 763782 - DNA, 105 bp, Homo sapiens
cggcgcgagactgcggccgaagcgtggggcgcgcgtgcggaggaccaggcgcggcgcggctgcggctgaggaagctcttcgtgggcggtcttgactggagcacga

SEQ ID NO: 763783 - DNA, 75 bp, Homo sapiens
gcctgggcagcatccagcacctgaagaaccgggatgccggtggtccgtggtggacagacagtgcccggccaggcc

SEQ ID NO: 763784 - DNA, 98 bp, Homo sapiens
ggcggccgaggcggcggtgtgggcgcgtcaggccgcgacgagggcgctgagatgaggacggggacttggttgccttttccagtgacgaggaattgaca

SEQ ID NO: 763785 - DNA, 75 bp, Homo sapiens
tccggatgctcatccataaaactgaagatgtgaatactctgtgctgcaggtggagaaattttcagcctgtgttta

SEQ ID NO: 763786 - DNA, 100 bp, Homo sapiens
aagaattctcacctgccatcggaagttctgtacatgctgaaaaacgttcgggacctccagttctgctccagtcttggaggaaggggacacagacccctgg

SEQ ID NO: 763787 - DNA, 96 bp, Homo sapiens
tcaacagaagatttgctctatgatcgtgataaagcgccaaatcttaaaggcagaccacgcaaaaagaaaccatgcccacaaagaagagattcattc

SEQ ID NO: 763788 - DNA, 83 bp, Homo sapiens
cagtgatctgccttaagggcagtcaatggtcagatattgaagagttctgcaatcgtctcatggactgattggctctcattcag

SEQ ID NO: 763789 - DNA, 100 bp, Homo sapiens
gtaagatcccagatgagatcaatgacagagtgaggtttctgcagacaatcaagcacctgttgaaggaaaaagaagatccatccttatagaaatagttgaa

SEQ ID NO: 763790 - DNA, 50 bp, Homo sapiens
aaggtctttgtcaagaacccagagtcggcaggaatagagttggagcggtg

SEQ ID NO: 763791 - DNA, 82 bp, Homo sapiens
cgcgcctgcgacctgcccgcctggttctcagagtacattcacgcccaggtggcatctggcaaagggaaactcgctcctggct

SEQ ID NO: 763792 - DNA, 97 bp, Homo sapiens
tgcctgtgctccgcgtctctcatgcagaggaggaagctggcaggctgggaaccacagcgccttctggggcatgaccctggatgagggcattcgctac

SEQ ID NO: 763793 - DNA, 100 bp, Homo sapiens
agcttgctctaatgctttctggactaattgaagaaaaaagtaaactacttgaaaaatttagccttgttcaaaaagaggctagaaaatattaaccctgaag

SEQ ID NO: 763794 - DNA, 83 bp, Homo sapiens
cccagcccccatcgagaaaaccatctccaaagccaaagtctaaagcatcacaaggtagtgaccttgaacaaaatgaagcctca

SEQ ID NO: 763795 - DNA, 97 bp, Homo sapiens
gactggaacagctactacgcagacacgcaggagttcctccgtgtcacaaagcagtacctgccccacgtggcgcgcctctgtctgatcagcaccttcc

SEQ ID NO: 763796 - DNA, 82 bp, Homo sapiens
tcgcgcccgggaggaaggaacgaggcaaggagctaaagcagcgtgcgttcagccctgggcaactattggatgattatccgaa

SEQ ID NO: 763797 - DNA, 90 bp, Homo sapiens
cttcgggcgcgctgtacagcaagtcaatgccatgactggcacagcctccaggttggcgggctcatctgcgctggggttctgtgcgccatg

SEQ ID NO: 763798 - DNA, 129 bp, Homo sapiens
tgcctatacacagaattacactgaagaagtagagtatttcaaccataaagacatcttaattgggcacgaaagaggtgctggagaatctggtaaaagcaccattgtgaagcagatgaggatcctgcatgt

SEQ ID NO: 763799 - DNA, 82 bp, Homo sapiens
tggaggcctacttgcagcatattacctatcaggagaggaggaatcccgttctgcttccagaagtggaagtgctcacggatcg

SEQ ID NO: 763800 - DNA, 83 bp, Homo sapiens
ccccggtgcacccgcaacaggcgttttgcaatgcagatgtaggccagaagcggactcctagaagaggggagcagcaaggatgg

SEQ ID NO: 763801 - DNA, 75 bp, Homo sapiens
caggaccccagatgtctgacagccctgtgtgacaccaagataagtaacatgttggagtccggggtgacctggtct

SEQ ID NO: 763802 - DNA, 50 bp, Homo sapiens
cagcaggacgtcactgttggaagaatatgccaccacgggctgttccctga

SEQ ID NO: 763803 - DNA, 95 bp, Homo sapiens
ttataaccaccccttgcactttgttttcaatgacaccaagttggacgctatgctggaagaatttaagaaagacaatgcagatcttcgtgaagact

SEQ ID NO: 763804 - DNA, 75 bp, Homo sapiens
ctgagggcgcagaggcaggcagtcctcctccgcctcctcctctctgcatgcgcgtcagagcccgtgccaagaaca

SEQ ID NO: 763805 - DNA, 100 bp, Homo sapiens
actggaacttcaaaaagttctgaaaacatgttgacttgtgcaccatggacaattttgctgagggagatttcactgtggcggattatgccttgttagaaga

SEQ ID NO: 763806 - DNA, 100 bp, Homo sapiens
ctggggccagggaaccctggtcaccgtctcctcagcagccttcgacgacgcagtggaagaacgagtgatcaacgaggaatacaaaatatggaaaaagaac

SEQ ID NO: 763807 - DNA, 101 bp, Homo sapiens
cctgtttctcacatttgtttcattgaagaaatagttaagcagggaggagagagcgatggcttttttcacccagaaggccagccccagcggcttccccagcc

SEQ ID NO: 763808 - DNA, 75 bp, Homo sapiens
tgaaatactgaaagaaattcgagaagctgcaaatgccagacctctttgtttttagacatgaattggccataatga

SEQ ID NO: 763809 - DNA, 82 bp, Homo sapiens
gctggatgggaagttaatgtttacggcgaagtctactcaacgtttccaaggtgtgggcaagagcagtttactgttgcgtttt

SEQ ID NO: 763810 - DNA, 88 bp, Homo sapiens
tcgccatggccgcggttcccgagttgctgcagcagcaggaggaggaccgcagcaaggtctggagcccggcactgtggtcataacagag

SEQ ID NO: 763811 - DNA, 100 bp, Homo sapiens
ctggccctcatgtacgagtccgagaaggttggggtcgcctcttccgaggggcttcataaaagtcagagttcatgtttgtcaggacctaatgaagaacaac

SEQ ID NO: 763812 - DNA, 74 bp, Homo sapiens
ggatacagagggacagaggcctactgtacatggcacatggaaacatgccctgaactgtcacagaatgaaaccag

SEQ ID NO: 763813 - DNA, 100 bp, Homo sapiens
aagttttggtggcacgcagcctggggactctgcctcgtgccgctgagcctggcgcagatcggttctggctccttggcagcaatggctgtatttgaagata

SEQ ID NO: 763814 - DNA, 74 bp, Homo sapiens
cacaaccaaactagaaaaggaggaagaggaagatgatggagatttgcctgtggccatcttcccatttacccgga

SEQ ID NO: 763815 - DNA, 100 bp, Homo sapiens
ccagcattacacgatgcacttaatgaccctaaaaatggcgattctgcaaccaagcacctgaaacagcagttagtgaaacttccatgccagaccaacatca

SEQ ID NO: 763816 - DNA, 87 bp, Homo sapiens
gagaacatggactcatcttcatggaaacgtctgctaagactgcttccaatgtagaagaggtgtgatcccctgggcccgtttgttgtc

SEQ ID NO: 763817 - DNA, 89 bp, Homo sapiens
ctcccaggtgtctgagcacagcatcatcaaggacttcaccaagcaggtattgttgcagcatctggcagtgagactgaggatgaggacag

SEQ ID NO: 763818 - DNA, 82 bp, Homo sapiens
cggcccgcttcctggaatggcaagcgcagcaacaacagagagcacgtgacctcctgccccccgaggtctgcagtctcctgaa

SEQ ID NO: 763819 - DNA, 90 bp, Homo sapiens
ggctggctggatctctggtgagacatttttcttccttctgtcacatcacacccaatgagaggaaaaaccacccttatctgcagaaacaca

SEQ ID NO: 763820 - DNA, 88 bp, Homo sapiens
acgacacggtgccgctgacagcagccatcgaggcgagccagagcctgcagtcccacacgatttgctatgggatcatttatggaatggg

SEQ ID NO: 763821 - DNA, 96 bp, Homo sapiens
gccctggacgtggtcatgaggcacttgccatccatgagaagagatcacaaaatggctcttcttcagatggcaacagtggaagaagctattcaggcc

SEQ ID NO: 763822 - DNA, 100 bp, Homo sapiens
ccaggcgagggaagccctcaagaagtacttattctactttgagagggaacagctttctcaagttctcgatgccatgtttgaaaggatagtcaaagctgat

SEQ ID NO: 763823 - DNA, 100 bp, Homo sapiens
ctacaaccggggctgcggtcagcgcttcgatcctgagaccaattccgacggtcctgagggagtctaacaagttagcagaaatggaagaaccacccttgct

SEQ ID NO: 763824 - DNA, 90 bp, Homo sapiens
ccatctatgactccaggtcttcagcacccacccaccgtggtacagttttagttactatccagcagaaaacttgatagagtacaaatggcc

SEQ ID NO: 763825 - DNA, 78 bp, Homo sapiens
aaactcaacttgctgggccggtgcaactattcgcagtccgagcgtgacaaccatgagtggaaaaaactaattatggtt

SEQ ID NO: 763826 - DNA, 82 bp, Homo sapiens
aagacgtcatcttcttctaaaagggccgtgactcaagagttgaagtattgataacaccaaggaactctatcacaatttgaaa

SEQ ID NO: 763827 - DNA, 100 bp, Homo sapiens
gctttcgattccgtgttcctgcgcatcaaacaacagctgttgcttatttcgaagatggacgtagatgacattaatgctgataagaatatctcttctgcac

SEQ ID NO: 763828 - DNA, 100 bp, Homo sapiens
gccgcttcctggcatgtcagagaacccctccgtctatgtgcctggtgttttcaaaagtggggacagtgaagagctgctccatctccaagaagaagaacaa

SEQ ID NO: 763829 - DNA, 100 bp, Homo sapiens
ttgttggcaaggattctgcagaaaaattatccctacattgcaaaggaaaataattgctgccttttgcatccgcgttggctccgtccccaggatcttcccg

SEQ ID NO: 763830 - DNA, 110 bp, Homo sapiens
atctccagaatgtcagcatggaggctgctgggcaggtcatgagtcaccatgacaggtgatttggcttctgcacagttaggaggagcaccaaaccgatgggaggttttgtc

SEQ ID NO: 763831 - DNA, 75 bp, Homo sapiens
cgccgaccactgcgtccagctcatcgcgccaacctttgtacggcaccactgggtacacagacgacgccaggacgg

SEQ ID NO: 763832 - DNA, 82 bp, Homo sapiens
aagaaaaaagaagaagtccccgagttcaccaaaattcagacatttgagacggtttaagcggaagcatcttactgccattgac

SEQ ID NO: 763833 - DNA, 83 bp, Homo sapiens
gtcggattgcacaccctgttgtgaagtgcacctactgcaggactgagtaccagcaggagagttggtgttggtattaggagatc

SEQ ID NO: 763834 - DNA, 95 bp, Homo sapiens
ggagcctcagttggaagcagccgatccagcctgcggagcctgtggggcaggcaggtaacttgcagactcacttacgacggcattctggtgaaaaa

SEQ ID NO: 763835 - DNA, 100 bp, Homo sapiens
ttctgacagccctcctgatactcaagaaattcataaatcatatcgtacagagactgtgtgaaagtaaagaagatggtcagtatggagaagttgtcagcca

SEQ ID NO: 763836 - DNA, 101 bp, Homo sapiens
tttcacgaaggcaccgacgtcatcatgctgaccaccaatcagatccgtaaggtaactaggatttctacctcaaccgcgagacctatgcaaggacggtgtgg

SEQ ID NO: 763837 - DNA, 97 bp, Homo sapiens
tgaaatccaaaggtgaatcttttggttggtgattttgatgatagccacaaagcaagcagggcagagtggcatgattccgactggatactctcagtgc

SEQ ID NO: 763838 - DNA, 90 bp, Homo sapiens
ttttccagtgtgatcttacccttaaagctacgaagggaacgtcatcgtttggaaagcgtcgcaataagacgcacacgttgtgccgccgct

SEQ ID NO: 763839 - DNA, 50 bp, Homo sapiens
ggaaccttatgtgacctggggttggtgccgtaacagtgaagttaaaagat

SEQ ID NO: 763840 - DNA, 101 bp, Homo sapiens
ggtgtcagtgttaaaggaacctctacaacgaaggtgaagccacggaagataagatgatatcatcaagttgaatcgaaaggaagggaagaagcagaattttc

SEQ ID NO: 763841 - DNA, 100 bp, Homo sapiens
tagaggaagacgacgagtttgaagagttccctgccgaaggtatgcctgcagcatctttagtgacccctgctgatgttatcaagacgagattacaggtggc

SEQ ID NO: 763842 - DNA, 78 bp, Homo sapiens
tcaaagatctcgtacaagatccttctttgccaccaccacctatcatgacagatggtgaagatgcggattacactcatt

SEQ ID NO: 763843 - DNA, 50 bp, Homo sapiens
gacggggtttcaccttgttagccaggatggtctctatctcctgaccttgt

SEQ ID NO: 763844 - DNA, 100 bp, Homo sapiens
gtggtgcgaccacggctcacggcagcctcagccacccagatgtaagcgatctggttcccacctcagcctcccgagtagcccaaatgcagtctggagatga

SEQ ID NO: 763845 - DNA, 82 bp, Homo sapiens
ggtgaccggatattcagttgcacatccccacatcaatgcactgccaatggatcagctcagctactatttaataaaacaaaat

SEQ ID NO: 763846 - DNA, 75 bp, Homo sapiens
ccaagtcgacgccgcaacccggggaaagcagggctccctgcggactgccgtggccgctgggagagcttcgtggag

SEQ ID NO: 763847 - DNA, 75 bp, Homo sapiens
ctgggtccatcaccaaagagcagatgccaaatctgtttttggctttcacccccaaccagtgaccaaagacttgac

SEQ ID NO: 763848 - DNA, 101 bp, Homo sapiens
agccaagggattcaggtgtggtgccggtgggaactgaggaagcgcccaagggcaactacactttccaatgcagtgtcttccctggcaagcactggtctatc

SEQ ID NO: 763849 - DNA, 73 bp, Homo sapiens
agatgtgatgttggagaactacagaaacctcgtctccctggtttgcctgagaatacagatcaacccacagaac

SEQ ID NO: 763850 - DNA, 106 bp, Homo sapiens
gattttgcctggctggaatcattctcaccttgtatgctttacgtgtcatggagaaactccagctgggcccagagattctgcagcgggaaaatccaaggcttattta

SEQ ID NO: 763851 - DNA, 74 bp, Homo sapiens
ccagtgtgaagacctccgaaggaccatagattctgcttctcagaagatgcactattatagatactctaacgcca

SEQ ID NO: 763852 - DNA, 100 bp, Homo sapiens
tcggctggacttctccatcaccaagcaccgaacaagatttgtgatgaaatggagcctggaacaaactcttttcgggtagaatttcctgatttttccagca

SEQ ID NO: 763853 - DNA, 90 bp, Homo sapiens
tggccgccggcctcccagccgcgttctcctccgccgctcctccgggcttgccctggagccctcagatatttgaatggtggtacttccata

SEQ ID NO: 763854 - DNA, 100 bp, Homo sapiens
aaaaggaaaaaatagaaaaacaaattgctacatccgggcccccaccagaaggtggacttaggaatttcgaggatgtcagatgtaaatgtatctgccctcc

SEQ ID NO: 763855 - DNA, 98 bp, Homo sapiens
tggccctctcgctgttgctggtctctggctccctcctcccagggccaggcgccgctcagaacggcagaactggggctcccttgcatcttccagttaca

SEQ ID NO: 763856 - DNA, 75 bp, Homo sapiens
tcgcctcgctgggcagcctcaacatcccctacaagatcgaggccgtgcagagttcaacaaacacctggatcgcgg

SEQ ID NO: 763857 - DNA, 98 bp, Homo sapiens
tctcacggctcaccagccccaagcaccagctccacgtgtcgccttacgttgccaggtgaaggtgccgagctataaacctccagaatattattagtctg

SEQ ID NO: 763858 - DNA, 146 bp, Homo sapiens
atccgggtcaccgacctggccgagctgcccagcgagatcctcggggccccagaggccgcggacaccgacctggaggtcaaaatgcagatcttcgtgaaaacccttaccggcaagaccatcacccttgaggtggagcccagtgacac

SEQ ID NO: 763859 - DNA, 75 bp, Homo sapiens
aaacctgtatgtggaaccacctaattttatagaagtgaagtgattaagaattccttggtaagtttgctttctgac

SEQ ID NO: 763860 - DNA, 100 bp, Homo sapiens
aaggcgggagacgagaagcctgaaaagtcgcagcgagctggagccgccggaggtggagataagtaattaacatttcgaaacaggaaatgaaaggatttat

SEQ ID NO: 763861 - DNA, 51 bp, Homo sapiens
taactaccacctgcattgtttatacagcaaattaaaggtggtggctgtggc

SEQ ID NO: 763862 - DNA, 100 bp, Homo sapiens
gtaaccagcaagaaccatcgccaaacctttccagagagaaaaccagaggggaccctcacaatgatcccaatgctcagggggatgccttcaagactctctt

SEQ ID NO: 763863 - DNA, 74 bp, Homo sapiens
ctgcacggaagaatatcagctccaggttatgatgtgattgctcaagcccaatctgggactgggaaaacggccac

SEQ ID NO: 763864 - DNA, 83 bp, Homo sapiens
gccaaagaaacaagccgtggaataggtgtatcaagtaatggtgcaaagcctgaagagttaagggagcatggagaaaagaagaa

SEQ ID NO: 763865 - DNA, 100 bp, Homo sapiens
cttgtctgtcggccctgtctgaagtgaaggtgcagccggaaggaaaacgacagattcctttaaatgagcaattcctcagcaagtgccctaatgcagatct

SEQ ID NO: 763866 - DNA, 82 bp, Homo sapiens
gcaggctccctgcctactcccccaccggggatttcaggttatgcaatggtctctgcaagatggtttattcttgaattggacc

SEQ ID NO: 763867 - DNA, 76 bp, Homo sapiens
taactgaacattggtctaaagtctttccaaaaggtcaaggttcacaaggtccaatgatgcatcagcagcctccttc

SEQ ID NO: 763868 - DNA, 83 bp, Homo sapiens
gcccctcaaggacaacctcggcctgagacaccggaggaccggacctcctgccccccgaggtctgcagtctcctgaacccagca

SEQ ID NO: 763869 - DNA, 87 bp, Homo sapiens
acagctgctcatgaaccacttggcaaatgctctctcagaggaggagaaaactactctgcgtgcagggctcatcaccaacttcaatga

SEQ ID NO: 763870 - DNA, 100 bp, Homo sapiens
cagtgtcaatattgcagctactgcttctgaggttgttgaggcatcttcattaagctggagtaccaggataaaaggcttcattgcgtgttttgctatagga

SEQ ID NO: 763871 - DNA, 101 bp, Homo sapiens
ttttaaatatgacggctccaccatcgtccccggcgagcagggagcggagtaccagcacttcatccagcagtgcacagtgacaaccatgagtggaaaaaact

SEQ ID NO: 763872 - DNA, 75 bp, Homo sapiens
agcgacatggagggagctgctttgctgagagtctctgtcctctgcatctgagtggaagaggaagctgcccagaag

SEQ ID NO: 763873 - DNA, 110 bp, Homo sapiens
tcagagaggaaattcaggaaactttgacttcggagtatttccagatttgcaaggacactgcccatctctaagataagaacctggaaaggggactctgttggccattggaa

SEQ ID NO: 763874 - DNA, 100 bp, Homo sapiens
ttgctgcaaaggttccagagcatcatttgcaggaaggatgcaccccactccgagggcgacatgcacgcttattcaaacctccttagagctaacatggatg

SEQ ID NO: 763875 - DNA, 75 bp, Homo sapiens
ggaagatcctggaggtggatctgaagaacggttttctggatatgccgcagaaggatccgtgccagaagcaagcct

SEQ ID NO: 763876 - DNA, 100 bp, Homo sapiens
gatttaaaattgcaactgaagcaaactcagacagtcaaggcctggccgacaacaccgttattgctaaagtaaataatgttgtgtgggacctggaccgccc

SEQ ID NO: 763877 - DNA, 100 bp, Homo sapiens
gcagtgatccatctgtacttttagacttgaagcccaccaatatattgcttggagatgaggggcagccagttttaatggacttgggttccatgaatcaagc

SEQ ID NO: 763878 - DNA, 74 bp, Homo sapiens
ctacaacttgtactatgaaggccagaatttacagctccggcaccgggaggactttgccaataccattcctggcc

SEQ ID NO: 763879 - DNA, 100 bp, Homo sapiens
agacctgggccagaatggtgaggaggagcttcagaaatacgagcagttcatctttgcagatcataccaatatgattcacgttgaaaatgtctatgaggag

SEQ ID NO: 763880 - DNA, 91 bp, Homo sapiens
gcagaagtcgcgtgtctaggtgagtcgcggtgggtcctcgcttgcagttcagcgaccacggtttttcacgactgaaaacaacatagcaaaa

SEQ ID NO: 763881 - DNA, 78 bp, Homo sapiens
cacaatgtgcctttgcaggggagcctgagagccacaggtgccagcttcaggtatttcttcgtttggagatgtgtctgc

SEQ ID NO: 763882 - DNA, 101 bp, Homo sapiens
aaaaaagtgattccaagtcaagatttcaaatggaaatctaagaacagctttgctgagccatcaaggtctaatggaagcatggttcggcattcttcatctcc

SEQ ID NO: 763883 - DNA, 100 bp, Homo sapiens
ttccacacctctagtggacccctcagtatatggatacggagtacaaaaacggcccttggatgatggaggacccagatgatgtggtaccagttggccaaag

SEQ ID NO: 763884 - DNA, 112 bp, Homo sapiens
gctggatatccaagcctctcagcttcggagaatggagtcttccatcaatcatatctcacagatgggtgagtcaagtgaagacatagaccaaatgttcagcactttgctggga

SEQ ID NO: 763885 - DNA, 90 bp, Homo sapiens
cacctcaatggcctaagcaagtgtctgcagtgccaaatgtgtgacccagacaatattttctatgtgatggagtaccgagaactattcctg

SEQ ID NO: 763886 - DNA, 90 bp, Homo sapiens
gaatttccatgtcaacatagtcctgtgaatcacatgaaggtcacccccatggatgcggccacagcctcactgctcaacgtcttcaacggg

SEQ ID NO: 763887 - DNA, 80 bp, Homo sapiens
tgggagcatccccttagcagcagcctctgaccacagagtattcagccatggcctcgctggctggtgggctggacgacatg

SEQ ID NO: 763888 - DNA, 83 bp, Homo sapiens
aagtgtatagggaaacctgggggctccctggacaactccgagcaggtgcgcgcggagccatggttatcatgtcggagttcagc

SEQ ID NO: 763889 - DNA, 51 bp, Homo sapiens
tccatttgctaaaggaatagtgtttggtgggaaagcagtgccactctccgc

SEQ ID NO: 763890 - DNA, 82 bp, Homo sapiens
acacggtgtgcaaggggagtcgtggcgtcgtctgcgaccgctgccttctcggaacaccttccaccatgaccacctcagcaag

SEQ ID NO: 763891 - DNA, 103 bp, Homo sapiens
accggacactttgttattggagaaacatgcagattatatcgcatcctatggctcaaagaaagatgattatggccattatgctgtgatgaacaaccccaccaga

SEQ ID NO: 763892 - DNA, 82 bp, Homo sapiens
gccgtggcgggaggagccggaagccccgcccccggggaggggccgtcctgcagttgcatttgctggtctggcctttgcgtcc

SEQ ID NO: 763893 - DNA, 50 bp, Homo sapiens
acgagtttgaagagttccctgccgaagtgctgcaggtggagaaattttca

SEQ ID NO: 763894 - DNA, 90 bp, Homo sapiens
tggccaagtcagttttgaaggagaggggtcttaagaagattagattgggaatagaagggttgatggtgcatgttgataaaagaattactc

SEQ ID NO: 763895 - DNA, 97 bp, Homo sapiens
tggcagcttcacattttcttgctcattcttctctctatgcacacaagggatatttgggatatgcctggcccagaatttggttagcgatatcgaagct

SEQ ID NO: 763896 - DNA, 75 bp, Homo sapiens
aaacctaaggaaaaacgtctgacctgcggagacaagtgtggttaactacattgaccagaggccagctgccaaaaa

SEQ ID NO: 763897 - DNA, 100 bp, Homo sapiens
gccgctgctcaggaacatcctccaccaggggcaggctggaagctcctggccatgttggctctggtcctggtcgtcatggtgtggtattccatctcccggg

SEQ ID NO: 763898 - DNA, 100 bp, Homo sapiens
gctgcagctggtgctcggccgcctgaccagcccggcagcctcagagaagcctgacctggccggctatgaggcccaggttgctgtcccctttgacgatgat

SEQ ID NO: 763899 - DNA, 100 bp, Homo sapiens
cagatgacagagtagaacgtgtacgcagaaaaatggctacaaacttcctagcacatgagaagatctggttcgacaagttcaaatatgacgacgcagaaag

SEQ ID NO: 763900 - DNA, 82 bp, Homo sapiens
attagtgtctccatcgtcatcagaaactgaaggcaactttgtctatcgcacagggctctgcctgtcatgtatgcagtagcgc

SEQ ID NO: 763901 - DNA, 82 bp, Homo sapiens
ctcctccggcgccgccgagctgcgcccgctgccttcacaccccggacatccgcgccacacggacccgagtgtatagccctcc

SEQ ID NO: 763902 - DNA, 100 bp, Homo sapiens
ttgctcgtcataccaaagccgtcaatgttgtgcgtttttctccaactggggaaattttagcatcgggaggagatggtggttgtgtcaaaccgattggtga

SEQ ID NO: 763903 - DNA, 100 bp, Homo sapiens
ggtctttactggattcagataattttattggactgtttgtctttgttctctgcctcttgtattctaggttggaagtgtatcctcccttcttattttttct

SEQ ID NO: 763904 - DNA, 100 bp, Homo sapiens
gctggtttctttgctggagcacttgagccacgtgcatgaaccaaacccacttcgttcaagacaggtgtttaagcaatcctgttacacctgggatttaggc

SEQ ID NO: 763905 - DNA, 82 bp, Homo sapiens
agcggagggacggcagtctcgcgcgtttggtgccctggttgtcagatgttggaaagcagtaggacggaacatactcttcgtg

SEQ ID NO: 763906 - DNA, 83 bp, Homo sapiens
catctacactcaggacttcacggtgcccgatcatgatgctgccgccaccgccgccaccacggagcgagaagcccagatagacg

SEQ ID NO: 763907 - DNA, 90 bp, Homo sapiens
gggagatgaacccaacctagtgggtgtaatacatcatgaactgcaggatcctggtgtatagcctggaagcaggacgccgcctcttgaagc

SEQ ID NO: 763908 - DNA, 87 bp, Homo sapiens
tcaacagatagaaaggcaggagcagcttctggatgaaatacatcgtgagaagagaggagcccctcaatagtgaagatgatgtgagtg

SEQ ID NO: 763909 - DNA, 90 bp, Homo sapiens
acttccagaacatctgggagaatatttaatggaaaatcgcttggttaaaacctgacacttttaacagggtgatcagcccatgacctaaac

SEQ ID NO: 763910 - DNA, 98 bp, Homo sapiens
cggtgaggagccgggttgggggagcggctcgtggaggtatgcaaccactcatgtattcggttcaggaagcattaaatgccagaccatggtggattcgt

SEQ ID NO: 763911 - DNA, 90 bp, Homo sapiens
cggacggaagaaaaggtctggccgaacaagttgaaatcatcgcagaaggataaagttcgtcagtttatgatcttcacacaatctagtgaa

SEQ ID NO: 763912 - DNA, 83 bp, Homo sapiens
tttacttccagaagattggtggagcttgatctgaagatgaaatcagacatcactgaaggagttgatattccaaagaaacctag

SEQ ID NO: 763913 - DNA, 101 bp, Homo sapiens
gaaaatgagaacaaaaatttaaagaaagatttgaagcactacaaacaagcagctgagttggatggcaagcatgtggtgtttggcaaagtgaaagaaggcat

SEQ ID NO: 763914 - DNA, 50 bp, Homo sapiens
ggaatccggaagggacacgctgaacagtgctgggattacaagcgtgagct

SEQ ID NO: 763915 - DNA, 88 bp, Homo sapiens
tgcagtggcgcctaaagtctgagagagggaagtcgcctctgtgctcatgaagactggcccatttgcagagcactccaaccagctgtgg

SEQ ID NO: 763916 - DNA, 50 bp, Homo sapiens
cggggctgaccgcgtcgtcaaagacctggccgagtgcaagctggtctcct

SEQ ID NO: 763917 - DNA, 100 bp, Homo sapiens
gttggaccggttaaagaaaacgatgagatcgaggctggcatacacgggctggtacatcaggaacgtctctatcaagaatacaatttcagcaaggctgagg

SEQ ID NO: 763918 - DNA, 82 bp, Homo sapiens
tgcggcagacggcgacagtggcggcggcgccatggcagggcttgcagcagaaagatgaaggtcttagaatcattgattggaa

SEQ ID NO: 763919 - DNA, 74 bp, Homo sapiens
ggagtgtcgggaaatgtggaaaggcttcatcttaacggtggtggagtttcattgtactgacaacctcagctggc

SEQ ID NO: 763920 - DNA, 100 bp, Homo sapiens
gaggctccaagacctcatcaacaattaaggaaatagctcgtctgctggccctggaggaggctaccctgagtaccgatctgcagcagggttatgcccttaa

SEQ ID NO: 763921 - DNA, 102 bp, Homo sapiens
cttgactaaaccgacttctgatccatggatgccatcagatgagagtccctacactaaatccgccagccagacaaagccgcctgatggagcgttggctgtgag

SEQ ID NO: 763922 - DNA, 98 bp, Homo sapiens
aaccattgacgccatgtcgggttattcgagtgaccgagaccgcggccgggaccgaggagcctcagcttaagggtatagttaccaagctatacagccga

SEQ ID NO: 763923 - DNA, 100 bp, Homo sapiens
gtcaacggtgacaagtgtgggaaccagcgcttctccaccaggatcacgtttgagtgtgctcagatatcggtgccaagtcctgccctgccaacttcttggc

SEQ ID NO: 763924 - DNA, 83 bp, Homo sapiens
gggcggagctgtgcgagagcctcctcacttgggatcagttcgaggtgctcgagcgccacacgcagtgggggctggacctgttg

SEQ ID NO: 763925 - DNA, 75 bp, Homo sapiens
caggacgtgcccggccccgcgtcgtctggcgccgccgccgccagcgcggtatgattatcgggaaatgctgcacaa

SEQ ID NO: 763926 - DNA, 74 bp, Homo sapiens
aagttgtggagggaagtgctgctagatttgactgcaagattgaagaaacctctgtagaggagcaggatgcaacc

SEQ ID NO: 763927 - DNA, 100 bp, Homo sapiens
caccttggtcctctcaggggaatattctattggacaagtactcactactgcaataaggtcactgatcagtgcctgtccttcttcaaacgctgtggaaaca

SEQ ID NO: 763928 - DNA, 74 bp, Homo sapiens
cagatgcagtgtggctctggatagcaccttatggacagatttatactatggtggggaagctttctctgtagagc

SEQ ID NO: 763929 - DNA, 76 bp, Homo sapiens
tgggacgtgctcaacttggtttaggagagataatcctggagtttggatcataatacaagagaagcacagggcaaag

SEQ ID NO: 763930 - DNA, 100 bp, Homo sapiens
tccaacacataaaaattatttatccaacagctcctcccagaacattcctgatgtagatgaagaaggctacagtattaaaccagaaacaaatcagaatgat

SEQ ID NO: 763931 - DNA, 82 bp, Homo sapiens
ccgagcgggcggcttcctggcctgggcgctccggtggcggcggaggatggccgagcctcgatttaacaacccctacttctgg

SEQ ID NO: 763932 - DNA, 74 bp, Homo sapiens
cagtggctgcagagtcgagaagccaaggtccgcataaagatcctggccagcctggtgacacagttcaactcggg

SEQ ID NO: 763933 - DNA, 75 bp, Homo sapiens
cctcagcctctcaggtggctgggattacagctggaaagtgaaatttcaaccacagcagatgactgcagttcagag

SEQ ID NO: 763934 - DNA, 82 bp, Homo sapiens
gaagaagaagaaccggaagaaactgtccgagaagcccaaacacttctcagaacttctggatgagttttcccagaacgtcttg

SEQ ID NO: 763935 - DNA, 96 bp, Homo sapiens
gggatgcaccgtggtagccgagggcggaggcgacactctcagggagttcccattagacttgaagttgggccacgtgatatgaagagctgtcagttt

SEQ ID NO: 763936 - DNA, 51 bp, Homo sapiens
cacagagataacggccagccctgggcgaagtcttaggaaaagtcctcagtg

SEQ ID NO: 763937 - DNA, 80 bp, Homo sapiens
caggatccgagcgttctgcacaccgaggaaatgcgcttcctgagggagtgggtggagagtggaatgcagtagccctctgg

SEQ ID NO: 763938 - DNA, 82 bp, Homo sapiens
tcgggtgcgggtccccgccccaccggcccccggcgccgtccagcccggagggacctgaattccatgaaggtgatgttcaaat

SEQ ID NO: 763939 - DNA, 75 bp, Homo sapiens
gcaaacacagttgtttacagctctaacaaaatagacggacagccttgatgccatgcttcagtggctcctgcagag

SEQ ID NO: 763940 - DNA, 75 bp, Homo sapiens
tccagcctgcggagcctgtggggcagcttaaagaagtcttctgctgaactgaaaaaaatactagccaatggccag

SEQ ID NO: 763941 - DNA, 75 bp, Homo sapiens
tattggcatactccacacatctgtaccattcttgagtgatcgcttagatttctgctaaacttggaacaaatgttg

SEQ ID NO: 763942 - DNA, 100 bp, Homo sapiens
ccttttccttcggagcagcagccctgtccggcatctgtcttgagctcccagcaagaatgacagcccatatcaaggcggtgtattctttttgacaattcat

SEQ ID NO: 763943 - DNA, 100 bp, Homo sapiens
agtaccttcctacatttgtctgctctgtggctgaagaaccaagttcaggcttcatctttggatatcaacagccttatgtttgatcatcggccaaggtcct

SEQ ID NO: 763944 - DNA, 74 bp, Homo sapiens
cttccggagcttctcagaagacagagggttttcttttgagatcaagcttcaggagtctccggaagacatgcctg

SEQ ID NO: 763945 - DNA, 75 bp, Homo sapiens
agggtccccgctcagctcctggggctcctgctgctctggctcccagccatctgcatccagtcgtggtggcgtgga

SEQ ID NO: 763946 - DNA, 80 bp, Homo sapiens
cggatcgggtggagtgtaggtcatatcgccgcggctccttgccagaggcctccactcactccagacccctatagcccgtc

SEQ ID NO: 763947 - DNA, 74 bp, Homo sapiens
tcactgcctgcgcagctccggccgcctggctccccatactagtcgccgaattaaacaaccaccatgtcgagcaa

SEQ ID NO: 763948 - DNA, 90 bp, Homo sapiens
caacacggtgcaccggaccctgccaggtcagtcttcactgtttccaatggaagatggattcttggatgatggccgtggggatcagcctct

SEQ ID NO: 763949 - DNA, 100 bp, Homo sapiens
agaaactgaaactctccgagggaaaaggccttgaagggccattagacctgataaattatatagacgttgcccagctctctgatgtaaaggatggagtaaa

SEQ ID NO: 763950 - DNA, 75 bp, Homo sapiens
ggaaaaccaggcgggcgtgctgcacgttggtctcggaagggtgctgacctggaccgggagaagaaggctgccgag

SEQ ID NO: 763951 - DNA, 100 bp, Homo sapiens
ccccagccgaccttgagctccaggagttcgtctcttacgtctgcggaagtgcagctgcctcagttcttagcgcagatagtgtgtgtaccatatcagtggc

SEQ ID NO: 763952 - DNA, 98 bp, Homo sapiens
cagctggcggagctggagctggagctctcggaggacaagttggatggcttgaggactggtactaaaaggaaacgtgactgggaggccattgccagcag

SEQ ID NO: 763953 - DNA, 82 bp, Homo sapiens
ccttcctcaacgacgcggacatggtcatgagctttgtgaacctgggcagcctgcttctgcaaagtggtacgatcgaagggac

SEQ ID NO: 763954 - DNA, 117 bp, Homo sapiens
agcgggagcggccggaggagccatggactgcagcctcgtgcggacgctcgtgcacagatacgccggaaaagaggcataaactcggagaacccaagaccccggcctggcgtgcagccc

SEQ ID NO: 763955 - DNA, 75 bp, Homo sapiens
caaggagctaaagcagcgtgcgttcagccctgggtgaaggagaacgacctgctcagaatgagaagaggaaggaga

SEQ ID NO: 763956 - DNA, 82 bp, Homo sapiens
aagaccctgaagatctgtgccaaccactacaactcggtgaaatacctggagtgctcagctctcacccagagaggcctgaaaa

SEQ ID NO: 763957 - DNA, 51 bp, Homo sapiens
gggacctcaaggaagcttatgacaggttgcgacctttccttccccagcaat

SEQ ID NO: 763958 - DNA, 100 bp, Homo sapiens
cagtggaatcagctgtgaatgcagaaagaggagttcttctcaccactaaatccaatacgagttcatattgatattggagctgatggcagagccacaggag

SEQ ID NO: 763959 - DNA, 75 bp, Homo sapiens
tacaaaaatcaatctcagggctacaaccagtggcagcagggtattcagccatccctgtggaaagtgacaccgatg

SEQ ID NO: 763960 - DNA, 100 bp, Homo sapiens
gtaatggagaccaaaagtatgttgtaccttgtgacagaatatgccaaaaatggagaaatttttgcgccacccaagactgtcaaaccccctgaggatcaac

SEQ ID NO: 763961 - DNA, 100 bp, Homo sapiens
ctctaccgatgggaagtccttattattggccctccagatacactttagggcctttacaacaactaaacggacaggcattccagccccacgggaattttca

SEQ ID NO: 763962 - DNA, 100 bp, Homo sapiens
gcctgttttccaaagtcacgctcattggccggaggaagctcaccttcgacgaggaagcttataaaaatgtggtatactcccacctcccagcttcgcacgc

SEQ ID NO: 763963 - DNA, 90 bp, Homo sapiens
gtttacagccactgcagtatcacagccagtgtgaagcctcagtttaggtcatctggtggttcagaacactcaacagagggctctgtatcc

SEQ ID NO: 763964 - DNA, 110 bp, Homo sapiens
accatccagagtctctttccaaatctccaggttttccctgcgctgggtaatcatgactattggccacaggtacgcagattttctgaggcattcttttgttttgagcatcc

SEQ ID NO: 763965 - DNA, 100 bp, Homo sapiens
atcggcccaaggccagttctccgcagatgcctgaggaaacccagacccaagaccaaccgatggaggaggaggaggttgagacgttcgcctttcaggcaga

SEQ ID NO: 763966 - DNA, 88 bp, Homo sapiens
ttgatcctcctcctaattgcagctggatgaaaaagaaagtcggcgtctgttccaacagatcctttctggtgtggattattgtcacagg

SEQ ID NO: 763967 - DNA, 95 bp, Homo sapiens
caggtgctgcggcctggggctggagtccgattgccgattcagcccagcagctgccattaggccgacagtgtgtggagcattatcgcttgcttcat

SEQ ID NO: 763968 - DNA, 101 bp, Homo sapiens
ctcagtccgaccgggctagctttggcgaggggacggagccggatcaggagccgccgccgccatatcagacttcacagagaatgcagttgtcttgacttcag

SEQ ID NO: 763969 - DNA, 75 bp, Homo sapiens
ggcttttgcagagtcactcaggacaagcttgaagtttttcagttatgggacaaaaatattatatcaaaacactga

SEQ ID NO: 763970 - DNA, 98 bp, Homo sapiens
gaggagccactgtggaagcagagcaatcgccatggagtttgtgatgaagcaggctctaggagtttctccttggaccaagatgactgatggaaaactct

SEQ ID NO: 763971 - DNA, 78 bp, Homo sapiens
tcaatcagaattactagattttctctcaaactacgaggaggagctgaatgatgctgtgggattttctagagtcattca

SEQ ID NO: 763972 - DNA, 75 bp, Homo sapiens
cagactggatctgggaaaacattgtctgtgagatcggactggaactgttcggctgcgaccagaaatttattttcc

SEQ ID NO: 763973 - DNA, 82 bp, Homo sapiens
ggtggaggttcgcggctctaacggggctttctacaagatgacagtcatgtccctttccagggacctcaaggacgactttcac

SEQ ID NO: 763974 - DNA, 75 bp, Homo sapiens
caagcatgcagcttactgcttgaaaggcaatccggctcatccaggcctgcgtggatgtcctttccagcaatgggt

SEQ ID NO: 763975 - DNA, 80 bp, Homo sapiens
agggaaagatgagcgaggagacggcgacttctgacaacgagtataaaggaccattgttagaagagcaagcccttacaaag

SEQ ID NO: 763976 - DNA, 75 bp, Homo sapiens
aaccggatcatgggctttcacaggcccgggagcggcgcggccctcaaggacgttttgttctgaagactctcatat

SEQ ID NO: 763977 - DNA, 105 bp, Homo sapiens
atccatgacactgttctgccctgctctgctctaacaacatttctgtatgcaggagctattcttgaagtttgtggatgaaaattgggaaggttccctcaagtccaa

SEQ ID NO: 763978 - DNA, 98 bp, Homo sapiens
ttggaaagcattgggctacctcagtacgagaaccacctgatggctaatggatttgacaatgtgcagtttatggctcagctcttgccaggccaaattga

SEQ ID NO: 763979 - DNA, 80 bp, Homo sapiens
ggagccgccggccaggacgcccccgagggtgtagaccgcgcccctggagttatacatgggaagctgttgataccaaaaat

SEQ ID NO: 763980 - DNA, 98 bp, Homo sapiens
tattcttcgcactataggaaaagaagccttttcatatcctcagaaacagccaacacatatctctttatggtacaagctcgaggtataatgttgagaga

SEQ ID NO: 763981 - DNA, 83 bp, Homo sapiens
cgttgagttacatgttcagaagatcacccggaagttcaggctgaattctgaaggcaaacttgagcagacggtctccatggcaa

SEQ ID NO: 763982 - DNA, 80 bp, Homo sapiens
caaggctggccgagccgtggatgtcgctgaattgcccgtgcccccagggggcagtacccaaaggaaacgctacgaaagaa

SEQ ID NO: 763983 - DNA, 90 bp, Homo sapiens
tcggtggtaacgacggcctcagcaggcggggaagatgaaagggaatatcgttcagaaaaatctcttgaagaattgagtaaacttgtgcca

SEQ ID NO: 763984 - DNA, 101 bp, Homo sapiens
ttggcattgacatttaattttagggtcctttatatagaagggagagtagcagtggacacgcatgtgcacagaatcgccaacaggctgaggtggaccaagaa

SEQ ID NO: 763985 - DNA, 98 bp, Homo sapiens
aaaggattgtgacatatcgttggacccagaattgagcactttcatttggacccgtggatacccattgaacagatgcttgaaacctgcaagtaatcttc

SEQ ID NO: 763986 - DNA, 83 bp, Homo sapiens
aagaggaggatctcccacctttccaagcaaggccaggaggaattgaatgatctggcacgggaccctccagcacagtgttcagc

SEQ ID NO: 763987 - DNA, 90 bp, Homo sapiens
gtttctgctgtgaaggaagacaaggagagcaatccagcgaccatcaacgcagccacaggtgaccaaccacataactcgagacagggacag

SEQ ID NO: 763988 - DNA, 50 bp, Homo sapiens
tggcaagccacaattatgggacctatggcccctgagttctgcagcctcga

SEQ ID NO: 763989 - DNA, 75 bp, Homo sapiens
acaagatgttgtcctgtgctggggctgacaggagccttctgatggagcgtgatgccttgaagcccaactcgcccc

SEQ ID NO: 763990 - DNA, 83 bp, Homo sapiens
atttgcctgaagaaggtcagtgtgcttgcttggagatcaggacgcaaagttttacagctcccagcacagtaggaaagagaaat

SEQ ID NO: 763991 - DNA, 75 bp, Homo sapiens
gccggggtgaccctgccggagcctccgctgccagcgacatgttcaagaatggagatgtatgcatttcgattcttc

SEQ ID NO: 763992 - DNA, 75 bp, Homo sapiens
tttgatgaaggaaaattaaaagctggccaaagtgtaattggtctgcaggctttcctcggagacgggtggcatggg

SEQ ID NO: 763993 - DNA, 51 bp, Homo sapiens
gagggcgcctacggcatggtgtgacacgatgaggcgagtggtacgacagag

SEQ ID NO: 763994 - DNA, 96 bp, Homo sapiens
ggccctgggagcccccctgtgctcacgccgggttctttacctccgagccaggccgccgcaaagcagtcacccacaaaagctgtatataatgccaga

SEQ ID NO: 763995 - DNA, 90 bp, Homo sapiens
ctcaggtcgatgacttcagtactttccaagagtgtatggaatgggactttgatctgaagaaattaccaaacattaaaatgagaaaaattt

SEQ ID NO: 763996 - DNA, 83 bp, Homo sapiens
ccttagctgtgctcgcgctactctctctttctggcctggaggctatccagcgtataccaagcttggctacgcaggcaacactg

SEQ ID NO: 763997 - DNA, 87 bp, Homo sapiens
tggacggcgcggccacggagaagggcgcggggacccgaagctgccagtactgtaccaagtggagcggacacgaacagggtcgagctt

SEQ ID NO: 763998 - DNA, 100 bp, Homo sapiens
agggaaggacggggcctggcccccgggactccctgtgccttgcttggagctgacgccgacggcttcttcctcctgctgagaaggcacagcccaaaaagtt

SEQ ID NO: 763999 - DNA, 100 bp, Homo sapiens
agcctgacagcttggaggtgttggtgaagaccttggactctcaaactcgtacctttattgtgggggcccagtctgaagttgcagccggagtgaagaagag

SEQ ID NO: 764000 - DNA, 82 bp, Homo sapiens
cgatactgagcttcttcctatttgccatgggagtcaaattgactttatcagctttaatcgatgggaagaacttcagtgcagg

SEQ ID NO: 764001 - DNA, 95 bp, Homo sapiens
tcctaagagctgggcaccaggaagcgaaggctgaacccagcgggtgccgcttctccacccgaggcttccacctccaacgagccatgttccaggct

SEQ ID NO: 764002 - DNA, 90 bp, Homo sapiens
aaattatcaacaccaaaaagctttctgctaggggaagagttttatggaagaaaattggttgttgctgatagagaagaagtggaacaagaa

SEQ ID NO: 764003 - DNA, 80 bp, Homo sapiens
tgaatgagcgttccagcttctccacattgtggatatcaagcctgccaatatggaagagctaacagaggtgattacagcag

SEQ ID NO: 764004 - DNA, 75 bp, Homo sapiens
cttcagggcccggagtactagtctcaacgagagacccaagaggaagctggagaagcttcgagagaaggagcgtaa

SEQ ID NO: 764005 - DNA, 82 bp, Homo sapiens
cgccgcccccccagacaagatggacaccgcggaggaagcatcaagatggtgctcatgtggaccagtggtgacgccttcaaga

SEQ ID NO: 764006 - DNA, 83 bp, Homo sapiens
ctggccaagaagcacggcacgcagaataagcgaggaaaggaataatgctgacagcatgtctgcacattccatgctctgtgaac

SEQ ID NO: 764007 - DNA, 75 bp, Homo sapiens
cctgaggagatccgttggctcctggaagagtcacctaaggtcctgcgagtacaagggtcgacccccaaaggcagg

SEQ ID NO: 764008 - DNA, 100 bp, Homo sapiens
ggtttgtggaacagacagctccttctttattgtcttagagtttgaaagagtctatcttgataatctccccagtgcatccatgtatgagcgcagttacatg

SEQ ID NO: 764009 - DNA, 100 bp, Homo sapiens
ttcgagatggaatgtgtagacagtctttcacgggacatgtctcagatatcaatgctgtcagtgtttctgctttgggacaaccatacatctaattccttaa

SEQ ID NO: 764010 - DNA, 74 bp, Homo sapiens
cgcggggccgccccccgaagcccagggagagcaaggcgcgcggcgactccggggagagaccattctaacacagg

SEQ ID NO: 764011 - DNA, 51 bp, Homo sapiens
gggatggcgcatcacacaccaaagtgtttccttcacagaatgtggaggctg

SEQ ID NO: 764012 - DNA, 75 bp, Homo sapiens
ggcccccggtgcaagaggcgcaaacaagccaatcccaggaggaaaaacgaccattactgggacttccacccccac

SEQ ID NO: 764013 - DNA, 91 bp, Homo sapiens
cagctgcaaagttcctatggatcacttggccagataagccaatggacacgtcagtgttatctgaagaaggaggagagccttttcagaagaa

SEQ ID NO: 764014 - DNA, 75 bp, Homo sapiens
cagaaatgtgtgcagactacatggcatctaccataggggactgcaagatggaggaaggcgggaacctaggaggcc

SEQ ID NO: 764015 - DNA, 75 bp, Homo sapiens
ggagaactacagcaacttcatttcactaggtctcacagatttcaagcctggctactggattggtgtccgctatga

SEQ ID NO: 764016 - DNA, 80 bp, Homo sapiens
caacatattgactgtatttgggctgcagcacagattgagaggatccagaatccagatctctggaatagctaccaggcaaa

SEQ ID NO: 764017 - DNA, 73 bp, Homo sapiens
tatgcttgttggaattggtgacaaaatcagaggcatactttataggaaggtgtcttgctgcaggtaactaatg

SEQ ID NO: 764018 - DNA, 100 bp, Homo sapiens
ctactttttcagacatctcctgtagggctagattcagagagcagcttctgatatttggaggggtgaggtggctttgaccccgggttgcccggccagcacg

SEQ ID NO: 764019 - DNA, 83 bp, Homo sapiens
aattgataagagtggcccaatgacactgcttgttcagttgttgacctcctgtactggagagacattaagaagactggagtggt

SEQ ID NO: 764020 - DNA, 75 bp, Homo sapiens
gtggttggtgattggcaggatcctggtatccgctaacaggttacctgtcctgctgccgattcctggatgacaatc

SEQ ID NO: 764021 - DNA, 100 bp, Homo sapiens
cgaagagccgttagtcatgccggtgtggtggcggcggcggagactgcgggcccgtagctgggctctgcgaggctggaccagatgatatcagaaactttga

SEQ ID NO: 764022 - DNA, 98 bp, Homo sapiens
gtggatccatacaactgctccgcctggtggaatctgagttcattcggctcctaaagaagtagcagtgtccaaggaacaagaagagaaatctgatagcc

SEQ ID NO: 764023 - DNA, 73 bp, Homo sapiens
cccacttcaaacattcgtctcggaaaccccgcctcttacagtcacgaggtgtgcaagcatttcctggaagcta

SEQ ID NO: 764024 - DNA, 90 bp, Homo sapiens
ttttgatgctgacatgctcaaagtctttcggaatgctgaggcagaaccgggtggaactgcatgagaagcgacggaggcgccagccccagc

SEQ ID NO: 764025 - DNA, 100 bp, Homo sapiens
caagcctttgctgaattggagagctgaatttgccattttcagtggaaaacaagtggtcgttactagctaagatgtgtttgtactttggatctgcatttgc

SEQ ID NO: 764026 - DNA, 75 bp, Homo sapiens
ccatttcggtgtagaagtggcagcacggcagccttatgtttgatcatcggccaaggtcctggcgagaactgcctc

SEQ ID NO: 764027 - DNA, 75 bp, Homo sapiens
ctggtgtctacgtgtttggagaactgctggacatgcccaatgttagagagggttcctattggacaattgacacct

SEQ ID NO: 764028 - DNA, 98 bp, Homo sapiens
cccaaagaggagaaagatgcttctaaggttgcctagacctggagcagtgttctcttaaggtactggagcctgaaggaagccccagcctgtgtctgctg

SEQ ID NO: 764029 - DNA, 75 bp, Homo sapiens
gatgagacgttatttccatcaaaaattgacttaattcagtgcacaaatgagatgaatgtgaacatcccacagttg

SEQ ID NO: 764030 - DNA, 75 bp, Homo sapiens
aggagtacctatagaaccccggaggagggtgaggagcagagctggggaaatgaggcaagttatcctttggaaatg

SEQ ID NO: 764031 - DNA, 73 bp, Homo sapiens
gtaaggacatgaagacagttcctgtcataccttttaaagattcgtctgtgatggctgtttaaagaaaagtgca

SEQ ID NO: 764032 - DNA, 107 bp, Homo sapiens
ccttagctgtgctcgcgctactctctctttctggcctggaggctatccagcgaggacccctcgctggaaaggcattttaagggccaccgagatgcagttacctgtgt

SEQ ID NO: 764033 - DNA, 100 bp, Homo sapiens
cctgctcctggccgcctgcatgcacagtggctttaagatcctcaactgccaaaaggcaatggaacccaacgtcttcctcatcttcagccatggactgcag

SEQ ID NO: 764034 - DNA, 82 bp, Homo sapiens
cgtaggcaggaccccgggacaccctggaagccaggaaatgcctgaactctttgcttccggaatccgggattgttgctgacat

SEQ ID NO: 764035 - DNA, 101 bp, Homo sapiens
cctaattctgcccttgatgtcacaggatctcttgaaggttcctccccgggcagaagaaatcaccattccagctgatgtcaccccagagagagttccaacac

SEQ ID NO: 764036 - DNA, 83 bp, Homo sapiens
gaaccaactggtcccgaaagagatacagatccacgggttttagaaaaacaagaattacagcagccaacctatgttgccctgag

SEQ ID NO: 764037 - DNA, 100 bp, Homo sapiens
gaaagagacagcttgagaaaagggactttggaaaaaggctgtctctagacagcagtcttgtgacccaacatgagtgaagtttcctgcaagaaacgggacg

SEQ ID NO: 764038 - DNA, 75 bp, Homo sapiens
atcttactgtactggaaacgtcaccggaatcaggaccgaggtcagacatatttccaacatttgggtcaaaacctt

SEQ ID NO: 764039 - DNA, 90 bp, Homo sapiens
cgaggctctggagtcctccacggctacggaagattcctgatgttgcacccattgtaagtgatcagaaaccatctgtatcaaagtctggac

SEQ ID NO: 764040 - DNA, 100 bp, Homo sapiens
cacatcaggacagctgttccttggccatcccaaagctattctgggggcaacagaggttgacttccccagaaatctggccaagtctgtaactgtggaatga

SEQ ID NO: 764041 - DNA, 100 bp, Homo sapiens
agaaaatctccctgctccgcagcgacatcaccaagctggaggtggacgccatcgtcaacgccggacacggtcatgaaagcaaatttgcacaaggtgaaac

SEQ ID NO: 764042 - DNA, 75 bp, Homo sapiens
aaactccctgagcctctcttcacaaatggaagccctcaatctagaagagtagaggtccaaaggtgccatatgttc

SEQ ID NO: 764043 - DNA, 139 bp, Homo sapiens
ggactccagaagtaggagcagtttacggaagtgtaacgttgaggcccttcttgtgtatctggagaaaatagagtccacaggtcctggctaccctgggaagagacaagaagtaaatgaagaaagaggaagattccaggac

SEQ ID NO: 764044 - DNA, 75 bp, Homo sapiens
tgcacaaggatgtcaacgtggtagtagtggaaggggataagtggtccccagcactgcagatccgcacagttctgc

SEQ ID NO: 764045 - DNA, 90 bp, Homo sapiens
cggctccggggcagctccggcgggcgaatccagcaactatcacaagaatactccttagccacttcaattgggataaagagaagctaatgg

SEQ ID NO: 764046 - DNA, 73 bp, Homo sapiens
tccccaaggaggacggcgtgatcacggccagcgaggacaggttttgacacaagggcgcatatcttcaaagcac

SEQ ID NO: 764047 - DNA, 74 bp, Homo sapiens
gctgacctggttgtggggctgtgcactgggcagcatttttgaaacgttggggttgttggagtggttggattttc

SEQ ID NO: 764048 - DNA, 100 bp, Homo sapiens
agactgatttgcaacccttccgggaagccatagctctgcatgggaaatcctcattgacgattcaatttgttgaaggccaatttgtggactcctacgatcc

SEQ ID NO: 764049 - DNA, 100 bp, Homo sapiens
ggagacaaacttatgtattttttaagtcacagaattcttgctgttggagctgatagcaaagtcacagctcacatccctgagtggcatcgcccaaaagaac

SEQ ID NO: 764050 - DNA, 75 bp, Homo sapiens
caccgcgggcgccaatggggagcagaaggactcggacacaggtgatgtgtccaatctagatcccaacttctcatt

SEQ ID NO: 764051 - DNA, 82 bp, Homo sapiens
tggctctggctgtgcgcgctggcgctgagcctgcagccggccctgccgaaagaagcttccggttctgaggtcctggaggtgc

SEQ ID NO: 764052 - DNA, 75 bp, Homo sapiens
agagcagcattcataaatttccagacgccttctggcaagaggggagagcctctggaacagtgtacagtggggagg

SEQ ID NO: 764053 - DNA, 75 bp, Homo sapiens
gcgccttccatcttgcagtgcaggcccagaagatgaatccggcctcggcgccccctccgctcccgccgcctgggc

SEQ ID NO: 764054 - DNA, 75 bp, Homo sapiens
gtttgaaagtgcgattgtggaagctgctcggcttctgcagaaagccgtcattacacctgattttgaaaaaaacca

SEQ ID NO: 764055 - DNA, 83 bp, Homo sapiens
ctttcttggcccttgttcccccaaatgtctgactctgactctcggactgagaaacgcaagccttcaccctgccatttctagtg

SEQ ID NO: 764056 - DNA, 75 bp, Homo sapiens
agtacatgctggattgtagaacttctctctctgcgccaagcccatctttgtgtgcttgcatccaactgtgatgag

SEQ ID NO: 764057 - DNA, 83 bp, Homo sapiens
gagctgggcgacgagctgaccctgggagacatcgacggcactgccgccctgcactgtagcagatgcctaaataaagtgtggag

SEQ ID NO: 764058 - DNA, 100 bp, Homo sapiens
gcgctgctgggggccgcccatgaaagcgcagccatggcgggagacatatactgcctggactgcctggctgatgtgagctagtttgtctggttgagttgga

SEQ ID NO: 764059 - DNA, 83 bp, Homo sapiens
aatgcacccgaggggcgatacaagcaggatgtgtacttgcttcctaagaaaatgggattgatctgaagttaaacaaaaaacca

SEQ ID NO: 764060 - DNA, 100 bp, Homo sapiens
ctgagctcgtcaagcagctgtcggccaagctcatcgccaacgcaaagaatggctcaagaagtactgacacatttaaaggagcatcctgatgcttggacaa

SEQ ID NO: 764061 - DNA, 100 bp, Homo sapiens
aacaacccgtacgtgcggaaggccctcaacatcccggagcagctgccacaatgggacatgtgcaaatatgggcacggttatgaaatattttgtgttactt

SEQ ID NO: 764062 - DNA, 100 bp, Homo sapiens
tccaagagccattgaatatgttaaggtgatgatgaccaaacggaccaaagacatgggcaagttcagttctgtcaccgtgtctaccattgatgaagaggaa

SEQ ID NO: 764063 - DNA, 91 bp, Homo sapiens
agctggcggcgacggccacaggggcggcgacggcgcagtgcgaagcgaaacaggtgttggagagcacaatggctgaacaagtccttcctca

SEQ ID NO: 764064 - DNA, 100 bp, Homo sapiens
agaaggaggtccattcctgttggtgacaacaccgtggccctgttctgggatgagcaaggtgtaaagaatgttggctaccagggtatttagcctagttggc

SEQ ID NO: 764065 - DNA, 155 bp, Homo sapiens
gaggggaaaaatggctcggactgtggcggcttcggcggctcaggttgtggtagaggcggaggctcaggcagcttgagcgatgtgcattttgtaagcactttggagccactatcaaatgctgtgaagagaaatgtacccagatgtatcattatcct

SEQ ID NO: 764066 - DNA, 96 bp, Homo sapiens
gggcttctcccaccccctcacgcagagtgcagtcatgggccaccgcaggcagctctgtggccatggatatgttccagaaggtagagaagatcggag

SEQ ID NO: 764067 - DNA, 99 bp, Homo sapiens
tcaaggaggccttccagctgtttgaccgaacaggctctaatgctagaaaatttacagaaacactcaacaccccatgctgcattccagccaaattcccag

SEQ ID NO: 764068 - DNA, 50 bp, Homo sapiens
gcattctttctttccttaggaaaaaagtagctgtgctatgtgtttccaga

SEQ ID NO: 764069 - DNA, 50 bp, Homo sapiens
tggcagtgcaaaaggctggcagtacaggtggacttaaatgaagaagaaac

SEQ ID NO: 764070 - DNA, 75 bp, Homo sapiens
cttccagagccaaggaggaagggttgtccgggtacatcaggaacgtctctatcaagaatacaatttcagcaaggc

SEQ ID NO: 764071 - DNA, 50 bp, Homo sapiens
ctcctggccaccgactcctacaagccttcaaatgtttatctggtgtgact

SEQ ID NO: 764072 - DNA, 73 bp, Homo sapiens
gagggactgcaaaagctctcagggatgctggtctggcagtcaggattcagtggcctttgaggatgtggctgtg

SEQ ID NO: 764073 - DNA, 82 bp, Homo sapiens
cagacctgcaagctctttgacacacagcagttcttgtcaggaatcccttggcaccatgtcctgtgtgcattataaattttcc

SEQ ID NO: 764074 - DNA, 82 bp, Homo sapiens
tgactgtttagcttggccatttgctgctcctacctcaaatagaagcatggcttctcgctgtttctgggatgctgacactgac

SEQ ID NO: 764075 - DNA, 83 bp, Homo sapiens
attagatttaaagatctcaaaaactttcatgtagacctttgtcgtccatttgctgctcactgagaaagtctattcgtgtgacc

SEQ ID NO: 764076 - DNA, 90 bp, Homo sapiens
gccgattcctcctccttggtcgccgcgtccttggctggcgtgtcaatggccagcaaggaggggggtccgagccggcggcggcggcggcag

SEQ ID NO: 764077 - DNA, 100 bp, Homo sapiens
tatggcagtggcagaagattttaattagatctgaacagaattaagacgaacgagctttcacaattgcagcagatgaagatccattggtaaattgatcagg

SEQ ID NO: 764078 - DNA, 83 bp, Homo sapiens
cctgcccagaggggcccactcgctgtcccgtgtccctggccagtgtccttccacctgtccacaagcatggggaacatcttcgc

SEQ ID NO: 764079 - DNA, 97 bp, Homo sapiens
tttcttatatgtgatgccattccagcactggactcatggaggctgagcatttattcagctttgtttgctagcaaaatgctttaagcctgcccttcca

SEQ ID NO: 764080 - DNA, 101 bp, Homo sapiens
gtacgggctcccttcgccaaactcttcattttctctgtgattggcgaggacaacgtggcagtcccctcacacctttataaggtaatcctggcccgcagaag

SEQ ID NO: 764081 - DNA, 89 bp, Homo sapiens
gttacgtgaagtcaagtaaaatcgcacactgatgttgaaatgcttcaggccagtacatctaacccaatccctggagatggtttctctcg

SEQ ID NO: 764082 - DNA, 101 bp, Homo sapiens
tttcgaccaggatgaggagacatgttggaactcagaccagttgtcgacaacagtagcaactgggcagtgtgtgggaaaagctgcggtgtcatctccatgcc

SEQ ID NO: 764083 - DNA, 98 bp, Homo sapiens
ttgacgtggcgggttgctttccaaaatggcgcgggtgctgaaggctgcagccgcgaatgccgtaggattggattcagcatcaaaatacatctactcat

SEQ ID NO: 764084 - DNA, 101 bp, Homo sapiens
cttcgtgaacggggtcctcttctgcaaggtccggctgctggatggaggggattttgtcagcttgtcgtcaagacagcaactctggaaagtggcttctaact

SEQ ID NO: 764085 - DNA, 100 bp, Homo sapiens
cgcctcgactccaaatggttgaaaacagatatacagaatacaaatggagagatttgcatgggatgcagaaatatggaagactaaccaagcagaccaggag

SEQ ID NO: 764086 - DNA, 100 bp, Homo sapiens
ccaatgaagtccattgtgttgaagagattctgaagatggcttccggaaagtggtccacatcgagcagggcggcctggtcaagccagagagagacgacacg

SEQ ID NO: 764087 - DNA, 100 bp, Homo sapiens
caggccccggcagcgcctgggacaagagagcctacgactagatttgcatctttacgtcctgcgcggaggctgctacacacatgcagaagtcatgctggtg

SEQ ID NO: 764088 - DNA, 82 bp, Homo sapiens
cctgcttctgctgctggtggggctcacggcgcctgccttggcgctggccggctacatcgagacctgcctagagctggaacgt

SEQ ID NO: 764089 - DNA, 85 bp, Homo sapiens
ttcatcaaaaatagtgatagctttgataagtttgggtacccagaccccacctacctgacccgggtgcaagaggagctgagagcga

SEQ ID NO: 764090 - DNA, 100 bp, Homo sapiens
taatcttgtgtgtgttttcaaattttttaaaaatagagatctgtagcagtgttggggtgtcatggagaaactccagctgggcccagagattctgcagcgg

SEQ ID NO: 764091 - DNA, 82 bp, Homo sapiens
gccaagaaggagaagcagctgcggaaaatgctagaagggatctaccgaacagaaagggacaaagggacattgtatgagctca

SEQ ID NO: 764092 - DNA, 100 bp, Homo sapiens
gggaaggaactttgggtcctgaatcttctgggagctgaggaaccagatatcttgaaaagctgccagaaagaacatgaacgattggatgcccatcgccaag

SEQ ID NO: 764093 - DNA, 75 bp, Homo sapiens
gctgccacacaagaagctgcagagactgttcctcagaaaggtcctggatgcctcatcccttagtttcaacaccag

SEQ ID NO: 764094 - DNA, 101 bp, Homo sapiens
tattcggaaacctatcgattacacagttctggatgatgtgggccatggtgtcaaggatggggatagtgtgatggtccttccaaccatccctgaagaagaag

SEQ ID NO: 764095 - DNA, 90 bp, Homo sapiens
caatttgaagatacatgagacagcagccaaacccccagttgatggagtttgcactgtagcaaattgcgttggaaaagaactagctccaca

SEQ ID NO: 764096 - DNA, 94 bp, Homo sapiens
cttcgagtgacccgggtgccgaggagcgggaagagttgctgggcaacgaatcaaatggccacgcagtcccggcaaattcatctcttttatcctc

SEQ ID NO: 764097 - DNA, 75 bp, Homo sapiens
gagcagccctggtgtcacctatcagtaaaaggcaaattttactgcaagcctcacttcattcactgtaaaaccaat

SEQ ID NO: 764098 - DNA, 75 bp, Homo sapiens
gctttattgacctcgactcccatgcggtacagcacgtgggagccagaagagcacatcttggacccccgcctcgtc

SEQ ID NO: 764099 - DNA, 96 bp, Homo sapiens
ttgtgcaatgtttagccaacccaaattaccttaatttgagggagataaatctgcaggacatcaaggaagatttagaattggatccagaggaaaaca

SEQ ID NO: 764100 - DNA, 51 bp, Homo sapiens
gacggaaccgccacagcactcaacgttacagtgtttctgccacctctgtac

SEQ ID NO: 764101 - DNA, 75 bp, Homo sapiens
gaactcaaaatacttctctctccagtttattcatggtggtcatactgccaagatatctgatttctcctggaatcc

SEQ ID NO: 764102 - DNA, 101 bp, Homo sapiens
cccccgccggcgctgacggactgggggcgccgcccgcgcccgggaccgacccctctgctcgcggccgcgcctttgagaattaaagctatagagagtcccaa

SEQ ID NO: 764103 - DNA, 95 bp, Homo sapiens
cacgaggttggtcatgaaagagattccttgcagagacagctcaacacggcacttccacaggaatttgaggatccaagggatgcagatgatgctgt

SEQ ID NO: 764104 - DNA, 80 bp, Homo sapiens
aaatgatgtattttgtgatcgcagcgatgaaagggtgcttcaaggatgaccgcatcgtcttctggacttggatgttctcc

SEQ ID NO: 764105 - DNA, 51 bp, Homo sapiens
ctccccagccacgtgaaactctccaaagcctgaactgatagctgcagagaa

SEQ ID NO: 764106 - DNA, 74 bp, Homo sapiens
tggaggggcgggccggacgctgagcggagcagctgcgccacggatctgcctacaaactggtttgctactttacc

SEQ ID NO: 764107 - DNA, 97 bp, Homo sapiens
ataatatttatggagcatatattatggaacacaaggtcctgctgtactagccaccaaagcagctgctggtactaagaaatatgatcttagtaaatgg

SEQ ID NO: 764108 - DNA, 98 bp, Homo sapiens
ggatcgccgcgctcagcgacaaacaaggatggaagcttcctggcgccaggtggccggtggccgaggccgatcccggggacgggccactgccgccccct

SEQ ID NO: 764109 - DNA, 74 bp, Homo sapiens
ctggcgtcaccatgggggctgtgctgggtgtcttctccctcgccagctggagttgtggaaagtaaaaatgtagc

SEQ ID NO: 764110 - DNA, 82 bp, Homo sapiens
ctctttctcttccggatgtcccggagcaaggtgttccatgtacccctggaggagagaaaatacaaggatatgaaccagtttg

SEQ ID NO: 764111 - DNA, 75 bp, Homo sapiens
ttttgtcagattatcaggatgaggcatctactacaagccttagtgggtctgatagtgagaccgaggggaaacaac

SEQ ID NO: 764112 - DNA, 100 bp, Homo sapiens
attcaagttcgaaatatggcaactttgaaagataaaagttcgtcgctgcttcctgtgctccaggagaggacatctcctgtattcctgtccagcccccctt

SEQ ID NO: 764113 - DNA, 75 bp, Homo sapiens
cggcgtccccggcgcgaagaggctggactcggattcgttgcctgagaactgataaatttcaaacggaagagagtg

SEQ ID NO: 764114 - DNA, 90 bp, Homo sapiens
cgactgtcattcacaaccccctgaaagcgaccatggccaacctggagcgcaccttcatcgccatcaagccggacggcgtgcagcgcggcc

SEQ ID NO: 764115 - DNA, 82 bp, Homo sapiens
ctgaggcagagtgtggttcagtaagtgttcaagcagccctggccagggatcatgcgcacagtctatgggaaccacgaacgct

SEQ ID NO: 764116 - DNA, 83 bp, Homo sapiens
cttgggcctcgcgccggctatggccgtgccctggggctgagccctcagaatatatacagccctgctctgggacacacctccat

SEQ ID NO: 764117 - DNA, 75 bp, Homo sapiens
tgggaaaccgggtctgctgcggaggaagctgagcttcatagcaagtgaagtactcaagttgttcagtcttaaaaa

SEQ ID NO: 764118 - DNA, 82 bp, Homo sapiens
gcttcagcactggcagcccccagatcattgagaagcagccaggccacattcggagcagggttttcagggaggtggagatgct

SEQ ID NO: 764119 - DNA, 98 bp, Homo sapiens
tccgggacaacatgctgcggggcacagtgttctaagaacggaagcatctgggctggatggaatttagcatcaagcagagtcccctttctgttcagagt

SEQ ID NO: 764120 - DNA, 100 bp, Homo sapiens
agaggaggctggaagaggaagatgcctagcacagaccttctgatgttgatattgcggtggtggagatgagcgatgccttccggcagccgtccttgtttta

SEQ ID NO: 764121 - DNA, 75 bp, Homo sapiens
aaggctctggataaggaccagtacctgcccaggaaactggtgtcttcagtgccctgggtttgcctgtgacccaat

SEQ ID NO: 764122 - DNA, 82 bp, Homo sapiens
caatccaaccaatgcgaccttaaacaaatttatagagaatgtgaaaacctttgcatcttctgatagtctagccaaggtccaa

SEQ ID NO: 764123 - DNA, 75 bp, Homo sapiens
ctatgattatgaagcaaacatgccagacagcttgaagtacatctggattccttatgtgtgcatgttagcagcatt

SEQ ID NO: 764124 - DNA, 88 bp, Homo sapiens
gaactgcgcaaaaagctataccagacgtttaaggatcggggtatactggatacactcaagatgtgtcgtggaggccgaatgtttgcac

SEQ ID NO: 764125 - DNA, 101 bp, Homo sapiens
tgacatcatccataccaaggagacgctgacacttgtgtttgaatatgtggagcagatgtctcaagtattagatgccatgtttgaaaaattggtcaaagatg

SEQ ID NO: 764126 - DNA, 50 bp, Homo sapiens
gcgccgcgaggtctgcggcctcggaggacagtcagtgacccacaccggcc

SEQ ID NO: 764127 - DNA, 75 bp, Homo sapiens
gccccggagtggggtgtcggcgcctcattcgggtggagctgagccggagacagaggagaaggcagagccccccca

SEQ ID NO: 764128 - DNA, 90 bp, Homo sapiens
tcctgcccctcgttgatgagagcattcgaagtgacctcagcagggcatccagataacatttttgaacgcacagatcgacagacattgttt

SEQ ID NO: 764129 - DNA, 75 bp, Homo sapiens
gtgagcgagaaagccgttgcctccagcaccacttctaatggtgctggagaatctggtaaaagcaccattgtgaag

SEQ ID NO: 764130 - DNA, 75 bp, Homo sapiens
atttcaactacagatactttgaagtagaagaagctgatggttgtactcgtaaaacaaggatcatcgatgttgtct

SEQ ID NO: 764131 - DNA, 80 bp, Homo sapiens
tacaacatcaagaagcaaaatgctgagaagcagctgctggtggccaaggagggggcagtgagcacacgtatgagagctgt

SEQ ID NO: 764132 - DNA, 96 bp, Homo sapiens
ggaggaggattcagggaataggagctggggagcccttctgcgccacagctttgtagctggtgccttcggaatatgatggcaaatcaccttgtaaag

SEQ ID NO: 764133 - DNA, 100 bp, Homo sapiens
tccgagaaggactggacacctttctgggactgcagcaccagggtggctacgcctcccggctggtttgaaggttgaagtgactcattgtggaacaatgaga

SEQ ID NO: 764134 - DNA, 100 bp, Homo sapiens
gcagagctcattgaaagattggagcagttaaccatgtgactgagtgccctgtggaatcgtgtgggatgctacctgataaaccaggcttctttaaccatgc

SEQ ID NO: 764135 - DNA, 100 bp, Homo sapiens
aaagaatgtatatgcaacaactgtggggacaccttacaaagtggaatggatatgaaagcatacctgagatctatgatcccacatctggaatctggaatga

SEQ ID NO: 764136 - DNA, 100 bp, Homo sapiens
gtcagtgttaaaggaacctctacaacgaaggtgaagccacggaagataagatgaggccacactgcaaaaggggtcctggagtttgctgaaggatctgaaa

SEQ ID NO: 764137 - DNA, 100 bp, Homo sapiens
aggactccaaaatggcgtcagttgccgaggcctgcctggagccccagatcaccccttcctactacaccacttctgacgctgtcatttccactgagaccgt

SEQ ID NO: 764138 - DNA, 100 bp, Homo sapiens
agtgaccggcgaggtgcacattggaggcgtgatgcttaagctggtggagaaactcggacccagatgatgtggtaccagttggccaaagaagagcctggtg

SEQ ID NO: 764139 - DNA, 83 bp, Homo sapiens
tgatgatgtctcatatgtctcaggcttccatgcagcctgccttaccgcaacacgctagaagggtttatgaaattcttcgacta

SEQ ID NO: 764140 - DNA, 75 bp, Homo sapiens
aggagaggcccgcggtgaccgaggcctgggccccggggccatgaagcccccaggaggagaatcgagcaatctttt

SEQ ID NO: 764141 - DNA, 100 bp, Homo sapiens
cagttatccacggactggaagatcaaaagaggggaagaatatttctcagccctccgttctcaagacagatgagtgctttagaaagaggactctgcagcgg

SEQ ID NO: 764142 - DNA, 83 bp, Homo sapiens
cagctaccctcagctctagctgatactacagacagtacaacagcagtagaccgactggaagaccacggcgtagcagaagccat

SEQ ID NO: 764143 - DNA, 75 bp, Homo sapiens
tttagagctggcagcagcatctcagcccaagagaaggatttgcctcaaagggcactgcaaaaattgaacagagga

SEQ ID NO: 764144 - DNA, 51 bp, Homo sapiens
ccaagagcacattgcctggtaagatgatgccagcctgttattgcgctccag

SEQ ID NO: 764145 - DNA, 100 bp, Homo sapiens
gattgaagctttgataaatgaaatcttcctaagtataggtggtggcattgggggacgtgccggatggtacggtggtgactgtgatggcaggcaatgacga

SEQ ID NO: 764146 - DNA, 74 bp, Homo sapiens
ggccttactccttcacagatcggccacatccacgtcctccgagcctacatcaagacccaagtgaacaaagagct

SEQ ID NO: 764147 - DNA, 83 bp, Homo sapiens
aggacagcgccttcctcaacgacgcggacatggtcatgagctttgtgaacctggcaagatcagcattggacacagctgcacgt

SEQ ID NO: 764148 - DNA, 90 bp, Homo sapiens
gcacctttgagcaatggtctttgctgtgccttctctactgatggcagtgttttagctgctgggtggaagcagggaaaggcctggagatga

SEQ ID NO: 764149 - DNA, 90 bp, Homo sapiens
atctgccccagctgtaataggactgcccatccactgagacatagtgaaaaaccttttgaatgtccaaattgtcatgaacgatttgctaga

SEQ ID NO: 764150 - DNA, 100 bp, Homo sapiens
gaactctccacagccatcactcatgtccataaggagattcgacttccacctgaagtaaatcggatattgtatataagaaatttgccatacaaaatcacag

SEQ ID NO: 764151 - DNA, 100 bp, Homo sapiens
ggggtcagctagtgtccgctctgctcggccgcgggctcccggaggactgcagaatggagaagctgatgccatgagcttggatggagggtttgtctacata

SEQ ID NO: 764152 - DNA, 128 bp, Homo sapiens
tcctgcagtttcaaaagaattggccaaagaagttgagaaaatgggagcagttttcatggatgcccctgtttctggtggtctgcgcggggcggccattggcggcggagtgtcacgtgaccgcgggggcg

SEQ ID NO: 764153 - DNA, 100 bp, Homo sapiens
aagaagccctattgtaatgcctgtccatcccacatggcttccagaacaaggaggctgctagctccccaacaccatccatcacccttagccaggtgcctga

SEQ ID NO: 764154 - DNA, 87 bp, Homo sapiens
cggtcaggaagtattaaggaaggtactttgaactcaagtaaacaaaagggaagattttctcgttgatactggagactgcacaacaat

SEQ ID NO: 764155 - DNA, 74 bp, Homo sapiens
aatagccagctccccagaaatgaacctgcccacggtgtccgcgctcaggcagcccctgtcaaagggaacaggaa

SEQ ID NO: 764156 - DNA, 100 bp, Homo sapiens
gccaggatcttataaaacaaatgctgctgctatgaatatgggtcgaccattccaaaaaaatcgaaatgcactcggtgatggaaagagagccactattctg

SEQ ID NO: 764157 - DNA, 87 bp, Homo sapiens
actggaccgggaaggagcatcccaggacctaccagaatctggatctgtctggctccattgatgacctccccacgggaacggaagcaa

SEQ ID NO: 764158 - DNA, 100 bp, Homo sapiens
cctcctgagaagctgggattacaggatgccatggcttttaataagtttaatgttcttcactggcacatagttgatgaccagtctttcccatatcagagca

SEQ ID NO: 764159 - DNA, 89 bp, Homo sapiens
gaggaggaagatggcgggacggctgccggcctgtgtggtggactgtggcacgggacaatgcagatcttcgtgaagactctgactggtaa

SEQ ID NO: 764160 - DNA, 100 bp, Homo sapiens
gcagctgcctcagttcttagcgcagctatcatggtgaacttacttcagattgtgcgggaccactgggttcatgttcttgtccctatgggatttgtcattg

SEQ ID NO: 764161 - DNA, 50 bp, Homo sapiens
ctggcctgccatgtccgggagaagacagtctgtgtatgatgaccaaccaa

SEQ ID NO: 764162 - DNA, 102 bp, Homo sapiens
agccggtaacaaacgagggttcccgggattggaccgacgcagccatggggacaaaacatggatgatgtcatggttttggtggattcagaagaggaagaggag

SEQ ID NO: 764163 - DNA, 51 bp, Homo sapiens
gaaagagaagtgctcttagaaaagatgagacaaacagatcgggatgtaata

SEQ ID NO: 764164 - DNA, 75 bp, Homo sapiens
tgttgacgttggtgctcgtgacctctttatggatcttaatgcaagtcatgaacttgaatgtgccgatgaggcctg

SEQ ID NO: 764165 - DNA, 100 bp, Homo sapiens
agcattggtgcacgatgtactggaaaaggggaagatagtgatgtactcagtataaatgcagatgcttatgacagcgacatagaaggcccatgcaacgaag

SEQ ID NO: 764166 - DNA, 101 bp, Homo sapiens
gcgtcgctcacgctgggagctgtagatcgcagctgttcctattcggccatcttggctcctccattctgcttttaaggaatgtgcagcaatcagttaaccgc

SEQ ID NO: 764167 - DNA, 87 bp, Homo sapiens
ggcttccgtcccggacagagcccgtggtcgcgcaggatgaagtcattgctgtttccgaaaaggtgattgtgaagcttgaagacctgg

SEQ ID NO: 764168 - DNA, 100 bp, Homo sapiens
aacttgatgaaggtacacccaatagagagagatggagtctcactctgtcacccaagctagagtgcagtggtgtgatcatagcactggagcctggaactcc

SEQ ID NO: 764169 - DNA, 83 bp, Homo sapiens
agccgcaggtggtggcgcgcgccgtgtgcttggtgaaatgacaatggatgctctgttggctcgattgaaacttctgaatccag

SEQ ID NO: 764170 - DNA, 82 bp, Homo sapiens
cggcgcccggatgggcagctgagttaccggtattgtaagaacaagccgtacccaaagtctcgcttctgccgaggtgtccctg

SEQ ID NO: 764171 - DNA, 82 bp, Homo sapiens
cggctgttcgaggccttgactgtagacactggccaaaagaagaccctagacaagaaagatggaagacgaatgtcttttcaga

SEQ ID NO: 764172 - DNA, 87 bp, Homo sapiens
ctggtacatcgcctcagggcattcatttcaggctccttctaaatggccaagcttaaagcttttcaagccaggccaagaagctgtgaa

SEQ ID NO: 764173 - DNA, 100 bp, Homo sapiens
aatcattccttctcacttggcctatggaaaacggggatttccaccatctgtcccagagctatgaaccagatgagctgaccaaagagatggcccacctgga

SEQ ID NO: 764174 - DNA, 74 bp, Homo sapiens
aagaagtggggaaaacaaggctcagacaggttcacagcaacccaatggacatgcctggaagagagctcaatgag

SEQ ID NO: 764175 - DNA, 98 bp, Homo sapiens
tgccacccaagaagcggttgccgctttgctaaaggtagttttgcagaagtgcaaagtcaagtctctcttgcacagtcctggagactacatcctcttaa

SEQ ID NO: 764176 - DNA, 51 bp, Homo sapiens
ccctatccagcaaagctctaaaggacagagcgggatgccaccagcttgtcc

SEQ ID NO: 764177 - DNA, 119 bp, Homo sapiens
gccggaggaaagcgggaagactcatcggagcgtgtggatttgagccgccgcattttttaaccctagatctcgtgctgcttttgacacaaaaacggggttacgtgtggcagtgaagaagc

SEQ ID NO: 764178 - DNA, 100 bp, Homo sapiens
agccatgggcaacctgcagatcgactttgccgacccctccagagcgatgttgatatatcactacttgtgtcttttaacaaaatgaaaaaattgactactg

SEQ ID NO: 764179 - DNA, 100 bp, Homo sapiens
ggcacccgaattgccaaagttttggaaaaggactgatcctttgaaatactccagccatgactaaaagagaagcagaggagctgatagaaattgagattga

SEQ ID NO: 764180 - DNA, 75 bp, Homo sapiens
gtgcccgcgaggagccgccgcgcgcccgcgccctccgcgcgacgccagggccgttgccgtctgcacccagaccct

SEQ ID NO: 764181 - DNA, 76 bp, Homo sapiens
acctggccccgctacagcaaaccaggaagccttaaaaatgtcatgctggtattgggctacaaccggaaaaatactg

SEQ ID NO: 764182 - DNA, 95 bp, Homo sapiens
ggtcgtgcgtctgaagcctacaagaaagcctgcctagggtagttaaaagacgagtgaatgctctcaaaaacctgcaagttaaatgtgcacagata

SEQ ID NO: 764183 - DNA, 101 bp, Homo sapiens
taaaggagatggaagtgatgtaccatcatgggtagcctttgataaacaggtgattcgcaaggggtggctcaccatcagcaacattggcatcatgaaaggcg

SEQ ID NO: 764184 - DNA, 74 bp, Homo sapiens
ggcatcacgtcccccagcgccgacaccaacaagcgcaagagagacgaagccctcccaggcccaatacttcaaag

SEQ ID NO: 764185 - DNA, 86 bp, Homo sapiens
agaaaaagtgaagaaaacaactcaggtcaaagactacagctttgtcactgaagatgcagaggccaggatgtgggcccagccctgtg

SEQ ID NO: 764186 - DNA, 96 bp, Homo sapiens
gctttctggaagaaaggaaatgttaggatcactttattctgctgcccatgatggggggagctttcatggactcgcccaacgaggacttcagcaccg

SEQ ID NO: 764187 - DNA, 100 bp, Homo sapiens
cttcacagggggtagaacaagtggtactaggattatacattgtaagaggtgacaacgtctgtgatgcagatccatccgccctagcaaaatatgttctggc

SEQ ID NO: 764188 - DNA, 93 bp, Homo sapiens
cggccaagcagccaaccatgctcaacttcggtgcctctctccagcagactgcggtacaatgactcttcttgcttttcacctaagttgaataag

SEQ ID NO: 764189 - DNA, 75 bp, Homo sapiens
acagcttcacgtcgcctgacccccacaagggggtggcccgattctacaggtcacggaaaaagcacttgatcacca

SEQ ID NO: 764190 - DNA, 75 bp, Homo sapiens
cctgaaaaacggatgagacttcagataagttctgaacgtcgaaaagaaaagtctcgagatgcagccagatctcgg

SEQ ID NO: 764191 - DNA, 80 bp, Homo sapiens
ctacaacacatggtggaatgtatccgggaggtcaacgaggtcatccaggacacaatgtttgcacgaggactgaagaggaa

SEQ ID NO: 764192 - DNA, 100 bp, Homo sapiens
aggaaacctaaccaatgactgtggaataatatggaagaagatggaaaaaacttgtttaatggaataactgaagtgaagtgatggactccgatttggagag

SEQ ID NO: 764193 - DNA, 98 bp, Homo sapiens
aaaattgaaaaaatggttgacctcacccagccatcccaggcctcaggacctgagttctccgacgcccacatgacatggctgaactttgtccggcggcc

SEQ ID NO: 764194 - DNA, 50 bp, Homo sapiens
aaaatcatcaacctttctaatgaagggcccaatgtaaaggctgttgctac

SEQ ID NO: 764195 - DNA, 100 bp, Homo sapiens
ccttgatacctctcactattctactgctggaagctcaagtggtgtggaatatcaaacaaatgattaagttgacacaggaacatatagaggccctattgga

SEQ ID NO: 764196 - DNA, 74 bp, Homo sapiens
gtggagcaggcgcagaacagtcggaggtggcatccttagctgggcctggagggcaagtggaaatagaacagaac

SEQ ID NO: 764197 - DNA, 100 bp, Homo sapiens
gcgtagcatccggaaacatgtggccctacatcaggaatttcatggcaagggcattgtgtggctgctcaattaatgtaccaacactggatggaagaaacat

SEQ ID NO: 764198 - DNA, 140 bp, Homo sapiens
gaagattcaccaaataagctatatactttggttacctatgtacctgttaccactttcaaaaagatagaatctcactatgttgaccaggctggtcttgaactcttggcacccaagcgatccttttgcctggaatcccaaag

SEQ ID NO: 764199 - DNA, 75 bp, Homo sapiens
cccccgattcaccaacgagccctagtcttcaatgaaatttatccagtatggacttactcttacctggtgctactg

SEQ ID NO: 764200 - DNA, 114 bp, Homo sapiens
cagcagtgatgatgaagagcctagcacctcttatactgatgtggagtggctgaaacttctcagcaggcgcatctacactagtgacctgaggagagaaaccctaaccccacaatg

SEQ ID NO: 764201 - DNA, 121 bp, Homo sapiens
atccggctcctccagctaccggcccaaggccatctacctggacatcgatggacgcattcagaaggttatgaagacagtatggagtttccagaccatagtagacatttgctacagtgtctga

SEQ ID NO: 764202 - DNA, 100 bp, Homo sapiens
cggcccacagtgggggtgtgcaaacccgagagaactgggtgtgcaactgaggaacatggctcaagaaactaatcacagccaagtgcctatgctttgttcc

SEQ ID NO: 764203 - DNA, 50 bp, Homo sapiens
cagagaccacactataccatccaagaaatatttttcttcatggccctgat

SEQ ID NO: 764204 - DNA, 100 bp, Homo sapiens
ccaacagaatttatatagagatgtgatgttggagaactacagaaacctcgtctccctgggtgtatcagttcctatccctgtgattggactgagggacgaa

SEQ ID NO: 764205 - DNA, 95 bp, Homo sapiens
tttctattacatcatgcggcctgatatttgtctttatggaactcagcaacatcacatacaggatgaagttggagcccttgtttttgacattggat

SEQ ID NO: 764206 - DNA, 100 bp, Homo sapiens
ccaagcactctagatgccctcaactatgctctccgctgtgtccacagcgttcaagtgctcatctctcagagatctagaacttgcctaccaagtacatggc

SEQ ID NO: 764207 - DNA, 75 bp, Homo sapiens
cgatttattggaggcctacttgcagcatattacctatcaggagaggaggttttgaacgaagaatgtgatcagaac

SEQ ID NO: 764208 - DNA, 75 bp, Homo sapiens
accgaggctcggccgccccgccgcgaggtttggtgcacctcgatttggaggaagtagggcagggcccttatctgg

SEQ ID NO: 764209 - DNA, 90 bp, Homo sapiens
gtcctgatgccaacagtgtaccagcagggcgttggctatgtgcccatcacagccactgaggcggctcccagctgcgttggcgacatggcc

SEQ ID NO: 764210 - DNA, 74 bp, Homo sapiens
ccgccgccccgaaactttcaccgcgagcggttaatagaagatgaaattgcaaccattcttaaatctacattgaa

SEQ ID NO: 764211 - DNA, 80 bp, Homo sapiens
tttgggtcctctgaggccccttgaccagggtgtcagcctgaccatggcgcgggagcgtgggcagcttgtgttccttgagg

SEQ ID NO: 764212 - DNA, 75 bp, Homo sapiens
gagcaaatgcagcatttttgataggtgcctatgcagaatacggggtgctttgcattcaggaatacagaaaaaaca

SEQ ID NO: 764213 - DNA, 153 bp, Homo sapiens
gaaggagctagcagatgccagccaacaactggaacgactgaggcaggacatgaaagtccagaaattaaaggagcaggtgccagaaattatgggagttatctgtgcccagttatccataatcagccagcctagagtccgccaacaaatcataaa

SEQ ID NO: 764214 - DNA, 75 bp, Homo sapiens
caataaactgctccaacattcgaatttatgaaaggccatccacggcttccgagagacagagaagtcgcgctggtc

SEQ ID NO: 764215 - DNA, 83 bp, Homo sapiens
ccctctctgtttctccccaaaataaccattctccagatccagacaatgcagatcttcgtgaagactctgactggtaagaccat

SEQ ID NO: 764216 - DNA, 50 bp, Homo sapiens
gtgggctctgtcagccttgcagggtggttgagtttgcctcttatggtgac

SEQ ID NO: 764217 - DNA, 90 bp, Homo sapiens
gatcccatctcaggagcacctgaatggtacggacattgctgcaggagaagaggttgccatcaagcttgaatgtgtcaaaaccaaacaccc

SEQ ID NO: 764218 - DNA, 100 bp, Homo sapiens
gaaaaacctgacttttatcatcatattgataatctcaggagaactctatgcagaagacaccaatgggaatcccaatggggaagtcgatgctggtgcttct

SEQ ID NO: 764219 - DNA, 90 bp, Homo sapiens
cacttcggaggattgctcaacaaccatgctgggcatctggaccctcctacctctgaggttggaaagaaccatgactgtattcaggaaggc

SEQ ID NO: 764220 - DNA, 74 bp, Homo sapiens
ccaatgacggttgcttgaactttattgaggtgcaactgccaaaagaactggcgtaagaggcaacagagccatct

SEQ ID NO: 764221 - DNA, 88 bp, Homo sapiens
gccgaggacgcagccaacagggctgccagtgcatctgaatctgccctccagggagatacttcaggggattaccggaagattctgctga

SEQ ID NO: 764222 - DNA, 75 bp, Homo sapiens
gctaagcaagcatctaaaaagactgcaatggctgctgctaaggttgcagatattttattccaaactgcccaaaat

SEQ ID NO: 764223 - DNA, 82 bp, Homo sapiens
gaccgtgaccgagagcgtgaccgagagcgcgaatatcgtcatcgttagaaggtttactcctggcttgggggcattaggaagc

SEQ ID NO: 764224 - DNA, 89 bp, Homo sapiens
tgcaaatctttcaccaatgtaagtctgccttatgttcctccagccaattgcaaaggacaggccgacggtcgcaaggtcctacggtcaag

SEQ ID NO: 764225 - DNA, 100 bp, Homo sapiens
ttttctctaactcagaaacatcagttactctgaagggcatcatgcatcttactgaaggtaattaataaaatgtctccaacatctctaaagatcacactaa

SEQ ID NO: 764226 - DNA, 116 bp, Homo sapiens
ggaagtggccggcgagcccggtccccgccggcaccatgggtacaggcatccttcacctgctattgttgcaagaacagtcagaattttacatacactactaactctggttaacaaac

SEQ ID NO: 764227 - DNA, 100 bp, Homo sapiens
tctcccatgtgaactgctggcaggctgccttccctgacccccagttacgcctggaatatgaaggcttccccgtcccggaggtcacaagccccaaagtgga

SEQ ID NO: 764228 - DNA, 75 bp, Homo sapiens
ccgtgaccgagagcgtgaccgagagcgcgaatatcgtcatcgttagaaggagaaaagccttacagatgctcatgg

SEQ ID NO: 764229 - DNA, 100 bp, Homo sapiens
tcctttatggtgatgaacatgtggctcagtctccctatattttgaaagctcatggaatgctgtgtaaatgccctggtgacatcatttaaagagactatct

SEQ ID NO: 764230 - DNA, 89 bp, Homo sapiens
ccagccagcacctccttcaggttacttcatggcagctatcccacaggacccgtggcacattcccggtgtgcctgagcccgtgcaccgcc

SEQ ID NO: 764231 - DNA, 75 bp, Homo sapiens
agaggaaaggcggcttttagccagggcggcgactggcggcgcgatggacctgaccgggctcctgctggacgaaga

SEQ ID NO: 764232 - DNA, 100 bp, Homo sapiens
cagtatttcaagagtcacttctttacttggtgcaggaaggcagtctttgctacgtacagcaaaagtgctttaagcagtggcttaaagggcagagcgcttg

SEQ ID NO: 764233 - DNA, 74 bp, Homo sapiens
ctccaggaagcacagagctgtaccagtacacggcccacgttgccagctctctagatgagaccacctatgaaaga

SEQ ID NO: 764234 - DNA, 75 bp, Homo sapiens
ccagatccatttacactttacaactgattcttgctattccaaatcctcttccacgttgacagcccttcagatatt

SEQ ID NO: 764235 - DNA, 99 bp, Homo sapiens
gcgctttgagctactgggctgtgagctgaacgtggaactctctagcctcctggttcggaatgtcaactatgagatcccctcactgaagaagcagattgc

SEQ ID NO: 764236 - DNA, 80 bp, Homo sapiens
aatatctgtcttcggtggactccttcggcagtccacccaccgccgccgcctcccagttcaaggagcagggacaagttaca

SEQ ID NO: 764237 - DNA, 100 bp, Homo sapiens
aggggcgtcggaccagccggcgcaagcgggcgaaggtaacacaagtggcaagacagccgggaacccctaccccatccccttattcagcacatgaaataaa

SEQ ID NO: 764238 - DNA, 100 bp, Homo sapiens
acagtaccaaacacgattgttgtttcttggactgcagaaattggaagaatatccttggaacagaagatcttattgtggaagtgacttccaatgatgctgt

SEQ ID NO: 764239 - DNA, 75 bp, Homo sapiens
cgtggacaaagctgttgtctcagggagcacagaagaatggtctgccgaaaaccgaccgacccggttgattggcca

SEQ ID NO: 764240 - DNA, 100 bp, Homo sapiens
aaaagagccctgcaatttgaagatacatgagacagcagccaaacccccagagccatttcctgcttttaagtcttggcaggaggactctgagtctggagaa

SEQ ID NO: 764241 - DNA, 100 bp, Homo sapiens
ccagaggagtctctctcatcctcccggattgctctgaggccaggagagaggagtctgcaatgccgagtggaggaaggaggaaccggagtgtgagcagtag

SEQ ID NO: 764242 - DNA, 101 bp, Homo sapiens
aaatgcaagaagactgatggagcaggcttgcaatattaaagatcttaagattgaaagtgatgttcaagaaccaactgaaccagaggatgaccttgacatta

SEQ ID NO: 764243 - DNA, 74 bp, Homo sapiens
tctcgatgaggataacatccctccagaagatgagctgcaagcgtttgctcaccacggccgctccctgccaagat

SEQ ID NO: 764244 - DNA, 50 bp, Homo sapiens
ccagaagcgggcggcgcgggggagatgctcaaagcttggattctgccgtg

SEQ ID NO: 764245 - DNA, 101 bp, Homo sapiens
agcacagttcctgggaaggtggagccaccagcctctccttgggccgttgctccagggagaactgcaaatatcttcatccacccccacatttaaaaacgcag

SEQ ID NO: 764246 - DNA, 51 bp, Homo sapiens
gcctactcaaatcctttctgaggctttacacggattttgatgaaattcgac

SEQ ID NO: 764247 - DNA, 50 bp, Homo sapiens
agaaacacaaagcagcccaaccaaaggcatgcttgagagttcaaaccggc

SEQ ID NO: 764248 - DNA, 119 bp, Homo sapiens
ggaaacaatggcatttacagaaagagtcaacagcagtggcaacagtactatactggcaattgctggagaagattttgcaattgttgcttctgatactcgattgagtgaagggttttcaa

SEQ ID NO: 764249 - DNA, 51 bp, Homo sapiens
gaggcctccacagccatgtggaactcaaaagcagacatgtgtcaatttaaa

SEQ ID NO: 764250 - DNA, 50 bp, Homo sapiens
attatctcgagcaaattaagcactagtgtaaaactccgaagtcctaaatc

SEQ ID NO: 764251 - DNA, 100 bp, Homo sapiens
agcgcatgtccgcgctccgcttagcaggtactccaaagattcaggtttactcacgtcatccagcagagaatggaaagtcaaatttcctgaattgctatgt

SEQ ID NO: 764252 - DNA, 121 bp, Homo sapiens
aagaaaaaagaatggatcaaccaagaacgtcaaacactccaacaattgagagcatttaaagatacttatcagatgtagacttcctagatgattcttcaacggagagtttgcttctgagtgg

SEQ ID NO: 764253 - DNA, 98 bp, Homo sapiens
tccttcagatcatcctcgggccagcacaatattcctcagtaaatctcagacggacgcatttatgacattaacagagaacaggactatgtcaagaattc

SEQ ID NO: 764254 - DNA, 76 bp, Homo sapiens
taacttagaggaacgaggattatacagaaatttgaagtgttgactttaaggtgaaaacaatttcagtggatggaaa

SEQ ID NO: 764255 - DNA, 100 bp, Homo sapiens
tgcagctgcagatttcagtgatgaagatgaagatgatgatgttgatggaagagagaaaagcgtcattgatacttcaacaagtgcttcatgttggcggaac

SEQ ID NO: 764256 - DNA, 80 bp, Homo sapiens
ggccagtggcactcccagctcggaacttgctactaccagcaccatgccctaccaatatccagcactgaccccggagcaga

SEQ ID NO: 764257 - DNA, 98 bp, Homo sapiens
tctttgcctgggaagttgaatgataaagccagaagaaagcatgctttctgatcattgttctaagctggtctatgtccatcaccttcttggagaaggag

SEQ ID NO: 764258 - DNA, 100 bp, Homo sapiens
gtgagctcaccgcccagcccaaaccaggagattgcgagggagcgatgcggtgcagcgcgatgatgtgatgccagccacttactgtgaaattgatttagat

SEQ ID NO: 764259 - DNA, 101 bp, Homo sapiens
tacacttggcctttcgacgacatcatcgtcttcgcctatgcctgccaggctgctggatcccatgacagattctgttgtcacgtctccttacagagtttgag

SEQ ID NO: 764260 - DNA, 75 bp, Homo sapiens
tctccgcctcagcccaacggggaggtgagaagccctaccactgcaactgggacggctgcggctggaagtttgcgc

SEQ ID NO: 764261 - DNA, 75 bp, Homo sapiens
ggacgacgagtacgactacctattcaaaggtcagcccaaggccaaccccactgtcactctgttcccgccctcctc

SEQ ID NO: 764262 - DNA, 74 bp, Homo sapiens
ttccgtctggccgggatgactggaagggaaggtggattcagtgctttttccctggtacgtgagcccctttcccg

SEQ ID NO: 764263 - DNA, 51 bp, Homo sapiens
cctgaagaagtgtgttggcctgggccagtatggaaattaccagcagtaagg

SEQ ID NO: 764264 - DNA, 50 bp, Homo sapiens
cgcgcctttgtgcgcgcgccgagagagagttcaagtggatggccttgagg

SEQ ID NO: 764265 - DNA, 82 bp, Homo sapiens
gaactccaggacagcatccaggcctcattggacagcattcgagggcgtgatggtgggcatgggtcagaaggattcctatgtg

SEQ ID NO: 764266 - DNA, 74 bp, Homo sapiens
tttattctgcagcaaaaaagctgaagatggatcgagtaaagcaggttctagagccttctttccgccaggccttt

SEQ ID NO: 764267 - DNA, 100 bp, Homo sapiens
taatcccagcactttgggaggccgagacctacagatggtgaatatctccctgcgagtgttgtctcgacccaatgctcaggagcttcctagcatgtaccag

SEQ ID NO: 764268 - DNA, 83 bp, Homo sapiens
ctcagagcccgtttggatactgggtagaaaatacagcattttcacaggagatacaactcgtcaacgaatcaaattcagtgatg

SEQ ID NO: 764269 - DNA, 83 bp, Homo sapiens
ttccgatggcaaagccgttgccaaggaccagcattagcagtacagggcccagccatgtttacagagccagcaaatgataccag

SEQ ID NO: 764270 - DNA, 129 bp, Homo sapiens
tcctttggtatcctgctgatggagatcgtcacctacggccggatcccttacccaggattggttgccgtggtctttactgcttttctccctgatgtgtgaaacaagcgccttctatgtgcctggggtcgc

SEQ ID NO: 764271 - DNA, 80 bp, Homo sapiens
tctgtcgctcttgtgccctagcaccccgagaaccgtcagtttgagccagatgcagggaggagagagcgatggcttttttc

SEQ ID NO: 764272 - DNA, 74 bp, Homo sapiens
acaaggaagtgctggaatccctggaccatttggcccaagaatggcttctttacctaaaaagactcttctggcag

SEQ ID NO: 764273 - DNA, 112 bp, Homo sapiens
gtttccccaaattgctccaatacagttcaagagaaaacattcaacaaagatacagtgattatagtgtgtaaaaggcttaatctccagcctttagcttatctttggcagagaa

SEQ ID NO: 764274 - DNA, 99 bp, Homo sapiens
ccgcgagccgccgcggagcctcctcgcccgctcccgccggcgagcaaggtctgcgaggaacagaagtgcgaggaggaggtcttcccgctggccatgaac

SEQ ID NO: 764275 - DNA, 100 bp, Homo sapiens
atcttctgaagccaatgagatttgtaacaaatcggaaaagaagaccatctcaccagagcatgtcatacaagcttctcaataggtttggcatggacaagat

SEQ ID NO: 764276 - DNA, 83 bp, Homo sapiens
ctgcttcaaaagaacaggaccccgtacgtcactaccactgtctctgctcacagtgccaagaaataacatctgctttgctgccg

SEQ ID NO: 764277 - DNA, 90 bp, Homo sapiens
gcagcccgcaccggacaacttgcgagccatggggctggcggatgcgtcgggggtcttcccggaagccctggaccccaaggccccgttggc

SEQ ID NO: 764278 - DNA, 90 bp, Homo sapiens
cacaatggggaggacaacttcgcccgggacttcatgatgatgattattctccaccgtctaagagaccaaaggccaatgagctaccgcagc

SEQ ID NO: 764279 - DNA, 75 bp, Homo sapiens
cacaccacaaaggttaacggcagtgcctcaggaggaagaacgtgcaaaacgtgaggagctagagcgaatactgga

SEQ ID NO: 764280 - DNA, 75 bp, Homo sapiens
tactattatggataagatgatggaagtcaaagtgaattgggcaacaacccctagcagtcaaaagaaagatacaag

SEQ ID NO: 764281 - DNA, 90 bp, Homo sapiens
ctttgtaggagcatggcttggagcacttcctattccactggattgggaaagaccatggcaggaattagaaggtgacgaggagggagaaga

SEQ ID NO: 764282 - DNA, 50 bp, Homo sapiens
ccacattcctgtgcattgagggctgtccctacctggctcgcaagctgacc

SEQ ID NO: 764283 - DNA, 75 bp, Homo sapiens
ttctctgtgttaaaccaatcagttgcgaccttctcttaacaggtgaagttttgggattactaggacacaatggag

SEQ ID NO: 764284 - DNA, 50 bp, Homo sapiens
ccctgtgtgacaccaagataagtaacggatacccacccaccatcccaggg

SEQ ID NO: 764285 - DNA, 90 bp, Homo sapiens
ctggaacagaatgaggcagcttttaggatctcaaagatttcatgagacaagctggggaagtaacgtttgcggatgcacaccgacctaaat

SEQ ID NO: 764286 - DNA, 95 bp, Homo sapiens
ggccagaaggagtgcttctaccagcccatgcccctgaaggcctcgctggagatcgagtaccaagtctcggcgcggaagatggccggcggcgtgga

SEQ ID NO: 764287 - DNA, 90 bp, Homo sapiens
gtggcgggggagaatctcttggttggctatacagtgcgctttgatgatgtcacctcagaagacaccaggatcaagtttctgacagatggc

SEQ ID NO: 764288 - DNA, 100 bp, Homo sapiens
tgctgccgacccctggcacctggcgcccagcgcgcccgtggccgctgccgcctccgccccagtattgctgacagacagaacgccttggaggctgagtgga

SEQ ID NO: 764289 - DNA, 80 bp, Homo sapiens
tgttcaggtccagttcagactcttgatcccacagccacttcttgagtgagacctgcgtaaattcaggacctataaaggtg

SEQ ID NO: 764290 - DNA, 83 bp, Homo sapiens
agagggccctgtacagggaagtgatgctggagaattatgcaaatgtggcttccctggctcttgaggatcttgcttgtccaaac

SEQ ID NO: 764291 - DNA, 76 bp, Homo sapiens
ctcgatccaacatcgatgttaacataaacagccaggcctgcactgcccaaagtcttggaaacttgctggatatgat

SEQ ID NO: 764292 - DNA, 101 bp, Homo sapiens
atttgcagccagtactctatatgaacaatccgtctggatcacggatgtaggaagtggtgtgattgaccgatgggagcttctccaggcccaggcattgagca

SEQ ID NO: 764293 - DNA, 82 bp, Homo sapiens
caaacatggactgctaaggaagaaggacccagtggcctttgatgatgttgctgtgaacttcacccaggaggagtgggctttg

SEQ ID NO: 764294 - DNA, 50 bp, Homo sapiens
tctgggcggtatctggaacttgcacttttcaggattagaagaggctgtgt

SEQ ID NO: 764295 - DNA, 100 bp, Homo sapiens
agggcatgttccgtggcctcgcccaggccgacggcaattctgtggtgttcttggtcacacatttatggagtttctgaagggcagtggagattactgccag

SEQ ID NO: 764296 - DNA, 75 bp, Homo sapiens
gcctggaagaaaaagatacaacgaactagcacaacgagggagaataaaggcagccccgttgatgactgaaaatga

SEQ ID NO: 764297 - DNA, 90 bp, Homo sapiens
tcaaagaagatgcctcgaactaaacaaattcatcccagaaatctaagaggacctctggtcctcaatcgagttcctctacgaagaacacac

SEQ ID NO: 764298 - DNA, 75 bp, Homo sapiens
gactacagtatgcacttaatgtccctagatcccagaagacccacttgtggctgaagagtactacgctgatgcatt

SEQ ID NO: 764299 - DNA, 83 bp, Homo sapiens
ttgagagcgggatgaagtacgaggacgccatccagttcatccgccagtgagaagccctaccactgcaactgggacggctgcgg

SEQ ID NO: 764300 - DNA, 75 bp, Homo sapiens
tcttgggagtgatttgcgccatcatcctcatcatcatcataggtactccaaagattcaggtttactcacgtcatc

SEQ ID NO: 764301 - DNA, 89 bp, Homo sapiens
ccccaatcctctcatcttgtcctacctgaagtatgccattagttcccaggctaccctagatacaaggaaaatagtagaagcttgtaaag

SEQ ID NO: 764302 - DNA, 74 bp, Homo sapiens
tgtgtgacaccaagataagtaacgtttgtttaagcatcttaaacacgtggcatggaagaccagaagagaagtgg

SEQ ID NO: 764303 - DNA, 93 bp, Homo sapiens
ctgtcttcatctttacagaggaatagtctacaaaggaagacttgtaacctggagaagaggcagctgaaaaagttggatgaagatagtttaacc

SEQ ID NO: 764304 - DNA, 80 bp, Homo sapiens
gatatctcaaaaggtgatctggacaaaggaacaggtatctcagtgttttagagcactttgctgcaagggaccaccacctg

SEQ ID NO: 764305 - DNA, 100 bp, Homo sapiens
acgtgctgaacaagagcaacgaggcttcttggacacttaatgattgttggcaagaaatgtgctgctgatctgggcctgaataagggttatcgaatggtgg

SEQ ID NO: 764306 - DNA, 100 bp, Homo sapiens
tttgcatatatcaactgtggccttaatgagcatgttgacagcatcgatgctagacagacagttattgttgtgggtaatccagccaataccaactgcctga

SEQ ID NO: 764307 - DNA, 82 bp, Homo sapiens
tgttccaacactacatccgagatacatcattcactctttggggacgtgaagaagctcatcactgatgagtttgtgaagcaga

SEQ ID NO: 764308 - DNA, 100 bp, Homo sapiens
ctagaacagtttcaggcagatataaaagggccaaacagcctttgatgtagcagatgaagacattttaggatatttagaagagttgcaaaagaaacaaaat

SEQ ID NO: 764309 - DNA, 75 bp, Homo sapiens
atctctggtgagacatttttcttccttctgtcacatcacacccaatgagtacaggggctcaggtccaggtggcag

SEQ ID NO: 764310 - DNA, 73 bp, Homo sapiens
ttccagaagcttcagggggcagagtcacaaagctgtaagaagtcctggacccaagccagaagcctctgcaaag

SEQ ID NO: 764311 - DNA, 75 bp, Homo sapiens
acctccagtgtcccttcttccacatgaaaaggataagcgagaaaatgtcattgaatataaacactgtttgattac

SEQ ID NO: 764312 - DNA, 71 bp, Homo sapiens
acacaggtagccctggacggcattcagtgttttgatatgagggaaggcaccattggagatatggctatcct

SEQ ID NO: 764313 - DNA, 90 bp, Homo sapiens
gacgaaagtttcaaggagtttgggaaaaaccgcgaagtcatggggctctgtcgggaaggtttctgagtcccttcaacatgatcctgggag

SEQ ID NO: 764314 - DNA, 101 bp, Homo sapiens
gttcttacaacatggcagacattgacaaaaaccactcaagaaggttattattgaagaaactggtaatttgatacagactattgatgtgccagatagcacta

SEQ ID NO: 764315 - DNA, 98 bp, Homo sapiens
tgaacattgtgaacgtagtctggaagacttgcttcgagaaaggaaacctgtgagaattagcaagagaactggatttcactgaggagcaaattcatcaa

SEQ ID NO: 764316 - DNA, 98 bp, Homo sapiens
cacaaatgctccttctcctggagacgcaactcaagggtgaggcacccattcctcggcgatctgaggaagctcatcacagatgactttgtgaagcagaa

SEQ ID NO: 764317 - DNA, 83 bp, Homo sapiens
aatgacatcagtttctggaagaagaagaagagcatgatcggcatgtccaccaaggcaggctccccacaggtgcaggaagccgc

SEQ ID NO: 764318 - DNA, 100 bp, Homo sapiens
tctccttttccctctccctttccctaaggctatggagttactagtagagaaagcaatcagcagtgcttctagccctcagagccctggggatgcactgaga

SEQ ID NO: 764319 - DNA, 88 bp, Homo sapiens
gttgagggagaaaggcgggcccgggaacagactcagtccgctagtagcacactccagaaacacaaatcttcctcctcctttacacctt

SEQ ID NO: 764320 - DNA, 98 bp, Homo sapiens
gcaggagctcacttcccagtgcctgggctcccagagagccttcatgaaggaaggtactccaaagattcaggtttactcacgtcatccagcagagaatg

SEQ ID NO: 764321 - DNA, 99 bp, Homo sapiens
atcttcggacgggaggggcaagccagccatcctgggaccccaggcgtgcaggttctctttgagggcgcggatcaagaagatcatgcagacggacgaaga

SEQ ID NO: 764322 - DNA, 84 bp, Homo sapiens
gcgagcagcggcgggggcccgaggggctgaccccgcactacatctacccaccagccatcgtgcagcccagcgtggtgatcccag

SEQ ID NO: 764323 - DNA, 75 bp, Homo sapiens
cattgccagaacttggaatactctactggacaaacatttcctccaagaatgccgggacattctgcttcctgtcat

SEQ ID NO: 764324 - DNA, 100 bp, Homo sapiens
gaaagatcctactggacatgtcagtgtcctttcacacccatgtgaaagagctccagatgaagatgagtgagcgggccgcctcgctgagcaccatggtgcc

SEQ ID NO: 764325 - DNA, 78 bp, Homo sapiens
gcgggctgaggcggcccagcggcggcaggatgagttccacccgttcatcgaggccctgctgcctcacgtccgcgcctt

SEQ ID NO: 764326 - DNA, 106 bp, Homo sapiens
ccgggaggaaggaacgaggcaaggagctaaagcagcgtgcgttcagccctgggtgcagagcagagcgggcggaggaccccgggcgcgggcgcggacggcacgcggg

SEQ ID NO: 764327 - DNA, 75 bp, Homo sapiens
cactctctccagcaacatcatcatggacacctccaccttcctgctcagatattcaagagaagcttatgtggagtt

SEQ ID NO: 764328 - DNA, 82 bp, Homo sapiens
cttctctccccggacctttgctcaggaatctaccagcattaaacctttgagctaggtgtctgacttccagcaactgctggcc

SEQ ID NO: 764329 - DNA, 101 bp, Homo sapiens
ctgaaatccattgtgagaggggatgctccatcaagcttggcagcttcagggatctgtaaaaaagagtcatccgtccttggctcaggatttggagagcttgc

SEQ ID NO: 764330 - DNA, 82 bp, Homo sapiens
gggatgcagcccgcaccctggggccccggtgtgtcccggcatggatatccggaacaacctcactaggttgcatgagctggag

SEQ ID NO: 764331 - DNA, 90 bp, Homo sapiens
gcagtgctgagcacgcagggctctttctggtgatggcaaatgtagaccctaccattgaattgaatgatctggcacgggaccctccagcac

SEQ ID NO: 764332 - DNA, 138 bp, Homo sapiens
cgtcgtgaggtgcatcgcgtaccccttcaacgccaagcagcccaccgacatggcccggaggcagcagaagctacctcatccctgaactcccagctccagcagctccagctccagctccagcagcagcagcagcagcag

SEQ ID NO: 764333 - DNA, 78 bp, Homo sapiens
tggccgagcaggctgagcgatacgacgcatccacaacggggtgatcgccgtcttccagcgcaaggggctgcccgacca

SEQ ID NO: 764334 - DNA, 83 bp, Homo sapiens
ccgagacactcttcttcatcttctactatctggagagctagagccggtgcaggccacgcagaacaagacagggaagtatgtgc

SEQ ID NO: 764335 - DNA, 90 bp, Homo sapiens
gtttgagcagcttgtgcgccgggtggagattctcagtgaaggaaatgaagtccgggataattctatttaaagaaaaagccaaggaagcat

SEQ ID NO: 764336 - DNA, 95 bp, Homo sapiens
tttcttgccaatcggaggatttcccaagcagttgttgcacaggtaacaggtccggaccctatttgtcagtggccttcctctggatatcaaacctc

SEQ ID NO: 764337 - DNA, 98 bp, Homo sapiens
tcaaactcccaggctcaagcaatcctaccatgtcagccttcccagtagctggaactacagatgcaagtgctgctggaccaggcgggctgctgtatcgt

SEQ ID NO: 764338 - DNA, 82 bp, Homo sapiens
cacggggccgctgctcaagttccagatttggacgtagacaagtttggcaacgagatcacccagctggcccggcccctgcctg

SEQ ID NO: 764339 - DNA, 80 bp, Homo sapiens
tcgagttcctcttcttgaaatactgaaatatccttacttgcttctacatgaacgtgttactgctgataaacttattaaaa

SEQ ID NO: 764340 - DNA, 73 bp, Homo sapiens
ttgacgatggagagcatgcaaagcaggacattttggcgcaagttttacagattttattaaagtcgaagctatt

SEQ ID NO: 764341 - DNA, 98 bp, Homo sapiens
cgaattatgcttttaaatcatcctgacaaaggaggatgttgagaccagtctggagaacttgcaggacatcgacatcatggatatcagtgtgttggatg

SEQ ID NO: 764342 - DNA, 100 bp, Homo sapiens
cagaggccccgatggcaaagggtaaaagcaccaccttaacgcagggctgtaggttccatgaggacaggccttgagtctgtcctggtctctggaatcacgg

SEQ ID NO: 764343 - DNA, 98 bp, Homo sapiens
gagcagatcctggtcctcgatccgcccacagacctcaaattcaaagcactgtgacttctgccgtgttcaccgtgggagacaacgtggtttcaggcagc

SEQ ID NO: 764344 - DNA, 73 bp, Homo sapiens
gcggctttgaccgagaggctgctggagctcgtgtttggacgcgttggaaaagagactgttcaaaccactgagg

SEQ ID NO: 764345 - DNA, 135 bp, Homo sapiens
cagaacccggcccggaccgtgtcgccgacgccaaaggggacagcgagtcggaggaggacgaggacttggaaggaatagccaggccagaagaaggaaggcctgtggtgagtgggacaggaaatgacatcaccaccc

SEQ ID NO: 764346 - DNA, 75 bp, Homo sapiens
cgccacactgctccttcgcgcgctggctgctctgtaacggcagctcaggagcatctatcggctgcacgccaacat

SEQ ID NO: 764347 - DNA, 75 bp, Homo sapiens
ctcttgtcctggcattgcatccacaggaggggcaggaaattctttgaaggccctggagagtgaatttgtttcctg

SEQ ID NO: 764348 - DNA, 89 bp, Homo sapiens
gataaatcagacagaacagttaatcctcaatttaagcctgatctaacccctagaaacaggggatgatcaaaaagttatgactgctgaac

SEQ ID NO: 764349 - DNA, 90 bp, Homo sapiens
cctgagtttacgtctcttccatctgctgctcacctcagctgcctgggtccccgacgagagccagatgcatcactgtaagcgataccgctc

SEQ ID NO: 764350 - DNA, 110 bp, Homo sapiens
caggacaccaggacctggcctgaagacatttcctctcctcccctctggatttctcagagtgccgcagaatggaattcggcattgttcctacacagcttctcggcaacatc

SEQ ID NO: 764351 - DNA, 87 bp, Homo sapiens
agcggagtaccagcacttcatccagcagtgcacagattttcagctgaactctcatctctcaacactggcaaatattcataagatcta

SEQ ID NO: 764352 - DNA, 75 bp, Homo sapiens
gcagccttcagggagcgtggagacaggaaccttgggtaatgtggaacatgggaaccaatgtcagatgaaattgat

SEQ ID NO: 764353 - DNA, 100 bp, Homo sapiens
ggataattgggatgatgacaatgtagaggatgacttctctaatcagttacgattaacgtcttcaaggacccagttgctgatcccaacaaaaggtccaaaa

SEQ ID NO: 764354 - DNA, 100 bp, Homo sapiens
gacttctcccgcctggcgagggtgctgacgggcaacgccattgccctggtgcttgggggagggggagcaagctcacagcgctccttcaccactattaccc

SEQ ID NO: 764355 - DNA, 97 bp, Homo sapiens
cgcgggaagatggcggcgccgctcatccccctctcccagcagatttcgccgccagctttctgaaccctgtaactcctttcctcctttgccgacgatg

SEQ ID NO: 764356 - DNA, 50 bp, Homo sapiens
gcaggagcggggtctgctccgaggtgaccagaagtcagcagcttcccaga

SEQ ID NO: 764357 - DNA, 82 bp, Homo sapiens
aggtaccatggctctgggaggatggatcaacattctcttctaacttgtcgttgaggacttccacatggagattggcacagga

SEQ ID NO: 764358 - DNA, 100 bp, Homo sapiens
gagtgccaatgccgcagtggcttcgtcctccatgacaacaagcacgactgcaaagaagggagagcacatctgcctgatccgcaaggtgaacgagaactgg

SEQ ID NO: 764359 - DNA, 80 bp, Homo sapiens
agatcgtcgccacctggatgctggagcagttggaattgatcacaccttttcagttgtacttcaatcctgaattaatcttt

SEQ ID NO: 764360 - DNA, 50 bp, Homo sapiens
atcgcccaatccacatgcttttccagaagcagtgttgccacaaactatat

SEQ ID NO: 764361 - DNA, 75 bp, Homo sapiens
caataatgaaatgctgactaaggaacaagggacttgccatgaggtgttgaagccttgtttcactgagttggagag

SEQ ID NO: 764362 - DNA, 100 bp, Homo sapiens
tctcctcgtctcccgctccgccctcccttttccctgggtgacgagaacaagtcagtgcgcgaccgtttcaacgcccgccagttcatctcctggctccagg

SEQ ID NO: 764363 - DNA, 75 bp, Homo sapiens
gtcatggacttcatcgtggtcctcagtggccccatctgctttgatatgattgaagaagcatacatgacaaaatgt

SEQ ID NO: 764364 - DNA, 82 bp, Homo sapiens
atcttgtctgatgtggcatctagactttggtttacatacaggaaaaactttccagccattgatatttggagttcttacaaca

SEQ ID NO: 764365 - DNA, 100 bp, Homo sapiens
gaaatgagaatgacagctgtgataaaaaaaaaattcatctgggcggtatctggaacttgcttcataaacaagcagatatgcaagaagagaaaaaccgaat

SEQ ID NO: 764366 - DNA, 98 bp, Homo sapiens
ggaaaaccagttattgaatatcaagaggaggagttgttgaattatatccagatcgagagacagaagattctgaaagggttcaatgaaatgagagtcat

SEQ ID NO: 764367 - DNA, 100 bp, Homo sapiens
tgctaagtggatcctctggccagctgactgcacttcttttttgagaaaggaaggaatatatcctgactgatttccaatatcagatggaaatgatgcggag

SEQ ID NO: 764368 - DNA, 90 bp, Homo sapiens
gaatgagagaaccgaggaacgaagaaacagacattcaacatgattgcatttgaagcgcagcccagcctcgaaatgcagaacgacgccggc

SEQ ID NO: 764369 - DNA, 100 bp, Homo sapiens
gcatgttcgacaagaatctgcaggacttggtccgcggcatccgtaaccacaaggaggacgagggcagctggtggaatttttgaagaaaatggaatctcga

SEQ ID NO: 764370 - DNA, 85 bp, Homo sapiens
tgagtttgtttacagctgttgtcctggtatctgcagcgctccattagcttccgcagtgagagccgccctgacatcctcgcccccc

SEQ ID NO: 764371 - DNA, 100 bp, Homo sapiens
aggtagaggtggcgctcatgcatatttgagacaacatctggatggttggggagaacgatgataccatcttccaaaatcctatggtacaagaagctatacg

SEQ ID NO: 764372 - DNA, 100 bp, Homo sapiens
ggccgagcaggggctaggcggggagggagcggcgcccagcggggcccggagcgtggccagcagggcccatggcggacacccagtacatcctgcccaatga

SEQ ID NO: 764373 - DNA, 75 bp, Homo sapiens
tcaggtcctactccaggggcgctcaggtgctgattggacatatctcaaagaagatgaacaaacagactttccctg

SEQ ID NO: 764374 - DNA, 100 bp, Homo sapiens
ttcatcggaaccatccaagtgatgctgctcaccatcagtgaatttaagcccacatatcaggaccgagtggccccgccagtgacgccaagtccagtgaaag

SEQ ID NO: 764375 - DNA, 90 bp, Homo sapiens
gtaaagttccagggaggccgcgaagatggcaggatggtggctggcaaagtgttgatggcaaagcaagaaattgttgaatgtgtagcctca

SEQ ID NO: 764376 - DNA, 76 bp, Homo sapiens
tgaaaagctaaagccaggagacctggtggctctccacagatagagaacatccagccattctctgccaaagacctgt

SEQ ID NO: 764377 - DNA, 87 bp, Homo sapiens
cagggcctgattgaggactgccagctggcgctgcagatttgggatgatgaaattgttgcagacttttacgtagctgttccagaaata

SEQ ID NO: 764378 - DNA, 76 bp, Homo sapiens
gatgctgccagggtccctgaagagggaagacacgcggaaacaggacctggcctgggccgtcagctactacatccgg

SEQ ID NO: 764379 - DNA, 82 bp, Homo sapiens
ctgccttctaacgaaagggcagtacagactttggcagggctatcattaagaaggcttccgatctagagtacaaaatccagag

SEQ ID NO: 764380 - DNA, 98 bp, Homo sapiens
tttgagattggcttttttcgttgactatcctgcccctgagatccacccaagttgtgcctctctacatatgacatcgtgatcactacctatagcctcgt

SEQ ID NO: 764381 - DNA, 86 bp, Homo sapiens
ggactccttcggcagtccacccaccgccgccgcctcccagatgaaggatttgggggcagagcacttggcaggtcatgaaggggtcc

SEQ ID NO: 764382 - DNA, 97 bp, Homo sapiens
aaggccagtagtgccagtgttcagagggatttcatggaccccactgtcaataacagtgaacagaggaggggaaagcaccaaccatggcagagtccag

SEQ ID NO: 764383 - DNA, 75 bp, Homo sapiens
caggaaccagctcgggggccaactctgaggagtccactgcagcagggatatcagtatgaacaacattactcagtt

SEQ ID NO: 764384 - DNA, 75 bp, Homo sapiens
tatagccctgcttgacctgtgtgatccgaggaagaggatcacctagcccgggtagaagaggcaatcacccgtatg

SEQ ID NO: 764385 - DNA, 100 bp, Homo sapiens
cttcccaagcttccaggtgtcccagaaacccaggaaatcgagactcatgactcccagagaggatggcatctagaagagaagggataaaccgccaggttga

SEQ ID NO: 764386 - DNA, 100 bp, Homo sapiens
caaggccttattgttgaagacctagtagaagaggtgaaatgtatcttctgtaagaagcggaggaaaagaactgctggctgctgtgtgcagtgttctcacg

SEQ ID NO: 764387 - DNA, 100 bp, Homo sapiens
tctttagtgtgttacatatgcaaaattacaaaaatgtcatcagctaatgtctacctcgaatcaaaggtacactggagaaccaaatgatgcccttcgacat

SEQ ID NO: 764388 - DNA, 101 bp, Homo sapiens
ggggcggccggggccgcgccgcaccgcaccgcgcgggcggccatggagcgagcctagggcccgacaggtctgagaaccattggagttatcaccaaactgga

SEQ ID NO: 764389 - DNA, 90 bp, Homo sapiens
ctgaaaaacagaaactgatgctcattgatttcgaatacagcagttacaattacagatgtgaggtagaaaatcgataccaaggaaaccctc

SEQ ID NO: 764390 - DNA, 100 bp, Homo sapiens
caacagtctaagttaaagcagtcaaacatgctgaccgctcaagagattctacatcagtttggtttcactcagaccgacggagtcttgctctgtcgcccag

SEQ ID NO: 764391 - DNA, 90 bp, Homo sapiens
gagggtgatgactgtgaaccagaacagactgcctcgctgaaaatccaaaattaacgggacaggctcttattccaggatcagtaatatacc

SEQ ID NO: 764392 - DNA, 75 bp, Homo sapiens
ccaggagtgacctggggctgtggagagcgacccgtggccttgtgtttcagttgactaagataacacgcacaggtc

SEQ ID NO: 764393 - DNA, 50 bp, Homo sapiens
gggagccaagcgtcctgcccggcccaacccaaggagatctgtgcgctggt

SEQ ID NO: 764394 - DNA, 137 bp, Homo sapiens
gcaggaagcaccagccactggccccgacctcccgcacccaggacctgacgggcacttagagccagcagccacccccgcccagccaacacctccccaggcccaagggggacgcggccctgaagatgcgggcgtcagtg

SEQ ID NO: 764395 - DNA, 90 bp, Homo sapiens
cgacctgcgagcgccgcccgggcatgcgaagccgtccctccccgggtgctggagaatctggtaaaagcaccattgtgaagcagatgagga

SEQ ID NO: 764396 - DNA, 100 bp, Homo sapiens
cggcgaggccctcatgtaccacacgacccctaagggagcctgtgcaacatcggtgaaggttgctattgacacagggtaccgacatattgatggggcctac

SEQ ID NO: 764397 - DNA, 83 bp, Homo sapiens
ctcgctctcggcttgaccgcattcttcctcccaggtgacttaagagattaaaattaatttggttgctgttggttctgaacaaa

SEQ ID NO: 764398 - DNA, 100 bp, Homo sapiens
ggagagccacggccggaccccatctccatccccaccctgcagcagctcccccagtccctcaggtggaatcccccaaagaaggtaaagggagcaagccttc

SEQ ID NO: 764399 - DNA, 100 bp, Homo sapiens
gatcatgtcagagagagagcttggttaacttgggagaaagtttcatctgtggatggagtattgggtgtccgcaatgttgccagtgtctgtctgcagattg

SEQ ID NO: 764400 - DNA, 139 bp, Homo sapiens
aagacagcaggattttcaccagactgcattatggatgatgccatcaacatcctgcagaatgaaagttcgatacaagaggctgttttcctagcgtggcttgctgcctttggtaagaacatgtcgtccatcttgccattca

SEQ ID NO: 764401 - DNA, 88 bp, Homo sapiens
ctgactaaagcttgaaatgctacatttccaaggcgtggtgtccctcgtggccgttcacccctccaccgtcaacccgctcgggaagcag

SEQ ID NO: 764402 - DNA, 83 bp, Homo sapiens
cgttgctcttgcttttcctcgctggggtgtacggaaaaatatattcagggggaagagatgtaatagatttcacattatggcag

SEQ ID NO: 764403 - DNA, 100 bp, Homo sapiens
gtgttttcctcaacccccgaaacagaactggttttggggacaccagggcctgattgtccgtgtggagcccttggtgaccatgggccaggtgactgccctg

SEQ ID NO: 764404 - DNA, 51 bp, Homo sapiens
ccaacccccaaattggctgggacagacagatctgagaacaattggcaagaa

SEQ ID NO: 764405 - DNA, 50 bp, Homo sapiens
tgaaatcagaggagatgtaactatcgagtcagcgtgggagaaattgtaac

SEQ ID NO: 764406 - DNA, 83 bp, Homo sapiens
cccatcgtcaccgtgtgggagcgggagctgcggaaaggtgtaaaacaaaggtgtatccagataatcttcctacaacaagtgtg

SEQ ID NO: 764407 - DNA, 82 bp, Homo sapiens
cgggggatgtgagcgctgagcccttggcagtgacctagagtcccgcagggatgtgaagagagaagaaggagaggcctttgct

SEQ ID NO: 764408 - DNA, 100 bp, Homo sapiens
cgttggaacagttcttctaattggatcctcagtcttccacaatgaaccctgtttacagccccgtgcagcctggggctccttatggcaaccctaagaacat

SEQ ID NO: 764409 - DNA, 51 bp, Homo sapiens
gttgatctcttcacctcaaaagattctttatctgatgtcacaagtaccaca

SEQ ID NO: 764410 - DNA, 100 bp, Homo sapiens
gtatctactcgcgcatcaggcatgaagaagaatatctatggcaatatcgaggacctggtggtggtaaatggaaatcccttctatgagtacgggcaccggc

SEQ ID NO: 764411 - DNA, 100 bp, Homo sapiens
gtaacagtgtgtggagatatccatggacagagaaactccagaaaatcttgccaaacttctgaccaggatgtatttaaaatcagaagtcataggtgatggg

SEQ ID NO: 764412 - DNA, 98 bp, Homo sapiens
caaggatgagtgctgccagagagtctcacccgcatggggtgaagcgttcagcctccccagacgacgatatggtgatggaatttcctgataatgtgtta

SEQ ID NO: 764413 - DNA, 90 bp, Homo sapiens
ttcaaggatctactctgaagatccctgtggtagagagaaaaatcctggatctgtatgctttgagcaaggactggacctacagagacatct

SEQ ID NO: 764414 - DNA, 82 bp, Homo sapiens
agaactgaggagcaccaggagacgcaactcatcggttgccgaggtactgtctgaatgccgcctgctcgcctacatatcccag

SEQ ID NO: 764415 - DNA, 101 bp, Homo sapiens
tggaaatcttatttagttttgggaatttttacgttaattgagggccaagaccagcttcaagtctccatggtaccagaaaacaacaacctcacagcacctga

SEQ ID NO: 764416 - DNA, 87 bp, Homo sapiens
tggcaggctgccatgacaaccaggcaatgctggatagataccgaattcttatcacaaagcctgctatgggatggatgaagaagagaa

SEQ ID NO: 764417 - DNA, 101 bp, Homo sapiens
acatattgactgtatttgggctgcagcacagcaataatgacgatgaggacctgacaccagagcagaaggcagagcgtgagaaggagcggaggatggccaac

SEQ ID NO: 764418 - DNA, 51 bp, Homo sapiens
ggagcaggcttgcaatattaaaagatgtggtgcaattgctgaacaaacccc

SEQ ID NO: 764419 - DNA, 100 bp, Homo sapiens
ggagcaagagcaagatcaccgtgacatccgaggtgcctttctccaaaagaataactgaagtgaagtgatggactccgatttggagagtagtaagacgtga

SEQ ID NO: 764420 - DNA, 119 bp, Homo sapiens
tgagtgtgaaaaactggaaatcccaaagcctcgaatggctgccactcagaaacttgttaaagacattattggaggagatgttaaagtaacccatcttgcaggacgacattgaagattgg

SEQ ID NO: 764421 - DNA, 118 bp, Homo sapiens
tcctgtgttgctgttattctcagcccgggcttgcgctgggcagtagggcactgtacaaaacgagttaaacagacatggcccttgccccctgggagttttcagtctaagatgatgctga

SEQ ID NO: 764422 - DNA, 100 bp, Homo sapiens
tcacaaggcagctcgctctgggagcctagaatgcatcagtgcccttgtggcgaatggggctcacgtcgagatcttgatgctggtgtaagtgaacattcag

SEQ ID NO: 764423 - DNA, 100 bp, Homo sapiens
agcgccatggcggagcagacctactcgtgacgagctcatctgcgcctttgtttagaacgcttaaaagttctgattccactaggaccagactgcacccggc

SEQ ID NO: 764424 - DNA, 100 bp, Homo sapiens
gcgggagaacggaaaactcccaacttcctggtatgtgtacattccagtgggcgggtcccagcatggcctgctggggacactgttttccacggcgatgaca

SEQ ID NO: 764425 - DNA, 50 bp, Homo sapiens
agatcctccaaagacagatctgtgggggaagaaggtagcctgtggctcca

SEQ ID NO: 764426 - DNA, 80 bp, Homo sapiens
cgcggattcgccgaggcaccgaggcactcagaggagggaacggcaggagcagctgatgggatatcggaagagagggccga

SEQ ID NO: 764427 - DNA, 75 bp, Homo sapiens
agcgacgcggaaccccgggcgcctgggtccccagcatgatcctcgtcctcctccgcctcctcctctctgcatgcg

SEQ ID NO: 764428 - DNA, 100 bp, Homo sapiens
cacggagtcgccgcggagcgcagtgtctttggtgcaacactaacaaggcttgtctggactacccagttacaagcgtcttgccaccggcttccctttgtaa

SEQ ID NO: 764429 - DNA, 74 bp, Homo sapiens
atgtttataatgagggcacacaggttgcacgttttcaaaaaatacctaatggtgaaaatgagacaatgattcct

SEQ ID NO: 764430 - DNA, 50 bp, Homo sapiens
ctgaggagttttcaatcccagaagcaagatttccagatgtagcaaatggg

SEQ ID NO: 764431 - DNA, 75 bp, Homo sapiens
ctttcacttattcatctgtccagcatgactcatccccgggagtgttgacaacgcagtgtgcatattttatctggt

SEQ ID NO: 764432 - DNA, 87 bp, Homo sapiens
cagattcgcagtggtcgcttcttctccttgttattgccttgtctgtcaagatccgcagttatgaagaacacttggagaaacatcgaa

SEQ ID NO: 764433 - DNA, 82 bp, Homo sapiens
gtctcctcccctccccccgcgaacttggccgcctccttctgtgacgatggagctcttgagcgcgagcccagcattgacctgc

SEQ ID NO: 764434 - DNA, 75 bp, Homo sapiens
ggcgggcccgggctgcggcgtgtgcgcgcccgccagctgctccggagatacggttcaatttcagaagcttcagca

SEQ ID NO: 764435 - DNA, 100 bp, Homo sapiens
ggagtgtatgaccacaaacagccatcaagatcccgtaatatcttgtgccaaaacgaaacaattgcgagttgtaaatgggattccaacacgaacaaacata

SEQ ID NO: 764436 - DNA, 83 bp, Homo sapiens
agagcgccgaggaggctttcctgctggtggcaaccgcctacgagacactcaaggtctgagaaacatcttacctattacaacag

SEQ ID NO: 764437 - DNA, 97 bp, Homo sapiens
catatgaacatctccgagaggttgtgtttggcaaaagtgaagatgagcattatcccctttggtgtcatggagaaactccagctgggcccagagattc

SEQ ID NO: 764438 - DNA, 74 bp, Homo sapiens
cagattcgcagtggtcgcttcttctccttgatgctacatttatgtgtgacaagcggtgtaacaagaaacggttg

SEQ ID NO: 764439 - DNA, 127 bp, Homo sapiens
ccttcccggcgtctaggggagcgaaggctgaggtggcagcggcaggagagtccggccgcgacaggacggtgtcatggagaaactccagctgggcccagagattctgcagcgggaaaatccaaggctt

SEQ ID NO: 764440 - DNA, 100 bp, Homo sapiens
ggattctcgacctgctaacagaactggaccttttcgaatgtacatggcaagtcaaagcaaacgatcgcaagtaccacgaacaacctcactttatgaacac

SEQ ID NO: 764441 - DNA, 100 bp, Homo sapiens
gcaaacatcgatggcctactggggataacattcatgcagaacatcagatgaccgtggaaaaagtacagggtattagcagattggaacaactttgtgagga

SEQ ID NO: 764442 - DNA, 100 bp, Homo sapiens
tggcagtctcacattgaaggctgggaggacatggatttgattgacatactttggaggcaagatatagatcttggagtaagtcgagaagtatttgacttca

SEQ ID NO: 764443 - DNA, 90 bp, Homo sapiens
acgacggcaggttccacgtctaacggcacaaggttctctgccaggagcagttacccatgacccccctcaggattccgttcctgtcagttc

SEQ ID NO: 764444 - DNA, 73 bp, Homo sapiens
ttgtttctgaagaaccaatttacattgtcactgaatttatgtcaaaagctcctacctcccggcagcctctcca

SEQ ID NO: 764445 - DNA, 100 bp, Homo sapiens
ggtggcaagtattgctgtgggtgctgggacttcccgtccgcggcgtggaggggtccctgtgttcatgatgaggactctggcctatcgctcattggaaaac

SEQ ID NO: 764446 - DNA, 87 bp, Homo sapiens
aggcagatcctgccccgtggccgcggccgtctcgtagtgccctctggtggtcagaagatgctgtgctgtctcgttaggatgaatgga

SEQ ID NO: 764447 - DNA, 90 bp, Homo sapiens
gcggggatacagcctggaaggtgcgtgtggggctgggtctcggagtgggagacgtggagtgcagtttgtcagggagccactggtgatgtg

SEQ ID NO: 764448 - DNA, 74 bp, Homo sapiens
tttctggtttggtttcttctgtggtttctcagcccagtggtacatgatcagcattgtccacatttacaatcgat

SEQ ID NO: 764449 - DNA, 95 bp, Homo sapiens
tgggaacctactgtggggccgcggccggaccgagcgcctcgacctcggtctgagggcagctggtggaatttttgaagaaaatggaatctcgaggc

SEQ ID NO: 764450 - DNA, 87 bp, Homo sapiens
ttcccatggttgccggctcccctctcaggacaacccagatgtgcaacaaagtgcgatgactagacgcttgaagcaaagctgccatcc

SEQ ID NO: 764451 - DNA, 50 bp, Homo sapiens
ccagggtctgcagacaaggcagggtgcacttacagagtgctacgatgaac

SEQ ID NO: 764452 - DNA, 50 bp, Homo sapiens
gccttggcaaatcactcctacaggatgacagtgatgggattccgtggtca

SEQ ID NO: 764453 - DNA, 98 bp, Homo sapiens
gcagattatatcgcatcctatggctcaaagaaagatgattatgtttcatatggacccatctgggacctttgtacagtgtgatgctcgagcaattggct

SEQ ID NO: 764454 - DNA, 82 bp, Homo sapiens
aaggtggctgtggagttcgggaaccagctggaggtgatggcatcagctgagaagggaaggaagcccatgtgaggacactgaa

SEQ ID NO: 764455 - DNA, 74 bp, Homo sapiens
tccaacaatatttacgaggcagtcaagttactcaaatgagtcgtccagacttgattctctttctgatgaaatac

SEQ ID NO: 764456 - DNA, 83 bp, Homo sapiens
cccgagtagctgggactacaaatgtaaacaggttacccagctgggagagaggacatctgctggctggtgtggcgtccagcact

SEQ ID NO: 764457 - DNA, 100 bp, Homo sapiens
gagaaaggagctcggggactcccccaaagacaagtatgagaataatgttatcactattgatctggttcaaaattcttctcaaaaaactcagaatgatgtg

SEQ ID NO: 764458 - DNA, 100 bp, Homo sapiens
taaagcttgaaatgctacatttccaaggcaccgtccacattttccaaattgaagatggagatcaagaagagccggcgccatcccctgggccggccgccca

SEQ ID NO: 764459 - DNA, 100 bp, Homo sapiens
caggaacctggctatggagaaggtggcctcggcagtcctgtttccctgtaagcattaaagggcagtatttaaagtcagttggcaagcagtggaataagat

SEQ ID NO: 764460 - DNA, 100 bp, Homo sapiens
catgagcgagcgcctccgtcccagcacaagcccaccgtactgttgtgtggatctgtattcacttcgtactggggagatggtcaagtccattcaatttaag

SEQ ID NO: 764461 - DNA, 82 bp, Homo sapiens
agaacctgcccttcgccaaggagatcgtctctctcatcgaggcccaaaccgccaaggccgctacctgtctgaggaacccgag

SEQ ID NO: 764462 - DNA, 83 bp, Homo sapiens
ctttctgctgctgaagtaatgcaatggtctcaatctctggaaaaacttcttgccaaccaaaaaatcccaagttgaccgtcaag

SEQ ID NO: 764463 - DNA, 76 bp, Homo sapiens
gtcttcaagtgccctgaggaccagcttcctctggactatgccaaggctccctgaggaggtccccagcttccagcca

SEQ ID NO: 764464 - DNA, 75 bp, Homo sapiens
tcaaagaaatggctaccatctctgaggatgtgataattgtcacaagcaggtatcatcttcaccaaataaagaaag

SEQ ID NO: 764465 - DNA, 98 bp, Homo sapiens
gtgagctcaccgcccagcccaaaccaggagattgcgagggagcgatgcggtgcagcgcgatagcaaagccattgtggatgggaacctgaagctcatct

SEQ ID NO: 764466 - DNA, 101 bp, Homo sapiens
tgcaagtcatcttacctctctggatctcagttgtctcatctgtaaaaaggagataaaaattatttacctgcctgaacgccttgctattttggaagctacaa

SEQ ID NO: 764467 - DNA, 75 bp, Homo sapiens
gcgagaaggagcgcgagcttgaacgcagcgtggtctccgatgatgacctcgacccatcctttactgtctcaacca

SEQ ID NO: 764468 - DNA, 75 bp, Homo sapiens
ctgcagacaagaaacattcgtttatgagatgttggaaaatggatataccttatttgattatgatgttggactgaa

SEQ ID NO: 764469 - DNA, 95 bp, Homo sapiens
tttatgcagatttgatggcaatacattaaaaactactcatgtgatgatgaataaggtatttggaggtactgtgcacaaaaaaagtgtcagagaag

SEQ ID NO: 764470 - DNA, 75 bp, Homo sapiens
ttttgatgttcctcccaggagacagctatatttgcccatgttattcaagaaacccaagtctgatatggtgaggac

SEQ ID NO: 764471 - DNA, 75 bp, Homo sapiens
gtcttccatcaatcatatctcacagggaagtcgagataacatgagtattgtactagtttgcttttcaaatgctcc

SEQ ID NO: 764472 - DNA, 75 bp, Homo sapiens
cggcgccgcgggcacggcgaggggggcggccgcctcaccggtgtcgtgaaaactacccctaaaagccaaaatggg

SEQ ID NO: 764473 - DNA, 72 bp, Homo sapiens
ccggcccgcgcccttgcccctcggccgggcggacggacaagggtgtcccccacctgaagacggcaagctggg

SEQ ID NO: 764474 - DNA, 82 bp, Homo sapiens
gtcggccattgagaaattgttgaggcagattggatttgaggctcctcccctccagggacaggctgcagctccagcgagtggc

SEQ ID NO: 764475 - DNA, 100 bp, Homo sapiens
gaaagtgatcataggagaaaaccatttcaggttcatgtgtgcccagctgcccaaccccgtcctggacagcatcagcatcatcgacacccccgggatcctg

SEQ ID NO: 764476 - DNA, 74 bp, Homo sapiens
gctgccgcgacgcccggcccgcagggcagaataaatccaccagtaccccaacttctccggggccccggactcat

SEQ ID NO: 764477 - DNA, 90 bp, Homo sapiens
ggtgattgttggtgaaacaggatgtgggaagagcacacagattcctcagatgatgaggtaaccgtggggaagttctatgccactttcctg

SEQ ID NO: 764478 - DNA, 74 bp, Homo sapiens
cttcgaggccgctttggcgccaaatcctgagcaaaagctgatgaagcattgaaagccaaagaaagaaatgagga

SEQ ID NO: 764479 - DNA, 100 bp, Homo sapiens
ccacccagaacaaactcaggaccttagttcccaacttcaccttcaacttgggcttctcgggcaagttctatcatactggattggatgtggtcttgatcgt

SEQ ID NO: 764480 - DNA, 100 bp, Homo sapiens
cgccgaggcgcttctgcatctgtgggccgagatgttttactgtgcctggctaactatagtcgagggggtgatggtcctatgtgtcgcccagtaattctgt

SEQ ID NO: 764481 - DNA, 82 bp, Homo sapiens
aagagcgacaagccgctggcagccgcggatctcaccgccgctcaggctgtcgcctggttgggcccggaaatgggacgtcgcg

SEQ ID NO: 764482 - DNA, 50 bp, Homo sapiens
cagggcaccagttcgacgcgctttttgctgccagagaaactacgcatagg

SEQ ID NO: 764483 - DNA, 101 bp, Homo sapiens
cttgctacgcactgatgttttctttctgccactattactattttcttccactaaaaaagcgtaatttgagtgacctccattgcagacaggctgaatgtgga

SEQ ID NO: 764484 - DNA, 48 bp, Homo sapiens
gccgcacgcggggctgctgcccaagatcggtcgcttggttatcggaca

SEQ ID NO: 764485 - DNA, 82 bp, Homo sapiens
tggacaacaccatggaaatatttgacattgagcgtcgtctcggagatgcagccaagaaagccatcagtaaattgacaaccag

SEQ ID NO: 764486 - DNA, 100 bp, Homo sapiens
cccggcgccgaggcggccacccgagacgcggcgcgcacgctccggcctgcggtgaaatgacaatggatgctctgttggctcgattgaaacttctgaatcc

SEQ ID NO: 764487 - DNA, 75 bp, Homo sapiens
gttgtagctgttcctctggcaatacaaactttctgctttcaatcagtttcctaattcatctcagaacggttcatg

SEQ ID NO: 764488 - DNA, 90 bp, Homo sapiens
cttttccacgtggtagaagctggctaacctccacttccacattccagcccaagggaaagtccaaggtagttccaatttgccagcagaatg

SEQ ID NO: 764489 - DNA, 97 bp, Homo sapiens
gggatcccaaatcggaagtgaattcggattgtttgctgctgtctgacaacatctacccggtggaggacctcgccgccacgtcggtgaccatctttcc

SEQ ID NO: 764490 - DNA, 100 bp, Homo sapiens
cgtgcgccgcagcccgggcccaggccccggcagcgcctgggacaaggaatagcgggttttgcagcaattgttgcatatggattatataaactgaagagca

SEQ ID NO: 764491 - DNA, 90 bp, Homo sapiens
gttcctacaccttgcatcatgccagctttgtcaacgggatctgggagtgacactgaagttcaccatgtctattctcaagatccatgccag

SEQ ID NO: 764492 - DNA, 50 bp, Homo sapiens
ctgactttcagctatggaatcgattcccaacttcttctggagcctgggga

SEQ ID NO: 764493 - DNA, 100 bp, Homo sapiens
ctgaattagaactgcagaggttcctctacagcaaggtgtggggatattcagctttgccaggtatggcagtgatttttatagcatgcactataaaggcaaa

SEQ ID NO: 764494 - DNA, 100 bp, Homo sapiens
gacagggaccatcctttcaggctccatcagcctcggtgacagtgtggagatccctgccctcaagttaggcatttcctcacatgagaatgccactcctgtg

SEQ ID NO: 764495 - DNA, 82 bp, Homo sapiens
ggtgcgctgctcaaggacacggtctacaccgacttcgacggattatatctgtccaagatgcgagtctggttttatcgaggag

SEQ ID NO: 764496 - DNA, 98 bp, Homo sapiens
ccaactccaatgggcctttccagcccgtggtccttctccatattcgagatgtggaagtctgtagtgggccatgatgtgtctgtttccgtggagaccca

SEQ ID NO: 764497 - DNA, 86 bp, Homo sapiens
aggcaagaaggcaacgacgttccatctgtggaaggacctaccaaccagtgagaaggcaaccaaagtgcaggacatcaaaaacaacc

SEQ ID NO: 764498 - DNA, 75 bp, Homo sapiens
atgtatctaaacttggcaccaagtatggggatcccaacaagccctcaggattcagaagtgttaaagctcctgtca

SEQ ID NO: 764499 - DNA, 82 bp, Homo sapiens
cggaatgtatcctccgaagctatggcctgaagacgggattctttaggacaatctctatgggaagcagaaggcaaggaccccg

SEQ ID NO: 764500 - DNA, 75 bp, Homo sapiens
agctccagccgaaggagaagggggttggaatcgaagcctcttaaaatggcagatgacttggacttcgagacagga

SEQ ID NO: 764501 - DNA, 75 bp, Homo sapiens
tgggtactgcattcctaccggtgtgacagatcatgacaagatgtttaagatgagtgaaaagatattactcctgtg

SEQ ID NO: 764502 - DNA, 90 bp, Homo sapiens
cacatgtgggtactgcattcctaccggtgtgacagaaattttagatgggcagaaatcaggcgaccatctaaagcggggtaggaagaaagg

SEQ ID NO: 764503 - DNA, 51 bp, Homo sapiens
ctaataattggcaacttggctttaaagcagatccctgggtatcagtatgtg

SEQ ID NO: 764504 - DNA, 88 bp, Homo sapiens
gatgctggggactggccagtgggccaccgacctctacagtggctatctggcctttgtttgctgtgtcagcgtgttatgatgccgtccc

SEQ ID NO: 764505 - DNA, 88 bp, Homo sapiens
gccacgtccgagacctggagcagccaccgccgcaatcatgggaggctgccggcgtggaccgcgggaaggcggggctggggctcggcgg

SEQ ID NO: 764506 - DNA, 97 bp, Homo sapiens
ctgaaacgacaagcccatgttgccagcgcattatcaccaagtcacttggcaagcgtttagcagtccccctggtgcgacacatggagtctaggatcat

SEQ ID NO: 764507 - DNA, 82 bp, Homo sapiens
ggagaagccgcccaaagaactgctgagcttcagtcattgtctattcctggaacttaccaagagaagatcacccacctgggac

SEQ ID NO: 764508 - DNA, 122 bp, Homo sapiens
gccaaggctaaaagacgaaataccaccggaactggtcgaatgaggcacctaaaaattgtataccgcagattcaggtgatttgaagatattaaagctagaaattggaactagaaaatcaaaag

SEQ ID NO: 764509 - DNA, 51 bp, Homo sapiens
atgtctgaagaaactgcaaaaggttgcctggctggacaaaatcgacagacg

SEQ ID NO: 764510 - DNA, 75 bp, Homo sapiens
tacacccaccatcccactggcctctgataaagcacaaacggcggcgtattgctctgaagaagcagcgtaccaaga

SEQ ID NO: 764511 - DNA, 74 bp, Homo sapiens
gtggagtgtaggtcatatcgccgcggaagaaatgttggctatttggcgatgagaggtggtgaacagtgaccata

SEQ ID NO: 764512 - DNA, 100 bp, Homo sapiens
accacggaccgggtcatgactgtgtcctttcataagtatggagagtacttcccaggaactggggacctacggggccattatgctgtgatgaacaacccca

SEQ ID NO: 764513 - DNA, 80 bp, Homo sapiens
cgaatctgtttttagctatcaagtggcatccacgcttaaacaggtgaaacatgtatttgagaacacagtggctacggtga

SEQ ID NO: 764514 - DNA, 75 bp, Homo sapiens
agccggttcaccagcctggacaaaggagagaatgggactctcagaggaatggcttcttgtgggaaccaaacaagg

SEQ ID NO: 764515 - DNA, 75 bp, Homo sapiens
tgcaggtggagctccggcagccgccctggtctacatccggataaaagacgatgaatggaatatttatcgccggta

SEQ ID NO: 764516 - DNA, 75 bp, Homo sapiens
ttttctgcactggaaattacagggctatctttgaagaaaccagtctattatcctcccagtccacaacgctgaacc

SEQ ID NO: 764517 - DNA, 100 bp, Homo sapiens
ctgtctggactgagcatttctctgacttgacataacttcccatccagccaggagtctgcactcttcagtctttgcaggtcacgacccccaggagacctgg

SEQ ID NO: 764518 - DNA, 90 bp, Homo sapiens
ctgctgacgtgcactgtgcccctggctgggggctcgcaggaccagttgctcttctgtgatgactgcgatcgtggctaccacatgtactgt

SEQ ID NO: 764519 - DNA, 100 bp, Homo sapiens
tccgcagcccgccgggagctctgaccgaggcgcctcgctggggcggggaccttgccttgcccgggctctctgcgcccttgttgccaccatctggttccct

SEQ ID NO: 764520 - DNA, 100 bp, Homo sapiens
gaatgaacttatggagcagacctcggagatcatcacgtttgccgagtcaggagctggtgatgatacacgaacttgggggccaccttttgttgggacagaa

SEQ ID NO: 764521 - DNA, 100 bp, Homo sapiens
ttgagctggaagaacctgaagatgctagaatcatgctgagccgagctgtggagtgctgccccaccagcgtggagacagtgatgtgtgttctgaaattgtg

SEQ ID NO: 764522 - DNA, 74 bp, Homo sapiens
tggagcacttcctattccactggattgggaaagaccatggcagttccaaatccagagttttgacattgtctgca

SEQ ID NO: 764523 - DNA, 96 bp, Homo sapiens
gcagccgccacctacccagtgaccatgataggtgtcatggagaaactccagctgggcccagagattctgcagcgggaaaatccaaggcttatttat

SEQ ID NO: 764524 - DNA, 98 bp, Homo sapiens
ctgagaagcatgggctactttgtagaggtcctcggggcccccttcacgtgttttgatgccagtcagtatggacatcggtgggatcaagtgaaaaagga

SEQ ID NO: 764525 - DNA, 87 bp, Homo sapiens
gagcccagcgtcaacttcctcaagtcgcccaaaggaggatacgaagcgttttcggcttcctgcccggagctgtgcagcaaacagtcg

SEQ ID NO: 764526 - DNA, 100 bp, Homo sapiens
cagaaagcaggcgaacccgcggcgcaataacgactcactgccacaacgacattgtcaaccttctcctggactgtggggccgacgtgaacaagtgctcaga

SEQ ID NO: 764527 - DNA, 98 bp, Homo sapiens
ggcttcgccacctgcgtgcaaaccctgcagccgcttcccagttgcgccctcctctgccctggcttcgtctgaggacctgcagcccccttctccaagca

SEQ ID NO: 764528 - DNA, 48 bp, Homo sapiens
ggcaatacaaactttctgctttcagttcaagatgttgttcctataact

SEQ ID NO: 764529 - DNA, 50 bp, Homo sapiens
aaagtcatttcccaggctggcggagaacggagtctcgctctgtcgcccag

SEQ ID NO: 764530 - DNA, 89 bp, Homo sapiens
cttaagaagaaggacagccagatatgtgagcttaagtatgacaatgcagatcttcgtgaagactctgactggtaagaccatcaccctcg

SEQ ID NO: 764531 - DNA, 80 bp, Homo sapiens
ggatctcggtgctgcagacggcgagacctcctgcacaggcagagaagaggcgatggcggcgatggcatctctcggcgccc

SEQ ID NO: 764532 - DNA, 97 bp, Homo sapiens
gagcgcttccttgcacagccttgcccatgagctcgtccctggcccggagggacccactctagaggtggtactccaaagattcaggtttactcacgtc

SEQ ID NO: 764533 - DNA, 100 bp, Homo sapiens
gacaggaggcagtagccaaacacccaggtgagagatcaagcccagcgctgttcacgggttctcctggatattgaggctggtgctcccgttctcttgatcc

SEQ ID NO: 764534 - DNA, 74 bp, Homo sapiens
cctcaacctggtgcagtgcgagacgctagaggaatgaacaggcatttgaagaagttttccagaatgccaacttc

SEQ ID NO: 764535 - DNA, 83 bp, Homo sapiens
gcttcgagtgacccgggtgccgaggagcgggaagagttgctgggaggccacaagaggaagctgaatgaagaggacgccgccag

SEQ ID NO: 764536 - DNA, 75 bp, Homo sapiens
agtacaacgtgcgatccatgcccatccgaaaggatgatgaagttcaggagtcttctgagaaggagacaatgtctg

SEQ ID NO: 764537 - DNA, 75 bp, Homo sapiens
gaagaacctgcgagccgacaacgccttcatgctgctcacgcaggttcacatcgagttcacagagggcgaagacaa

SEQ ID NO: 764538 - DNA, 50 bp, Homo sapiens
gttccctggaggtcctgtggaatgaccacctggtggcccatggtagaatg

SEQ ID NO: 764539 - DNA, 75 bp, Homo sapiens
gataaactccacatatttctgtgcgcgcggagccatggttatcatgtcggagttcagcgcggaccccgcgggcca

SEQ ID NO: 764540 - DNA, 150 bp, Homo sapiens
tttgttggggagaagaggattggaggtgtcagtgttaaaggaacctctacaacgaaggtgaagccacggaagataaggtgctggagaatctggtaaaagcaccattgtgaagcagatgaggatcctgcatgttaatgggtttaatggaga

SEQ ID NO: 764541 - DNA, 83 bp, Homo sapiens
cccgcccaccagttcgcccgtccccctgccccgttcacaatgggacggcaaaacagaacagaaaggcggagataaaaagaggg

SEQ ID NO: 764542 - DNA, 75 bp, Homo sapiens
ctgatgcaatgaaaaaagttggaagaaagggtgtcatcacagtaaaggatggcaatggctatattagtgctgcag

SEQ ID NO: 764543 - DNA, 96 bp, Homo sapiens
atcatgtcaagcgaagccttgaaaaagctgccctgagacggtgtcccgccgaaagggtcatgtaggtacaacagcaaccaagaagatcgatgtcta

SEQ ID NO: 764544 - DNA, 127 bp, Homo sapiens
gaggaaagtagaagagatcaaggcagagttatttggtcatggaagaacaactgacttgtccaaggaagggaaaaggccgaggcatcagcgtgtgaagaccgcaaagacgatcccgagtacagttgtg

SEQ ID NO: 764545 - DNA, 75 bp, Homo sapiens
ctccggctccaaggtttacaggcttgcaggctacacacggagggccgtgtagccatcacccgagtggccaacctt

SEQ ID NO: 764546 - DNA, 83 bp, Homo sapiens
ccgagtgcggcccggaggcggcggagggcaccccgggcgggcggcggctgctgatgagcaattcttaggttttggctcagatg

SEQ ID NO: 764547 - DNA, 75 bp, Homo sapiens
aaaagctggtcaaatttcgcgaaggtgaacgcccgtctctgagactgcagttacggagtttcgctgttgttgccc

SEQ ID NO: 764548 - DNA, 50 bp, Homo sapiens
gttcaggaaccaccagtgacagactgtttttcagagtgacggatgaccgg

SEQ ID NO: 764549 - DNA, 82 bp, Homo sapiens
agaaagagtggatttcagcctgcacggatggtcttgaaacacaaatggtttttgtaaccttcgagaaagctttgaatgccgg

SEQ ID NO: 764550 - DNA, 99 bp, Homo sapiens
gtgcagctgtcagaccacacccgctccgagcagtgctacagagacgtgtctgatctaaagtctgagggaaaaggccataccaatgctggagatgcaata

SEQ ID NO: 764551 - DNA, 75 bp, Homo sapiens
ctcctacttcctctgtatagagcaactgttgaactcagctgcctgtagatgattgctgtactagtggataagatg

SEQ ID NO: 764552 - DNA, 100 bp, Homo sapiens
tccacctatgatctcaggtcctcagaccaaccagcccaaggaacatcttgccaatttcaaatcgggaagcagtcaattatagatttcttcaaaccagctt

SEQ ID NO: 764553 - DNA, 75 bp, Homo sapiens
gcagccattactgacacccaaagagaagtggagatcctgatgtttctcagtgccattgtgatgatgaagaaccgc

SEQ ID NO: 764554 - DNA, 74 bp, Homo sapiens
ctgggttcgcctgcccagcaaatgcgaaggtgctggagaatctggtaaaagcaccattgtgaagcagatgagga

SEQ ID NO: 764555 - DNA, 120 bp, Homo sapiens
caagtgcatcttatactgcttctacaagaatatagtgctctatattatcgagagagatcgatgtcttattgtgatgagtctcgactgtcatatcttcttcggaggatcacccgggaaaac

SEQ ID NO: 764556 - DNA, 83 bp, Homo sapiens
gggagcgggtccttcggagatatctacctgggctcttgtcaggatggtgaagctgttcatcggaaacctgccccgggaggcta

SEQ ID NO: 764557 - DNA, 75 bp, Homo sapiens
ccgggaccgccttgccctctctttaaaggccatcgaggagggcacgctggaggagatcgaagaggaggtccggca

SEQ ID NO: 764558 - DNA, 99 bp, Homo sapiens
agttcacccgccggcatccagggggctcccgggtcatcagccactacgccgggcaggatgccacggaagccaaattggcagagaatgcttgtaccctgg

SEQ ID NO: 764559 - DNA, 75 bp, Homo sapiens
cgtttaacctttattgtggtggagtccaccccgctgtgaggcaaatttctggagatgtgcaatgatctcttagct

SEQ ID NO: 764560 - DNA, 100 bp, Homo sapiens
agtgatgctggaaaatctcaggaatctggtctcattggggatgatcatggtgattttactgctgcttgtggctatcgtggttgttgcagtctggccgacc

SEQ ID NO: 764561 - DNA, 83 bp, Homo sapiens
agtcaaggcagtcaagctgcggcgagataggttttactgcaatcacagcaaccaaccccatttggcttataaagactcggtta

SEQ ID NO: 764562 - DNA, 75 bp, Homo sapiens
cggccggaagcgcggagggagccgcgggatggaccgcagtcaaggcggataagaaggcggcacaagaaaagatga

SEQ ID NO: 764563 - DNA, 129 bp, Homo sapiens
atggtgatgccaccccagcccgtggtcctgatgccaacagtgtaccagcagggcgttggctatgtgcccatcacagatcgcccaggaccacaccgcagcgtaactgcaggcctctcagcgaaaaagggg

SEQ ID NO: 764564 - DNA, 51 bp, Homo sapiens
tgagtggacagttgaaacggttgagcgcctgaattctgctattatctatga

SEQ ID NO: 764565 - DNA, 82 bp, Homo sapiens
gccaagatggcggtgctgtcaggtggctattatcatggaaaactaatttttcccagagaatttcctttcaaacctcccagta

SEQ ID NO: 764566 - DNA, 82 bp, Homo sapiens
ccgcgcacagctgctcccttcgccttcgccctttccacctcgcggcagttcgtgttatagttttgccgctggactcttccct

SEQ ID NO: 764567 - DNA, 74 bp, Homo sapiens
ccgacctcgacgtcttgcctgtgtcccacttgttcgcggcctatagggcgtgatggtgggcatgggtcagaagg

SEQ ID NO: 764568 - DNA, 116 bp, Homo sapiens
ccgagtgcagaagatctgggtgcccgtggaccacaggccctcgttgcccagatgcttgggcactgtttaaaggaaagttccgagaaggcatcgacaagccggaccctcccacctgg

SEQ ID NO: 764569 - DNA, 83 bp, Homo sapiens
gagctgcggccgccgcggcattcggggaatctgcagggcagattgacgtgagtgaattcagatataactcaagcttgttagag

SEQ ID NO: 764570 - DNA, 83 bp, Homo sapiens
cagagacaagctgagcttgccgcacaaaaagctagagagtgcgtcagcatttatcccgtttgccaaccattgatccgaatacc

SEQ ID NO: 764571 - DNA, 75 bp, Homo sapiens
gctggaacaacaagaaaccggccttcttgcgtcgatggtgttcagcacttactccaacgaggattacgatcgtcg

SEQ ID NO: 764572 - DNA, 75 bp, Homo sapiens
ggctgccgtggctgtgctgagggtggcggccggatagggccagctctcaatgttgcaagaaaaaatagaccattt

SEQ ID NO: 764573 - DNA, 83 bp, Homo sapiens
ccatggacatctttgatatgttttttggaggaggaggaaggatgcagagagaaaggagaggttgacatcatggacatatgtga

SEQ ID NO: 764574 - DNA, 51 bp, Homo sapiens
cgactccccccgggcccaaagttcagcagatagatcgtgtggtagaagttg

SEQ ID NO: 764575 - DNA, 100 bp, Homo sapiens
gccgccgagctggacccggaccggttttggaataatccagaatggctactctgatctatgttgataaggaaaatggagaaccaggcacccgtgtggttgc

SEQ ID NO: 764576 - DNA, 76 bp, Homo sapiens
agtgcctgtaaccaggtcgtcaagccacaggttttccagtcgcactgcggggagccctggaagcttatgttcaatc

SEQ ID NO: 764577 - DNA, 100 bp, Homo sapiens
ccaccatggcggcgcccccgcagcccgtcacccacctcatctttgacatggacggacttcttctggtgatctcagtgaaaaccaaattcaggcaatccca

SEQ ID NO: 764578 - DNA, 98 bp, Homo sapiens
atgcttctggagcgaaatgaagagctgcggcggcagctggagacgctgagcgcccagcacttggagcgtgaggaattccagaaacgccgctggactgc

SEQ ID NO: 764579 - DNA, 89 bp, Homo sapiens
cagagatccactgtttacagaagaggcttcaagctgttagtgagtccacggttccgccaagccaacaaatggaattttcttgagcatgt

SEQ ID NO: 764580 - DNA, 100 bp, Homo sapiens
atgaactcatccttcaaaccgacgcatactcaggagcagaggatttcagatgcatgccaggtttccactgattgccagaactcgagatcactacacatgg

SEQ ID NO: 764581 - DNA, 100 bp, Homo sapiens
atctacttctcagatcttaccatcaatgtcagtgtctatatgccccagttcaacagaagttctgaaagcatgcagatcatgaagactatgatccacaaac

SEQ ID NO: 764582 - DNA, 100 bp, Homo sapiens
gcgccttgtcactggagtgcaagaagaaattcccacctgtcaaagaggatattaccttccaaatgatgatggagaattttatcagttctgttacgttacc

SEQ ID NO: 764583 - DNA, 82 bp, Homo sapiens
gtgcgcccatcgcggtctcggccttctacgccggtgcccctgtagacaatggccctcgtgtctgccgattcccgcattgcag

SEQ ID NO: 764584 - DNA, 100 bp, Homo sapiens
cggacggttttcgtacgggcggccgtgcgcgaggcgaggtgtacatcggtgagctcccgcaggacttcctccgcatcacgcccacacagcagcagcggca

SEQ ID NO: 764585 - DNA, 99 bp, Homo sapiens
ttgtggaggatatgcagagagagcttgggagactgagacaacaggatggggagggacgcgcggcactgccctcgagaactggcgctccggtgaagtagg

SEQ ID NO: 764586 - DNA, 99 bp, Homo sapiens
tggatcatcaagtccaactaccagggcctgcccgtgccctgcgtgaagagcatcgtgaggcagaggcattcgacttacagcagtgtgcggccagccagc

SEQ ID NO: 764587 - DNA, 104 bp, Homo sapiens
cagatggcagacatacatcatttaaaggatacactctgtgcagttttagagagagacacactcagtattcgagaaagtcgactttttggagctgttgtacgctg

SEQ ID NO: 764588 - DNA, 75 bp, Homo sapiens
aggcggtcaccaagtacaccagctcgaaggaatggcatagtactgccacctaaacccaaaagcaaggtcaagtgg

SEQ ID NO: 764589 - DNA, 80 bp, Homo sapiens
agcgcgagcggcgcgagaaaatgagatcgtggggctcaccagcgtcccccatggcttctgagtagcgtgggagtggagtc

SEQ ID NO: 764590 - DNA, 101 bp, Homo sapiens
tatcagggacagtggcggatgtgcactgctacaggactctactatggagtatctggagtccatctttcaccatcttctcctgagattgtactggaccgtga

SEQ ID NO: 764591 - DNA, 104 bp, Homo sapiens
tgctccttctgcatggaggaggtcattctgccctttcttgggctgtgttcacgcctgactggctcatggagaaagcctacctaagaatgaagccgggacccggc

SEQ ID NO: 764592 - DNA, 75 bp, Homo sapiens
ttcatagccatttattaccatgcttcaagagccattccttttggaacaatggatctcccattaaccagtcataat

SEQ ID NO: 764593 - DNA, 100 bp, Homo sapiens
gattcgcgtacacctgttgtttgaaagctctcagcgggacaatgctgacccaggttgaagccatccttgtcaatatatttggtggtatcgtcaactgtgc

SEQ ID NO: 764594 - DNA, 78 bp, Homo sapiens
gaacccagaggtcgtggaggtggccgtggaggcagaggtggcatgggatacgtaggtaacctttccagagatgtgaca

SEQ ID NO: 764595 - DNA, 83 bp, Homo sapiens
ggaaagtggtagaagctgacccctgagccctggcaggtatggtttaggaatgatttattacaagcaagaaaaattcagccttg

SEQ ID NO: 764596 - DNA, 50 bp, Homo sapiens
cggaatggagaaggaagaggagtcgtaatctcaggggcgatataatcaat

SEQ ID NO: 764597 - DNA, 100 bp, Homo sapiens
gcgaagagaagctacaaaatatgctcgatggatagcattcactggaaatttggctagctgattggctgctgaaaaataatcctaacaaacccaaactttg

SEQ ID NO: 764598 - DNA, 90 bp, Homo sapiens
cgataagcgctttcgcttggcgctgggcagcttcgtggaggagtacaacaacaagccacagcctggcagctctgatcaggaaagtgagga

SEQ ID NO: 764599 - DNA, 100 bp, Homo sapiens
tggacatctgctgccggaaggggtcccgaagccccctgcaggaactctacaacccaatccagatacttgccagaactaatacagctgatgaaatacctga

SEQ ID NO: 764600 - DNA, 97 bp, Homo sapiens
tcaaacactgcaaggaccccctccggctcaagtgtgtcaagcaagattttaccaaatgttgcaagaactctggagttcttatggtagtaaaatgccg

SEQ ID NO: 764601 - DNA, 83 bp, Homo sapiens
gaacgggccacggccatttccttgatgcgcaagttcattgcctaccagttcacagacacgcggatgcagtggtgcagtatgac

SEQ ID NO: 764602 - DNA, 100 bp, Homo sapiens
ccgacgactgcaagcagtttcgggaggagttcaacatgctgtgtgctgtggacccacctggggttcatggagtgggccacggggcccagccctaagcact

SEQ ID NO: 764603 - DNA, 75 bp, Homo sapiens
tgctgctatagactcactgctgaattatgaaactgtgaagaatatcatcacccttgcagaaactggctctctgga

SEQ ID NO: 764604 - DNA, 83 bp, Homo sapiens
gttaacacctctgccgctgctaaaagtttaaggaagaaatctctaaacgttttaaatcacatactgaccaacttgtgttgata

SEQ ID NO: 764605 - DNA, 100 bp, Homo sapiens
ccactcttctctggttccgagatgggaaaaaggagttcttggtttcgactcagaaaacatatggtgctgacctggccagtgtggattttcagcatgcctc

SEQ ID NO: 764606 - DNA, 108 bp, Homo sapiens
gaggaggttttcaggaccaaaattgtggaaaagtcactctgtgtgcaggagaagagaattgggtggacagcaggaccatctacgtgggacacagggagccacctccgg

SEQ ID NO: 764607 - DNA, 101 bp, Homo sapiens
tagattatcatgatggagcagctacattcctcttaataaatcacacaaagaatgaacttgttcaatacaatcaaagatcccagatgcagtgactggttact

SEQ ID NO: 764608 - DNA, 75 bp, Homo sapiens
ttccgcaagctcaacgcgtttggcaacgctttcctcaacaggcagttggccagacagcaggctgataaaaaaaaa

SEQ ID NO: 764609 - DNA, 49 bp, Homo sapiens
atctgtgggatctgtaatagaaatatgggcactgtgccccgactgcggc

SEQ ID NO: 764610 - DNA, 98 bp, Homo sapiens
aggaatgagaagacagaagtcagagacaagaagaggctaacatgactgataccactataatttagtgcgggcgctaatattgacacctgctcagaaga

SEQ ID NO: 764611 - DNA, 82 bp, Homo sapiens
gagaccacatcagaggcagacaaaaacctttccaagcaagcatgggacaccaagaagaggtcctgctgtactagccaccaaa

SEQ ID NO: 764612 - DNA, 75 bp, Homo sapiens
gacactcctttactcacagcagcaggtgggcaccatgtccttgaagcttcaggcaagcaatgtaaccaacaagaa

SEQ ID NO: 764613 - DNA, 75 bp, Homo sapiens
ccgcgctccaaccgcctcctcctcctcagtaacgcgggtcccagtagggatggcacaatcagcgaggacaccatc

SEQ ID NO: 764614 - DNA, 127 bp, Homo sapiens
gcattggcagcgggagccgtccggaggacctgggacaccgcggaagtcgggaaatggtgcgtctaatgctagtgttggcacctgttatgtgcattctctctggcattggagtctcccaggtgctgtc

SEQ ID NO: 764615 - DNA, 100 bp, Homo sapiens
ccacacgggcgagaagccctacgagtgcaacatctgcaaggtccgcttcaccagcaattctgtggtgttcttggtcacacatttatggagtttctgaagg

SEQ ID NO: 764616 - DNA, 98 bp, Homo sapiens
atgaatagttctactccttctacaggtgtgtatggtctgaatttcctgctgctgttcacaaagatgctttttatctttaactttttgttttccccact

SEQ ID NO: 764617 - DNA, 76 bp, Homo sapiens
agaaaaagaaactggacttaatgtgttcttattggatatgtgtaggaaaagaatcttggacttgttaataccactt

SEQ ID NO: 764618 - DNA, 75 bp, Homo sapiens
agaacttagtagatgcattgaggatgtgtttaaggttttatgacttacctagtggagcctttatttacagaatgg

SEQ ID NO: 764619 - DNA, 98 bp, Homo sapiens
aagcctggcatgaacttgcagaactttacatcaatgaacatgaagtctcactctgtggtccaggctgaagtacagtggcatgatcccaggtcactgca

SEQ ID NO: 764620 - DNA, 75 bp, Homo sapiens
cacaatagcgggattgatctccttaggacctgtcgtcagcttgttctggaaactctttatgctttgacatcgagt

SEQ ID NO: 764621 - DNA, 83 bp, Homo sapiens
tagccctctacttttcaagacaccaagtgagaggccaaccagtttgtggggacattcatggacaattctttgatttgatgaag

SEQ ID NO: 764622 - DNA, 100 bp, Homo sapiens
acagcgttctgtcatctcagcaaagaatggaaagaccacagcaagattctttcattcgtctcctcctagcctgggggaccaggctcgaactgaccctgga

SEQ ID NO: 764623 - DNA, 75 bp, Homo sapiens
ctcgtctcgaccaagagctgaagctgatcgttctcctgtgcctcctgttggctctctttgcatctggcctcatcc

SEQ ID NO: 764624 - DNA, 74 bp, Homo sapiens
cttctcaggtagcaagtacatggggagttttcggctttgtgagaaaccttaccatcaaacacgatggccagcaa

SEQ ID NO: 764625 - DNA, 75 bp, Homo sapiens
gaagctacttcacacaggaaactccttaaaggccactccctgctgatgcaacatctgggtttgggcagaaaggag

SEQ ID NO: 764626 - DNA, 100 bp, Homo sapiens
ggagacacaaaaccaactgctggacaagtccacctaatcatcctgtgaaagtggtttctctatggaaagctttgtttgcttcctacaaatacatgcttat

SEQ ID NO: 764627 - DNA, 97 bp, Homo sapiens
ccggctctggtccccttccagcaagggaacccagggagcaacaccaccagtccaggccaagagcacatccccaggccagaagcttcgacctgcagaa

SEQ ID NO: 764628 - DNA, 75 bp, Homo sapiens
gaacaagcaaagaaggtgataaccatgtttgtacagcgacagatggctgatcactgggaaactgcacctcgtcac

SEQ ID NO: 764629 - DNA, 96 bp, Homo sapiens
gggggtcgggggactggccagctcaaccgcttcgtgcaactctccgggcggccgcacctgccagtgttctaagaacggaagcatctgggctggatg

SEQ ID NO: 764630 - DNA, 100 bp, Homo sapiens
gaggaagtctgcatccacattgcacataaagttgatccctcgggctggtggaagggccggcttcacggccaggagggccttttcccaggaaactacgtgg

SEQ ID NO: 764631 - DNA, 101 bp, Homo sapiens
atgaatcagaagaactggatcttaccttgcccaccaacttcagagatttgtccaagacatcccagttaccagtgtccttgaattgatagtggcttctgttt

SEQ ID NO: 764632 - DNA, 75 bp, Homo sapiens
cagtgctgtaagaaaggacggaggctgttatctatggcaggggggacacagcgattgccacgcgccattggaatg

SEQ ID NO: 764633 - DNA, 75 bp, Homo sapiens
ggcagaaggccctgtaccgccggcttgccacagtccacatgtcccggactttgctgtctgcatgccgacatgctg

SEQ ID NO: 764634 - DNA, 100 bp, Homo sapiens
ggagtcatcgcgggcatcttgctgttcgtgattatatttcttggagttgtgttggtaatgaagaaaagattgaagaatgaaaaggccttgcgtctcaacc

SEQ ID NO: 764635 - DNA, 50 bp, Homo sapiens
ccaatgccaatccctcccagctcttcggctaaatttattgtgaagaaatc

SEQ ID NO: 764636 - DNA, 75 bp, Homo sapiens
agctccagccgaaggagaagggggggtctccgtctctccaccgggggcttcatccttccagggaggagaagaggg

SEQ ID NO: 764637 - DNA, 87 bp, Homo sapiens
tggagctaaactggagccgtccataggggtgaatggggactctcagcgttctcatctctcttccttcaccatgaagctgatggacaa

SEQ ID NO: 764638 - DNA, 100 bp, Homo sapiens
ccatccatcaaactgcgcaggagtaaggcaggaaaccgacgagaggacctcagctccaaggtcatttcttcagatagctccccagctgtggaaaatgagc

SEQ ID NO: 764639 - DNA, 82 bp, Homo sapiens
ctcgcctcctcgcagcagcgccatgggagtaccctgacttctaccggaagctctacggcctcttggacccctctgtctttca

SEQ ID NO: 764640 - DNA, 90 bp, Homo sapiens
gcaggtcctgatagtcgatcaaaaattgtgcttctggtagatgcttcacagcaaactggtgactattatatggttaaaaagattttggag

SEQ ID NO: 764641 - DNA, 83 bp, Homo sapiens
ctcctgccggcagctccaaccatgggaggccgcgtctttctcgatcgccatggatcggatgaagaagatcaaacggcagctgt

SEQ ID NO: 764642 - DNA, 51 bp, Homo sapiens
ccgaagagccaaaaatgaccaagtccctggcctgggccgaggccactggtg

SEQ ID NO: 764643 - DNA, 82 bp, Homo sapiens
cgccgcccagcccggccccgcccgcgccggaagagccacgccggtgtcttatctgacttggggtgtgctgcaggaaagagtg

SEQ ID NO: 764644 - DNA, 101 bp, Homo sapiens
taatcaattgtgctgacaacacagatgttctacatttcaactccatcaaatattaaattgatgtttatgggctaacctggaaaccgaaaaacagtttgttt

SEQ ID NO: 764645 - DNA, 50 bp, Homo sapiens
aacatgcagagtctgcacaacagtagaagactcagaaagtggtgtttaca

SEQ ID NO: 764646 - DNA, 83 bp, Homo sapiens
gcagtttgcaatatgactttggaggaattctcggctggagagcagaagaccgaaagccttatgccagcctggaccatcttgga

SEQ ID NO: 764647 - DNA, 50 bp, Homo sapiens
tggagtgtaggtcatatcgccgcggaaaaccaattctgtgtcctcggagg

SEQ ID NO: 764648 - DNA, 110 bp, Homo sapiens
ccgccggggggctatgggcccatcgactacaaacggaacttgccgcgtcgaggactgtcggccattgcactgaatggtgtggaggacgtgcgaaccgtgctggagcacta

SEQ ID NO: 764649 - DNA, 96 bp, Homo sapiens
ccattcttatcatttctaagcaggttcatgccagcccagaacagagaatcaggaaaatgtttataggaggccttagctgggacactacaaagaaag

SEQ ID NO: 764650 - DNA, 75 bp, Homo sapiens
aagagtttcagtttttacaggctcaataccacagtattgcctaagtgtaatcttgaacatgggcggtgctgtgag

SEQ ID NO: 764651 - DNA, 75 bp, Homo sapiens
ggcggcgcaccttaagaagcgggtttatgaggaattcacgaaagtggttcaggtgctgcaggatcatcttataaa

SEQ ID NO: 764652 - DNA, 95 bp, Homo sapiens
aactccgcggcccgcaagcccggctcggcccggccctgctctgttctgcccggaggagccgcccgtggtgatgcgcaggcaccccctggtctatg

SEQ ID NO: 764653 - DNA, 99 bp, Homo sapiens
actttcgtttccctctgagggaattgggaggtcggcggccccaaaagaacattttagtggacaaaccaaatgaccaatcttcaagatggtcttcagaga

SEQ ID NO: 764654 - DNA, 123 bp, Homo sapiens
tgccaaaagcataaccaatggcagtgatgatggagctcagccctccacctccacagacttcaaatctcaacctgagccatccccagttcttagccagttgagccagcgacaacagcaccagag

SEQ ID NO: 764655 - DNA, 75 bp, Homo sapiens
tattcctctccaaagagctgcaggccttcaacagccttattagcgaaggggcagaactcaggcacctcgacactc

SEQ ID NO: 764656 - DNA, 100 bp, Homo sapiens
ctcgcatggagcgcgagcccagcgcctcggaggccgcccccgcggcggccgcgctcttcgcctgggtgcatgtgagggaaccctggcttgttcaacctgt

SEQ ID NO: 764657 - DNA, 78 bp, Homo sapiens
agacactccccagggcagaaatagcgaccatggcgaggggtgagcccctccagactccgaataggagatcaagagttt

SEQ ID NO: 764658 - DNA, 50 bp, Homo sapiens
tccggaggcgccagctcaaccaaggacagaataacgggctcccagattca

SEQ ID NO: 764659 - DNA, 75 bp, Homo sapiens
gggccggcacggtgcgggccatgagcggggcggtgccccaggacctagcggctggacgtaaagaaagaagtgatg

SEQ ID NO: 764660 - DNA, 98 bp, Homo sapiens
cagccccaagaaggagaccctcatccagctgatgcccttcttcgtaactgccattggatgtccagaatcccctgtagttgataatgttgggaataagc

SEQ ID NO: 764661 - DNA, 100 bp, Homo sapiens
accccattaaaaagaaagaccttcatcacagcaatggagaagagaaagcacaaagcatggagaccctccctccaggctcctgggtagaactgcacttcag

SEQ ID NO: 764662 - DNA, 98 bp, Homo sapiens
aagcttacgtctctgctcttcagtacaatcctgtccctatcactgttcagtccatcgtcattcagtctctaaataaaacgctcacccgacgggaggac

SEQ ID NO: 764663 - DNA, 87 bp, Homo sapiens
agcctgggagtgggaggatgcgcaggggttttctgcacttctacactcagtgtggcaaaggagcagagaactttgacaagttcttca

SEQ ID NO: 764664 - DNA, 97 bp, Homo sapiens
ttcctgggagccgagggccagagactaagtgcaggatgacgcaaaacacggtgattgtgaatggagttgctatggcctctaggccatcccagcccac

SEQ ID NO: 764665 - DNA, 113 bp, Homo sapiens
caggtcgccgacacgctcacgcaccctccctgcctggccgcgcctctgcgaccagatgtatttccactacacaaaattttccacctctgggataccttactacttgggaattc

SEQ ID NO: 764666 - DNA, 75 bp, Homo sapiens
ggggacctgctccgggacaacatgctgcggggcacagggttccgagtctgaggaagacataaccttgtgcctgcc

SEQ ID NO: 764667 - DNA, 133 bp, Homo sapiens
tgatgatgatcggtttcccagacggggtgatgactcaagacctggtccttggagaccattagtcaagccagggcgtgatggtgggcatgggtcagaaggattcctatgtgggcgacgaggcccagagcaagag

SEQ ID NO: 764668 - DNA, 99 bp, Homo sapiens
atttacggtatatcttatgactctacaggagccttgggatataggttctaggtaccagcctctggcttctacagcctcagacaatgactttgtcacacc

SEQ ID NO: 764669 - DNA, 74 bp, Homo sapiens
acgcaccaggtcttgaataacatttttgaacgtttcccagaaagaacaagaatgtggtggtggctgacttcggg

SEQ ID NO: 764670 - DNA, 75 bp, Homo sapiens
tgtgagagacaaattgcttgttaaagttgctgccaaacaaggtgaatccgacccagagaggaaagaaacaaggca

SEQ ID NO: 764671 - DNA, 121 bp, Homo sapiens
gcagcaactgccgcacccttgaaaggaggcccctgccgtgtggacccgtaaaataaaatggattagcctgaggcctgctcagtcgttcctaatgaataaaaatcaagtgccaaagcttcag

SEQ ID NO: 764672 - DNA, 100 bp, Homo sapiens
ttcttggtactggacagaggggcccgggagctgagctggatgtccagtgtaagaagacaagaggtttcttctcctagaaaagaaacttcagcaaggagtc

SEQ ID NO: 764673 - DNA, 83 bp, Homo sapiens
gagctaaagcagcgtgcgttcagccctgggagctggaagtcgagtgtgctactcaactcaggagatttggagacaaactgaac

SEQ ID NO: 764674 - DNA, 100 bp, Homo sapiens
acacaacaggagagaggagaaagaagaaacgctagtaattccagacctgaaggagaagaaggagaaggtggaggagaaggcaagccggaaagagcgaaag

SEQ ID NO: 764675 - DNA, 83 bp, Homo sapiens
ggctgccaagtaaaccaagactactttgcatctgtaaatgcaccttcaaacccaccaaggtcaaatgaagcgcaacagagggg

SEQ ID NO: 764676 - DNA, 100 bp, Homo sapiens
atgatatccttctcaaccttgtgggatgtgaaaactctgttactgaagtgaaagctggtggaatgcgaattgtgcagaaacacccacatacaggagacac

SEQ ID NO: 764677 - DNA, 76 bp, Homo sapiens
ctactggccagatgagggtgcctccctctaccacgtatatgaggatgacaaggagtatgtgggctttgcaaccctc

SEQ ID NO: 764678 - DNA, 100 bp, Homo sapiens
ggcagcagcatgaaattcagcccagcgcactacctgctgcctctcctgcctgcgctggtcctcagcaccagactgtagactccactccactttcagttca

SEQ ID NO: 764679 - DNA, 75 bp, Homo sapiens
atgtcggtggccgggctgaagaagcagttccacaaagccagccagtgccgcgtatgatgctgtccttgacagaaa

SEQ ID NO: 764680 - DNA, 82 bp, Homo sapiens
agcagcccgccagccgccgggagcaattctgtggtgttcttggtcacacatttatggagtttctgaagggcagtggagatta

SEQ ID NO: 764681 - DNA, 100 bp, Homo sapiens
actggcacgctctatagccaaggaaggcttcgagaagattagcaaaggtgctaatccagtggaaatcaggagaggagttggacattcaatggaatctaag

SEQ ID NO: 764682 - DNA, 50 bp, Homo sapiens
aaatcatttcactcatgcttaggatgcaacctgaagatcttcaacaacca

SEQ ID NO: 764683 - DNA, 96 bp, Homo sapiens
taaaaactaccgatcagtcatcagagcatgtatggaggaaatgcaccaggttgcaatggaaatttaatggagccaccatttcagaaccaaaagaaa

SEQ ID NO: 764684 - DNA, 98 bp, Homo sapiens
aaggagcaaagcaacagaagtttatcaaggctgtcacacatcaagttaaatttggtcaacaaaatccacgtcaggtctttactcacctggagacctgt

SEQ ID NO: 764685 - DNA, 80 bp, Homo sapiens
gtggccaccgcctccagcttgccaccaaagacctgcgactttgctcaggttcattttccagacactgaaagagcagaatg

SEQ ID NO: 764686 - DNA, 51 bp, Homo sapiens
gggcagaatacagagatatggaatcaggaatgtatcctgtcaggtataatg

SEQ ID NO: 764687 - DNA, 100 bp, Homo sapiens
gcagaagctgtattaaacttgttccgtacacgtcctggagagagatgtttttagaacggcctcgtgttcggtttgatgggctgcaaagtatgccagggga

SEQ ID NO: 764688 - DNA, 100 bp, Homo sapiens
cagttacacgtgtgtcgccagcaccgagctagaccaagacctggccaaggcctacctcaccgtgctaggaccctttgaggatgccctgaagttgcatgag

SEQ ID NO: 764689 - DNA, 100 bp, Homo sapiens
cggctccatcatcacccaggcgcggagggaagacgccctggtgctcaccaagcaaggaatactcccccagttgcaagaggcgcaggaccgtggaagactt

SEQ ID NO: 764690 - DNA, 75 bp, Homo sapiens
ctgacttttatcatcatattgataatctcaggagaactctatgcagaagattgcaatgaacttcctccaagaaga

SEQ ID NO: 764691 - DNA, 100 bp, Homo sapiens
cggcgggaacccattcccagtctggaggccatttatttgctgagccccacggagaagcttcttggacacttaatgattgttggcaagaaatgtgctgctg

SEQ ID NO: 764692 - DNA, 51 bp, Homo sapiens
ggatatagcacaccatccccagccaatgtccagctcgccgctgtccaagaa

SEQ ID NO: 764693 - DNA, 49 bp, Homo sapiens
ccttttcatatcctcagaaacagcttgatcagttactggcagtcgcaga

SEQ ID NO: 764694 - DNA, 100 bp, Homo sapiens
cgggttgctgtgcgactattctccgggagccgtccgtgtcaccgccggaacctggcgcagatacgatgaatggattaaagcagataaaatagtaagacct

SEQ ID NO: 764695 - DNA, 100 bp, Homo sapiens
gagccacacgactcccgctggctcaatggggaccccgtggaacagctggtccgccatttcctcatcgagactgggcccaaaggggtgaagatcaagggct

SEQ ID NO: 764696 - DNA, 75 bp, Homo sapiens
tcttcggtggactccttcggcagtccacccaccgccgccgcctcccagggcgccatgttttggaagtttgacctg

SEQ ID NO: 764697 - DNA, 129 bp, Homo sapiens
ccagtaccaagacccgacacaaggcagcttcccacagcaggttggacagttcacaggcattgaagttgatatcgatgtggagcacggagggaaaagaagccgcctgacccccgtctctccagagagttc

SEQ ID NO: 764698 - DNA, 74 bp, Homo sapiens
tgagacatttgctacagcatcccacattaagtcaacggtacttaaagctttcaccaaaacacccagaatcaaat

SEQ ID NO: 764699 - DNA, 83 bp, Homo sapiens
agagagatgtactccaaagagaagaggactcttgctatggttcagaaagacgagaatccaggacttgaatcgtatcttcccac

SEQ ID NO: 764700 - DNA, 82 bp, Homo sapiens
tgatgccccacttggtgaatggagatgcagctcagcagtattggtaaaggttttcaaggtgtcatgaaaagatggggattta

SEQ ID NO: 764701 - DNA, 100 bp, Homo sapiens
gcaccagccctttgcacctcgcagctaaaaacggccacatcgacatcatcagctggcaaactgatacaactcagaaactgctcaatgtcaggaaaaccgg

SEQ ID NO: 764702 - DNA, 74 bp, Homo sapiens
attgagcgcgtcgtatgcggccagcactaaggtcaatgagctgaaggagaaaggcaacaaggccctgagcgtgg

SEQ ID NO: 764703 - DNA, 75 bp, Homo sapiens
gttggactgatggcagcacactggagtgacagttcatttagattctttgtattcttcttcgtctatatttgtcag

SEQ ID NO: 764704 - DNA, 75 bp, Homo sapiens
ttcgacgcgatgttccgccggagcttgaatcgttttccagagagatgacacgggggaaattcctcaatattctag

SEQ ID NO: 764705 - DNA, 75 bp, Homo sapiens
caaggacgagccggggcgctgaagatttggtgcttccagatgtgagttatcaggtggaatccagtgaggaggatc

SEQ ID NO: 764706 - DNA, 75 bp, Homo sapiens
gcaaatgaggaacagggcaatagtatgatggcgcagttgtgtagcagttgagtaatgctggttagctgttaaggt

SEQ ID NO: 764707 - DNA, 100 bp, Homo sapiens
aacgtaacgtgagcatgaggttttccaatcaggtctatgctccatcagcaagcactgccgactacaatagggactcgccaggctatccttcctccaaacc

SEQ ID NO: 764708 - DNA, 100 bp, Homo sapiens
ggaagtgagacttatttttctctctggactgtgcatagcagtagctgttgtttgggctgtgtttcgaaatgaagacagaccattaaaaatctcaagtgac

SEQ ID NO: 764709 - DNA, 100 bp, Homo sapiens
gagccatggatcataaagagacacataccaaattggatctatccaggagagccttgaacttaggaattcttcgagatcctggatcagaaatcgaagacag

SEQ ID NO: 764710 - DNA, 100 bp, Homo sapiens
atgcggttagagccgcggagcctggaagagccccgagcgaggatcccttttcccccagaaattactcaatgctgaaacctctcaaagtggtattagagac

SEQ ID NO: 764711 - DNA, 100 bp, Homo sapiens
cagcagtggtggctatgaacccagaggtcgtggaggtggccgtggaggcagaggtggcatgggagctgtcgatgatgaaatcgaggccaatcttgaagag

SEQ ID NO: 764712 - DNA, 75 bp, Homo sapiens
gggaatgtacacgataattaaagagtaaagttgtgctcaacgcgaagcagcagttttgggaatttcgatcgtttt

SEQ ID NO: 764713 - DNA, 83 bp, Homo sapiens
gatcactcgagcccagaagatcaagactagtgtgagcaacaaaggcgccatgttttggaagtttgacctgcacacaagctcgc

SEQ ID NO: 764714 - DNA, 90 bp, Homo sapiens
ttccaaaaaatgtgagactttttcttggacgaattcagtgatgccatctgcagttttgtgatctgcaatgattcttcccttcgaggtcag

SEQ ID NO: 764715 - DNA, 75 bp, Homo sapiens
cgcgaggaggcgcgggaggtgttcgagaacgaccccgagacgtgtaaatgagcaaagatggatcaggaaggtggg

SEQ ID NO: 764716 - DNA, 97 bp, Homo sapiens
ggtgacacagcagatcgaggcttgctaccaggtgatgggtatcccgcaatcccacatggccgaaatgacagctgagatgagtgaactgagtgtggca

SEQ ID NO: 764717 - DNA, 82 bp, Homo sapiens
cgtcgcagactacggacctgtctgggtctcagccgccaaagaccccgtccggtagggagtgcctgcagggcaccatccgcaa

SEQ ID NO: 764718 - DNA, 100 bp, Homo sapiens
caggaatatccatgtcggcttgtagagagattgcagttctccgtggaggagccagccaacgtcctttgaccccaaaccagaaccagcagggacagcaaac

SEQ ID NO: 764719 - DNA, 74 bp, Homo sapiens
cgtccctccgtgacaacctgtaccttctccaagcaacaatggagtcaatgaatggtggaaaactctattccaat

SEQ ID NO: 764720 - DNA, 74 bp, Homo sapiens
cctgctggtggcaaccgcctacgagacactcaaggatttacagctgttggaggatggtgatctgactgtgatag

SEQ ID NO: 764721 - DNA, 100 bp, Homo sapiens
cgatgcagcagccccacagaccatggtcatgccagattgtgtcagcagctaaggtgtgtggagctgccagtgagtcaccgtcagtgaagagcctccgctt

SEQ ID NO: 764722 - DNA, 83 bp, Homo sapiens
gcacagccagcaccgcacgccctgcaagggaggtggccagcatcgaaatgttcagccttttagtgatgaagatgcatcaattg

SEQ ID NO: 764723 - DNA, 97 bp, Homo sapiens
gtcctgcaggggcggggcggcgccaagcgcagggagcccggctgagtggcagcccagagtgcttgtgatttcacgtatttttgctgaactcgtaaaa

SEQ ID NO: 764724 - DNA, 75 bp, Homo sapiens
gggttccacaccctcttgactccaaaaccacgtcggatgttttaagcttagcagtgtctgcaaaaacgaatcttt

SEQ ID NO: 764725 - DNA, 74 bp, Homo sapiens
agatccaatcccttgtccttaaaaggtcttaaagaaagtgcagaagagatggtcaaaaacaaattggaaggaaa

SEQ ID NO: 764726 - DNA, 83 bp, Homo sapiens
cggcagttgcaggagcggatggagttgctgcaggcagagggagccacaggactttctgcagggcgactgcaccaaagcgaaac

SEQ ID NO: 764727 - DNA, 101 bp, Homo sapiens
caaaaactgggtctgtgactacaacatattgctgcaatcaggaccattgcaataaaatagaacttccaactactggccctcgggaccaaggatcacgtcat

SEQ ID NO: 764728 - DNA, 98 bp, Homo sapiens
agagaccacatttgaagtatatgttgaagtggcctatcccaggacaggtggcactctttcaggaatttatcaaagagctgctttctcggataagaggc

SEQ ID NO: 764729 - DNA, 82 bp, Homo sapiens
tttcacgaaggcaccgacgtcatcatgctgaccaccaatcagatccgtaagctcagagcccgggcgctgtggaagagattct

SEQ ID NO: 764730 - DNA, 100 bp, Homo sapiens
gtagactaagaacaactctaaacagaatacaagaaagccttattgatctacttttagtaaaacatggaggagacttgtttgctgagaatgaaaataaaga

SEQ ID NO: 764731 - DNA, 75 bp, Homo sapiens
tagagaagatccagaccaaggcaggtgaggcggtcacggagctgctggacgtctccatggagctgggctgtttcc

SEQ ID NO: 764732 - DNA, 83 bp, Homo sapiens
atgtcacttacaacattaatcagatactgcatttaagagtttcgtgagtgctcgcagctcatacctgtggctgtgtatccgtg

SEQ ID NO: 764733 - DNA, 98 bp, Homo sapiens
gtgcagctccagagagacgtgaaacatgtgaacactcaagtgaagcaaaagccttccatgattacctactctccagagagaccggatcttcaaacatt

SEQ ID NO: 764734 - DNA, 75 bp, Homo sapiens
ggtctctggctccctcctcccagggccaggcgccgctcagaacggactggctggacaatggcccagaacaagcta

SEQ ID NO: 764735 - DNA, 82 bp, Homo sapiens
agggtttccaccgttcgttcaagcggcagtccctgccccggtgggccgagtgcaggctgctacagaaggaggcctcgctctg

SEQ ID NO: 764736 - DNA, 50 bp, Homo sapiens
cggctgctggacatcgagtcacagtgagaaggcaaccaaagtgcaggaca

SEQ ID NO: 764737 - DNA, 100 bp, Homo sapiens
cggtaccctcgctcctcgatcgaggacgacttcaactatggcagcagcgtggcctccgccaccgtgcacatccgaatggatccacattgtttgaagttat

SEQ ID NO: 764738 - DNA, 98 bp, Homo sapiens
ggaaaagaaactttatgaatataatcagtctgatacatgcagctttttagttggagaaggagcctacagatgggcagtagatcatggaataccctctt

SEQ ID NO: 764739 - DNA, 101 bp, Homo sapiens
aagctggttcccgctgtagcaaacgtccgcggcctctcagctgcaccagtctgctgtcaagtgttcagtggcacacgtcgcgaggggctgccatcacggac

SEQ ID NO: 764740 - DNA, 98 bp, Homo sapiens
acaaacttggatcattaccagaagagataggtcagctcaaacagttaatggagctgaaactcccatcaagactgaagcagacgttttggcagaaaacc

SEQ ID NO: 764741 - DNA, 100 bp, Homo sapiens
cttccccaggcagtggaaccttcgggctcctgccaagtcctgtatctgccatgtctgtggcgtccacctcaacaggctgcattcctgcctctactgtgtc

SEQ ID NO: 764742 - DNA, 83 bp, Homo sapiens
gtctggcattgctggaggatacaaacatggcattggagtcaagagagattataaacaggccttgaagtattttaatttagctt

SEQ ID NO: 764743 - DNA, 83 bp, Homo sapiens
cagctggcctgttccatcgtggaccagaaggttcagtgtatctttgcctgcctacatcaatctgcaagggagttgcagaaagc

SEQ ID NO: 764744 - DNA, 76 bp, Homo sapiens
cctcctgtggtttttgattcaagtcctgttctacctactgccaattggaaaggaaccacgtgaatgttgagggggc

SEQ ID NO: 764745 - DNA, 100 bp, Homo sapiens
tgtatttgactgagagaaacccactgaagacgtctgcgtgagaatagagaccaccgaggcagcgtctatcccagactaccggggccctaatggagtgtgg

SEQ ID NO: 764746 - DNA, 82 bp, Homo sapiens
gcgaaggatccccaacggggaggccaacgtgaagaaatgttccaggtcatccagccagagcgtgcgctgtacatccaggcca

SEQ ID NO: 764747 - DNA, 82 bp, Homo sapiens
tgtcttcggtggactccttcggcagtccacccaccgccgccgcctcccaggttctgggccggagaaggggcgacgttcgggc

SEQ ID NO: 764748 - DNA, 75 bp, Homo sapiens
ggaagagttgtggcgaggcagatcctgccccgtggccgcggccgtctcgtaggtcatcatcagatttgaaatatt

SEQ ID NO: 764749 - DNA, 82 bp, Homo sapiens
ctaaagcagcgtgcgttcagccctgggaatgagtctgcaggtcttaaacgacaaaaatgtcagcaatgaaaaaaatacagaa

SEQ ID NO: 764750 - DNA, 100 bp, Homo sapiens
ggacatttgctaatgaagactgtggaaggacctgacatgaaacgcagatctagtggcagagaggaagatgatgaggaacttctgagacgtcggcagcttc

SEQ ID NO: 764751 - DNA, 90 bp, Homo sapiens
ggaggagatcctcaacgtggacccggtgcagcacacgtactcctgcaaggagcgagaacccgagcagcgccatgagcaacactaccgtcg

SEQ ID NO: 764752 - DNA, 100 bp, Homo sapiens
gtttatgccaccaacaccagaggccagatccctcccctggtcactacagattgcatgatacaagaccaagcctgcagcaggagaggatgtacaagatgca

SEQ ID NO: 764753 - DNA, 111 bp, Homo sapiens
gccgagggggccgcccctcgcccaacctgcccgacatggggaaccccgggcccagctgttcatcaaagaaaaagggttcttttggtcacccaccactggccccatggctgc

SEQ ID NO: 764754 - DNA, 75 bp, Homo sapiens
tcaggcgtgcgcggacggtgtgcggattgatgtacagctatatattttgtcctttctttcacctcatgatctgtg

SEQ ID NO: 764755 - DNA, 75 bp, Homo sapiens
gccgcgtctccgcttctgctgcctgccgggcgggctccggtggccggaatatcacaggagtgatgctgtgttctt

SEQ ID NO: 764756 - DNA, 75 bp, Homo sapiens
ggagagcacaaccatcgcagttggaagcccatggggcaggccagtactaaagtggaagtggacatggagaaagca

SEQ ID NO: 764757 - DNA, 99 bp, Homo sapiens
ttgacagagaggggaaaccccgtaaagtggttggttgcagttgtgtagtagttaaggctcgtggtcccaagaagcatctgaagcgggtggcagctccaa

SEQ ID NO: 764758 - DNA, 82 bp, Homo sapiens
gtccaagtcagttcctgggtacaagataacaacgaacttgatgcaagtgataggtttgccaaggtcagacctctcatcatcc

SEQ ID NO: 764759 - DNA, 90 bp, Homo sapiens
atgaatgatgacccaagtatggaacagaagatggctgtgccacccacgtatgccgatcttggcaaatctgccagggatgtcttcaccaag

SEQ ID NO: 764760 - DNA, 100 bp, Homo sapiens
cgctgaatgggctgaaggaggaggacaaagagcccctcatcgagctcttcgtcaagatgatcatgggaacagcaatagtagtcatgtaaaaatcttttta

SEQ ID NO: 764761 - DNA, 100 bp, Homo sapiens
caatccatgtggcaacattcagcgctcactctatgaggcaactcatgcagcaattccagaaccccgacttcccacccgaagtagaggaacaggatgccag

SEQ ID NO: 764762 - DNA, 75 bp, Homo sapiens
ggaacggcggcgacaagggtgttcccgaactagagtggcctgattacatcaaccccagagccgtgcagctgggct

SEQ ID NO: 764763 - DNA, 90 bp, Homo sapiens
gggagagccgccggaagtattgacggaaagcttgaattacctacatggcaagcacgaggagcggcaggacgagcatggctacatctcccg

SEQ ID NO: 764764 - DNA, 50 bp, Homo sapiens
gtttcacctaccttcccgccaacggatgcctttgtggaactgtacggccc

SEQ ID NO: 764765 - DNA, 90 bp, Homo sapiens
aagtcccagcattcagaatgggagagaatatcactgggtcacaatcactctggacttaagacaggccgccagatcccacccttggacccc

SEQ ID NO: 764766 - DNA, 98 bp, Homo sapiens
aatagtggagtagaagaaataaaaggtcatcccttttttgaaggtgtcgactgggagcacataagatgtggcaaaatctggcaaaggcagagaccaaa

SEQ ID NO: 764767 - DNA, 99 bp, Homo sapiens
ctatttttcatgacctttctcatctgactcgtgatctgcccatcttgttactccctagcagtgtggtaaggtgctgagattagaagcgtctgcacagag

SEQ ID NO: 764768 - DNA, 99 bp, Homo sapiens
gacattgcatcaaatagaatcaaaaagattgaaaatatcagccatctaacagagctgcaagagttctggcaacagccaactcagtttataaatccagaa

SEQ ID NO: 764769 - DNA, 82 bp, Homo sapiens
tcctggatcatttttacagttttccagaactccacaaaggacattcgtcatgtcctcaaatacaatgcttcaaaaaacgctg

SEQ ID NO: 764770 - DNA, 90 bp, Homo sapiens
caagtcgtaaaaacaggtcaagtggaaaaggggaagatagtgatgtactcagtataaatgcagatgcttatgacagcgacatagaaggcc

SEQ ID NO: 764771 - DNA, 96 bp, Homo sapiens
acgctttgtgaaccaattaaataccaagtaccgggattccttgccccagttggaagtgcacggctgtctataacgtgctgccgggtctcaggatgg

SEQ ID NO: 764772 - DNA, 90 bp, Homo sapiens
tgacggtggaggttcgcggctctaacggggctttctacaagcaagaagatccatcgcagagtcctaaagaagaacccactgaaaaacttg

SEQ ID NO: 764773 - DNA, 127 bp, Homo sapiens
ccagggcccggggccgtggggcttccgcctcgtgggcggcaaggacttcgagcagcctctcgccatttcccgggtactccaaagattcaggtttactcacgtcatccagcagagaatggaaagtcaa

SEQ ID NO: 764774 - DNA, 90 bp, Homo sapiens
ggagaaggcggcggctctctggtccgcagcggcaacagtaacgaaaaacagggctgaaacctcgacctgtctcccagttggttgcacagc

SEQ ID NO: 764775 - DNA, 100 bp, Homo sapiens
ggaaggacttcgtgaccgaggcgctgcagagcagtgtgtaaatatgttgctgtggagctgaagtcagcctttgaggaaaccggcaagaccaaggaggtga

SEQ ID NO: 764776 - DNA, 100 bp, Homo sapiens
gccctgctcagagggccctgtacagggaggtgacactggagaactacagccacctggtctcactagccctggaagagaggccggcagtgatgacctcgcc

SEQ ID NO: 764777 - DNA, 75 bp, Homo sapiens
agcccaggatcagcctgtgaagtatgagaataatgttatcactattgatctggttcaaaattcttctcaaaaaac

SEQ ID NO: 764778 - DNA, 75 bp, Homo sapiens
ctgccctgcgcgctgctggctgtgctgctcacggccgtgaactgctacagcgtgaaggccgccacccgggtccag

SEQ ID NO: 764779 - DNA, 75 bp, Homo sapiens
ccactcgcccctggcctcgcgggccgtgtctccggcatcatgtgtgtgcctccggagccagcgtggtggccatag

SEQ ID NO: 764780 - DNA, 100 bp, Homo sapiens
tctggagcaaagacaggagccctggaatgtgaagagacatgagaccatagccaaacccccagaacggggaagataaccgaagggtggtttgagaaaccca

SEQ ID NO: 764781 - DNA, 74 bp, Homo sapiens
tgccagcactcccagggaccctattgacgttgacctgccattgagacccagagcagcagttctgaagagatagt

SEQ ID NO: 764782 - DNA, 83 bp, Homo sapiens
ggaacctgaggtcggctgctgcgggaaatacttcctgtttggcttcaacattgtcttctggatgcgtctgttactagagtgga

SEQ ID NO: 764783 - DNA, 75 bp, Homo sapiens
gtgctaacggagcctgccccagccctgttgggcaattgaaggaacagactaaaaatcgtgtcctggaaggaaact

SEQ ID NO: 764784 - DNA, 83 bp, Homo sapiens
ggcgcctgccccgtcagacaggggccccatcccactcgctaccctgtccgctggcgctggagcagcgctgccgggagctgcgc

SEQ ID NO: 764785 - DNA, 76 bp, Homo sapiens
caaagaagaccacacactgggaaacatcattaaatcgcgcattgaacagtcctgggcactacatgtaaattaagcc

SEQ ID NO: 764786 - DNA, 98 bp, Homo sapiens
gaatatctgcattgaacctgacaccatcagcaaaggagactttataactataggtgaggaagctggtccagaggaaggcaagggagggctgcctgcca

SEQ ID NO: 764787 - DNA, 100 bp, Homo sapiens
tttcagagcgtttgggtcctctgaggccccttgaccaggcctcaggagtgcaagtagctgatgaagtatgtcgcattttttatgacatgaaagttcgtaa

SEQ ID NO: 764788 - DNA, 100 bp, Homo sapiens
ccgactacctcaacctggtgcagtgcgagacgctagaggtcccctgttttcatagcccaagttggccaagacctggtctcccagacggaggagaagctcc

SEQ ID NO: 764789 - DNA, 51 bp, Homo sapiens
gtgaccacccctgaagaaattgcacagggcatgctgttgaagcgaagtggc

SEQ ID NO: 764790 - DNA, 98 bp, Homo sapiens
agcagtcctaccatgtcagccttcccagtagctgggaccacaggttcttgcacgcattgcaaatgccacgaggccaactattcatctgtgtgagattg

SEQ ID NO: 764791 - DNA, 101 bp, Homo sapiens
acgtgttgaaccggttcttgggggactatgtggtggacttggacacgtcccagctctctctgggcatctggaaagagcatgtctgttcgatcctggcttcc

SEQ ID NO: 764792 - DNA, 50 bp, Homo sapiens
ctggactcggattcgttgcctgaggcctccaggcccaaggtcagcatccc

SEQ ID NO: 764793 - DNA, 100 bp, Homo sapiens
aaatacgtcagcagatcctggatgaaaagcccaaggcacagaccccacaggctcctcggacactgggtccatcacctcctgccccatcatccactccaac

SEQ ID NO: 764794 - DNA, 100 bp, Homo sapiens
gatgccgtagagggagctgtcgtcgccctggaagacgatcccgagttcaacgcagatcaagaagctactctagaagtcggagcagaggatggtacagcag

SEQ ID NO: 764795 - DNA, 73 bp, Homo sapiens
ggatgccctcttggctgcactgcactcccagatccaagagctcctgtctccccaggagccccccaggcctccc

SEQ ID NO: 764796 - DNA, 75 bp, Homo sapiens
gaagccccctgcaggaactctacaacccaatccagctccataatgggagaagtaaagaacaaagacttaaggaac

SEQ ID NO: 764797 - DNA, 83 bp, Homo sapiens
caaaatgcaaaaaaggaggccaaagactttggccagttacaacagaagacactcctatggatgctattgatgcaaacaagcaa

SEQ ID NO: 764798 - DNA, 100 bp, Homo sapiens
gttgccggggcaggggcggaggcggaggcagaggtggaggcgctttgaaagtacttcctcctgtgctggttccaagacacagcgaatataatcctcagca

SEQ ID NO: 764799 - DNA, 82 bp, Homo sapiens
agacctgccaatttaccagagataattgataacaccctgtaacagctgaatttcagtcagtaatggatattaccaccagcat

SEQ ID NO: 764800 - DNA, 100 bp, Homo sapiens
ctttccgccctaatggaggtctccagtttcggtcgcaatggaagaagagatcgccgcgctggtcattgacaatggctccggcatgtgcaaagctggtttt

SEQ ID NO: 764801 - DNA, 83 bp, Homo sapiens
caaggggcttacgcagaaggacctggccacgccactcatctctgcccagctgctgccctccccaggaggcctccatggcttca

SEQ ID NO: 764802 - DNA, 75 bp, Homo sapiens
gccttggtgggctggatgctggagcacacggaggccgtgatgaagttggttgaatctggcgatgtggaacccatg

SEQ ID NO: 764803 - DNA, 101 bp, Homo sapiens
cgccatggcccagattctgccaattcgttttcaggagcatctccagtaggtgatttcaaatcggagaagtccaacggggagctaagtgaatctcctggagc

SEQ ID NO: 764804 - DNA, 83 bp, Homo sapiens
cgcggacatggtcatgagctttgtgaacctggtgtggcaaaggagcagagaactttgacaagttcttcacacgaggacagccc

SEQ ID NO: 764805 - DNA, 100 bp, Homo sapiens
taacacctcaaggttgaagcagaagaataaggagaaggataagtcgaaggggaaggcgcctgaagaggacgaaggtacatccaagcagaagtccagttcc

SEQ ID NO: 764806 - DNA, 134 bp, Homo sapiens
taacatggacatgatcttctttataattctactttgagtgctgtctccatgtttgatgtatctgagcaggctgctggtggtctacccttggacccagaggttctttgagtcctttggggatctgtccactcctg

SEQ ID NO: 764807 - DNA, 100 bp, Homo sapiens
cggtcgagttggacccccggatcaaggtttccatgtgatccccactatctcaagcatcgtcccggagagctgcctgctgatcgtggtggggctgctggtg

SEQ ID NO: 764808 - DNA, 75 bp, Homo sapiens
tgcatgatgtgcgatgtgcggaagggcacctccacccgactgtcagcatcaataaggccattaatacgcaggaag

SEQ ID NO: 764809 - DNA, 90 bp, Homo sapiens
tctcgtagtcctgggagcacagcagaagtccctgggcgctgcctatggcacagccaagagcggtaccggcattgcggccatgtctgtcat

SEQ ID NO: 764810 - DNA, 100 bp, Homo sapiens
ggaggccgagccgggatctcaggtcctcgggggcggcggccacgccaaggacgggccccttcacagatgtagtcactacaaatcttaaattgcgaaatcc

SEQ ID NO: 764811 - DNA, 103 bp, Homo sapiens
gaacgcagtatgcctgcccacctttcgatctgactgaatgttcattcaaagaatcagatatcaccaaggagagaattcagaagatcctggcaactggtgccaa

SEQ ID NO: 764812 - DNA, 100 bp, Homo sapiens
tagccaatcacaggagacccaaatctgcttgttatctacagaactcaaagttgtcaatacgtagagagtgaagttcccagaccctacgccccgctgtcag

SEQ ID NO: 764813 - DNA, 100 bp, Homo sapiens
tcccaatgatatacagctgttgcatatttgtgtactgcatgaatgaattcagggcatggacggacatcaagcctgtgaaaccaataaaggccaagcccca

SEQ ID NO: 764814 - DNA, 101 bp, Homo sapiens
ttgtttgcagtaggtctaacttttgcatctgattctttagggaaagcacctaccaaggcttcctattacctatttcacagatggagtttccctcttgttgc

SEQ ID NO: 764815 - DNA, 74 bp, Homo sapiens
ctcgtagcctgccactccgtgcccctgggcgctgcctatggcacagccaagagcggtaccggcattgcggccat

SEQ ID NO: 764816 - DNA, 51 bp, Homo sapiens
gagccgccggagctgtcggagccagagagactcccgtgagcacgaggagcc

SEQ ID NO: 764817 - DNA, 76 bp, Homo sapiens
ggaaaagtggcactgaggctctggaacttctgcccagctctccttgaggcggggtttcaccatgttgcccagactg

SEQ ID NO: 764818 - DNA, 75 bp, Homo sapiens
tgggaaccagtctttcaaaatactattgcccagaagaaaagatgtttggttttcacaagccaaagatgtaccgaa

SEQ ID NO: 764819 - DNA, 100 bp, Homo sapiens
tgaagggcggccgcgagcacggcgagccgctggtcatcaccaagcagtgcctgatttgagatggggtcccaggtctcggtggaatcgggagctctgcacg

SEQ ID NO: 764820 - DNA, 75 bp, Homo sapiens
cctgacgcccccctcccgcccggaaagctgcccagccaccagcaaccccccaggaggaggaagccaagaatctgg

SEQ ID NO: 764821 - DNA, 96 bp, Homo sapiens
gaatgatagcacagaaaatctctgtcagaactggccatgtagggcaggaccgggtggactttggccagactgagccgcacacggtgcttttccacg

SEQ ID NO: 764822 - DNA, 87 bp, Homo sapiens
ctagaatcaactgagagagatgcttaaaaatcaccagttactttaatgaagaattttctctacatgtgcacccatttaaaggactcg

SEQ ID NO: 764823 - DNA, 74 bp, Homo sapiens
ccaactccggagcagtggaagcagattgcttctgtcatgaagcaagtgcggaggcaagacacatcaaagcagag

SEQ ID NO: 764824 - DNA, 100 bp, Homo sapiens
tggtgaaacaccactgaagcattgccaagctgccactgcagagccccgccatggaagacacgccgttggtgatatcgaagcagaagacggaggtggtgtg

SEQ ID NO: 764825 - DNA, 97 bp, Homo sapiens
gtccaggagctctcggggctccacgtcctcgtgaaccagctcagcgagaacctcaagagagtgaacctcttaccaacaaccacacctcaggaagctc

SEQ ID NO: 764826 - DNA, 75 bp, Homo sapiens
taccctctgttatataaaagagacaggtgctgttccagaattcaaagaagagaaactgcagctgcaaccaaaacc

SEQ ID NO: 764827 - DNA, 100 bp, Homo sapiens
gttcaaggaggccttccagctgtttgaccgaacaggtcttcaaagcttcacctttctccaaaggcagatgtgaagaacttgatgtcttatgtggtaacca

SEQ ID NO: 764828 - DNA, 100 bp, Homo sapiens
gctgcaggtcctgcggccggggctggtcgtggtgcatgcagaggacggcaccacctccaaatactttggagacgaagtcgcagacgtcggtgacactcag

SEQ ID NO: 764829 - DNA, 100 bp, Homo sapiens
cagccgccccgctccgcctcggcggggccagccggcgagtctaaacccaagagcggatcttaagattgaaagtgatgttcaagaaccaactgaaccagag

SEQ ID NO: 764830 - DNA, 98 bp, Homo sapiens
gcgactgtcattcacaaccccctgaaagcaccgcgtgcttccgagaggagcgcgatgtgctggtgaacggcgactgccagtggatcaccgcgctgcac

SEQ ID NO: 764831 - DNA, 90 bp, Homo sapiens
aatacatcgattgcatcagcaatgtggcgcacggtcagcagatccggaagctcatcaaagatgggctgatcatccgcaagcctgtgacgg

SEQ ID NO: 764832 - DNA, 98 bp, Homo sapiens
gccgaggatgataaacacccaggacagatcacggatacacgactctagccaccagtgtgaccctgttaaaagcctcggaagtggaagagattctggat

SEQ ID NO: 764833 - DNA, 74 bp, Homo sapiens
ggtgttcgagaacgaccccgagacgctcagccagacgtccaggatcccaccccttgcaaaagaccaggccgtgg

SEQ ID NO: 764834 - DNA, 100 bp, Homo sapiens
agactggggtgtggaaaaacccggtactgtgcactattctttcccaggaaccattggataaggataaagggtatatttgtaacaagggtacaacctgaag

SEQ ID NO: 764835 - DNA, 74 bp, Homo sapiens
gttaaacttgatatggtggaggacacagaaggttttgcactgattgcaaaaataaagtcctccgagcatacaat

SEQ ID NO: 764836 - DNA, 82 bp, Homo sapiens
aagaagtcaaggttgcccccaggcggtccttcctggcaattctgtggtgttcttggtcacacatttatggagtttctgaagg

SEQ ID NO: 764837 - DNA, 87 bp, Homo sapiens
tcagttcgtcatggggctgtttggaaagacccaggagaagccgcccaaagaactgcttattttgggagaggccagccgccatgtcat

SEQ ID NO: 764838 - DNA, 96 bp, Homo sapiens
ataatgctatccgagaacatttgtgcatcagagcttatttgcgttggctccaacttttgaaatgaatcctatgaagaaaaagatcctggctgctaa

SEQ ID NO: 764839 - DNA, 51 bp, Homo sapiens
gcgaccggatcatacgaaatcagactactggctctctctcctctacaagcg

SEQ ID NO: 764840 - DNA, 49 bp, Homo sapiens
gcgtattctggtaatttcgaggagctcgatgctgccaatgtcaccaaca

SEQ ID NO: 764841 - DNA, 98 bp, Homo sapiens
gtccgatggctgcggctgcgccgaggcgccctactcagaaaggagaacctgactgctgtgcactctctctggagacaagcgagcagctcacctttgag

SEQ ID NO: 764842 - DNA, 82 bp, Homo sapiens
cggacatcgtctcctgtgtggcgatggtcttcctgctggggctcatgtttgagattgagaggatccagaatccagatctctg

SEQ ID NO: 764843 - DNA, 76 bp, Homo sapiens
taagtaatgtgtctcatgttattgtagatgagacctttccaaagtgaaactgatgagatttgatgatccactgttg

SEQ ID NO: 764844 - DNA, 83 bp, Homo sapiens
ggcaggcagcggactccgccaatattatctgtccaagattgaagaactccagtctcccgcattgacttcataaccaagttctg

SEQ ID NO: 764845 - DNA, 98 bp, Homo sapiens
ggaagagcaaagctgtcctaggccaaccagagattcatctttcatgcagtgacatgttgataaaaaatgatgattcaagtcaatctgaaagtcccagc

SEQ ID NO: 764846 - DNA, 82 bp, Homo sapiens
tggctccgcgcgcggtggtctcgggggaaatcctcattgacgattcaatttgttgaaggccaatttgtggactcctacgatc

SEQ ID NO: 764847 - DNA, 100 bp, Homo sapiens
gtggagaaggccaagaagcagctcctgcatctggcggaggagaagagccatgtccattggagcccgttcccaatcagctcgtacttacttggagagacat

SEQ ID NO: 764848 - DNA, 75 bp, Homo sapiens
ttctgactctcatgcagaagtaatttctgggaaacaagaaggtggaagaagagcccgaagaagaacctgaagaga

SEQ ID NO: 764849 - DNA, 100 bp, Homo sapiens
cgcagctgaagctcatcatgaccttccagaattacgggcaagcgctgttcaaacccatgaagactcctcctattttgaggacttctccaacatctccatc

SEQ ID NO: 764850 - DNA, 75 bp, Homo sapiens
ggtacgcgaaaaaacaggggcagaagaacaaggaagcggagaggcaagagctacttaaagagtttaaagatgaag

SEQ ID NO: 764851 - DNA, 98 bp, Homo sapiens
agccatgccccttccgattgggagggacaaggccctagaactggacagcaacaacgagaagggcctcttccgccggggagaggcccacctggccgtga

SEQ ID NO: 764852 - DNA, 100 bp, Homo sapiens
gcaagaggaaaggaaagatgtgttcgggtttttctagaacacggaggaattactccttctacgtcctcgacaaccagaacttgcagcaactgtgggactg

SEQ ID NO: 764853 - DNA, 128 bp, Homo sapiens
agcgctcgaggtcgtatgaacgcacaggccgtcgctatgagcgggaccaccctgggcacagcaggcatcggaggcacattcaggaccccgcgagccagcggctgacgtggaacaagtccccaaagagc

SEQ ID NO: 764854 - DNA, 80 bp, Homo sapiens
cgcagttcttgtttgtggatcgctgtgatcgtcacttggccaccagcttgggctccccacggagggcagcaagtgggact

SEQ ID NO: 764855 - DNA, 75 bp, Homo sapiens
ctccggctcaagtgtgtcaagcaaggatattagaaatggctactccccagtcaattttcatctttgcaatctgca

SEQ ID NO: 764856 - DNA, 100 bp, Homo sapiens
tcaacaggggcaaatcgaagtagagagcgaaaccatcttcaagttagcagcgtttattttacagcttggcagcagcatgatgtacaagaactatgcagag

SEQ ID NO: 764857 - DNA, 83 bp, Homo sapiens
cggagagtgtgcggctccaggtgggctcacgcgagagaagtggagatcctgatgtttctcagtgccattgtgatgatgaagaa

SEQ ID NO: 764858 - DNA, 75 bp, Homo sapiens
acaggacatggatattaatcggcttagggcagttgttttcagagacatagactgtggccaagagaatcaccaggc

SEQ ID NO: 764859 - DNA, 74 bp, Homo sapiens
gagacggcggcagcagcggcattcagtttttatggaaacgagccctcaaagatcgctttaaatatgttcgaaga

SEQ ID NO: 764860 - DNA, 100 bp, Homo sapiens
ggcacccccactcatctttcccacagcctcaccgggtggctccagctgttttccactaggaggtgaggtggtcacttatcagtggaacatcccagagagg

SEQ ID NO: 764861 - DNA, 51 bp, Homo sapiens
cgcgggcacagggtgccgctgaccgacctctgtgagtgaaagccttcagag

SEQ ID NO: 764862 - DNA, 112 bp, Homo sapiens
ccagccgcaccatgccgctcctaagcctgcacagccgcggcggcagcagcagtgagaggaaggtgctcgggtcttcggggcactgggtcccatcggtccctcctcacctggg

SEQ ID NO: 764863 - DNA, 97 bp, Homo sapiens
caagaacttcgagatggattccaacatcctgctagacttgttaaggtggatctctccacccactgtgggttcatgggtggccttcagcgcaatggca

SEQ ID NO: 764864 - DNA, 100 bp, Homo sapiens
ctcctgagtagccgggactacagtctgactaaagacatgactggaaaagaagatgtataccgaggcccggccatcagagctctctgcaggatcaccgatg

SEQ ID NO: 764865 - DNA, 100 bp, Homo sapiens
tgaaaagtctgttaaaaatctttgcggatgaagatgagctggattcccacaccatggtgaagactagtgtggagagtgtgggcaccatgcgggccacaag

SEQ ID NO: 764866 - DNA, 100 bp, Homo sapiens
ctacatcccaagcaactatgtcgcccgcgttgactctctggagacagaggagaccgtagcatcctgagacattttgaattgacacttctcaagatttgac

SEQ ID NO: 764867 - DNA, 74 bp, Homo sapiens
taaatgaaatcttcctaagtatagtgctgctgcagcacggagctgacccaaacattcggaacactgatgggaaa

SEQ ID NO: 764868 - DNA, 83 bp, Homo sapiens
agaatgagaacggaccctgccccttgctggccatcctcaatgttttgctcctggcctggaagaatctggccaacctatttgtg

SEQ ID NO: 764869 - DNA, 89 bp, Homo sapiens
ctgtggggatctggcactgtggttcctgcatgaagacagtggctggcggtgcctggacgtacaagacccaaagcagcagaagatctacg

SEQ ID NO: 764870 - DNA, 97 bp, Homo sapiens
acttgtccacgacaccggctacttctcagctttaccatccctggaggagacctggcagcaggggctttgttatgcacctaaagccatattggaagct

SEQ ID NO: 764871 - DNA, 127 bp, Homo sapiens
cttcgacaacctgatgcagcagaagctggtggaccagaacatcttctccttctacctgagcaggaaatggagaagcatcatgtgccaagtgacttcaatgtcaatgtgaaggtggatacaggtccca

SEQ ID NO: 764872 - DNA, 89 bp, Homo sapiens
cttcccagccgcgcggcttcctccagacctctcggcgcgggtaccatgcatttcacggtggccttgtggagacaacgccttaacccaag

SEQ ID NO: 764873 - DNA, 50 bp, Homo sapiens
caagaggctgatggccgagtacaaacgcttgtccagccggaagccctgag

SEQ ID NO: 764874 - DNA, 100 bp, Homo sapiens
cacagcagcctcccaaggagtctgcaagttgagttaaacatgaagtttctggagagacagtggtatttcaagggggagctcttggcaaaacaccagatgg

SEQ ID NO: 764875 - DNA, 100 bp, Homo sapiens
actttgtggagaaagtcgtcttccacttgcacgaaagctttcctaggccaaaaagaggaataattctgctacaaggctgatttcaaggacatgaattgtt

SEQ ID NO: 764876 - DNA, 100 bp, Homo sapiens
ctcaccgttctgcccccagaactagggcgaagtctaaaaatggaggaagatctttaagagaaaaactggacaaaataggattaaatctgcctgcagggag

SEQ ID NO: 764877 - DNA, 100 bp, Homo sapiens
ttccagtgggcccgacagcgcaacaggaagaggatgaaatggattctggcacgatggttcgagcagtgggtgatgagatgggcactgtccgagtagccag

SEQ ID NO: 764878 - DNA, 75 bp, Homo sapiens
ggaccttgcagcttcctggatgaagtgccccttggacaggcttcttggacacttaatgattgttggcaagaaatg

SEQ ID NO: 764879 - DNA, 98 bp, Homo sapiens
gaaaagaaatcctgataagaactgctttatggagtttcgctccgtcgcccaggctgaagtgcagtggcgtgatcttggctcgttgcaacctccacctc

SEQ ID NO: 764880 - DNA, 75 bp, Homo sapiens
agaccatactggaagaattattttgaaaataccgatattcttgtctggtgagctgtaccttctttctggcagtga

SEQ ID NO: 764881 - DNA, 100 bp, Homo sapiens
gcaactaatagcccttgaacagctatgcatgctgcttttgatgtctgacaacgtggatcgttgttttgaaacgaaaatgtttataggaggccttagctgg

SEQ ID NO: 764882 - DNA, 75 bp, Homo sapiens
cggccacagtggccggcgtacatgtgaagcagcagtgggaccagcagacttaattcagtgcacaaatgagatgaa

SEQ ID NO: 764883 - DNA, 75 bp, Homo sapiens
aagggaaccaacccactttctcggcgccgcggctcttttctaaaagtatcctgggcgcagtgatcctgggcttcg

SEQ ID NO: 764884 - DNA, 98 bp, Homo sapiens
ggggcctgggatgagagtggggtatttatctataccacaagcaaccacatcaaatatgctgtcaccactggctggaatgaaacctctgaagaatcgag

SEQ ID NO: 764885 - DNA, 100 bp, Homo sapiens
acagagtgtttcacatttgctgccatgagcaaagaggaggtcgacagtgattacagtggcgagatcttgaacaactgctgcgtcatggagtaccaccaag

SEQ ID NO: 764886 - DNA, 100 bp, Homo sapiens
ggggatggagtgcctccaaaggttgctgaggtccagagcctggtgcactgtgtgaactgtcacctgtcagtgcctcccatcctgtccaggccttgatgga

SEQ ID NO: 764887 - DNA, 100 bp, Homo sapiens
gacatgtgagacgaacaccggtgaggtatatcgggggaagctcattgaagcagaggacaacatgaactgccaggacatttcatatatatggatttcacag

SEQ ID NO: 764888 - DNA, 87 bp, Homo sapiens
tatagagatgtgatgttggagaactacagaaacctggtctccctaggtgttggagcgggccggagagaagtagagtgggctgcgagg

SEQ ID NO: 764889 - DNA, 98 bp, Homo sapiens
cgcgcccgggacgcgcggcggcaccgggaggccgggccgagcgcccaccttgggacaccttgactccaagcccagcagtaagtccaacatgattcggg

SEQ ID NO: 764890 - DNA, 97 bp, Homo sapiens
tgagcctggactcgccctcctatgtcctgtacaggttctgaagaaagtctccaaatacattcaagagcagaatgagaagatctatgctccacaaggc

SEQ ID NO: 764891 - DNA, 51 bp, Homo sapiens
agtggccctggaggaggccaagggcagcaggatgggtgtggaagcagtgat

SEQ ID NO: 764892 - DNA, 100 bp, Homo sapiens
ggagtccggccagggccggcgcggcgatgatgaacaggttccgaaagtggctctacaaacccaagacccaacatgagtgaagtttcctgcaagaaacggg

SEQ ID NO: 764893 - DNA, 83 bp, Homo sapiens
ggacacagccatgcagatgactccttttcccacccagctctttccaacaactgatcctgtgggtactttgctccaagttccag

SEQ ID NO: 764894 - DNA, 82 bp, Homo sapiens
ttggagtgtgcgtgcgcgccgagcggagccttcacgtaaatgggtccagtcatgcctcccagtaagaagccagaaagctcag

SEQ ID NO: 764895 - DNA, 100 bp, Homo sapiens
acaagacccatctttatgcaaagccagcgttacagtaatgttccagctgagatctgtatctgtggacctgaatgttgatccctcgcttcagattgacata

SEQ ID NO: 764896 - DNA, 100 bp, Homo sapiens
caggagcatcaatctacagtgtcagccctgaagctaacaaagagatgccagggctggaccctaatttgagaagtgcagtagagacgaggtttcgccatgt

SEQ ID NO: 764897 - DNA, 82 bp, Homo sapiens
cgcaagctgagcgagctgtcagagcccggggacggcgaggccctcatgtaccacacgcatgcttttcacttccactgcatct

SEQ ID NO: 764898 - DNA, 90 bp, Homo sapiens
caccactgctctccagcctggggcattaacctgtctgggggccagcggcagcgggtcagtctggctcgagctgtttacagtgatgccgat

SEQ ID NO: 764899 - DNA, 100 bp, Homo sapiens
ggaccctacagaagatgctgaagctgaggacacacccaggaaaagactcaggacggacaagcacagtcttcggaagagttgatcaagaacttaatggaaa

SEQ ID NO: 764900 - DNA, 75 bp, Homo sapiens
tcaacatggccaaggtgctggcgtccctcagaatgaaaaaggcaggcattgacctccctctgaggcagtttccag

SEQ ID NO: 764901 - DNA, 76 bp, Homo sapiens
gtttcctgttttgaaacttccatctgtaaggaggagatgttaaagtaacccatcttgcaggacgacattgaagatt

SEQ ID NO: 764902 - DNA, 114 bp, Homo sapiens
aaggaggaagggaaccaacccactttctcggcgccgcggctcttttctaaaagttgagaaagatcagtctaaagaaaaggagaagaaagtgaaaaaaacaattccttcctgggc

SEQ ID NO: 764903 - DNA, 98 bp, Homo sapiens
gaggactcggcccggctcgtggagcccttcgcccgcggcccagcttaccaaaacctgaggcagaaagtggataattttgtgtcaacacatctggacaa

SEQ ID NO: 764904 - DNA, 95 bp, Homo sapiens
tttagtctaaatgatgggcagtcatggtcccagaaacgtcactatcaagaaggagacagtgtttcacaaaatgattttccttctgaagctcccat

SEQ ID NO: 764905 - DNA, 100 bp, Homo sapiens
cggcatcggctgcgagctcctcaagaatctcgtgctcaccggtttctcccacatcgacctggcgattgtggaaaaatgtgacagactcgctgagagaatc

SEQ ID NO: 764906 - DNA, 82 bp, Homo sapiens
caaggggcttacgcagaaggacctggccacgggaaggtgctgagctactggtgcttcagtcccggccacagcatgcacgagc

SEQ ID NO: 764907 - DNA, 74 bp, Homo sapiens
agcacgtcatctccatcgaggctactacccacagatggcatgatccgaaaacactctcatgtcaagatagggcg

SEQ ID NO: 764908 - DNA, 100 bp, Homo sapiens
agagttcaaggaggccttccagctgtttgaccgaacaggtatcgagaaccttccctgcgaacttcagaggaacttccagctgatgcgagagctggaccag

SEQ ID NO: 764909 - DNA, 100 bp, Homo sapiens
atctttaacaattcaacctcaaatttctaatttcaccaacaactatttattgagggctagaggaactgtgagagtgacactgaggaggacatcgccagga

SEQ ID NO: 764910 - DNA, 100 bp, Homo sapiens
agcctaccaccccagcggcaaggaccagaccgtcgggaacagccatgcaaaggcaggggaggaagccacctcgagcaacagaagaaccttgaaggctatg

SEQ ID NO: 764911 - DNA, 73 bp, Homo sapiens
agacatttacgcggatgtcggcgaagagttcaaccagatcctgtttgaccaaactcagagatcaattaaggca

SEQ ID NO: 764912 - DNA, 97 bp, Homo sapiens
aaaaccatattttcctatctgcatgcgtttgctgagagtagtatctgttctgattaagcagttttacagtcttttgcctgattacatcaaccccaga

SEQ ID NO: 764913 - DNA, 82 bp, Homo sapiens
cagggttcctggggcatcgacgatctccatatttcattgcaagccaaaatgaagtttaatccctttgtgacttccgaccgaa

SEQ ID NO: 764914 - DNA, 87 bp, Homo sapiens
ggaaccgaaaaggcgaggagtatagtacggcaaaaaactgtcggcgtcgattagcaaggtaaaagtaacagaaccatggctcagttt

SEQ ID NO: 764915 - DNA, 80 bp, Homo sapiens
acaccgggacctcctggaagccaaaaatgcctgatcctgcctgaagatggtgccactggtggctgtggtatcagggcccc

SEQ ID NO: 764916 - DNA, 149 bp, Homo sapiens
gccagacagctggaggaggaacttcgaaccatggaccaggccctcaagtccctgatggcctcagaggaggaggaacagatggagtcggataactgttcaggaggagatgatgactggacccatctgtcttcaaaagaagtggacccgtc

SEQ ID NO: 764917 - DNA, 100 bp, Homo sapiens
cctccctctccactcccatcttcagggcatccaaagcctctgggatgtgttctgactgtaaaaactctgatgttgtgaaaaaagcttacgctttgcctcc

SEQ ID NO: 764918 - DNA, 75 bp, Homo sapiens
caacagctcggcgggctggaagttgacattcgtgaaattaaggagatccgcccagggaagacctcacgggacttt

SEQ ID NO: 764919 - DNA, 101 bp, Homo sapiens
ctgcggcggccacaccctggatgaggttatacattggctcttcaaagacgttcacctcatcagagaaatccctgactcctttgcagtggtgtagacatgtc

SEQ ID NO: 764920 - DNA, 100 bp, Homo sapiens
aggaagtagttgattatatcatctttggtacagttattcaggaagtgaaaacaagcaatgtggctagagaggatattcattaccttgcactagataaagg

SEQ ID NO: 764921 - DNA, 75 bp, Homo sapiens
tgactaatcaagagtctgccgtacatgtgaaaatgggtgatgacaactccgtgagggtggagattatacatctct

SEQ ID NO: 764922 - DNA, 90 bp, Homo sapiens
tcggaatagtctcaagatgctgcttactggtgggaaatcaagtcgtaaaaacaggtcaagtggcctggagctgctgaagactgctattgg

SEQ ID NO: 764923 - DNA, 99 bp, Homo sapiens
ctaatagtagttgggtggtggtcttcaaatctctcattacaactcatcatttgatggtgtatggaaatgaggtgcaaacagctgcacagcaagtggcag

SEQ ID NO: 764924 - DNA, 83 bp, Homo sapiens
gaagcgcgagcgcgacgagtataagcggaggaattgaatgatctggcacgggaccctccagcacagtgttcagcaggtcctgt

SEQ ID NO: 764925 - DNA, 96 bp, Homo sapiens
gatgccgggaccccttagaagcctagaaatgggaatgactctactaatgatggggtcagcagatgctcttccagaagaaccctcagccaaaactgt

SEQ ID NO: 764926 - DNA, 74 bp, Homo sapiens
gggccgctgtgcctgctgctgagcagcgccgcggaagttaatattatgtgggccggacaccaaacacatcatag

SEQ ID NO: 764927 - DNA, 50 bp, Homo sapiens
accagatgtaccggaccctgttcttcagatgagcagcaccagcagtaaga

SEQ ID NO: 764928 - DNA, 58 bp, Homo sapiens
ctggtcttggccgtcgcgctgttgtctggaattctgcagtagaaactgtagaacaaga

SEQ ID NO: 764929 - DNA, 82 bp, Homo sapiens
ggatttgttaaggattccaagtaactcttatttggaactttatattgctgttggaatatctggagccatccaacatttagct

SEQ ID NO: 764930 - DNA, 95 bp, Homo sapiens
tcatgtatccaccaaatccctggaaggaaatatctcatgaagatcaacaacccctccccgtcgtaaacgctgaggaatgatgtggcaagaatgcc

SEQ ID NO: 764931 - DNA, 98 bp, Homo sapiens
gccagctgactgctcaggaagtaaaatcggtcaatatccaacacagccaacctaccctgtgcagcctcctgggaatccagtataccctcagaccttgc

SEQ ID NO: 764932 - DNA, 75 bp, Homo sapiens
catgagcgatgttaccattgtgaaagaaggttgggttcagaagaggggatgctgatatgctaactggtgatgagc

SEQ ID NO: 764933 - DNA, 90 bp, Homo sapiens
acttccatctcttcaaagaaggaattaaacccatgtgggaggtctccagaaatgctttgggttcatctttcattgctgcaaggaacttcc

SEQ ID NO: 764934 - DNA, 95 bp, Homo sapiens
cgggatgcagccgccggtgcccgggcccctgggcctgctggaccccgcaggtttacccaaggtccagcctagcccctaggcaccatgtcggacag

SEQ ID NO: 764935 - DNA, 75 bp, Homo sapiens
tattgtcttaacatgcttcaaataaatcagccttgctatacatcctgacaaaattaggattgcaactggacagat

SEQ ID NO: 764936 - DNA, 51 bp, Homo sapiens
gcttttttcttgctgaaacattaaacctctctacatatgacatcgtgatca

SEQ ID NO: 764937 - DNA, 75 bp, Homo sapiens
taatgcaatagaagctgtggatgaatttgcttttctggaaggttccagttacagctatatcagagaatgagttaa

SEQ ID NO: 764938 - DNA, 100 bp, Homo sapiens
gcaaaagagggaggagatgcgactcgaagcagaaagatgccgctcctacgaggactgctgtggctccaggtgctgtgtgcgggccctctccatacagagg

SEQ ID NO: 764939 - DNA, 123 bp, Homo sapiens
ctttgttggaccctcgtcaatctctttcgaagccattcagtcctcaatctccttttccttggctacccctgccagagtctctcctggaggcggatcttagctttctgtctctggaagttccta

SEQ ID NO: 764940 - DNA, 100 bp, Homo sapiens
ttccccatgttctacaccaccagtcaaggttaatggtgcaatgtaagaaacctttaaaagtttctgatgaattagtgcagcaatatcaaattaaaaacca

SEQ ID NO: 764941 - DNA, 100 bp, Homo sapiens
tacaatgatatatactgtgtccagttttagcataaagcaggccctgagcctgtgcaattatttcgagagtcaaaatgtggatttccgaggcaagaaggtg

SEQ ID NO: 764942 - DNA, 73 bp, Homo sapiens
tttgcagtcgacatactcggataccagcgctcagcccacctgtgattatggcaacagctgaacagatgcgtct

SEQ ID NO: 764943 - DNA, 51 bp, Homo sapiens
gtggtgcgtgggtcatgagcggaggtctggtccgagagcaggaggctgggc

SEQ ID NO: 764944 - DNA, 100 bp, Homo sapiens
atatgctcttggacgtcatgcacacagttcatcagttctactgccctctgcctgcggtaatagcctgcagctggtgttttgagaagccctactgctgaaa

SEQ ID NO: 764945 - DNA, 101 bp, Homo sapiens
ggtggaggaggtggaggaggtggaggaggcgccggaccgggggggtaagcagaattttgtacagtttctgtacagcattcaaacgttcttccagacaagtg

SEQ ID NO: 764946 - DNA, 82 bp, Homo sapiens
gctgcacatcgtcattgacatccctatcaatgtctacaagcccaagaagatgaaaggattgttcttgttgacaacaaatgta

SEQ ID NO: 764947 - DNA, 75 bp, Homo sapiens
gatgatgcagccaagcctgaagacgtgtataaatttgaagatcgaactacatattgtccataagtgcttcatcag

SEQ ID NO: 764948 - DNA, 75 bp, Homo sapiens
tactgtccctgcctctatatcgtccagaggctgggaggcggcagaatgcagccagaggagggcacaggctggctg

SEQ ID NO: 764949 - DNA, 100 bp, Homo sapiens
ctccacagccatcactcatgtccataaggaggaagactatgaccgtctgaggcctttatcttacccaatgaccgatgtcttccttatatgcttctcggtg

SEQ ID NO: 764950 - DNA, 106 bp, Homo sapiens
gcaggaaggtctcacctgaggtgaaccttcgaccttggacttctcagcctccagaatgacaaatttacatgtattggagaccagaccagaagcccttctgaattaa

SEQ ID NO: 764951 - DNA, 83 bp, Homo sapiens
ggccgtgcgggacgcgggcgccaggaccggccgaacgcagagtctctgctttctatccgtcaagatgataaagtcgtgtgccc

SEQ ID NO: 764952 - DNA, 75 bp, Homo sapiens
aaatccatgatcctcaccgatgtcgggaaggtcactgaacctgcacgtgcgctaagctgcggctacccccgcaag

SEQ ID NO: 764953 - DNA, 98 bp, Homo sapiens
ggcagagcatggccaagtccagatatatggagctctacacgtatcctcctgcctagcgcagtgaaaatgcctcgtgtaaaagcagctcaagctggaag

SEQ ID NO: 764954 - DNA, 100 bp, Homo sapiens
agggctggaggccccggcggctagtttcatccaggatcgagcagggcgaatggggggggaggcacccgagctggccctggacccggtgcctcaggatgcg

SEQ ID NO: 764955 - DNA, 100 bp, Homo sapiens
atgtgaaacaagttaaagaattaataagtttaggggcaaatgtgaatgtgaaagattttgcaggaaatggtgtttgcaagtgtcgtgtgtgtgagtgcaa

SEQ ID NO: 764956 - DNA, 114 bp, Homo sapiens
caaacaaagaggccgcggaggagaagccggaggaggacaacgactaccaccgcagcgacgagcagctgagctgactgctgcccactttggaggaggcggtgggctccttcacaa

SEQ ID NO: 764957 - DNA, 97 bp, Homo sapiens
agcatcacaactaatcaggctgttttgacacatgatgaactctagcactggtgtatatgagaaggaaggcgaaagcatgacaggaaacctgccgcct

SEQ ID NO: 764958 - DNA, 88 bp, Homo sapiens
ggagcccctccctgacacagcccagcctgcggtgatggagacacccgtgggtgatgcagacgcaagcctgcaagctttcttcctggtg

SEQ ID NO: 764959 - DNA, 80 bp, Homo sapiens
ggcgacccaagacacccagagagggacagttcaaatctgaacatcaatgatgtactagggaactactcattgactcttgt

SEQ ID NO: 764960 - DNA, 100 bp, Homo sapiens
agagaatcaaccttctgaattcaggaggatagaatctccactgaaacatcagggtggctgtgccagtgtcattgtgtcattaactactcagtgtcctcag

SEQ ID NO: 764961 - DNA, 100 bp, Homo sapiens
cagagcgtcggggaggcaagatgatccaccagcggttccatcctacacttggtataccaacagatgttttaaagattgtgtattctgtgggtgctcagac

SEQ ID NO: 764962 - DNA, 74 bp, Homo sapiens
ttctttgtcatgtagccaagactggagaaacaatatgatgaataaggtatttggaggtactgtgcacaaaaaaa

SEQ ID NO: 764963 - DNA, 76 bp, Homo sapiens
ggaaggagcagcgggccgcgcagatgaggacggggacttggttgccttttccagtgacgaggaattgacaatggcc

SEQ ID NO: 764964 - DNA, 100 bp, Homo sapiens
gtccacccagaaggtgctagacaccaagaaggacgcactgactcgcctcaagcacctgcgcatcgtcatcggtgctgttcctataatcagatgttcaaga

SEQ ID NO: 764965 - DNA, 75 bp, Homo sapiens
tcgcccacatccccaacccccgcctggctgcagagagaagcgaagggcaatcattccttctcacttggcctatgg

SEQ ID NO: 764966 - DNA, 101 bp, Homo sapiens
attctaacaggagctggagccctcaacaaaatggtgatggaatttcctgataatgtgttaaatctcgatggacatcagaataatggtgcacagctaaagca

SEQ ID NO: 764967 - DNA, 75 bp, Homo sapiens
ggcgatggaagatggaaggaaggagcgcagcgatttatccacctatcaatgtgctgccctcactatcacggttaa

SEQ ID NO: 764968 - DNA, 100 bp, Homo sapiens
cgccgcccctgttgcgatggcgcagaaaccccgttgacaaggcactgctttttcatgacgcccgagcgggaagaagttccgcagcaagccgcagctggcg

SEQ ID NO: 764969 - DNA, 100 bp, Homo sapiens
gtgcccatctatcagcaggctccgggctgaagattgcttctcttctctcctccaaggttccaagttccccatcaagtggacagccccagaagctgccctc

SEQ ID NO: 764970 - DNA, 50 bp, Homo sapiens
agtctctggcatctctatcccctatgaggtatcgagaactaacagagatg

SEQ ID NO: 764971 - DNA, 76 bp, Homo sapiens
caagaagtaggctatggcttttgtgcaagaatgtccagaggaggtttatgaccctcgatctctatatgaaaggcta

SEQ ID NO: 764972 - DNA, 75 bp, Homo sapiens
caaggggcttacgcagaaggacctggccacgattttgcaagaacgaggctcaaggatgtgagggacacagtattg

SEQ ID NO: 764973 - DNA, 100 bp, Homo sapiens
gaccaaagagaacaacctctctgaagaagagtccagcaagctaaaagtacagaaggtggagccctggaacagcgtgcgtgtgacattcaacatcccccgg

SEQ ID NO: 764974 - DNA, 97 bp, Homo sapiens
gtagtggatgacggagtggaacacaccatccaggacattgcacccaactatagatgaccaagcgagacgtgcctggcttcgccatcgggggcctgag

SEQ ID NO: 764975 - DNA, 98 bp, Homo sapiens
gggcgacctgggcaccagcaggacccgaggccaggagccaggggcccagaagaggcagaggaggtggacacggtggacgtctccggcgtgcccgcaga

SEQ ID NO: 764976 - DNA, 75 bp, Homo sapiens
taatacctcagtgttcacataactgtatggaatcttgcggcatccacgagaccaccttcaactccatcatgaagt

SEQ ID NO: 764977 - DNA, 75 bp, Homo sapiens
aggacgagctgatcaagtatatgactgaagaagattgagaggatccagaatccagatctctggaatagctaccag

SEQ ID NO: 764978 - DNA, 100 bp, Homo sapiens
gtgcgctaaccccggagcccggccccggggaactagggagcgtctccggctgcacagcgctcagtgaggatgaggatgatgaccttcagtatgccgatca

SEQ ID NO: 764979 - DNA, 82 bp, Homo sapiens
gtccagtcatgtctgcaggtccgaggatgtgatggtggcaggtgggatggagagcatgtccaatgttccatatgtaatgaac

SEQ ID NO: 764980 - DNA, 100 bp, Homo sapiens
gcacgacctgcggatccccttgcacaacgaggacgccttccagcacggcatctgctttgaggccaaggttggtcaaagaaaaagtgatgtatgaaaaaga

SEQ ID NO: 764981 - DNA, 100 bp, Homo sapiens
cgccgccagggtctgcagggcctgggccgccgctgctacctgcagcgccgtgtggcacgacacaaaaatcagtaaaatgtttattggaggcttgagctgg

SEQ ID NO: 764982 - DNA, 75 bp, Homo sapiens
ggtggcccatgagccggttgcgccacccgaggacaaggactcagcccaggagagtgttattactcgagatattca

SEQ ID NO: 764983 - DNA, 100 bp, Homo sapiens
ctgaagctcaacacagcagcctccacggaaggccggaaaagaggcataaactcggagaacccaagaccccggcctggcgtgcagccccagcagccggacc

SEQ ID NO: 764984 - DNA, 96 bp, Homo sapiens
aggttccgcgccgggcgtggacggtgtggggcggtcccggccccgcagtgtgctcatgggagcttagaagatcccaaaagtataacccatcataaa

SEQ ID NO: 764985 - DNA, 106 bp, Homo sapiens
tgaccgtgctggctggtgcaatgcttgccttgggactaatgacatgcttgtcagattattcagagctgggagagcttcccccacgatctcctttagaaccagtttg

SEQ ID NO: 764986 - DNA, 90 bp, Homo sapiens
cagatgtggtggaatatgccaaggaaaaactggagagcttcatcaaaaatagtgatagctttgataagatgttgagaaagagaaggaaac

SEQ ID NO: 764987 - DNA, 83 bp, Homo sapiens
gttaggatcaggaaaagtcatcaaggtgtcgtgaaaactacccctaaaagccaaaatgggaaaggaaaagactcatatcaaca

SEQ ID NO: 764988 - DNA, 131 bp, Homo sapiens
gaaatcctgctttcttttcctcagaactactatattcagtggctaaatggctccctgattcatgaagaagaagaggacagtgctccagtgaaagtggaagaacaaaggaagatgagtcaggatagtgtcca

SEQ ID NO: 764989 - DNA, 90 bp, Homo sapiens
attcccaagtccttcacccgggttcaatcttatgatccagaaaccaattcttggctacttcgtgcagctatcccaattgccaaaaggtgt

SEQ ID NO: 764990 - DNA, 50 bp, Homo sapiens
aggagacccctgcgactgagagtcccgctggctgaaggcggtgcaggtcc

SEQ ID NO: 764991 - DNA, 75 bp, Homo sapiens
ataacgcgcttttgctcctcctgaagtgtctttggtccaacgttgttccagaaatgattctggggaccattctga

SEQ ID NO: 764992 - DNA, 83 bp, Homo sapiens
cggcgccaagccgccgtcatcttcttcctgtgccagggactttgaacatgtcggggatcgccctcagcagactcgcccaggag

SEQ ID NO: 764993 - DNA, 74 bp, Homo sapiens
cgacatcaccaagctggaggtggacgccatcgtcaacgccggtgacaaaaggtgagacactcacctagaacagt

SEQ ID NO: 764994 - DNA, 101 bp, Homo sapiens
ggacaccttgaagcagaggagcagcaggaccaggttcctcatggatgaagaaggaccagcccacatttaccctccgacaagttggcataatatgtgagcgc

SEQ ID NO: 764995 - DNA, 100 bp, Homo sapiens
tgcggctggtccaggccttccagtacacagacgagcatggggaagttggactaaatgctcttccttcagaggattatccggggcatctactcaatgaaaa

SEQ ID NO: 764996 - DNA, 101 bp, Homo sapiens
ctgaggagtccaacatcaccatgcagggccgtccgggcgctgaggctcataggctgggcttcccgaagccttcatccgttgcccggttcccgggatcgggc

SEQ ID NO: 764997 - DNA, 97 bp, Homo sapiens
ccatatatgattttctttaaggatggtttagaaatggaaaaatgtgttaaaggtgaatccttgtttcattctaagaaaatggacctgacagtaaatg

SEQ ID NO: 764998 - DNA, 49 bp, Homo sapiens
agaaacaaggcgccttggagttcagacgcaaacatgcagatctttgtga

SEQ ID NO: 764999 - DNA, 76 bp, Homo sapiens
tcacaaacttgaaagaaaggaaaacaagtttgtcagacctaaatgatccaattgactatattgtggagtatgacta

SEQ ID NO: 765000 - DNA, 90 bp, Homo sapiens
gcaggactctaaaagctttggatattgatgatgttaagaagttcaaaccgggttacctggaagctactcttaattggtttagattatata

SEQ ID NO: 765001 - DNA, 101 bp, Homo sapiens
caaagtagaaccaattaccaagcatataggtttggtgtacagtggcatgggccccgattacagtgattcgcctttgccagtctcatctcgtgtctgctttg

SEQ ID NO: 765002 - DNA, 51 bp, Homo sapiens
ccagggaaccctggtcaccgtctcctcagatctggtggctggacccagagc

SEQ ID NO: 765003 - DNA, 106 bp, Homo sapiens
tctgcgggccgcactcgcctgcgccccgcacccctccgagcagcccggggatccagcacgcaggtactccaaagattcaggtttactcacgtcatccagcagagaa

SEQ ID NO: 765004 - DNA, 101 bp, Homo sapiens
ataagattaaaacccgcttcctagaccacccagaaatctacaggtcattcctggagatcctgcacacgtaccagcctccgcagcattcctagtgtctctct

SEQ ID NO: 765005 - DNA, 100 bp, Homo sapiens
ctggccactatggaattctaatttgaaccatgtttggattgaagccgcctctgtattacttaccagttcaaatctgaacatcaatgatgtactagggaac

SEQ ID NO: 765006 - DNA, 80 bp, Homo sapiens
cagtgccctgagggccttcgagagctaccgcgccagacaggagtgagcccagccctgacttcccggcgctgctggtggag

SEQ ID NO: 765007 - DNA, 82 bp, Homo sapiens
tttgattgtgcaggacggacaggaggcacccagaattcagaaggagctggcggacatcactttagaccctccacctaattgc

SEQ ID NO: 765008 - DNA, 50 bp, Homo sapiens
ccttgaggaggtttgaaaaacccacatatgacagtggacatagaggacaa

SEQ ID NO: 765009 - DNA, 90 bp, Homo sapiens
tgaatcagtatgttgtgcaagaggtactgtccatcaaacatcttccaccacagcttagagctacagaagtcaagattccaaaaccaagag

SEQ ID NO: 765010 - DNA, 90 bp, Homo sapiens
tgagtgagcaagtgaagaccaatattcaacaggcaactgccactctccgcccctacctgagtgccgtgcgggccacattgcaggctgccc

SEQ ID NO: 765011 - DNA, 50 bp, Homo sapiens
ttcaacatgcctctgacaatctctagtaatgacagcccatatcaaggcgg

SEQ ID NO: 765012 - DNA, 71 bp, Homo sapiens
aacaagaaagactccacctactatggaggtttccacttgagcggcacagtgacagaacctgcaatacaatc

SEQ ID NO: 765013 - DNA, 75 bp, Homo sapiens
tgcatggtgtttcaaagggtggtgaagaactaaggtgtcagcttcctctggtgcaaccagcaagtcttccagtat

SEQ ID NO: 765014 - DNA, 99 bp, Homo sapiens
agaggcagacctccagaactacctgtaaattatgtgaaacctccaaatgtggggtaatgccctgtacttcaagtctgccagaaatgttacagtgaacat

SEQ ID NO: 765015 - DNA, 74 bp, Homo sapiens
tggggactgctggcagacgtgcttcaaatgaattcttggtgtgtggagggttcgatacaagaggctgttttcct

SEQ ID NO: 765016 - DNA, 100 bp, Homo sapiens
ggcaggctgaggagaaagcggcgcgcggagggctccttcacctaccaaacgcaaagaccgctcagatgagaagtccaaggatcgctcaaaagataaaggg

SEQ ID NO: 765017 - DNA, 98 bp, Homo sapiens
gactagccactttgcattgactggaaacaatggcatttacagaaagagtcaacagcagtggcaacaggcatcaacttctaactcatctcgccaggaga

SEQ ID NO: 765018 - DNA, 82 bp, Homo sapiens
ggcccttttgaagaggaaatgaagggtattgccgctgttactgatatacctttaggtgctggagaatctggtaaaagcacca

SEQ ID NO: 765019 - DNA, 100 bp, Homo sapiens
gctgaagggcatgtccctgcttgtcagggctgagagcgacggaaggccaacagctcaggagaagccatgtcactggggagccacagcccgcagagtgact

SEQ ID NO: 765020 - DNA, 100 bp, Homo sapiens
gcgcagaaagtgaagctgtttcgggccagcgacccgctgctcagcgtcctcatgtggggggtaaaccactcgggaccagttactctccacaagaaaattc

SEQ ID NO: 765021 - DNA, 75 bp, Homo sapiens
tctgctgcatgacagctatgactacgacctgcaggaacagatgaagggcgccctaatggagatcatccagctcgc

SEQ ID NO: 765022 - DNA, 100 bp, Homo sapiens
gcatgcatgtaccgaccttctgaacaaggccaacacctatgcaggagcttgaaaaatcacatttgagaagaggattggatcctagccataacataaatat

SEQ ID NO: 765023 - DNA, 100 bp, Homo sapiens
acccttcagctgtgagctggcaccgagagggttgaagaagaggatgaacttgaatctggagaccaagaggatgaggatgatgaaagtgaagatcctggca

SEQ ID NO: 765024 - DNA, 80 bp, Homo sapiens
gggaccagcagctgctgaagcgggtgctcgtccggaaactactaaagttcctggggaagcaaagtagaatttcataagaa

SEQ ID NO: 765025 - DNA, 74 bp, Homo sapiens
ccgaaactgtcaagattggcaaggtgctgggtaggccaggtttcagcatcgcagacaagaagcgcaggacaggc

SEQ ID NO: 765026 - DNA, 101 bp, Homo sapiens
ggcgttgtttttgcttctccataacgagatggtgtctggagtgtacaagtccgcggagcagggggaggtggattccagacagcattggaaaagacatagaa

SEQ ID NO: 765027 - DNA, 97 bp, Homo sapiens
gacgaggaggagcgagcgcgcctggcgggcgaggaggaggcgctgcgtcagtaccagcaggtgagccaccagctgggcagcatcatggacctcttca

SEQ ID NO: 765028 - DNA, 75 bp, Homo sapiens
cttggtccagctcatgcaccagtgcgaggattccttccaggtgatacagccaggcatcaccgagctgttatccta

SEQ ID NO: 765029 - DNA, 98 bp, Homo sapiens
gccgaagagagtcggaagaacaagaggttttccgtttgggttggggagggtctcgaaaatggggatcctaggatcttggccctgattgcattcatctg

SEQ ID NO: 765030 - DNA, 74 bp, Homo sapiens
ctggctcttgccctcatcctggttctggaatcctcagttcaagttaactgcctgtatccatggatcagctgctc

SEQ ID NO: 765031 - DNA, 97 bp, Homo sapiens
ttcacgaaggcaccgacgtcatcatgctgaccaccaatcagatccgtaaggagtgtggccatctggggccgtgtggtatttgccactcaggagacat

SEQ ID NO: 765032 - DNA, 100 bp, Homo sapiens
gtggagttcggctctgtgaacacccagaacttccagtcactgcataacattggcagtgtggtgcagcacagtgaggggtatgtctggatttggaatgaac

SEQ ID NO: 765033 - DNA, 83 bp, Homo sapiens
ctggactcatggaggctgagcatttattcagggaagacactgatcaaggtggcagaagctgaaaagcaactgggagccgcgga

SEQ ID NO: 765034 - DNA, 50 bp, Homo sapiens
catcaccttgcccatgtctcacgcgggttacctacctgggcaaagtctcc

SEQ ID NO: 765035 - DNA, 95 bp, Homo sapiens
ctgtctatgtgctgtattgtgtggccactgggactttgcagacatgatggtgataaggagcctgaggtaaaataccatgaagattttgaaaaaac

SEQ ID NO: 765036 - DNA, 90 bp, Homo sapiens
cgaaggggacctcatgtccctgtgggacacaatgcccccaagactgctgagaaggaagaatttgaacatcaacagaaagagctggagaaa

SEQ ID NO: 765037 - DNA, 100 bp, Homo sapiens
caagcaccacaaggaaaagccaggccccgaggacaagttgcatgagcaggtggccaagactaagcagcagattgaggagcagcgggtgcaggtgcaggtg

SEQ ID NO: 765038 - DNA, 82 bp, Homo sapiens
ccacagccagccttctcgcggccccttagcgcggtcaggccgccctccttttccagccctccagaatacccatcatatagcc

SEQ ID NO: 765039 - DNA, 97 bp, Homo sapiens
catcttcgacagtgaggaagatatcaccaccttcgtcaagggcaagatacacgtggtcacttctttcatcgaaactccttgtcccctcggagtctgg

SEQ ID NO: 765040 - DNA, 75 bp, Homo sapiens
atttagcaaggattcaaggctttcagctttgtcagtggaaatgcctgccccagagggatattgcttcagttgacc

SEQ ID NO: 765041 - DNA, 78 bp, Homo sapiens
gccgcgtgtcctcggagcgcggtccctgtattggtctcctgctcctagagacccaacatgagtgaagtttcctgcaag

SEQ ID NO: 765042 - DNA, 90 bp, Homo sapiens
ctcctccaccagaggactgggaggagcatgtcaacagctgaactgtcccaagcaataaacagtggtacattgttatcaaaaccgtcccca

SEQ ID NO: 765043 - DNA, 75 bp, Homo sapiens
ggaaccaattgttttacagtctgttccacatgatcattgtaataagctatccagtcagttcgctgctattcccat

SEQ ID NO: 765044 - DNA, 76 bp, Homo sapiens
aaaaagaagatcctgtatgccacatcagattattgaaactatgccaatgactgagaaagttgaagaattgctgcgt

SEQ ID NO: 765045 - DNA, 101 bp, Homo sapiens
ttcagatcttcacagcacagttcctgggaaggtggagccaccagcctctccttgccctgaaaaccactcgcttgcagagcgctggatcagcaatgcctact

SEQ ID NO: 765046 - DNA, 97 bp, Homo sapiens
caatattgaggaagaaaactgtcagaggaactgatgacgcttgataatgtggctggggacttcagggaagagtgggttacctggacactgcttagag

SEQ ID NO: 765047 - DNA, 51 bp, Homo sapiens
ctttgctgacacctacctgaaggacacaccacacactggaagcagacgctg

SEQ ID NO: 765048 - DNA, 100 bp, Homo sapiens
ggggactctgtgtgagggaaagaaaacaatttctcctgctctgcagcttctgttcaggtgaatgaaaactttgccattgatttgatagcagagcagcccg

SEQ ID NO: 765049 - DNA, 87 bp, Homo sapiens
agatcaagaccggcgtggtgaagcggtggatcatccatgccatggagtatgaacttcagatccgtggcggagacaagccagccttgg

SEQ ID NO: 765050 - DNA, 100 bp, Homo sapiens
gagacccacggtggtgcagcgttggggcgccagggctgcgttcccgtctcgcgtcccggactgagaaggggttcggtccgagcccggtgggaggctcccg

SEQ ID NO: 765051 - DNA, 88 bp, Homo sapiens
gtttcctgaggcctccccagccatgctgaactcatcccagctatggctggcgattctaggaatgccatgaaccaggacatggagattg

SEQ ID NO: 765052 - DNA, 100 bp, Homo sapiens
caaggaggcggtgggcgccgagcaaccgccctctcctgcatccaccagcagccaggaatccaagatgtaaggctacgaaaacttgctggagagaaggaag

SEQ ID NO: 765053 - DNA, 75 bp, Homo sapiens
agacatgagaagattcatactggtactaggttttgacaagcttgcatcatgcgtgagtataagctagtcgttctt

SEQ ID NO: 765054 - DNA, 100 bp, Homo sapiens
tgaagatgaaggcaatctccgatttgtgtatgaactactgtcttgggtagaagagatgcagattggaaccaaccagatggctgtgtgtgccaaagcacag

SEQ ID NO: 765055 - DNA, 100 bp, Homo sapiens
gcttcgcccggctttgcagcggggacttcggcggcggcgcctcaggcacctcggcccggccctgtatgatgagattcgtcagtttcgcaaggcctgtggg

SEQ ID NO: 765056 - DNA, 87 bp, Homo sapiens
gttccttgtggagccggagctgggcgcggattcgccgaggcaccgaggcactcagaggaggaacccaagacagaccaggatgaggag

SEQ ID NO: 765057 - DNA, 98 bp, Homo sapiens
cttgtgcttccctggtggtgctcagcttccctgagctcgagctcctgggcaacgtgctggtctgtgtgctggcccatcactttggcaaagaattcacc

SEQ ID NO: 765058 - DNA, 98 bp, Homo sapiens
acctggctgtcttccacctggactcggaggccagcgtgaggctcacagccgaacaggcacgcttcttcctgactccttcctccgatttttggaaagaa

SEQ ID NO: 765059 - DNA, 74 bp, Homo sapiens
acattaacagtatttactgagagctcatcagttcctaatgtggatctaccacccctgtgttcatcgagattccg

SEQ ID NO: 765060 - DNA, 113 bp, Homo sapiens
aacaaagcactctgtgctagtgatgtgagcaaatgcctcattcaggaagatgagaatgtgcctactgctcctgatcctccaagtcaacatttacgtgggcatgggacaggctt

SEQ ID NO: 765061 - DNA, 83 bp, Homo sapiens
atttgactgagagaaacccactgaagacgtctgcgtgagaatagagaccaccgaggtatggagagaaggggaaagccatccgg

SEQ ID NO: 765062 - DNA, 97 bp, Homo sapiens
ctccatcgtgggactcagcagccttggtgctcaggtgccagatgcaaagattgccttctctcagcacagcaattttatggacctggtacagttcttc

SEQ ID NO: 765063 - DNA, 100 bp, Homo sapiens
tggaaatctcagactgtgcttcttgtgcaagtaatcagtctttgacaagtgatgagaagctgtcggagcttcccaagggtctaaaattcccaggactcca

SEQ ID NO: 765064 - DNA, 75 bp, Homo sapiens
gtttcctaaagttcgtgaatctcaacttgcagacgcgtgccatgcctaccagatcattcaccgcaatgggattcc

SEQ ID NO: 765065 - DNA, 100 bp, Homo sapiens
aggcgagtacacaagcgaagactttccagctcagagagtgaagggttgatggtgcatgttgataaaagaattactctggcagctttcaaacaacatttag

SEQ ID NO: 765066 - DNA, 51 bp, Homo sapiens
gttcttaatggcatctagaatgacttggtcacagggcttcccaggaggtgt

SEQ ID NO: 765067 - DNA, 100 bp, Homo sapiens
tgctgggggccttcccgccggccgccgccgcccgagggagtgcatccgccccaacccttttccccctcgtctcctgtgagaattccccgtcggatacgag

SEQ ID NO: 765068 - DNA, 80 bp, Homo sapiens
cacggtgcgcgtcaaggccctcttcgccatctcctggtgagaactctgtctcagtcgacgggaagtgcagtgactccacg

SEQ ID NO: 765069 - DNA, 96 bp, Homo sapiens
atccacctggagctgaggaaccggaccccggcagctgagtgtggggctgattgtgctaagttccagaagagtgagctagaattcaagtttaatcgg

SEQ ID NO: 765070 - DNA, 98 bp, Homo sapiens
ccttgcactttgttttcaatgacaccaagttggacgctatgctggaagaatttaagaaagatttaccatatgagccccccaggagatcagcctggacc

SEQ ID NO: 765071 - DNA, 80 bp, Homo sapiens
ctgacctctctgatgagatggatcgactgattcttgctattccaaatcctcttccacgttgacagcccttcagatatttc

SEQ ID NO: 765072 - DNA, 101 bp, Homo sapiens
gctgttgccccgtgggcttctgctccctcgcttgtcttctcgggcttctcgccccggccgcggccgggtcctcagggaagaacagctttgcattggtcctg

SEQ ID NO: 765073 - DNA, 98 bp, Homo sapiens
aatccactgctccgaaaggagagtgcgccccccagcctccggcggcggcccgcagagaccctcggagctatactgacttctgttgaaaccattcaaag

SEQ ID NO: 765074 - DNA, 83 bp, Homo sapiens
agtcacccagcccccaaggattctgggggaggcctcaggaatctcaccagtgacacgcgtttgtgaaaagctgtgaatattca

SEQ ID NO: 765075 - DNA, 100 bp, Homo sapiens
aggtgtcttgagccctatggtggccatgctgggtgcagtagctgcccaggaagtgctgaaggaccagcacttccgcacgacgcccctggagaagaacgcc

SEQ ID NO: 765076 - DNA, 90 bp, Homo sapiens
cgggccctgctggaccagctcatgggcacggctcgggacggttaatttggagtggcccctggagtcagtttcctacaccatccgaggccc

SEQ ID NO: 765077 - DNA, 82 bp, Homo sapiens
ctgtcttcggtggactccttcggcagtccacccaccgccgccgcctcccagattttgagaagagggggaaaaaggaagtttg

SEQ ID NO: 765078 - DNA, 100 bp, Homo sapiens
atcatggtgaggacatgaggaaaatgtccttccagcgctgcgcccggacagacaagatgtggcttaggaagctactatggaacaataggtggtccagtcc

SEQ ID NO: 765079 - DNA, 75 bp, Homo sapiens
gtgggacctgctggaagggaaggaaaaacctgtatgtggaaccacctatcctgaggaggatgaaggggctggccc

SEQ ID NO: 765080 - DNA, 100 bp, Homo sapiens
gagaaaatggacgtgttatgactccagaatttcccaaagcagtgcatgctgtcccttacgtgaccaagaatatggcccaggtgaccaaagccctggacaa

SEQ ID NO: 765081 - DNA, 76 bp, Homo sapiens
agctggaatctatgggattttcagctcgatacaatttcacacctggaacttccaggaacagaacaggccttaccgc

SEQ ID NO: 765082 - DNA, 76 bp, Homo sapiens
aatgtccaatactgtggctactgtaaataccattttagtaagctggtgaaggtgctaaaggagaagatagaagctg

SEQ ID NO: 765083 - DNA, 74 bp, Homo sapiens
caggaatactcataaagagactgagcctgtgtatgagaggggaaatggctagtgatgagctgaaagagatgcgg

SEQ ID NO: 765084 - DNA, 100 bp, Homo sapiens
gatgaaccgtgcactggaccaggtgctgggccgcttcttcctctaccacatccacctgtggatcaggatcgactacaagaccaccaccatcctgctggac

SEQ ID NO: 765085 - DNA, 74 bp, Homo sapiens
ccccgcgagaaggaaggtcgagccagcggacaaggcaaaatctcagcaagttcggacctctagtacaataaggc

SEQ ID NO: 765086 - DNA, 80 bp, Homo sapiens
gacagatgccagcgtagctgaatccagtaccaaaaacgtcaacaacagttttacgtgttggctgcaccaattctagaagt

SEQ ID NO: 765087 - DNA, 88 bp, Homo sapiens
atttgttaaggattccaagtaactcttatttggacgtcttcctcatctgcttctccctcgtcagcccagcctcttatgagaacgtccg

SEQ ID NO: 765088 - DNA, 100 bp, Homo sapiens
cttggtctgtgaaggaagtggcatcatatcagccattacagcgaaaactcttcactgcagtgcccctgggcgctgggattgctctagcctgtaagtataa

SEQ ID NO: 765089 - DNA, 73 bp, Homo sapiens
ctgaggccatcgttaatctgcagatgctgacttacctgaacttgaggcatggctaatgtaaaagcagccccaa

SEQ ID NO: 765090 - DNA, 100 bp, Homo sapiens
cctccgagggatgcaacgggcaaaaactgaactgttcaggcttcagattgtaactgacgatctgaggaaaaatgagggagtgcatccgccccaacccttt

SEQ ID NO: 765091 - DNA, 74 bp, Homo sapiens
gacagagtcctccgtgtcctcccccgcatgacccccttgaggtcctgctgtactagccaccaaagcagctgctg

SEQ ID NO: 765092 - DNA, 100 bp, Homo sapiens
gtcaacatgagtcctgccaagtgcaagatctgtttccctgatcgcgaagtaaagatcaagaattggttaaaatagttggaatacgatatgaagttgggcc

SEQ ID NO: 765093 - DNA, 100 bp, Homo sapiens
tcagagctggccaagccaatagtctacgattcctgtaactcggaagaaatacagagaaagcttaatgagcagcagagtggcagaatttagtgacatttgg

SEQ ID NO: 765094 - DNA, 98 bp, Homo sapiens
ttgaagttgaggccaagaaaggatcttgtagaggaggactggaatgaaattgaccccattaaaaagaaagaccttcatcacagcaatggagaagagaa

SEQ ID NO: 765095 - DNA, 87 bp, Homo sapiens
tgaattaaaggagccttttgacccaatcatatagtggggctcagggccagtgctcactcttattggagtctgcactatggaaacaac

SEQ ID NO: 765096 - DNA, 99 bp, Homo sapiens
tctgcttttggtaacatcctttcatgtaaggttcaaaaccagttaaagtaatatatattaattcaccacttccccaaaagaaaatgactatgagagaga

SEQ ID NO: 765097 - DNA, 83 bp, Homo sapiens
ctagaagtcctagaagaaatttggagtgtgcgtgcgcgccgagcggttcgagaacttgtcttggacaattgcaaatcaaatga

SEQ ID NO: 765098 - DNA, 80 bp, Homo sapiens
ggctggacaccccttcatgcagcagcttcctgtggctatctcaacatagcagagaattacatgaatgacagtcttcgaac

SEQ ID NO: 765099 - DNA, 87 bp, Homo sapiens
aacacagtagtggaagatgtaaagcaatatttcgagcagtttggcaagatgagattgtggggaacctgggtgaaggcacctttggca

SEQ ID NO: 765100 - DNA, 100 bp, Homo sapiens
acaagacacccctgcaccagaaacatgctgcctcctggaatgaggccgcccatgggaggccatatgccaatgatgcctgggcccccaatgatgagacctc

SEQ ID NO: 765101 - DNA, 101 bp, Homo sapiens
tctgtcttcggtggactccttcggcagtccacccaccgccgccgcctcccaggagcctcctcaacaagcccaagagtgagatgaccccagaggagctgcag

SEQ ID NO: 765102 - DNA, 80 bp, Homo sapiens
gcagccgatccagcctgcggagcctgtggggcaggcaaaatcctgacagatgactttgcagacaaggagggtctggaaat

SEQ ID NO: 765103 - DNA, 95 bp, Homo sapiens
aggaggcggctataataatagcaaacatcgatggcctactggggataacattcatgcagaacatcaggttatcaatactctggctgaccatcatc

SEQ ID NO: 765104 - DNA, 74 bp, Homo sapiens
tgaccttaaacctgaaagtggtagcaagaatttcgctaaggagtttgtgatcagtgatcggaaggagctggagg

SEQ ID NO: 765105 - DNA, 100 bp, Homo sapiens
gaggcgccgcggtaccatgaggcgccgttgacgaaggatcagagattggtgtattcgggcagactgcttcccgatcatctgcagctgaaagacattctca

SEQ ID NO: 765106 - DNA, 90 bp, Homo sapiens
aagcgaaaacatgaccgctgagcccatgagcaagagtgagccatggagctacgtgtggggaacaagtaccgcctgggacggaagatcggg

SEQ ID NO: 765107 - DNA, 75 bp, Homo sapiens
ctagcttccctgtatgtgatgatgaccgtcaccaactggttcaagagaccaagacacattccaccccagtggggg

SEQ ID NO: 765108 - DNA, 100 bp, Homo sapiens
ataaggacaaacagagaactggccgctgcatggttaccacagaccacaaaatctgggcttcaaggacctcacgctgcagccgcggggccctctggagcca

SEQ ID NO: 765109 - DNA, 89 bp, Homo sapiens
acagccccaggaggtcctgagaacatgtgcacaagccgtgctggtatagaggactctaagaagtggggcatgctgtttctggtgaacca

SEQ ID NO: 765110 - DNA, 75 bp, Homo sapiens
tcggggcctttatttctcgtcggcggcgccctgcaccgcgcctcgcaaagttaatgttgaagaaggaaaatgcgg

SEQ ID NO: 765111 - DNA, 50 bp, Homo sapiens
ttctgagcaaggtagttttgatggagattatttggtagcaattgaagaga

SEQ ID NO: 765112 - DNA, 87 bp, Homo sapiens
ggagatgaggaaggctggtatctttcagagtgtaaagtaatcttggaatataaaggtgttggagcgggccggagagaagtagagtgg

SEQ ID NO: 765113 - DNA, 96 bp, Homo sapiens
gtgctcgtcgccgtggcgccatgggtgttgtccgcagccgcagacggaagctcctcagtcttagagagttctgaaggtggatttctcagccacgtt

SEQ ID NO: 765114 - DNA, 98 bp, Homo sapiens
tatatcgcagtagttaaaaaactagatccaggttggaatcctcagatcaaattttctccggtggctaaaaagttgtttgtggtaactgcagtgagtgc

SEQ ID NO: 765115 - DNA, 121 bp, Homo sapiens
cgcgtggctgccggggaggccagagcgtggagcgctgcgcggcgcggcggccgggccctcgagacggggacgtaagactttgaccccgacgcaggcttcagtgattgccgcggatcagaag

SEQ ID NO: 765116 - DNA, 113 bp, Homo sapiens
aaggcctcttcatgaaacagcagttttggtagaagatgtggtacacactcagttaattaatctgaaaatggtgtgaatggaacattaacttcaaatgtagcagactctccccg

SEQ ID NO: 765117 - DNA, 83 bp, Homo sapiens
ctgctctgcctccggggacaagaaactagagcaaataaccgttttgaaattggatcgcttacacctgagacgaactacagaac

SEQ ID NO: 765118 - DNA, 100 bp, Homo sapiens
ctctggatggaggagccatctatgaggcgggaaaggagcacggcctgaagccggtggtgggcgaagtgtacgatcaagggcagagcggcttgggtaaatc

SEQ ID NO: 765119 - DNA, 50 bp, Homo sapiens
ctggggccccaggtggagctgctggctggaggcgtgatcctgggtgtggc

SEQ ID NO: 765120 - DNA, 83 bp, Homo sapiens
gtgatacttacctcacctctaattagggacgaattggagaagaaggatggagctgtccctttccccccaacacatcgcttgac

SEQ ID NO: 765121 - DNA, 75 bp, Homo sapiens
ggagtccggacatctgaaacttggctgaacataacttctttttttcaaagttccctgtgttgtgaactgagcttg

SEQ ID NO: 765122 - DNA, 90 bp, Homo sapiens
ggactacaatgcaggactgctctcctactacacggatcggaaactccatggtacagctcagcaactgctccaggacagcaagacaaaaat

SEQ ID NO: 765123 - DNA, 87 bp, Homo sapiens
agcggtagccctccttgcgcctccgattcccaggatctgtctggctccattgatgacctccccacgggaacggaagcaactttgagc

SEQ ID NO: 765124 - DNA, 90 bp, Homo sapiens
gcctgagccgctcttcccttacagtttctttgagcagtttgtggaagcgatcataacagggggtatcacagaagagcagtttcagacaca

SEQ ID NO: 765125 - DNA, 75 bp, Homo sapiens
ctccaaggcctcactcattgtcagagattgacaggtatgcccagcaagacctgaagaaaggcttgcacctgtacg

SEQ ID NO: 765126 - DNA, 90 bp, Homo sapiens
caggaaccagaacccaggcccacggaggaagagccgggcagtccctggagcgggccagcgagcagagatgctacagaagctgagtgaagt

SEQ ID NO: 765127 - DNA, 75 bp, Homo sapiens
ctccctgctgctgctgctcttcgccatcttcatgggcctgcgggcctccaagattggtttatcttggaagctaaa

SEQ ID NO: 765128 - DNA, 75 bp, Homo sapiens
cccgcccgcaggtgctatgctgtgggccccgctcaggtgctggagaatctggtaaaagcaccattgtgaagcaga

SEQ ID NO: 765129 - DNA, 82 bp, Homo sapiens
aaagaaccacatccgtttccccaaattcaacttctccaacaatggctgccatccggaagaaactggtgattgttggtgatgg

SEQ ID NO: 765130 - DNA, 75 bp, Homo sapiens
gacctgcccgcctgcggctgctccggtttaatagaaaatggtcagcttgaaattgtgacaggtggctgggttatg

SEQ ID NO: 765131 - DNA, 134 bp, Homo sapiens
gcggcttgtccctgtttcgccacagttcctaccttatgagctcggttttcttatgcttataagagtggaacagcacaacattctgaaattttttggttattgtaatgatgttgatcgggagttgagaaaatgcc

SEQ ID NO: 765132 - DNA, 80 bp, Homo sapiens
ggaagacgagccacctgagcaagctgagccagagcccacagaagcatggaagtttgggatatgagattgaaaatgacgac

SEQ ID NO: 765133 - DNA, 100 bp, Homo sapiens
ctcactgttcctcctgtcgtaaagctggagaacggcagctcgaccaacgtcagcctcaccctgcgcccatcacaacattgatagctgatgttgaaactgc

SEQ ID NO: 765134 - DNA, 100 bp, Homo sapiens
accggcagaacacagcagggcggaggaaagtgcaggcccggtggttctgggaagcgtacttccagtcaattaaagccattgccctggccaccctgcagat

SEQ ID NO: 765135 - DNA, 100 bp, Homo sapiens
ctctgatcgccgggaacccttgccgctgctgtcctgcgaccccaagcaggtgtcatggagaaactccagctgggcccagagattctgcagcgggaaaatc

SEQ ID NO: 765136 - DNA, 100 bp, Homo sapiens
gcaggtttccacctgcggccaccgtttctgcgatacctgcctgcaggagttcctcaggaccatggccaacctggagcgcaccttcatcgccatcaagccg

SEQ ID NO: 765137 - DNA, 97 bp, Homo sapiens
aggacagccttggcagcagtggcccttgaaccagcaacaatggatgcagtcattccagcaccaacaggatccaagttatggaggttttgatgactat

SEQ ID NO: 765138 - DNA, 100 bp, Homo sapiens
cggggctgggcgcgctcccgcggagccggagccgcagaggctcccgggctggactcaggcttctcagactgaagcgttcccggctgaaggtgaggttctg

SEQ ID NO: 765139 - DNA, 74 bp, Homo sapiens
tgaattgcatcatagagacaccgaggactggaatgtcacgtggaataccagcaaccccgacttcaccaagtgct

SEQ ID NO: 765140 - DNA, 114 bp, Homo sapiens
gaatgacgtctgctgatgatttcttccaaggaaccaaggcggccctggctgggggaaccactatgatcagagctattcatcactaatgaaagttgaaaatatgtcttcaaatca

SEQ ID NO: 765141 - DNA, 100 bp, Homo sapiens
gctggcgcagctggcggacccgtggcagaagatggctgtggagagcccgtccgacagcgctgaggattttttatcaagcagaaatgcatcgaacaacgag

SEQ ID NO: 765142 - DNA, 100 bp, Homo sapiens
ctccccttcctggactgcaaatttcctcctctgtaaaatgaagggttggcaaggcactgacgtttcttctgctacagcctccaagccccaaacttcctcc

SEQ ID NO: 765143 - DNA, 101 bp, Homo sapiens
agttcgtcatccacaaccatgcggacatcggcttctgcctggtgctctgcgtcctcatcgggcttatgttcgaggtccgtggcactcaggtagttggttct

SEQ ID NO: 765144 - DNA, 75 bp, Homo sapiens
cgccatacgcgctctccctgtttaggagccagcaccgctctttgaccttgccatgcttgccttagatagtccaga

SEQ ID NO: 765145 - DNA, 98 bp, Homo sapiens
ttatagcaacagcctctgattacgacatggctgagatcaccaatatccgacctagctttgccagtgagctcctccgacagcgaggcccccgaggccaa

SEQ ID NO: 765146 - DNA, 74 bp, Homo sapiens
ggaggccagtggctggtctcagatcacagattctgctggccatattctctactccaaagaggatgcaaccaagg

SEQ ID NO: 765147 - DNA, 120 bp, Homo sapiens
aaagaagaaaccaagaccacctcctgctctgggaccggaggagacatcggcctctgcaggcttgccgaagaagggagaaactggcgatggaatatgagaggagccctctggaaagaaaag

SEQ ID NO: 765148 - DNA, 83 bp, Homo sapiens
cgtgtgcaagccctgctatgtgaagaatcacgctgtggtgtttggcgatccgccgagaagttgttggccccaggagcatccct

SEQ ID NO: 765149 - DNA, 101 bp, Homo sapiens
aaaaaaaggagagaagctgaagcattgcttcaaagcatggggctaactccagaatcccccattgcggtttccaacctagatgaggaaagccgatggacagt

SEQ ID NO: 765150 - DNA, 98 bp, Homo sapiens
ccgagggtctcctccagtagacggtacagcgaaggcagagagttcagagctagggccatgagtaccttgtttttgactggaaggagctgtggggtgga

SEQ ID NO: 765151 - DNA, 100 bp, Homo sapiens
acactgagagggagatgattattagttgcgttgagtcatcaggcaaagaagaaatgttggctatttggcgatgagaggtggtgaacagtgaccatactgg

SEQ ID NO: 765152 - DNA, 76 bp, Homo sapiens
ctcagcgtcctcatgtggggggtaaaccactcggacccagatgatgtggtaccagttggccaaagaagagcctggt

SEQ ID NO: 765153 - DNA, 82 bp, Homo sapiens
gacatttaattttagggtcctttatatagaagggagagtaggagcacagagagtttcctgtcagggaagctgacatgtcggt

SEQ ID NO: 765154 - DNA, 82 bp, Homo sapiens
cgggactgcggcggcgccggcctccggggagaaacggctgaaggtgatgtggccgccctcaaccgacgcatccagctcgttg

SEQ ID NO: 765155 - DNA, 51 bp, Homo sapiens
gagtccggacatctgaaacttgcttttcaggatgtccagcaaagaatcctg

SEQ ID NO: 765156 - DNA, 100 bp, Homo sapiens
tggcacaaatactattatggataagatgatggagaactgtgtttatgaaactgtagttttgcctttggatgaaagggcatttgagaagactttaacacca

SEQ ID NO: 765157 - DNA, 90 bp, Homo sapiens
gcggccggccgacccttcctgtcgctgacggcgactgcgggaggccagtctgaagtttcctggatccccaataaacattactctgggatt

SEQ ID NO: 765158 - DNA, 100 bp, Homo sapiens
catggagcccgactcggtgattgaggacaagaccatcgagctcatggcacttcaggtggcaagacagctccttcttcagcagcaacagcagcagcaagtt

SEQ ID NO: 765159 - DNA, 50 bp, Homo sapiens
tgaaccgattcttgttggccgggtgcctcatctccagacatggagcccag

SEQ ID NO: 765160 - DNA, 99 bp, Homo sapiens
agaaggtttcctggcctgttgcagccatggtgcattgcagttgcgtgttgttcagaaagctggaaagtgaaatttcaaccacagcagatgactgcagtt

SEQ ID NO: 765161 - DNA, 90 bp, Homo sapiens
gtggtgctgaccctgtaacccaaaggaggaaacagctggctaagctcatcattgttactggcaaaagagatttcactagcagacctccag

SEQ ID NO: 765162 - DNA, 89 bp, Homo sapiens
cccggtgcaagaggcgcaaacaagccaatcccaggaggaaaaacggcaaaaggactcttgtggaagatggaactcattgtccattttcc

SEQ ID NO: 765163 - DNA, 90 bp, Homo sapiens
cgggactccaaatgggtcgcagtcgcagccgctctccacggagggctatcagttgagggatttgcagttgataaaatggctggagaggtt

SEQ ID NO: 765164 - DNA, 83 bp, Homo sapiens
gtttgagctgcagcatggcactgagaacatccagtcatggataaaaatgagctggttcagaaggccaaactggccgagcaggc

SEQ ID NO: 765165 - DNA, 90 bp, Homo sapiens
tcatggtagctgagaagtcacagaaggatcccaagagaagccactttgtcttaattgctggggagccattaagagaaccagttatccaac

SEQ ID NO: 765166 - DNA, 90 bp, Homo sapiens
ggctgttggagccacttgttacacagacctcctgccccccgaggtctgcagtctcctgaacccagcagccatctacgccaacaacgagat

SEQ ID NO: 765167 - DNA, 51 bp, Homo sapiens
aaacactggaatcctactttttctatggagttttaacattgaatgcggaga

SEQ ID NO: 765168 - DNA, 82 bp, Homo sapiens
gccgacaagcccgggagacacagtgtcagaattacaaggtactccaaagattcaggtttactcacgtcatccagcagagaat

SEQ ID NO: 765169 - DNA, 80 bp, Homo sapiens
gtcatcttccttgaattctttgcgtggggccttttgacaactccaatgttgactaaacatgggctgaggcttcatcttcg

SEQ ID NO: 765170 - DNA, 127 bp, Homo sapiens
cggctcttcccggcgctctcctggctcccttctgccccagctccgtctcggcggcggcggatacttggcatatcgaaattttatgattgacacgtatcgtctaaacccccaagagtatttaactagc

SEQ ID NO: 765171 - DNA, 147 bp, Homo sapiens
caggaccctctagatcgagcagatttcaatgctgttgagtatatcaataccctgttcccaaccgagcaaatgatgataattccgaagaaggcttccacactattcattcaggaaggcatgaatatgcattcagcttcgagcttccac

SEQ ID NO: 765172 - DNA, 82 bp, Homo sapiens
tttgactcaaacatgaataggacaaagaacagaccgctggttcgtggacagatcaggttaaggaaatggaagggattctgaa

SEQ ID NO: 765173 - DNA, 82 bp, Homo sapiens
ctggggccagggaaccctggtcaccgtctcctcagccgccaccggcacggccaggccagcatggtggaccacttacttccag

SEQ ID NO: 765174 - DNA, 98 bp, Homo sapiens
cggcacagtatgaccggcagatccgcctgtggggactggaggcccagaaacgaacttgggaatcagtgaaacgtacaaccaggaaagagcagactgcg

SEQ ID NO: 765175 - DNA, 75 bp, Homo sapiens
tccattacaggcccagcccactgggaggagttaaacatccttctacaggataactgcatctagaggcaggactat

SEQ ID NO: 765176 - DNA, 74 bp, Homo sapiens
gaagtttgagaggtcatgtggttggactacgctattacacgggagtaaattatatccagatcgagagacagaag

SEQ ID NO: 765177 - DNA, 100 bp, Homo sapiens
acagctggaatgggagagagagcgcagaatatcaagtgctgatcttcaacttgctgctgagcttgggaagacattactggatcggaacacagagttggag

SEQ ID NO: 765178 - DNA, 82 bp, Homo sapiens
atcgaccttattgctgctctgccctttgacctgctttacatcttcaacatcaccgtgacaatgcagatcttcgtgaagactc

SEQ ID NO: 765179 - DNA, 50 bp, Homo sapiens
cagtggtggtggtgggggtagcaggtttgttgataagccggggcccttcg

SEQ ID NO: 765180 - DNA, 101 bp, Homo sapiens
atctggggccttatttccactttgtaattccagtgaattgacttcccatcagtctaatgctggcgtgctatgcgggacacctagatgttgtgaaatatctc

SEQ ID NO: 765181 - DNA, 75 bp, Homo sapiens
tccctgctctgtgcgcgcctccatctgggccatggatggatgccatggacaatattaccaggcagaaccaattct

SEQ ID NO: 765182 - DNA, 50 bp, Homo sapiens
gaagaattagtgcgtagtgctgaagatgacagcgtggaagatgaactgga

SEQ ID NO: 765183 - DNA, 100 bp, Homo sapiens
gtgagggtgtacaaatacccctttgaattaattatggctgtttccactgtatccaaaaggaggggagaagttgcagtttgattatggtgtctatcttctg

SEQ ID NO: 765184 - DNA, 83 bp, Homo sapiens
cccgcgagcacagagcctcgcctttgccgatccgccgcccgtccacacccgccgccaggagccgctcccactcaggggaccgc

SEQ ID NO: 765185 - DNA, 128 bp, Homo sapiens
tcagacagatcgccggggaggcagcgcgggatcccagcctcaggcgtgcgcggacggtgtgcgggatgctcacaactgtattcctgagctggacagtgagacagccatgttttctgtctacgatggac

SEQ ID NO: 765186 - DNA, 97 bp, Homo sapiens
acgctggcaagtctcaaagtcgccacagagtgcagcagctgccccgagccccgtgcttggcaacattccccccaacgatgggatgccgggaggcccc

SEQ ID NO: 765187 - DNA, 75 bp, Homo sapiens
cgcagtatcatgctggccaagaagatcatcattaaggacggaggcacgtcaccttcaggccattcagaggaggaa

SEQ ID NO: 765188 - DNA, 87 bp, Homo sapiens
gagacaacctgcagcctcctggcaccaaaggcttgtccagccggaagccctgagggcagctgttcccactggctctgctgaccttgt

SEQ ID NO: 765189 - DNA, 97 bp, Homo sapiens
ccaggagcagcgaggcactcatcctgcacgccggcgagtgccagcgagaaatgttctttactaccatggaaagccaccttctgcgctgcaaagtgtt

SEQ ID NO: 765190 - DNA, 100 bp, Homo sapiens
tgaagacccggccgcccagatgatgcggtggtgggggacctgccggcacgcgactccccccgggcccaaaccctgggcgctgcctatggcacagccaaga

SEQ ID NO: 765191 - DNA, 100 bp, Homo sapiens
aacagcagcagcaagttagtggattaaaatctcccaagaggaatgacaaacaaccagctcttcagccaaaatgaagtttaatccctttgtgacttccgac

SEQ ID NO: 765192 - DNA, 104 bp, Homo sapiens
tatgaaatttttgggaaggtgcaaggggtgtttttccgtaagcatactcagcctccagggtcgtatagacctccccctcctatgggcaaaccaccaggttcaat

SEQ ID NO: 765193 - DNA, 100 bp, Homo sapiens
aaaaaccaacttttccctgttgtcatgaatggcaaagaagatgttttgtggtgcactgagctcgaaagaagatggcagtgaacgtatactcaacgtcagt

SEQ ID NO: 765194 - DNA, 75 bp, Homo sapiens
ggatatgctggaaatacagaaccacagtttatcatcccttccttttgtggggacattcatggacaattctttgat

SEQ ID NO: 765195 - DNA, 88 bp, Homo sapiens
aaggacatcagtggctggaaaataatataggttggatggcaagcatgtggtgtttggcaaagtgaaagaaggcatgaatattgtggag

SEQ ID NO: 765196 - DNA, 100 bp, Homo sapiens
gatgtactgctatttattgataacatctttcgcttcacccaggctggttcagaggtgaatattgaccacttcactaaggacatcacaatgaagaacctgg

SEQ ID NO: 765197 - DNA, 75 bp, Homo sapiens
atcggacctgtccagtctgctggagcagtttgagaaatcagaagccaaaacctattgatgtacaagtcattacac

SEQ ID NO: 765198 - DNA, 101 bp, Homo sapiens
gctggaccagaccattgctcgcaagcggatggagatccaggaggccatcaaaaagcctctgacattgcggcgccgcttcggggacgtgttcagcctgcagc

SEQ ID NO: 765199 - DNA, 101 bp, Homo sapiens
cggtgactccccgccgctcccgggggccgtgacggtctggctctgggagaggagtggacagcagctggttgagatacatccccatctggagacaggactgc

SEQ ID NO: 765200 - DNA, 83 bp, Homo sapiens
taaggattccaacaacaattccgatggcaaagccgttgccaaggtcaggaactgtgtgtctagatgtaattaatcaaacttgg

SEQ ID NO: 765201 - DNA, 74 bp, Homo sapiens
ggtggccggcagtcatctcgcggccgttcagcccaggccagacccgatcgtctatggtccagtggcttaaccca

SEQ ID NO: 765202 - DNA, 75 bp, Homo sapiens
ctcgacgtcttgcctgtgtcccacttgttcgcggcctatagagccagtcttggtgctctgtgttcacctggttca

SEQ ID NO: 765203 - DNA, 98 bp, Homo sapiens
ctcgcagcagctggggaggagccaaagcctcggcgctcacctaagccgcagggagatacacccaactgggagatgatggacctagccaaagtgagtct

SEQ ID NO: 765204 - DNA, 87 bp, Homo sapiens
acatcaggtgatggataggagcaaccctgtaaaaccagccttagactatttttcaaacagacccctcgtccagtcattgtggaaccc

SEQ ID NO: 765205 - DNA, 83 bp, Homo sapiens
ttcctggtctgcggcagccatgctgaactcgtatggagaggttttggctacgggcctccacctccaccgccagatcagtttgc

SEQ ID NO: 765206 - DNA, 100 bp, Homo sapiens
catgaagctaccggccagggttttctttactctggggtcccggctgccctgtggcctcgctcctcggagggctgcaagaaagcgtaagattgccattcga

SEQ ID NO: 765207 - DNA, 90 bp, Homo sapiens
aatttgtatagagatgtgatgttggagaactacagaaacctggtctccctaggccccccaaagatggcggacaaggtggtcccacggcag

SEQ ID NO: 765208 - DNA, 90 bp, Homo sapiens
cctgctgcttgctgaccaaatggggtcctgctgtcacccaggctggagggcagtggcaccatcacagctccctgcagccttaacctcccg

SEQ ID NO: 765209 - DNA, 75 bp, Homo sapiens
agctgaggaacttaactttccggaagcaggtctcgtacagaccactggagcgatccagcgaagatgtggatataa

SEQ ID NO: 765210 - DNA, 98 bp, Homo sapiens
gcgagagcctcggcgagccctctgcagcggagccccctgcccatttggttttgggcagaagactgatttttggaaatatgtatttgggagacagtcac

SEQ ID NO: 765211 - DNA, 75 bp, Homo sapiens
accaccgtcatggcagtcccagggaggttttacataaatggagtcctaaacaaataggagaacaccttctactga

SEQ ID NO: 765212 - DNA, 75 bp, Homo sapiens
caccgcctgcggaaggagtacctggagtacgagcggtcttgcgagtggctggttccctgcagaagagcacagaag

SEQ ID NO: 765213 - DNA, 75 bp, Homo sapiens
gctacttcatattttggaaagcagtttttaagacaactcaccatctgctacctggatatgctgatgaccagtgag

SEQ ID NO: 765214 - DNA, 74 bp, Homo sapiens
gctacatgaagttctgaaggatgttcagccccgggtcactccacttgaactcacaattttccagtacaggcgcc

SEQ ID NO: 765215 - DNA, 105 bp, Homo sapiens
agtacaccatgcacaaggtcttccagtttctgaacctaggattttttatcaagcagaaatgcatcgaacaacgagaatcaagatcactgagctaaatccccacct

SEQ ID NO: 765216 - DNA, 101 bp, Homo sapiens
aggtcacagatatctttgaaactctgatgaaaggtgcagcccatccagcccacaccaaccgtgccccagcctgctgtggtcattgccagcccagctccagc

SEQ ID NO: 765217 - DNA, 75 bp, Homo sapiens
ttaccatcactcctgtgttttcaggtgtggatgtcagcatgaatacacatcttaaagctgtgaaaatgaccctga

SEQ ID NO: 765218 - DNA, 100 bp, Homo sapiens
aaccagcatggctacttcatattttggaaagcagtttttaagacaactgggctgtgtctgaactgctggagcctgcaggagctggtcagcagggacccgg

SEQ ID NO: 765219 - DNA, 98 bp, Homo sapiens
tggaactagtcggacaaagccctcgcgtcggacccttgccagaactctgatggtgagaccattctaaaaggcctccagtccattttccaggagcaggg

SEQ ID NO: 765220 - DNA, 83 bp, Homo sapiens
acgaaagccagcgagctcctcagcctcaggtcaaaatgcagatcttcgtgaaaacccttaccggcaagaccatcacccttgag

SEQ ID NO: 765221 - DNA, 99 bp, Homo sapiens
ctgcgactcaggctccggcgtctgcgcttccccatggggctggcctgcggcgcctgggcgctctgagttctgaagtttataggttaaacttagaacaag

SEQ ID NO: 765222 - DNA, 116 bp, Homo sapiens
tgcctcgcatctgcttgcctacttcttcacggagctcaaccatgaccaagtgcagaagggggatatgagactttctactcggaatatcctgagtgttgcgtggatgtaaaacccat

SEQ ID NO: 765223 - DNA, 100 bp, Homo sapiens
agtccttccagaccagggacaaccagggcattctctatgaagccatgctgcggatggtctcagcagttctccagtttggcaacattgccttgaagagaga

SEQ ID NO: 765224 - DNA, 73 bp, Homo sapiens
ggggctggcggacggtgtttccctcccgtgagttctggcacaggcgccaagcccatctttgtgtgcttgcatc

SEQ ID NO: 765225 - DNA, 74 bp, Homo sapiens
tccctgaagagggaagacacgcggaaacaggggacagtgagcccctcagtgaggcggctcaggcacacacccga

SEQ ID NO: 765226 - DNA, 85 bp, Homo sapiens
ggtgaagcggccccagcactcccagctgcgcagggcctgccaggtggcgctcgcactcctgtaggaggcctgctgatggcatttc

SEQ ID NO: 765227 - DNA, 98 bp, Homo sapiens
aaggtggatgaggcccaggctgatgggaaggagcacccaggagctgaagattctgaaagtcaagaagacatcatccggaatattgccaggcacctcgc

SEQ ID NO: 765228 - DNA, 101 bp, Homo sapiens
ggctgaagacgtgtctgaccagcttgcccagcaactccagaaggcccttgtggggaagcctgcggagagagaatctgaccaacacagttgatcacttgtag

SEQ ID NO: 765229 - DNA, 74 bp, Homo sapiens
aacaattctagagtagagcgcctgtaccatgatattgcccagcaagattttgcctgcctgagctcctctagtag

SEQ ID NO: 765230 - DNA, 100 bp, Homo sapiens
gaaggtgttaatttcaaaccaactggatcggaaactccatggtacagctcagcaactgctccaggacagcaagacaaaaatagaagtcatacgaatgcag

SEQ ID NO: 765231 - DNA, 101 bp, Homo sapiens
aagaggcgccaggccaaggtgcaggagaagcgcccgccgccctggaagaagaggacgtgagagtccgcgggtgcagtggaggcttgcctcttgcatcagct

SEQ ID NO: 765232 - DNA, 82 bp, Homo sapiens
gcggatcggctcacgcagcttcaggacgctgtgaattcgaacttttgagcatgctgttctagctgcaggaacagatttccgt

SEQ ID NO: 765233 - DNA, 100 bp, Homo sapiens
gccatcatttgcatttggtacttttctggtccaggaattaatcaagagcaagactcccaagcagctcataagcttaaatcgtctcagaaggacaaggtcc

SEQ ID NO: 765234 - DNA, 75 bp, Homo sapiens
gctcctaagcctgcacagccgcggcggcagcagcagtgagaggtaaggctggcctctctgcagtcagaggtctga

SEQ ID NO: 765235 - DNA, 100 bp, Homo sapiens
gtttgcggttcagccctttgatgaccgcagcaggacagtcattttgtttactcattcagccctgttgcaggtcccaataaactcttcataaggttgacag

SEQ ID NO: 765236 - DNA, 75 bp, Homo sapiens
gtctgtggtgtcggttaatcgtcacggcttccgggagttaaaggacgtgtttgagatgaggtttgccaagatgcc

SEQ ID NO: 765237 - DNA, 98 bp, Homo sapiens
ggagcacccggggtgtcctcatcgagcccgtctacccagacatcatccgcatgggcacgcctatctcaggaagtggctgctgctctcagaccctgatg

SEQ ID NO: 765238 - DNA, 75 bp, Homo sapiens
tgaaacggattgccagagaattggcagaagataccccatcagcctgagtctcttaaaggcctttatacacatatg

SEQ ID NO: 765239 - DNA, 96 bp, Homo sapiens
atcatgtacatctgccatgggatgacgcctcaggaagaagcattgcatgcatttattcagccagagattctggatggcccaaatcagtatttttgt

SEQ ID NO: 765240 - DNA, 88 bp, Homo sapiens
tggttattcctgcccgaagtcagaactttgacatcttgcaaagtgccatcagtaagcatttggtggagccgccaccaaaatgcagatt

SEQ ID NO: 765241 - DNA, 74 bp, Homo sapiens
agctgctggctaagatcaccaacacagacgtgattgggaaaatgaggtacgttagtgttcgcgattttaaaggc

SEQ ID NO: 765242 - DNA, 75 bp, Homo sapiens
ggtgaagagaggttttgaattcacgcttatggtagtggtgtttcctgaggttataggcgggtgtttgaggagtac

SEQ ID NO: 765243 - DNA, 96 bp, Homo sapiens
attacacctgcatagcccggaatgaggccgccgctgtggagcaccaaagccagttgattgtcagagtggcaccctgtgctgcgcacactaaagaac

SEQ ID NO: 765244 - DNA, 100 bp, Homo sapiens
ggtttggccaaagaagcccccatactcccggtgaaaaagttgtgtaaaaaacagtttcagtacagtgcctctttgcgagcacatcttattcgtcatacca

SEQ ID NO: 765245 - DNA, 75 bp, Homo sapiens
gacaatggctttggtccccagcgcagtgaagtggtgagcctttttgtcactgaacctatctacaagacctcttgt

SEQ ID NO: 765246 - DNA, 75 bp, Homo sapiens
caagttctccctctttgctggaggcatgctgcaattttccagattattcaaagtatcaggatgggcatgtgaagt

SEQ ID NO: 765247 - DNA, 83 bp, Homo sapiens
gctggccgcgggctccatcagcatggctgagcttccgccctgcgctgccagtctcctacctgcaggccgagctggccttcgag

SEQ ID NO: 765248 - DNA, 75 bp, Homo sapiens
aaagcagaggttaatacaatccctggctttgatggagtagtcaaggggagaagccgttccagtgtgagtttgagg

SEQ ID NO: 765249 - DNA, 75 bp, Homo sapiens
gcaccttctccatcaggtgcagaaggtggccctggtacagtggacggaaagtgtgggcttaaccctggtgggccg

SEQ ID NO: 765250 - DNA, 120 bp, Homo sapiens
gccgggctggctgcggccgccctgggccgggccccaccggacggagaacaaggggtctgtggaaatcatgagaaaggacttgaatgacgcccgggacctgcatggccaggcagagtcagc

SEQ ID NO: 765251 - DNA, 100 bp, Homo sapiens
ctccttccttcctccccacccattcctttaaatccggagggggaaaaaatcccaaggtctgcaaaggaggaaaaggcttctcttttacatcgtactcagg

SEQ ID NO: 765252 - DNA, 97 bp, Homo sapiens
ccagccgctgttttgccggaggagcccctcaggccatgtggacgaatgtcagcagaacccaaggctctgtaaaagctacggcacctgcgtcaacacc

SEQ ID NO: 765253 - DNA, 100 bp, Homo sapiens
ttgctaatacccatctttactggcatcctaaaggaaaatcagaggctccttaaaaatatgttcaaaatcggtgatttttgaaccagattcaatatcccag

SEQ ID NO: 765254 - DNA, 88 bp, Homo sapiens
tgcgggcccgggccatggccgccgccgatgccgagccctgaccctctattctgcaccctgtgagccaccgagactgaaccaaacccag

SEQ ID NO: 765255 - DNA, 75 bp, Homo sapiens
atcaagagtctgccgtacatgtgaaaatggtgcaggcctggggtagtctcctgtctggacagagaagagaaaaat

SEQ ID NO: 765256 - DNA, 75 bp, Homo sapiens
ggcaatggcggcgctgacgagaggtgacagtgctggctacaatgctatccagccggtggtggccaagttcctggg

SEQ ID NO: 765257 - DNA, 89 bp, Homo sapiens
cggcggaggacgcgcccggcgcccctgagccggccgagcggcgacggaccgcgaggttgtggcagcactgcctgaaggtatgagaccag

SEQ ID NO: 765258 - DNA, 100 bp, Homo sapiens
tttctcattatttgccagatctgcagagatcaaaacaagccctccaggaactcacgaactttatattgctgttggaatatctggagccatccaacattta

SEQ ID NO: 765259 - DNA, 74 bp, Homo sapiens
acgacatcccggaagccgaaaaatggcatcacgttgggtggtttccatttagaccgaggccggttcagaacttc

SEQ ID NO: 765260 - DNA, 98 bp, Homo sapiens
tggagctcacgtttattcaacaaaagtgaagtcactgcttttgctgtcttggatcaagaccagaaagaaattattgataccaatggagctggagatgc

SEQ ID NO: 765261 - DNA, 82 bp, Homo sapiens
gcccacgctgttcaatccgttcctgctgtctctgggggtcctcaggtggcgaaggacctcctgccccccgaggtctgcagtc

SEQ ID NO: 765262 - DNA, 74 bp, Homo sapiens
ccaggttttcgacccacggcgctccgccgagagggtgacctctctgggcaaggactggcatcggccctgcctga

SEQ ID NO: 765263 - DNA, 80 bp, Homo sapiens
ccgaggcaccgaggcactcagaggagattcctggtcgggtggcttccagtggtcttcagtctgtcgtgcaccgatgagaa

SEQ ID NO: 765264 - DNA, 82 bp, Homo sapiens
gaaggtctcacctgaggtgaaccttcgaccttggacttctcagcctccagaatgagcccgcagcttcatctcccagctcaaa

SEQ ID NO: 765265 - DNA, 100 bp, Homo sapiens
tactaccactatgggaagttcgcagaaaagtatgacagcgaccgcacagtgagagatgctgcaatattggctatagtggagatttatagacatgtgggag

SEQ ID NO: 765266 - DNA, 100 bp, Homo sapiens
ggaagatgtacgaatccaaaatgcaatcaatatagctcagaaagtctttatctcttgcaaggttcagtagtggcagatcatgactacattggattgcctg

SEQ ID NO: 765267 - DNA, 101 bp, Homo sapiens
aacgctgcctttgctttaaaacagtattacttgcgggtttcccaaactctcgattgcctcttgcaagcagatgacctgggagcaaatgttatggcagaacg

SEQ ID NO: 765268 - DNA, 74 bp, Homo sapiens
ccagtgttcaccatcctggccccggaagcacagaagctgtaatgttattaaacaaagcaatgtatccagatcac

SEQ ID NO: 765269 - DNA, 101 bp, Homo sapiens
gccaatctctgcttgaaaggagaagacttggattctcaggttgcaaaagcttctcatttcagagagatgccaggatcctaagtgcctgccaaacttaccaa

SEQ ID NO: 765270 - DNA, 97 bp, Homo sapiens
ctttcccccctcagtttctgaaatgattctccagaatttctcctcataaaaaagcattcgacttaagagtctcaatgccaacacagatataacttcc

SEQ ID NO: 765271 - DNA, 74 bp, Homo sapiens
ctgtgtggacctaattgactgcttgtcccagaagcaatttaaggagcaggtggtgaaggtgggtctggttgaag

SEQ ID NO: 765272 - DNA, 83 bp, Homo sapiens
gtgcccttcatcccagtcacccaggcctccgcttctccggcctccctgctcttaccgggaggctatgactttgcagccgtcct

SEQ ID NO: 765273 - DNA, 51 bp, Homo sapiens
ggatgattgtctctcggcggcggagtcgggtgaaaaggtggaggggctaca

SEQ ID NO: 765274 - DNA, 50 bp, Homo sapiens
cctgatggcctcagaggaggaggtggagcgaatcaaggagcgtgtggagg

SEQ ID NO: 765275 - DNA, 100 bp, Homo sapiens
agatcgaggagatggagaagatgctgaaagaggctcatgcagagaagaaccggctcatggagtcgagggccaatccggagccggcaacaactgggcaaag

SEQ ID NO: 765276 - DNA, 90 bp, Homo sapiens
cgtggatctagagctgaagaagtcgcagtctagcagaagcttgttcagatggggatgttaatgctgttcgtaaattgctagatgaaggca

SEQ ID NO: 765277 - DNA, 82 bp, Homo sapiens
ggagggagatccaggaggggctgaacacccgcatccaggatctctacactgatcataaaaggattcctctgtactagcacac

SEQ ID NO: 765278 - DNA, 87 bp, Homo sapiens
ccctgtcaagaaggtgccggtggtgcgagtcttcggagcgaccccggcagttcatccatgagctcggatttcccacattacaacttc

SEQ ID NO: 765279 - DNA, 80 bp, Homo sapiens
gagtttcatgaagagcccaaaacctattacgaactcaaaagtcaaccgctgaagagcagctactctccagagagaccgga

SEQ ID NO: 765280 - DNA, 100 bp, Homo sapiens
agctaccatcagatggaattcccctgcaatattaacgttttcattacttcggaggggaggtcactcctcccggaagacaatggtgtaaaattggttgatc

SEQ ID NO: 765281 - DNA, 98 bp, Homo sapiens
tggtacctgcggtagtagcctggctttgctctgacggcgatctcgcggcccgagagccttttatagtttcaccagtgatcattaaagaatgggcagct

SEQ ID NO: 765282 - DNA, 101 bp, Homo sapiens
gacctccctcacctggtcaatgcagacggacagtacctcttctgcaggtactggaaacccacaggcacacccaaatatttggagttcttacaacatggcag

SEQ ID NO: 765283 - DNA, 50 bp, Homo sapiens
acgccgtcgcggtggactgcaagaaagaatcttcaagagggagacatagg

SEQ ID NO: 765284 - DNA, 90 bp, Homo sapiens
gcggcgtctccggggaaagccgtggccccgagggcggatccgagcgtgttcctgccatccagtaggatcagctgtccttcctgccaactc

SEQ ID NO: 765285 - DNA, 113 bp, Homo sapiens
ggatattaaaccatttcttccctttcctcttgacactgcagctgcagtcaacctcttccccaatttcaatgcggctcagcttgtcaatcggaaacagaaattagagtctgtgg

SEQ ID NO: 765286 - DNA, 100 bp, Homo sapiens
gtgctgaagcctttaaatgcagcatctgcgatgtgaggaaaggcacctccaccagtgtcccagaagcttttgttgacaattccagtttccgaacaaaaca

SEQ ID NO: 765287 - DNA, 74 bp, Homo sapiens
cgggctctcggggcaccacagccatgtgctcgttagcgtcaggcgctaccgggtactgcgttcaacagatcctg

SEQ ID NO: 765288 - DNA, 100 bp, Homo sapiens
aagcacaaaagttatcaaacccggtggaccatatgtaggttacctgtgcatgacagatgagtggttctctgagtatgtctacgaagtggtggtggacagg

SEQ ID NO: 765289 - DNA, 98 bp, Homo sapiens
agaaagaagatgagacaatcacaaggcccatcccctcggaagaaacatccacaggaccttttggagagcgagacgatcaacaggtgtttatccagaaa

SEQ ID NO: 765290 - DNA, 100 bp, Homo sapiens
ctgacaggttctggatcctggaacaacatgctgaaactgggttatggtggagaattcagactttaccccctcacaagtaggatgtctctttaccttcctt

SEQ ID NO: 765291 - DNA, 88 bp, Homo sapiens
cgataaatccctggctactagaactgaccaggtcccaaaggtaaccctggtctccctggacagccaggtcttataggacctcctggac

SEQ ID NO: 765292 - DNA, 97 bp, Homo sapiens
tggtcatgaaagagattccttgcagagacagctcaacacggcacttccacagccattggaaaagaagtttgttcgagtttcaggagaagcaactatt

SEQ ID NO: 765293 - DNA, 76 bp, Homo sapiens
gcaaatggaagaacaaatatgtctgtcaggtgctcctcgcctgcttgcagatatcagaccccagctcatctcagac

SEQ ID NO: 765294 - DNA, 100 bp, Homo sapiens
cacgaatctgcccacccctcctgtaacccagcctgtttcacttcttggctgtccggagtacacatggcttagaagttccattaagccataagggaaaact

SEQ ID NO: 765295 - DNA, 74 bp, Homo sapiens
gattgatcatgagcacagaaaggtaaaagttttgtttgtgagaaacttggctactacggtgacagaagaaatat

SEQ ID NO: 765296 - DNA, 100 bp, Homo sapiens
actccatgccactggaactcaggagcgcaggatgtacagttacccagcacgtgtacctcctcctcctcctattgctcgggctgtagtgccctcgaaacgt

SEQ ID NO: 765297 - DNA, 76 bp, Homo sapiens
atgctgatggcgataagtcattaccacaggaaactactaaagttcctggggaagcaaagtagaatttcataagaac

SEQ ID NO: 765298 - DNA, 76 bp, Homo sapiens
cggtttacctattacacgatacttgatatatttagagaaatgttctttactaccatggaaagccaccttctgcgct

SEQ ID NO: 765299 - DNA, 90 bp, Homo sapiens
tactctttgaatgtcacatacaacattgtggatatcaagcctgccaatatggaagagctaacagaggtgattacagcagcagaatttcat

SEQ ID NO: 765300 - DNA, 100 bp, Homo sapiens
atggatccatttctcctattgaggagtcaacgatgtttggatctggccgagaacataactttacacgacccaatgagaaaggagagtatgaggtggcaga

SEQ ID NO: 765301 - DNA, 98 bp, Homo sapiens
tatggttggcatggaattgaatttcatctgtctgtgggaattgtaagcaaggctttcatagaaaccatgttcaccagtaaagcccctgtggaagaagc

SEQ ID NO: 765302 - DNA, 98 bp, Homo sapiens
cgctcttccccacctgcccggtgcccgaggaggcagccaagctcgtggcctgcctctgcgtgccaggtcaatggccagcaaggaggggggtccgagcc

SEQ ID NO: 765303 - DNA, 75 bp, Homo sapiens
tattggtctcctgctcctagagtttggaagccgaggcaccatcactgatgctcccggctttgaccccctgcgaga

SEQ ID NO: 765304 - DNA, 74 bp, Homo sapiens
gggctctgttagtgcgcctctaagatggcgacgcctttggcggtaaattcggtagagacagggttttaccatgt

SEQ ID NO: 765305 - DNA, 75 bp, Homo sapiens
gatcaaccaccaaagtgggaaacattgaaatcaaggacttctccaggcctcggccgccccagaaggcactcccgg

SEQ ID NO: 765306 - DNA, 97 bp, Homo sapiens
gtcggccggggccgcttcaccacttacgaaatcagggtcaagttcacagacattgggaccttcgagacagtgtggcaagtcaagttctacaattacc

SEQ ID NO: 765307 - DNA, 83 bp, Homo sapiens
aaggattccaagtaactcttatttgaaggcaagctccagttgcagctgtgtttgcagggagtccacagttaatgggtgcgatt

SEQ ID NO: 765308 - DNA, 100 bp, Homo sapiens
ggcctccaacagcttacctgagccagccaagaagaggagtctcgctctcagtcaaaatctccaacgggaactcctgctcgtgtaaaatcggagagcaggt

SEQ ID NO: 765309 - DNA, 50 bp, Homo sapiens
tggcaaaggagaagtaacttttgtttgttgacatcggaatagtaacaagt

SEQ ID NO: 765310 - DNA, 78 bp, Homo sapiens
gaaatccagactgcatactctaaatttaaacagctatttctgatagatattgccgatgtttctgtcaaacagtgtcag

SEQ ID NO: 765311 - DNA, 100 bp, Homo sapiens
attatatgctggaatggttccttcttggttctacagccattgggatccagacatcagagggtgtgtgcctagctgtggagaagagaattacttccccact

SEQ ID NO: 765312 - DNA, 88 bp, Homo sapiens
gtttctctgctgcaccgacctcgacgtcttgcctgtgtcccacttgttcgcggcctatagccacacccactcgcccgggtctatggcc

SEQ ID NO: 765313 - DNA, 144 bp, Homo sapiens
gccaagtcagcaattctgtgagcagcaagaatggcacggtctgcctcagtccaccctgtaccctggttggcttcaggtcacatgttgctctggagaaccgagaagggtgagcagacaccaatcatgaccccaaacagcaagagg

SEQ ID NO: 765314 - DNA, 87 bp, Homo sapiens
tcatcttcatttattatattatcaaaactgagaggtatctactgtggattatgaagactatcagagtgtaacccgttttctagacct

SEQ ID NO: 765315 - DNA, 74 bp, Homo sapiens
gggtcctttatatagaagggagaggcttcagtttccacctggctgcggtcctgctgtccctggcttttatcact

SEQ ID NO: 765316 - DNA, 82 bp, Homo sapiens
cggctgctgtcggaggcttttgtcatcaaagtgccctctggtggtcagaagatgctgtgctgtctcgttaggatgaatggat

SEQ ID NO: 765317 - DNA, 96 bp, Homo sapiens
attctagtgtgtcagtattgggactatttagtccaaccatgaaaacagacattcagtcccctgaagctgaatatgtagatttgcttcttaatcctg

SEQ ID NO: 765318 - DNA, 82 bp, Homo sapiens
caagcaactttgagctgcacgttgcacaagctccggaccaaaatttaacagtgccatccgaggaaagattgggttgcctcat

SEQ ID NO: 765319 - DNA, 74 bp, Homo sapiens
tcgcagggaggatgtcgggacaccccggaagctgggaaatggtgttggggatgtcctttgcactgaccctgaac

SEQ ID NO: 765320 - DNA, 75 bp, Homo sapiens
ctgagaggctgctgttctaactcgctcccaggtccctcgccggctccctcggggcctccactgcagcgcagctgc

SEQ ID NO: 765321 - DNA, 110 bp, Homo sapiens
gtgacgggcatcctggtgcagctcctggtgcgtggcccagcctcagagctcttgtcaggatggtgaagctgttcatcggaaacctgccccgggaggctacagagcaggag

SEQ ID NO: 765322 - DNA, 99 bp, Homo sapiens
ggcacctgcgcgaagctggccaaagcctgcccagacggctcacctgtgcgggatggaacaaaaggaatggccaacctgctgacgggccccaaacggaac

SEQ ID NO: 765323 - DNA, 100 bp, Homo sapiens
tgcggtcaagatgctgcaaaacgtgactccccacaataaaaaacccgctacgagacctacgtgcagctgctggtggcccgcctgcactgcccctctgatg

SEQ ID NO: 765324 - DNA, 75 bp, Homo sapiens
ccgagtgctgctcctgtcattgtggccatggacggtgcatctgcagacgcagcaggaggtgaagctgcgcatgac

SEQ ID NO: 765325 - DNA, 83 bp, Homo sapiens
gccccagggatgctgagcctgcacaagtggaagacaatgcagatcttcgtgaagactctgactggtaagaccatcaccctcga

SEQ ID NO: 765326 - DNA, 76 bp, Homo sapiens
ccggtcttagtgaggagcagcttcaggagccaattacaggatggaggaagtctctgtcccacctggtgctctggac

SEQ ID NO: 765327 - DNA, 75 bp, Homo sapiens
cgcgggcagagcgcggcggcgcggactctgctaactggaatggcttattgtgcaagaaagtacacctggtcgggt

SEQ ID NO: 765328 - DNA, 50 bp, Homo sapiens
atctggacaaaggaacaggtatctcagtgaaatcaaatacattgcccatc

SEQ ID NO: 765329 - DNA, 75 bp, Homo sapiens
ccgctccggctgcaggcggaggagctgggtaactactccagacccccagcgtatagtggggtgcccagtgcaagc

SEQ ID NO: 765330 - DNA, 100 bp, Homo sapiens
tcttccaaaagcgcagaccacagttacatgtatggagaatggctggtctcctactcccagatgcatccgtgtcagcttcctgcttttccgaagccttccc

SEQ ID NO: 765331 - DNA, 100 bp, Homo sapiens
gctgacaaaaggcatggtgatccttcgggacaagattcgcttctatgaggaccatggtgaatccgggcagcagctcgcagccgcccccggtgacggccgg

SEQ ID NO: 765332 - DNA, 83 bp, Homo sapiens
ctcggcgggagccctcgcgacgcgcccggcccggagcccccagcgcagcggccgcgatttcaagttccacctataaagacagg

SEQ ID NO: 765333 - DNA, 141 bp, Homo sapiens
tcgacctccccgtgctcaagtgatcctcacacctcagcctcccgagtagccgcgatcacaagtctctgaaagaagatgaatttggctgagatttgtgataatgcaaagaaaggaagagaatatgcccttcttggaaattac

SEQ ID NO: 765334 - DNA, 75 bp, Homo sapiens
tgtcaagcgaagccttgaaaaagctgccctgagacggtgtcccgccgaaagacggttacctggcacgctggccac

SEQ ID NO: 765335 - DNA, 133 bp, Homo sapiens
ctcattgtagcctcaaactcccaggctcaagcagtcctaccatgtcagccttcccagtagctgggaccacagtggcccgttgccgacaagccctggtgccgcgtgccttccatgcttcagctgtggggctaag

SEQ ID NO: 765336 - DNA, 50 bp, Homo sapiens
ttgggtcctctgaggccccttgaccagatctcacattcttgaaggtggca

SEQ ID NO: 765337 - DNA, 100 bp, Homo sapiens
tctcagtccgaccgggctagctttggcgaggggacggagccggatcaggagccgccgccgccatatcaggtggatctttaactcaagactagcatgaaga

SEQ ID NO: 765338 - DNA, 75 bp, Homo sapiens
gaaacatgaaaacatcgtggccctgtacgacttccagaggaatgtcgggtcctcacaattcaaaacaattgaaga

SEQ ID NO: 765339 - DNA, 50 bp, Homo sapiens
gctgtgggctggcactgtggtcgcatcagaaactggcgatggaatatgag

SEQ ID NO: 765340 - DNA, 51 bp, Homo sapiens
cccaggagaagccgcccaaagaactggccccttcacagatgtagtcactac

SEQ ID NO: 765341 - DNA, 83 bp, Homo sapiens
cttggaatgcagcttttttggaatcttctgctaaagaaaatcagtgctgttgcaaatattctggtgaatgaacacagaatcag

SEQ ID NO: 765342 - DNA, 100 bp, Homo sapiens
ggaagcccgggaccgtttaaaaaactggagaaggagcgctcctggcaccagcaggagctggcaaaggctctggagagcttagaaagggaaaaaatggagc

SEQ ID NO: 765343 - DNA, 73 bp, Homo sapiens
aggggctggaacacctcgccaaagcagagaaatagaatatgaagacaaggctggaagacctagcaagccaccc

SEQ ID NO: 765344 - DNA, 82 bp, Homo sapiens
tcatgctctacatccccatagaggtcagcccaaggccaaccccactgtcactctgttcccgccctcctctgaggagctccaa

SEQ ID NO: 765345 - DNA, 114 bp, Homo sapiens
cgtcgcgcccgggaggaaggaacgaggcaaggagctaaagcagcgtgcgttcagccctgggttgagccccatatgggggttggcaggcagcagagaggcccctttcaaggtgtt

SEQ ID NO: 765346 - DNA, 100 bp, Homo sapiens
gcaatcctgtttttaggagatacttaaataagattttaattgaagctggaaagcttggacttgacttcagggccacaggtgctgccaagatgctccaggg

SEQ ID NO: 765347 - DNA, 98 bp, Homo sapiens
ctgagtcgtcttggtcccaggagccagtagtgaaggcaacagtctgcccacctgtggacaccagataaaataccatgaggagtttgagaagagccgca

SEQ ID NO: 765348 - DNA, 100 bp, Homo sapiens
ggagaaacaagtgaccaacagttgaatcaaagtatggacacaggagaagttgccccagtgcaaggcactgcattcgacctgagaaagccagtggagcttg

SEQ ID NO: 765349 - DNA, 100 bp, Homo sapiens
tttagcctcaccacagaggagaaagtccccttcatgatgccttcttctgtagagtgggcgctttgcagaatacgtgttgaatgaaatcactgatctagga

SEQ ID NO: 765350 - DNA, 90 bp, Homo sapiens
gcgtgatctgctcttccaagccctgggccgcacctacaggcctattccactagaagcaagatggctgaactcaatactcatgtgaatgtc

SEQ ID NO: 765351 - DNA, 96 bp, Homo sapiens
tcaacgacgaggacctgacgcaggaatggcggcgctagatagtaaggcatcagggaagatgggaatgcgagctgtagtctattatatgactaccac

SEQ ID NO: 765352 - DNA, 99 bp, Homo sapiens
ccagcaatgattacttcagaattaccagtgttacactggagaatgctggaggagaccttaaggatggccaccaccactatgaaggagctgttgtcattc

SEQ ID NO: 765353 - DNA, 87 bp, Homo sapiens
aggaagcccttccgcggaccgaaagaaaaatggctacaaacttcctagcacatgagaagatctggttcgacaagttcaaatatgacg

SEQ ID NO: 765354 - DNA, 82 bp, Homo sapiens
gggagctgcctaggccgggccctgccagggagcaagtctgcatcgcagaggccagggccaagactaaggggctgcagagcgg

SEQ ID NO: 765355 - DNA, 74 bp, Homo sapiens
tctgtggctggattgtcttaggaccataccatgacaagagttgatctctctaatgtattagatcttcatgcctt

SEQ ID NO: 765356 - DNA, 83 bp, Homo sapiens
tgaagatcctggtgtcgccatgggccgccgccccgcccgttgattgtcactgctgttccaagggcacacgcagagggatttgg

SEQ ID NO: 765357 - DNA, 100 bp, Homo sapiens
gttgctgcccttccggagtccgccccgtgaggagaatgcatccagttttggatgaaccaatagcagaagctgtctgtattatagctgacatggataaatg

SEQ ID NO: 765358 - DNA, 100 bp, Homo sapiens
tgaagcctgaggtctccccaacgcaggacatcaggacttatggagcaaggatgactgacacaaacacaaaaatcattctgcctgttgaatgaatcataaa

SEQ ID NO: 765359 - DNA, 96 bp, Homo sapiens
aacaagactggggctgctcccatcattgatgtggtgcgatcggaacaagaccattttgttttactttaacctgttacgctgtaccagtccctccgt

SEQ ID NO: 765360 - DNA, 98 bp, Homo sapiens
tcctgctctgagataaaaatgaacaagaaaggcgctagaattgattttaaaggattataccttaaccatgtattttcaacaatattggagagataaaa

SEQ ID NO: 765361 - DNA, 75 bp, Homo sapiens
ggtgcccgaggaggcagccaagctcatggcctgccactgcgtgcgccccagcacccgcagagcagacactgcgat

SEQ ID NO: 765362 - DNA, 100 bp, Homo sapiens
gtacgagtgggaatatgacgaagaggaggagaaaaaccagctggagattgagagactggaggagcagaagatggcagtgaacgtatactcaacgtcagtg

SEQ ID NO: 765363 - DNA, 92 bp, Homo sapiens
ctcaaggacaacctcggcctgagacaccggaggaccgggttttaaaatcaaagatgggaaaatcggagaaaattgcccttccccatggccag

SEQ ID NO: 765364 - DNA, 123 bp, Homo sapiens
agtgacctttgcatctgcctgtccagccagcatggaaccaaagcggatcagagagggctaccttgtgaagaaggacccagatgatgtggtaccagttggccaaagaagagcctggtgttggtg

SEQ ID NO: 765365 - DNA, 100 bp, Homo sapiens
aagagggtagaagacatacttcaggcattggtggtgtgtccaaatctgctgagggcccagataaaggccactgtgaaacgcaaggtatatgaagattctg

SEQ ID NO: 765366 - DNA, 75 bp, Homo sapiens
cgaaggaggaggcgttgccggagaagtatatcagagaattccctggtagcaatggacttctcaggccagaaaagc

SEQ ID NO: 765367 - DNA, 100 bp, Homo sapiens
ctgtgctgtgccgcgcagttaggcagcagcagccgcggagcagtagccgccgtgggagggagccatgaagcattacgagcgtgtccggagcggtgactgg

SEQ ID NO: 765368 - DNA, 90 bp, Homo sapiens
cgcggccgagagtgcagcgagagttcaaagaaggacgcagagccagccacacagccccacaggtcctctttagccacagggaacctcctc

SEQ ID NO: 765369 - DNA, 100 bp, Homo sapiens
cctcctgcagcagctgtgtcccctatgcaggaagtccgaggcagcgggggccttccaggcccaggacgagggacggtcacagcagcccagccaaggccag

SEQ ID NO: 765370 - DNA, 100 bp, Homo sapiens
ttccgcgcgggactccggggcgccacgggggccatgtaagcagggtgaagaaggtgaatacagtgaagaggaaaactccaaagtggagctgaaatcagaa

SEQ ID NO: 765371 - DNA, 75 bp, Homo sapiens
cgcagaagtgggttacaatagggacaggttgccttctgatttctgcatcattccagcccttctctgggcagccag

SEQ ID NO: 765372 - DNA, 95 bp, Homo sapiens
cttcagccatagaaatgcagttgcgaagagtattacatgatattagaaactcactgcagaatctttcacaggtgatggcccgctccctctcccca

SEQ ID NO: 765373 - DNA, 98 bp, Homo sapiens
atttcctgaacacaccattatgtcccttaagctcctaggatttttagatgttgaaaatactccctgcgcccggcattcaatattgtatggttcattag

SEQ ID NO: 765374 - DNA, 101 bp, Homo sapiens
gggtgcgccggcagaggatccagtgttcaccatcctggccccggaagcttcggaaccaaaaagaagcttcccagagccggggccaggagccccaagcgccc

SEQ ID NO: 765375 - DNA, 90 bp, Homo sapiens
acgccatcagcaagatggaccccaccgccaggtcagagcagcccaccatgggatggggagggggtggaggctgcaccccgcgcccaccca

SEQ ID NO: 765376 - DNA, 75 bp, Homo sapiens
cagcgcattgcctcacagtcacgccgcagcatggatgtgtcgcgccagacatggaggatgaaaaggaagatagta

SEQ ID NO: 765377 - DNA, 98 bp, Homo sapiens
acttcaacggaaactagctcatctgtagagactgatttgcaacccttccgggaagccatagctctgcatgaatctgaattatccagaacagaaagttg

SEQ ID NO: 765378 - DNA, 82 bp, Homo sapiens
ggtaccggctgggccggaagatcggcagcggctccttcggagacatctatctcggtgtagaatgagccaaggagactcaaac

SEQ ID NO: 765379 - DNA, 104 bp, Homo sapiens
tggaagtccgtttcgtgagcagcgccaagctgcataataaatgtgcttctcatctaaaacctgaatgtgactgtggacctttgaaggaccatattttaccaccc

SEQ ID NO: 765380 - DNA, 98 bp, Homo sapiens
aaaaagttctgggtgatactgaaggggtcgtcactgtactggtatagcaatcaaatggatctgtctggctccattgatgacctccccacgggaacgga

SEQ ID NO: 765381 - DNA, 83 bp, Homo sapiens
tgccaagctgtgcagaacacattccagtttttattagaaaactccagcaaggagaccaggcacctggatgagatgaagtcggc

SEQ ID NO: 765382 - DNA, 131 bp, Homo sapiens
aaggccttcatcagggactaccatctgagccgccacattctgactcacacaggagaaaagccgtttgtgggcaagattcttgccaagagaattaatgtgcgtattgagcacattaagcactctaagagccg

SEQ ID NO: 765383 - DNA, 75 bp, Homo sapiens
agccaatatggaattgccaggttcttcactgaatacttcttacagtacatttctagtgaagtaaacccccccagc

SEQ ID NO: 765384 - DNA, 100 bp, Homo sapiens
gtgcccctgcccgcgaccatggcctcctccgaggtggcgcggcacctgatccagatgtaccagctctcgaggttgcttcatgattaccacagagacctct

SEQ ID NO: 765385 - DNA, 83 bp, Homo sapiens
ggaaaatccgcaagaccatcatgcaggtaactaggatttctacctcaaccgcgagacctatgcaaggacggtgtggaccaact

SEQ ID NO: 765386 - DNA, 74 bp, Homo sapiens
ggacttcccgtccgcggcgtggagggatcagtgaatgcttgtgaaaagacctcatttatgtttctgcggcaaga

SEQ ID NO: 765387 - DNA, 100 bp, Homo sapiens
gtagacattgtctcccaagacaacttcctcaccagcaccttacagggcatcccggaggcaggcaaggccttgctgggcctggtacaggatgtcattggcg

SEQ ID NO: 765388 - DNA, 105 bp, Homo sapiens
agcttcgggtaactctcacagtggaagagttctaaagttcctgttgcttcagacaatggatgagcaatcacaaggaatgcaagggccacctgttcctcagttcca

SEQ ID NO: 765389 - DNA, 48 bp, Homo sapiens
gctgaatttgctttgtgatacctgcatttcagcaggaacttgatgcaa

SEQ ID NO: 765390 - DNA, 83 bp, Homo sapiens
aagggtatctgatcaagccaacaacagtgacggaatgcctccatacatccttcaagatggtcagcaaggccagcagtccacag

SEQ ID NO: 765391 - DNA, 102 bp, Homo sapiens
catggcggccgccggggctgcggctacacacctaggatgaagcctgctgggagcgtgaatgacatggccctggatgccttcgacttggaccggatgaagcag

SEQ ID NO: 765392 - DNA, 82 bp, Homo sapiens
acgaggaggaagcgagcagcccagacagcggccacctcaaggttttaaaatcaaagatgggaaaatcggagaaaattgccct

SEQ ID NO: 765393 - DNA, 97 bp, Homo sapiens
gaagacaaggttaataaagctgccaaggcagtcgatgatgtgaagaaaggttacatcaaagcagaagaaaagtcctatcaattacagaagctatacg

SEQ ID NO: 765394 - DNA, 83 bp, Homo sapiens
tgcgctgtgatgcctgcagagctgtggcttaccagaacgtgctgagtttatgggatatttacactctaactcctgtatggaac

SEQ ID NO: 765395 - DNA, 85 bp, Homo sapiens
atttccagaaggaactgacatgatctgacttaaaaaggcatctggtgtcgaaggctcagatattcctgatgatggtaaactgata

SEQ ID NO: 765396 - DNA, 100 bp, Homo sapiens
ctttcacgatccagcactgtggccagcctcgacacagattccaccaaaagctcagacagcatcgcacagaattattttaaaaaaaagcagtgatccaagc

SEQ ID NO: 765397 - DNA, 100 bp, Homo sapiens
ctggagaggggaaaggatgccacacttcagaagcagcactttcatttggacccgtggatacccattgaacagatgcttgaaacctgcaagtaatcttcag

SEQ ID NO: 765398 - DNA, 80 bp, Homo sapiens
tccagcctgcggagcctgtggggcaggagcgggacggtatgcgggccatcctggggtcctacgacagcgagctgaccccg

SEQ ID NO: 765399 - DNA, 90 bp, Homo sapiens
gcatgaatggagcaaaatggcggatcatgtgcaggagaacatattgtgatgttcgtgcctcagagctaaaactatgagtgaatttcggat

SEQ ID NO: 765400 - DNA, 90 bp, Homo sapiens
tcaaggccaagtatccgccagtcaataggaagtacgagttatcagatgtagaaggtggtgatggactgcagctcagaaaggaacatactc

SEQ ID NO: 765401 - DNA, 90 bp, Homo sapiens
gttttgaagcgttcgatcttttaacatcacatcacatgctgacagcacaagaaggtggattctgaagagccagtctttgaggctgtcatc

SEQ ID NO: 765402 - DNA, 100 bp, Homo sapiens
caggtgaagggccccgtaaattggaaggatgcacaagttccaaggttacgtttcagtaaaaagatggcctatcagaaggtccatgcagatcaaagagctc

SEQ ID NO: 765403 - DNA, 75 bp, Homo sapiens
gtctgcttcgggcctctggaatttagcgctcgcccagctagccgcagatatgatgcttcctggtgtgtttagtgg

SEQ ID NO: 765404 - DNA, 100 bp, Homo sapiens
gctgcctgtcaccaacgggaagggccggcccgcctccctggccggggcgcagttcggaggttcagaagtcacctgcaccggtgcccgtgacgtacgagct

SEQ ID NO: 765405 - DNA, 50 bp, Homo sapiens
ccggggacttggggccgcagggaggaaggtgctcgggtcttcggggcact

SEQ ID NO: 765406 - DNA, 75 bp, Homo sapiens
tcacagtttgctctgctcttccaacaccagtggaagatgatcacatcccagttacatcatgctgatgacagcttc

SEQ ID NO: 765407 - DNA, 74 bp, Homo sapiens
cagtggtcgcttcttctccttgatcaaaagtggaccaggtacaggacatagttactggtaaccctacagtcatc

SEQ ID NO: 765408 - DNA, 75 bp, Homo sapiens
cagctacacatcttgaaagagaagctcttcctgtgagtgtgaacacagcaggtgtgagatgtcatcttggaagac

SEQ ID NO: 765409 - DNA, 98 bp, Homo sapiens
ggggcctttgtccgtgttcggtgaccgcagcactggggaaacgatccgctcccaaaacgccctactgccaataaagggaaaataagagatgctcatcg

SEQ ID NO: 765410 - DNA, 75 bp, Homo sapiens
agtcctcaatctccttttccttggctacccgattttttatcaagcagaaatgcatcgaacaacgagaatcaagat

SEQ ID NO: 765411 - DNA, 100 bp, Homo sapiens
aaggagcagttgctagtggccatttacaggaatcagccacttcagttcaggttggaaaagagactgttcaaaccactgaggatcagattttgaagagaga

SEQ ID NO: 765412 - DNA, 100 bp, Homo sapiens
tgttgtcattgcctgagcgcgtcgagccagacagactgctgagcgactatattgagaaggaggtaaaggtgggtgtcccagagcaggcggctgcaacgag

SEQ ID NO: 765413 - DNA, 100 bp, Homo sapiens
aaatcatcatgctcaacagacgctacctgagcttcagggtcattaaagttctaatagaagactgtatcccggtactgaagaggtacgccaaagaagggag

SEQ ID NO: 765414 - DNA, 100 bp, Homo sapiens
tgctgcctgtgttcacgagggcatatatgaagaaggcatttctattttagaaagcagttcgcaaggtgattgagcactgcagtaactttaaagaggagaa

SEQ ID NO: 765415 - DNA, 100 bp, Homo sapiens
tttagacaactggacaaatgcagtattgagagggaccagtataaaagtgaggttccagctggggtgagagcagctcagggagaataacaaattggcttgt

SEQ ID NO: 765416 - DNA, 100 bp, Homo sapiens
ccagaacgctaatttccagaacccccgctgtgagaacaccccactcattgggcgcgagtccccgccgccctcagtcccgagcagccccgcccaacatgga

SEQ ID NO: 765417 - DNA, 100 bp, Homo sapiens
caatcatgggaatttccaaggggattcaaacttcaacagaatgtggcaaccaggtttgtccgatatgtgcctcgatgccctggggagaccccaactaccg

SEQ ID NO: 765418 - DNA, 82 bp, Homo sapiens
agtccgagaactggctgaagccgatgaacagcgccgggatccaggtgccagaaccctgtggagcatcatgaactgggaagag

SEQ ID NO: 765419 - DNA, 50 bp, Homo sapiens
gctggctgcccttgtctccttttgtggggatggtggcagatactctggct

SEQ ID NO: 765420 - DNA, 100 bp, Homo sapiens
cacttcgcggcttcttcatgctttttcttctcaccatttctggccaaaactacaaacaagacttcgcaggctattttggcattctgctggatatatgttc

SEQ ID NO: 765421 - DNA, 91 bp, Homo sapiens
ctccattggatttaaaagacagtcctcgtcagcactgactttcagctatggaatcgacctgcctagagctggaacgttacctccagagcga

SEQ ID NO: 765422 - DNA, 82 bp, Homo sapiens
gaatgtctttcctaccatctaaaatacgaaggtttctggctggtgatgcagccaacacgaacggttgtcatgtgtaacacaa

SEQ ID NO: 765423 - DNA, 50 bp, Homo sapiens
tccactggattgggaaagaccatggcagtgtaaggcaaacattggtgggc

SEQ ID NO: 765424 - DNA, 75 bp, Homo sapiens
cagccgcttccgacagaactgaatgtaacttcaccgagtaaagaggagtggggcacacagtatgatcaaaatcac

SEQ ID NO: 765425 - DNA, 100 bp, Homo sapiens
gagatggaaacctcatagcagctgcctgccagaatggaagcatacagatctgggaccgaaatttgactaatgacaattctaggtacaacttttggcatgg

SEQ ID NO: 765426 - DNA, 94 bp, Homo sapiens
ggcagaaactgaacttgctggagacaaaactgcagactattagaagacacattagtgcagaagcttccaggctgtagagccctgcttcccttct

SEQ ID NO: 765427 - DNA, 83 bp, Homo sapiens
cttagatggcttagacacaccgtcagagaatagtaatgagtttgagtgggaaggcacagaaaactgaatctgtagataacgag

SEQ ID NO: 765428 - DNA, 100 bp, Homo sapiens
aaaacactttctgaagctcatgaagactgtgtaaataatatcagaggggtgtttgatgcttccctcaaaatggctggcttctatggattgtatacctggc

SEQ ID NO: 765429 - DNA, 83 bp, Homo sapiens
aagctgtatgacattgatgtggccaaggtcaacaccctgattcgtagtttatgccaacgtgacttcattcatacagatgaacc

SEQ ID NO: 765430 - DNA, 88 bp, Homo sapiens
tctgcaatcctggacatgaaatgtgatctcttaatgagggacaacctgtttgaaataataacaagctccaggaccttctacgtacagg

SEQ ID NO: 765431 - DNA, 102 bp, Homo sapiens
gtgcggggtgcgtgggtgcctggagatgaagctggaaaggtttttcgttggaatatacgttgcacatttatggcgattctgagtgtgagggcagacttctgc

SEQ ID NO: 765432 - DNA, 75 bp, Homo sapiens
caatccctccgtatgcacatgtgggtagaggacgtgttagacaagttcatgagcactcctggaagcctgcacttt

SEQ ID NO: 765433 - DNA, 90 bp, Homo sapiens
aatgagggagttccaggagattcaaccaggagttctggggctgctggtatggacgcttattgctggaactgagtacttccgggtccccgc

SEQ ID NO: 765434 - DNA, 90 bp, Homo sapiens
gaggaacggcagtgatcacacgtcggctgctgggaagatctggattctcgtttcagagcaccaagctatggatcatcatggagtacctgg

SEQ ID NO: 765435 - DNA, 82 bp, Homo sapiens
cttcatagggacagccgcccctggtgcacacaccctcgtattctcctgcccttccccaggctggtccacctggcagtgattc

SEQ ID NO: 765436 - DNA, 90 bp, Homo sapiens
atctgcacaggaacttcattatccacaggtagtaagcattaataatgtctttcatctttgagtggatctacaatggcttcagcagtgtgc

SEQ ID NO: 765437 - DNA, 102 bp, Homo sapiens
aaaagttaaacccaggaagctttggatcagacttttgtgttgcagttcgggattttttatcaagcagaaatgcatcgaacaacgagaatcaagatcactgag

SEQ ID NO: 765438 - DNA, 83 bp, Homo sapiens
cgcgggagccacgcagaggacgccggaacaccctggaagccgagaaatggtggaaatgagttctcaacagtttcctcggttag

SEQ ID NO: 765439 - DNA, 100 bp, Homo sapiens
cttattgcctgttcagtactgtgggtgatatttgcctttagtgcactcttctccttcacagtaaagtggctgtctgcagcttctcctgtcatcggaaatg

SEQ ID NO: 765440 - DNA, 75 bp, Homo sapiens
acaacgaggacgccttccagcacggcatctgctttgaggccaagggaattatgcaggtcgagggactactggaat

SEQ ID NO: 765441 - DNA, 75 bp, Homo sapiens
ctcaagttgcaaatgtaaacctgttccacttttagagcttgctgaaggggtaaatattgggaagatggattcacc

SEQ ID NO: 765442 - DNA, 95 bp, Homo sapiens
ctgcatcgggagaaaacaagtccaaggatgaatcccagtccctgttacggttcctccaggagtgatccaaaatggagcgcgggtcctgagccgag

SEQ ID NO: 765443 - DNA, 50 bp, Homo sapiens
aaaaatttcaggattggtactacaagatgcagacaatctctttgaacatg

SEQ ID NO: 765444 - DNA, 141 bp, Homo sapiens
atttaaagaagcattaatactcatcttgtccagaactctgtcaaatgaagaacactttcaagaaccaggatgtacagttacccagcacgtgtacctcctcctcctcctattgctcgggctgtagtgccctcgaaacgtcag

SEQ ID NO: 765445 - DNA, 74 bp, Homo sapiens
gagagagggacactaccctcgcttagccattgagacccagagcagcagttctgaagagatagtgcccagccctc

SEQ ID NO: 765446 - DNA, 90 bp, Homo sapiens
cgctgggagagaggtacctctccttttccctctccctttccctaaggcttatggtgaaggctctggtgctgattgtagacgccatgtcca

SEQ ID NO: 765447 - DNA, 101 bp, Homo sapiens
ccaagtatttcaatccttgctatgccactgctaggttaaaaccaacattcatcagcaaggctgccccgggagacgctggccttcagggaggagctggatgt

SEQ ID NO: 765448 - DNA, 100 bp, Homo sapiens
agaaaaggaaccctggcctgagaaaatgacagatggcgagacctggacaggaaatgccctcttcagattgaccaaccgagcaccagcatctgggaatgcc

SEQ ID NO: 765449 - DNA, 108 bp, Homo sapiens
gggattaaaggctagtctcaggctggggatggctcctgtctatttcttctctctcagagactgcagaaaccctccgtaactctaggtcagagcgcactaaaatgagcc

SEQ ID NO: 765450 - DNA, 83 bp, Homo sapiens
ctccgaccggctgaggcggcgcggcagcggagggacggcagtctcgcgcgttacagaatgtctgaaggggacagtgtgggaga

SEQ ID NO: 765451 - DNA, 100 bp, Homo sapiens
aagtagcttggcttgtagtggaaaaaaacgagaggcatttcatccttcatgaagccattcaggattttgaattgcatatgagtgcttggctcttccttct

SEQ ID NO: 765452 - DNA, 50 bp, Homo sapiens
gcacccccagcagccaccagcagatttcaggtatgctgctgaaagtggga

SEQ ID NO: 765453 - DNA, 141 bp, Homo sapiens
tttaaatatgacggctccaccatcgtccccggcgagcagggagcggagtaccagcacttcatccagcagtgcacaggtactccaaagattcaggtttactcacgtcatccagcagagaatggaaagtcaaatttcctgaat

SEQ ID NO: 765454 - DNA, 100 bp, Homo sapiens
cccacccattcctttaaatccggagggggaaaaaatcccaaggtctgcaaaggtacgccatcccaccagagcacggcaagcgcctggagcggctggccat

SEQ ID NO: 765455 - DNA, 127 bp, Homo sapiens
gaactcatcgcatcccaaggcagcctattccatcatggatgagctcaaagtgtttgaaagttctgctttatcaacctgccgagtgcctgcgattgcaggcgcgcgccgccacgcctgactggttttc

SEQ ID NO: 765456 - DNA, 100 bp, Homo sapiens
tcgctggggctttatccctcttgtgatttacctgggatttagagggaaagatcattgtagatgaactgaagcaagaagttatcagtaccagcagcaaggc

SEQ ID NO: 765457 - DNA, 100 bp, Homo sapiens
tttcatttccatttctaccttgtatgcctcaatttgctggatttaagcactgctgcactttatgagatgtgtcttgctgaatcagggctctcttatccct

SEQ ID NO: 765458 - DNA, 75 bp, Homo sapiens
ggcccaagaaaaagcacctggactgctgttgtcagaaggtgcagatgtcaatgcaaagcacagacttggctggac

SEQ ID NO: 765459 - DNA, 100 bp, Homo sapiens
tctgaaagttctcctcccaaagcaatgaagtcctccatgaatgccatgggctccctttccgtcctgtcgccggaccgggtcctcccacagctcatcagca

SEQ ID NO: 765460 - DNA, 75 bp, Homo sapiens
tcatggataggcagaagaaagaagaggagaaggagcagtccgtgctcaagtgaaaggtgtagcagtcactcggcc

SEQ ID NO: 765461 - DNA, 100 bp, Homo sapiens
ttctaagtgatgtccaggaaggaggaggaataatatttatggagcatatattatggaacacagcatggacatatctgccattgacttgataaacatcgag

SEQ ID NO: 765462 - DNA, 75 bp, Homo sapiens
agtgtggtgaagggtacttttcatggtgcatggaaggaaagccaatgcgcaggagttttgagagcaaaatgacaa

SEQ ID NO: 765463 - DNA, 100 bp, Homo sapiens
atgggctcttcctctagcagccagtatactttctgtcagccagaaactgctctttcgacgtgtagcagcagctttgccgggaatggaaagcacacaggac

SEQ ID NO: 765464 - DNA, 98 bp, Homo sapiens
gtggacctcacttgtgaatctttagagcctgtggtggttgatctgactcacaatgactctgttgtgtgcaaattgggaatcgtgaaattcatagaagc

SEQ ID NO: 765465 - DNA, 101 bp, Homo sapiens
aatgatgacccccacctcagcgagataggaccctgcttcctagagcacttttcatggagtgataatgaaaggagcagcagccgcattaatatcccagagag

SEQ ID NO: 765466 - DNA, 100 bp, Homo sapiens
cttgatgggtttgtggagaggatcaagcatgcctgtcaactgtttaaacccattttcctgaacacaattgacccatctcaccccatggcaaagctgagca

SEQ ID NO: 765467 - DNA, 83 bp, Homo sapiens
tcaagtgccacgagctgccgttttatgggcgccatgtcagaaccggctggggatgtccgtcagaacccatgcggcagcaaggc

SEQ ID NO: 765468 - DNA, 100 bp, Homo sapiens
ggggactacgacgtccctcaaaccttgcttctaggagataaaaaggatgataatgaagataattcaaatgatgggacccagccatccaaaaggaggcgaa

SEQ ID NO: 765469 - DNA, 100 bp, Homo sapiens
atgggtggtgctcgcacacagcaggatttaagaggtcttctcccctgtctgcctcccggagctaggactgcagaggggcctatcatggtgcttgcaggcc

SEQ ID NO: 765470 - DNA, 90 bp, Homo sapiens
tcagttggaagcagccgatccagcctgcggagcctgtggggcagcaccggcagctgctgaaggacagcttcatggtggagctggtggagg

SEQ ID NO: 765471 - DNA, 83 bp, Homo sapiens
aatgaatggacacagtgatgaagaaagtgttagaaacagtagtggagaatcaagttgatattcactgatggactccaaagaat

SEQ ID NO: 765472 - DNA, 83 bp, Homo sapiens
agggtggggctcctccctgggaaaaatctttagcaattctgtggtgttcttggtcacacatttatggagtttctgaagggcag

SEQ ID NO: 765473 - DNA, 100 bp, Homo sapiens
cttcacttccctcggtctgggcttctctgaggcggcgagagatggtcaggtctggagctcgaccgggccaggatattccccgagtccctccggtggctaa

SEQ ID NO: 765474 - DNA, 50 bp, Homo sapiens
cttgactatgacaggctgaagcagactgggtttgtagatgaaactgaagc

SEQ ID NO: 765475 - DNA, 88 bp, Homo sapiens
ctcatgcagtggtacaaggaccagaagaaactgcaccggaaatgtgcctaccaggatgaaactgattccaagacagcctccccgtgga

SEQ ID NO: 765476 - DNA, 75 bp, Homo sapiens
tttgttaccttccgagccacccgaaaacctctagtacagacaaccccaaggtcccaatattgaagcccatggatc

SEQ ID NO: 765477 - DNA, 100 bp, Homo sapiens
caccccacatgtgccggctgagggacctgagagattccccagtgcgctggctgcaaccagcacatcctggacaagttcatcctgaaggtcctggacagac

SEQ ID NO: 765478 - DNA, 101 bp, Homo sapiens
agagcttcccccggcctgccacctcccacagtctcctggggatggaagtgccttattactacttcacaagaaaggatatcaaagcagactgcaatacctgc

SEQ ID NO: 765479 - DNA, 100 bp, Homo sapiens
cctgcgtcctttttcgtttttcggatgatgccttcaatactacctttatttccaccataggttgcagatattttattccaaactgcccaaaatgcaggca

SEQ ID NO: 765480 - DNA, 50 bp, Homo sapiens
gttctctcaggctcccgttcaggtcctccagcagcctgacctgagtgggt

SEQ ID NO: 765481 - DNA, 98 bp, Homo sapiens
gtctactggaaatctgaatgctgttatcacgttgtcaagttattaagcaacaaaagatcacaagcagttggaatactaatgtctagccttcatttaga

SEQ ID NO: 765482 - DNA, 100 bp, Homo sapiens
agccatgagggccgggcccagtcaccgaccttttacatgaggctgtgagcactggcgatcctgagatggtgtacacagttctccaacatcgagactacca

SEQ ID NO: 765483 - DNA, 74 bp, Homo sapiens
agggcctgcagcgggagctggacggcgagcgcgagcggcgcgagaaagtactaactagggagctctggcagtga

SEQ ID NO: 765484 - DNA, 74 bp, Homo sapiens
taagtatacagcatctgtcctcatagcagatccagctccaggtcccacaggggctcttcttccccacgaaaaag

SEQ ID NO: 765485 - DNA, 73 bp, Homo sapiens
aagaacatggaatgcctgaaaagcttcacagcgcatcgaactccatttaaaccacagcagaggctttatagaa

SEQ ID NO: 765486 - DNA, 100 bp, Homo sapiens
ctacctcctggctgccgtgaataggcagcctaaagagcccccctccatgcgcctgaaggcccgacccagcagccctggcttttccgtgcttacctgcagc

SEQ ID NO: 765487 - DNA, 100 bp, Homo sapiens
aaggacgtggccactgtggccttctgcgacgcgcagtccacgcaggagatccatgagaagagagcgcctgctcgctgtgcccccgggttatgacgacccc

SEQ ID NO: 765488 - DNA, 50 bp, Homo sapiens
cagcatccccaagcagggggagatgagtaacgaaagaggctttgaaaatg

SEQ ID NO: 765489 - DNA, 112 bp, Homo sapiens
cggcccgggccggcgctccaaggcccgcccgggagggccggggccgcgctcagatggcccactgcgtgaccttggttcagctgtccatttcctgtgaccatctcattgacaa

SEQ ID NO: 765490 - DNA, 80 bp, Homo sapiens
ggaagcgccaggacaatggggacccgggacgacgagtacgactacctattcaaaggttcgaccttgaaactacaagagtg

SEQ ID NO: 765491 - DNA, 97 bp, Homo sapiens
ctttcttcgaaacctcaaagaacctcttctgacctttcgccttaacagagcctttatggaagcagcaggtcagtttacgttgcgagacatgtatgag

SEQ ID NO: 765492 - DNA, 74 bp, Homo sapiens
caagtttaaaaatttggaatgcaaattacttcctcaaattcaacacccaacagcttccttaatagcaaaggtag

SEQ ID NO: 765493 - DNA, 90 bp, Homo sapiens
tgaaagtgtataactacaatcacctaatgcccacaaggaacagcatatgccatatatgagctggctgtggcttcatttcccaagaagcag

SEQ ID NO: 765494 - DNA, 82 bp, Homo sapiens
gaggtcggctgctgcgggaaatacttcctgtttggcttcaacattgtcttctggggtgaccatcgggatgaggaggaagaga

SEQ ID NO: 765495 - DNA, 80 bp, Homo sapiens
cctggatatcagcatacaattcttacatattcctggtgtagaatctgcaaacagctgtgctccattgaagtgacttgtga

SEQ ID NO: 765496 - DNA, 83 bp, Homo sapiens
ccgcgggagcccccagcatggggagtcagaaacacatttttcttctgacacagattttgaagatatcgaaggaaaaaaccaaa

SEQ ID NO: 765497 - DNA, 75 bp, Homo sapiens
atcattcacatgcacaacaagaaactgaagtattatacggctagttcaggggatacgataaaagatctccaaatg

SEQ ID NO: 765498 - DNA, 75 bp, Homo sapiens
aagatggcggcgccgctcatccccctctcccagcaggcctgacctctcgggacacacccagccctgtggacccag

SEQ ID NO: 765499 - DNA, 100 bp, Homo sapiens
ctttccgccggggcatcgcgctgttggaaagcggctgcgtagacaacgtcctgcaagtcggtgacagagctgaatgaacctctctccaatgaagatcgaa

SEQ ID NO: 765500 - DNA, 78 bp, Homo sapiens
tcgccggagccgcgccccaccccgccagctccagagccacgtacgattgagaggatccagaatccagatctctggaat

SEQ ID NO: 765501 - DNA, 97 bp, Homo sapiens
cacatggctgtgcaacgccgtctagatgtcatggaggagggacgtgttggtgcaacatctttctattcgacttgtcaaagcaatggaaagtggagta

SEQ ID NO: 765502 - DNA, 87 bp, Homo sapiens
agagagctattagagattgtgaagaagaatttcgatctccgccctggggtcattgtcagttcagagaagccgaactgggattaccat

SEQ ID NO: 765503 - DNA, 74 bp, Homo sapiens
cccctccacactttcctggtcgagggacgaaagcgcccgaaggaacaagttgaaatcatcgcagaaggataaag

SEQ ID NO: 765504 - DNA, 83 bp, Homo sapiens
ggatggtgctggccacttgcttgggatcctttatcctggtcatcttctatttccaaagcggctatgagaggttttcctccgag

SEQ ID NO: 765505 - DNA, 75 bp, Homo sapiens
cttacttccaacgagggatgctctactaccagacagagaatccaagtggtaagaagttcagaagcaagcctcagt

SEQ ID NO: 765506 - DNA, 90 bp, Homo sapiens
gagtactccaagaagatggttcagttgactattgcaaagagaaactccagaaaatcttgccaaacttctgaccaggatgtatttaaaatc

SEQ ID NO: 765507 - DNA, 101 bp, Homo sapiens
tctcgatgccaatctctgcttgaaaggagaagacttggattctcagactaatagggatgccaaaggaaaaatatgatcctccagatcctcgcagaatttat

SEQ ID NO: 765508 - DNA, 100 bp, Homo sapiens
tgtggcggaggaacgcagcggccactgcgccgtggtggacggaaacttcctctacgtgtgggggggctacgtgcaactccaggtggttccgctatttggg

SEQ ID NO: 765509 - DNA, 82 bp, Homo sapiens
atctcacgaacctcaccccaagatcttcacattctggatctcagctgctcttgaaggtgtgagttcttgatacgaatgaaag

SEQ ID NO: 765510 - DNA, 84 bp, Homo sapiens
aatcccattattcagagcgcgtatggagtggaaacgcttgtagggcttcaccaggttgtggcagcactgcctgaaggtatgaga

SEQ ID NO: 765511 - DNA, 74 bp, Homo sapiens
gtccctaagcctcattggacaccgtctgcaggaaactgaggccctggccaacgtcaacattgggagcctcatct

SEQ ID NO: 765512 - DNA, 82 bp, Homo sapiens
gtcgcctagtaaacggggctgctggtgggccgcgtcgaagacatggaccagggctacggagcctgcctgctccgcttcagcg

SEQ ID NO: 765513 - DNA, 100 bp, Homo sapiens
cgcggcggcgcgggggctcggagacagcgtttctcccggaagtcttcctcgggcagcaggcggactgtttttccaatgacattcacaagctagataccag

SEQ ID NO: 765514 - DNA, 101 bp, Homo sapiens
gagcagcagcggctcctcaacacccctcgaaggttaacaatgagaatgttgtcaaagtcggccacaggcaggtggtgaacatgatccggcagggagggaat

SEQ ID NO: 765515 - DNA, 100 bp, Homo sapiens
ggatgacaagaatgcaacaaagctgaatgaactcattcaggttggggttgaaaaataccggccacagaccctgaatgatctcatttctcatcaggacatt

SEQ ID NO: 765516 - DNA, 75 bp, Homo sapiens
agtataagactggcatcaagaaaggttgttcctcaaagtcattcaagctgtactcgccgaaggagcccccgaacg

SEQ ID NO: 765517 - DNA, 78 bp, Homo sapiens
caatcatatctttagattttggcagcaacgaagtttgcctgcaatggtactgtaattgagcatccggaatatggagaa

SEQ ID NO: 765518 - DNA, 74 bp, Homo sapiens
aatcaaaaggcccaaagagacagctcactgctgcggcttgatgagacccaggaggcagagttccaggcccttcg

SEQ ID NO: 765519 - DNA, 101 bp, Homo sapiens
agtcaataggaagtacgagtagagtacacactagatgtgtacagactctcctccgtggtcacacagcacgattccaagaaggctggagctgaggtggtaaa

SEQ ID NO: 765520 - DNA, 75 bp, Homo sapiens
cttcgctctttgcatcttaactgcagacctgcaatgcttcttttgccacccgagaccgtctgcgctcccacctgg

SEQ ID NO: 765521 - DNA, 75 bp, Homo sapiens
aaccacctaactgccttccactgggagctgttccgatgtgtgcatgagggagcctgccccgctggaggctgcctg

SEQ ID NO: 765522 - DNA, 83 bp, Homo sapiens
gggaaagatttatcttttctccactcatataaaatgctaggtcctttcacaaaactgttcctgtgaaagcatttcctgctttt

SEQ ID NO: 765523 - DNA, 123 bp, Homo sapiens
gacaaaggcgcaagtcgagaggaaactgttgtgcctcttcatattggcgatcctgttgtagactctgacctgtttttgttggacacccgtgtagtatgggcctcagaagaaggctggctggaa

SEQ ID NO: 765524 - DNA, 102 bp, Homo sapiens
atctcaaggactccgactcctggcttgttcagagaaggagagccccgactcctggatccctggtgctgccaggttgccagatttctaagaaggagtttgaag

SEQ ID NO: 765525 - DNA, 100 bp, Homo sapiens
ggggcaggcagaggccgatgactctggcgtggggcaaagctcggaccgcggcagccgttctcagtttttgaatcagagccgacaggcacttgaattgaaa

SEQ ID NO: 765526 - DNA, 115 bp, Homo sapiens
tggctaccatgttctctcgcgcgggtgtcgctgggctgtcggcctggaccttgcagccgcaatgaaccttctgaggaaaggaggccatacagaaattgaacctcagcacttctgt

SEQ ID NO: 765527 - DNA, 75 bp, Homo sapiens
cagacacggtggctactctgcctcggggacgaaagcagctgcagaaccttggcctgaaaatgctacattatatca

SEQ ID NO: 765528 - DNA, 96 bp, Homo sapiens
caaagtggagaggaagcggtggccctggtagtgcatttggagaaagagactggaagactaagacagcagacctcagaatatattattcaagcttac

SEQ ID NO: 765529 - DNA, 102 bp, Homo sapiens
gtagaccggagctgttcctattcggccatctttgctcctccctgcaactaactccattcttaattggaaaacacagatcctggtgccgaacatgaggacagg

SEQ ID NO: 765530 - DNA, 96 bp, Homo sapiens
ctcccacagtgctgggattacagtcggatcctgacctcccagccgatgtgcagacaccatcctcggtggaactggggaggtatccagcccttccct

SEQ ID NO: 765531 - DNA, 73 bp, Homo sapiens
taaattgttggcgggtttcatgggcgtcatgaataacatgcggaaacaggtgtgatgaatgcagactctgcta

SEQ ID NO: 765532 - DNA, 96 bp, Homo sapiens
gcccgagcggctgctggggacggcggggaccgattgtagggaatggaagtgaacagcagctgcaaaaagagctagcagatgtactgatggatcctc

SEQ ID NO: 765533 - DNA, 87 bp, Homo sapiens
cgtacgagctgcaggaggttatcggactgttccctgatgtgggtggaggttatttcttgccacgactccaaggaaaacttggttact

SEQ ID NO: 765534 - DNA, 75 bp, Homo sapiens
aagcggaaggtgatgcccaagatggaccagggcaccgcgtccgtgctgcagcgccggtcccccaatgaggagtac

SEQ ID NO: 765535 - DNA, 82 bp, Homo sapiens
gcagccgatccagcctgcggagcctgtggggcaggtaaggctggcctctctgcagtcagaggtctgagctctgccatgggga

SEQ ID NO: 765536 - DNA, 100 bp, Homo sapiens
catctgtgagtgactctttgacatggagagaatttcactatattcaggttgaagccatccttgtcaatatatttggtggtatcgtcaactgtgccatcat

SEQ ID NO: 765537 - DNA, 100 bp, Homo sapiens
gcacacagtaaatccagcaaggatatggagagccatgttttcctgaaggccaagacccgggtattgttgcagcatctggcagtgagactgaggatgagga

SEQ ID NO: 765538 - DNA, 75 bp, Homo sapiens
gtcttactggcaggtgttggtgtccagatggatcgccttcgcagggctaggattttttatcaagcagaaatgcat

SEQ ID NO: 765539 - DNA, 100 bp, Homo sapiens
ctgaggcggaggctgacgaggaggcggatcccccggcgtcaggaatcatatgaagatggcccttgtactataacttcaaataagaattctgataataact

SEQ ID NO: 765540 - DNA, 96 bp, Homo sapiens
tgctgtagctttcatgagcacaggcatcagtcaggcagatgtttgtcgactggaatggttttcggctttgtgagaaaccttaccatcaaacacgat

SEQ ID NO: 765541 - DNA, 101 bp, Homo sapiens
tcagccgacttagtggggctgcagtatcaactcgagggaggttcatgacaactgaggaaaaagccaaagtgggaccagggaggcaagtgaggcctatctgg

SEQ ID NO: 765542 - DNA, 96 bp, Homo sapiens
cgtcggcagcaagaacagagagagaggtggacagatctgagagatactgagaggctgaggggatctggcggtggagcgctaggatcagacgccccc

SEQ ID NO: 765543 - DNA, 100 bp, Homo sapiens
aggaatagaaactttggaatctgtacccattattggtggtttttgggagactatctttggcaacagttgagtcagcagatactggagttatttgaaacat

SEQ ID NO: 765544 - DNA, 77 bp, Homo sapiens
tgtctgacatggaggatgatttcatgtgcgatgatgaggaggactacgacctggagagcatatagattattgtggat

SEQ ID NO: 765545 - DNA, 75 bp, Homo sapiens
tctcgttctgcgacttataaaggaccagacaaatcaaattagtggttttgttacgatatcagaagtgcttggtag

SEQ ID NO: 765546 - DNA, 100 bp, Homo sapiens
gggaaacaagaaaacatcaaagaggtctagcaaagggtatcagctctgtgataacagcgtgggggtgctcttcaatgactcaacacgcctcatcctctac

SEQ ID NO: 765547 - DNA, 75 bp, Homo sapiens
gcccctccagctgccccctgtgtggcaaacctttcttgagctcagtgcaaggatgatgctgaaaggaataacaag

SEQ ID NO: 765548 - DNA, 100 bp, Homo sapiens
ccggagcagccgcgggcgcccgaggggccgagcgagggacaaatatggccctgaaggctccatgagcagacgagaaggctggacttcgcaactgggtcac

SEQ ID NO: 765549 - DNA, 100 bp, Homo sapiens
acatttacaatggatttttggtaccagtcttggctcctgctctccataaggagtctaccatggctcaagaatctcccaaaaattcagcagcagaaattcc

SEQ ID NO: 765550 - DNA, 75 bp, Homo sapiens
tgcccaacgacatcgatggcctggagaagagtgacaaaaagagtagtccccagaaagaagttaagtatgaaccct

SEQ ID NO: 765551 - DNA, 100 bp, Homo sapiens
gcagctgacccggcgaagggagccgaccgggccctgggctggaggtaaaaccccacggtgtcgtttcagtcagatgttgcatccaatttttgaggaagct

SEQ ID NO: 765552 - DNA, 100 bp, Homo sapiens
ctggtgaattacatcttctttaaaggtgcacgtcggcgacgaggacttcgtacacctgcgagtgttccaatctctccctcatgaaaacaagcccttgacc

SEQ ID NO: 765553 - DNA, 95 bp, Homo sapiens
ggactggcagacccgtagctaagacgccaggatttcctggaagcagagaaatgactgttcgccatggatttccctatcaaccctcagccctggcc

SEQ ID NO: 765554 - DNA, 100 bp, Homo sapiens
tcgactttccaacatttttgttattggcaagtaccgccagctctctgctctccacagggctccccgccccacccggcctgataaagcgcgccgactgggc

SEQ ID NO: 765555 - DNA, 74 bp, Homo sapiens
gcctgaccacggcgactggacttacgaggagcagtttaagcagggagtaccctgacttctaccggaagctctac

SEQ ID NO: 765556 - DNA, 82 bp, Homo sapiens
tggcattgacctctcagatcccaaacaactggcagaatttgctagctcaaagattagaacgactccgaaaagagagacaaaa

SEQ ID NO: 765557 - DNA, 83 bp, Homo sapiens
attgaggacgttcccttcacggagaaagattttgatgatcagggccaaagcggtcagtgagaaggaagtggactctggaaacg

SEQ ID NO: 765558 - DNA, 82 bp, Homo sapiens
aggcctgacagctctgcggctcgggccctgagggcgccctgcgtccggcagaggaggcgagcatcccgctcaggtgatgagg

SEQ ID NO: 765559 - DNA, 100 bp, Homo sapiens
aggccgagctgctgcggcgccgcaactttaaagtcatgatctaccagggttttggccaaattgggcgagggcacaaaataaccacttaccccttctcacc

SEQ ID NO: 765560 - DNA, 82 bp, Homo sapiens
gcctcctgagtagctggaaccatcatatgcaccagcacgcctggctaaggctgaaatctctttaatgatggagggaagcagg

SEQ ID NO: 765561 - DNA, 75 bp, Homo sapiens
gaagaagggaaggcgcgagtgaggaaaggaggtactgtaggctgctatccatgtccagggccaaacatgaatcct

SEQ ID NO: 765562 - DNA, 101 bp, Homo sapiens
aaaagaggggccacttctcagcgattcacatgtagctttcagggtgacagattgactgggatcccctcgcacatcctcaacagctccccatcagaccggca

SEQ ID NO: 765563 - DNA, 83 bp, Homo sapiens
tccggggacaagaaactagagcaaataaccgttttgaaattgttcaaaccttgtactactcagctgatcacaagctgcttgat

SEQ ID NO: 765564 - DNA, 75 bp, Homo sapiens
gtggacgtggatttggggatggctataatgggtatggaggaggacctggaggggctgtgtctccccagagcttgt

SEQ ID NO: 765565 - DNA, 90 bp, Homo sapiens
ccgcgcccctcggctacgtgccggggctgggccggggcttcgtgctctgtctgatgatggagtatctgatcttgaagacccaaccttgac

SEQ ID NO: 765566 - DNA, 101 bp, Homo sapiens
agaaggaccgagggggagacatctctcagaagacagtcctgcccttgcatctggttcatcatcaggccctgcatcatggaaactctttctaatgcaagtgg

SEQ ID NO: 765567 - DNA, 100 bp, Homo sapiens
gacagttcccagcgggctccgtttcgtctccagaaccctggacagctcctccagaggagaaggcagagcccccccaggctatgaatgccctgatgcggtt

SEQ ID NO: 765568 - DNA, 75 bp, Homo sapiens
cgaggacggtcggactcccgcggcgggaggagcctgttcccctgaggaatactcccccagttgcaagaggcgcag

SEQ ID NO: 765569 - DNA, 75 bp, Homo sapiens
cggatggaagggaggagactcctgaccctcagaatgagatggaatttcaccgtgttgcctaggctggtctggagc

SEQ ID NO: 765570 - DNA, 111 bp, Homo sapiens
cgcagatatccaggcattcttcatgagcatagacagtctgtgtaagaagtactccagggaaacctcccaggcgtccgacctccgatcatgaacgggcccctgcacccgcgg

SEQ ID NO: 765571 - DNA, 101 bp, Homo sapiens
ccgaggtggacatgagtgaccggggcatctccaacatgctggatgtcaacggcctctgagcggcctattgccaattcatggacatgctcttccctggctgc

SEQ ID NO: 765572 - DNA, 100 bp, Homo sapiens
gcgggaatctgggaggcgagcagctctgcagttaatgcacgtattttaaactcccgggcctgcggacgctatgcacagggcatcttctctgcattcagtt

SEQ ID NO: 765573 - DNA, 51 bp, Homo sapiens
gcaagaagcgctttgaagtgaaaaaggagatcatgcacgccctgaagatga

SEQ ID NO: 765574 - DNA, 75 bp, Homo sapiens
cctccctccagctggtcaagcctcgttccaggcccagccaactcctgcagctgtcacgaccaccacccagaggcc

SEQ ID NO: 765575 - DNA, 100 bp, Homo sapiens
cggcaataaagcaaagaaacaaaagacaactctgcttttccagaaactgtgccaggatcacgctccgccgcatgcaagagatgattgcaaggatgcaggc

SEQ ID NO: 765576 - DNA, 75 bp, Homo sapiens
tggcgataagtcattaccacagaggcgtggagctatttcctatgacagttctgatcagactgcattatacattcg

SEQ ID NO: 765577 - DNA, 82 bp, Homo sapiens
gcgacttatgtctgttgcttatacgtatgataatctggctcctagtgcattcccttattcgtggaagcagccttagaaagac

SEQ ID NO: 765578 - DNA, 99 bp, Homo sapiens
gacagaactaaagtctcctgcaagggcagaggcctggcctccaggggtttgtcttaaatatgtcgggggagaccaatttggacatgtgaacatggtgat

SEQ ID NO: 765579 - DNA, 100 bp, Homo sapiens
ctcgcgcccgccgccgcccgtccccagggtcctaaaaaggtggggacgctgtggcgagaagccgggcttagctggaaggaatttctacctgaaggccagg

SEQ ID NO: 765580 - DNA, 98 bp, Homo sapiens
caggtcgcgatcgaagagtccccccaagtctcctgaagaggaaggagcggtgtcctcttaagaaaatgtgatgatgatgatgattttgatgatgagga

SEQ ID NO: 765581 - DNA, 83 bp, Homo sapiens
cgacgcgcagtccacgcaggagatccatgagaaggtccggacaggccgagatgacgccgagccccctgttgctgctcctgctg

SEQ ID NO: 765582 - DNA, 83 bp, Homo sapiens
actggatgcagcaaggaaataggatttaaccgctctctgcctcccagttccaaagaactactggttcagattttagctcttcc

SEQ ID NO: 765583 - DNA, 119 bp, Homo sapiens
ctggaattggtgggttcttggtctcactgacttcaagaatgaagccacagactctcgcgtcctcctccgcctcctcctctctgcatgcgcgtcagagcccgtgccaagaacaagcagca

SEQ ID NO: 765584 - DNA, 100 bp, Homo sapiens
caggaaacatggcggcggcgggtgttgtgagcgggaagataaagagaggcctgtccagtctttgaaaacatcaagagatacttcaccctcaagtggttca

SEQ ID NO: 765585 - DNA, 74 bp, Homo sapiens
ttcgcagtggtcgcttcttctccttgccactttcactatacctcgggaaccacctccatctccagcagaagtga

SEQ ID NO: 765586 - DNA, 98 bp, Homo sapiens
gaagcgatttgatctacggcgactccagtaagactttgaccccgacgcaggcttcagtgattgccgcggatcagaagcctgagcactttggctcgaga

SEQ ID NO: 765587 - DNA, 75 bp, Homo sapiens
gaagaacatatttatcgttgtgaagatgaacgctttgaggctccttctcctgaaaaagccgaggaggagagtgag

SEQ ID NO: 765588 - DNA, 100 bp, Homo sapiens
ctcgctcaagatggcggcgcagccaccccgcgggatacgcctcagcgcggtccacgctgcttttatgagctgtaacactcaccgcgaagatctgcagctt

SEQ ID NO: 765589 - DNA, 83 bp, Homo sapiens
ctcggattttgataatgaagaagaatagcctaacatggcagaccagagacagcgctcactgtctacctctggggagtcattgt

SEQ ID NO: 765590 - DNA, 90 bp, Homo sapiens
aaagaaaacaaatagaggaagaagatctaatcatatcaccaaggatgacattgatcttgatgccttggctgcagaaatagaaggagctgg

SEQ ID NO: 765591 - DNA, 82 bp, Homo sapiens
ttttgtgatcgcagcgatgaaaggtggtctttgggaagaagcttcctgcctttgccaccatccccatccaccagctgcagca

SEQ ID NO: 765592 - DNA, 76 bp, Homo sapiens
gaactctgctggcctttcatttggtggaggagccggaaaaaagtccagtatcccccctggagtcacattcgaaagc

SEQ ID NO: 765593 - DNA, 50 bp, Homo sapiens
tgttggtgtagaagccaaaatcaggtctatactgtccgacaagacttccc

SEQ ID NO: 765594 - DNA, 51 bp, Homo sapiens
tgcacgaaagcattccatgttatttatagactctgcaggtcctctcagatc

SEQ ID NO: 765595 - DNA, 129 bp, Homo sapiens
gtcgggaacaggtaccggctgggccggaagatcggcagcggctccttcggagacatctatctcggtcgcgtctccttcttcacctcggggtccgagaacctacaccgcgtggagaaggtccactggggc

SEQ ID NO: 765596 - DNA, 104 bp, Homo sapiens
atcacaatcccattattcagagcgcgtatggagtggaaacgcttgtagggcttcaccaggtgacttaagagattaaaattaatttggttgctgttggttctgaa

SEQ ID NO: 765597 - DNA, 75 bp, Homo sapiens
gtgataaagttggtcagtctcgcactgggcagcctgcttctgcaaagtggtacgatcgaagggactatgtcttca

SEQ ID NO: 765598 - DNA, 90 bp, Homo sapiens
atgtcacaaggaacagctatcggatcatcagtgtggacggagccaagtactaaggctcgtacgtctgcatcgattatcttacgtggggca

SEQ ID NO: 765599 - DNA, 99 bp, Homo sapiens
ctcagagaaagcagagggtgagatggatgagtccagcattctaagacgaagagggctccagatttggacacctcccacactgagtccccaaccccccat

SEQ ID NO: 765600 - DNA, 75 bp, Homo sapiens
cttcccagtagctggaactacaggtgaataagtctgatgacacagcagaacatcttctggagttgggctggttta

SEQ ID NO: 765601 - DNA, 95 bp, Homo sapiens
ctcaattacacttcgactctcaaagcaataccaggatagctgttgtttcagagaaagactgtaaattcacctgtcacccagaatgccgcagcctg

SEQ ID NO: 765602 - DNA, 82 bp, Homo sapiens
ctggagcgaatcctaccttccaaacagcaatttttccagctagtcaaattacgaaagcttggacttagtgataatgaaattc

SEQ ID NO: 765603 - DNA, 104 bp, Homo sapiens
gaaggcggcggctcctgccctctcgctttccctctcgcgtctctggctgcaggtgtcgtgaaaactacccctaaaagccaaaatgggaaaggaaaagactcata

SEQ ID NO: 765604 - DNA, 100 bp, Homo sapiens
actgcacctgatcaggtggataaggaagatgaagactttcaggaatctaataaaatgcactgttcaactactcaatttcatgctggcatgagaagataat

SEQ ID NO: 765605 - DNA, 50 bp, Homo sapiens
cccactggctctgctgaccttgtgccttgcatgcttttcacttccactgc

SEQ ID NO: 765606 - DNA, 90 bp, Homo sapiens
tcgcctcacagcgaaacgccgcgcactcggagccggcacggctcggcggtgaaaggtgtagcagtcactcggcctacacccacagcatcg

SEQ ID NO: 765607 - DNA, 95 bp, Homo sapiens
acggctgccagcgcgtcaagtatggccagtgctgggtcttcgccgccgtggcctgcacagagataattgacgaccttgccaacctagtggagaac

SEQ ID NO: 765608 - DNA, 83 bp, Homo sapiens
agcccgtgccgcgagcgcggcctgcaggaggggatcctcttggtgtatgacatcaccaaccgctggtcctttgacggcatcga

SEQ ID NO: 765609 - DNA, 90 bp, Homo sapiens
cagcatctgaaaagccataatcagcgcctggtggagcaggtgggatcccttcaagatgcgctagaaggtgaggagcattacaactgcatc

SEQ ID NO: 765610 - DNA, 75 bp, Homo sapiens
gcagacctcgaaatgatagacggaatcactatcttctctgttggtgtggcttgggcacctctggatgacctgaaa

SEQ ID NO: 765611 - DNA, 116 bp, Homo sapiens
ggtaccccggctggagggcgtttctcgggagcagttcatgcagcacctctacccacagacatcaactagtcaggcagtcttccgtctccagtctggcatctgccatctcttccgag

SEQ ID NO: 765612 - DNA, 75 bp, Homo sapiens
gcagttacctgtggccatggaggcggcaaccaacaaggctccctagatctttagcttctactcccactgctccta

SEQ ID NO: 765613 - DNA, 100 bp, Homo sapiens
gatctcagaaggccagttcaaagcgaccgtggcagccatgtattacagctactacatgctaccggacggcacttactgcctggcgccgccccctcccgga

SEQ ID NO: 765614 - DNA, 100 bp, Homo sapiens
ggaggatgtcgggacaccccggaagctgggaaatggatatgatggatgatatctgtcaggagcaatttctagagctgtcctacttgaatggagtacctga

SEQ ID NO: 765615 - DNA, 96 bp, Homo sapiens
ctcaagactggtccacggagtgtatgaccacaaacagccatcaaggttacttcttgctgcagattctgcgcaggatcggagctgtgggccaggctg

SEQ ID NO: 765616 - DNA, 75 bp, Homo sapiens
cctgatcccaaaattattgaaaacactcgaagggagcatctttccttgaagaagtacattattgacattgtggtt

SEQ ID NO: 765617 - DNA, 100 bp, Homo sapiens
gttcccctgtcttccccaacgccccggagccgccggccgctagcgtcagcgccagccagctgcagaaccttggcctgaaaatgctacattatatcagcaa

SEQ ID NO: 765618 - DNA, 100 bp, Homo sapiens
gttcttggtgcccctgggcatcaccaacatagccatcgacttcggggagcagtctccacaaaccggaggactacccccagactgcagtaagtgttgtcat

SEQ ID NO: 765619 - DNA, 100 bp, Homo sapiens
aaaaaaacaaaggtatttatggaattccactgagtggtaatggatgatgcagttcaaataactaaggtacaggtttgcagattccgccagcagcacagca

SEQ ID NO: 765620 - DNA, 82 bp, Homo sapiens
gataattgataacaccctgtaacagctgagtggagcgcgtgtcgcacccgctgctgcagcagcagtatgagctgtaccggga

SEQ ID NO: 765621 - DNA, 83 bp, Homo sapiens
cagccggcacctgacggcgtgaccgacccgagccggctcctggctggtgccccccgggagctcgctgtgcccgatggctacac

SEQ ID NO: 765622 - DNA, 75 bp, Homo sapiens
agtgaagggactgttgttccagaggatcgctgcaaatctccaacctctgaatttcttgaggttggcaaaaagcag

SEQ ID NO: 765623 - DNA, 100 bp, Homo sapiens
cgagtggccaggcttctggggctgactcaactgtacgaggatgtcgtccaggaaagattgtgcagatgactgaagcagaagttcgaggcttatgtatcaa

SEQ ID NO: 765624 - DNA, 100 bp, Homo sapiens
cttgggagcgctacatgatctagccaacagggaataccttggcaagcagctccagtccgagcagccccagaccgctgccgcccgaagctaagcctgcctc

SEQ ID NO: 765625 - DNA, 85 bp, Homo sapiens
accatgtctcgccgcaagcaaggcaaaccccagcacttaagcaaacgggaattctcgcgcccgatgagagaaagggaaagttaag

SEQ ID NO: 765626 - DNA, 83 bp, Homo sapiens
cgggacctgggctgggaacccgcggtggagcgggacacgaacgtgccccactgcaggccccaccatggcgccgttcctgcgca

SEQ ID NO: 765627 - DNA, 98 bp, Homo sapiens
gtggactgcagcctcggcggtcagcaggtgctgaccttaaggaaagagccaaaatgagttccagtgaagttggtccttttgtctccaaaataagagca

SEQ ID NO: 765628 - DNA, 82 bp, Homo sapiens
ggcaaccgggcggccacgttcccgctgcaggttctgcggggagtgtctccagccctgcctgcaggtgccatccccgctgtgc

SEQ ID NO: 765629 - DNA, 50 bp, Homo sapiens
gtcctgtgtcactcccaatttctgagaaagaaatgaccgcccggatgtgc

SEQ ID NO: 765630 - DNA, 50 bp, Homo sapiens
caggggagttctctgtgtctgtgaaagacgctctcctggtctgtgttctg

SEQ ID NO: 765631 - DNA, 100 bp, Homo sapiens
ttgatgggcacctcccgggacgaagaagaagaggacagtgctccagtgaaagtggaagaacaaaggaagatgagtcaggatagtgtccatcacacctcag

SEQ ID NO: 765632 - DNA, 89 bp, Homo sapiens
gtctctgatgagctgagaaacaaagccacccagccaatgaaggagcctcagggaacccagccagcacagcagcagcagccttgcctcta

SEQ ID NO: 765633 - DNA, 75 bp, Homo sapiens
tacttttactactgtgacaacattaacggtcgttcttccctctttccaatagatgatggcttgcttgatgatggt

SEQ ID NO: 765634 - DNA, 90 bp, Homo sapiens
atgccctcaagtcctggctggccaagttactggagccgatgaatttcttcacatggctcctggagaagtgaccatcacagttcgcctcat

SEQ ID NO: 765635 - DNA, 80 bp, Homo sapiens
acgggaagggccggcccgcctccctggccggggcgcagttcggaggttcagggctgaagaagatgcagagcagcctgaag

SEQ ID NO: 765636 - DNA, 75 bp, Homo sapiens
cctcatgcaagcgagggacctgggactgctcacagccaggaattgaatgatctggcacgggaccctccagcacag

SEQ ID NO: 765637 - DNA, 100 bp, Homo sapiens
gagagctcagaattgcaacatccttctatcgaggctacaactgaggtggaaattaagaagaaaggccctggatctcttttagtttccatggaccaattag

SEQ ID NO: 765638 - DNA, 55 bp, Homo sapiens
gaaggaaatgctaaagcgattccaaggtctcaactcctccaaacgaacagaaacc

SEQ ID NO: 765639 - DNA, 80 bp, Homo sapiens
cggctcctgccctctcgctttccctctcgcgtctctggctgcaggggaacgcccttttgcttgtgactggcagggctgcg

SEQ ID NO: 765640 - DNA, 75 bp, Homo sapiens
ggagccgcgcagccctcggagcacggctgctctttggcgtaaattgcaatcgattagggatcgtttctcagaatc

SEQ ID NO: 765641 - DNA, 98 bp, Homo sapiens
tgggcggcagcgactccgagaagtgctcctactctcagaccgtgagtccatcttcttcaacagccacaacgtgtcaaagccggagtcgtcatcggtcc

SEQ ID NO: 765642 - DNA, 100 bp, Homo sapiens
caactgccgccgccgcctctttcatctcttctggggcaggggccagggccagggtgaatcatttgatgtaaaagacttgactccataatctgcatctgtc

SEQ ID NO: 765643 - DNA, 74 bp, Homo sapiens
gatttctccgcctcagcccaacggggagacgttcatcttcactgacggggaagatgaggccctggccaggcaca

SEQ ID NO: 765644 - DNA, 74 bp, Homo sapiens
ttggacagtccaatgtcaacattgcccagcaagtgctgatcttgcatctttaatggataaaacatttgagagaa

SEQ ID NO: 765645 - DNA, 100 bp, Homo sapiens
tttacgcacagctgcctgtcaccccagatgtcctcatcatcccgtcagagctgaggtacttcgtgaaggccagcagagccagccgcagagcagccagccc

SEQ ID NO: 765646 - DNA, 100 bp, Homo sapiens
ggatggccccaggtgtaagcgcagaaagcaggcgaacccgcggcgcaataacggtttgctggttggctcccgagcagacagcaggaaagaagaagccctt

SEQ ID NO: 765647 - DNA, 82 bp, Homo sapiens
tgagagccggacgggcactgggcgactctgtgcctcgctgaggggcagcgggtggcatgagacgtgggaacatgggccacct

SEQ ID NO: 765648 - DNA, 90 bp, Homo sapiens
cgaggaagcagaagacgaagggtcccagctggtggttttggacccagaccacgatatgctgcaggctgctagtcattatcgccaaaatag

SEQ ID NO: 765649 - DNA, 90 bp, Homo sapiens
tgggtggtccctgctacaccagcctcccaagcctcccagtgcaccttctaggagacaagcaagaagccctacaggtggcaactactagcc

SEQ ID NO: 765650 - DNA, 100 bp, Homo sapiens
gtgtggtgtccaaggagctgcacaacaccccgtacggtacggccagcgagcccagcgagaaggccaaggtacgaggaacagcaaattcaggaaaaagtgg

SEQ ID NO: 765651 - DNA, 100 bp, Homo sapiens
ttcttcttctgctgggaggttggggtctctgggagctctgcaggtctgaatttcctgctgctgttcacaaagatgctttttatctttaactttttgtttt

SEQ ID NO: 765652 - DNA, 82 bp, Homo sapiens
tctaaaggaaggcgtccgttggccttcgtacccgtcttgattgagctcaccatggatgatgatatcgccgcgctcgtcgtcg

SEQ ID NO: 765653 - DNA, 101 bp, Homo sapiens
agcgggcttcccaacaccatgccgtccgccttctctgtcagctctttccccgtcagcatcccagccgtgctcacgggcaccgcgtccgtgctgcagcgccg

SEQ ID NO: 765654 - DNA, 90 bp, Homo sapiens
caaagaacagacaccttgggattctataaaattgacttttgaagcaacaggaggactcagagagagtaatgataattaccggaccaaaca

SEQ ID NO: 765655 - DNA, 82 bp, Homo sapiens
ccgcgctgacaggggggcctggccgcgcagccggttaacacagaaatctgcctcctgggccatgccgcttctaaggcctgtt

SEQ ID NO: 765656 - DNA, 50 bp, Homo sapiens
tgtctcttctcgccctggcggggaagcaggagcattggtttgaaaaggcc

SEQ ID NO: 765657 - DNA, 97 bp, Homo sapiens
ttcaagcttaggaccacccaccatgcctatccagatgaggagcgggaaggcctcctgcaccctggagaccgtgtgggaagacaagcacaagtatgag

SEQ ID NO: 765658 - DNA, 100 bp, Homo sapiens
cattcaggatcacaacgtgaagttcatggggagatttccttttggataccatctcggggcttgtatttgatactgcaaaggaagacgtggagttacggac

SEQ ID NO: 765659 - DNA, 100 bp, Homo sapiens
aaagcggccaaagaagtgaagctgctgctactcggtgctggagaatctggtaaaagcaccattgtgaagcagatgaggatcctgcatgttaatgggttta

SEQ ID NO: 765660 - DNA, 101 bp, Homo sapiens
tgggcgtgggcgaaggtaatccaggcctgggtacgattccgggccctccttcgacttcccagcgggtgctcaaaaatgtgataactttgctgaaaaaagac

SEQ ID NO: 765661 - DNA, 100 bp, Homo sapiens
tcacattgctgttcatgagtggaatccatgtttctggacgcggatttttggcctcatactctgttatagataaacaagctttccgcttggccctcatcca

SEQ ID NO: 765662 - DNA, 88 bp, Homo sapiens
ctggctgcggccccggctccggcccccgcaggagcaggagctggaggagggaatgatattcagtggtgtttttctcaggtgaaaggag

SEQ ID NO: 765663 - DNA, 100 bp, Homo sapiens
cagagactcactctcctgggatgttctcatggtttcccatcctcttccctattaagtcgtagtcgagatcgggatcggtatagacggagaaatagtcgga

SEQ ID NO: 765664 - DNA, 100 bp, Homo sapiens
gggcccaactggaattccacttacggctgccactgcagagccccgccatggaagacacgccgttggtgatatcgaagcagaagacggaggtggtgtgcgg

SEQ ID NO: 765665 - DNA, 75 bp, Homo sapiens
tgtgccggagaacacgggctacacgtatgcgctcagttaattggccttggtcctcacagctccaaaaagaaacag

SEQ ID NO: 765666 - DNA, 75 bp, Homo sapiens
tggagggtggcatcatgcaaagaatggatgatgttggagaaaaattagagcatatggggaatacaccattaaaaa

SEQ ID NO: 765667 - DNA, 88 bp, Homo sapiens
gcaacagccccttcgtcccaaagcctaacccagatggagagggagaagattgtttgggagtttgagcagctgtatcactccttaaagg

SEQ ID NO: 765668 - DNA, 82 bp, Homo sapiens
cccaggcgcgcagctgggcgcctccttcctgcaggccaggtggacggcctgttcatcatcgggtggatgtacctgcctcccc

SEQ ID NO: 765669 - DNA, 88 bp, Homo sapiens
ggcgctcagcccccggatcagcctgcctctgggtgtctgctttttcaacgtgggagaaggagttgcacaagatagtttttgatccccg

SEQ ID NO: 765670 - DNA, 93 bp, Homo sapiens
cgaagttctcgcgagagtcgtctcctcgataccaaggcccttaagtgagaagcaggaggctttgatgaccaagagccccgcatccaatgcacg

SEQ ID NO: 765671 - DNA, 75 bp, Homo sapiens
aagatcatgggcaaaggacagatccagcatccgcagtgtcatgcagaagtacctggaggaccggggcgaggtgac

SEQ ID NO: 765672 - DNA, 100 bp, Homo sapiens
gcctcccgagaagctgggattacaggtgccatgtttcagaacagagtaagacccctggtaaagaagaactgaagatattatacagataccagatatagcc

SEQ ID NO: 765673 - DNA, 100 bp, Homo sapiens
tgacacggaccttggacagagaagtaatcgctgtttatcaagaaatgaatggggtgctgaaaggaatgctctcagaatggttttcctccgggttcctgaa

SEQ ID NO: 765674 - DNA, 83 bp, Homo sapiens
aacgaggggctggaacacctcgccaaagcagagaaataggtgacgagaacaagtcagtgcgcgaccgtttcaacgcccgccag

SEQ ID NO: 765675 - DNA, 119 bp, Homo sapiens
tcaagccccagccaagcaatgcaggaatatatcgcagtagttaaaaaactagatccaggttggaatcctcaggagggtgcatctgcccggaagactcagactcctgcagcccagccagt

SEQ ID NO: 765676 - DNA, 75 bp, Homo sapiens
aagtgattctcgtgcctcagcctcacaagtaactgggattatacaggatattggtgctggaaaaggcaaatacta

SEQ ID NO: 765677 - DNA, 96 bp, Homo sapiens
cacagaagaagaaatgaaactggtgcacagatataaagaaatgttcaacgttgctggtccgagctatacctgtggacattggtttctccattgaag

SEQ ID NO: 765678 - DNA, 100 bp, Homo sapiens
ggagcccgggacccccgggggcgcaggtgtcatggagaaactccagctgggcccagagattctgcagcgggaaaatccaaggcttatttatgccaggctg

SEQ ID NO: 765679 - DNA, 76 bp, Homo sapiens
gagaggaccccggtacatctgaaagccgggaaatgggactttgaacatgtcggggatcgccctcagcagactcgcc

SEQ ID NO: 765680 - DNA, 83 bp, Homo sapiens
gccgacatgttcacgcacgggatccagagcgccgcgcacttcgtcatgttcttcgcgccctgaggacaagaattttgggcaga

SEQ ID NO: 765681 - DNA, 100 bp, Homo sapiens
cgctaccggaggatttataccgctgcgctcaatgacagggaccaggggggcggcagcgctggacacccagcctccagacccaacatgagtgaagtttcct

SEQ ID NO: 765682 - DNA, 98 bp, Homo sapiens
tgggatgtgaaaactctgttactgaagctgtgttggggtggaagaggaggaggcgcccgacatcgacatataccactgcccaaactgtgagaaaaccc

SEQ ID NO: 765683 - DNA, 83 bp, Homo sapiens
gaagcttctgaaccatccacacatcataaagctttaccaggcccccacccccgctgccccccagcccctgcagatggggccct

SEQ ID NO: 765684 - DNA, 100 bp, Homo sapiens
attgaaatggacagtggagatgaagcctaagaatatgatcaggataagcactgttcaaaggatgccctacttgcaggattaaaacaagatgaaccaggac

SEQ ID NO: 765685 - DNA, 75 bp, Homo sapiens
gtcagtgcgccgctctccagcccgcttgaacgattactgtggcatgatcctccaccattcacactctaccctgga

SEQ ID NO: 765686 - DNA, 90 bp, Homo sapiens
gtcctccggaatcttctagtttatgtgcttccaaatcagacgaaggtctcccagatggtctaaggaagctgtgctgaatggtttggtggc

SEQ ID NO: 765687 - DNA, 100 bp, Homo sapiens
gtccgcaacctccgccagcgtcggtccctgggcaggtgtgggccagaagcggactcctagaagaggggagcagcaaggatggaatgacagccgtgggccg

SEQ ID NO: 765688 - DNA, 82 bp, Homo sapiens
atcaaggacgtcctggacagcgaaggatccgcaaggatgctctccgggcgctcaactttgcgtacacggtgagcacacagcg

SEQ ID NO: 765689 - DNA, 75 bp, Homo sapiens
ggcgggctggagacatggaccgcggcgagcaagagaccttcagagaagacatggcttccagaaaagagaatgcga

SEQ ID NO: 765690 - DNA, 74 bp, Homo sapiens
gaacgtgcgggaagagaagatcatcgagcatttcaaacggggacggcaaaacagaacagaaaggcggagataaa

SEQ ID NO: 765691 - DNA, 75 bp, Homo sapiens
gaaactgccattaacctccagctttttaagcagctccgacagttagttaatatgtgcatcaacccagatccagag

SEQ ID NO: 765692 - DNA, 75 bp, Homo sapiens
caccactgacctgggacagtgaatcgcctgagagtgcagaggatgcatcttatcgactacctgctcctcctgctg

SEQ ID NO: 765693 - DNA, 74 bp, Homo sapiens
gcaaataacttttccttggagagtcataacatatcactgactggtgttatccacgtgaccaaggaagtgaaaga

SEQ ID NO: 765694 - DNA, 75 bp, Homo sapiens
ccgtaccatggcggagaagactcaaaagagatagtgtttttagaagaagcatctcaacaggaaaaactggccaaa

SEQ ID NO: 765695 - DNA, 82 bp, Homo sapiens
ggctttgcagcggggacttcggcggcggcgcctcaggcacctcggcccgggttatggaaacaaaggacatgctttacatcgt

SEQ ID NO: 765696 - DNA, 50 bp, Homo sapiens
tggagtagttttctctagcaaagatctatagcatgatgctgcgattatct

SEQ ID NO: 765697 - DNA, 75 bp, Homo sapiens
cctaccaggagcatgtggccttacacgcccccatcacgaggaagaaaggacccggtttcaggagctgctggccag

SEQ ID NO: 765698 - DNA, 130 bp, Homo sapiens
tccgggcgcgacagaggcagcgagcgggcctggagaacatggacagggcggcgcagcgcttccggctccagtttgtgaagcctggagctgagaattcaagagactaccctgacttggcagaagaagcagg

SEQ ID NO: 765699 - DNA, 87 bp, Homo sapiens
ggactcatggaggctgagcatttattcagataagccaatggacacgtcagtgttatctgaagaaggaggagagccttttcagaagaa

SEQ ID NO: 765700 - DNA, 90 bp, Homo sapiens
aataccaagcagcagaacaatgctggaaacctgtaggaagtgtcagggactctggaaagaacataatggcctcacctgtgaagagctggc

SEQ ID NO: 765701 - DNA, 74 bp, Homo sapiens
ccgggcccgcgtccgctcccgcgcccgcttccccgggcgctgcctggacaggcctgcctgcgtgctgggacatg

SEQ ID NO: 765702 - DNA, 82 bp, Homo sapiens
aatactttatactcttggactacatctttctcgggctcaggatgacaaaagatgtgagtggatctatcgaggctctacacgg

SEQ ID NO: 765703 - DNA, 75 bp, Homo sapiens
gccgggagtcgccccctacccgcttctcgtagtcctgggagcacagcagaagtactttaagtttgccatgtaccc

SEQ ID NO: 765704 - DNA, 74 bp, Homo sapiens
cggcagaccccaggcatatcctcctcttcatcctggagcacatcatggtggagatggaataaactgagactgca

SEQ ID NO: 765705 - DNA, 75 bp, Homo sapiens
acccagtggatgtaaaccccttccaggctagtgatacagagcgagatggactagccccagaaaagacatcaccag

SEQ ID NO: 765706 - DNA, 74 bp, Homo sapiens
tctgggggtcctctctgagtcaaatccagtggcgcctgtgtctggcagagctggtgtgagacgagacaatcctg

SEQ ID NO: 765707 - DNA, 96 bp, Homo sapiens
ggagcccatcggccaggggtggtcaccaaagcaggactcatcctctttgggaatgatgacaaaatgatctccgcaaatgacttcattgccaagaag

SEQ ID NO: 765708 - DNA, 82 bp, Homo sapiens
aaggcttttgctgttgtggcaacgggatccagcacacggaagacatggagaacgagatcgacgagctgctgcaggagttcga

SEQ ID NO: 765709 - DNA, 83 bp, Homo sapiens
tggcacgcagcctggggactctgcctcgtgccgctgagcctggcgcagatcggcatggaagaggagatggttcgtgttacgca

SEQ ID NO: 765710 - DNA, 101 bp, Homo sapiens
gcgcgatgagatcaaacagctggggagggagatccgcctgcagctgaagggccgagtgtactacttcaaccacatcactaacgccagccagtgggagcggc

SEQ ID NO: 765711 - DNA, 83 bp, Homo sapiens
agctgcttagacgctggatttttttcgggtagtggaaaaccaggccgaatacatcaagcaatggtaacatctttaaatgaaga

SEQ ID NO: 765712 - DNA, 50 bp, Homo sapiens
caatctgaatatcaaaatagcaggatctggagtgggagagcaggatgggg

SEQ ID NO: 765713 - DNA, 100 bp, Homo sapiens
taaagttgcagcgaggagaagcgcagcgacggcgtcgggagagcgcgcctagccggctcgcgagtgatctttagacagtgactgagtatggatcatttga

SEQ ID NO: 765714 - DNA, 100 bp, Homo sapiens
atgtatccgggaggtcaacgaggtcatccaggagcaggacccgtggtaccattggccctggcaagtatggctatggtaaggccccatatatcttaccact

SEQ ID NO: 765715 - DNA, 50 bp, Homo sapiens
cccagcccctctccagctcgaaatcgaattacatgaatgacagtcttcga

SEQ ID NO: 765716 - DNA, 99 bp, Homo sapiens
agattagacaacagagtcattgatcttaggatagtgtgtgtaccatatcagtggcgtgtaactatgctcatcattgttcttgtcaatgcctttgtgtct

SEQ ID NO: 765717 - DNA, 97 bp, Homo sapiens
atgtaattacagaactcagctttggaacatttcaggcctggcacggaatgcagtttttacataagttacacatcatctcagagttggagcacctgac

SEQ ID NO: 765718 - DNA, 97 bp, Homo sapiens
aggagccctggaatgtgaagagacatgagaccatagccaaacccccaggcccattggaactacttcagtttgatcacgggcagtcaaatccaactta

SEQ ID NO: 765719 - DNA, 97 bp, Homo sapiens
gtggctccgcagatacctggagaacgggaaggagacgctgcagcgcacgggcgtggtgaccaagatgaagatgcagaggaccattgtcatccgccga

SEQ ID NO: 765720 - DNA, 83 bp, Homo sapiens
agcggcggcggctggactaaacaggtcacctgcagaaaccaaggtgtatgttggtaacctgggaactggcgctggcaaaggag

SEQ ID NO: 765721 - DNA, 97 bp, Homo sapiens
ttatgagagatttttgggacctgaaatcttttttcatccagaggttcatccacataaaacttatttcacagtagctgaaaaagggagttttccagat

SEQ ID NO: 765722 - DNA, 95 bp, Homo sapiens
aggcttccagtacgagctggttaggaggcacagggcgtcggacctgcacgagctgtctggtattgttgcagcatctggcagtgagactgaggatg

SEQ ID NO: 765723 - DNA, 74 bp, Homo sapiens
gaagaacgtgccttcatgctgctgctgcaggaggaaactggcgatggaatatgagaggagccctctggaaagaa

SEQ ID NO: 765724 - DNA, 51 bp, Homo sapiens
ggaggatttgccctgccctggctgtggggggggccctcagcctcttggcct

SEQ ID NO: 765725 - DNA, 100 bp, Homo sapiens
cttcccagccttcagaaattgccggtctgggagttgggggcaaggagaagatcctgaacacagatatgtagaactcttcttgaattctacagcaggagca

SEQ ID NO: 765726 - DNA, 74 bp, Homo sapiens
acaaatgttcttaatggcatctagaatgaccctatcagatttggatatgtccttcatatttgattggatttaca

SEQ ID NO: 765727 - DNA, 90 bp, Homo sapiens
gtccgccccgcgagcacagagcctcgcctttgccgatccgccgcccgtccacacccgccgccagctctcctatgtggacgccgagggcaa

SEQ ID NO: 765728 - DNA, 50 bp, Homo sapiens
tgacgtgatggtgaacggcaaggaatgtaagaagcacttggcaggcttgg

SEQ ID NO: 765729 - DNA, 90 bp, Homo sapiens
ggattccaagtaactcttatttggtgacttcatggtcatgacgattttcttcaatgtgagcaggcggtttggctatgttgcctttcaaaa

SEQ ID NO: 765730 - DNA, 100 bp, Homo sapiens
ctttatcctggtcatcttctatttccaaagtggtgtttggactctagaccatgtgcctaggtagaagtttttcctttctccgcagctctgctcccctagc

SEQ ID NO: 765731 - DNA, 80 bp, Homo sapiens
tctcatgaatcaaattattagctgggcaacattaggaatggggcctctcaatacttctaggactgtgtattgctctgttt

SEQ ID NO: 765732 - DNA, 100 bp, Homo sapiens
tatgagagagaatgaggcatatcaagcatcttgcaaagaaagattcttcagtgaggaggagaatggaggaatgtatacaaagactatcgcttccttgagc

SEQ ID NO: 765733 - DNA, 75 bp, Homo sapiens
caggaaggtgaccatgtttctcagacacattcatttttacaccccagaaatggactcggcactactgcgccattg

SEQ ID NO: 765734 - DNA, 75 bp, Homo sapiens
tgtttgccatggaccccaggaatggttacatggagccccactacccctcctccagagttgtgacctggaagttgc

SEQ ID NO: 765735 - DNA, 100 bp, Homo sapiens
ggatgatgcagatgtacagacacaagcgggccaacaaataggtttcagcaagcagatggtggaaattcttcacaaacataatattcagtttagcagtttt

SEQ ID NO: 765736 - DNA, 75 bp, Homo sapiens
agcagtgggtcccaggacgtgcaccagaaaagagattgggctaatggatactacagacaacagagaaaacttgtt

SEQ ID NO: 765737 - DNA, 89 bp, Homo sapiens
ccccgaggaggaagacgaatcgttaaacatctgaaagggtcagggtggagagattcaaccagttagcgtgaaagttggagataaagttc

SEQ ID NO: 765738 - DNA, 90 bp, Homo sapiens
caccttctgtgcgtcctggactcctctgagaaacagtgacagaggccaagcaagaattaataacctaccctcagcctcagaaaacatcca

SEQ ID NO: 765739 - DNA, 90 bp, Homo sapiens
cgacgggcgcctggaggagctgtaccgcggcatgtttagaaacctgctgaagtggtatgctaaggagttcaaagacccactgctacagga

SEQ ID NO: 765740 - DNA, 75 bp, Homo sapiens
gggagatccacagctaagacgccgggactccctggaaacctagaaatgggcggcgactggcggcgcgatggacct

SEQ ID NO: 765741 - DNA, 100 bp, Homo sapiens
ggcgtcaagctggtctccatcggggcagaagacgtgacgctgagcccctggagtggggacagcaagtgccaccagcgccgggtgctgacgtacaccatcc

SEQ ID NO: 765742 - DNA, 100 bp, Homo sapiens
catccagcccctggactccttgcttccccccagctccctgtgcagatgcagccagcaggaaagcaatccaagtcctgggcactgtcaaatggttcaacgt

SEQ ID NO: 765743 - DNA, 50 bp, Homo sapiens
acagaggagtggcgggggagaatctcttgttaattggccttggtcctcac

SEQ ID NO: 765744 - DNA, 95 bp, Homo sapiens
ccccgaattgacctgatcgtgtttgtggttaatcttcacagcaaatacaggttattatcaacccttactttgctaagcaagaaactgaactgtta

SEQ ID NO: 765745 - DNA, 100 bp, Homo sapiens
ggagccagccggagctacagaatccttgcagggccaagatctcttcaacagggcttcaccactggaacaagcacaaggtctgggataaaagtgaaagtgg

SEQ ID NO: 765746 - DNA, 83 bp, Homo sapiens
caaagacaggagcgtcccggtgcggctgcacgtctcgcggatcatgctgttatggaaacaaaggacatgctttacatcgtcac

SEQ ID NO: 765747 - DNA, 100 bp, Homo sapiens
cgctcgtactggagcgaagagcggcctcctgaaggaggggaagggacgtgggggcggccacggcagactgtgccctgtccacggtgcctcctgcatgtcc

SEQ ID NO: 765748 - DNA, 50 bp, Homo sapiens
agcgagccgcgacccgagctgcccccagcagtacctatgggagaaggagg

SEQ ID NO: 765749 - DNA, 82 bp, Homo sapiens
ggagctgtgcagccgcgaggaggcgcgggaggtgttcgagaacgaccccgagacggtccctgtgcgttttattgcgacctgc

SEQ ID NO: 765750 - DNA, 100 bp, Homo sapiens
agtcctgataggccggactcaaagaaacacggacaacataatatatcctggggtttgccaacttgttaataagatggaggagaatactggcaaggttaag

SEQ ID NO: 765751 - DNA, 75 bp, Homo sapiens
cattgatcccaggaaacaagagattgttgctgggaagatggtgaaaggaatgggaggtgctatggatttagtgtc

SEQ ID NO: 765752 - DNA, 74 bp, Homo sapiens
tttggtggcatctgcctaacgttcacttcactcacggaagtcctgacggccacgctggatctggaggacgtccg

SEQ ID NO: 765753 - DNA, 133 bp, Homo sapiens
gacacctcctggccatgggggacgtgctgtccacgcacctggacgacgcccggcgccagcacatcgcaggtgctggagaatctggtaaaagcaccattgtgaagcagatgaggatcctgcatgttaatgggtt

SEQ ID NO: 765754 - DNA, 75 bp, Homo sapiens
cccaaacttgctggtcactgggagcaccagggaaaaattggagttaagtttaatgttgggacagatgacatcgcc

SEQ ID NO: 765755 - DNA, 100 bp, Homo sapiens
ctcgcaggagttagctgagaaggctctagggaaacacaaggagaggatagggcacagctcactaaatagcctgcctgatttttttctacctgaggctatg

SEQ ID NO: 765756 - DNA, 80 bp, Homo sapiens
gttcagatatcttgccccggtgggccatcattggttggctcctgacaacgtgcacggccctcgggaccaaggatcacgtc

SEQ ID NO: 765757 - DNA, 100 bp, Homo sapiens
cttgacacagccaagatgatgacttcatcaggcagatactgtgagggctacaagcttctaaataagcacaaaggtgaagctgtacttcacaaaaacagta

SEQ ID NO: 765758 - DNA, 74 bp, Homo sapiens
accgagagcgtgaccgagagcgcgaatatcgtcatcgttagaaggaaactttgaaaagcaccccaaagaactga

SEQ ID NO: 765759 - DNA, 101 bp, Homo sapiens
ctcggccagctgcagtccagctccagctaccagggcctgacacatttagggaagggcacccttaccctctgcccctaccacagcgaccggcagcttatgag

SEQ ID NO: 765760 - DNA, 100 bp, Homo sapiens
cgagaaccgcagggactggccgaggtatccgttacagcactgatgtgagtgtagatgaagtaaaagctttggcttctctgatgacatacaagtgtgcagt

SEQ ID NO: 765761 - DNA, 96 bp, Homo sapiens
gctatgaccaggtgctccacgaagacgaaaccacgggggccgaaggccagagaccaggatttggctacggaggcagagcgtccgactataaatcgg

SEQ ID NO: 765762 - DNA, 120 bp, Homo sapiens
gtggttaagaaccaactggttgaggttcaatgcagacaagacggatgtgatgctgttcacacaaaagatgttggacaatttctacaattttgcttcatcatttgctgtctctcaggccca

SEQ ID NO: 765763 - DNA, 50 bp, Homo sapiens
ttcacggcgccgagccgcggtccgaatgtatcggcaagcagtgtaaacgg

SEQ ID NO: 765764 - DNA, 98 bp, Homo sapiens
tggaacctgctcagagggacctctatagagatgtgatgctggagaattacgggaatgtgttctcactggagtcgggcgctgctgtctgtgaattcttt

SEQ ID NO: 765765 - DNA, 75 bp, Homo sapiens
cataaagaaagcaaagcgcagaaatgttggatttgaatttggtgaggattcatcaacctccagtatgatgtctgt

SEQ ID NO: 765766 - DNA, 75 bp, Homo sapiens
agagttcaaggaggccttccagctgtttgaccgaacagctctgcttatgataatgtcaacaaagttcgagtagct

SEQ ID NO: 765767 - DNA, 90 bp, Homo sapiens
ctgagtagctgggactacaagtgtgcatcaccttcgaccaggccaacctgaccgtcaagctgccagatggatacgaattcaagttcccca

SEQ ID NO: 765768 - DNA, 100 bp, Homo sapiens
gtacccgctgttctgcttcctgctgctctgtctcagcgccgcctccctgcttcttaacaggtatggcatgaattgccttattcagtttgaagattttgcc

SEQ ID NO: 765769 - DNA, 118 bp, Homo sapiens
caaggagtcacggatcggattcctcagctacgaggaggcgctgaggagaggcccagattgccttcctgcagggagaaaggaagggccaagaaaatttgaagaaggatcttgtgaggag

SEQ ID NO: 765770 - DNA, 83 bp, Homo sapiens
ccgcccgcctgctcggcgaccaggcgggcgctaatattgacacctgctcagaagaccagaggaccccgttgatggaagcagcc

SEQ ID NO: 765771 - DNA, 75 bp, Homo sapiens
ctcccgtgtagctgggattacagagctttgcagctgccctgatggagatgtccggcccctacaacagctcccctc

SEQ ID NO: 765772 - DNA, 50 bp, Homo sapiens
gcctgcggcgcctgggcgctctgaggaagcggggagaggtggtgagagat

SEQ ID NO: 765773 - DNA, 90 bp, Homo sapiens
ggagggcgtccgagtcaacaaccgcttcgagctgggagtgcatccgccccaacccttttccccctcgtctcctgtgagaattccccgtcg

SEQ ID NO: 765774 - DNA, 100 bp, Homo sapiens
gcctcgtgccgttacggccatcacggcggccgcagtggcgtcctggagccctcctcaggtcatgatgatgggcagcgcccgagtggcggagctgctgctg

SEQ ID NO: 765775 - DNA, 90 bp, Homo sapiens
aaagccgaatccgaacttgaattctgtgcggcggattgcagagctgagactaaggtgtcagtatgttcttcaagctgctctgctcctggg

SEQ ID NO: 765776 - DNA, 100 bp, Homo sapiens
gagctactgtactggctattggaaggaggagattctgaagataaggaggcctccaggcccaaggtcagcatcccactgtcagccatcattgaggtccgca

SEQ ID NO: 765777 - DNA, 98 bp, Homo sapiens
ttcctcctgattatagattagaagaggtcaagttttttgctccactcaagcctgttagaatcaccatggaatacagctccagtgggaaggccactgga

SEQ ID NO: 765778 - DNA, 49 bp, Homo sapiens
gaagaaggccagctttgaggaaggcaaacatgagacagttggagggcag

SEQ ID NO: 765779 - DNA, 50 bp, Homo sapiens
tttccaattttatggcctggagtgtacaggtttgcagattccgccagcag

SEQ ID NO: 765780 - DNA, 95 bp, Homo sapiens
ggattataggcgtgagccaccgtgcctggctgaagtggcactatcacaacagagtgacataatggtgggataacatggacacttgtcttcttcct

SEQ ID NO: 765781 - DNA, 95 bp, Homo sapiens
gttcgtttctggtcactgctccaggaagccaccttactctgagggtcaagaattgccgcttccttttagttactccactcatctctgcccagctg

SEQ ID NO: 765782 - DNA, 50 bp, Homo sapiens
acgacaaggcttggaaacatacttacagctctctatcaatatcagctcac

SEQ ID NO: 765783 - DNA, 87 bp, Homo sapiens
ccagccagcagcccgccagccgccgggagggtaaaccagacttgaatacaacattgccaattagacaaacagcatcaattttcaaac

SEQ ID NO: 765784 - DNA, 100 bp, Homo sapiens
gacatttctgaagcgagcgtcttcgatgtttcgaccacttggcacagtaacgatgacgatgtgtatagggcgcctccaattgaccgttccatccttccca

SEQ ID NO: 765785 - DNA, 100 bp, Homo sapiens
gtttagcacgatgagctcaatcggcactgggggtgctggaaatgtaaacaagaatagactgttcattcctgatggcttttagtctatactaacatattgt

SEQ ID NO: 765786 - DNA, 100 bp, Homo sapiens
ggtggacctgctggcgcaggacgccgacatcgtgtgccgctgccagagatgtgaactttgtccccataaggatggagctttaaaaagaacagataatggg

SEQ ID NO: 765787 - DNA, 75 bp, Homo sapiens
ggagatgacaacgttagagaaagtcatcaatgagacctggaattccttcgacaatcctgagtggttttatcggca

SEQ ID NO: 765788 - DNA, 100 bp, Homo sapiens
tgacgccatgtcgggttattcgagtgaccgagaccgcggccgggaccgagggaaagatgaatgggagggctgattttcgagagccgaatgcagaggttcc

SEQ ID NO: 765789 - DNA, 100 bp, Homo sapiens
tgcggaggctgcctcggcggagcagaggaaccacacgctgatcatgtcagaaattggctttggaaaaatggaaacctacatcaaattggaaaagcttgga

SEQ ID NO: 765790 - DNA, 75 bp, Homo sapiens
ccggagcaggcgaggtggccggagccgtgtggaccaggaggagcgctcatcaattcctgaagattgccaagcccc

SEQ ID NO: 765791 - DNA, 75 bp, Homo sapiens
gcggagagcaacagcgcgccgtgctggacccaaaggagacaacatttatgaatggaggtcaactatattgggacc

SEQ ID NO: 765792 - DNA, 90 bp, Homo sapiens
aaaaacaaatgctaaaaaggatggaagtgactggattctcaatggaagcaagattactgaagatttcattgctacatatcaggccaatta

SEQ ID NO: 765793 - DNA, 50 bp, Homo sapiens
cgcggccccggccggaggagacaggttaattatagaaaatgccaagtagg

SEQ ID NO: 765794 - DNA, 103 bp, Homo sapiens
aaagaaagctgcgttaatgtttgcaaatgcagaggaagaatttttctatgagggcaccattcccaaactcacagctaaatccaactgccgctatgaaattgag

SEQ ID NO: 765795 - DNA, 99 bp, Homo sapiens
cttcagaaaagagtgggacagggacaagcatatctaagaggctgaacatgaatccacagatcagatgcgcctgcttcctctgcgccagaagaaggccca

SEQ ID NO: 765796 - DNA, 82 bp, Homo sapiens
ggccgcgccgcgcctcagctctgggtggcccagttgaaatccttcccttcctctaccttggaagtgcctaccatgcatccaa

SEQ ID NO: 765797 - DNA, 75 bp, Homo sapiens
gcgagaccctagaggcctgcggcctgcggggacggcaaaacagaacagaaaggcggagataaaaagaggggtgtt

SEQ ID NO: 765798 - DNA, 82 bp, Homo sapiens
tcaggccaaggctccaagtagtctgagtgatggtctcacagatttcaagcctggctactggattggtgtccgctatgatgag

SEQ ID NO: 765799 - DNA, 100 bp, Homo sapiens
ctgcaagactgtcgacctaaagcctgactggggcaagtatgagaataatgttatcactattgatctggttcaaaattcttctcaaaaaactcagaatgat

SEQ ID NO: 765800 - DNA, 80 bp, Homo sapiens
aggtgaatggcagcaaggtgggcccggacggcacaccctacgttaccgtgctcaagcacttgcacctcctgcgccgccgc

SEQ ID NO: 765801 - DNA, 90 bp, Homo sapiens
agaccatgtgtgtctgatctgctgggatcctagagctggaacagggttccaaaaggtcccaggtgtcctctccgtgcagtcggaaaaagc

SEQ ID NO: 765802 - DNA, 74 bp, Homo sapiens
ttctgccaagcatagccaccacggttaaggtgagctcatcgattcagcacccagaaacacctctgcacatttct

SEQ ID NO: 765803 - DNA, 100 bp, Homo sapiens
ttttctcttcttctgaaaaagagatcttgctatgaagtcttacactccatatttcattctcctgtggagtgctgttgggatagcgaaggctgccaaaatc

SEQ ID NO: 765804 - DNA, 83 bp, Homo sapiens
ggatttttgtcaagattggataaaccatgtatcacattgattgtagaggtgagcatctgcctggagtgtaacagcagcaaact

SEQ ID NO: 765805 - DNA, 142 bp, Homo sapiens
tccagatgcgattttagtggaggactacagagccggtgatatgatctgtcctgaatgtggcttggttgtagattgcccaaggactccagatactccaaataatgaccctcgttgttctactagcaacaatagattgaaggcc

SEQ ID NO: 765806 - DNA, 81 bp, Homo sapiens
ttcctggaggaatccgagaagagcagagcggagggagccccagacacgccctgggcgctgcctatggcacagccaagagcg

SEQ ID NO: 765807 - DNA, 101 bp, Homo sapiens
agaggcgctttcactggaccgcgccggctgcgctgcaggtggatgtgaagaaaacagcattggccttggccattacagactcagagctgtcagatgaggag

SEQ ID NO: 765808 - DNA, 99 bp, Homo sapiens
caaaggcagactgagcgccagagaggacgtttccaactcaaagctgtactttcgcagtcaagtcaaaggggagacggaccgagaacggctgctccttgc

SEQ ID NO: 765809 - DNA, 82 bp, Homo sapiens
ggcgcggattcgccgaggcaccgaggcactcagaggagacaaatggaatcctgtgctgaacccgaatcttccaaaaaacagc

SEQ ID NO: 765810 - DNA, 50 bp, Homo sapiens
gtggactttgctctggaatctggtgtgaaaaccttgttcaatccagcccc

SEQ ID NO: 765811 - DNA, 97 bp, Homo sapiens
ggctggtgcccgagtcggccaagcatgggcaaccactcaggacggcccgaggatccggaaccaggaccccaggagcaagcacaagttcaaaatccac

SEQ ID NO: 765812 - DNA, 82 bp, Homo sapiens
cgaatccataacaagttccgatcagaggtgaaaccaacagccagtgatatgctatacatgtactgccaaatctgtcgaaagg

SEQ ID NO: 765813 - DNA, 100 bp, Homo sapiens
atgaagaacagtcacaggacaggctgaccggttccctgatgtgttacctgcttctgctactgatccaaactgcagaacttctcattcatccccaaggcct

SEQ ID NO: 765814 - DNA, 101 bp, Homo sapiens
cctgggaggaatatttccgactggctttgcaagagaaactgtctacgcgggatgtagctcattttgggatacgagtctccatcgtggagcctggcttcttc

SEQ ID NO: 765815 - DNA, 100 bp, Homo sapiens
cttttactttgccggtagaacacagttatgggtcgcaagaagaagaagcagctgaagccgtggtgctgatcttcttggaaacagaattgttctacaaagg

SEQ ID NO: 765816 - DNA, 83 bp, Homo sapiens
acacgtggatgttcaaagactcaacgggtttttagaacttcagccataaaaatgggcagaattttccttgatcatatcggtgg

SEQ ID NO: 765817 - DNA, 83 bp, Homo sapiens
cgcggcgcgagggaggctacacgtgcgtctgccgcccgcgcttcaccgggtggcccagttgaaatccttcccttcctctacct

SEQ ID NO: 765818 - DNA, 50 bp, Homo sapiens
tttgagacttctgctccttgggacaggtagagcagctgacagaagagcag

SEQ ID NO: 765819 - DNA, 100 bp, Homo sapiens
gaccatcctgggcggcctggggctcgggctgggcggtggcgactgcagaggcgaatctttctgcattgaatttgaagatttctgaacagaaggaaatatt

SEQ ID NO: 765820 - DNA, 90 bp, Homo sapiens
tggctataatagaaggagcaaaatgtataaagggagattctagtatacaggtgaatggtgatattccccctcggttaaaaaagagtgctc

SEQ ID NO: 765821 - DNA, 87 bp, Homo sapiens
aggtgatgcctgaagctcaagggactgtgtccaccctcaggtggacattgaagtggacctaattcggttttccttttaaaagccccg

SEQ ID NO: 765822 - DNA, 100 bp, Homo sapiens
ttctcttgtactggctggtggatttgcggatgaagtcgattgttaaaatgagtcttcggaagcaaacccctagtgacttcttaaagcaaatcatcggacg

SEQ ID NO: 765823 - DNA, 97 bp, Homo sapiens
acactccaaatgttgcgcttgatggatttactctggaaagaagctggtttggatcttcggtggagccgccaccaaaatgcagattttcgtgaaaacc

SEQ ID NO: 765824 - DNA, 80 bp, Homo sapiens
gactctcttcgctctttgcatcttaactgcagggattgttcccagaaagggagaccatttcatctcttcaggttgctcat

SEQ ID NO: 765825 - DNA, 75 bp, Homo sapiens
cctgtttccatctccagaaattccactgaagatcgcttcacgttgaggaaccgcagattggaggagaaggaatga

SEQ ID NO: 765826 - DNA, 51 bp, Homo sapiens
tgtcagttttctgtggatgaagagacaaagcatggaggacacaagaatggg

SEQ ID NO: 765827 - DNA, 96 bp, Homo sapiens
cggccggcgaaaggagctggtgcctgtgcaagttgttgaggctttacaggaagtatggtgctggcatctgcttggcttctagagagtcttacaatc

SEQ ID NO: 765828 - DNA, 82 bp, Homo sapiens
gtcgcggagccgcgcagccctcggagcacggagtacttcttgcaagcagagctgacaagcaacgtcttaaaaacaggcgtgg

SEQ ID NO: 765829 - DNA, 98 bp, Homo sapiens
ccgcccagttggcccagaggatctcttctaacatccagaagatcacacagtgttccacttccggctcctgcgtcgctccggaagcctgcgagttccgg

SEQ ID NO: 765830 - DNA, 90 bp, Homo sapiens
cggcgggtggcagcgatccgcgggctggcgacgtagaggaggacgcctcacagctcatctttcctaaagaaaaatggctacaaacttcct

SEQ ID NO: 765831 - DNA, 50 bp, Homo sapiens
gcttcctacagcagtgcaagttcacaggctaccacatactgttgattgtg

SEQ ID NO: 765832 - DNA, 99 bp, Homo sapiens
aagaggaggaggaagccgagtttggcgaggaggatcttttccaccaacagcctgacatttaccccggtaactgctgggcatttaaaggctcccaggggt

SEQ ID NO: 765833 - DNA, 88 bp, Homo sapiens
ccgtccagcagatggcggatgccctgcagtacctgcagaaggtctctggagacatcttcagcaggtgtggagcagaggatcatgtgga

SEQ ID NO: 765834 - DNA, 75 bp, Homo sapiens
ggcgacttcatctggggcgtcgtgcgcaaaggcctgcagtgcgcgctttaccaaacgagaaccagaagatacgaa

SEQ ID NO: 765835 - DNA, 100 bp, Homo sapiens
gcggcagtgtcggcagtccaaccgcgactgcccgcaccccctccgcgggggtcccccagagactgctggccagacccccaagctagcccgccaggcctcc

SEQ ID NO: 765836 - DNA, 74 bp, Homo sapiens
ggaagtcacccagcccccaaggattctgggggaggcctcaggagcatcagatccatgctgctgctgactcggag

SEQ ID NO: 765837 - DNA, 98 bp, Homo sapiens
aagatgatgtgagtgatgaggaaggacaggaactctttgacacagaaaatgttgttgtatgccaatatgataagatctgcttgacatttacctggaag

SEQ ID NO: 765838 - DNA, 100 bp, Homo sapiens
gggcggtccgttgccaaagccagaatctaggtcaacctattaagatacgtttccaggaatctgaagaacgaccaaaattatttgaagaactagggaaaca

SEQ ID NO: 765839 - DNA, 75 bp, Homo sapiens
atcttctggagtactcttattttgaaaaggccctggccaacgtcaacattgggagcctcatctgcaatgtagggg

SEQ ID NO: 765840 - DNA, 82 bp, Homo sapiens
gaaacatggcttccttcaccaagcacatctgcgccatctgcggggaccgctcctcaggttaacacagaaatctgcctcctgg

SEQ ID NO: 765841 - DNA, 75 bp, Homo sapiens
gtggaattcgcgaagctgccaaagccttagacaacaagtgcagccgcggagccctgtacacaggcttttccatcc

SEQ ID NO: 765842 - DNA, 100 bp, Homo sapiens
gaaggcagccgagaaacacttttgcatcaggtggttgtgtcaaaccgattggtgacatctccatgctgtattgtcacaagcacatatggctggacagcaa

SEQ ID NO: 765843 - DNA, 75 bp, Homo sapiens
ctgaattcattgaggaccagtcaattctaaactgttcagcttgttggtttagatgaggagagttcagagtttatt

SEQ ID NO: 765844 - DNA, 75 bp, Homo sapiens
cttggccaaatggacgggactattaaggatagagggaggaatcagcagcttggaaattcaagcacgtgatctggc

SEQ ID NO: 765845 - DNA, 74 bp, Homo sapiens
cgtggagcacaccggaggagccaacagcgccccccgcgatttcgcggtctttgcagcacgctggctcttctcct

SEQ ID NO: 765846 - DNA, 100 bp, Homo sapiens
ccaggggcagccggctctggtgctcccagaagagagatttacaaacgaggaccacctggcagttcataaacacaagcatgagatgacattgaaatttggc

SEQ ID NO: 765847 - DNA, 100 bp, Homo sapiens
acaaactaacagcagaagctattcagacacccctgaaatctgccaaaagagtcagtggatcggtggggaaaatgctgcttaccctgggccctgggctgta

SEQ ID NO: 765848 - DNA, 98 bp, Homo sapiens
cttagaaaagcctaggcatttctgtaacatttggcatgcatatcattctgtttcaactccccctgtttaccctcctaaaaatgttgccgacctgaaac

SEQ ID NO: 765849 - DNA, 98 bp, Homo sapiens
ttgcatctggtgtgcaatgtgaagagtccttcaaaaatgccagaaatcaacgccaagcttctcaataggtttggcatggacaagatctatgaaggcca

SEQ ID NO: 765850 - DNA, 100 bp, Homo sapiens
atcagtggtgtagccaggatctacaaccagagcttcttccagagccttctcaaagccacagtggtcccaggctgcacccatggcagaaggaggagggcag

SEQ ID NO: 765851 - DNA, 75 bp, Homo sapiens
gaatatcaagaggaggagttgttggctgccaaacgagggattctttcatctggtcggggcagaggaattcattca

SEQ ID NO: 765852 - DNA, 87 bp, Homo sapiens
cgagttggagattctcagaatcctcttctgagtgatggagatttgtctaccatgattggcaagggctccaaggtcctggccaagaaa

SEQ ID NO: 765853 - DNA, 88 bp, Homo sapiens
tttccaagcggagccatgtctggtaacggcaatgcggctgcaacggcgggagcccccaacccagaccacacccttgagcctgagcccg

SEQ ID NO: 765854 - DNA, 50 bp, Homo sapiens
tcaccttcaaggccgtcagacaaggtacctcaataataatgagttgacag

SEQ ID NO: 765855 - DNA, 87 bp, Homo sapiens
tgtttccacatcggtcagaaaaagatgtaaagtgttgagagaggagaaccagtgcattgctcctgtggtttccagccgcgtgagtcc

SEQ ID NO: 765856 - DNA, 75 bp, Homo sapiens
ctatgccaagaagcgaaatgtgctcattggccattcctacggacgcctgtggcctctcagacccggcccacgttg

SEQ ID NO: 765857 - DNA, 100 bp, Homo sapiens
cggctgcaggactgggcacagcatgagatccaaaggcagggcaaggaaactggccacaatttgtttcgacgccggaccgcgtaagagacgatgatgttgg

SEQ ID NO: 765858 - DNA, 100 bp, Homo sapiens
catctactcctacttccacttcgtgttcttcctagcttccctgtatgtgatgatgaccgtcaccaactggttcaagtgtcatggagaaactccagctggg

SEQ ID NO: 765859 - DNA, 100 bp, Homo sapiens
ggcgccgcggggcagccgccgctcctccgggagcttttcatcctactataaaggaggatttgaacagaaaatgagtaggcgagaagctggtcttatttta

SEQ ID NO: 765860 - DNA, 83 bp, Homo sapiens
cctccttctcaatcttggaacagcacccccttctttaaggcaagaaataatggcggcagctacgggggatcctggactctcta

SEQ ID NO: 765861 - DNA, 74 bp, Homo sapiens
gaggaaaacaaaagctgctacttatggaagatacaaagggttggtcaaagaaaaagtgatgtatgaaaaagagg

SEQ ID NO: 765862 - DNA, 74 bp, Homo sapiens
aatgttccgggaagttcttccaaagcaaggattaatgcagtatcgaatggacaagtccgaggtgatagttacag

SEQ ID NO: 765863 - DNA, 90 bp, Homo sapiens
actcatggactttctcctccagagaaaggaatgcaagatggtcatcctgtctgtctgttcacagagtgagcgaagcaggtgttcacagac

SEQ ID NO: 765864 - DNA, 96 bp, Homo sapiens
ctgtctaagtccaaagatttttacccagagttgaagtattgataacaccaaggaactctatcacaatttgaaaagataagcaaaagtttgatttcc

SEQ ID NO: 765865 - DNA, 98 bp, Homo sapiens
aagcgtttcctcgcttgcattcagctcctctgtgtttgccgcctggatttcgccgccagctttctgaaccctgtaactcctttcctcctttgccgacg

SEQ ID NO: 765866 - DNA, 75 bp, Homo sapiens
tacccccagtatctgcaagccaaggtgatgtttgcagacagaaaaagtaaactgtcaaggaattcagagcattgg

SEQ ID NO: 765867 - DNA, 100 bp, Homo sapiens
ttacagaaccttgatccgccatttagcattgatgggaagatggtagctgtaaacctggccactggaaaacgaagctcctactccaatgtggccagatgac

SEQ ID NO: 765868 - DNA, 74 bp, Homo sapiens
atctgaagagctatggtgaaacaccactgaagcattgccaagagacagggtctcattatgttgctcaggatgga

SEQ ID NO: 765869 - DNA, 100 bp, Homo sapiens
tctttttatcataactcatcaaggtggtgaaggcatttgtggtcctggcctcgcagttcctgtcccatgacccagaacagctcaccaaggagctgcagca

SEQ ID NO: 765870 - DNA, 74 bp, Homo sapiens
ccacaacgaatgaatgaacagccacgtcaggttgggagaagaacaatcaccaaaaatgcagagtggggagcggg

SEQ ID NO: 765871 - DNA, 101 bp, Homo sapiens
tctctgcttgaaaggagaagacttggattctcaggaaatcatgaccagatctgaaatggctgaaaaaatgttctcttcagaaaagataatgtgattggaac

SEQ ID NO: 765872 - DNA, 89 bp, Homo sapiens
tcggcagccttgcgctgctctaatggtccggacttccgtgtagccctatgagtttgtctctctggaatggctgcaaaagtggttggatg

SEQ ID NO: 765873 - DNA, 90 bp, Homo sapiens
tgcccacgcaccccactcggcgtcgcgcggcgtgccctgcttgtcacaggtgcttttgaagatgatgatatcacgcacgttgaaggaagt

SEQ ID NO: 765874 - DNA, 90 bp, Homo sapiens
aatttccagtgatacagctgatggaaaatgtgtccaggaagtgacaacactgcagctgaaggaggagttgctggatggagaggattataa

SEQ ID NO: 765875 - DNA, 100 bp, Homo sapiens
gggattgctaatgagatacaaagccaccttggaataaaaataaatttctctctgttggctcctccggccatggagaggtttcttccaaggtgaaatccag

SEQ ID NO: 765876 - DNA, 100 bp, Homo sapiens
ggttttagagacctgaaacatcacagaagcttctgagtggttctgaagattcaagagggcgggaagcttcagagtacctttgtatttgaggaaataggac

SEQ ID NO: 765877 - DNA, 50 bp, Homo sapiens
cggcaccttcggcaaagtgaaggatagtcgtgcaagcactgcagtgttcc

SEQ ID NO: 765878 - DNA, 87 bp, Homo sapiens
tccaggcatgccccgctacgagctggctttaatcctgaaagccatgcagcggctgcatcttcctcccgtgaggctggccgagctcca

SEQ ID NO: 765879 - DNA, 75 bp, Homo sapiens
cgcgtccgaggctcgcgggcggcgggcccggaaatctcctgcaaagaagctgagccatgcaattagtaaatcttt

SEQ ID NO: 765880 - DNA, 73 bp, Homo sapiens
aggcaatgtcctgggtcattccagaattgctgggacaaagggggcggaggaaagcgcaaagggaaaagcaaga

SEQ ID NO: 765881 - DNA, 82 bp, Homo sapiens
aatattatgctacagaatttgacctatttgatggctttgcagatggactaggagttgctgaagctatttcatatgtggatcc

SEQ ID NO: 765882 - DNA, 97 bp, Homo sapiens
gttatctccagatgccgcgcaactgtctgatctcagttcatgaattttgattcagctaaagttccatcagatgagtattgccctgcttgtagagaga

SEQ ID NO: 765883 - DNA, 100 bp, Homo sapiens
taaatctgaaggtgacactcagtccaattaaaactgatctgataagacctcagatcagacagagatcaggtatttggatccaatctcgctaatctgtgtc

SEQ ID NO: 765884 - DNA, 101 bp, Homo sapiens
tgagcaccctgtggctggtgggggccggccccggcctggtcctggccccggagctgttgctggacccctggcaggatatcccgcccaggtacccgttccaa

SEQ ID NO: 765885 - DNA, 50 bp, Homo sapiens
gaatttcctacagttcttgatattacagtgacgttcaagtgtttctcacg

SEQ ID NO: 765886 - DNA, 149 bp, Homo sapiens
atggaagtgactgtgggatgtttgcctgcaaatatgctgactgtattaccaaagacagaccaatcaacttcacacagaggaggctggcagctgtgtgcaggatgggcagaggtataatgataaggatgtgtggaagccggagccctgcc

SEQ ID NO: 765887 - DNA, 82 bp, Homo sapiens
gagtatctggtgaaatggagaggctggtcgcccaaattggtttatcttggaagctaaagggcattgctcatcctgaagatca

SEQ ID NO: 765888 - DNA, 75 bp, Homo sapiens
tgatgaaagtacttcagggagtcaacggtgagaactttgaaagtgatgaagtagaactctcgtatgctaagaatg

SEQ ID NO: 765889 - DNA, 58 bp, Homo sapiens
aagaaaaatctgaggttatcaatgacgagtggaagccgctgaacatcccgaggaactg

SEQ ID NO: 765890 - DNA, 100 bp, Homo sapiens
ggtggtgaccatcgaaaggagcaagagcaagatcaccgtgacatccgaggtgcctttctccaaaaggagatcacaaatcaacatctcacttccgaaccgg

SEQ ID NO: 765891 - DNA, 83 bp, Homo sapiens
ggcttcctggcctgggcgctccggtggcggcggagaagtccattggaatattaagcccaggagttgctttggggatggctgga

SEQ ID NO: 765892 - DNA, 96 bp, Homo sapiens
gcattgaagaagatggaaaactctacctttgtgtatcaagtcccactatcaaggataagccaaatgaggagaaacctgtgcaaatgatgtttaagc

SEQ ID NO: 765893 - DNA, 83 bp, Homo sapiens
gatggaaaaggagttcgagcagatcgacaagtccgggagctgggcggccatttaccagatgcctgaggaaacccagacccaag

SEQ ID NO: 765894 - DNA, 80 bp, Homo sapiens
acagcgccgccgccagtccaaggagcaggatgaagttcgacatgggagagacaagttaaagtattgcacaatcagctggt

SEQ ID NO: 765895 - DNA, 75 bp, Homo sapiens
tcttggaatttgctatggtatgcagcctcggccttcatcatcgtcatgctcctggccagcctcaacagctgctgc

SEQ ID NO: 765896 - DNA, 75 bp, Homo sapiens
tctactcaagagtggaagttttcacaggctcaagttggtgacccaagcctattgtaaacaagtgattatctcaaa

SEQ ID NO: 765897 - DNA, 100 bp, Homo sapiens
gatctatgatggccagtacctccaggccctgaacgcggactggcacgcagactgcttcaggctacctcggacctgaacagctgcctgactgcctgaaagg

SEQ ID NO: 765898 - DNA, 100 bp, Homo sapiens
caagctttagccgccgaggccgcgtgtcccaaaggccagaacacagaatgttcttggtgagaagggccggcggattcgggaactgactgctgtagttcag

SEQ ID NO: 765899 - DNA, 100 bp, Homo sapiens
gcaaggcgtccaggagtgacctggggctgtggagagcgacccgtggccttgtgtttcaggtcaaggtgaagatgttcttaaagggtcccagattacgtat

SEQ ID NO: 765900 - DNA, 50 bp, Homo sapiens
ccaacaagagcactggccaagtcaggatttaagtgccctgtatgctcaaa

SEQ ID NO: 765901 - DNA, 88 bp, Homo sapiens
tcgatggtcggcggcgcccggatgggcagctgagattggatcagatgttttcagatgcctttagtaaagatcaccagctgcttcgggc

SEQ ID NO: 765902 - DNA, 83 bp, Homo sapiens
ctgcacgtgcaactgcaaacgctctttgttccagagcatggagatcagttgtgaccgagattcccgacgagagagactgaggg

SEQ ID NO: 765903 - DNA, 75 bp, Homo sapiens
tgaaattaataaaagccttttagcactcaagacctcagaaagtactactacagtaaaaagcaaagttgatgaaag

SEQ ID NO: 765904 - DNA, 82 bp, Homo sapiens
cctcctcgcagcagcgccatggtgtttgagaagtcccccctgcgggtgaagaacttcgggatctggctgcgctatgactccc

SEQ ID NO: 765905 - DNA, 88 bp, Homo sapiens
tgcgtgcacagcgccttgttccagcagggcctgatccaggtctgtctgctatcagctatgccgctgcccgttgcgctgcagacccgct

SEQ ID NO: 765906 - DNA, 90 bp, Homo sapiens
cctggaggaatacctggcattgacctctcagatcccaaacaactggcagaatttgctaggatccttcatctgtacctaatgcagacaatg

SEQ ID NO: 765907 - DNA, 74 bp, Homo sapiens
ctgtcttcggtggactccttcggcagtccacccaccgccgccgcctcccaggattctgtttcactgaggccatc

SEQ ID NO: 765908 - DNA, 98 bp, Homo sapiens
ggatggggcacgcacagagtgcaagacgctgagcaatgcagcaccgacagtaaatggttcacggccgacatcatgtccataggggtgaattgtacaca

SEQ ID NO: 765909 - DNA, 75 bp, Homo sapiens
cgactacagcgagaagttgcccaaagaacaagtgagggggccatgtgtaaacaggaacatcgataagtagtgtaa

SEQ ID NO: 765910 - DNA, 93 bp, Homo sapiens
gatgctgccagggtccctgaagagggaagacacgcggaaacaggattatatgcgtcaggcaggagaagtgacttatgcagatgctcacaaggg

SEQ ID NO: 765911 - DNA, 90 bp, Homo sapiens
cttcttatccatcccatctcttggacagatgatgccagttaattactttgaatgaagagagaagggcacagttacctaagtatcaacgta

SEQ ID NO: 765912 - DNA, 100 bp, Homo sapiens
aagtccaggaagctatcaattccctcgggggcagtgtctttcctaagcttaattggagtgccccaagggttgtctgcattcaaaagagcattctattaaa

SEQ ID NO: 765913 - DNA, 90 bp, Homo sapiens
ctggcagcgccatggagacggtacagctgaggaacccgccgcgccgatatgaggccccaggattcctggcgaggtcctcctccccttttc

SEQ ID NO: 765914 - DNA, 98 bp, Homo sapiens
gctgaccacctgaatgaggatcttaccacagtgcggagactcctttctgaaaaggccactcacgtgaacactagggatgaagatgagtatacccctct

SEQ ID NO: 765915 - DNA, 90 bp, Homo sapiens
ccggggacccggcccgggaccggcggcgcgcggcggccgaggccagacaatgcagatcttcgtgaagactctgactggtaagaccatcac

SEQ ID NO: 765916 - DNA, 100 bp, Homo sapiens
gccagcctgcgaaggtggcggcgctgctgctcgggctgctcttggagatcttgatgtggaagaaatggaggactcagaaccaaggatttccaagtgattt

SEQ ID NO: 765917 - DNA, 75 bp, Homo sapiens
ggcctggagcagaaactgagctggaccactggagcctcggtgaggggtgagagcaaagagcaggtggccaactca

SEQ ID NO: 765918 - DNA, 75 bp, Homo sapiens
agatcttcattttattgcattagttcatgtagatgggcatctctatgaattaggacagtcattttgtttactcat

SEQ ID NO: 765919 - DNA, 96 bp, Homo sapiens
gagtgagcatcagtcccaccaagaagccatctcgaagatcaagtgggagtcggagcgggatattcggaggctgggcaagtgtccagagaatggctg

SEQ ID NO: 765920 - DNA, 100 bp, Homo sapiens
cctggccaagggcctgatgctgtgagtcctgtttgtgttcctgacctgcaggtgccacaggcccctctgctgacagtgtatacacaaaagtgaggctcct

SEQ ID NO: 765921 - DNA, 75 bp, Homo sapiens
ggcctgggagcttgctgcagcttcagactacgtctactttgagaactcctccagcaacccatacctgatccggag

SEQ ID NO: 765922 - DNA, 121 bp, Homo sapiens
tgggaaggttcacgaaaagttcacgttgattgatggcatccgcgtggcaacaggctcctacagaaggggacagccggaggctgaagggggccatccagaggagcacggagacgggcctggc

SEQ ID NO: 765923 - DNA, 76 bp, Homo sapiens
ggcggcgcggcgcaggcaccggcccggggagaggcaccatgagcgccacaatggtgcgcatgaatgtcctggcaga

SEQ ID NO: 765924 - DNA, 98 bp, Homo sapiens
cggaaccttcctcccggacaccgggctttgcagctgtgacccaagctggactggacacgactgttctatcgtgcatctgggggaggtgttgtagccat

SEQ ID NO: 765925 - DNA, 100 bp, Homo sapiens
gaagaagaggaaatcctcttgaactcttacaccacaccttcaaaggaggaaaaggcttctcttttacatcgtactcaggaagaaagaagaaagagagagg

SEQ ID NO: 765926 - DNA, 98 bp, Homo sapiens
gtggagaaggcagtggagatgacagaccagctgatgaatgacgtggccgcacttctgaaacccatatcggaaaagattcaggaaatccaaactttcag

SEQ ID NO: 765927 - DNA, 74 bp, Homo sapiens
aagtcacgattaggactgacaataaggaggttgtggctcactggattgctgaaagccgcattgccattgagaag

SEQ ID NO: 765928 - DNA, 98 bp, Homo sapiens
attaaaatctcccaagaggaatgacaaacaaccagctcttcagggaggttatattcaaaagaaaaaggaactgtggggaatctgtatctttattgcag

SEQ ID NO: 765929 - DNA, 75 bp, Homo sapiens
aagacatgcttacttccccttcaccttccttcatgatgaaagtgaagtcactgcttttgctgtcttggatcaaga

SEQ ID NO: 765930 - DNA, 82 bp, Homo sapiens
ctctcatctccggccctctcggcgtccgccagcgatggcacagaactctcagaaattgagcccaatgtattccttcgacctt

SEQ ID NO: 765931 - DNA, 82 bp, Homo sapiens
catttattcaccacacctccaaagtggccacagatgtctttaattccaaaaacctggccgttcaggcacaaaagaagatctt

SEQ ID NO: 765932 - DNA, 99 bp, Homo sapiens
aagcagcatgtgaaggagaccaagaaatcgagctatagcagattatcttcgttcaaatggctatgaagaggcatattcagtttttaaaaaggaagctga

SEQ ID NO: 765933 - DNA, 100 bp, Homo sapiens
gccacatgtgtttcaaaatggccctatgcttaggatgctgcagttggagaagaaacttgaacgtgaacttgaggatgatgcacgagttattgcttgccgg

SEQ ID NO: 765934 - DNA, 83 bp, Homo sapiens
cgcgggcgcctgaaggagttgttgtctcggcagcgcccgcggagacgtgaagagaacatccagtcatggataaaaatgagctg

SEQ ID NO: 765935 - DNA, 148 bp, Homo sapiens
cagcgagcaagaacaatgccaggaggtctggagaaaacgtgtcatcagtgcatttctaaaatcgccagcaatgataaccgtctcctcaggaggaatgttggttcagaaactgaacaccaatgatctccagtccgaaagaacaccattt

SEQ ID NO: 765936 - DNA, 101 bp, Homo sapiens
cccaccgccggcggtgatgcggctgtgaagccctagtcggactttccttatcccagttgattgtgcagaatacactgcctgtcgcttgtcttctattcacc

SEQ ID NO: 765937 - DNA, 100 bp, Homo sapiens
cccggcgagtcgggctctggaggaaaagaaaggtagctgcaatcaacccaaatcaccctcttgctcagatgcctttgcctccgtcgatgaaaaactgcat

SEQ ID NO: 765938 - DNA, 49 bp, Homo sapiens
ccaaaaccggcagctgttagccgagcaaccttttatgtcacctcggtac

SEQ ID NO: 765939 - DNA, 75 bp, Homo sapiens
ccaccgtgttgcagatatatctggggtctttcccgcggtgacttcccttgggctgaatgaacaggagctgttatt

SEQ ID NO: 765940 - DNA, 50 bp, Homo sapiens
cttcagcccagttatcaaatgaagagcctcgatgacttacgagccctcaa

SEQ ID NO: 765941 - DNA, 100 bp, Homo sapiens
gttagggggccggcgcccgcggttcaggtgtcatggagaaactccagctgggcccagagattctgcagcgggaaaatccaaggcttatttatgccaggct

SEQ ID NO: 765942 - DNA, 100 bp, Homo sapiens
tcttccccaactaccaccaagtcctctccatctgatcccatgaccacctccagagctaatcagggaggtggggaagacagggctccagctaccacaggac

SEQ ID NO: 765943 - DNA, 98 bp, Homo sapiens
gggccaaccatgggaaaggagagtggatgggactcaggtatatgaatggcacctgcccagaaggaaacagctgtaaatttgcacatggaaatgccgaa

SEQ ID NO: 765944 - DNA, 98 bp, Homo sapiens
ccgttagtcatgccggtgtggtggcggcggcggagactgcgggcccgtagctgggctctgcgagggaagaaggagaaagggccaacccctgaagaagc

SEQ ID NO: 765945 - DNA, 100 bp, Homo sapiens
accatcccgtctccagcccgggcttacgccccgccgacagacttggggacagagagcgtcagtggcaccctcagttcactccagcaatgtaatccccgtg

SEQ ID NO: 765946 - DNA, 75 bp, Homo sapiens
ctttggttataaattatgatctacctaccaatcgtgaaaactatattcacagttgaagactgggatagtttccaa

SEQ ID NO: 765947 - DNA, 100 bp, Homo sapiens
atcccattgatcttaggaggaggtgatgtacttatgatatgagatcctgactccaaactccattcccaagggtttcatggacgggaagcaggcgtgcgtg

SEQ ID NO: 765948 - DNA, 98 bp, Homo sapiens
ttaagacagaactcaactcatcagctgaaagtggctgcctctttgatgagccgtatagcacatgtggatatagtcaatctgaaggtgatgacttcaat

SEQ ID NO: 765949 - DNA, 98 bp, Homo sapiens
ttgtcctcacctggtctctggctgtccagagttgcttcctgttgacgacagctctcctcagactgtgccctgtccacggtgcctcctgcatgtcctgc

SEQ ID NO: 765950 - DNA, 100 bp, Homo sapiens
cagcccttatccctcgtgagaaaaagatctcgatacttgaggaaccttcaaaggcacttcgtggggtcacaggtaaacactacacgtgaagagtggtgaa

SEQ ID NO: 765951 - DNA, 76 bp, Homo sapiens
ccaagttctccctggaatacaggtgctggagaatctggtaaaagcaccattgtgaagcagatgaggatcctgcatg

SEQ ID NO: 765952 - DNA, 82 bp, Homo sapiens
gggtggagtacagatctctgcagttacaggaacatcgtctgcttcatgggagaagcatgacactggccaacactgcgtccag

SEQ ID NO: 765953 - DNA, 96 bp, Homo sapiens
ccaatatccacaccttttctgcctgcctaggctgtctcagaatcttgatggggtggtcattgagctcctcttccgccagagcaagatcagtgaagt

SEQ ID NO: 765954 - DNA, 75 bp, Homo sapiens
aggagaattttgacgtgaataagaatggagaagctgatgccatgagcttggatggagggtttgtctacatagcgg

SEQ ID NO: 765955 - DNA, 100 bp, Homo sapiens
cggcggggcgcaccacagagaccggcttcaatatcttcacccagcatggtagcatcttggacaaaatattgggcagctttgtgtgggacacagctttttt

SEQ ID NO: 765956 - DNA, 75 bp, Homo sapiens
gtttgtccagcgactccggggcctgatgaatgacatcgcagcccctgtcaaagggaacaggaagcagtccacgga

SEQ ID NO: 765957 - DNA, 100 bp, Homo sapiens
cagcatggggagtcggaaggggacaaatccgcgatcccagtcatgcataatgaagaaggagccccacaggaaggaattctggaagatatgcctgtggatc

SEQ ID NO: 765958 - DNA, 83 bp, Homo sapiens
ctacgacacggacgcaggcccagtgttcgtcaaagtcaaccgcaggacgcaggttggccgactgcgatgtgagtgacagcagc

SEQ ID NO: 765959 - DNA, 75 bp, Homo sapiens
ttttttctgacatctttgtttccaagaatttggcctcagtatgtcaaggatagaattcattccacctatatgtac

SEQ ID NO: 765960 - DNA, 75 bp, Homo sapiens
ccgagttggagaacaggcgtggccagcactggctccttgatggtggagccgccaccaaaatgcagattttcgtga

SEQ ID NO: 765961 - DNA, 85 bp, Homo sapiens
agtgggcggctacatcctgggggagtttggaaacttgatagctggagacccgagatccaggaactttgctgccacaatacctcgg

SEQ ID NO: 765962 - DNA, 74 bp, Homo sapiens
tgaggatgatgccccagctgcagttcaaagatgccttttgggagtcatactccatgggtttatgtgataaatga

SEQ ID NO: 765963 - DNA, 98 bp, Homo sapiens
ggagccccaggagggaccgcacaagatcatgtttcactccttcggcaacaagcaagggccccagcacgggatgctgatcaatactccctacgtcacca

SEQ ID NO: 765964 - DNA, 75 bp, Homo sapiens
ggaacgggctgcaccaatggccagaggcggggtttcaccatgttgcccagactggtcttgaactcctgagcttaa

SEQ ID NO: 765965 - DNA, 82 bp, Homo sapiens
gcctctctccagcagactgcgcacttgcacctcctgcgccgccgccccccatccaaggatatgccttcaagcctccacctag

SEQ ID NO: 765966 - DNA, 82 bp, Homo sapiens
cgaggagccagccttcaatgtgtcctacaccaggcagcccccaaatcccggcccaggatgcctaaatcaaaggaacttgttt

SEQ ID NO: 765967 - DNA, 74 bp, Homo sapiens
gcagaagccgcccgctctccgggtgaaaggtgtagcagtcactcggcctacacccacagcatcgaccttgtgaa

SEQ ID NO: 765968 - DNA, 95 bp, Homo sapiens
aagctgatttcaccatgcccatattccctttcctcaggcctgctggtgggtacccttgatgttgtgttggactccagcgcccgggtcgctcctta

SEQ ID NO: 765969 - DNA, 74 bp, Homo sapiens
gctgctcagcgtcctcatgtggggggtaaaccactcggcatgaatgctttacagttgcagaacctggcgacgct

SEQ ID NO: 765970 - DNA, 106 bp, Homo sapiens
tcatcgccaagaacaagaaggtgggcctgctgtaccggctgctgcaggcctccatcctggcgtacctggtcgtggctagtgaatgttcccgaggaacccattgaag

SEQ ID NO: 765971 - DNA, 100 bp, Homo sapiens
agccctgctctgggacacacctccattggatttaaaagacagtcctcgtcagcactgactttcagctatggaatcgatggagaaggaggagacaacccgg

SEQ ID NO: 765972 - DNA, 100 bp, Homo sapiens
gtgggtttatctcaaggcctgagtagccggtaacaaacgagggttcccgggattggaccgacgcagccatggtgtcagaaatggctgtttctgagctacc

SEQ ID NO: 765973 - DNA, 82 bp, Homo sapiens
ccgctggcgggcttccctgtcgccgttcgctgcgctgccggcaaattgtggctactaatttgccccctgaagatcaagatgg

SEQ ID NO: 765974 - DNA, 75 bp, Homo sapiens
caaccacccacccttccgagacatgaagaaagtgaaataagatttcgccgcctatcatctgctaactgctacgga

SEQ ID NO: 765975 - DNA, 88 bp, Homo sapiens
cagagccaacatttcatagcaccatgtccatgacttgcagagctttggccttgacaacgtacgtaccagatggaaaccatggagggca

SEQ ID NO: 765976 - DNA, 104 bp, Homo sapiens
cctccactccgtcccccgcgggtctgctctgtgtgccatggacggcttccccgggcgctgcctggacaggcctgcctgcgtgctgggacatgtctggcctccaa

SEQ ID NO: 765977 - DNA, 50 bp, Homo sapiens
gggcacaccaaactccatctggcccactgctcagtggagcgtggaggacg

SEQ ID NO: 765978 - DNA, 100 bp, Homo sapiens
tgggagatgggcctactcgcccgccaccctgcgctgccgccgctctgaggagttaaaggcgatgctgaagaccaaccgaggtactataggaggcttcttc

SEQ ID NO: 765979 - DNA, 109 bp, Homo sapiens
ccgccggcggccaagcagccaaccatgctcaacttcggtgcctctctccagcagactgcggtgctggagaatctggtaaaagcaccattgtgaagcagatgaggatcct

SEQ ID NO: 765980 - DNA, 75 bp, Homo sapiens
tgacctgaaggctgtcaagtatgtggagtgttctgcacttacacagctcattgctatggacagtgctatcaccct

SEQ ID NO: 765981 - DNA, 100 bp, Homo sapiens
tctggatcccgctgcctcggccaccgctgctgccgccgccaggagccacctgtgttctggcccccaagttctctacttcctgcttctgggatgactgtcg

SEQ ID NO: 765982 - DNA, 101 bp, Homo sapiens
gctggcccaacaggcaaaaatgaagaaaaaattcaggttctaacagacaaaattgatgtacttctgcaacagctgcattaatactacattgtcaaagacaa

SEQ ID NO: 765983 - DNA, 75 bp, Homo sapiens
gccgtgatcgtgcccaaagaggagggcgtcatcagcgtctccgaggacagtctgaattggagaagcctagaggca

SEQ ID NO: 765984 - DNA, 75 bp, Homo sapiens
acgtcgtgatccagaagtccagagctgaggactgcctgtttgcagaaagggctattgcaagacacgaagtccgag

SEQ ID NO: 765985 - DNA, 98 bp, Homo sapiens
cgcggggccccagggggcacaagaagtccggaaccatcccttcttccaggacctgatgcagtactgtgcccaggacgtgtgggccacccatgaggttt

SEQ ID NO: 765986 - DNA, 75 bp, Homo sapiens
ccgcgccgcgctcccctcgcccgcccgggccgccagggctgcgaataaaggagaccaaggaagtttatgaaggtg

SEQ ID NO: 765987 - DNA, 74 bp, Homo sapiens
gtcgcggagccggagggcgggaggaacatgacatcgcggaggtttgctctggaattagtcacagaaaagggcca

SEQ ID NO: 765988 - DNA, 82 bp, Homo sapiens
agaaggcctctctcctgatacagcaggcgctcaccatgttccctggagacctcctgccccccgaggtctgcagtctcctgaa

SEQ ID NO: 765989 - DNA, 99 bp, Homo sapiens
tcattgttctggccaagaacatgtgtatgatcatgatggagatgacagacttcactagatcaggcctttgtgacactaaccacaaacgatgcctacgcc

SEQ ID NO: 765990 - DNA, 80 bp, Homo sapiens
tttcttggaaaagttgccattcccttgctgtccatttgtccagtcattgtgccacaacattcaaagaagatggattatgg

SEQ ID NO: 765991 - DNA, 98 bp, Homo sapiens
tttatacagatccagtagaagctgtaaaagacatccctgatggtgccacggttttggttggtgctttatggggaatttgctgacccatttaaacttgc

SEQ ID NO: 765992 - DNA, 74 bp, Homo sapiens
gaggacgggctttaggctggaagcgccttagaggagccatttttccaggactgtgaggaatgtatccagctgga

SEQ ID NO: 765993 - DNA, 100 bp, Homo sapiens
gatgggtctggaaatggatggactgtgtttcagaagagtgctgatggcagagattggtgaggatttggataaatctgatgtgtcctcattaattttcctc

SEQ ID NO: 765994 - DNA, 98 bp, Homo sapiens
agcgcctccctggcttctcggactccaatgtcattgaggtacatggccatcatacatcccctccagccccggctgtcagccacagccaccaaagtggt

SEQ ID NO: 765995 - DNA, 83 bp, Homo sapiens
ctggctcttctccacaaagacacgtacacggtcctcttctcgcacggcaatgccgtggacctgggccagatgagcagcttcta

SEQ ID NO: 765996 - DNA, 100 bp, Homo sapiens
ttaatgggctggattcactaactgaacttaacttgcgacacaatcaaatcactttcgtgggtcatctagtagcaggcacccaaatcaggcaactcccaag

SEQ ID NO: 765997 - DNA, 75 bp, Homo sapiens
agaatggcagtgctcaaactcaccgaccagcaggatggcccaatggaatcagctacagcagcttgacacacggta

SEQ ID NO: 765998 - DNA, 90 bp, Homo sapiens
gagaagctcgaaagcatggggataaggaagataccagatgacaattttagcatcccagaaggtgaagaagatctggcaaaagcaattcag

SEQ ID NO: 765999 - DNA, 75 bp, Homo sapiens
gagcagaggaaccacacgctgatcatggagttttgggaatgcacttggaaactgtattctggacaaagactacct

SEQ ID NO: 766000 - DNA, 100 bp, Homo sapiens
aaggctgcggcgcgcagagcgaggctgcgggaccccaggatgggggacaggaggctgcggggcctcagacgctacgtgaccaaacccaactcagatgatg

SEQ ID NO: 766001 - DNA, 82 bp, Homo sapiens
gatgttggaacttgctcgtgccttagacaagaaactcctttccttaaaggaagaaatgttggctatttggcgatgagaggtg

SEQ ID NO: 766002 - DNA, 76 bp, Homo sapiens
gtgaagaaaggtggatcctacatgtgccataggggtcaacatatttcactggcacctattcacaagcttgaagaag

SEQ ID NO: 766003 - DNA, 96 bp, Homo sapiens
aagctgccccggagcccccgagaagccctcatcagtggctggctcttcttccgatacctggctatcggaggtacaggtttgcagattccgccagca

SEQ ID NO: 766004 - DNA, 100 bp, Homo sapiens
aatttaattcagaaagatagaacctttgctgttcttgcatacagataccatgtttgtgtggaagtgccccgtgtttgctatgccgatgctgtcctagtgg

SEQ ID NO: 766005 - DNA, 90 bp, Homo sapiens
agaagttcttcgatgtatctaaacttggcaccaagtatggtgaagaacaaattggttttgagctagtggagaaattatttcaaggtcagc

SEQ ID NO: 766006 - DNA, 74 bp, Homo sapiens
cttcactaacttcatcatcatcaggtgaccaagaatatggcccaggtgaccaaagccctggacaaggccctgag

SEQ ID NO: 766007 - DNA, 74 bp, Homo sapiens
gggccttactccttcacagatcggcaacaagtgatctggaacactatgacaagactcgtcatgaagaatttaaa

SEQ ID NO: 766008 - DNA, 98 bp, Homo sapiens
ggagcccgcgtcggctgagagcccacaggcccccacagtaagactttgaccccgacgcaggcttcagtgattgccgcggatcagaagcctgagcactt

SEQ ID NO: 766009 - DNA, 87 bp, Homo sapiens
gggagaacctgcggcggccggagcgttgggccggtgcacaaacagcgtggtcaagtatgagctgatgcgcccctccaacaaggcccc

SEQ ID NO: 766010 - DNA, 75 bp, Homo sapiens
cagccggtggggaagacaaggaggattcctacgagaagcaacaggcacaaggctctggtcggaaaaaattactgt

SEQ ID NO: 766011 - DNA, 74 bp, Homo sapiens
aacagcgaggaagaagaggacgacgacgacgaggaagaggaggtttctgagaaagtgactgagaccgaagatga

SEQ ID NO: 766012 - DNA, 80 bp, Homo sapiens
ctcgccgaggcacaggctgctcgcggaccaccctgctccgaaaactaaggagccttcacgtaaatgggtccagtcatgcc

SEQ ID NO: 766013 - DNA, 82 bp, Homo sapiens
ctccagcgctgcctggaggagaatcaagagctccgagcagttggaattgatcacaccttttcagttgtacttcaatcctgaa

SEQ ID NO: 766014 - DNA, 100 bp, Homo sapiens
ggacgtacctggacaagcacatggaggctcagcgggccgaggagggaatgaaagctactggttgattttaaagtgcctgggcctcacaggtttggagatg

SEQ ID NO: 766015 - DNA, 100 bp, Homo sapiens
attttactgattgaggactcctggcagactcacagggatgtccgtcgcttggtagtggccatgtctagagccagacttggactttatatcttcgccagag

SEQ ID NO: 766016 - DNA, 100 bp, Homo sapiens
cagtctgggaaagaaaaagccgtccacagacgagcagacctcctcagctgaggaagatgttcccacctgcgctgacatcatctctaccgttgagttcaac

SEQ ID NO: 766017 - DNA, 98 bp, Homo sapiens
atgtctttacctcagagaaagcaaaccaggaggaggacatccctgtgaagatcatggagctttgtggtgcaacaagacttggttattttggaagaagt

SEQ ID NO: 766018 - DNA, 100 bp, Homo sapiens
agaaacaggaacactcaggctctgaggaggcccagaagccaaacctggaagagattccatcgtgcctggctcacataagcgcttcctggaagtgaagtcg

SEQ ID NO: 766019 - DNA, 83 bp, Homo sapiens
ggcgccttccatggagacgcaggaaccacgtgaatgttgagggggcgacacacaagcaggtggtggacctgattcgagcaggc

SEQ ID NO: 766020 - DNA, 82 bp, Homo sapiens
tgaaaatattggggccatttagtaacttctttgcaagattcagaatggacagtttagaagaacctcagaaaaaagtctttaa

SEQ ID NO: 766021 - DNA, 100 bp, Homo sapiens
gctacatcttttcgtcgcttgccggctgtctgatgaagagcagcgagaatggcgcggttgattgtcctgggctgtggctggctgtggagctagagccctg

SEQ ID NO: 766022 - DNA, 100 bp, Homo sapiens
ttccacattgctgcatttgttctgcctgacttggaccctggaaaacctggccctcttcaatttctgacaaaagctcggggagtacagacagtgaggaaag

SEQ ID NO: 766023 - DNA, 100 bp, Homo sapiens
ccttatttacgccctttagagaaaatacagctgaggaaagagggcttgcatgaagaggatggatcttctgatcaaaatacttgctggatggtggactcag

SEQ ID NO: 766024 - DNA, 75 bp, Homo sapiens
ccagaccaccgcagagcaagggatggagatctataaggacaggcagaaattctcagaacaggttttcaaagtggc

SEQ ID NO: 766025 - DNA, 100 bp, Homo sapiens
ctccagcttgctccatccatgaccacagtggaccagctcgagtctcaagtggacaatggccagctgcgggccgtccagcggctgtgccacttctacagcg

SEQ ID NO: 766026 - DNA, 80 bp, Homo sapiens
cttacaagagaacctcctaagagtcacccaaacaatcggctgagaatgagaagagatggagtcttactcttgttgcccag

SEQ ID NO: 766027 - DNA, 74 bp, Homo sapiens
cagcctgtttaggaccacaccacattttggacctcttgctgtgcagttcagcacttgcacctcctgcgccgccg

SEQ ID NO: 766028 - DNA, 75 bp, Homo sapiens
cctgtctggagagaagcagcggatcagcagagtgctgattcctaaagaaaagcccccaatcacggttgtgggtga

SEQ ID NO: 766029 - DNA, 100 bp, Homo sapiens
tgcaaatgctgttcgtatggaaatcaaagaccagacgaaatgtgctgcctctgttggaattgcgtcagagtctcaggatctcgatgtggacaggcaccct

SEQ ID NO: 766030 - DNA, 75 bp, Homo sapiens
cagccttctacttgtcccatgagacctgcctagagctggaacgttacctccagagcgagccctgctatgtttcag

SEQ ID NO: 766031 - DNA, 100 bp, Homo sapiens
tctctttctggcctggaggctatccagcatcattaaagacttttaccttctgggacgtggagaactgtttcaggccttcattgacacagctcaacacatg

SEQ ID NO: 766032 - DNA, 100 bp, Homo sapiens
ctgaaacagaaattctggaacacctatatgctttgcccgaagtttttacatacaaattctactagtcacacctggccattcagtgcagttgctgaattaa

SEQ ID NO: 766033 - DNA, 98 bp, Homo sapiens
aaaacccccattcattctggattggtggatctgaagtacaaaatattttccaggagtcgatagcagcagttggtgacgagatggcactcagaaacggc

SEQ ID NO: 766034 - DNA, 51 bp, Homo sapiens
cgcaggaggagtatgtcaagcgagccctggggaaactgactctactctgtg

SEQ ID NO: 766035 - DNA, 100 bp, Homo sapiens
tttctggataagagtggcaactttaagaaaagtgactacttcatgcctttctcagcagggcacaaccatattaatttccctgacttctgtgctacatgac

SEQ ID NO: 766036 - DNA, 101 bp, Homo sapiens
ctggaagaaagcccctctcacacagccttatgtttgatcatcggccaaggtcctggcgagaactgcctctgcggctagctgattttggggtacttcatagg

SEQ ID NO: 766037 - DNA, 90 bp, Homo sapiens
gggaaggcgaggacgaggacgaggacgtcaagttttacatgtggcacccataaaagatgaggctgagaacacggaaagcttctcagcagt

SEQ ID NO: 766038 - DNA, 98 bp, Homo sapiens
ccagcctggggcggccggccaggaaccacccgttaagaggatgtggaggatgagttgataagggaagaggtcatcctgtcgccagtcccatcagtgct

SEQ ID NO: 766039 - DNA, 80 bp, Homo sapiens
aggagacatcggcctctgcaggcttgccgaagaagggagcccaagaagatgaaaggattgttcttgttgacaacaaatgt

SEQ ID NO: 766040 - DNA, 59 bp, Homo sapiens
ggagcaggcccccgccgccgtggtcgagattgaatttgccaggaagaatgtgtatagtg

SEQ ID NO: 766041 - DNA, 122 bp, Homo sapiens
aaaattcaaagtcgaatatcatgctggtggctctacccagaattcaattaaagtggctcagcaagatgagaagatgaagtgaatttatggattctggtttttctgaattttcaaagcataag

SEQ ID NO: 766042 - DNA, 82 bp, Homo sapiens
agcctcagttggaagcagccgatccagcctgcggagcctgtggggcagagcatagcggcctgaccacaggggtggccttcgg

SEQ ID NO: 766043 - DNA, 75 bp, Homo sapiens
ggaacttgctcgtgccttagacaagaaactcctttccttaaagtgagaaagatcagtctaaagaaaaggagaaga

SEQ ID NO: 766044 - DNA, 75 bp, Homo sapiens
cactcccgagtggaggaagcaatacatccagtatgaggaaaacgggccttactatacatcatatcccccatcacc

SEQ ID NO: 766045 - DNA, 90 bp, Homo sapiens
gacggaggagcttgtaccaccgatggtgaggtctacagctttgggactcttccctggagaagtggaccagtggagatttgtccaagtagc

SEQ ID NO: 766046 - DNA, 74 bp, Homo sapiens
gtttcattgtgtatgtagaagaccagaagtggatggagatactaaggctcgtacgtctgcatcgattatcttac

SEQ ID NO: 766047 - DNA, 100 bp, Homo sapiens
atgagctacaggaagctgaggagctgctgtctttggctgttcaaatacagtgttacacataatattgcattacttcgagaggtgataatcaactcacgct

SEQ ID NO: 766048 - DNA, 101 bp, Homo sapiens
tggcccttgagggagttcctgagctgctccaaaaaattctcgagatgacacctttgaggccctgtgcatcgagccgttttccagcccgccagagctgcccg

SEQ ID NO: 766049 - DNA, 100 bp, Homo sapiens
ctggtattcctgcctatcctcgaacctgcactgtggacttttcgagaccccgcagatgtgtcttcagagagtgacagtgccatgacctccagcactgtga

SEQ ID NO: 766050 - DNA, 75 bp, Homo sapiens
cagaatggacaagcttaataaaataaccgtccccgccagtcagaagttgagatggttctgttatatcccccagag

SEQ ID NO: 766051 - DNA, 99 bp, Homo sapiens
aggtccgccaggcgtacggtgccaagggattcagcctggcggacatcccctaccaggagatcgcagccatcatcgtctacagactgccgtggacctgga

SEQ ID NO: 766052 - DNA, 51 bp, Homo sapiens
cagaactatgcgaaacaattgagccatgaatcatcttaatggacagaaaat

SEQ ID NO: 766053 - DNA, 83 bp, Homo sapiens
ctcgtggtgaattctcttatcagtattctgaagaagccaataatctcattgaagaatgtgaacaagctgaacgacttggagca

SEQ ID NO: 766054 - DNA, 100 bp, Homo sapiens
gcggcgtctggctgctgcggaccccgccgagtcctagcgcctggcctgcgcgccgctgcccgcgccacagatgctggcatcaccatctacatcaggtcag

SEQ ID NO: 766055 - DNA, 82 bp, Homo sapiens
gcgacaagccgctggcagccgcggatctcaccgccgctcagggtatgtgagactctgtgaagtagtcgaccacgttttcccg

SEQ ID NO: 766056 - DNA, 83 bp, Homo sapiens
ctcggactctgctcctcactcaccgcgtggacacgatcggttatgattcagaggaggaggaagagagcaggcccatgagttac

SEQ ID NO: 766057 - DNA, 96 bp, Homo sapiens
agaaggactgggatgatacaccttttccacagggaattgagttgatggccgccaagaacgagtcatgtttgacaaaattacatctcgaatccagaa

SEQ ID NO: 766058 - DNA, 100 bp, Homo sapiens
ctgtggtgcggcaccggcgagccagccagcagccgctcttctaaaacattcaaaccaaagaagaatatccctgaaggatctcatcagtatgaactcttaa

SEQ ID NO: 766059 - DNA, 100 bp, Homo sapiens
tggtcaggaggcagaaacaggagcaagaaaagggagatttcattgccctggatcttggtgggtcttcctttcgaattctgcgggtgcaagtgaatcatga

SEQ ID NO: 766060 - DNA, 90 bp, Homo sapiens
tccaatctctgttgcttcatcccaggaaagacaggggcaagtgtccgagtggtgaatcagctacttacagagatggatggtctggaagca

SEQ ID NO: 766061 - DNA, 126 bp, Homo sapiens
ggaggggtgaatcagtatgttgtgcaagaggtactgtccatcaaacatcttccaccacagcttagagggtgttaatctttatgtgaaaaatcttgatgatggtattgatgatgaacgtctccggaa

SEQ ID NO: 766062 - DNA, 100 bp, Homo sapiens
aagctttctacaaatcattttcaaagatccacatctcaaagaagtggggcttcaccaagttcaatgctgatgaatttgaagacatggtggctgaaaagcg

SEQ ID NO: 766063 - DNA, 100 bp, Homo sapiens
tggctgtggaaggtgttttaaaggggctttgaccacgacctttgaagagcttcattttgagatcaagccccacgatgactgcacagtagagcaaatctat

SEQ ID NO: 766064 - DNA, 85 bp, Homo sapiens
tagatttactggagttgcaagtgggagcactggaagtacgggcagttgcagtgttggagctaaactttctgaggaagagaaaatt

SEQ ID NO: 766065 - DNA, 100 bp, Homo sapiens
gcttggatgacagtcaccgacagaagggacagtcattttgtttactcattcagccctgttgcaggtcccaataaactcttcataaggttgacagaagcac

SEQ ID NO: 766066 - DNA, 73 bp, Homo sapiens
agctgcggccgcacctggccaagagacgagttgtactgctgtcacaggaaatggacgctggattacaagcatg

SEQ ID NO: 766067 - DNA, 75 bp, Homo sapiens
gtcaaatacaaaaggaagccaccgcccagaaggaggcaaaaccttcaactgaggacttgggggataagaaggaag

SEQ ID NO: 766068 - DNA, 75 bp, Homo sapiens
aatcaaaagaaacttttgcccttatcagtaacacctgagctcatggtgataaacaagacaaagtcaagcagaaag

SEQ ID NO: 766069 - DNA, 98 bp, Homo sapiens
tccttccagctcaacctcaagaccaacaccgtcatcaactggttccacaactacaggagttaaacatagatgtagctgatgtggagagcttgctggtg

SEQ ID NO: 766070 - DNA, 98 bp, Homo sapiens
ttgcctcctgggaaagaggatcaccgtcatccacagcaaggactgtttcctcaaaggtgaccaaggaagaaaggcacattgttaaacctctctatgat

SEQ ID NO: 766071 - DNA, 100 bp, Homo sapiens
cgcgctgctcttccccgcggagcccgcgcagtccgcgcagccctcatcgcaactgggcccgcgcgcagttgctctaggtcgtaaccagcctttgaaaaag

SEQ ID NO: 766072 - DNA, 97 bp, Homo sapiens
gagattgaaatgttccttagaaaggagcagcagatcacatattctacaaattccagccttctgtggtcgctgcggcctgtgttggggcctccaggat

SEQ ID NO: 766073 - DNA, 75 bp, Homo sapiens
atgcccccactcaaattctaccatgactttcactacctatgaggaccagcacagcagtgaggaggaggaggaaga

SEQ ID NO: 766074 - DNA, 74 bp, Homo sapiens
gcgttttggtgtcttcgtttgttatggccgctgctgtcgctatggagacaggagtgtcaaagccagccacatcc

SEQ ID NO: 766075 - DNA, 75 bp, Homo sapiens
gatgaccgtgcgctgaccctgactcactccaggtcagccctgacaaaggtcagctagccccttgaggacatcagc

SEQ ID NO: 766076 - DNA, 100 bp, Homo sapiens
tcccaaagtcaggatttctcatcaatcccatggatcctattcccaggcatcgtcgacgcttaagtgggcagaccaacatccacctcagcaaaaacttctt

SEQ ID NO: 766077 - DNA, 101 bp, Homo sapiens
tttggccaacctgacatggcagtcccgaacacaggatgaacatccgaagacaatgttctccaaagataaggttttgtaagttacgacaatcctgtttcggc

SEQ ID NO: 766078 - DNA, 43 bp, Homo sapiens
cccgcctggctgcgagatataggtgctgcccagctcgggggac

SEQ ID NO: 766079 - DNA, 95 bp, Homo sapiens
agaaggactgcctcactgagcaaccaagactcctggctaaatacaaaagcttgcaatgggacaaagtactgaggctggaggaggtgcaggctaaa

SEQ ID NO: 766080 - DNA, 98 bp, Homo sapiens
gaaggggcagatgacttacaagcatccgtgtacaagatttgcagagaaatgtatgacgatggagtgggtttaccctttcaaagtcagcctgatcttat

SEQ ID NO: 766081 - DNA, 80 bp, Homo sapiens
atttatcagagacgtatcaggaattcaggtgatgcagctaattgccccagtttggaaaacatggacttggatgaattgtc

SEQ ID NO: 766082 - DNA, 83 bp, Homo sapiens
ttggaaaaacgtgtgggtacgaccttgctcacccaagcatccgtctgtttgtcacccacggcgggcagaatagcataatggag

SEQ ID NO: 766083 - DNA, 96 bp, Homo sapiens
gcttgctccacttgggggccgtgtactccctggtgctcatccccaaagccaagccactcactctgctctgggcctataaagacctgcagtctcggg

SEQ ID NO: 766084 - DNA, 75 bp, Homo sapiens
ccgaagaagactcccccacatctggctacttgaaggaaattttgccaaagaagtgagccatgaaatggatggact

SEQ ID NO: 766085 - DNA, 74 bp, Homo sapiens
ggttggcaccactgaagtgaccgaatgagcaacaaggagtgaggatcttcataatgctctacaaagaggtggaa

SEQ ID NO: 766086 - DNA, 75 bp, Homo sapiens
cgatgaagtgcagaggtttttttctggacctgggtctaccaaggagttgatcaagtccatcaatgaaaagtttgc

SEQ ID NO: 766087 - DNA, 75 bp, Homo sapiens
atcctgtgcctcttctggctctacttcttttccttcctgcgcctggtgcctccggagccagcgtggtggccatag

SEQ ID NO: 766088 - DNA, 103 bp, Homo sapiens
tttacctgcttcccaatcccactgatgaggatcagcccatggtttctaagcatgaattgaggaacagaagaagcagagcagatgatcggagcagcatttgttt

SEQ ID NO: 766089 - DNA, 96 bp, Homo sapiens
attcgcagtggtcgcttcttctccttggccaaagcgtttgagttaagctacctcgagaaggttccagaagtcaaagacacagtgcacaagcagtcg

SEQ ID NO: 766090 - DNA, 90 bp, Homo sapiens
tacgagaacgtcaccgtggggacctctgtgctgacagtcctgcaattctgtggtgttcttggtcacacatttatggagtttctgaagggc

SEQ ID NO: 766091 - DNA, 100 bp, Homo sapiens
taaatatgcagattatatttctagggacaaacctatcacatttactcaggaaactctgagtacattggaatatgctcatagagcaaagaacatattgaat

SEQ ID NO: 766092 - DNA, 90 bp, Homo sapiens
caaccccttcgagcaagacgtgggcaaaagctgtgcctcacttctgcgggttgaaccctttgtatgtgcccagtgccgcacagatttcac

SEQ ID NO: 766093 - DNA, 74 bp, Homo sapiens
ccagaagtcagaatccaagatgttttttgctccactcaagcctgttagaatcaccatggaatacagctccagtg

SEQ ID NO: 766094 - DNA, 75 bp, Homo sapiens
cctcatcctggatgaggctactagtgccctagatgtgcagtgcgagcaggccttcccagtgacctgacagcagag

SEQ ID NO: 766095 - DNA, 74 bp, Homo sapiens
gcgctgttcctcaccatccctttcgccttcttcctgcccgagctggattcgctaaatattgtaatggatcaagg

SEQ ID NO: 766096 - DNA, 82 bp, Homo sapiens
atccacgtcgacaccgttgtacaaagatacgcggacccttgatggctgacctgatgtttagaaaacagaaacatgaagcggc

SEQ ID NO: 766097 - DNA, 98 bp, Homo sapiens
ctgtgcccacccagaatcactgaagggtcagagcattttctctgtgccaccagagagtttcgtgtgcgatttacagccagttacttactcagaacctg

SEQ ID NO: 766098 - DNA, 100 bp, Homo sapiens
gagcagttggtttagtatcagccaaacttgcagctgttcagaccgcgctccgccgagcgtcgagggcgaggcccccagcagtgagactggcacatccctg

SEQ ID NO: 766099 - DNA, 89 bp, Homo sapiens
ggacgcctttcagaaagtggctgacatggccaccaacacacgtgatatgaggccccaggattcctggcgaggtcctcctccccttttcc

SEQ ID NO: 766100 - DNA, 98 bp, Homo sapiens
cgatgctggtccgatggttgtgcactgcagcttttacaactgggacgctgatattgctgttagtaattcaagtcccaactatcaagtgattgccgata

SEQ ID NO: 766101 - DNA, 76 bp, Homo sapiens
gaattcacaagatccaatcccttgtccttaaaagaaacttgaactttacctgatttctgtatgttgtcatcttgcg

SEQ ID NO: 766102 - DNA, 50 bp, Homo sapiens
ctctgttccaaatgctttgctggagtgtgaggaagaggctgtctgtgtca

SEQ ID NO: 766103 - DNA, 90 bp, Homo sapiens
cgctgaagttgaacaaaatggtggtctctttataatgatataattgaccctgcaatcctgcgcccgggccgcctggacaaaacactgttt

SEQ ID NO: 766104 - DNA, 100 bp, Homo sapiens
ttttttgatgattgtgtagataaattctaggtacatgaaatccactggtgtgctggtaaatgtttaataaccagtcctctggaaaggagaaagttgaaga

SEQ ID NO: 766105 - DNA, 76 bp, Homo sapiens
agacgagaagcctgaaaagtcgcagcgagctggagccgccggagggctgttgataatcaggtgtatgtggccacag

SEQ ID NO: 766106 - DNA, 90 bp, Homo sapiens
gaagcttttcccttacctcgacccttttgattccgcctcacagttgatggagccagatttttaaagagcgagaagaagatttgaggcgtt

SEQ ID NO: 766107 - DNA, 98 bp, Homo sapiens
agggggctgtcgcccgaatgcaggaagaccgtgatgggagctgcagcacagtcgggggtgtaggttatgggggttggtgacagcgtcccaagctggtg

SEQ ID NO: 766108 - DNA, 51 bp, Homo sapiens
ctccagccctacccctctggttccagcaagggcaagtattttgtaaccttc

SEQ ID NO: 766109 - DNA, 90 bp, Homo sapiens
gtttcttatatgtgatgccattccagcactggactcatggaggctgagcatttattcaggacctggtgtcaaagatgcttcatgtagacc

SEQ ID NO: 766110 - DNA, 100 bp, Homo sapiens
gcaatcactagggaagcacagatgtggaaagtgaatgtgcggaaaatgccttcaaatcagtgtggacaacagtgagtatatgcggaatggagacttctta

SEQ ID NO: 766111 - DNA, 90 bp, Homo sapiens
gggacaagtacctttatgaaccagtgtatcccaaaaatgggcaagttcatgaaacctgggaaggtggtgcttgtcctggctggacgctac

SEQ ID NO: 766112 - DNA, 75 bp, Homo sapiens
caacaaggagctgggctgcatcaactcgacaatgcagatcttcgtgaagactctgactggtaagaccatcaccct

SEQ ID NO: 766113 - DNA, 50 bp, Homo sapiens
actgaatgcacatgacaccacaaagtcattccaaggaagtcaaggacgag

SEQ ID NO: 766114 - DNA, 100 bp, Homo sapiens
attccaggtcacctatagcctatgagagaggaagaatatattttgacaattatcggcgctgtgtcagcagccaacaaatggaattttcttgagcatgttt

SEQ ID NO: 766115 - DNA, 50 bp, Homo sapiens
cggaatgcagtaccctcagcagcagcttcgcctcaacagcatcaagaagc

SEQ ID NO: 766116 - DNA, 90 bp, Homo sapiens
ctcgagagcgagagtcacgtcccggcgctagcccagcccgacccaggtcaaaatgcagatcttcgtgaaaacccttaccggcaagaccat

SEQ ID NO: 766117 - DNA, 82 bp, Homo sapiens
agaagctccaggatattatgaagttataaggttccccatgggaattgcattttgtgaaaaaagaacaagaattttctgcaag

SEQ ID NO: 766118 - DNA, 95 bp, Homo sapiens
cccagacaacatgtgcatggggaggaccagtcgtggccctggttaactgggacccagtggatcaaacagtgcttgccaatgagcaggtggatgaa

SEQ ID NO: 766119 - DNA, 75 bp, Homo sapiens
gaagcatctgatgcacgttccatccggcgctcagctgggcttgagacactcttgcactcctgtaatgagcctggc

SEQ ID NO: 766120 - DNA, 75 bp, Homo sapiens
gtatttcaaaatgagtgaagcatgactctcacagatgaaggcctagacgcagccaatgttttcagttgcaccaag

SEQ ID NO: 766121 - DNA, 98 bp, Homo sapiens
tgaccacaacaagcaagcatgcagcttactgcttgaaaggcaccatgagccaggacaccgaggtggatatgaaggaggtggagctgaatgagttagag

SEQ ID NO: 766122 - DNA, 98 bp, Homo sapiens
gtcagcccacttcctagctgaacagcgcgaggcggcggcagcgagccgggtcccaccatggccgcgaatgcatcatggccgccctcagaccccttgtg

SEQ ID NO: 766123 - DNA, 96 bp, Homo sapiens
ctcccactgattctacattatggtatttctttaaatccagaacaatggagccagctgaaggaacagatttctgacattgatgatgcagtaagaaaa

SEQ ID NO: 766124 - DNA, 102 bp, Homo sapiens
ggccttagctgtgctcgcgctactctctctttctggcctggaggctatccagcaggccacaagaggaagctgaatgaagaggacgccgccagcgagtccagc

SEQ ID NO: 766125 - DNA, 83 bp, Homo sapiens
cctggatcttcgaacttttgacacggctttggaaacgacgtcatgtgttagatctgttacctaaagcaataaaaaatggccag

SEQ ID NO: 766126 - DNA, 83 bp, Homo sapiens
cgggcgagaagccctacgagtgcaacatctgcaaggtccgcttcaccaggtgctttgcaagatatcaccttgtcacagcagac

SEQ ID NO: 766127 - DNA, 117 bp, Homo sapiens
cagcgccagcggccgagcgggcggcttcctggcctgggcgctccggtggcggcggagggagtgcatccgccccaacccttttccccctcgtctcctgtgagaattccccgtcggata

SEQ ID NO: 766128 - DNA, 95 bp, Homo sapiens
gcagcatggcggtggaggacgaggggctccgggtcttccagagcgtgaagatcaagatcggtgatgtgtccaatctagatcccaacttctcattt

SEQ ID NO: 766129 - DNA, 100 bp, Homo sapiens
actgtgcagctccagagagacgtgaaacatgtgaacactcaagtgaagcaaaagccttccatgattacggaagtgtgaaatcggctgggcctactactgc

SEQ ID NO: 766130 - DNA, 51 bp, Homo sapiens
agctgatgatttgtccctgtctgaaggtggaatatgtgatcaagtgtgaca

SEQ ID NO: 766131 - DNA, 100 bp, Homo sapiens
ccaggggaaatgcagaaaacagaaacacttcttttattttcctgtaatatatctgtatcatcggagaaatggtggagtcaatgaagaaagtagcagggat

SEQ ID NO: 766132 - DNA, 98 bp, Homo sapiens
cgcgaggaggcgcgggaggtgttcgagaacgaccccgagacgatataattgaccctgcaatcctgcgcccgggccgcctggacaaaacactgtttgtg

SEQ ID NO: 766133 - DNA, 90 bp, Homo sapiens
ccggggaatggccgcggtgtggcagcaagtcttagcagtggacgcgagatgaaggcttgactattgacctgaagaattttagaaaaccag

SEQ ID NO: 766134 - DNA, 75 bp, Homo sapiens
ccagcctgccctgccacacagtgtgcctgcaacctgtccggggatcccagggagcaaaatgatgcttcaacaccc

SEQ ID NO: 766135 - DNA, 100 bp, Homo sapiens
cacagctgcttccattggccagtatgaagtggtgaaggagtgtgtgcagcggatgtacagttacccagcacgtgtacctcctcctcctcctattgctcgg

SEQ ID NO: 766136 - DNA, 75 bp, Homo sapiens
aaaaaactgcgcccagggggagggctctatggccaagaaggtgtcctgcttcaatgagttagaggtctgtatcca

SEQ ID NO: 766137 - DNA, 76 bp, Homo sapiens
atgaaataacctttgacaagattttcaatcagaaaattgcccagcgatctgctcacgagctgcccatggttgaaag

SEQ ID NO: 766138 - DNA, 83 bp, Homo sapiens
gccaccaaagacctgcgactttgctcagacacaggctcagtctgctggagcgggtcagtgccgaggctgtgaccaccaccctg

SEQ ID NO: 766139 - DNA, 90 bp, Homo sapiens
tccgtaacctgcgggagaggtttggaattgatgatcaagatttccagctcaatctgaaattgaagtgtctgtctctgcaaggaatatcag

SEQ ID NO: 766140 - DNA, 100 bp, Homo sapiens
ggagactatcatggaccgggagcgagaagcagccaaatttgagtccctctttaggacgtatgacaaggacatcacctttcagtattttaagagcttcaaa

SEQ ID NO: 766141 - DNA, 76 bp, Homo sapiens
accacctggacttcaacatgaatatgcagctcctgctgaaaactgggagtgatttttccatgtttgaagctttgcg

SEQ ID NO: 766142 - DNA, 100 bp, Homo sapiens
ctcacctgcatagccaattcagttaatacagcttcgtgggattttcctgttcctatctgtagaggcaagctaatgaagaatatcaaatactggcgaactc

SEQ ID NO: 766143 - DNA, 100 bp, Homo sapiens
taacccatggaccaccactggagtctccgggaccattatggcagtcaagtggacgggtgggcattcttctcctgtcctctgcctgaatgcaagtaaagaa

SEQ ID NO: 766144 - DNA, 95 bp, Homo sapiens
aaaatggacgcctggcaaccaagaagcctacgccgtccaccttgaaggcaggggagctgcgcacgcacgtcagccgctgccaagtctgtatgaga

SEQ ID NO: 766145 - DNA, 75 bp, Homo sapiens
ctgataagcatcttgggaaaaccctggatcaaatggagccttatctcatagagctagagatgatcgctatggaaa

SEQ ID NO: 766146 - DNA, 75 bp, Homo sapiens
atcgactcctttgttactcactgtgttcggatggcctgatatgaaggagtcacgcctcccgcctcccggagctgc

SEQ ID NO: 766147 - DNA, 75 bp, Homo sapiens
cgtcccaggactgtgcaggggactctgtcacaattgagaggatccagaatccagatctctggaatagctaccagg

SEQ ID NO: 766148 - DNA, 100 bp, Homo sapiens
aacaacctggatcttcgaacttttgacacggctttggaaacgacgtcatgtgttaggcctggaagaaacgctggtttatcctgcggagtggccggatgag

SEQ ID NO: 766149 - DNA, 100 bp, Homo sapiens
gtgagaatggcgtcccgcggccggcgtccggagcatggcggacccccagagctggtctcggcgcggaagatggccggcggcgtggacggccccatcggga

SEQ ID NO: 766150 - DNA, 87 bp, Homo sapiens
tgtttgagaaaaggcctaagaattttggcattggtcatcctgtacagttctacagcatgaataggcctgcctctcgccatactcccc

SEQ ID NO: 766151 - DNA, 100 bp, Homo sapiens
aagtaccagcaaggagactttggttactgtcctcgtgtgtactgtgagaaccagccaatgcttcccattggcagggcctggtcactgaccaagtctcact

SEQ ID NO: 766152 - DNA, 90 bp, Homo sapiens
gatctgcaccagtacatcacggaggtccaggcatcagctggcgctacgtacatctttgggaaaagtggtgggcttatcctctacacctgg

SEQ ID NO: 766153 - DNA, 75 bp, Homo sapiens
agagaaaaggccaaagagaggtgttctgaacaagttcaaggaaaaccgtcttcagatacagtccctaagcccaag

SEQ ID NO: 766154 - DNA, 100 bp, Homo sapiens
ccaacttctgctacagacgactcagaatccatgggaaagagctatgatgggagagcttatgtcatcactggcatgtggaaccccaatgcaccagtatttc

SEQ ID NO: 766155 - DNA, 50 bp, Homo sapiens
cgccaccgctgccacctccgcgaggttgacaatggtctccaggatggtct

SEQ ID NO: 766156 - DNA, 90 bp, Homo sapiens
cgtcactcacccccccgccggggatgggaagaagccctccattgccgccgtgctaagtgtggtggctcacacctgtaatctcagctactt

SEQ ID NO: 766157 - DNA, 87 bp, Homo sapiens
acttcttggtggatatggcaagggtacaaacccgtagtgctgatgaaccaatgacaacatttgttgtctgtaatgaatgtggaaatc

SEQ ID NO: 766158 - DNA, 95 bp, Homo sapiens
cctttctattttaaagagccaagcctcagagaattagaaatgatatttgccaaatttgatgaagtgcaaagttcaggcggtatgattttgagtgt

SEQ ID NO: 766159 - DNA, 75 bp, Homo sapiens
agaagaagatggagaagaaatagttacctatgatcggcctcagcaaggatgtggtggttatctgacaggctcgaa

SEQ ID NO: 766160 - DNA, 100 bp, Homo sapiens
ggacatccctttggaaggctacctgttgtctccgatccagaggatctgcaagtacccgctcctccttaagcaggaggatgcattagcacaacaggccttt

SEQ ID NO: 766161 - DNA, 88 bp, Homo sapiens
tggccagaactctgaaaagattgggaatggatggctacaggggaatcagcctagcaaactgcctgtctcctccctcctacacatttcc

SEQ ID NO: 766162 - DNA, 74 bp, Homo sapiens
ttgtgaacattcaagtgaagcaaaagcctttcatgattatgaatatgaagacaaggctggaagacctagcaagc

SEQ ID NO: 766163 - DNA, 98 bp, Homo sapiens
taaagggcagagcaaagactccagtaacactcaagcaaagaagagttgagcacaatcagctagagaccgttggatggcagcttaaccttcagatggct

SEQ ID NO: 766164 - DNA, 119 bp, Homo sapiens
gcgggagccgcacgcggcgatatggaagaggagggcaagaagggcaagaaggcttgcttccggcgtcatggctcaaagggccttcccgaatccttatgctgattataacaaatccctgg

SEQ ID NO: 766165 - DNA, 75 bp, Homo sapiens
ttggatcaaagaccgatgctgagagatttccatcgttgcatttacaactgctacaaaaatgccagcactccatcg

SEQ ID NO: 766166 - DNA, 50 bp, Homo sapiens
tggctccacgcatttcccttcgtgagcatcctggccagaacaagccaagg

SEQ ID NO: 766167 - DNA, 82 bp, Homo sapiens
ctgcgttcacaggtgtttctgcggcaggagacacacggacatcgggaacggacggaggaaggatgtgcagttgcagcctttt

SEQ ID NO: 766168 - DNA, 75 bp, Homo sapiens
tgcggtagcagcgactcatgagagcgcggccggaggacagtgctgcttttgacacaaaaacggggttacgtgtgg

SEQ ID NO: 766169 - DNA, 75 bp, Homo sapiens
tcagcagccaccggaccctgtcttacagccgctggagctatgacagcaccttctagccaccatggcaacctcatc

SEQ ID NO: 766170 - DNA, 75 bp, Homo sapiens
tggactccttcggcagtccacccaccgccgccgcctcccagtcatggggaagttcacctggactgcctgggcagc

SEQ ID NO: 766171 - DNA, 100 bp, Homo sapiens
tgggtctgttccccagggcccagggccctgcagcctccagccagagtggtgccagcttaggaataaccagcgatggattttttcagctggaagaattgcc

SEQ ID NO: 766172 - DNA, 100 bp, Homo sapiens
ccggcccgtgtcaccgccctgcgcttcaacagctccagcctgcagtgccagaattcctcggatattgctgcagaaaaactagtccccaagccacctccag

SEQ ID NO: 766173 - DNA, 90 bp, Homo sapiens
tatagcgtggcaacccagctgttcattggaggtgtcactggatggagtccaggcatgataaagaaaagatagaaaagaaagagaaacggg

SEQ ID NO: 766174 - DNA, 101 bp, Homo sapiens
aactctgaacacatctgaacatcagaagggacagactccagacgcgccaccgtaacttgggtttttactcctgtaacaactgaaataacaagtcttgatac

SEQ ID NO: 766175 - DNA, 98 bp, Homo sapiens
aaggaaagttgactgaaaatggggcggaagaaaatacaaatcacacgcataatggatgaaaggaaccgacaggaaagaccacagcaagattctttcat

SEQ ID NO: 766176 - DNA, 74 bp, Homo sapiens
ctcccatcattgatgtggtgcgatcggccagaggcattgatgtgcagcaggtttctttagtcatcaactatgac

SEQ ID NO: 766177 - DNA, 100 bp, Homo sapiens
agaaattttcgttgtgattgtggaaacagcaagtttaaaaatttggaatgcaaattacttcctgctgcattgcgtcagattactgataaagctcgtgaat

SEQ ID NO: 766178 - DNA, 83 bp, Homo sapiens
caatcatcaccaagttcgcatgttggctgcagagtcaatcaatagagctctcgatgttctgaagtatgaggaagttgacatgg

SEQ ID NO: 766179 - DNA, 130 bp, Homo sapiens
ttaggttccattgaaagcactgtgtcgaagaatttacctgtggtttctattcatcagtgtgtcccggcatggatatccggaacaacctcactaggttgcatgagctggagaattgctctgtcatcgaagg

SEQ ID NO: 766180 - DNA, 90 bp, Homo sapiens
caggaagctgaagaggagcgatctaaggatggaaaggagttggtcagcccttgcttgtctcccagtttcaaaggagagtgggaacacgca

SEQ ID NO: 766181 - DNA, 75 bp, Homo sapiens
ctggaccctggagtacaccccgcagcacagccgcgacttcaagatgccttcaattaagttgcagagttctgatgg

SEQ ID NO: 766182 - DNA, 82 bp, Homo sapiens
attgaagaacttcaaccccacagtgaggctaaggagaagcgccaggaacaaattgcgaagagacgcagactttcctctctgc

SEQ ID NO: 766183 - DNA, 83 bp, Homo sapiens
tgggcctgcccttcaccctctacatggtgacttaagagattaaaattaatttggttgctgttggttctgaacaaataatgagt

SEQ ID NO: 766184 - DNA, 100 bp, Homo sapiens
gatgaagttcgccgagcacctctccgcgcacatcactcccgagtggaggaagcaatacatccagtatgagaacaccttccaccatgaccacctcagcaag

SEQ ID NO: 766185 - DNA, 100 bp, Homo sapiens
gggatctccggcgccaactgccaggctacagaagaagtttccaaaaatctggttgccatgaaagaaattctgtatggcacaaatgaaaaagagcctcaga

SEQ ID NO: 766186 - DNA, 100 bp, Homo sapiens
caccgggtgagctcaccgcccagcccaaaccaggagattgcgagggagcgatgcggtgcagcgcggagagcactgtgaggtggatgcccgctcaggccgc

SEQ ID NO: 766187 - DNA, 75 bp, Homo sapiens
cttccaaagaatgccacagaatcaggggaggcatgcttcaggcgagtgttgtgtataaaggaagttgaaatcctg

SEQ ID NO: 766188 - DNA, 96 bp, Homo sapiens
ttttttctttttatttttttaatggctttacagaatcttaaatagaatacagtttgacatgacggcaaaaaataatgtccgtctgtctgcccaggc

SEQ ID NO: 766189 - DNA, 90 bp, Homo sapiens
gtgggctgggcagcagctgctgtggaagggctccttcaagcccagcgagcatggtgaccctggcagcaaccccaacaaacgccagaggca

SEQ ID NO: 766190 - DNA, 100 bp, Homo sapiens
ccctaccccagtgctcagcctttccatgctctccatcacctatcacagcagcatccgctctctggagctatcagttgagggatttgcagttgataaaatg

SEQ ID NO: 766191 - DNA, 100 bp, Homo sapiens
agaaagatgttcctccttcagctgtcacaagaccaatatttggtatactgggcacaatccatctggtggcagaaaaactaattgagggactcaaatctcc

SEQ ID NO: 766192 - DNA, 99 bp, Homo sapiens
ccgagatgtgggagctgctggccgcggcgtgggcagttcaggggctgggcggctgaggagtgcatcatcgacgaggactgtgggcccagcatgtactgc

SEQ ID NO: 766193 - DNA, 100 bp, Homo sapiens
aactgtcattgactcctcctgtgttccagttaataaagcatctacaaatgaggcagcctggggcagtgacaacactgcagctgaaggaggagttgctgga

SEQ ID NO: 766194 - DNA, 74 bp, Homo sapiens
atggcagacgatattgatattgaagcaatgcttgaggctccttacaagaagagctggctttatgtgctggggca

SEQ ID NO: 766195 - DNA, 82 bp, Homo sapiens
attcgagtgaccgagaccgcggccgggaccgagggttggggtgactcagtgggaacgccatctgagcggggcatgacctatg

SEQ ID NO: 766196 - DNA, 100 bp, Homo sapiens
ctctggccagctgactgcacttcttttttgagaaaggaaggaatatatcctgactgattaaagtgactgagaccgaagatgatagtgatagtgacagcga

SEQ ID NO: 766197 - DNA, 100 bp, Homo sapiens
aatggttagagaagaattttccaaatgaatttgcaaaacttactgtagggcttcgtgggacacatatgcaacatgcctatgatttttacaagcctgatat

SEQ ID NO: 766198 - DNA, 74 bp, Homo sapiens
tgcgtaatgctgtggatgagtttttactccttttagacaagggagtatatgttgaggagctcaagcttgggaaa

SEQ ID NO: 766199 - DNA, 98 bp, Homo sapiens
ccggcccggtttccctcggcgtgctactgtgcgctcgatccagcaccatggggaagcgggacaatcgggtggttgtggcagcactgcctgaaggtatg

SEQ ID NO: 766200 - DNA, 83 bp, Homo sapiens
aagcagaaccttagcaaagaggagctgatagcggagctgcagtgtttcaggctgcatgtaccaagtagttcagacgattggct

SEQ ID NO: 766201 - DNA, 83 bp, Homo sapiens
gatctgtccaccctcctaactatgtttggcctgccccagtgacagtgggacgggctgccctcctaaatgcgatggccaggtat

SEQ ID NO: 766202 - DNA, 99 bp, Homo sapiens
ctccaagcccatcaacttctccgtgatcctgaagctgtccaatgtcaacctgcaggagaaggcgtaccggcatgtggatgccatggagactggaagacc

SEQ ID NO: 766203 - DNA, 97 bp, Homo sapiens
gttcagcccagaggagaaactcgctcgccttcagaagacaggatcatccagcagctcgtcaacggcatcatcacgcccgccaccatccccagcctgg

SEQ ID NO: 766204 - DNA, 78 bp, Homo sapiens
ctggaagtgctgctgatgtgcaacaagggctccatgggccttaccccttcggccagtcttaaacgggtgtcagcaaga

SEQ ID NO: 766205 - DNA, 51 bp, Homo sapiens
gggctcactgaacccgggaaagcaactgctgaatcatacctatagtcaact

SEQ ID NO: 766206 - DNA, 90 bp, Homo sapiens
tcggccaacaagcagtgaagttgacagggatgctgtgaagaagtgttttgccgtgtgtcttgcataattcatggccagttttatgaagct

SEQ ID NO: 766207 - DNA, 75 bp, Homo sapiens
gccagcgaggcgggcagaagaagaaagggtccccagccccaccccagccccaaaggaggctgttcgagagggacg

SEQ ID NO: 766208 - DNA, 51 bp, Homo sapiens
gtgagcgagcggacccgcgatgggtgccagatgtgacatccagatgaccca

SEQ ID NO: 766209 - DNA, 75 bp, Homo sapiens
ggggctccaccgcgggaggttgcaggaactacccgatgtggtcccggaacagcaagcccgtgcacaccaccatcc

SEQ ID NO: 766210 - DNA, 50 bp, Homo sapiens
cttgacaacacagagtttcaaggttgggcccgaaggcatcctgcagaacg

SEQ ID NO: 766211 - DNA, 90 bp, Homo sapiens
atttcatgaagatggcgccaggacgaaggccctactgggcaagcctcctgacaaggtgatccgggcgggccccgcaggaattttatcccc

SEQ ID NO: 766212 - DNA, 74 bp, Homo sapiens
agttcatcaacatcaactacgtccctctgaagggtccaagttttctctccgaggcccgtttttctacacgagca

SEQ ID NO: 766213 - DNA, 100 bp, Homo sapiens
gaaatgcagaaaagcttgcagaatatatttgttccacttccacagcgcggcacctgtacctccggggtggcgctggggttggctccatgaccaagatcta

SEQ ID NO: 766214 - DNA, 82 bp, Homo sapiens
gtgcttaggggctgtcactggagtcccctctttgctgaggcattgaagttgatatcgatgtggagcacggagggaaaagaag

SEQ ID NO: 766215 - DNA, 75 bp, Homo sapiens
gggagctcgtaaggtccctcaaagcgggaaatgcgtcaaagatgccttcaattaagttgcagagttctgatggag

SEQ ID NO: 766216 - DNA, 73 bp, Homo sapiens
gtaaacccaagcagctggagggcttgaaaccaggcaccaaggacactcatgaggaccatgatacttccactga

SEQ ID NO: 766217 - DNA, 76 bp, Homo sapiens
ccttctgataacctgcttcattattgttatgtacactgctatcttaaggtggcctgtggattaaaccacactttgg

SEQ ID NO: 766218 - DNA, 75 bp, Homo sapiens
gaccggcgtccccggcgcgaagaggctggactcggattcgttgcctgagaactgatagtgcatcagctgacccag

SEQ ID NO: 766219 - DNA, 100 bp, Homo sapiens
cgcgtgctacggggacgacgcgtgcttcgtggcccggcaccgttccgcggacgtgctcgatcatgattgagttctgtccagggggagccgtggacgccat

SEQ ID NO: 766220 - DNA, 90 bp, Homo sapiens
ctcaaagaagtttgtccttctgctattgatcctgaaggccccttcacagatgtagtcactacaaatcttaaattgcgaaatccatcggat

SEQ ID NO: 766221 - DNA, 101 bp, Homo sapiens
ggccgcagaccagcgcccgaaggccgacacgctggccctgaggcaacggctcatcagattgggcctacagcaagggctttgtgactgccgacatgatccgg

SEQ ID NO: 766222 - DNA, 95 bp, Homo sapiens
accgtcccatggaggagtcactgctgctctttgaggcaatgattcgtgtgaataccttctctcaagtggcagatttcttggagagaaagtttggc

SEQ ID NO: 766223 - DNA, 83 bp, Homo sapiens
gactccttcggcagtccacccaccgccgccgcctcccagatcctgctctctctcagccgcctgtggacatgcgcaaagggccc

SEQ ID NO: 766224 - DNA, 100 bp, Homo sapiens
atgaccaaggctcgcaattttgagagagttttgggaaagagtcccaagagtggcccaaaagagagaatttatctagaggaaaacccagagaaaagtgaaa

SEQ ID NO: 766225 - DNA, 120 bp, Homo sapiens
gcgagaggtggaggccgcggacattttggtgccaagccgaaccgagccggggcgccgggagctattgggacctgcggatgtggctaaagccctgtaagagggcagatataccaaaacggc

SEQ ID NO: 766226 - DNA, 75 bp, Homo sapiens
ctggagctgagcaaagtgcgtgaggagtttaaggagctgaaagcgcgatatggaggtaccacatggttctcagag

SEQ ID NO: 766227 - DNA, 74 bp, Homo sapiens
gacgacgctgctgggtccgctgagcggggcgacccgaggtcctaggcctacttacaagcctccagtctcaaatt

SEQ ID NO: 766228 - DNA, 96 bp, Homo sapiens
gaaacttgatgcttctgggccaccatttgccagggcctcgctcgagatactggtagacacagtctgggccctctcttaccttactgatgctggcaa

SEQ ID NO: 766229 - DNA, 101 bp, Homo sapiens
atgccattccctctcacccaagaggacagagcgggatgccaccagcttgtccaaagggaagttccaggagctcctggtgggcatcgttgtggagaatgacg

SEQ ID NO: 766230 - DNA, 75 bp, Homo sapiens
tcagctgcctcccagggtgaatacaggaagcgtcagcccccgtagcacctctgttaccacgacttctagtgcctc

SEQ ID NO: 766231 - DNA, 83 bp, Homo sapiens
caagctgatccgacagagaaaggtatggcctcacaagtcttggtctacccaccatatgtttatcaaactcagtcaagtgcctt

SEQ ID NO: 766232 - DNA, 101 bp, Homo sapiens
cgcccttgatcttcgctgtggcatggcggacgaggggaagtcgtacagcgcgatgccctcctagctagccgtcacgggatggagggcttcatggactcagg

SEQ ID NO: 766233 - DNA, 50 bp, Homo sapiens
cactgcaacctctgcctcccgggttcaagaaattctcctgcctcagcctc

SEQ ID NO: 766234 - DNA, 91 bp, Homo sapiens
ctgatgcacgttccatccggcgctcagctgggcttgagaactccatccggcacaacctgtcactgcatagtcgattcatgcgggtccagaa

SEQ ID NO: 766235 - DNA, 75 bp, Homo sapiens
gaagggtgtttggggtgtgttttacaaaggtactgaagaagacctggaattttatgtcaggaagtgtggtgatat

SEQ ID NO: 766236 - DNA, 90 bp, Homo sapiens
gccgcacacgccctggagctccgcaagggggagctgcgctcggcggacctgcccgcgatcgttcagcagactgtacaggatctttttggc

SEQ ID NO: 766237 - DNA, 90 bp, Homo sapiens
ggatctgcagaagaaagctggccggggcctgggcctgagcatcgttgggaaacggtgtgaagatgccttaagaaaaaataagagcttaat

SEQ ID NO: 766238 - DNA, 74 bp, Homo sapiens
tgggtggtcaaggagtcgggcatcctggtgctgggcgccattgctgaggtgtggacaacagtgagtatatgcgg

SEQ ID NO: 766239 - DNA, 99 bp, Homo sapiens
aaagaaccagcttaaagatatggctattgctactggtggtgcagccagtgaagaagcaaaggaagacatgaaaattgacgctcattcttcttcctattg

SEQ ID NO: 766240 - DNA, 100 bp, Homo sapiens
gtctccaggctcctcactctgtccagcttcgttgttccctctggcttgtgggggcacggctgtgctccatgtggcaaggtggaaggcatggacgtgtgga

SEQ ID NO: 766241 - DNA, 90 bp, Homo sapiens
gggggattctcgacctgctaacagaactggaccttttcgacatgcgtcgggatgtccaggaaatttttcgcatgaccccccacgagaagc

SEQ ID NO: 766242 - DNA, 119 bp, Homo sapiens
gccggtcgcagtcgcgatgtcggtggccgggctgaagaagcagttccacaaagccagccagattgaaaaggaagatcaggccaaccccaaagaagaagtgaccaaggaggagtttaaac

SEQ ID NO: 766243 - DNA, 50 bp, Homo sapiens
gaggaatatcagtcccttatccggatgatgtctttctacctaaagatatt

SEQ ID NO: 766244 - DNA, 58 bp, Homo sapiens
tttaaagtgggcactgcaaaagtggttggttttcagaagatcctgacactgacatatg

SEQ ID NO: 766245 - DNA, 75 bp, Homo sapiens
ccgattactcggtgcgagccctttcggatctgcagtttgttaagattggcacttctctgtttgatgaagagggag

SEQ ID NO: 766246 - DNA, 83 bp, Homo sapiens
agcccggaaatgtccggcaagatcgagaaagcaggagcgagcccagggcgtggtgctgaaagtgctcacaaacttcaagagca

SEQ ID NO: 766247 - DNA, 115 bp, Homo sapiens
gtgatcactctgagatctatggtacagttcattggcagagaatccaagtactgactattcctgatccttatgaagactttatgtaccgtcacctccaatattatggctactttaa

SEQ ID NO: 766248 - DNA, 97 bp, Homo sapiens
gagggcattatgaacgaattctcaacccctacaacttattcctgtccggagacagcctaagggctgatgaggaagagatgcttgataatctaccaga

SEQ ID NO: 766249 - DNA, 83 bp, Homo sapiens
ggaatgtatccgggaggtcaacgaggtcatccagtgcctatgattacacaataccacctatggagaaagctgttgtgaaaacg

SEQ ID NO: 766250 - DNA, 100 bp, Homo sapiens
ggtcaaccgcgaccctaaacacctcaacgatgacgtggtcaaggttccaattgtggacaagataaggaccattgctcaggctgtctatggagccaaagat

SEQ ID NO: 766251 - DNA, 102 bp, Homo sapiens
ctaactagctccaggttaggccgagctttgcgggaaagcagcgacgagccaaactcaggctgtaccttgagcagctcaagcaactggtgcccctgggccccg

SEQ ID NO: 766252 - DNA, 75 bp, Homo sapiens
ccgcggctacgctgaggctctccgctcaggaatatgcactttctggttggaatttgaataacatgcctgtcctgg

SEQ ID NO: 766253 - DNA, 100 bp, Homo sapiens
tgaacagatttcctgcccggggccctcatggacggttggatcagggccgaagctgtcggaaaaggtaacagaagatggaactcgaaatcccaatgaaaaa

SEQ ID NO: 766254 - DNA, 101 bp, Homo sapiens
actgagtagtcactgccccacccctgcctggagcctcacacatgactcgcctcctctcagtgaccacagattgtcactgctgttccaagggcacacgcaga

SEQ ID NO: 766255 - DNA, 96 bp, Homo sapiens
atcgcggaaagtgatggctgtcgtcccggcgtctctctcaggacaggacgtggggcgtgcttggcttggttgctggaggtctggtgctgttgcttc

SEQ ID NO: 766256 - DNA, 83 bp, Homo sapiens
gagttgagcctgtgggacacttcgggttgtgaccgagattcccgacgagagagactgaggggaagagaggaaggaggggcggg

SEQ ID NO: 766257 - DNA, 74 bp, Homo sapiens
tcacagcggtccggtgaccaagtcgaggaatttgtaagtgtctgggttcgagatcctaggattcagaaggagga

SEQ ID NO: 766258 - DNA, 82 bp, Homo sapiens
aagatgttgtcctgtgctggggctgacagccactcatctctgcccagctgctgccctccccaggaggcctccatggcttcac

SEQ ID NO: 766259 - DNA, 83 bp, Homo sapiens
aaagtgaaattagcagttggaattcctggaaatgacaataaaatcgcaagcaggactggtcagaccatgctatttggtgggaa

SEQ ID NO: 766260 - DNA, 76 bp, Homo sapiens
aagactgggaggaactggggtgataagaaatctattcactgtcaaggaacttagtgatttggcccgtgaccctcca

SEQ ID NO: 766261 - DNA, 97 bp, Homo sapiens
accactttgaggtcactttccagcagtccagcacggccaagtcagccacctggacgcttggatttacactgggcaacgtggttggaatgtatctggc

SEQ ID NO: 766262 - DNA, 84 bp, Homo sapiens
cccgcccgaccccgtcccgaccctggccgccccgagcggagcctggaggcttgggcactgtttaaaggaaagttccgagaaggc

SEQ ID NO: 766263 - DNA, 75 bp, Homo sapiens
ccctgactgtgtacgtgatatctgaacactcctcacttcttccccaggacgatgttcaactttggctctcctatg

SEQ ID NO: 766264 - DNA, 100 bp, Homo sapiens
agaatcaaggcgttgagcctcaaggatgggcaacactccagattcagcctcagacaacctcggtttccgctgtgctgcagacgcaggccggccgccaggg

SEQ ID NO: 766265 - DNA, 100 bp, Homo sapiens
gactacgagtctcagagcacagatacccagaacttctcctccgagtccaagcgggagacagaatatattccaaacagaggcattgatttactgaaaaaag

SEQ ID NO: 766266 - DNA, 74 bp, Homo sapiens
cggaaaccgaaggggagccatggcggctgacagtcgggaggagaaagttgcctttccccatcttcctggttctg

SEQ ID NO: 766267 - DNA, 75 bp, Homo sapiens
tatatcacacaactgaaaacagattctgagctcccagatggacgtatcatcaaagttgggggagagagatttgaa

SEQ ID NO: 766268 - DNA, 82 bp, Homo sapiens
gacctgcgcgcgcgcacccagctgcggaacgagtttatcgggggatatgagactttctactcggaatatcctgagtgttgcg

SEQ ID NO: 766269 - DNA, 100 bp, Homo sapiens
ttttatttctacgaaagagcaaagactaagatgcttggtgaagcagctggaaagaggtgatgttaacgtcgtcgacttaaagaagaatattgaatatgcg

SEQ ID NO: 766270 - DNA, 75 bp, Homo sapiens
gagctgaaacagaacctgtccaggagctggcatgacgtgcaggtctctagcgcccaaaacagagtggagtacgag

SEQ ID NO: 766271 - DNA, 98 bp, Homo sapiens
gatataatgcacctgactgactctgtggtgcgtcgccagctctttcttgacgtgcttgatggaaccaaagcattagtggacccaagagccatatcagt

SEQ ID NO: 766272 - DNA, 76 bp, Homo sapiens
gccagaaagtttactcatatttcagctctgttacagggattttttaacctggccctgctaatcgaggaaggtacga

SEQ ID NO: 766273 - DNA, 75 bp, Homo sapiens
ccaattaagccttaccagcaggggcgacaacagcatcagggggcacacagtatgatcaaaatcacattatcctca

SEQ ID NO: 766274 - DNA, 82 bp, Homo sapiens
tcttcccgcgtccgccgattcctcctccttggtcgccgcgtccttggctggcgtgaggaggaaggtgaggacggcgatccat

SEQ ID NO: 766275 - DNA, 100 bp, Homo sapiens
atttttatattttattcctcttcctatccaatccctgccttttgagtccaggtggaactttatattgctgttggaatatctggagccatccaacatttag

SEQ ID NO: 766276 - DNA, 78 bp, Homo sapiens
tcggatcatgtctggtggctccgcggattataacagcacttttcaggattagaagaggctgtgtatagaaacatacaa

SEQ ID NO: 766277 - DNA, 82 bp, Homo sapiens
ggaaccctggtcaccgtctcctcagcacaggaagtcctggagaacctgaaggaccgctggtaccaggcggacagcccccctg

SEQ ID NO: 766278 - DNA, 83 bp, Homo sapiens
ttagcagcgcgcggagaagaacggggagccaggacctgaaggagaagaaggagaaggtggaggagaaggcaagccggaaagag

SEQ ID NO: 766279 - DNA, 116 bp, Homo sapiens
atagaaaaggagaaagaattgcttatacatgaaagaggggcatcagcttatagtgatttaggatactacattatcaataaactgcaccatgtggacgagtcggtggggagcaagac

SEQ ID NO: 766280 - DNA, 100 bp, Homo sapiens
cctgcctcgaagacctgaggagcaagggtcatcatcagatttgaaatatttaaagtggatacaaaactatttcagcaatgcagacaattaagtgtgttgt

SEQ ID NO: 766281 - DNA, 97 bp, Homo sapiens
gaatgaaaaggtcactgccatctggagtggatggacacacctggttgctcagacaggtgtcatggagaaactccagctgggcccagagattctgcag

SEQ ID NO: 766282 - DNA, 100 bp, Homo sapiens
taagatgtgggatgtcagtactggcatgtgccttatgaccctcgatgagagtagtgaagaagaggaagaatatgaaactatgactattggggagtctgtg

SEQ ID NO: 766283 - DNA, 96 bp, Homo sapiens
gcgaccccagtcggtgctccggggaggtcacctgacgaggaggagcaactggactctccggattgaccaagttcatcctgggctccattgggtctg

SEQ ID NO: 766284 - DNA, 75 bp, Homo sapiens
gccttgatagcatggatttctgtgagctcactttcaaacgatatgtcaataaacttcgaagcaagagtacagttt

SEQ ID NO: 766285 - DNA, 100 bp, Homo sapiens
aaacggagacttggatgaggtgaaagactatgtggccaaggtttttcgttggaatatacgttgcacatttatggcgattctgagtgtgagggcagacttc

SEQ ID NO: 766286 - DNA, 75 bp, Homo sapiens
gagtcgcgcggaggcggaggcttggggagagccagtgtaactccttcaagactggagtgacacacactgcatctg

SEQ ID NO: 766287 - DNA, 83 bp, Homo sapiens
tgagatccggagcagccggggtcggagcgggtctctaattaacagaagatggcaaagcccagccacagcagctatgtccttca

SEQ ID NO: 766288 - DNA, 82 bp, Homo sapiens
agagatcccggctcccagcccactgagtggcttcagcctcgctgtggttggaataaaaacagggttgaatgagttccagaaa

SEQ ID NO: 766289 - DNA, 101 bp, Homo sapiens
cgagctcctccagagccgcccgggagcagggagggctccgctagcccggggggccctccccgcggggcagatgaatttacatagtacatgacgaagttaag

SEQ ID NO: 766290 - DNA, 83 bp, Homo sapiens
ctggagcctcagttggaagcagccgatccagcctgcggagcctgtggggcagaagctggaggatcaggagcagcgggcccgac

SEQ ID NO: 766291 - DNA, 100 bp, Homo sapiens
agaacaggccctatggggcatacctatggctttattgacctcgactcccatgcggactccctggaggaaaagcggaagcggcagcggtctgaacgcctgg

SEQ ID NO: 766292 - DNA, 83 bp, Homo sapiens
ctcaagacctggtccttggagaccattagtcaagccagtatgcatagcttatgggactagctgtttataacagcatcaccttg

SEQ ID NO: 766293 - DNA, 119 bp, Homo sapiens
cccggtcctcagcgactcttctgacctccgcgcgacgtacccgccgccgccgttggctggagacaatgcagatcttcgtgaagactctgactggtaagaccatcaccctcgaggttgag

SEQ ID NO: 766294 - DNA, 113 bp, Homo sapiens
agctcctcaatgtgggtgtagagtctaaactcatccttaaaggggtcatactgctgtgagaaagatcagtctaaagaaaaggagaagaaagtgaaaaaaacaattccttcctg

SEQ ID NO: 766295 - DNA, 75 bp, Homo sapiens
gcagctctgctgagagagtgcaagccgtggggtccatctgggaagcgggatttgggttgatgaggagaaatggca

SEQ ID NO: 766296 - DNA, 90 bp, Homo sapiens
aaattgttttttctacctgttgacgtgtcaagcactaactagactaaggtgtcagtatgttcttcaagctgctctgctcctgggcccaag

SEQ ID NO: 766297 - DNA, 82 bp, Homo sapiens
gggacacatgtcttagaagcacactcattagataaagtgtcgcatactctttgataagaccatggcaaaagttataaccacc

SEQ ID NO: 766298 - DNA, 74 bp, Homo sapiens
gcgctaccggaatgtcatccagcgagtgattaggtggaaattcttgcttctcttcagaaaccaaagaagatttc

SEQ ID NO: 766299 - DNA, 82 bp, Homo sapiens
caccaccgcggtcactcaccgccgccgccgccaccactgccaccacggtcgcctgccacagttttcggctttgtgagaaacc

SEQ ID NO: 766300 - DNA, 101 bp, Homo sapiens
agagcgtgtctgaggtggtgcgcggctccgtgctcctgaacgacaaatcctccacccctgggctcaagtccaacacaccaaccccaaggaacgacgcccca

SEQ ID NO: 766301 - DNA, 101 bp, Homo sapiens
atgatattcagtggtgtttttctcaggtgaaaggagcagtagatgatgatgtagcagaagagttttgccgaattgacaagcccctgtgtcacagtgaggat

SEQ ID NO: 766302 - DNA, 82 bp, Homo sapiens
cccgcttcatgccgccgcccccccccacgcgccgcgtgcccggccgcgcccagcagctcaccatggatgatgatatcgccgc

SEQ ID NO: 766303 - DNA, 50 bp, Homo sapiens
gggacggccgccggagccgcgaggccaacgagcatgacctgggggaggac

SEQ ID NO: 766304 - DNA, 100 bp, Homo sapiens
gtctggacatctgggtgaagttttaataaggtgccagctgctgcccgtgctggtgccattgccccatgtgaagtcactgtgccagcccagaacactggtc

SEQ ID NO: 766305 - DNA, 148 bp, Homo sapiens
gccgggagaagcatgggaaggaggccgagccgggatctcaggtcctcgggggcggcggccacgccaaggacggaggaacgagccagaatctattcatcagacagtgatgagggatcagaagaagataaagctcaaagattactcaaag

SEQ ID NO: 766306 - DNA, 75 bp, Homo sapiens
gactgactagcagcttcattttgaactagaaggctgcatccgaggcgagaggcagagtgtcccgttggacacatg

SEQ ID NO: 766307 - DNA, 75 bp, Homo sapiens
cactgaggaaggggaagtgggcaaagcaggttttgtcaggttcttagaaggctattatattgtgttaataactaa

SEQ ID NO: 766308 - DNA, 83 bp, Homo sapiens
aacctcgcggccaacctgacgcacctgggcatcggtggcgccggccaggacaatgcagatcttcgtgaagactctgactggta

SEQ ID NO: 766309 - DNA, 76 bp, Homo sapiens
caggcctgctgaactgggtgctttatatagggtcagaatggcggcagtggagcatcgtcattcttcaggattgccc

SEQ ID NO: 766310 - DNA, 99 bp, Homo sapiens
catcatcgccatcctgtctatcctcctggccgtcctcctcacggtcctcctggctgtgctcatatacacctgggaagtgctcagcggctgcactggacg

SEQ ID NO: 766311 - DNA, 101 bp, Homo sapiens
gcggcggcgagggtggtggcggaaaggccgagggggacggcaagatgcacatcaccctctgtgacttcatcgtgccctgggacaccctgagcaccacccag

SEQ ID NO: 766312 - DNA, 75 bp, Homo sapiens
tggagcaggcgttccagacgattgcacggaatgcacttaagcagtggatcaatcttcctgtcctacaactgacaa

SEQ ID NO: 766313 - DNA, 100 bp, Homo sapiens
tgaagcaggacatgcctccgccggggggctatgggcccatcgactacaaacggaacttgccgcgtcgaggactgtcgggcagcggaggaggagaaagaga

SEQ ID NO: 766314 - DNA, 75 bp, Homo sapiens
tcagtggctggaaaataatatagaactcacgtgctgtgtgtcagactgagctttccctgattcattctacaatcc

SEQ ID NO: 766315 - DNA, 88 bp, Homo sapiens
tggccagtcgcctcacctctcctatcgtctccacccacctggacactcgtaatgtggcctttgagagaacctagaagtcggaatccgg

SEQ ID NO: 766316 - DNA, 75 bp, Homo sapiens
ccggctgccgccgccgccgccgccaggtgctggagaatctggtaaaagcaccattgtgaagcagatgaggatcct

SEQ ID NO: 766317 - DNA, 97 bp, Homo sapiens
aacctgggtgaactttcacggacaacctcagaggacaacgaagtgttcgtcctttagtgaagaagattcatttaaaaaatgttcatctgaagttgaa

SEQ ID NO: 766318 - DNA, 75 bp, Homo sapiens
cacagctgggtcctgatgaaagcaaacagaaatttgtgctcaaaacccccaagaatatgccttccgcatgtctcg

SEQ ID NO: 766319 - DNA, 78 bp, Homo sapiens
ggacccagagctagactacaccctcatgagggtctgcaagcagatgataaaggacagtcattttgtttactcattcag

SEQ ID NO: 766320 - DNA, 90 bp, Homo sapiens
cgacgaggaagttttctactgtaaagtcaccaacgagatcttccgccactacgacgccagcagccctgtggtggcgacgacgatggacca

SEQ ID NO: 766321 - DNA, 113 bp, Homo sapiens
ctgagttcaatacgtctgaacctttgctgtctatggatctgctctaaaccttatagcctgcttatgggggaagattccagactccatcatttctcgtggtgttcaggtgctcc

SEQ ID NO: 766322 - DNA, 82 bp, Homo sapiens
ccgtcatcaacgggcagtttgtcgaacgatgttggactcatagtcactgccagaaagccatgtcaaaatctgccgtgaagat

SEQ ID NO: 766323 - DNA, 100 bp, Homo sapiens
aggtgccaagaagcagcggtacacacctgatggccaaaagaaaggaagaaaatttttcctctcctaaaaatgccaaaaggccaagacaagaagaattgga

SEQ ID NO: 766324 - DNA, 75 bp, Homo sapiens
cagggagtgcatcaaaggtgtgaacgcagaggatgtctacagttgctttcgcttcctacgtgatgtttttgcaga

SEQ ID NO: 766325 - DNA, 75 bp, Homo sapiens
ctggagacctgccatttccaggccttctgggatgctttcattggatttggaggaaatgtgatcaggcaacaagtc

SEQ ID NO: 766326 - DNA, 82 bp, Homo sapiens
ttctggagtttgatcgagattttcgaattcgacattatgcaggcgatgtagtgcaacaagattgacctggctgaaaggagag

SEQ ID NO: 766327 - DNA, 75 bp, Homo sapiens
tacaatctaagaaggatttcagcaaatttggagcagggttggactccatgaaagaattgcacaaaacaaatcgac

SEQ ID NO: 766328 - DNA, 98 bp, Homo sapiens
gcgggttccggcgaggcctgaggtactctgtggatatccccttggacaaaactgtcgtcaataaggatgtcttcagagatcctgctcttaaacgcaag

SEQ ID NO: 766329 - DNA, 83 bp, Homo sapiens
ccaggccgaagcctcaaggccacaacaatgagttacaaggcactaatagttctggatccttgggtggtcttgatgttcgcaga

SEQ ID NO: 766330 - DNA, 90 bp, Homo sapiens
gtggcggcgctgctgctcgggctgctcttggaggcatatctttttcttgcacatcaaggaggccctcttggcaggccacctcttgtgttc

SEQ ID NO: 766331 - DNA, 100 bp, Homo sapiens
ctgctgctgctgctgctgtgggcgccgcctccgagccgcgcagacctgcagccagttacctactgcgagccggccttctggtgctccatctcctactacg

SEQ ID NO: 766332 - DNA, 50 bp, Homo sapiens
cggatctcaccgccgctcaggctggagaatgctggaggagaccttaagga

SEQ ID NO: 766333 - DNA, 82 bp, Homo sapiens
gacccggtgtgtggcgcgcccagagccccgcgtttcagccctagggaagccctgggcgctgcctatggcacagccaagagcg

SEQ ID NO: 766334 - DNA, 74 bp, Homo sapiens
tttttcctggtgggacaagacaacgggccggtggaggtgtccacattgcagtgagaaggcaaccaaagtgcagg

SEQ ID NO: 766335 - DNA, 100 bp, Homo sapiens
caaaaaccatcagtgtttgggaatgattctgatgatgatgatgagcaattcacagaagctgtgagtccttcagtgctacccccttcagctttgccactgg

SEQ ID NO: 766336 - DNA, 75 bp, Homo sapiens
cgcactgtgacatgtctgatcccttgctcccatccctgcagcatgaacaagagttctccggggtgctgcaccagt

SEQ ID NO: 766337 - DNA, 84 bp, Homo sapiens
ttcaattcggtgctccgccagccccagcttggcgtcctgagaaatggcactttgtgagtgtgccctccagactccttatgacag

SEQ ID NO: 766338 - DNA, 74 bp, Homo sapiens
acagaaagaagtctcatcttcctttgaccacgttatcaaggagggcgatttgatgaaactgttatcgaagagag

SEQ ID NO: 766339 - DNA, 74 bp, Homo sapiens
cggatttcaccacaagaagggctgccagtgtgaaagaaaatgtctttatttaaagcccgtgattggtggtctac

SEQ ID NO: 766340 - DNA, 74 bp, Homo sapiens
cttctgggagctgaggaaccagatatcttgaaaagctgccagaaaggtggtgttcccactgatgaagagcaggc

SEQ ID NO: 766341 - DNA, 82 bp, Homo sapiens
taaagaacttgcagttgaaggagtataacacaggaaaggacttagaagccttacaaatacatctgtgcattcttgcttcaga

SEQ ID NO: 766342 - DNA, 102 bp, Homo sapiens
ctgatctgttaaccttgcaccactggctgggaggccgctgcagctcatggctttggccaaagagttgcaaaatgatgtccatgtggtaaggcgacaaataag

SEQ ID NO: 766343 - DNA, 74 bp, Homo sapiens
ctgtatttactgggaactagtcttgcaggaagtgtatgcagagaatatttccaaaatggtgggaagagaaaagc

SEQ ID NO: 766344 - DNA, 75 bp, Homo sapiens
gggggtcgctacggacttaaaatctccgcaccgcaccctccacctcagggggccgtggagcccatgcagatcgac

SEQ ID NO: 766345 - DNA, 100 bp, Homo sapiens
ctgccttccaccgggacgccgggcctgctgtggctggaccctacaggagacaagggaaggagaattaacatcaaagctgtggcctcgtggtctatgcgga

SEQ ID NO: 766346 - DNA, 75 bp, Homo sapiens
aagagtcctgcatggtttcaagggacgtaccaggaggatggtgcccagggtaaaccagacttgaatacaacattg

SEQ ID NO: 766347 - DNA, 100 bp, Homo sapiens
aagagagacatttctggctctgaaggcgaacgcttcgctggccatttaggagctctgctcaaagccagacggtggagcgatttagccaagaagttcagat

SEQ ID NO: 766348 - DNA, 97 bp, Homo sapiens
ggattccaagtaactcttatttgaaagcataaaggatgttattggcagaaagataaaaatttcagtgaagaagaaagtaaagttggaagttaaggga

SEQ ID NO: 766349 - DNA, 96 bp, Homo sapiens
gagatcaattcttggagaacacaaagaagtgtgatgcttcttaatgaagaggataactcagaatcatcggctatagagcagccacctacttcaaac

SEQ ID NO: 766350 - DNA, 51 bp, Homo sapiens
ctgtgagatgtcctcactgtttcaggagggtgttggaactcgccataaggc

SEQ ID NO: 766351 - DNA, 75 bp, Homo sapiens
atggaagagtaattgcctgctttgattccctaaagggtgatcagcccatgacctaaacctccagacaaaataaaa

SEQ ID NO: 766352 - DNA, 100 bp, Homo sapiens
gaaactttgctacagcctcctttgaccagatccatgactgttggtgggtgtccgtgccgctgctgaagacgctggaccacgtgctcacccacggctgctt

SEQ ID NO: 766353 - DNA, 149 bp, Homo sapiens
aagttgggccgcttggtcaaggacatgaagatcaagtccctggaggagatctatctcttctccctgcctattaagaagcgaggaaaagccacagccccgtgaagcgtccgcggaaagcacagagactgcgtgtggcctatgagggctcg

SEQ ID NO: 766354 - DNA, 90 bp, Homo sapiens
gcccagaggcgagccctggtggaggaagaggctgttttggagtcagcggaagatcaccaaggccagggagtggttccaccgcactgtgaa

SEQ ID NO: 766355 - DNA, 100 bp, Homo sapiens
gaaaaaaggaaattttgtctcacctgtgaaaaatcaggttttgggtcctgctcctcggtggtgttccttcttagacaacttgaccgaagaattagaagag

SEQ ID NO: 766356 - DNA, 100 bp, Homo sapiens
ggcgctgttttcgacaggtgtgcaggtttcggcacatggagattgatgcgcccagacaccatgtcacaaccctccagaactgacgttggcaggaagtaga

SEQ ID NO: 766357 - DNA, 78 bp, Homo sapiens
aggtggagcacctgaagagatgccagcaggcccagctgagagccagcctggaggttacccagcagcaggccacccagg

SEQ ID NO: 766358 - DNA, 82 bp, Homo sapiens
ctggatccaggataacggaggctgggtgcatggctgcctcctaatcccatagtccagaggaggcatccctaggactgcgggc

SEQ ID NO: 766359 - DNA, 105 bp, Homo sapiens
ttacgtgggggagagaataaaactccagcgagatccgggccgtgaacgaaagcagtgacggaggagcttgtaccaccggaggcaaaaccttcaactgaggacttg

SEQ ID NO: 766360 - DNA, 75 bp, Homo sapiens
cggagacccccgcttccagtgcagcccagatacttcacgcatctatgtggccctgggatatggttttttcctgga

SEQ ID NO: 766361 - DNA, 100 bp, Homo sapiens
gacggagagaacacgagcccatcaggtgctactttgaatgataaggatgatgactctcttcctgcagaaactggccaaaaccatccatttttccgacgtt

SEQ ID NO: 766362 - DNA, 98 bp, Homo sapiens
gctgtagtgggcggccagagcgccggcaagagctcggtgctggagaacttcgtgggccgctttctggtaaacttacagtaccgccgtctctaccgaag

SEQ ID NO: 766363 - DNA, 96 bp, Homo sapiens
tgcctctgttgtagaagacatgtggtgtatataaagtttgtgatcgttggcggacattttgccccactgtgttctccttgcctcaaaagaaaactc

SEQ ID NO: 766364 - DNA, 58 bp, Homo sapiens
gcactgctactgcgaagacagctggcagggagaaaccccgttgcacacagcgtgtcgg

SEQ ID NO: 766365 - DNA, 98 bp, Homo sapiens
aaaacacgaggtgcagaagatgaccttaacacagtagcagctggaaccatgacaggcatgttgtataaatgtacaggcatgccagaggaacagagaga

SEQ ID NO: 766366 - DNA, 98 bp, Homo sapiens
agaaccatcacctcggagacccagacaatcacagaggccatgtggaagtgttacatcaccttttgcttggaaagatttactaagaagtcaaatagtgg

SEQ ID NO: 766367 - DNA, 75 bp, Homo sapiens
ctttgaggacatggcctccgacgaggacatgcctccggtgtggctgtctctgatggtgtcatcaaggtgttcaac

SEQ ID NO: 766368 - DNA, 100 bp, Homo sapiens
cggaaatgtgtcatcgaaagccaggagagcttgtttcatatccatatcccactgtattcctgctaatctgctaatgcagtaaattggaggaaaactgtta

SEQ ID NO: 766369 - DNA, 83 bp, Homo sapiens
gtcatgtggcagtggaaaatgcgctcgggctggaccagcaggtctcggcgcggaagatggccggcggcgtggacggccccatc

SEQ ID NO: 766370 - DNA, 90 bp, Homo sapiens
cgccgtagccgtccagagactggcaggcctcggcctaaaggtatcgaaggatgatcgcagtgatgtggagagcagctcagaggaagaaga

SEQ ID NO: 766371 - DNA, 75 bp, Homo sapiens
aggccgcggccggggcaggagcgcagagaaagtctattcgtgtgaccaggagaggcagagtgccctggaagaggc

SEQ ID NO: 766372 - DNA, 51 bp, Homo sapiens
atacaccgctttatcaaatatgcctaaggcaaaatacatccatgttcaaat

SEQ ID NO: 766373 - DNA, 99 bp, Homo sapiens
tgaacatttgtagcattgatttcccggatctggtaacatggcaaaagatataacgaaggaggcccaacttcattcaataaggagcctgacggatttatc

SEQ ID NO: 766374 - DNA, 100 bp, Homo sapiens
tttttaatgaccacaacaagcaagcatgcagcttactgcttgaaagttgctgctgacacgccgaccgcctgctgcttcagctacacctcccggcagattc

SEQ ID NO: 766375 - DNA, 74 bp, Homo sapiens
tcagatcttctcacactgctgtaaatgctgctcgatcttctgctgattcaaatatggacgatatttgtaagctg

SEQ ID NO: 766376 - DNA, 98 bp, Homo sapiens
ctgtgtagaatttctcaccaaacatcttagggcagataatgcctttatgttacttactcaggtgacagagctgaatgaacctctctccaatgaagatc

SEQ ID NO: 766377 - DNA, 74 bp, Homo sapiens
tccgcatcgccacagctgaaggctgcgagggactaagagcagagcctaccagacttgaagaaagtggtggtgat

SEQ ID NO: 766378 - DNA, 100 bp, Homo sapiens
gttattctgtcttcacaaatcgaagggcctatatgaacccaatagcaatggcgagatcaaggggtccaatccagtcttcagggccaacaatacaggatta

SEQ ID NO: 766379 - DNA, 98 bp, Homo sapiens
atattgcacaatggaggtggaaggaggagagaaactacagactgatcaggccgaggcttctaaaccaacgttcctgggtggagctacccatgaacagc

SEQ ID NO: 766380 - DNA, 97 bp, Homo sapiens
gcaagcgcaaccgtcggtgggtcggggatcggtcgcctgagagacgcaaacatgcagatctttgtgaagaccctcactggcaaaaccatcacccttg

SEQ ID NO: 766381 - DNA, 100 bp, Homo sapiens
atacaatgatggggcagcaagtggccaagtttttgtatgaatatgcaagaaggcatcctgattactctgtcgtgctgctgctgagacttgccaagacata

SEQ ID NO: 766382 - DNA, 100 bp, Homo sapiens
gtgaagaagatccgcagctccacgcagcaagacccgcgccgccgggacccccaggacgacgtgtacctggacatcaccgcctacttctgcttcctcctgg

SEQ ID NO: 766383 - DNA, 90 bp, Homo sapiens
gtctgcgggccgcactcgcctgcgccccgcacccctccgagcagcccggggatccagcacgcagcgttgtagaatgaatgaagacactgg

SEQ ID NO: 766384 - DNA, 114 bp, Homo sapiens
ctggctctgctgctgccgccggcgaaggaggaggcgttgccgggttactataacaacagtaccaaggtggctgtgaaaaccctgaagccaggaactatgtctgtgcaagccttc

SEQ ID NO: 766385 - DNA, 104 bp, Homo sapiens
gagcgacaagccgctggcagccgcggatctcaccgccgctcaggaaatgagccgtcagactgctacagcattacctaccggtacctcgaagtgtccaccatccc

SEQ ID NO: 766386 - DNA, 97 bp, Homo sapiens
atgatggagctgaggaagtgctgtaaccatccctacctgatcaatggtaaagtcatgaagctgagccccaaagcagaggaagtagctacgttctttg

SEQ ID NO: 766387 - DNA, 106 bp, Homo sapiens
gctttagtttatttcccttggaaacccttgtgtacctgactcctgactcagaacacgatacctttgtctggatatggaggaacaagcaatcttattttggaaggcg

SEQ ID NO: 766388 - DNA, 100 bp, Homo sapiens
gtgcagagcagcacctccatcaggtacaacctcgaggagctctaccagattcagaatggacagtttagaagaacctcagaaaaaagtctttaaggctcga

SEQ ID NO: 766389 - DNA, 75 bp, Homo sapiens
gcaagtgcagatagatggccttgttatatcttaagtgtggtgctgctaacattgcccaggcagcatctggttcag

SEQ ID NO: 766390 - DNA, 100 bp, Homo sapiens
gctgcagtagggacctggatgggggactttgtcacagcttggatgactattgcccagaagaaaagatgtttggttttcacaagccaaagatgtaccgaag

SEQ ID NO: 766391 - DNA, 90 bp, Homo sapiens
atgatgcaatcttcaggaaagtaagaggagttcagcaagaccagcagattggaagtatcaaagtggattatcatcctcatggctttcttt

SEQ ID NO: 766392 - DNA, 100 bp, Homo sapiens
cgaagcacgagcagatcctggtcctcgatccgcccacagacctcaaattcaaagtggctagtattcagaagcttcctgcagcctctgttctaacagacat

SEQ ID NO: 766393 - DNA, 50 bp, Homo sapiens
ctcatattttgaagtgtttacggaacatccatgatagcagtcttctgtaa

SEQ ID NO: 766394 - DNA, 100 bp, Homo sapiens
agcaaggatatggagagccatgttttcctgaaggccaagacccggtcattgaagactctccggaattcagatttgaaaccatatattatcttcattgcac

SEQ ID NO: 766395 - DNA, 100 bp, Homo sapiens
tgtggtggaatatgccaaggaaaaactggagagcttcatcaaaaatagtgatagctttgataagcctttccacgaagagtcctcagccttctccctccag

SEQ ID NO: 766396 - DNA, 100 bp, Homo sapiens
cctatttgaagtatttgacgaaaatagactgctgagatctgtatctgtggacctgaatgttgatccctcgcttcagattgacatacctgatgcgctcagt

SEQ ID NO: 766397 - DNA, 50 bp, Homo sapiens
ttggttccgcgttccctgcacaaggaagaacttgtcgcttttcctaagca

SEQ ID NO: 766398 - DNA, 82 bp, Homo sapiens
ccagcacagtccccactgacgggagcagcagaaatgaggtgtcgtgaaaactacccctaaaagccaaaatgggaaaggaaaa

SEQ ID NO: 766399 - DNA, 82 bp, Homo sapiens
gatgtagtctggagctcataacggtggtggccaaaaaatatcgcaactttgatattccaaaagaaatgactggcatctggag

SEQ ID NO: 766400 - DNA, 98 bp, Homo sapiens
tcaccaggcacctggatcagatcattcccaggatgaccacacagagtcccctaaaccagtgcctgcagagtggaagctgctggtctcggagaagtctg

SEQ ID NO: 766401 - DNA, 75 bp, Homo sapiens
gaataaacatgcaatgaacccaaaagggaggaagaagccagacgacagtcaggagctcagtatggctcttttcca

SEQ ID NO: 766402 - DNA, 80 bp, Homo sapiens
ctgagcgcgtccaggcctgacagctctgcggctcgggccctgagaaatacactttcgggaaatggcctctaaatcctggc

SEQ ID NO: 766403 - DNA, 75 bp, Homo sapiens
gagtcgaattggagaacttgttggagtgctggtgaatcatttcaagagatgatgataattccgaagaaggcttcc

SEQ ID NO: 766404 - DNA, 100 bp, Homo sapiens
tgattggagaaggctcttttgggagggtgtacaagggtcgaagaaaatacagtgctcagggaaggacaccactggtaccagctgcgccaggctctgaacc

SEQ ID NO: 766405 - DNA, 82 bp, Homo sapiens
cactgtcttctcttcctcctccaccgagtcgtgctctcgccccaacccgcgcgccaggtactaggttttgacaagcttgcat

SEQ ID NO: 766406 - DNA, 83 bp, Homo sapiens
cgccggcagctgctgcctcgcgcccgggagcaggaggagctgctggcgcccgcagatggtctttgtactccaactaaacctac

SEQ ID NO: 766407 - DNA, 50 bp, Homo sapiens
ccgcggcggcagcagcagtgagagcacacgccaaagaagatgagtcaagg

SEQ ID NO: 766408 - DNA, 83 bp, Homo sapiens
ggaaactccagcgtgtctccagccgtgtctctgctttctatccgtcaagatgataaagtcgtgtgcccgagaaccaaagaagt

SEQ ID NO: 766409 - DNA, 75 bp, Homo sapiens
gaactcctacccctggccctacggccgacagacgtttcacagattccttggtgtctttctccgctgagattttgt

SEQ ID NO: 766410 - DNA, 83 bp, Homo sapiens
acatttgaatctttggtagactttagcaaagccctaggaaagcatcctgtttcttgcaagctgaaggaagaggatcaccttcc

SEQ ID NO: 766411 - DNA, 75 bp, Homo sapiens
gccgggcaggatggatcaccaccagccggggactgggcgctaccaggtggacctgatcttcaggtttgcatatcc

SEQ ID NO: 766412 - DNA, 101 bp, Homo sapiens
agtctgtgaagcagcgatacaggattaaagcaaggagagccaatcatgactggcaaaacacagaccagcaacgtcaccaataagaatgaccccaagtccat

SEQ ID NO: 766413 - DNA, 50 bp, Homo sapiens
acaggcgtgtgtcactgcgcccaggtggttgtgggaagagaagtttgcag

SEQ ID NO: 766414 - DNA, 75 bp, Homo sapiens
cggggaggtcacctgacgaggagatatctccacaggaccttcttggttaaatcagggactacttctgaactctac

SEQ ID NO: 766415 - DNA, 82 bp, Homo sapiens
ggggccggctggtgcgcgagacgccgccgagaggctactgcagcactggggtgtcagttgttggtccgacccagaacgcttc

SEQ ID NO: 766416 - DNA, 51 bp, Homo sapiens
ctttgctccagtgcttttgccacattcaagccagaaatgtacacacaggag

SEQ ID NO: 766417 - DNA, 75 bp, Homo sapiens
ttggagttttttgcttggggactattgacagcacccaccttggtgggttttgaatatagccgttctggaaatccc

SEQ ID NO: 766418 - DNA, 83 bp, Homo sapiens
tgacatgttgataaaaaatgatgggcgaagctgtgctcaggcccgggctggacgcagagccagagctgtccccagaggagcag

SEQ ID NO: 766419 - DNA, 90 bp, Homo sapiens
gagtcagctcaaagattcttctacagtcaaggagctcaagacttaattcagtgcacaaatgagatgaatgtgaacatcccacagttggca

SEQ ID NO: 766420 - DNA, 86 bp, Homo sapiens
tctatggagaacacgacgtgtccaaggcgcagctgcattcagcctcagcggaggacacgcctgtggtgcagttggcagccgagacc

SEQ ID NO: 766421 - DNA, 100 bp, Homo sapiens
gtccgcagggggagattttgggaatccactgagaaaattcaagttggtgttcttgggggagcagagcggtgctggagaatctggtaaaagcaccattgtg

SEQ ID NO: 766422 - DNA, 75 bp, Homo sapiens
tccgtgaaccttagggacaacaccgggacacccgcgaggccggaaaatgctagtgtcagcagtgggatacctgcg

SEQ ID NO: 766423 - DNA, 82 bp, Homo sapiens
ggaggtcctgccgtccatgcggaagatcgtcgccacctggatgctggaggacatggatttgattgacatactttggaggcaa

SEQ ID NO: 766424 - DNA, 82 bp, Homo sapiens
gtgatgaataaaaacatttcaactccctacagttgtgccatgcgtaactataactacccaatattgcagccatggagtccat

SEQ ID NO: 766425 - DNA, 82 bp, Homo sapiens
cgccgtcccgtccgacagccaggcccgggagaactacgagttccagggagctctgtcctggtgaccgtgcccgggttatgac

SEQ ID NO: 766426 - DNA, 125 bp, Homo sapiens
cgagatgtctcgctccgtggccttagctgtgctcgcgctactctctctttctggcctggaggctatccagcggactttgaacatgtcggggatcgccctcagcagactcgcccaggagaggaaag

SEQ ID NO: 766427 - DNA, 100 bp, Homo sapiens
gccatgaccctggtactaaagaaagagcttgttgcggaaatggctagtgatgagctgaaagagatgcggaaaaacttgaccaaagaagccatcagagagc

SEQ ID NO: 766428 - DNA, 74 bp, Homo sapiens
ccagccgctgttttgccggaggagcccctcaggccgactggctggacaatggcccagaacaagctattcaacaa

SEQ ID NO: 766429 - DNA, 126 bp, Homo sapiens
atgagcctcccattctcccagacatggggaacagggtcacagctctcacccagcaacagcttgaagaagaggcagctaaacctcctgagcctgagaagcccgtgtcccctcctcctgtggagcaga

SEQ ID NO: 766430 - DNA, 98 bp, Homo sapiens
gctccgtcgtggaagcaggactgcgccgcgtcttcctcaagcttttcttggacagtgacttactttgattcttttgaaccaggaatgtttcctcctac

SEQ ID NO: 766431 - DNA, 74 bp, Homo sapiens
gttggagtgctgaaggctgtgcactgtggagagtggactgcaatgtgccgatcttagctgctgcctgagaggat

SEQ ID NO: 766432 - DNA, 98 bp, Homo sapiens
gcgacggggccaggaagcaattctggaagcgcagcaacagcaagctcccgggcaggtgctggagaatctggtaaaagcaccattgtgaagcagatgag

SEQ ID NO: 766433 - DNA, 74 bp, Homo sapiens
aagagtgcccatcgcacgctgctccggactactccggtgccctaccagaactattacgatcgggaggtcacccc

SEQ ID NO: 766434 - DNA, 50 bp, Homo sapiens
ggaggatgcttcgcagtttacgaacccttggaaaagcacaagacataaat

SEQ ID NO: 766435 - DNA, 100 bp, Homo sapiens
gggggacaaatgtgaccgttgccagcctggattccattctctcactgaagcaggatgcaggagctgcatctctgcgtctcccgcaagcacttcgctctgg

SEQ ID NO: 766436 - DNA, 85 bp, Homo sapiens
ttgaccagcatcttggctgaccttgagtgcagctccccctataagcctcggcctccacagttttctggatatgccgcagaaggat

SEQ ID NO: 766437 - DNA, 100 bp, Homo sapiens
gtgtgtcagaagacggtttactttgccgaagaggttcagtgcgaaggcaacagcttccataaatcctgcttcctgtgcaagccccaacccccgcctgacc

SEQ ID NO: 766438 - DNA, 75 bp, Homo sapiens
ccacctaggggaatcacaagcagcgaggaatatactttgtgtaaaagctttttttctcaaggtgcaatgaaagcc

SEQ ID NO: 766439 - DNA, 100 bp, Homo sapiens
atgtgtcagccgatgcaccgagtccagcccaggaaaatggagagctgccactggtgacatgccaacttaccagatccgagctcctactgctgctttgcca

SEQ ID NO: 766440 - DNA, 128 bp, Homo sapiens
tttttccctgtggctcagcccgttcgctggactgcaaaccgagctcccgtctgccttgcagtcaagtccatcatctccagaaccagctagtcttcctgcagaagatattagtgcaaactccaatggcc

SEQ ID NO: 766441 - DNA, 100 bp, Homo sapiens
gcaggagctgctcttctggggtatcgcgatccacttaaggatgaggcagacttggtgacaagctggtctgagcagagggtctccccagacacccgagcac

SEQ ID NO: 766442 - DNA, 75 bp, Homo sapiens
gagacccggaaggcttcaaaggctgtcgcaaggaggaaggaagcacaagcctatgcagacgacaacagtttgctg

SEQ ID NO: 766443 - DNA, 98 bp, Homo sapiens
ttaatcctactcagaagaacttgtacagagatgtgatgttggagaactatagcaatctggttttcttgggaaattgctttggagatgaggaaacaaac

SEQ ID NO: 766444 - DNA, 83 bp, Homo sapiens
tggcgtgcagcgcaaccacgagacggccttccaagcctggagcattggtaagcgtcacactgccaaagtgagagctgctggag

SEQ ID NO: 766445 - DNA, 100 bp, Homo sapiens
ttggcgatgggttacagtaagaggcatccagcaagatgaggacatctatgaggaaggaaactatgaggaggaaggaagtgaagatgtctgggaagaaggg

SEQ ID NO: 766446 - DNA, 90 bp, Homo sapiens
ctgatgactatggaattataaaattattccgatatccatgtttaagaaaaggcagttatacttaagcatgaacattgacgacaaactgga

SEQ ID NO: 766447 - DNA, 100 bp, Homo sapiens
cgaggaaccgcccaacatggcctcggaggcagaagatcctgaaggagaaggctgtgcccatgatagaaggctacatgtttgaggagcatgagatgatccg

SEQ ID NO: 766448 - DNA, 83 bp, Homo sapiens
ttctccttctggtgtggggcccgaggtgcagaccatgaattacgtggggcagttagccggccaggtgtttgtcaccgtgaagg

SEQ ID NO: 766449 - DNA, 98 bp, Homo sapiens
ctggaatgtcctgatgagctcattgagagaaccatgatggtcaattgccatgcacacttctgggtctacgacgttcctccatcggtgagcaaggatgt

SEQ ID NO: 766450 - DNA, 100 bp, Homo sapiens
aggacatcggcatctggttccacatcctggcgggcctcacgcacctggcggtcatcagcaaccactctcgagtggaccctgaggagctcttcaccaagct

SEQ ID NO: 766451 - DNA, 75 bp, Homo sapiens
cccaggagacagctatatttgcccatgttattcaagtttttccagaaaggaggagtcaaggaagcccttagtgaa

SEQ ID NO: 766452 - DNA, 125 bp, Homo sapiens
gccagacagtgcaccaaaggctgtcccgccctgaaatgcaatcagagctgggttttcccaatccacaggatcttctggtcgaccagaccatcgaaaaggtctccttttgtgctcctgaccgcaac

SEQ ID NO: 766453 - DNA, 97 bp, Homo sapiens
caacctcagctttacaaaccctgaatttataactgaattccatgcaagcatgttttttgctatgactgtgctattttacatgaaaaaaagggagata

SEQ ID NO: 766454 - DNA, 97 bp, Homo sapiens
tgagtcttttgacacctgggccaacaaagtgcgagtggccttggaggtggaggatggccgtaaacgcagctgtaggttccatgaggacaggccttga

SEQ ID NO: 766455 - DNA, 100 bp, Homo sapiens
cctggctgtcagcctggtgctcctctatctgaggtcacaagccccaaagtggacgtgttcaatgctaacagcaacctcagttctgggcctctgcccatct

SEQ ID NO: 766456 - DNA, 104 bp, Homo sapiens
gatgaagatgccatcgtcaacaggatttcgtgtggaatatcaaacaaatgattaagttgacacaggaacatatagaggccctattggacaaatttggtggggag

SEQ ID NO: 766457 - DNA, 75 bp, Homo sapiens
gctcgaggacgctggagcccagcaaggaaaatcctgccttgcttcgttgggcctatgcaagaacaataaatgtct

SEQ ID NO: 766458 - DNA, 90 bp, Homo sapiens
acaagccctgctatggaatcctcttcggacccaagggtttccgcagacatgcagctccagttacaagaaggcagttcccacacggtgcac

SEQ ID NO: 766459 - DNA, 98 bp, Homo sapiens
caagatccatctgccttctgcataggccaaacagggagactcatgcatctgtatgccgtgtgcgtggactgcctggaaggggttcacaagatcatctg

SEQ ID NO: 766460 - DNA, 59 bp, Homo sapiens
ccaggagttgggcccagcgtccctcccggaacgtgtgtcccggcatggatatccggaac

SEQ ID NO: 766461 - DNA, 50 bp, Homo sapiens
cttcgatcgtcgagtctgtcactggtgagaagccctaccactgcaactgg

SEQ ID NO: 766462 - DNA, 74 bp, Homo sapiens
gcccgtctccaggaacatcgatgtcccaaagaggatgttgtagccagaacacaaaaagatgggtttcatatctt

SEQ ID NO: 766463 - DNA, 83 bp, Homo sapiens
tggcgccgcccggggcgaggcagggccagcagcaggcgggagtaccatggggcgcaagttggaccctacgaaggagaagcggg

SEQ ID NO: 766464 - DNA, 100 bp, Homo sapiens
tctttgggaaacaaacttcagaccttatctccctctcataaagggatagcagcccctcatgcagggtaatggaactgctggtccatctgaataaacgtat

SEQ ID NO: 766465 - DNA, 96 bp, Homo sapiens
gcggcgctggccgagagccgcggctccgtgtttctggaaagtgacagcagaagtcggccagagcagcatgtggatctccactgatgccgccgcctc

SEQ ID NO: 766466 - DNA, 75 bp, Homo sapiens
tgatatctaggaggactcttctctcccaaactgtgcagtagacattgttgcaatcatgatcggcaatctgaaagg

SEQ ID NO: 766467 - DNA, 75 bp, Homo sapiens
gtttctgaaacctccatctaatgagtttaagatgcggaagggagagctgtttgactatctcacagagaaggtggc

SEQ ID NO: 766468 - DNA, 82 bp, Homo sapiens
aatctttaagtgaaaagcaaggcatgacacaagaatcctttggtgaaggtgacgaggcagaagatgaggagcagagggggcc

SEQ ID NO: 766469 - DNA, 75 bp, Homo sapiens
gactctgcggcgcatggaggaggaggagatggagtgaaggtacctgagcgcaggaaccatggtcttcattgctgc

SEQ ID NO: 766470 - DNA, 113 bp, Homo sapiens
tcccaggaaaggaaatgctccacgcagttactagtgtctgaagatccaaaggaaggaggagctaccaccaaagagtcagtgtgttgttggtggctgcaatgccagctttgctt

SEQ ID NO: 766471 - DNA, 100 bp, Homo sapiens
gcggccactgcaacaccaccacggatatcaaagaggccaatttctttggcagctacaaaccactgagtaagcaaaaatcagaggaagagctcaaggacaa

SEQ ID NO: 766472 - DNA, 83 bp, Homo sapiens
cagaggctggcagcgactatgtgaagcacatgattaagtaccggtacatcccgttcacacatgggaagagaaggtacagaggc

SEQ ID NO: 766473 - DNA, 74 bp, Homo sapiens
cgacccgtggccttgtgtttcagatgttttactgtgcctggctaactatagtcgagggggtgatggtcctatgt

SEQ ID NO: 766474 - DNA, 98 bp, Homo sapiens
cggcaggcaggggaggcgccgtctgtgagaaggaacctcaagaaggcatgaagccagcccctgcagtgccgtccacccgcccctctgggcctgcctgt

SEQ ID NO: 766475 - DNA, 75 bp, Homo sapiens
caagagatgctgaattatgccaaaaccagggatcctattgttaactttgaacttccaattcatttggagaagtgg

SEQ ID NO: 766476 - DNA, 90 bp, Homo sapiens
tgatctgcagggagacgcacagccaggacatcctggaacctgggaaaggatattgaaatggattccaggcgtgtgcctcgagacaagctg

SEQ ID NO: 766477 - DNA, 108 bp, Homo sapiens
ccgtttgttcaggaaccaccagtgacagagctggacggcagtctggaaacgaccaatgagatcttggactctgcctctcacgactgccccttagtcactcagacatac

SEQ ID NO: 766478 - DNA, 90 bp, Homo sapiens
gggactccgggaagccatggacgtcgagaggctccaggaggcgctgaaagctccagtcagcccggtcaagcatgacagcaactcaaactc

SEQ ID NO: 766479 - DNA, 82 bp, Homo sapiens
ctgggctctgcagcctcatcctacagccccctaggcctttgcccagtttgatgctgagggtgatgggacagttgatgccgag

SEQ ID NO: 766480 - DNA, 100 bp, Homo sapiens
ctttccctctcccaacatggcggcctcagagtggagactgctgcacggactctggaaccatgaacatatttgatcgaaagatcaactttgatgcgctttt

SEQ ID NO: 766481 - DNA, 96 bp, Homo sapiens
ttttactggcaaatagtacttcaagagcacagtcttatgtaaggaggcaggtggaagtcatcataaagtttctgtttcacccgtcgtccatgttcg

SEQ ID NO: 766482 - DNA, 90 bp, Homo sapiens
cacaaagcgtgaatccggaagaaaagttcaatctggaaacatcaatgctgccaagttctttccaaatggcaatgcatttgccactggctc

SEQ ID NO: 766483 - DNA, 75 bp, Homo sapiens
tatggagcatgcctttaccccgttggagcccctgctttccactgacggtctggaaaatcccgaagcagaagcccg

SEQ ID NO: 766484 - DNA, 50 bp, Homo sapiens
acaaacttgccaaagctacaagagacagaaacacccgccgggcagcagag

SEQ ID NO: 766485 - DNA, 100 bp, Homo sapiens
tcggtacgccgccgcctcgcacccgcagcctcgcgcccgccgccgcccgtccccagaaagggctattgcaagacacgaagtccgagaaattgagcagcga

SEQ ID NO: 766486 - DNA, 75 bp, Homo sapiens
gcaggtctctgtcgagcagcggacgccggtctctgttccgcaggatgattgaagcactgaagtcattctcaaaat

SEQ ID NO: 766487 - DNA, 97 bp, Homo sapiens
gcttcaattaatccagaagatagtactttccctggattttgcctaccattttacagtatttgtcttctattttggagcctttttattggaagcagca

SEQ ID NO: 766488 - DNA, 118 bp, Homo sapiens
cccttttaccactgcctggttgcagaagtgccgaaagagcactggactccggaaggagccagtggggtgggtcgcagccacattaagaatgccctgctcagccagaatccggagaagt

SEQ ID NO: 766489 - DNA, 75 bp, Homo sapiens
aattgccccatctgtggaggatttctttgctgaacaccacatcaaagcttggatttacactgggcaacgtggttg

SEQ ID NO: 766490 - DNA, 75 bp, Homo sapiens
gtgtggtggcggcggcggagactgcgggcccgtagctgggctctgcgagtgtggaaggggagtatgtcccagtgg

SEQ ID NO: 766491 - DNA, 74 bp, Homo sapiens
gaggctttggagcggctaaaaacctgttcgtgctggccgtgggcagcgccgtctttgatgccatgttcaacggg

SEQ ID NO: 766492 - DNA, 100 bp, Homo sapiens
ggaagaggagcgcgtccccggggaaatgagttggatatgtcaagtgaccagatagctgccaatctgcaagcagttattaatgaagtttgtaggcacagac

SEQ ID NO: 766493 - DNA, 83 bp, Homo sapiens
ccctacttgcctaaatgaggaatgtctttcctaccatctaaaatacgaaggtttctggctggactactactggagaatgccac

SEQ ID NO: 766494 - DNA, 100 bp, Homo sapiens
tgggtcccttcactggattttggcaaactcgtcaagggaatggatttgtaaactcaagagcttctccaaatttgattggagctactggtgcaaatagctt

SEQ ID NO: 766495 - DNA, 99 bp, Homo sapiens
tcctggcaccaactccgggcagtcacatgacgccggcgccgctcgctctgcgagcctcccggggctggcggggcttgcttccggcgtcatggctcaaag

SEQ ID NO: 766496 - DNA, 51 bp, Homo sapiens
catctacaaccttcgatctcctgacgagtccctgagtgccagaggtggtgg

SEQ ID NO: 766497 - DNA, 100 bp, Homo sapiens
cagaaagcaggcgaacccgcggcgcaataacgatcatggaagggaagtggttgctgtgtatgttactggtgcttggaactgctattgttgaggctcatga

SEQ ID NO: 766498 - DNA, 50 bp, Homo sapiens
accagtcattcctgtccttcaagaggtcatactaagcattttagttccac

SEQ ID NO: 766499 - DNA, 90 bp, Homo sapiens
atttctctctgattcagaatcctgaaaatgtgatctcccttaaaaagaacattcctgatgtagatgaagaaggctacagtattaaaccag

SEQ ID NO: 766500 - DNA, 88 bp, Homo sapiens
gtggcgtcccccatggacgacgggtttgtgagcctggactcgccctcctatgtcctgtacaggaaaaggcattaatagctgctcagct

SEQ ID NO: 766501 - DNA, 82 bp, Homo sapiens
ctcggcgctgccgtctctggaggagtactggcaacaggcaggtgacagcagggacatgtctcgggagatgcaggatgtagac

SEQ ID NO: 766502 - DNA, 100 bp, Homo sapiens
caataaacagctggagtctcagctccaccgcctccgacagctgctggagcagcatccacccaacccaccagtatcaccaggaaaaactgtaaatgatgtc

SEQ ID NO: 766503 - DNA, 88 bp, Homo sapiens
cagtgtcagaattacaaggtgagatcagccgcccggccaagctatcttctcgctagcagaacagctttgctgagccatcaaggtctaa

SEQ ID NO: 766504 - DNA, 75 bp, Homo sapiens
aaactcagaaaagcgtaagcttgctcagagatctgaaactggacaatgtcctgttggaccacgagggtcactgta

SEQ ID NO: 766505 - DNA, 100 bp, Homo sapiens
ggacccccaagccgccgcggacgcagttttcggctttgtgagaaaccttaccatcaaacacgatggccagcaacgttaccaacaagacagatcctcgctc

SEQ ID NO: 766506 - DNA, 50 bp, Homo sapiens
ggcgaacacgccgcggtcctcgtcgtggatcatggggttgacagcagcat

SEQ ID NO: 766507 - DNA, 96 bp, Homo sapiens
gtcagccatgaacggatggatgtgatgcctgctagccaaaaggaatactctggagcagtgcaatgtgtgttccaagcccatcatggagcggattct

SEQ ID NO: 766508 - DNA, 50 bp, Homo sapiens
ccaccggccgcttctgtcctcggaatttggataaagagagggcagtgcta

SEQ ID NO: 766509 - DNA, 83 bp, Homo sapiens
ctgggcttgtccttgctggtgcatgcgtcgtcggcctctgggcagcagcactctacacccccaagtgcatatgggtctgtcaa

SEQ ID NO: 766510 - DNA, 96 bp, Homo sapiens
caggagaccaagtttcagatgttccagctaattgacattgcccggcagacggctcagggaatggactcaggagcatctatcggctgcacgccaaca

SEQ ID NO: 766511 - DNA, 82 bp, Homo sapiens
tccaactgacaagcccttgcgcctgcctctccaggatgtctacaaaattggtgggtgatcagcccatgacctaaacctccag

SEQ ID NO: 766512 - DNA, 75 bp, Homo sapiens
ctgtgttctgcgtggggacggccgcctagagtggttcagccacaaggagggtgtccgcaatgttgccagtgtctg

SEQ ID NO: 766513 - DNA, 100 bp, Homo sapiens
gcatttacagaaagagtcaacagcagtggcaacagcttcccatcgacggtcagtgcgcacgttgtaatcagctgaggccatgtcaggagacggagccacg

SEQ ID NO: 766514 - DNA, 75 bp, Homo sapiens
gcccacaacaaggcggcggtggactggtatgttgagtctaaaaaggacagagtcacagtagtcttcagcacagtg

SEQ ID NO: 766515 - DNA, 100 bp, Homo sapiens
ggatggtgtgaccccatatatgattttctttaaggatggtttagaaatggaaaaatgtgtcaggaactgtgtgtctagatgtaattaatcaaacttggac

SEQ ID NO: 766516 - DNA, 87 bp, Homo sapiens
cgggcatgggcggcaactctttgatgtactactataatgggaaagcggtgaatgaaaactttgccattgatttgatagcagagcagc

SEQ ID NO: 766517 - DNA, 120 bp, Homo sapiens
actagtcgcgggagccacgcagaggacgccggaacaccctggaagccgagaaatggccaagttactggaggagatggaccaagagtttggtgtcagcactctggtggaggaggagttcgg

SEQ ID NO: 766518 - DNA, 100 bp, Homo sapiens
tgaaccccgtggtgaaggttgagcctgactaccgcctttttgttgtgcacctgctccccaagctccagcagctgggtgctggagaatctggtaaaagcac

SEQ ID NO: 766519 - DNA, 75 bp, Homo sapiens
gccagcggagcgaacccgagagcgtggagcgggctgggccagggacagagcagaatgggctgatatagatccggt

SEQ ID NO: 766520 - DNA, 100 bp, Homo sapiens
gttttacagaaatgggagaagacatcccttcttgctccgtgccatgacagacttcaaaaatcttcagaggagaagagatcaactttgggaaacttatcac

SEQ ID NO: 766521 - DNA, 98 bp, Homo sapiens
cgtctcttcaggcagttctgtgataccaaacccactctaaagaggcacattgaattcttggatgcagtggctggagtgtagtggcatgatctcggctc

SEQ ID NO: 766522 - DNA, 98 bp, Homo sapiens
cgccttgctgctgctcaaagctgctgccgccccttgggctaaaaggtcatggaactaaaggagtgtttgagcttctgtccggatggcggagaaccaaa

SEQ ID NO: 766523 - DNA, 83 bp, Homo sapiens
cggaactagatctttctgacaacaaactcgaagactggcatgagagtaagccatatcaaagacttcattgaaaaataccaagg

SEQ ID NO: 766524 - DNA, 82 bp, Homo sapiens
aagaatcgccgcgggggaccgcccttcgccttcgttgagttcgaggacccgcgggcgtgatggtgggcatgggtcagaagga

SEQ ID NO: 766525 - DNA, 100 bp, Homo sapiens
ggaagcagcaccatcggggagacaagcaagactacgcccaagcaaggtttgatgcctatttccaccagaagaggaagcttggggtgtgactgtggggagg

SEQ ID NO: 766526 - DNA, 75 bp, Homo sapiens
gatggaacctctgaataacctccagtgattacagtggcgagatcttgaacaactgctgcgtcatggagtaccacc

SEQ ID NO: 766527 - DNA, 82 bp, Homo sapiens
gcatctcagagaagaggaggaagaaggcgagaagcacaggactgggaggtgctggtcctagggaagctcaagtgggacctgg

SEQ ID NO: 766528 - DNA, 90 bp, Homo sapiens
gttgtgtgatgaccggaatgacaggtgaaaagccatacaagtgtacctgggaaggctgcgactggaggttcgcgcgatcggatgagctga

SEQ ID NO: 766529 - DNA, 95 bp, Homo sapiens
cgccggacgcgccgcgccctggcggctctagggaccccccccgcgcctgcacttagccccgcgcccgagtgtgaaatatgagttggcgaggaaga

SEQ ID NO: 766530 - DNA, 75 bp, Homo sapiens
ctccctcgtgagttgggcttggtaccgtgctgcccagaatgcccttcgggagaaatcatgagtggaggatctcaa

SEQ ID NO: 766531 - DNA, 100 bp, Homo sapiens
accgggaggggcgaaggcgggcggcagaggcgatcagatggactctgtgactacatgactaataaaatatggcagaaatgacaccatgcagtttccaagc

SEQ ID NO: 766532 - DNA, 100 bp, Homo sapiens
ctacagagcagtaaaagagcaattaaaacagtgggaagaaggcagtggcatgaataccaaattgacatattttttgctcagacctggacagatagtcgcc

SEQ ID NO: 766533 - DNA, 100 bp, Homo sapiens
gaagggcatgaaaccagcgactggaacagctactacgcagacacgcaggaggtttgccaagatggtggataagaatatttacatcattcaaggggagatt

SEQ ID NO: 766534 - DNA, 75 bp, Homo sapiens
cggcgttccttgtctgcctcgctttctccttggccaccctggtccagcgagtcaggatggctaaaggtgacccca

SEQ ID NO: 766535 - DNA, 75 bp, Homo sapiens
aggagagcagagaacgtccccaggctggagcattggatttgctaaaggagcttaagaatattcctatgaccctgg

SEQ ID NO: 766536 - DNA, 51 bp, Homo sapiens
aacttcaggaacctgctgtcagtgggcagatagaatgttgtgaaacagcag

SEQ ID NO: 766537 - DNA, 83 bp, Homo sapiens
gagaagcaggaggatgcagccatctgcccagtgacagtgctccctgagggttttggccaaattgggcgagggcacaaaataac

SEQ ID NO: 766538 - DNA, 83 bp, Homo sapiens
gagaattacgttttaattgactatgacaccaaaagctgaagaaacacttaaattctggaaatagcgactcagtatcatggcca

SEQ ID NO: 766539 - DNA, 50 bp, Homo sapiens
cctggatctttgctagaaagagaggctggcagtgatggtgaaagcatagg

SEQ ID NO: 766540 - DNA, 100 bp, Homo sapiens
aaagcatccccgaggaggaagacgaatcgttaaacatcttaggtcaggatgtttggaccaggaagagagtacaacttcactcggcccaatgagaagggag

SEQ ID NO: 766541 - DNA, 100 bp, Homo sapiens
cttggtcccagcgccttcccacggagcagcactcttcaccctgcacagccttgttaggtgtccctggccagtgtccttccacctgtccacaagcatgggg

SEQ ID NO: 766542 - DNA, 98 bp, Homo sapiens
ggatcaagcctccccaaccccaccatcccaccaaagggggctgctgaccgagagagctcactcagccagcaatggctgccatccggaagaaactggtg

SEQ ID NO: 766543 - DNA, 100 bp, Homo sapiens
ctcatctgttccagggaggtgggattgagatctctctttcctcatcatggtacatttgaagtaataaagaatacagatctcgatctggataaaaagatac

SEQ ID NO: 766544 - DNA, 50 bp, Homo sapiens
ctctccctacgagatcaccacagaccgtttaaagtaaaggtgggtgctga

SEQ ID NO: 766545 - DNA, 100 bp, Homo sapiens
tgtatattcactctgaactgagagtggaatctaatcagaaaagctcattccaagaaatccccaaacttaatgaagaactactcagcaagcaaaaacaact

SEQ ID NO: 766546 - DNA, 83 bp, Homo sapiens
tgagggcccttgaggggaaatggatgctaaagaggctggagtgctggagaatctggtaaaagcaccattgtgaagcagatgag

SEQ ID NO: 766547 - DNA, 96 bp, Homo sapiens
ttgcggcggtggcggcggccttggcccccagcggcttcctcggcctcccggcgcccttcagcgaggaagctgacgggaccagcacctacaagcagc

SEQ ID NO: 766548 - DNA, 96 bp, Homo sapiens
aatacgatgaaatcacagctacatatttgttattggggagaaaatcttcagaggcgagttttgtggcatctggaaaccggacagatatttctttag

SEQ ID NO: 766549 - DNA, 100 bp, Homo sapiens
cccggccaagatgtctgacatggaggatgatttcatgtgcgatgatgaggaggactacgacctgtcactcagcctctgaagaagcttcgggttcagactc

SEQ ID NO: 766550 - DNA, 98 bp, Homo sapiens
caggatgggatccggctcctccagctaccggcccaaggccatctacctggacatcgatggacgcattcagaaggctctctttttgcctgctgccatcc

SEQ ID NO: 766551 - DNA, 50 bp, Homo sapiens
ctgcgcttgctgctgggaagtggtttgccaggcagtatagcaggaatgag

SEQ ID NO: 766552 - DNA, 98 bp, Homo sapiens
caagatcgagaatggttaacagaactttttcaacaaagcaaggtcaatatgcagaaaatgctcccaggtctgatgctacaggacttggtttcagctaa

SEQ ID NO: 766553 - DNA, 73 bp, Homo sapiens
tcatggtgcatggaaggaaagccaatgcgcaggcagcacacttctgcttttgttccttcatcaggacgaattt

SEQ ID NO: 766554 - DNA, 90 bp, Homo sapiens
gaggaaagcaaaggcgtcaggaatggttcttcctcagtgccggtggtggtgtgcacattgagccccggtatagacagttcccccagctga

SEQ ID NO: 766555 - DNA, 90 bp, Homo sapiens
agtttgaaggtggcccctgtgctgttattgcacctgttcagtcagaaaaagtggacagggcagtgctgaaggaactgagtgaaaaactgg

SEQ ID NO: 766556 - DNA, 50 bp, Homo sapiens
ggctgggcccgcgtggatctctaagacctgcctagagctggaacgttacc

SEQ ID NO: 766557 - DNA, 100 bp, Homo sapiens
cccagccccccatctgcaccattgatgtctacatgatcatggtcaaatgacagagcgggatgccaccagcttgtccaaagggaagttccaggagctcctg

SEQ ID NO: 766558 - DNA, 83 bp, Homo sapiens
aaggaacgaggcaaggagctaaagcagcgtgcgttcagccctgggacactcgcctatggggacatgaaccacgagtggatcgg

SEQ ID NO: 766559 - DNA, 90 bp, Homo sapiens
ttctcgacctgctaacagaactggaccttttcgggtgactatgaccagagcaggaccaaagtgctgcacatgagcctgaaccccaccagt

SEQ ID NO: 766560 - DNA, 101 bp, Homo sapiens
caagggaacatcagttctacgagaccctccctgctgagatgcgcaaattcactccccagtacaaaggaacagatggagtcggataactgttcaggaggaga

SEQ ID NO: 766561 - DNA, 89 bp, Homo sapiens
gggccctgggccctggagcccctggaggaagcagccggtccagcctgaggagccggtggggcagctttgatgaccatgacccagctgtg

SEQ ID NO: 766562 - DNA, 50 bp, Homo sapiens
ggaattcctagctagcttcagagccggacccctttgctgatgcaagtaag

SEQ ID NO: 766563 - DNA, 100 bp, Homo sapiens
agcaaacagcgcagccagaaccgctccaagacgcccaagaaccaggaagccctgcggatggccaacgtggcaggtgcataaggcaaatccaatacgcaag

SEQ ID NO: 766564 - DNA, 98 bp, Homo sapiens
aagaggatggcaaaggtggctaaggacctcaacccaggagttaaaaaggtgactattatatggttaaaaagattttggaggaaaacagttcaggtgac

SEQ ID NO: 766565 - DNA, 76 bp, Homo sapiens
aggagaggccctcagcttgtctgcactggcagtgacgatggcacagttaagatttatgtgatcagtttggctgaac

SEQ ID NO: 766566 - DNA, 83 bp, Homo sapiens
gagagggcctgggagcttgctgcagcttcagagtctgtagaagaggcgacaccagggcttccaaatgaacaaccgaaaggaag

SEQ ID NO: 766567 - DNA, 75 bp, Homo sapiens
cgcggagccggagccgcagaggctcccgggctggactcaggcttctcaggatggtactggggaagtatgactgtt

SEQ ID NO: 766568 - DNA, 90 bp, Homo sapiens
ctggccactgtggatgttgaccccaagtctccccagtattgccagtgcaatgtgccaccccaagccctcccacctcccctgcttccccgg

SEQ ID NO: 766569 - DNA, 49 bp, Homo sapiens
cgaagctgctgactgaggtgcacgcaggacttccccagcgtggtgctag

SEQ ID NO: 766570 - DNA, 98 bp, Homo sapiens
gctgcagccgcagcctgtggctgtgcagggccccgagccggcccgggtcgagcaggcattgccagtggacctgagcaacagtggtatcagaagtcatg

SEQ ID NO: 766571 - DNA, 100 bp, Homo sapiens
cgacgcgggggcaggggtggacggcggtcagagccgaacgcgagggcggcgcccggggactggagctgcgcgcaatagcaacagccaactcagtttataa

SEQ ID NO: 766572 - DNA, 83 bp, Homo sapiens
ttcaactgcaccaagacctcgtgttgagacctcccgcgcagtgcctctgaattcactcgtgaagtaacagacacacagatgcc

SEQ ID NO: 766573 - DNA, 50 bp, Homo sapiens
caaagacctgcgactttgctcagagagaactcgatgccaccgcaacggta

SEQ ID NO: 766574 - DNA, 80 bp, Homo sapiens
atcaaggccaactatgacgtgctggaaagcccgtttccctggggagatggtaaccatactctattccataaccctcatgt

SEQ ID NO: 766575 - DNA, 51 bp, Homo sapiens
gggaacgcagctgaaagcgtgaactgtgttctgtggacaatcacaatggga

SEQ ID NO: 766576 - DNA, 100 bp, Homo sapiens
cccacgctgcatcatgagtgcagccggctgcaggagcagctagcgcagatacacattccagttttcctgatggtgaacaaataggccctgaagatctcag

SEQ ID NO: 766577 - DNA, 104 bp, Homo sapiens
tccctgctagcccagctgcctgtggacgttgtgattgggtttgccttcccggattgggcctacaagccagagtcgtcccctggctcaaggcagatccagctgtg

SEQ ID NO: 766578 - DNA, 75 bp, Homo sapiens
accgtgacttcccggacgctgggaaatgatgggaacagcgagagctgcccaacggacgtgtctattatgttgacc

SEQ ID NO: 766579 - DNA, 83 bp, Homo sapiens
acttggaatgaatccttctagagacgtccacgctcccggagccctgcctgttccctgtccatccaggccagcagctgaaggag

SEQ ID NO: 766580 - DNA, 50 bp, Homo sapiens
ctgaagatggctactctggagttgagagtctaaatggtgtttggctgaac

SEQ ID NO: 766581 - DNA, 74 bp, Homo sapiens
aaggaaaaactggagagcttcatcaaaaatagtgatagctttgataagtggatccataaagaacccagccaacc

SEQ ID NO: 766582 - DNA, 89 bp, Homo sapiens
ccttgaacgattccgctctgcggcgggtgtccctaaactagcagtttagggtgtcagctcaaagatcctctcaagacagtatccggctc

SEQ ID NO: 766583 - DNA, 87 bp, Homo sapiens
tgatgatggatccatttctcctattgaggagtcaacgggccctaaccacccaggatgaaaatggccagaccaagcgcaagttgcagg

SEQ ID NO: 766584 - DNA, 97 bp, Homo sapiens
aagtgcaggttctgggaagtctcggtgggttccccgcaaaatcaggttctgactcctcaggagcaaaaaacataacctgaagagggaggaagtggat

SEQ ID NO: 766585 - DNA, 90 bp, Homo sapiens
gactacggccgcctcagcagccggctgcaggccagagagggcctcgggaagagatgcgaggatgacaagccatctgtgagaaagacacac

SEQ ID NO: 766586 - DNA, 111 bp, Homo sapiens
aatcatttccttggctgataaccatatcctgctgtgggatttacaggaaagctcgagccaggctgtgagctgcagaaactggagggcagcagtggacctgtgcggacgtct

SEQ ID NO: 766587 - DNA, 75 bp, Homo sapiens
caacaccaagtgcatcaccatccccagctctgcttatgataatgtcaacaaagttcgagtagctatcaagaaaat

SEQ ID NO: 766588 - DNA, 100 bp, Homo sapiens
ttcacctatcccgcttcactgcatgcccaggcagggcaagaatcctttcgttccatcacaaggtcgtattacagaggtgcagcaggagctttactagttt

SEQ ID NO: 766589 - DNA, 74 bp, Homo sapiens
tcctgagtagctgggactgcagttaataaaggtatccatggagaacactgaaaactcagtggattcaaaatcca

SEQ ID NO: 766590 - DNA, 83 bp, Homo sapiens
atcgacgtcgtgatccagaagtccagagctgaggactgcctgtttgcaggtgcatggctgcctcctaatcccatagtccagag

SEQ ID NO: 766591 - DNA, 101 bp, Homo sapiens
gtggcagcgacagagccaaaatcagagctggaacctgaggagagagaaacgtgaagagggctggtgggtggtgattggagatgccaagtccaatagcctca

SEQ ID NO: 766592 - DNA, 90 bp, Homo sapiens
cctctcagctcctgccttacagcccgggatactgaggaagatgaggaggaagatgagaaggacaaaggaaaactgaagcccaacctaggc

SEQ ID NO: 766593 - DNA, 100 bp, Homo sapiens
taggtaccatccctgacctggtcctcatgctgccgaggctgttgctgttgatctgtgccctagggtggtcccaaccatgtgatgtctggagcataggatg

SEQ ID NO: 766594 - DNA, 74 bp, Homo sapiens
caacaagctgcgggctcggcatgcccaggcttaccactcttctctcatggatcctgataccaaactcatcggaa

SEQ ID NO: 766595 - DNA, 90 bp, Homo sapiens
ggagcgcggaatcggggagcgtccggagctagctggatcctctaggcagaacaccttccaccatgaccacctcagcaagttcccacttaa

SEQ ID NO: 766596 - DNA, 99 bp, Homo sapiens
ctcagatgcaaatgatgtagttattactgtcccgtttgattttggagaaaagcaaaaaaatgctcttggtcagaaaaagtggacagggcagtgctgaag

SEQ ID NO: 766597 - DNA, 100 bp, Homo sapiens
aggccatcaggggccttgacaacacagagtttcaaggcagggactggctgccaacccctccggctacgggccccttaccgagctcccagactggtcatat

SEQ ID NO: 766598 - DNA, 100 bp, Homo sapiens
aatgagtacatgaaagaagactttctgattaaaattgaaacctggcacaaaccagatcttggcacgcaggagaatgtggactttgatgctcccctgggct

SEQ ID NO: 766599 - DNA, 101 bp, Homo sapiens
gggatcccccagttccaaagtgtcttaaagagaatctggacgaggctagagaacagaaagaaaagagtcctccagaccagcctgcggtcccccacccgcct

SEQ ID NO: 766600 - DNA, 100 bp, Homo sapiens
aagctgcagccgcacctggccaaggggaggcatgcatctccccatgtgctatgatgctggctctggtgtacattgaacggctccggcaccgaaacccaga

SEQ ID NO: 766601 - DNA, 50 bp, Homo sapiens
ccctatcctatccgcaaacatgctacagttgaaactccagcagcgccgga

SEQ ID NO: 766602 - DNA, 90 bp, Homo sapiens
cgaacgagcgacggcggaacccgtgggcctgtggactgcagcctcggcggtcagcagatcaaccagaatgtggagatccagcgtggccgc

SEQ ID NO: 766603 - DNA, 75 bp, Homo sapiens
gtcgtgcgcctgggggtgcgcgcctgcgacctgcccgcctgggttcagcagctggacatggagaaccaacgctca

SEQ ID NO: 766604 - DNA, 82 bp, Homo sapiens
cgcttcacgacagccagtgacgtctggatgttcgccattttgcagactttgatcacagtgaaacgttccatgggaacttggg

SEQ ID NO: 766605 - DNA, 90 bp, Homo sapiens
gtggtgaaggtccggggcttgccctggtcttgctcggccgatgaagtgcagaggtttttttctggaaggcctgtgagattgagcgtggca

SEQ ID NO: 766606 - DNA, 75 bp, Homo sapiens
gttgatagagactcagctgaaagcatgtgcctcttttatacgaaccagcagagcatcctggccagaacaagccaa

SEQ ID NO: 766607 - DNA, 99 bp, Homo sapiens
atttaatggaaaatcgcttggttaaaacctgacacttttaacagttactccacaggatccgctgaacataggatgttgccacaaaatctacctcgtgta

SEQ ID NO: 766608 - DNA, 88 bp, Homo sapiens
tgatgacgcaggccttaaggagaaagtttcagctccagaacctgggtatcaacccagcaaacattggcttcagtaccctgactatgga

SEQ ID NO: 766609 - DNA, 90 bp, Homo sapiens
aacctggcggtgctcgagtgcctgcaggatgtgagggaggtatgggcactaggaaaagacttcttccatcaagcttaattgttttgttat

SEQ ID NO: 766610 - DNA, 114 bp, Homo sapiens
atggcctcggagaagccgctggcggcagtcacttgtacagcgccggtcaacatcgcggtcatcaagtactgttctgcggggagtgtctccagccctgcctgcaggtgccatccc

SEQ ID NO: 766611 - DNA, 100 bp, Homo sapiens
ggttcagagcaaaccgcagaagccaccaagcgtcctgaggaagtgtgcgggcccacacagttccgatgcgtctctaccaacatgtgcatcccagccagct

SEQ ID NO: 766612 - DNA, 98 bp, Homo sapiens
gcgagagctggagaagctgggattggagattccacccaaacttgctggtcactgggaggaaacattggcaaatttggagcgacagatctatgcttttg

SEQ ID NO: 766613 - DNA, 98 bp, Homo sapiens
cttggaggcccgggacttgattttcatgaatgaacggagccgggactgactttgcctacggcaagtgctggagaatctggtaaaagcaccattgtgaa

SEQ ID NO: 766614 - DNA, 100 bp, Homo sapiens
tgtaccccactcacaagtctctgaagccgtgcccgttcttcctggagggaaagtgccgctttaaggagaactgcagggcagctgcaatgactctccgcac

SEQ ID NO: 766615 - DNA, 51 bp, Homo sapiens
ccgagcccaaaccccgccaccatcatagtggttcaactcataatgacaaga

SEQ ID NO: 766616 - DNA, 100 bp, Homo sapiens
ttagaagccaccagcaagaagtcagccaagagatgtgttaaagaaactggcgatggaatatgagaggagccctctggaaagaaaaggacagaccctgtgc

SEQ ID NO: 766617 - DNA, 100 bp, Homo sapiens
aaacaagccaatcccaggaggaaaaacggtacactgaggaggggacggctccgtcttcacattgtgcacagatctgaggatgggattagcgaagctgtgg

SEQ ID NO: 766618 - DNA, 97 bp, Homo sapiens
caaggggaatggggtcaaaatgagcaggcagttgtgaaaaacttcaggacaaaaatgtttcatttaaggacttgtgctgctaagttgaggccattga

SEQ ID NO: 766619 - DNA, 50 bp, Homo sapiens
ggtgaaagactatgtggccaagccctttctaaggcacaaaatgatgtgat

SEQ ID NO: 766620 - DNA, 80 bp, Homo sapiens
caggcccagaacggagccgccttggcctcggggtctccctacaccaacgcttaaagcttttcaagccaggccaagaagct

SEQ ID NO: 766621 - DNA, 101 bp, Homo sapiens
caaagataagaagagaaaaagagaagaagatgaagaaaccagcttgatatgttggttcaaaccttgtactactcagctgatcacaagctgcttgatgggaa

SEQ ID NO: 766622 - DNA, 100 bp, Homo sapiens
agggcctcctcaagaagggcgcgtgctacggggacgacgcgtgcttcgtggcccggcaccgttccgcggacgtgctcgaataactgaagtgaagtgatgg

SEQ ID NO: 766623 - DNA, 87 bp, Homo sapiens
ccgaaggggcgtctgcggctctccgccgtccccagccctgcctctccctgggctctggctggcgcccatgcggctctacacgctctc

SEQ ID NO: 766624 - DNA, 75 bp, Homo sapiens
cgaacgcaaatgcaggagggagaggtgccaagaagcagctgtacacgtgatgatgaacagtctacacagatggct

SEQ ID NO: 766625 - DNA, 98 bp, Homo sapiens
gtcctggctgtcttctgccattcagggtgcctctgccaactggtggaatcatcgccacttccagcaccacgccaagcctaacatcttccacaaggatc

SEQ ID NO: 766626 - DNA, 100 bp, Homo sapiens
agaagaagaaatcccagcaaataggaaaattaagtttagtagtgctcctattaagagccttgcaaaggaccatcgcatgaaacttatgcaacaacaacag

SEQ ID NO: 766627 - DNA, 100 bp, Homo sapiens
cggagtgaaaagaaggcacggaagcgtcagcttttctttcgcaaaaagctgcttcactcatcccagatgcttcgggcggtctccctgggtcaggaccgct

SEQ ID NO: 766628 - DNA, 75 bp, Homo sapiens
cgctgtcaagttcaccctcttcaagaaggagatttaagatctccaaggtcattgtggtgggggacctgtcggtgg

SEQ ID NO: 766629 - DNA, 100 bp, Homo sapiens
gctacgccgccgccatgtcggcgcaggcccagatgcgcgcgatgctggaccagttgatgggcacctcccgggacggatattagaaatggctactccccag

SEQ ID NO: 766630 - DNA, 87 bp, Homo sapiens
tcaacatctctcagagacgaaagttgtaggtaaaactccaccatccacgacggtgggcagccattctcccccggaaacaccggtgct

SEQ ID NO: 766631 - DNA, 80 bp, Homo sapiens
agacaggagtcaatggagattctcgatacttcctgtggccactccaggtttctactacacttagcggacaaaactggtgg

SEQ ID NO: 766632 - DNA, 100 bp, Homo sapiens
agctggcaaattcagtgcagatcagggttgagttccagaataaattctacagcgggaccggtttcaagttcttacccttctccttcgagcatattcggga

SEQ ID NO: 766633 - DNA, 98 bp, Homo sapiens
ggcagtgctcacatttctgggcaggaattcgaatttagagtttaatttctcagagcattctctccaggaagaatttttacagtatctcaaagacttca

SEQ ID NO: 766634 - DNA, 100 bp, Homo sapiens
cagccctctgccttcctggccgctcccaaatataggttccggaatgaggactacaccatacatgtgcagctgaatgactacgtggacatcatctgtccgc

SEQ ID NO: 766635 - DNA, 98 bp, Homo sapiens
aaggatacctctttattggcttctgccaccgatccagaaccctgctcctcaccccacagcctccagggtcgtatagacctccccctcctatgggcaaa

SEQ ID NO: 766636 - DNA, 80 bp, Homo sapiens
cagaaaatgaccgactgagaatcaggtagttgatgtcacttggcgatattcctgcaaacatgaagaggtgattgccagaa

SEQ ID NO: 766637 - DNA, 100 bp, Homo sapiens
ccgcgcccatggcagagccagaccgaatgggtaccacagaccatgtcatcgtcctggcgtccacgaaccgagctgacattttggacggtgctctgatgag

SEQ ID NO: 766638 - DNA, 75 bp, Homo sapiens
tggaaaagaccctcttcagacttgaacaagttttcagataactattatcgtgcagaaatgattgatgccctggcc

SEQ ID NO: 766639 - DNA, 75 bp, Homo sapiens
cgccctccatcctctacgggggcaggtacgctggggaggaggaggaggaagggagcggcagcagtgaaggatttg

SEQ ID NO: 766640 - DNA, 90 bp, Homo sapiens
ctgtggctgaactacgacaacacattgctgagcttgaaatccagggtgataaaagaaaatgtggctgaagttacccgaagttcagcttgc

SEQ ID NO: 766641 - DNA, 75 bp, Homo sapiens
gcctgtgtcccacttgttcgcggcctatagcacaggaagtcctggagaacctgaaggaccgctggtaccaggcgg

SEQ ID NO: 766642 - DNA, 87 bp, Homo sapiens
ttcacaatgttgattctgatgacctcattagcatgggatccaacgacagtggggaccaaggcatactgaacacattttttagcagct

SEQ ID NO: 766643 - DNA, 51 bp, Homo sapiens
cctctgtacgcccgttcactggtggagccgccaccaaaatgcagattttcg

SEQ ID NO: 766644 - DNA, 75 bp, Homo sapiens
cacgtctccaaaatgagtcgcatcttcaacccccatcttgtggccagactccactgatgatagctgccgaacaag

SEQ ID NO: 766645 - DNA, 75 bp, Homo sapiens
agtgactgaattaaaaggtgtcaagaagctcagaatgcaatcatttggggaagaatctacagttgctgatggaca

SEQ ID NO: 766646 - DNA, 113 bp, Homo sapiens
aacgtcatccctgatatccctgaccacttcctgtgtctgtgggagcactgtgaggtaattgaacggcgcattcggcaagagctgcctttcatggccacagagaacatcatcat

SEQ ID NO: 766647 - DNA, 100 bp, Homo sapiens
caaagtaacgcaggaacagaaaaccaaacaccacatgttgtctcttagaagtgggagctgaacggacaaagcagttccaattccagagaaaatgagtgaa

SEQ ID NO: 766648 - DNA, 82 bp, Homo sapiens
ggccgcaggcagtcccgcggcagcaggatcacagataaagccaccaatccttccaaccgccaggaggactgggaatacataa

SEQ ID NO: 766649 - DNA, 75 bp, Homo sapiens
cagaaaacagccacaatgcaggacaagtggacactgtatgtggtagaagaccaaagaagagatgagctaggacca

SEQ ID NO: 766650 - DNA, 82 bp, Homo sapiens
cgagaggcacgagaactctggtcccggctacaggatcagggagcttccaaggcatttgatacctttttgatgggaagaaggg

SEQ ID NO: 766651 - DNA, 100 bp, Homo sapiens
tcttccgaagatcctaatgaggacattgtggagagaaacatccgaattatagctgtaggtaaaacttgcctactgatcagttacacaaccaatgcatttc

SEQ ID NO: 766652 - DNA, 74 bp, Homo sapiens
tttgatagtcattcgtaatcagcaggccaaagactcagagagtcttctgaagaggagtctgatgatgaaatagc

SEQ ID NO: 766653 - DNA, 100 bp, Homo sapiens
tggagcaggggaaggaactttgggtcctgaatcttctgggagctgaggaaccagatatcttgaaaagctgccagaaagggacattccagctacatcacac

SEQ ID NO: 766654 - DNA, 74 bp, Homo sapiens
ctcagcaggattgctgtgtgaaaaccgagctgctgggagaagcttgttctcagaacacaaacaaaacctgtgaa

SEQ ID NO: 766655 - DNA, 90 bp, Homo sapiens
cgcgctggagaaccccgagtgcggcccggaggcggcggagggcaccccgggcgggcggcggctgctgccctgagaatcgtcctgcacagc

SEQ ID NO: 766656 - DNA, 100 bp, Homo sapiens
cgaagaggccaaggcaccttccagaggctttgtggtgcgggacgcaccctggaccgccagcagcagtgagaagaagctggcagggcggagatgctggacc

SEQ ID NO: 766657 - DNA, 90 bp, Homo sapiens
atccgaggactgcctccccacaccaccgaccaggacctggtgaagctctgtcaaccgtcgtttatacgcaatgcagactggaatgaagat

SEQ ID NO: 766658 - DNA, 88 bp, Homo sapiens
gacagtcgtagatacaaatttttggatgatgatggatccatttctcctattgaggagtcaacattcatgatgttgctatcaaaagttg

SEQ ID NO: 766659 - DNA, 50 bp, Homo sapiens
ccagagaagcctgtgaacaaatactcccctgccctcaacaagatgttttg

SEQ ID NO: 766660 - DNA, 76 bp, Homo sapiens
tcaccacccctctccacaggaatacaggataacttttccagtaagaagtggaaaagggaagaaaaggaaagatgcg

SEQ ID NO: 766661 - DNA, 75 bp, Homo sapiens
ccaggggccgaagcccacccagggagttgatgctgtgtattcttattacaaccaaggcattttaccagagcaagg

SEQ ID NO: 766662 - DNA, 88 bp, Homo sapiens
cggccttgaacattgagaaagaactaccaaagccaagacacgttttcaggtacgtgcagcactacggcctgggcagtgcctgtgacaa

SEQ ID NO: 766663 - DNA, 100 bp, Homo sapiens
acaagtgcagttagtgtcgacgtggaaggctacatttatagtcattgtcgaaagcctgcctagggtagttaaaagacgagtgaatgctctcaaaaacctg

SEQ ID NO: 766664 - DNA, 75 bp, Homo sapiens
agaagcagatgaatatgagtccacctccaggcaatgggaagttaagatatgccaacaacagcaattacaagaatg

SEQ ID NO: 766665 - DNA, 104 bp, Homo sapiens
gacattgccgtcgacggcgagcccttgggccgcgtctcctttgaggtcttcgatgccaagaacatgatggctgcctgtgacccccgccacggccgatacctcac

SEQ ID NO: 766666 - DNA, 100 bp, Homo sapiens
aggtcctctgggacagcccctgccttctaccaggaagagttacaggccaacctggacctgatccaaacctacagaatgcatattgcccaagacatcaacc

SEQ ID NO: 766667 - DNA, 90 bp, Homo sapiens
agcatacaatgaaggaattattaatttgttgggttacttcttgctgcagattctgcgcaggatcggagctgtgggccaggctgtgtccag

SEQ ID NO: 766668 - DNA, 75 bp, Homo sapiens
cggcatcctcagcatggccaactccgggcccaacagcaacaggtctcaattatcctgcccggcctgtacatcggc

SEQ ID NO: 766669 - DNA, 100 bp, Homo sapiens
tcgagctcttcttcatcttcagtgagtctactcttcatcttgtgttgagacttcgtggtggtgctaagaaaaggaagaagaagtcttacaccactcccaa

SEQ ID NO: 766670 - DNA, 48 bp, Homo sapiens
aggagccaactagcatggaagtgcaggaggtagaaaagtatagagctg

SEQ ID NO: 766671 - DNA, 87 bp, Homo sapiens
aacacagcctggaccaccacagccaccccagcagaggccttatggatatgaccagatgtggaaatggaggcccagaaagatgaaatc

SEQ ID NO: 766672 - DNA, 82 bp, Homo sapiens
aaattttgagtcctcgagtgaatgggcggatctcatatcttcacttggcaaactcaacaagcaattctgtggtgttcttggt

SEQ ID NO: 766673 - DNA, 87 bp, Homo sapiens
actaccgattcaaccatcactgcaaagaccacacagtctctggtgatgaggattactgtcctcgcaaaagtgcagcggttttgaatg

SEQ ID NO: 766674 - DNA, 96 bp, Homo sapiens
gagtcttctcaacttgaaggtcatttaaccaacctcagctttacaaaccctgaatttataactgaattcccgatacattcttctgcctgtcgtgtt

SEQ ID NO: 766675 - DNA, 50 bp, Homo sapiens
gtctttattactggagttcattggtagagatggggtttcgccatgttggc

SEQ ID NO: 766676 - DNA, 74 bp, Homo sapiens
cgtccctgtcgtgtgacattttctggtagatgacattaatgctgataagaatatctcttctgcacagattgttg

SEQ ID NO: 766677 - DNA, 98 bp, Homo sapiens
tatggctaaattacatattccagtaatggtggatgaagttgttcattgtttgtcaccacaaaaaggacagaatcctcactatggatgggctcattgag

SEQ ID NO: 766678 - DNA, 100 bp, Homo sapiens
atcgtccaaggactggcgccggatccaacacctttccccagctctgcgcgtaccgcgctctttggaaacgaattgtgaaaggtgtagcagtcactcggcc

SEQ ID NO: 766679 - DNA, 136 bp, Homo sapiens
tggacttggaacaaaaggacttgtacagagatgtcatgttggagaactacagcaacttggtctcactggctctggcttatcaggactccatagttctccaacagagaaatcttgaaaaggactgaccagtttttgc

SEQ ID NO: 766680 - DNA, 75 bp, Homo sapiens
aaggacccggagccgaaacaccggtaggagcggggaggaactgtggctgcaccatctgtcttcatcttcccgcca

SEQ ID NO: 766681 - DNA, 100 bp, Homo sapiens
ccacgccctactgttgctcctactacgcttatattgggaatatcctctcgtcgtccttggtggaaggaaccatgaactggcatctccccctcttcctctt

SEQ ID NO: 766682 - DNA, 96 bp, Homo sapiens
gtctgcaaacctggagccagaaacattaccgtcatattccacccattactaaggtttttctaaagagtgaccgagtggccagaatggtacagagtg

SEQ ID NO: 766683 - DNA, 100 bp, Homo sapiens
ggtcgtcctcctgggcgcgacgaccctagtgctcgtcgccgtggcgccatgggtgttgtccgcagccgcagaaacggtcccctcctggatggtggccgtc

SEQ ID NO: 766684 - DNA, 75 bp, Homo sapiens
gacgtgcggatcctgctggtgggagaacaaatggtggagtcaatgaagaaagtagcagggatggatgtggagctg

SEQ ID NO: 766685 - DNA, 49 bp, Homo sapiens
gaacgagccaagaaatttccaactggagtctggctcttgctgattgaat

SEQ ID NO: 766686 - DNA, 50 bp, Homo sapiens
gggttacaaaaatccagaccagtgccgcagaatggaattcggcattgttc

SEQ ID NO: 766687 - DNA, 75 bp, Homo sapiens
ggtgaatattttgctactgctggaaaggcaaaagagatttcactagcagacctccaggagaattatattgaggca

SEQ ID NO: 766688 - DNA, 83 bp, Homo sapiens
aggagtttaaggagctgaaagcgcggctgcaagattaaggccttgagggccaagaccaacacctacatcaagacaccggtgag

SEQ ID NO: 766689 - DNA, 90 bp, Homo sapiens
aaaggctaatggcacaactgtccacgtaggcattcaccccagcaaggttaacgtccctaaaacccgccggactttctgtaagaagtgtgg

SEQ ID NO: 766690 - DNA, 83 bp, Homo sapiens
cccaggtgcccccggcctgcgctcccatccacacgctcggtactccaaagattcaggtttactcacgtcatccagcagagaat

SEQ ID NO: 766691 - DNA, 75 bp, Homo sapiens
ggctcaggttgtggtagaggcggaggctcaggcagcttgaggttaaacccatccagagtaatggctgcggcctta

SEQ ID NO: 766692 - DNA, 100 bp, Homo sapiens
gtggaagatgggaaatatggagcccaggatgatgccaatggacaatggaatggaatggttcgtgaactaattgatcatatggagtttcactgtgtcaccc

SEQ ID NO: 766693 - DNA, 90 bp, Homo sapiens
cttcactcctcagcgcgacgtcgtgtcgagttcccaaaaagctccgcaggggctgtagggaggtgctggagaatctggtaaaagcaccat

SEQ ID NO: 766694 - DNA, 50 bp, Homo sapiens
cagaaacaaaatgtcaacaaattgatggggtgtactctgtgtgaccgcgc

SEQ ID NO: 766695 - DNA, 101 bp, Homo sapiens
aatatgacccaagcattggtatctacggcctggacttctatgtgctgtcaaagctcgaaaaacagcagcagaggaaagaaaagaccagagctaagggacct

SEQ ID NO: 766696 - DNA, 75 bp, Homo sapiens
ctttgctactaccgcgactggctgctgcggcgcgagaaaccaaagccgcctttggcctctgcagagggcccagcg

SEQ ID NO: 766697 - DNA, 82 bp, Homo sapiens
agaagagcagagcggagggagccccagacacgcgcgagcccagcattgacctgctgcaggccttcgtggagcactggaaggg

SEQ ID NO: 766698 - DNA, 74 bp, Homo sapiens
cattttcaccggcgccgcggtggtctgtgccggtccaacaaaagcccttgggtctgtttgacttgttcaagtgt

SEQ ID NO: 766699 - DNA, 90 bp, Homo sapiens
gccgggggcgtctttcagagcattacgtctccaggtttaaaggagagcaactagaagtcgtccaaacacctgcatctcataaggagaaga

SEQ ID NO: 766700 - DNA, 88 bp, Homo sapiens
ttgagtcatttccttcgtacccacagtgcttcatgagaggctgccctgaggatctgtgtttggtgaaaaggagccaaattcacctgca

SEQ ID NO: 766701 - DNA, 101 bp, Homo sapiens
gaaggacaatatgatggcaaagtagatgtgtggtctcttggaataacatgtattgaactaggttcctttggcttgagtgacgagcgcattagtttgggtca

SEQ ID NO: 766702 - DNA, 82 bp, Homo sapiens
gatagagcagagtggaccaccccatgaacctcggagtcataccctgctgtgccccccatctggtcggtggagtctgatgacc

SEQ ID NO: 766703 - DNA, 90 bp, Homo sapiens
accagtacatcagagaaacccaactccatggacactgcaaatacctcacccttcaaagtaccatagtattattgattccacagaatacag

SEQ ID NO: 766704 - DNA, 83 bp, Homo sapiens
ccaacagctgcgcaaggaggaagagaatgcatcagcccccttacccaggaatggaacaacctccacaccatccttactatcag

SEQ ID NO: 766705 - DNA, 50 bp, Homo sapiens
gcctcccgactagctgggattacagggaccattgacatttatggatgtgg

SEQ ID NO: 766706 - DNA, 90 bp, Homo sapiens
caaaggaccatgatgtgaaaatggagaggaatgttacggcatccggagtcatccctcagatttctctgatcatgggcccatgtgctggtg

SEQ ID NO: 766707 - DNA, 100 bp, Homo sapiens
agataatagaacttccaaggcgtgtccagagcattctgctcccataaaagttcatcataatcaaacgaatggtgtgctcttgcttgcacagcttttgaat

SEQ ID NO: 766708 - DNA, 49 bp, Homo sapiens
ctcttcctggctgcgtccctaggatgagaatgacaaccctcccaccttc

SEQ ID NO: 766709 - DNA, 83 bp, Homo sapiens
ccgcgccccccgggacccccacgccgccgccaggtgctggagaatctggtaaaagcaccattgtgaagcagatgaggatcctg

SEQ ID NO: 766710 - DNA, 83 bp, Homo sapiens
agcatggttctggacagacagagaagtcctcctgcagtagagggttgatgataattagaagcatgctttccactgaacttccc

SEQ ID NO: 766711 - DNA, 74 bp, Homo sapiens
aagacttcaaaacccattttcttgggcaattgaaggaacagactaaaaatcgtgtcctggaaggaaactacagg

SEQ ID NO: 766712 - DNA, 98 bp, Homo sapiens
aagaatgatcaggaaccaccaccagagttacagcaagctgctgaagtttctcagctgcggggagcaagggtaatcactcctgaagatcttctgttttt

SEQ ID NO: 766713 - DNA, 100 bp, Homo sapiens
gatgctcgcagcactctcagccaggtggagccaggttgatgataattagaagcatgctttccactgaacttcccgacaacatttgttatgcagaatgtct

SEQ ID NO: 766714 - DNA, 75 bp, Homo sapiens
gccccggacagcggccccgaagcgggcggcctgcactcggctgaattcttgccgccaggatggggaaacagaaca

SEQ ID NO: 766715 - DNA, 101 bp, Homo sapiens
aaggatatgctgtattcagctcaggaccaggcaccttctgtggaagtggcactaaggaaaacagatcatctctccctagacaaagccaccatcccgcccga

SEQ ID NO: 766716 - DNA, 82 bp, Homo sapiens
taaggatggcaaacttcagattggagataaacttttagcagcagtatttggcagtcgtattcagagataaacccctggagct

SEQ ID NO: 766717 - DNA, 100 bp, Homo sapiens
gggagtcgtggcgtcgtctgcgaccgctgccttctcggatctgggacatgagcgatgatgagaccatctgagatggccccgctgtggggctgacttctcc

SEQ ID NO: 766718 - DNA, 90 bp, Homo sapiens
ttataaagcaggaaggtgaccatgtttctcagacacattcatttttacaccccagaggaggaggtggaggaggaggaggatggagagctg

SEQ ID NO: 766719 - DNA, 75 bp, Homo sapiens
agaggaagaggaaagaaaaggagtcagggatggcccttactcaggatttggggtggaaggcaggcatggtcaaac

SEQ ID NO: 766720 - DNA, 98 bp, Homo sapiens
gccgcctcagcagccggctgcaggccagagagggcctcgggaagagatgcgaggatgacaagaattgctggaatccacaaataccaaactatggccat

SEQ ID NO: 766721 - DNA, 100 bp, Homo sapiens
gggcagtgggagtggtacctcagaactcctttaatgtgaaagtttttgctggcatcacttcttctgggacatcttcaacctttttgtcacagctccattt

SEQ ID NO: 766722 - DNA, 100 bp, Homo sapiens
gacaggagtggagtgatatcagacaccgagcttcagcaagctctctccaacgctcccggagccctgcctgttccctgtccatccaggccagcagctgaag

SEQ ID NO: 766723 - DNA, 75 bp, Homo sapiens
tgtctgacagccctgtgtgacaccaagataagtaacatgtgcctggttccccttcaccttctgccatgattggaa

SEQ ID NO: 766724 - DNA, 75 bp, Homo sapiens
caacactgcctcctacttgcggctctgggccctcagcctcgctcatgcgcgtgcccggtaccatgccctcctgat

SEQ ID NO: 766725 - DNA, 98 bp, Homo sapiens
tggagcacttcctattccactggattgggaaagaccatggcagaatgaaccaacattttatacatctgatggtgttcctttcactgcagctgatccag

SEQ ID NO: 766726 - DNA, 75 bp, Homo sapiens
aaccacctaactgccttccactgggagctgttccgatgtgtgcatgagggtgccagccgggccgccgatgacgcc

SEQ ID NO: 766727 - DNA, 90 bp, Homo sapiens
cagccacatactatccgtttgttcaggaaccaccagtgacagagtttgttgataagccggggcccttcgtgggaccctgcggtcactgga

SEQ ID NO: 766728 - DNA, 74 bp, Homo sapiens
ccgatggccacgatgtggatgatcctcactccttccaccacaggcctgatgccgatgcagcaacaaggatttcc

SEQ ID NO: 766729 - DNA, 100 bp, Homo sapiens
aagctgtcatcacaaaagagttgattgaaattatctctggtgctgcagctctacacagggctgggtgactccgtatgctccagccccagtatctccagca

SEQ ID NO: 766730 - DNA, 83 bp, Homo sapiens
gtcggagactttgccatcttggtccagtctggctgcagcaaaaagcaggttgatggaaatcacaatcttctgacaaagctttc

SEQ ID NO: 766731 - DNA, 100 bp, Homo sapiens
cagcacttaaaacgattaaaaaagtctggtttagctcaaagcttggattctgccgtgccactcacgaatggcgacacagaagacgatgctgacaaaatgc

SEQ ID NO: 766732 - DNA, 100 bp, Homo sapiens
tgtctgtgtgcagaggggattcaacttcaatttttctgcagtggctctgggtccagccccttacttaaaggtcctcagaatggttggaatgaccctccag

SEQ ID NO: 766733 - DNA, 90 bp, Homo sapiens
tggtactaggattatacattgtaagaggtgacaacgtgtaacacaagtggcaagacagccgggaacccctaccccatccccttattcagc

SEQ ID NO: 766734 - DNA, 74 bp, Homo sapiens
ctttgctcttccatccgcctttgatcgtcttcctcttcagccatccaggagccatgtgtgagatacctgcccag

SEQ ID NO: 766735 - DNA, 100 bp, Homo sapiens
gcctcaatttgaagctccttctccatcacacagccttcaaaagtatgttcgggaacagattctactagcagtagcagtaattgtaaaaagaggatcatta

SEQ ID NO: 766736 - DNA, 83 bp, Homo sapiens
aggtacgctgtctccagtgaacctgacagacgaccagatcgccgctggcctctatgattcttgaagtgaaaagtccaataaag

SEQ ID NO: 766737 - DNA, 96 bp, Homo sapiens
gatcctgggcctcctgtgcaaaagcatggttattaatgctgcactggctttagcagcaaaaccacagagtaaactggcccaagagaacatggatct

SEQ ID NO: 766738 - DNA, 100 bp, Homo sapiens
gtctggctacctcgtggacaagtttgcagatcgggagcgcaaggtcgccctcaaggccatgatcaaaacagatgccctgtatccaagcccaatatgggac

SEQ ID NO: 766739 - DNA, 100 bp, Homo sapiens
cgaaactcccacgtcagcctcctgagtacctgggactacagaatagcctaacatggcagaccagagacagcgctcactgtctacctctggggagtcattg

SEQ ID NO: 766740 - DNA, 74 bp, Homo sapiens
cagcagcgaggaggggaagagagggccaaggcctaatgagtcagattctgatgatctggatgatgaagactttg

SEQ ID NO: 766741 - DNA, 82 bp, Homo sapiens
ctccggcgcatcatggcggctggccgggcccaggtcccttcctccgtttggtgcacctcgatttggaggaagtagggcaggg

SEQ ID NO: 766742 - DNA, 98 bp, Homo sapiens
tctcattgtccgtctggctgtgttaatggctgtgaccctgacagtaccagtagttattttcccacttagcagtgtctgcaaaaacgaatcttttccta

SEQ ID NO: 766743 - DNA, 99 bp, Homo sapiens
gcccagcaagataacctacaaggcagagaatctggagacgagttgtactgctgtcacaggaaatggacgctggattacaagcatggcagctcaggcagc

SEQ ID NO: 766744 - DNA, 75 bp, Homo sapiens
gccgattcctcctccttggtcgccgcgtccttggctggcgtgttacaggaggttccagtggcatcgggaagtgca

SEQ ID NO: 766745 - DNA, 76 bp, Homo sapiens
attattgctgatttatatgcagaggtgataggggttcttgcccaatcaaagtcgagcctcttaggcagagtttaac

SEQ ID NO: 766746 - DNA, 75 bp, Homo sapiens
accaatgaacctctattcaaacaatgcatgcccactctcagttctgcatgagtggggaccacacgttagaaggga

SEQ ID NO: 766747 - DNA, 100 bp, Homo sapiens
tctggctcctccagcgtcgccgctatgaagaaagtggttcaacagctccggctggaggccggactcaaccgcgtaaaaatatgaagatcaatgatgcaga

SEQ ID NO: 766748 - DNA, 75 bp, Homo sapiens
ctgggcggccggccgacccttcctgtcgctgacggcgactgcgggaggccagaggagaattctgcctaagccaac

SEQ ID NO: 766749 - DNA, 100 bp, Homo sapiens
actgtccccgggacctcaccgactgcctgctcgtggaaatggagaaggtcgcccagagcaattttgaggcccttcaagatttcttccgcctctttccgga

SEQ ID NO: 766750 - DNA, 74 bp, Homo sapiens
gctgtcgggcttgctgccccccgacaccgctatcctgtcttgggcgtctttggtactggcttttttaggggtct

SEQ ID NO: 766751 - DNA, 82 bp, Homo sapiens
cggaagtgtagaaaataccagtgggaaaaggaagtgctgttaagggaagaaagtcggaggctggctttggctgcgaaaagag

SEQ ID NO: 766752 - DNA, 100 bp, Homo sapiens
agtgcaaagagaaaaggggcattatcccgctggatgcacactgctgcgtggagttaagtgggcagaccaacatccacctcagcaaaaacttcttcctgac

SEQ ID NO: 766753 - DNA, 75 bp, Homo sapiens
tactgcgggccgctccgacggcggtccatcctggcaggagatggacagcctgcagcgccagatggaggagcacgc

SEQ ID NO: 766754 - DNA, 83 bp, Homo sapiens
cggtacgccgccgcctcgcacccgcagcctcgcgcccgccgccgcccgtccccagcctcaagtactacagccttccagcagcc

SEQ ID NO: 766755 - DNA, 50 bp, Homo sapiens
gaactggcccggaaacaggaggacgagtggccagacgctaaggactggag

SEQ ID NO: 766756 - DNA, 50 bp, Homo sapiens
cgacagccaggcccgggagaactctaagcgaaagacatgaggcctcagcc

SEQ ID NO: 766757 - DNA, 83 bp, Homo sapiens
ggcgtgcactccgcacctcggggacattattgcgcgtggaacggctgcttttggaagatccacctccgacccttaagccagag

SEQ ID NO: 766758 - DNA, 75 bp, Homo sapiens
ctcaaagatctcgtacaagatccttctttgcaaaaagccctcccacgtttgaggggagtcatgagccgtttcctg

SEQ ID NO: 766759 - DNA, 50 bp, Homo sapiens
gtggtctctgcacctcctttctgaaaaattccggaactgttggcttcggg

SEQ ID NO: 766760 - DNA, 82 bp, Homo sapiens
cccgccatgctgtctctagactttttggacgatgtgcggcggatgaacaagcggcaggtttccacttgagcggcacagtgac

SEQ ID NO: 766761 - DNA, 75 bp, Homo sapiens
ggtgctgctcatctgcctcgacctcttctgcctcttcatggggccacccagtgctcctgcagaagatcgttcagg

SEQ ID NO: 766762 - DNA, 98 bp, Homo sapiens
gcgcgctcgctccggcgccggcctcgcctcctcgcagcagcgccatggccaagactaaggggctgcagagcggggtggacattggcgtcaagtactcg

SEQ ID NO: 766763 - DNA, 50 bp, Homo sapiens
cgaggagctcagcggcgggaggatcaagtgtattgaaaatgtgtcccgac

SEQ ID NO: 766764 - DNA, 73 bp, Homo sapiens
cccaaggtccaccgagcccgcaaaaccatgtccaaaccaggaaatggacaggggaaaaaagttgttccatgta

SEQ ID NO: 766765 - DNA, 75 bp, Homo sapiens
gtacaggactgtcaacgaaacctggcacggctcttgcttccgatacaaggcagatccaaccatccccaccgtggt

SEQ ID NO: 766766 - DNA, 96 bp, Homo sapiens
gttaaccgggggacaggataaactgttacgcatatatgacttgaacaaacctgaagcagattactccaaaggtttcggcggcaaatacggtatcga

SEQ ID NO: 766767 - DNA, 100 bp, Homo sapiens
aaaaaatcccatgaggagaaggcattctaatttaggctggagtgcaatggtgccatctcagctcaccgcaatctctgcctcctgcattcaagtgattctc

SEQ ID NO: 766768 - DNA, 83 bp, Homo sapiens
gggtcctctccgaaatcgacagcctcaaccttcataaacaggtgaccctggcagcaaccccaacaaacgccagaggcagcccc

SEQ ID NO: 766769 - DNA, 108 bp, Homo sapiens
gggccgccatggagcccgactcggtgattgaggacaagaccatcgagctcatggtatatgctcgtatgtcagaagtcttaggaataacagatgacaaccacgttctag

SEQ ID NO: 766770 - DNA, 99 bp, Homo sapiens
cttgggagaaggccggaagcttaccagccgagaaggaattcctagctagcttcagagccggcagctactccatccgccactcaataagtatgccagcca

SEQ ID NO: 766771 - DNA, 71 bp, Homo sapiens
gtgcccaggccctgaggtgggccggacctgggagtggcaggcggtgcgtctttctacgtgaataggatttt

SEQ ID NO: 766772 - DNA, 90 bp, Homo sapiens
tctgaagctaaaattaagaaacgtcaggctcctgatccgaatttggctgctgaccagaatgtcatcatggctgccctgagcaaacacgcc

SEQ ID NO: 766773 - DNA, 100 bp, Homo sapiens
ccaagcgctggacgaccggctctactgcgtctaccagagcatggtgctcttcttcttcgagaattacaccggggtccagtgtttgtggagaaggtgctgc

SEQ ID NO: 766774 - DNA, 82 bp, Homo sapiens
aagagagaccttagaaaggatcaggactggcggggacaatgactcattcttcccaggacactggttcttgtggcattcagga

SEQ ID NO: 766775 - DNA, 74 bp, Homo sapiens
gaagagggaagacacgcggaaacaggtgagccctattcccagaggcaggtggtgctgaccctgtaacccaaagg

SEQ ID NO: 766776 - DNA, 75 bp, Homo sapiens
cttggagaccagctactacttttcagcatccttatgtgagggcacgcctatctcaggaagtggctgctgctctca

SEQ ID NO: 766777 - DNA, 96 bp, Homo sapiens
agtcttgtccacagctggcaaattcagtgcagatcagggtacctttcaacagatgtggatttccaagcaagaatatgaagaaggagggaagcagtg

SEQ ID NO: 766778 - DNA, 51 bp, Homo sapiens
cagaatcaccagcactggctgaaggagaccagttttgattttaaatgttct

SEQ ID NO: 766779 - DNA, 101 bp, Homo sapiens
gcaccaacggcaccaactattcgcggagctggaatgactggcaacccagttactgtaaaatggggaaaggagaaatttgaaggtgtagaattgaatacaga

SEQ ID NO: 766780 - DNA, 50 bp, Homo sapiens
ggacgagcagcaagtcagggagcttaaggctctatcaaagaaagcaagag

SEQ ID NO: 766781 - DNA, 142 bp, Homo sapiens
ctagcgccgctgggcctgcaggtctctgtcgagcagcggacgccggtctctgttccgcaggatgtatctccagatgaaatggccactgcttgatgtccaggcagggagcctccagagtagacaagccctcaaggatgcccgg

SEQ ID NO: 766782 - DNA, 100 bp, Homo sapiens
ccgtgcagcacgtcaacctgctgaaggagtggagcaactcgctcgaaaagaagctcctgccgctggatggggaactcgtcctggcttcaggagccggatt

SEQ ID NO: 766783 - DNA, 83 bp, Homo sapiens
tactgggggattcgcagggaggatgtcgggacaccccggaagctgggaaatgccatcactggtgcaagctatatttaacggag

SEQ ID NO: 766784 - DNA, 50 bp, Homo sapiens
tttatgtcatcaagaagaatgacgatgggagaccaaattttgaggaaggt

SEQ ID NO: 766785 - DNA, 98 bp, Homo sapiens
cgtagagggagtagtcaggattctcttggaacattattacaagctctggtagctgaagaacatctcacagtggacgccagggtctattcctacgctct

SEQ ID NO: 766786 - DNA, 82 bp, Homo sapiens
tgaaagatcctaactatgatgatgaccagattgccccagtggaaaatgacaatagctacgatgaactgaaaagagatgcaaa

SEQ ID NO: 766787 - DNA, 100 bp, Homo sapiens
cagcagtagaatcacttgggttcattctattcagttggtcgcattatgtttcagctcttctcagacatatgtccaaaaacatgcaaaaacttcctttgct

SEQ ID NO: 766788 - DNA, 100 bp, Homo sapiens
gaatggggtgatcgctctcaactaactacaattgtattggcagctagagaggacacagcattgttggttttgccatgtactattttacctatgacccgtg

SEQ ID NO: 766789 - DNA, 83 bp, Homo sapiens
aacacactcagcatcactaaaggtgagcgtccctatcaatgtccttactgtgaaaaaggattcagtaaaaatgatggactgaa

SEQ ID NO: 766790 - DNA, 75 bp, Homo sapiens
cagggatatggtctgcaatatgctaggtttaaataagcagtctcaggaggaggtctgcgatttgctccatgccgc

SEQ ID NO: 766791 - DNA, 100 bp, Homo sapiens
gtcattgagaagtttgattatgtgtttgccgagaacgggacggtgcagtataagcacggacgactgctctccaagcaggatatgtgatggcgtccagttt

SEQ ID NO: 766792 - DNA, 100 bp, Homo sapiens
ggctaccgtggatgggtgcagctggagagggtgcagtgaaagagcgtagtaggagatcaactcagtgaaccagccaagtatgagcccagaggacctggtc

SEQ ID NO: 766793 - DNA, 100 bp, Homo sapiens
gccaagaagctccatggtgagcactcacagtctaaggctggaagtttaatgaactgttttctacatttcacaggttatcaatactctggctgaccatcat

SEQ ID NO: 766794 - DNA, 98 bp, Homo sapiens
cggcttcctagtgagtcggcggctgatttagaaggaggttcaggctacgagcttggcagagctgagagatcagcggcagggggagcgcctggaacatg

SEQ ID NO: 766795 - DNA, 100 bp, Homo sapiens
gtaactgtcttcatctttacagaggaatagtctacaaaggaagacttgtaacctggagaagaggtgctgaccttaaggaaagagccaaaatgagttccag

SEQ ID NO: 766796 - DNA, 50 bp, Homo sapiens
ctgcttttgaccaaaggaatgggttacgagtcctcctttgtcacccagcc

SEQ ID NO: 766797 - DNA, 98 bp, Homo sapiens
acagacatctggaccagttattaatgtgtgccatttatgtgatggcaaaggaaacagtgacattcaaggatgtggccatggactttacaccagaggag

SEQ ID NO: 766798 - DNA, 74 bp, Homo sapiens
cgttggtcaaatcggaagcgattaagtgccagcaagatgcttgctctgtcaaggcacagcctattgtctccttt

SEQ ID NO: 766799 - DNA, 75 bp, Homo sapiens
gaccgaagcttccggacgacgaggaaccgcccaacatggcctcggagcaacgctccacggtagcatccatgatgc

SEQ ID NO: 766800 - DNA, 100 bp, Homo sapiens
ctcggctcatccagcttgatgatgtcacctaccatggcttccccagcctgcaggccctggctggacagtcattttgtttactcattcagccctgttgcag

SEQ ID NO: 766801 - DNA, 82 bp, Homo sapiens
aagaggctgaccgcaaatacgaggaggtattctctactgccgctgatggtcaaacgcaagtggaaattaaagtgtgtcaggg

SEQ ID NO: 766802 - DNA, 51 bp, Homo sapiens
caacagtaaaacctctcaaaccgagggagaacatgatcgtgtatgtggaaa

SEQ ID NO: 766803 - DNA, 50 bp, Homo sapiens
cgagtatctccgtttcctggatgtgaaccaaatgtcctggaaacacttcg

SEQ ID NO: 766804 - DNA, 100 bp, Homo sapiens
ctgctgtcacccgacgccccgtgctgggaggaggccatggccgctgcattccaactggcgaacactggctctgagaccccgactgcccgacggctctaca

SEQ ID NO: 766805 - DNA, 100 bp, Homo sapiens
cacagctattggatttcccacccagaatctttaggtaaatgaggttgaaatcacaaagattagacacctttttagataggtgttcttcagcaccactgac

SEQ ID NO: 766806 - DNA, 76 bp, Homo sapiens
cgcctaacttctactgacgaagcttggaagttgcagaaggcagcctcctgtcagtgagtctcattggagaacgttg

SEQ ID NO: 766807 - DNA, 82 bp, Homo sapiens
gcaagagcaggagcccggcaccccccgccgacaaggaggatttggagcaagaggtggtggtggccttcccccgaagaaattt

SEQ ID NO: 766808 - DNA, 75 bp, Homo sapiens
cgacatatttcctgtcaccaacaaagatttcagggacagagcagaatgggctgatatagatccggtgccgcagaa

SEQ ID NO: 766809 - DNA, 74 bp, Homo sapiens
cgggaagaagcatgggttaaaatagaaaatctagccaaagccaatccccaggaatcccttggcaccatgtcctg

SEQ ID NO: 766810 - DNA, 75 bp, Homo sapiens
agcagctgtcgccgccgctctcaggaaatcatcgagttccccatcctaaagctaaatggccggaccatggagatt

SEQ ID NO: 766811 - DNA, 100 bp, Homo sapiens
tggctgtattgctccatctcccccagcttctcattatgtacctcaggttacatccggtgatcaaggctttcctgtgtggctccatcagtgggacctgctc

SEQ ID NO: 766812 - DNA, 129 bp, Homo sapiens
cagctttccctcccccttctttcgatcagagatcggcggagaccctcgaagtgcgcaaacttgacactcaccctgaccgatatgaggccccaggattcctggcgaggtcctcctccccttttccagcag

SEQ ID NO: 766813 - DNA, 75 bp, Homo sapiens
ggaaaggtcatctcggagactagaggctggataccaaatagcagtggaaaccgttttcatatgagtccaacaagc

SEQ ID NO: 766814 - DNA, 99 bp, Homo sapiens
ttgtatgtgttgagactggcagaagatggaccagcaataaggaatgggaggatgaggtgattcgcctttgccagtctcatctcgtgtctgctttgttaa

SEQ ID NO: 766815 - DNA, 50 bp, Homo sapiens
caccgtcaagtttctctccaagcaggcaccccccgagcccagctccacac

SEQ ID NO: 766816 - DNA, 82 bp, Homo sapiens
ccaagcataatctaatgacagttgaacagaataatggccactgaaggaccttgtaacatgcccaaaccaggtgtatttgact

SEQ ID NO: 766817 - DNA, 87 bp, Homo sapiens
gagctggagcatgccctcagcgccatcggaggcgatcgagatcggatgacagcaaatcatgaaagctacctcctcatggcaagcacc

SEQ ID NO: 766818 - DNA, 100 bp, Homo sapiens
aggatgcacccggcaggcttggcggcggcggctgcggggacgccccggctgcccgactccacgggaacccactccctctacacgatgtaccaggactacg

SEQ ID NO: 766819 - DNA, 75 bp, Homo sapiens
gaagatcctggaggtggatctgaagaacggcctgctcaggaagaactcagagaagatccagattttgaaattaag

SEQ ID NO: 766820 - DNA, 75 bp, Homo sapiens
cgcagagcaagcgcggggaaccaaggagacgctcctggcactgcaggtacatgtcccagagcaagcacacggagg

SEQ ID NO: 766821 - DNA, 90 bp, Homo sapiens
tgcaagagcaacatctttcctcaccccaaggcagtgccctactccagggattacaaaagaaagtatgagttcttccgaagaaagttgaag

SEQ ID NO: 766822 - DNA, 100 bp, Homo sapiens
ttacatcaccaacaggtgaagaaaacctcatgaatagcaatcacagagactcggagagcatcactggctcagtagatgaaggcgtttctgagggcttgcc

SEQ ID NO: 766823 - DNA, 75 bp, Homo sapiens
ttcttgctccattggcagaaaatgcagcctcgtcttacagcgtgactgcaaagaaaaagacttttgttttgcaaa

SEQ ID NO: 766824 - DNA, 90 bp, Homo sapiens
cagggccgtgccgcagatgcccaccggaatggagaaggaagaggagtcggcaaccacacctccaaatcaaggaaggccagattctcctgt

SEQ ID NO: 766825 - DNA, 73 bp, Homo sapiens
tggacatggacatgagccccctgaggccccagaactatcttttcgattgcaaatagaagagtcttccaaacca

SEQ ID NO: 766826 - DNA, 74 bp, Homo sapiens
atacaggaacagggcagacgttagcgtgagtgatcactctcaatcccggcatcccagccatcactcttccacct

SEQ ID NO: 766827 - DNA, 87 bp, Homo sapiens
atgtctttcctaccatctaaaatacgaaggtttctggctggcctacaatcagggctttggcattaaaggttttaagagaaatcctaa

SEQ ID NO: 766828 - DNA, 73 bp, Homo sapiens
acgccgagggcaggacgaacttcaccagctacgagttccagggagctctgtcctggtgaccgtgcccgggtta

SEQ ID NO: 766829 - DNA, 75 bp, Homo sapiens
ctcggggacattattgcgcgtggaacggctgcttttggaaggtgttgacttcaaaatcaaaactgtagagctaag

SEQ ID NO: 766830 - DNA, 82 bp, Homo sapiens
gcggccttcgaggaggtcatgaaggacctgagcctgacgcgggccgcgcggggatccaggtccggcacgatcaagacccagg

SEQ ID NO: 766831 - DNA, 101 bp, Homo sapiens
acttcccttacctcagcgcctttggggacctcgaccagaaccaagctgaaaccaccaatgggtgaggtcgtcacccctacggccccccaggagcctcctga

SEQ ID NO: 766832 - DNA, 50 bp, Homo sapiens
gtgggactttgtttgtcttctggcgtgagtggagtgatgctgaccacacg

SEQ ID NO: 766833 - DNA, 74 bp, Homo sapiens
tcaacctcgtcatgtcctacgcggaatactcccccagttgcaagaggcgcaggaccgtggaagacttcaacaaa

SEQ ID NO: 766834 - DNA, 101 bp, Homo sapiens
ctgggctggggctcgctgctcatcatgctcaagtcagagggcttttactcctacctgtgtaccgagccaggtcaaaatgcagatcttcgtgaaaaccctta

SEQ ID NO: 766835 - DNA, 90 bp, Homo sapiens
gcaaaagaaggagggtcctctcagtgattaaggtgtgatccctcacatccacaaatctctgattggaaagaagggacagcagaaaactgc

SEQ ID NO: 766836 - DNA, 75 bp, Homo sapiens
gagatttgaaagtgttatccatgagtttgatccgaattatccagactgccttgccactagatgaatggaagacaa

SEQ ID NO: 766837 - DNA, 75 bp, Homo sapiens
tcctggagaagcggccgcggccagggaacggggcatcgcggttccaacggacttctccaggcctcggccgcccca

SEQ ID NO: 766838 - DNA, 100 bp, Homo sapiens
cgtagcaacagctctaggactcaatgcattgaccaagctgctaaaggcctggagccctgtttttaggaactacataaagcgcgcagccgaccatttggaa

SEQ ID NO: 766839 - DNA, 90 bp, Homo sapiens
tctctccaggtgaagcagaaaggtgcaggtgatggtcctaccagtgtgtctgttgaggtcacccgtcctaaagtgacctccctgaaagcc

SEQ ID NO: 766840 - DNA, 118 bp, Homo sapiens
ccatccagactgaggaagacccggaaacttaggggccacgtgagccacggccacggccgcataggatcaccagccttttgcaaatgcacacgatgtgctagcccgctcccgcagtcga

SEQ ID NO: 766841 - DNA, 100 bp, Homo sapiens
gaatagaagtaaatatgtttattggtgaaaaagaattccaggatttttttcccaggaagccatcccgtcagaggggttcaagtgatgaaagttggcaaac

SEQ ID NO: 766842 - DNA, 74 bp, Homo sapiens
ctcagcacctgcttgtttggaagtggatgattcaacagccacacaaagcagcaacattttttggatgcattggg

SEQ ID NO: 766843 - DNA, 80 bp, Homo sapiens
aatcctgcccgcgtgaaccacatgcccagcacgggaaataatgcaaaaggtgtcccaaggctcctgaccagtgaacaaag

SEQ ID NO: 766844 - DNA, 74 bp, Homo sapiens
ctggactacaatgcaggactgctctcctactacacgaaacacaagttcctgagaagaaaaaaggaatcttcagg

SEQ ID NO: 766845 - DNA, 95 bp, Homo sapiens
tttgtaattccagcgagtcgacttcccatcctgagttggtcctagcagaagatgtgactcagactgcctctgggtggggctggctggcccacaga

SEQ ID NO: 766846 - DNA, 74 bp, Homo sapiens
aaagaagtagcagaaaccctgtctttcaggattcctgggacacagaggaattgaatgatctggcacgggaccct

SEQ ID NO: 766847 - DNA, 88 bp, Homo sapiens
actcgattcagctattggaaagtttttttaatgtggttggaacaactgaggacgactgggtttggattcagaagaggattattataca

SEQ ID NO: 766848 - DNA, 101 bp, Homo sapiens
gcgggtaccgggcgcgggcagagcgcggcggcgcgggtttggtgcacctcgatttggaggaagtagggcagggcccttatctggaaagaagtttggaaacc

SEQ ID NO: 766849 - DNA, 75 bp, Homo sapiens
cgccagcagcgcagcaccgattcctctcgggctcttgggcgctgctctgaggtcaaaatgcagatcttcgtgaaa

SEQ ID NO: 766850 - DNA, 82 bp, Homo sapiens
cgggtggcggctcgggacggaggacgcgctagtatgaaggatttgggggcagagcacttggcaggtcatgaaggggtccaac

SEQ ID NO: 766851 - DNA, 100 bp, Homo sapiens
cacagccaggcgggacgcgcacagtccctccacgcggaaagaagtaccttcgccggtcaccggctcctgcagggtccacgctgcttttatgagctgtaac

SEQ ID NO: 766852 - DNA, 83 bp, Homo sapiens
gagagatgcttaaaaatcaccagttactttaatgatgctggctgaagatgcaatcaaggccgccctggctgattacaaattga

SEQ ID NO: 766853 - DNA, 100 bp, Homo sapiens
tgctcaaggatcccagttttctctggatgacgtgatgtccagctcgccgctgtccaagaaacgtcgcgtgtccgggcctgatccaaagccgggttctaac

SEQ ID NO: 766854 - DNA, 75 bp, Homo sapiens
cagcctgcggagcctgtggggcaggcatttggctttatgtcccgagttgccctacaagcagagaagatgaatcat

SEQ ID NO: 766855 - DNA, 76 bp, Homo sapiens
ccttggtcctagcacccactcgagaattggctcagcagggtgtccgcaatgttgccagtgtctgtctgcagattgg

SEQ ID NO: 766856 - DNA, 75 bp, Homo sapiens
gacccggaaaggccggaagcggccgggctggatcaggatgagggaaatcgtggaacacatggtccagcactttaa

SEQ ID NO: 766857 - DNA, 75 bp, Homo sapiens
gcccattcttttcatcattcggaagcaacagcggcagtcccctgcccaagtccccatgtgagagcagcagaggcg

SEQ ID NO: 766858 - DNA, 110 bp, Homo sapiens
acagtgtggagagccgtgatatgttccagttgcacatttcctgcaaggactccaaagtggtgagaaaagtggagaatcttcttctcagttgagtcaagagcagaagagtg

SEQ ID NO: 766859 - DNA, 87 bp, Homo sapiens
cctggctcttgccctcatcctggttctggaatcctcagttcaagcaaaatgatgcttcaacacccaggccaggtctctgcctcggaa

SEQ ID NO: 766860 - DNA, 100 bp, Homo sapiens
ctcccgctcggctccccgcagggacgactatgacaagaaggtgaagcaggcggccaaggagaagagacaaggtctcaccgtattgcccaagctgatctcg

SEQ ID NO: 766861 - DNA, 83 bp, Homo sapiens
ccgatgggaagaagaagatcagcactgtggtgaggaagaggatggagatgaagatgaggaagctgagtcagctacgggcaagc

SEQ ID NO: 766862 - DNA, 96 bp, Homo sapiens
gcctgggacgcgccccgaggaggagcggggcggcgcaggcggagtaaaagtccctcgcaatttccgactgttggaagaactcgaagaaggccagaa

SEQ ID NO: 766863 - DNA, 140 bp, Homo sapiens
gcaggagccgcggagccggcgctgagaggggctgcggccggagcgggcggctgagacaaaggcgacgtgttgacctaaccaatgaagaaacaactgattccaccacttctaaaatcagcccatctgaagatactcagcaa

SEQ ID NO: 766864 - DNA, 82 bp, Homo sapiens
ttggaacaatttgatgagctaggaggctgaaggtgatgtggccgccctcaaccgacgcatccagctcgttgaggaggagttg

SEQ ID NO: 766865 - DNA, 98 bp, Homo sapiens
cctgaattgcgtccccgaaatagctgacacactaggggctgtggccaagcaggggtgacatacaaatggctgagctatacactaggggttcatgttaa

SEQ ID NO: 766866 - DNA, 75 bp, Homo sapiens
cccagaagttgttctaacgctgcctttgctttaaaacagtattacttgcgctgccagagaaactacgcataggct

SEQ ID NO: 766867 - DNA, 75 bp, Homo sapiens
tgtttgtggatcgctgtgatcgtcacttggagattttatgaagatggagcaattgtcttgggtgaagaagcaaat

SEQ ID NO: 766868 - DNA, 75 bp, Homo sapiens
ggcagctaggggcgacgaggcgggacgtcatggaagtaaggggaaactgaggcccaaggaaattgagtatctctg

SEQ ID NO: 766869 - DNA, 83 bp, Homo sapiens
tgctacatcgatgacagaggattcagatcatgagcgtcttgttgttcatcgagcactcagtagaggtggcccatggcaaggcg

SEQ ID NO: 766870 - DNA, 51 bp, Homo sapiens
cttctggagctggccaacgtgcaggagctatcagttgagggatttgcagtt

SEQ ID NO: 766871 - DNA, 50 bp, Homo sapiens
cctacgaaagaaagctcatcgagatatcatggtggaagagtttgtggaag

SEQ ID NO: 766872 - DNA, 82 bp, Homo sapiens
cctttatgatctaccaggagagcgtggggagctatgtgcagggtgtgggccgaagatatgctcatgtggtgttgaggaaagc

SEQ ID NO: 766873 - DNA, 50 bp, Homo sapiens
ttctggaaggttccatcccctgcaggccaagcaatggggctggacacaag

SEQ ID NO: 766874 - DNA, 74 bp, Homo sapiens
tatgatcaagttctcgtggagtcagacaatgagatcatcagaaaagcccttactgaggaaaaacgtgtctcaac

SEQ ID NO: 766875 - DNA, 75 bp, Homo sapiens
tcgagactgcgcgcagggcggtcctcgggtccgcggaggctgcgctctgcgagcccgggcccttctgccatgtga

SEQ ID NO: 766876 - DNA, 100 bp, Homo sapiens
cgatatctctccctattttggcctattctatgagccaagagtcgaagctaaaccagaagttcaatctcagccacctcgtgtgcgtgaacaacgacctaga

SEQ ID NO: 766877 - DNA, 98 bp, Homo sapiens
agacgtgggcgccctccccgccaaggcccgtgcgagtgacatgggctcgagggttggctaccccgctcaggtttacaaaactgccagtgcagagactc

SEQ ID NO: 766878 - DNA, 99 bp, Homo sapiens
aaacaggaagacatgagatgaaggaaacaggagattcaacatggatgccccttggtgtggccactgcaaggctctggcccctgagtatgccaaagccgc

SEQ ID NO: 766879 - DNA, 82 bp, Homo sapiens
ggggatttggaaatgtcatccgatggcacaatcaggttgaaatcacaaagattagacacctttttagataggtgttcttcag

SEQ ID NO: 766880 - DNA, 75 bp, Homo sapiens
cctccggggacaagaaactagagcaaataaccgttttgaaattgttgccgaggagcccaagtagaagaaatatgg

SEQ ID NO: 766881 - DNA, 51 bp, Homo sapiens
tcactactgaatgccaccttcttgattcagcaatggcgaactgagcaataa

SEQ ID NO: 766882 - DNA, 50 bp, Homo sapiens
gcctcgggaagagatgcgaggatgacaagaacgatttcgagatttactac

SEQ ID NO: 766883 - DNA, 82 bp, Homo sapiens
tttatgcaaagccagcgttacagtaatgttccagggtggagccagccatcctgagacgtccgtacagcccgtactggtggag

SEQ ID NO: 766884 - DNA, 101 bp, Homo sapiens
accaaagcatctccttcatcagccacttgtcgggcgatgtcgcaagcagcttcattgacttcctgcccctaaaatgggtggcatttttctgaagttgttca

SEQ ID NO: 766885 - DNA, 75 bp, Homo sapiens
cgagtgaccgagaccgcggccgggaccgaggggagttgaccacatttggccatttcccagaagggccccacccca

SEQ ID NO: 766886 - DNA, 100 bp, Homo sapiens
tcccactgatgaggatcagcccatgtgttctaagaacggaagcatctgggctggatggaatttagcatcaagcagagtcccctttctgttcagagtgttg

SEQ ID NO: 766887 - DNA, 83 bp, Homo sapiens
ccagctccgaaatcaccaccaaggcacccgagtgtacagccccccggagtggatccgctaccaccgctaccacgggcgctcgg

SEQ ID NO: 766888 - DNA, 82 bp, Homo sapiens
acgtgtacaacccgacgaggaacgaatgggacaagatcccgtccatgaatcaggaagctcttcgtgggcggtcttgactgga

SEQ ID NO: 766889 - DNA, 100 bp, Homo sapiens
tctgaggtccgcggcagggtcccgcatggcggcgcacaggaagcacgagaggaggttcagatgagcccctgctgacttgagagagacagagagaccacgc

SEQ ID NO: 766890 - DNA, 96 bp, Homo sapiens
tgagtgccggagtggttatgagtttgcagatgaccggcatacttgcatctggtttggagaacattgattaaggaagcattttcctgattgatgaaa

SEQ ID NO: 766891 - DNA, 100 bp, Homo sapiens
gtccgtccgccgccaccacccactccggacacagattttgcaagaacgaggctcaaggatgtgagggacacagtattgacagctgaagaaatgatttacg

SEQ ID NO: 766892 - DNA, 75 bp, Homo sapiens
agccgggcacactgggctctgcagcctcatcctacagccccctagtgctcaagtaaagctctttgtgacagggct

SEQ ID NO: 766893 - DNA, 80 bp, Homo sapiens
tttctcttggatttggctacacacttatagatcttctgcactgtttacaggcacaggtaagaatgattgatgttggctga

SEQ ID NO: 766894 - DNA, 106 bp, Homo sapiens
gctgctgctgctgcagtgggacaggtggcggcgaccggcggcgtccgaggagacacagaatgttcagcttaacaaagaaatgacacttgccagcaaccggagcctg

SEQ ID NO: 766895 - DNA, 90 bp, Homo sapiens
cagggtccctgaagagggaagacacgcggaaacagcccgacggccatggaggctgaagagacgatggaatgccttcaggagttccctgaa

SEQ ID NO: 766896 - DNA, 82 bp, Homo sapiens
tgggacaggccacgctgtccgtccgcagtaccgacgcctgcagagtgaagacatttccacctggacacctgaccatgtgcct

SEQ ID NO: 766897 - DNA, 100 bp, Homo sapiens
cgcctccgggcatcttcaactgagtgaaacctcggtccggctgggctattgatccctttggacactcaccaacaatggcttatcttctaaaccgtgctgg

SEQ ID NO: 766898 - DNA, 82 bp, Homo sapiens
gaaggatgcttggattgtctgcttcaagccctggctcaaaatacttttctgggagaagaggctacaaggacttagtgcatca

SEQ ID NO: 766899 - DNA, 90 bp, Homo sapiens
cgctggaggagcgaggcagctgtactaggactgggaacggatgtccagctcgccgctgtccaagaaacgtcgcgtgtccgggcctgatcc

SEQ ID NO: 766900 - DNA, 100 bp, Homo sapiens
ctatttctctagctattgccttattttttctcatggatgttcttcttcgagtatttgtagaaggtataaatcaaagccattctgtgaaaaactgctttcc

SEQ ID NO: 766901 - DNA, 100 bp, Homo sapiens
gtgggtgagaagctaagtgaaggagacttactggcagagatagaaactgacaaagccactataggaaaaccaattctgtgtcctcggaggaccacagccc

SEQ ID NO: 766902 - DNA, 75 bp, Homo sapiens
ccttcctgctagtcctggtggatctgcagtacgaaggcctggtctccaagtcctctcctaagaagcctcgtggac

SEQ ID NO: 766903 - DNA, 49 bp, Homo sapiens
gcggcttctggttctcacttgtcgggtgcaaatagctatgggcaacttg

SEQ ID NO: 766904 - DNA, 107 bp, Homo sapiens
tcggcccctgcgccggcctcggccaccgagatcctgctgacgccggctaggaagctccaccatgaggcgaggtggatggaggaagcgagctgaaaatgatggctggg

SEQ ID NO: 766905 - DNA, 90 bp, Homo sapiens
gcactgttcggctctaaagaaggttctgctccatatcggctgagaagaaaatctgcatacacaagctgagggagaatgtctttcaagagc

SEQ ID NO: 766906 - DNA, 75 bp, Homo sapiens
cctcccaaacaactgcttcctgaatctacccctgcaggaaaccaagaaatgccgtggtccttcagcatatctctg

SEQ ID NO: 766907 - DNA, 101 bp, Homo sapiens
ctattgttcagttacaagagaaactttatgtgcctgtaaaagaatacccagatgtaaaagtcttgcagtgaaaaacccgaggacccttaccgcaagtgtct

SEQ ID NO: 766908 - DNA, 82 bp, Homo sapiens
tgcacagtagatccctcccggcttcccggcttcccgtctcgtcaccctctgtgttctagaacagatcagacattttgtaatg

SEQ ID NO: 766909 - DNA, 88 bp, Homo sapiens
gttccccggcccacagtgggggtgtgcaaacccgagagaactggattgaccctcttgctggaatgacatctcttagtataggtggttc

SEQ ID NO: 766910 - DNA, 78 bp, Homo sapiens
tattttgtggattttcctgttccattttgtgcctcctggacacctcaggatgaagatgagctggattcccacaccatg

SEQ ID NO: 766911 - DNA, 100 bp, Homo sapiens
tgaaggatcactgaggaaggggaagtgggcaaagcagggtgtggtgtctatctgaagaatattttactttcaaaggaaagatgctgtctccaaatgataa

SEQ ID NO: 766912 - DNA, 78 bp, Homo sapiens
gcacttggaatagtagcaggcggcggcggcggaacgccaggcaggaatgaatctgaagtctgctgcagtaaaacacag

SEQ ID NO: 766913 - DNA, 100 bp, Homo sapiens
tcgtggtgaaggtccggggcttgccctggtcttgctcggccgatgaagtgcagaggtttttttctggttttgactacaagacttgtaacgtgctggtagc

SEQ ID NO: 766914 - DNA, 100 bp, Homo sapiens
gagggtccccaagacaggagctcccagcagaaaggccgcctgtccctgcagaatacagcatttttgaaacgttggggttgttggagtggttggattttcc

SEQ ID NO: 766915 - DNA, 113 bp, Homo sapiens
gttcacgcacgggatccagagcgccgcgcacttcgtcatgttcttcgcgccctggtttacccaaggtccagcctagcccctaggcaccatgtcggacagtgatctaggtgagg

SEQ ID NO: 766916 - DNA, 137 bp, Homo sapiens
ggaatttggagctggagacctacaggggcctttgttcggtctcaagctgttccgtaatctcacaccaagatgggagccatttgtgcaggccaagctgcggcccgaggacggcctgtacctcattcactggagcacca

SEQ ID NO: 766917 - DNA, 89 bp, Homo sapiens
gtgatgttggagaactacagaaacctcgtctccctgggtaaatccatcagataggtatcatctcatgcccataatcacccctgcctacc

SEQ ID NO: 766918 - DNA, 50 bp, Homo sapiens
aggaaaatgtgatgcatgtctcagtgatgactgtccaagtgcctccaaag

SEQ ID NO: 766919 - DNA, 100 bp, Homo sapiens
gggcgctccgcttcctggagaaggcacagcggctgtatccgacgccgcgagttcgcggtctcctctgagcctccggcctccataagacccaaaacagatg

SEQ ID NO: 766920 - DNA, 100 bp, Homo sapiens
agaataagagatgtgattaatgtattccaccacctccgccagttaagaggaaaaagaggacaagaattttgggcagatttgaatgccatgaacgtgtatg

SEQ ID NO: 766921 - DNA, 100 bp, Homo sapiens
ttggaatatttaacagtctttggttttccttgggtgcctttatgcagcaaggatgtgatatttctccaaggtgagatcggactggaactgttcggctgcg

SEQ ID NO: 766922 - DNA, 75 bp, Homo sapiens
ccgaagcgggctgtgtgccccttctccacccagagaactggctgcggctttatggctacctgcctcagcccagcc

SEQ ID NO: 766923 - DNA, 75 bp, Homo sapiens
cagagcctatttacccagaagtagtccatatgcatgaatgtcagcatcatcattcaaagaacaagaaacattcta

SEQ ID NO: 766924 - DNA, 50 bp, Homo sapiens
cagtcagtggagacttaaccaaagaggaacaagatcactcaaggtgaagg

SEQ ID NO: 766925 - DNA, 75 bp, Homo sapiens
cacctttgccaggaactggggggccgactatatcctgctggaaaacctcatgctggacaaagatggccacatcaa

SEQ ID NO: 766926 - DNA, 100 bp, Homo sapiens
tgaaagaagaaaactttcagctttggctttgctctctcttctgccatctgataatagcttctttgtgatattggccacagtgaagaaaaactgggctttc

SEQ ID NO: 766927 - DNA, 74 bp, Homo sapiens
tacaacgtggctatcccctctgacgtctcccacttccgcttccattattcacaggcctccactgggctctcagt

SEQ ID NO: 766928 - DNA, 83 bp, Homo sapiens
agcccaaggggatggcaagtccaggagtctggcttcagccttgtcatgaaccacccagcctgtgtcaatgagattgctctgag

SEQ ID NO: 766929 - DNA, 100 bp, Homo sapiens
ggcggagctggcgcggcccctagctttctccttctggtgtggggcccgaggcaccaggatcatctacgaccgaaagttcctgctggagtgcaagaactca

SEQ ID NO: 766930 - DNA, 100 bp, Homo sapiens
catcatcgggaagaagggggcacacatcaaacagctggcgagattcgccggagcctctatcaaggttcatgcagcatcccaagaactttggcctgatcgc

SEQ ID NO: 766931 - DNA, 88 bp, Homo sapiens
gtgcggcggcccaagcggtttcaaacggcttagagcaggccgcttggttctgacccagctgagatgacacaattggtactgcctggca

SEQ ID NO: 766932 - DNA, 98 bp, Homo sapiens
ttgggctaccctgctgctctgccattgactccctgggaggatctttgacttcagcttctcctcgacacaagatggtgaaggagacccagtactatgac

SEQ ID NO: 766933 - DNA, 83 bp, Homo sapiens
ttgtgaggcctccccagccacgtgaaactgttaattatagaaaatgccaagtaggaaatttgccgatggtgaagtggtaagag

SEQ ID NO: 766934 - DNA, 99 bp, Homo sapiens
gaaagtcgtcttccacttgcacgaaagctttcctaggccaaaaagagttcattatgctgacatatcttttcatgttggcctggctgggagtcacggctt

SEQ ID NO: 766935 - DNA, 90 bp, Homo sapiens
gacctttggacaaaactaaaagaatgtcatgatagagaagtacaaggttatggaggttttgatgactatggtggctataataattacggc

SEQ ID NO: 766936 - DNA, 100 bp, Homo sapiens
tggaggacgctgaggggcggaggcgggagaggcgagctcgcgatgagtggtctcggcaggctcttcgggaaggaatatgcttttaaggctattaaccagg

SEQ ID NO: 766937 - DNA, 50 bp, Homo sapiens
ccatccccgagcagcggtggaagctgggagtgcatccgccccaacccttt

SEQ ID NO: 766938 - DNA, 75 bp, Homo sapiens
ctgatactgaatctccagtgttagtgaatgactattgcatttgcccagtataacatggatcagttcacgcctgtg

SEQ ID NO: 766939 - DNA, 100 bp, Homo sapiens
gactatgaagctgcttctgatttttataggaagggagttgatttactcctagaaggtgttcaagccttcaaagaaaaacctcggtatccaccaagtcagg

SEQ ID NO: 766940 - DNA, 75 bp, Homo sapiens
gcctccttgaagctgccgctgtcgctgctgctcgttcgagtcgcaggtatctgaacttaggactggagctgcaga

SEQ ID NO: 766941 - DNA, 100 bp, Homo sapiens
tttcttggagacccagttgagaaagctgcccaactaagacctatctccctaccaggagtttctagcactgaagtgctggccagaagagctgtgcaggagt

SEQ ID NO: 766942 - DNA, 118 bp, Homo sapiens
ccccggcccacagtgggggtgtgcaaacccgagagaactgggtgatgcttctgggagacacaggcgtcggcaaaacatgtttcctgatccaattcaaagacggggccttcctgtccgg

SEQ ID NO: 766943 - DNA, 74 bp, Homo sapiens
ccaaggtcatcattgtccaggcctgcagaggtggtggctctggtaggcgaggaggaaggttttctgctcaagga

SEQ ID NO: 766944 - DNA, 75 bp, Homo sapiens
cggtggctgcggttgcgggaccggtactccaaagattcaggtttactcacgtcatccagcagagaatggaaagtc

SEQ ID NO: 766945 - DNA, 82 bp, Homo sapiens
gctgcgcatctccaacagcgacctgagcgggttgtgagtcccggcccagcccctccacccccctgcccccccgatgcgacca

SEQ ID NO: 766946 - DNA, 90 bp, Homo sapiens
ggcaagcgcgcagtgtcgactccccggtctatgccaggcgcatctcaggaaagaccacagcaagattctttcattcgtctcctcctagcc

SEQ ID NO: 766947 - DNA, 100 bp, Homo sapiens
agtgggctacccgggcatgaagccccagcagcactgcccaggcgagcttcagcaggattcctgccagctcccaggggctttggttatagaagtgaagtgg

SEQ ID NO: 766948 - DNA, 98 bp, Homo sapiens
ttttcacctcgcgtcgcgcccgggaggaaggaacgaggcaaggagctaaagcagcgtgcgttcagccctggggcaggcagtatgacacctaagtcgcc

SEQ ID NO: 766949 - DNA, 82 bp, Homo sapiens
atccagcaaggtcggcagagcaaggggcttacgcagaaggacctggccacgaaactagatgatggccatttaaacaactctt

SEQ ID NO: 766950 - DNA, 82 bp, Homo sapiens
agcgccttgggacagggggatttggaaatgtcatccgatggcacaatcaggttacaagaggacccacctgtgggtgtcagtg

SEQ ID NO: 766951 - DNA, 75 bp, Homo sapiens
tgcccagctttgcagcccccgaacgcggcctcgcacagatgaagatcagcttcgtgcaaagggttatgacaaaac

SEQ ID NO: 766952 - DNA, 95 bp, Homo sapiens
ggcggcggcggcaatgctggagacccttcgcgagcggctgctgagcgtgcagcaggatttcacctccgggatcaacacagcccttagacttatcc

SEQ ID NO: 766953 - DNA, 120 bp, Homo sapiens
tacaagcaagctgaatggaggccagatagtaccatgatagctgtatcaaatgaagaatccccacctgagggccaaactagcagaggtgttggaagcagtgatgccccacctggatcagac

SEQ ID NO: 766954 - DNA, 83 bp, Homo sapiens
gatcgtgacggagaaccaggccctgcagcagcagcttcaccagagacagggcagggcattgttcatgcactgaccgacctcag

SEQ ID NO: 766955 - DNA, 51 bp, Homo sapiens
caacaacatcatccagtaccagtttgatgccgtggtccttcagcatatctc

SEQ ID NO: 766956 - DNA, 75 bp, Homo sapiens
cgttttaatgcagattctggctattccatccattctgattcagaaagtcagtctataggatcgggtgaaccacca

SEQ ID NO: 766957 - DNA, 88 bp, Homo sapiens
ccccttgacgcagtacagaatttcaggatcccttggttccagtaccccattatctatgacattcgggccagacctcgaaaaatctcct

SEQ ID NO: 766958 - DNA, 100 bp, Homo sapiens
ccgatggcagcggctgtgccgaggcgcccaactcaggaccgtgtttcttcgcctcgcctccctggtggtcctgctcttctctctctggaatcagatcact

SEQ ID NO: 766959 - DNA, 75 bp, Homo sapiens
cccaggtgtaagcgcagaaagcaggcgaacccgcggcgcaataacgtcactcagcctctgaagaagcttcgggtt

SEQ ID NO: 766960 - DNA, 100 bp, Homo sapiens
ggacagagccagctctctaacccaacagatgacagctggaagggtagaccatacgcaacttatcttaatggccatgcagaaaccccagtatatcgattct

SEQ ID NO: 766961 - DNA, 99 bp, Homo sapiens
tcacataagaagttcttcgatgtatctaaacttggcaccaagtatggcccagattgccttcctgcagggagaaaggaagggccaagaaaatttgaagaa

SEQ ID NO: 766962 - DNA, 100 bp, Homo sapiens
ctcctgagtagctggaaccatcatatgcaccagcacgcctggctaagtacgaatgtgaagaatcttttacgaccctaaacgtagacattagaaatcacca

SEQ ID NO: 766963 - DNA, 82 bp, Homo sapiens
tgactacttacacactggtgctgactgcatttgcatgatgccttcttctgtagagtgggcgctttgcagaatacgtgttgaa

SEQ ID NO: 766964 - DNA, 98 bp, Homo sapiens
gcacaggggccactcggagtcgcccgagaagtgtgggccatgtttgaggattgccccagcattcagttctatgagtaataaatatccacaggctgttt

SEQ ID NO: 766965 - DNA, 141 bp, Homo sapiens
aagatgaagtgcttaattcaaggtcacacaatgtcggggatggacctccagatttccttactgatggcccactgcgtgaccttggttcagctgtccatttcctgtgaccatctcattgacaaggacatcggctccaagtct

SEQ ID NO: 766966 - DNA, 83 bp, Homo sapiens
tcctttccaaacctttgcagctgccctttgttaaagctcaccatctgctacctggatatgctgatgaccagtgaggagcgccg

SEQ ID NO: 766967 - DNA, 98 bp, Homo sapiens
ctttggcttgggaaataggagtgaagctgttatcgcccagttctaccacagccctgcggacaacaagcgggagaggagttcattacttcggaagtggt

SEQ ID NO: 766968 - DNA, 76 bp, Homo sapiens
cctccaaggaggacagcggccccagcaccaggcaggcttcaggaatactcccccagttgcaagaggcgcaggaccg

SEQ ID NO: 766969 - DNA, 83 bp, Homo sapiens
gaaagaagatgttaactttcagcttgaaggatgccaatgatgtaccaatccaatgtgaaatctctcctcttatctcctatgct

SEQ ID NO: 766970 - DNA, 75 bp, Homo sapiens
gagcagcaggccaggctcggagacctttccccccgcagtgacagtgctggccattttccatgaactgcacgtcga

SEQ ID NO: 766971 - DNA, 100 bp, Homo sapiens
aggccacgacccacgagatcatggggcccaagaaaaagcacctggactgaagatgaagtcctcagtacattctgaagaagatgattttgttccagagcta

SEQ ID NO: 766972 - DNA, 87 bp, Homo sapiens
tcaactacgctgtgcacgagggtctcggcctcgcggtgcaggccgtgacttggcgagcacgaccctccccgggtaccctccacacgt

SEQ ID NO: 766973 - DNA, 82 bp, Homo sapiens
gcctgtatactctcgttctgcgacttataaaggaccagacaaatcaaattagtggttttgtttccaacatggctagatccat

SEQ ID NO: 766974 - DNA, 82 bp, Homo sapiens
cgctttgccaacttcagcggggggaagatcaccaagagtctcactgtcgcccaggctgcagtgcagtggtgccatcacgcgt

SEQ ID NO: 766975 - DNA, 75 bp, Homo sapiens
cgcgggtctgctctgtgtgccatggacgggccttgtttgtatgaagtccagcacatctgtggttgagcttgttat

SEQ ID NO: 766976 - DNA, 90 bp, Homo sapiens
gcaaccctgtaaaaccagccttagactatttttcaaacaatcttgtggaagccctgaagccagagtatgtggcacctcttgtcctttggc

SEQ ID NO: 766977 - DNA, 100 bp, Homo sapiens
ctcccaagtagctgggactacaggtctggctctgggagaggagtggacagcagctggttgagatacatccccatctggagacaggactgccactgacaga

SEQ ID NO: 766978 - DNA, 100 bp, Homo sapiens
gacgctgcacctcccgcgccgcacggtggacgaggctctgacgcccgctctgcggcttcggtgtttgaacaggccacagtccaggagcgcttacattcag

SEQ ID NO: 766979 - DNA, 100 bp, Homo sapiens
catcagtagatgccagtccctcaaccttgaactttccagacgcagaactggtgaagactgtctccttctgttgaagtctttgcctcctgctgaagctgag

SEQ ID NO: 766980 - DNA, 80 bp, Homo sapiens
ggacccagcctcgtgggagccccgcgggtcctgcccaggacgacctgcacatcatggactccctagagctgcccaccgga

SEQ ID NO: 766981 - DNA, 50 bp, Homo sapiens
cgaaactttcaccgcgagcgggtggcatccttagctgggcctggagggca

SEQ ID NO: 766982 - DNA, 100 bp, Homo sapiens
gtttaaatgttcatcaccatagaaacatgacagcttctccatagagcttttgctgctttgtaccgcctcagtggagactggaatcccttacacattgatc

SEQ ID NO: 766983 - DNA, 82 bp, Homo sapiens
caagtcttacaggagcatcagcacaggggcttctttcctgtcgttgttggctttattagaagagtgccagtccttggatccc

SEQ ID NO: 766984 - DNA, 100 bp, Homo sapiens
gatttgtccctggggcggcagcgcggacccgcccggagatgagttcctacaacagcagccagtacccctgatgccgttgacaagtatctcgagacacctg

SEQ ID NO: 766985 - DNA, 74 bp, Homo sapiens
cattgaggggaatatcccagctacctgatgtgacagggcttcttcgctggaatgaggaagaggaggaagccaag

SEQ ID NO: 766986 - DNA, 50 bp, Homo sapiens
cttaagcaaacgggaattctcgcaacccagcgggtgccgcttctccaccc

SEQ ID NO: 766987 - DNA, 83 bp, Homo sapiens
ggcctctcattctgcagctcatcttctcaaaaacaggtccgcgggagagctgtggggcttggtgagtgtttcgtggcctctcg

SEQ ID NO: 766988 - DNA, 109 bp, Homo sapiens
tggtttgatactgacctgtaaatcatcctttaggttaatttggagtggcccctggagtcagtttcctacaccatccgaggccccacccagcacgagctacagcctccac

SEQ ID NO: 766989 - DNA, 100 bp, Homo sapiens
acactcttcggcctgacgcccaccctcaatggcgggtgagaagccctaccactgcaactgggacggctgcggctggaagtttgcgcgctcagacgagctc

SEQ ID NO: 766990 - DNA, 83 bp, Homo sapiens
gcccctgcgtcgccgggaccctcgcgcgcgaccgccgaatcgctcctgcagcagagtatggtttgaagtggtgaacatggatt

SEQ ID NO: 766991 - DNA, 100 bp, Homo sapiens
gcctattgtttatactcccactgtgggtctggcttgccaacaatatagtttggtgtttcggaagccaaggtggatattccatctattataaccaagaaac

SEQ ID NO: 766992 - DNA, 100 bp, Homo sapiens
agaccgtgaccgagagcgtgaccgagagcgcgaatatcgtcatcgttagaaggccgggctcggtggctcatgtctgtaatcccagccctttgggaggacc

SEQ ID NO: 766993 - DNA, 75 bp, Homo sapiens
ttttggatgatgatggatccatttctcctattgaggagtcaacgataaaagaatcagagtgtctcaacccttgac

SEQ ID NO: 766994 - DNA, 100 bp, Homo sapiens
ctccctgcagaatgcctctcaccacttagaacccaacatggatttgatcaacctgctcacggtgctgatagtctgcagcacaggtttagctgggattatg

SEQ ID NO: 766995 - DNA, 75 bp, Homo sapiens
ggtatcgggaggtgccgaacactgctgcggcaccgctttggggacgtgttcagcctgcagctggcctggatgccg

SEQ ID NO: 766996 - DNA, 75 bp, Homo sapiens
ttcgcagtggtcgcttcttctccttgctgttctaaagaaatccaaatggcagttctgctgaaatttgtttcagaa

SEQ ID NO: 766997 - DNA, 75 bp, Homo sapiens
gaacgttactgtggagaaccaaccaaggaatacggggtgctttgcattcaggaatacagaaaaaacagcaaagtg

SEQ ID NO: 766998 - DNA, 98 bp, Homo sapiens
cggagaccactgttcaaggccacaggtcacaatccaaggtccggctcctccgcgtcccagggccggacggagggatgaggcagggggggcccgggcag

SEQ ID NO: 766999 - DNA, 75 bp, Homo sapiens
tgagacggcggcagcagcggcattcaggatttggacgtggcagagggagaggggcaggaaggttctcaacccaag

SEQ ID NO: 767000 - DNA, 98 bp, Homo sapiens
tgcagaaccaacgaggtggccgaatcttccttcaggatatcaagccagatgacgtgtactactgtggaataaagtacatcaaagatgatgtcatctta

SEQ ID NO: 767001 - DNA, 102 bp, Homo sapiens
ccttagcttccaagaatgctgaggttacagatgtcaagccctccaacatcctagtcaactcccgtggggagatcaagctctgtgactttggggtcagcgggc

SEQ ID NO: 767002 - DNA, 119 bp, Homo sapiens
ccaatgatcttttcaatgctgcgaaagctgccaaaagtgacatgcagggccttggtgtaccttgttgtagtgtttgaaaacatctgaggctgcatccatctccagcaccccataaagca

SEQ ID NO: 767003 - DNA, 100 bp, Homo sapiens
ctgcctttgagcggactcccttttaagattcaagatggaaaaggtgatgtaaccattacaaatgatggtgctaccattctgaaacaaatgcaagtattac

SEQ ID NO: 767004 - DNA, 75 bp, Homo sapiens
agtgaagaacgccgccatccagccaccattccaagctccctgatggctcggagatcccgctccctcctattctgc

SEQ ID NO: 767005 - DNA, 95 bp, Homo sapiens
gaccccaggtcagagactggagccattacttcaagatcatcgaggacctgagggctcaggtttctgcaggtaatggtggcagcagcctctcttac

SEQ ID NO: 767006 - DNA, 100 bp, Homo sapiens
cagcctcttcgagcgccgcggacgcgtcatcgagtgtgacgtggtgaaagatgaggaaaatgaggcccaaagaagtgatgccacttggttaaggtcccag

SEQ ID NO: 767007 - DNA, 90 bp, Homo sapiens
atccgtttccagtccaggtcaggggatgccatggggatgaacatgatttcaaaggcgcagcccagcctcgaaatgcagaacgacgccggc

SEQ ID NO: 767008 - DNA, 75 bp, Homo sapiens
gcgcggccttcccatcaccatcacagagagcgatgtaaactttcctgagaatggctttctctctcctgataaact

SEQ ID NO: 767009 - DNA, 82 bp, Homo sapiens
ctgccgcggggaaatggctgctgttgcttctgggccagaggaagagaatgagataccatggcctgggagaccatcctgatgg

SEQ ID NO: 767010 - DNA, 76 bp, Homo sapiens
tgatttctccaaggatctgctgaaagaaacttttgagaagaactttgaaagagaaacccataaaataagtgagcaa

SEQ ID NO: 767011 - DNA, 106 bp, Homo sapiens
ttttcctcggtgggggcttagcgcactggaggagcggcgggcttcagacaggtgttgatggagtggatcaatgccactcttctccccgagcacattgtggtccgca

SEQ ID NO: 767012 - DNA, 88 bp, Homo sapiens
aggcctgggttacaagcagcaagtgcgcggttggggccactgcgaggccgttttaggcctccccatggccacccatggaccagtcggc

SEQ ID NO: 767013 - DNA, 75 bp, Homo sapiens
ttcaggctcctctctttactgctgaagctttacttcgagctcatggtatcagaatggcaaagcaacttaaccttc

SEQ ID NO: 767014 - DNA, 100 bp, Homo sapiens
tcgactcctttgttactcactgtgttcgggttcgaacctctgacatgggtggctatgctacttgccatgacttcactgaggctgtcattgctgccttgcc

SEQ ID NO: 767015 - DNA, 135 bp, Homo sapiens
aacagactagccactttgcattgactggaaacaatggcatttacagaaagagtcaacagcagtggcaacaggggcaagattcttgccaagagaattaatgtgcgtattgagcacattaagcactctaagagccga

SEQ ID NO: 767016 - DNA, 97 bp, Homo sapiens
gcgagcgcccggattggggatgagtatgcggaggacagctctgatgaggagctgttcgggggtcttgtctggattttggttgcctcctccaatgttc

SEQ ID NO: 767017 - DNA, 83 bp, Homo sapiens
cttctgcctggtggtggactcctgcctactcctaacccacttacccagcttagcagtgtctgcaaaaacgaatcttttcctac

SEQ ID NO: 767018 - DNA, 100 bp, Homo sapiens
ctgaagaaaagacagctgctagtgctcctgccaatgtgatgaacaggaagcggtgcaggaggttcctagagttgttcagaatcctccaaaaccagtcatg

SEQ ID NO: 767019 - DNA, 75 bp, Homo sapiens
ggaggatgagcctgcagagcgcgcagtacctccgtgtcttgggacaaggtgcgcattcctggtgtgctgcagcga

SEQ ID NO: 767020 - DNA, 82 bp, Homo sapiens
ccctttaatccagtgactgtcaggtcgatcatatactgattcttgctattccaaatcctcttccacgttgacagcccttcag

SEQ ID NO: 767021 - DNA, 75 bp, Homo sapiens
tgtcacaatgctgggggaaaccagggggattcccgaagtcttccgttttctgagaatgtgagtgctgttcaaaaa

SEQ ID NO: 767022 - DNA, 98 bp, Homo sapiens
atgggttttagctgccgccggagtcgaggagcatctttccttgaagaagtacattattgacattgtggttgaaagtacagctccagcagaagctttga

SEQ ID NO: 767023 - DNA, 88 bp, Homo sapiens
gtggacatagtgaagaggtacaactggacctatgtatcagccgtgcacacagaagttaccttatcccatatcacacaactggtcctca

SEQ ID NO: 767024 - DNA, 107 bp, Homo sapiens
aaaacctgacttttatcatcatattgataatctcaggagaactctatgcagaagggggaggagttttggcccacacaatactaggagttgcatggaatgagattaca

SEQ ID NO: 767025 - DNA, 101 bp, Homo sapiens
cgaacttagacttccggaaggactttggcgaggacagcatcgcacagaattattttaaaaaaaagcagtgatccaagcaattgaattggaagcactctggg

SEQ ID NO: 767026 - DNA, 75 bp, Homo sapiens
aagagtctttggaggatgcggctttgatggctgctcccggaactgaccaaccctgatgagctactgtcctacttg

SEQ ID NO: 767027 - DNA, 100 bp, Homo sapiens
agagcccctcatcgagctcttcgtcaagtaatctatgccagcaattatgacaatgttagcagaccatgcagctcgtcagctgcttgatttcagccaaaaa

SEQ ID NO: 767028 - DNA, 75 bp, Homo sapiens
tgcgcagacctggtggaggtgttaaatgaaagtgtcagctgtgatgcatgtttaaaaggaaattttcgaggtcgc

SEQ ID NO: 767029 - DNA, 95 bp, Homo sapiens
cgtcgacatgagtgatgtggaggaaaacaacttcgagggcagatcaggtcaattcagtgaagatatgatacccacagtgggcttcaacatgagga

SEQ ID NO: 767030 - DNA, 92 bp, Homo sapiens
ctccttcggcagtccacccaccgccgccgcctcccaggtcaccgacgatgagggcgcacctgctgtcctggagcttccgatctctgttcggg

SEQ ID NO: 767031 - DNA, 75 bp, Homo sapiens
acctagtccaccactgtccaacatggcaatggagtgggaatagctttgcgaaaaatgggcgcaatggccaagcca

SEQ ID NO: 767032 - DNA, 88 bp, Homo sapiens
gaaagaagatgttaactttcaggtattttggcctctccccagtctgctcctggaaacttggacaatagtaaaagtggagaaattaaag

SEQ ID NO: 767033 - DNA, 75 bp, Homo sapiens
agcccaacgaagactgtctctacctgaacgtctatgtgccgacggaggatggcctcccaaggtggggagggtacc

SEQ ID NO: 767034 - DNA, 51 bp, Homo sapiens
cagacattcaacatgattgcatttgaacatgattccacctttccactgata

SEQ ID NO: 767035 - DNA, 100 bp, Homo sapiens
ttgatcgccaaaatcccaaatttttgggtaacaacatttgtcaaccatccacaaggacgactgggtttggattcagaagaggattattatacaccacaaa

SEQ ID NO: 767036 - DNA, 98 bp, Homo sapiens
gccggcgcggggtcggcgctgggctggaggcggcggagcgcgagagcttcgagcggactcaggcttgcttccggcgtcatggctcaaagggccttccc

SEQ ID NO: 767037 - DNA, 100 bp, Homo sapiens
ggaagggccacgcgtcccccagtaggagaatgactccgattcgtgaccctcagcgccggtgcatgtcgatggttacatcaattgcagacaggttgaatgt

SEQ ID NO: 767038 - DNA, 75 bp, Homo sapiens
agagcggagggagccccagacacggcccaggcgagagcgggaagagcaccttcatcaagcagatgcggatcatcc

SEQ ID NO: 767039 - DNA, 100 bp, Homo sapiens
taccatgacgaaaacatgtactacagccagtcttctatgtttccacatcggtcagaaaaagattggtgggggaaaagtagctccagctcaaccatctgag

SEQ ID NO: 767040 - DNA, 100 bp, Homo sapiens
ccagtatcaacaccagtaacagtgtgtggagatatccatggacaggtatgaagtcttacagttctgttggctgtcaccagaaaagagacccgcggctgaa

SEQ ID NO: 767041 - DNA, 90 bp, Homo sapiens
ggaagggcacgcgcgtgctgagactgtagactccactccactttcagttcacacaccaaccttaaggaaaaaaggatgtcctggttcaac

SEQ ID NO: 767042 - DNA, 96 bp, Homo sapiens
ctcagcctcccaaagtactgggattacaggcagcactcgtcggaggcaccaccatgatcatcggccacgtcctgcccgacaaggagacctcccttg

SEQ ID NO: 767043 - DNA, 75 bp, Homo sapiens
ccggcagcctcacctcaccatttctagcttgttgaaacccaaaactacaaaccagtccagctacgggggcccagc

SEQ ID NO: 767044 - DNA, 51 bp, Homo sapiens
tgatcgcgctcgttcccgtcggccggggttatatcttaagtgtggtgctgc

SEQ ID NO: 767045 - DNA, 137 bp, Homo sapiens
cgtgtatgtgtgtgccagcgatgtccccatccgccgccgagaggaggcctatgagaatcaggtcctgctccgcttcgcagtggaatggaacggatttagaagcctgcagtaggggagtggggagtggagagagggag

SEQ ID NO: 767046 - DNA, 76 bp, Homo sapiens
aggctttacaaaccacaaaaacccctgttgaaaagtcattgcaaagaggttttcttctggaggcaaaaaattaaac

SEQ ID NO: 767047 - DNA, 75 bp, Homo sapiens
atgcttggagaagctgaggacacacaggacggttgatgatgaagcgccggccgtgtaaatgaagatcgggtgagg

SEQ ID NO: 767048 - DNA, 83 bp, Homo sapiens
attgtgagagactgcctagagaaggacccaattgaccggacagatgatgacattggaagctctggaggaatatgtgaaaaaag

SEQ ID NO: 767049 - DNA, 75 bp, Homo sapiens
cgacttggacctcatctgccgagcacaccaggtggtatgcagatcttcgtgaagaccctgaccggcaagaccatc

SEQ ID NO: 767050 - DNA, 74 bp, Homo sapiens
ggattccaagtaactcttatttgcatcctgaggttagcattacacttctcccagtggagcccatgacttctgat

SEQ ID NO: 767051 - DNA, 100 bp, Homo sapiens
ctccgagagtggctgcggcggctggggccatatgatgggtgatgagggttcagagtgccaagccccggctggactgcttgattgaagtatacaggagctg

SEQ ID NO: 767052 - DNA, 101 bp, Homo sapiens
aatgcatctttatgtcagaaacacaaagcagcccaaccaaaggggctgatcccttatccaacatggttctaaccttcagtactaaagaagatgcagtttcc

SEQ ID NO: 767053 - DNA, 147 bp, Homo sapiens
ccgcacagttatttgcaaagtcccaggtgaactcgtggcgagagaaggaaaatgcgcgtcccgggcgcgggtaggtgggaccagggagattggatctgctctcaccaggatgtgcatgaggcacagaagcattgaagccaagctgag

SEQ ID NO: 767054 - DNA, 100 bp, Homo sapiens
gtcgcctagtaaacggggctgctggtgggccgcgtcgaagacatggaccagggctacggaggtgtccctggccagtgtccttccacctgtccacaagcat

SEQ ID NO: 767055 - DNA, 83 bp, Homo sapiens
gaccagctagagaccatacagacctaccggtctgtcagtgagatggcttctaacaaggagaagatgtatggtcttatgcaaag

SEQ ID NO: 767056 - DNA, 105 bp, Homo sapiens
gggtaaagtcgagtatctggtgaagtggaaaggatggcccccaaacttccccgggcgctgcctggacaggcctgcctgcgtgctgggacatgtctggcctccaag

SEQ ID NO: 767057 - DNA, 80 bp, Homo sapiens
ctccccagccacgtggaactgtcagaatgaaggaacgatttccgtagttgaaggagaaacattgtatgtcatagaggaag

SEQ ID NO: 767058 - DNA, 83 bp, Homo sapiens
ctcgattcgctgtcggaggagaatgagaccctggtggagtttgctattggattttttatcaagcagaaatgcatcgaacaacg

SEQ ID NO: 767059 - DNA, 83 bp, Homo sapiens
cgcatccatcaaagctttgcgcaacgccaacctcaggcgagatggtttgcctgcaatgagatttcattctctacatttaaagg

SEQ ID NO: 767060 - DNA, 74 bp, Homo sapiens
gaatcttttaagagatatgaagaagaattagagatcaatgacttcccacaggatgttttgagcagtgacattat

SEQ ID NO: 767061 - DNA, 100 bp, Homo sapiens
cggacacctaccaggtggacggcacggacgacagaagcgactttggtgagactctggcgaggcggctttgcacaaggtggacattcccagggccacgtgg

SEQ ID NO: 767062 - DNA, 75 bp, Homo sapiens
cccggagccagcgtgggaggccgctgccgtcgcgcgccttggttcatgtgtgcccagctccctaatcaggtcctg

SEQ ID NO: 767063 - DNA, 100 bp, Homo sapiens
ccctgctacgagcagctgaacagggcccagtcctatgcggagagactgcgtctgggtttggccgtcattcacggggaagctcagtgcacggaactggaca

SEQ ID NO: 767064 - DNA, 97 bp, Homo sapiens
ggagatccagctgggcgaggacgaggacgaggacgagatggacctggagcccaacgggggggccctcagcctcttggccttgaacgggctgttcatc

SEQ ID NO: 767065 - DNA, 88 bp, Homo sapiens
ccgcgctgcttccacccaacttcctgttaggacttatcaaactggtttcaaagcacagagctcaagtaatttacaccagaaataccaa

SEQ ID NO: 767066 - DNA, 75 bp, Homo sapiens
accagtgaaagctggcgttcgtttttcaaggaggctctccaaggccgtgcataaggctgtgctgaccatcgacga

SEQ ID NO: 767067 - DNA, 82 bp, Homo sapiens
atgtttaaaatcattggaccatttagtaagaagaattccagtcttataaatgtcagagatggctttggattccccgttctgt

SEQ ID NO: 767068 - DNA, 83 bp, Homo sapiens
cagtgtctctggatggctactttcatctctggaaggctgaaaatacactatctaaggtaatctgtaagtcagatgctccaaca

SEQ ID NO: 767069 - DNA, 98 bp, Homo sapiens
ttgtgacgttgtggagatggggagcgtcctggggctgtgctccatggcgagctgggtggtgcccaggcaacatgggtgactggagcgccttaggcaaa

SEQ ID NO: 767070 - DNA, 100 bp, Homo sapiens
agatcttcctcagctccttccaggagcctcctcaacaagcccaagagtgagatgaccccagaggagctgcagaagcgagaggaggaggaatttaacaccg

SEQ ID NO: 767071 - DNA, 100 bp, Homo sapiens
agaagatgcctcgaactaaacaaattcatcccagaaatctaagaggccagaagcggactcctagaagaggggagcagcaaggatggaatgacagccgtgg

SEQ ID NO: 767072 - DNA, 83 bp, Homo sapiens
gaaagatctaccttctggaagctactactacgtggtgcttggaaagatctgctacaacatcctggttctgtgcctgagggagc

SEQ ID NO: 767073 - DNA, 98 bp, Homo sapiens
cgacccgtactgggcctactctgagctcttgaaacagcagcagggctcatccacggtgttgcatgagaacacagcaagtgatggaggaggcactgcaa

SEQ ID NO: 767074 - DNA, 75 bp, Homo sapiens
ggaggagtcccgctcgaagctagcggaagatccatccaaaagctatgtgaaattacgagactttgtgcttgtgaa

SEQ ID NO: 767075 - DNA, 76 bp, Homo sapiens
taaaggacaaggtaagaagaagacaagcgggcagaaggctggtgacaagagttcccgattttgaaatgctgggctc

SEQ ID NO: 767076 - DNA, 100 bp, Homo sapiens
agaactctaccctggaggagattctggggcagtatcaacggagtctccgggaagctccaccatgaggcgaggtggatggaggaagcgagctgaaaatgat

SEQ ID NO: 767077 - DNA, 48 bp, Homo sapiens
gcctttcgggagggagagaatacccagctggtggaggccattgtcttg

SEQ ID NO: 767078 - DNA, 83 bp, Homo sapiens
atcaaggacggatgatgaagtagtacagagggtatttgtggtgcagcagattcccaacagtaacctcctcctcctggtgacag

SEQ ID NO: 767079 - DNA, 99 bp, Homo sapiens
tccaaactcaattatctggaccctaggatcacagtggcttgttatctccagaagaagaagagaaaaggagaatccgaagggaaaggaataagatggctg

SEQ ID NO: 767080 - DNA, 80 bp, Homo sapiens
ccctacccgcttctcgtagtcctgggagcacagcagaagtatatgtgtcacaaagatgtctacacggaactgccagggaa

SEQ ID NO: 767081 - DNA, 76 bp, Homo sapiens
ccacttccccatctgtaacgaggtgttgagacgagtgtcgtgtgggagccaatgggagatgggaagaaaatcattt

SEQ ID NO: 767082 - DNA, 83 bp, Homo sapiens
caaccatgctgggcatctggaccctcctacctctgggtacagccaaagaccggagctttggagagatgaagtttaaacagtgt

SEQ ID NO: 767083 - DNA, 86 bp, Homo sapiens
tcttgcccagcgagatctgtgaccggctcgtcaatgacctgggcagaggagcagaataagttggtgcatggcggaccctgcgacaa

SEQ ID NO: 767084 - DNA, 97 bp, Homo sapiens
aagcgcccagcctgccgcctcgctgtccctgcggcttctggggatcttatgccttcattcatccggcatggtccaacaattccaagacgaactgata

SEQ ID NO: 767085 - DNA, 99 bp, Homo sapiens
gcagctgtcgccgccgctctcagagggaatctggaaaaattgcaatcaaaacatcatttctctaagaaaattttgggtaaccgaagttctggacaacag

SEQ ID NO: 767086 - DNA, 83 bp, Homo sapiens
gccctgaaaaaagacagagaaactatgggacacagatatgttgaagcctccccagtttaaattagacccccgcctagctcgac

SEQ ID NO: 767087 - DNA, 89 bp, Homo sapiens
ggacagcacctcatcccctggatgggggaccacaagatcctcatcgacaggtgtccttaagtttgctcgcttggtcaagtcctacgaag

SEQ ID NO: 767088 - DNA, 75 bp, Homo sapiens
ggcagctcgcacttgctcaacaagggcctgccgcttggaagctcttcgtgggcggtcttgactggagcacgaccc

SEQ ID NO: 767089 - DNA, 97 bp, Homo sapiens
ggtcatagagttctttcataaagctctcatgaggaccaaataagaagcctgcgggaggggtcatttttgagattcatgatgttgctatcaaaagttg

SEQ ID NO: 767090 - DNA, 74 bp, Homo sapiens
ggggccagggaaccctggtcaccgtctcctcagagtcactggaactggaggacccgtcttctgggctgggtgtg

SEQ ID NO: 767091 - DNA, 100 bp, Homo sapiens
agccctccaagtacccacatgtgccccctcaccctgctgaccaaaaagtgctgggcctaaaggagataacatttatgaatggagatcaactatacttggt

SEQ ID NO: 767092 - DNA, 50 bp, Homo sapiens
agacagagggttttcttttgagtgaagttattgccagtggactgtgagag

SEQ ID NO: 767093 - DNA, 90 bp, Homo sapiens
cagcattcctgaaatacatccaggaaagacatggagattctcttaaaaagcaattggtgctgaaaattcagaaaaaatagatgagaattc

SEQ ID NO: 767094 - DNA, 75 bp, Homo sapiens
tacaactacaaccagctggaaggcagattcaagcagctgcaagttttccaagagataacttcaccaagatgtcca

SEQ ID NO: 767095 - DNA, 90 bp, Homo sapiens
atttagaaggaggttcaggctacggtgagccgaagaaacattgaatgaggaggataaagcaaagattgctaaaagcaagaagaagatgag

SEQ ID NO: 767096 - DNA, 75 bp, Homo sapiens
tagaggaacttcagtctataataaagagatgtacagttcagtttgttcagggaatttttgttgaaaaatatgacc

SEQ ID NO: 767097 - DNA, 74 bp, Homo sapiens
ttactcaacctctttgatgacacagcagtgaaaggaaagcaagccaggatggatatttacgacactcaaacctt

SEQ ID NO: 767098 - DNA, 74 bp, Homo sapiens
ggaaaaccagttattgaatatcaagaggaggagttgttggttgttccaggctatggccatgcagtactaaggaa

SEQ ID NO: 767099 - DNA, 100 bp, Homo sapiens
gcatctgatgctctctctccagtccttgctgaagagactttccgttacatgagagcgagaacccgagcagcgccatgagcaacactaccgtcgtccccag

SEQ ID NO: 767100 - DNA, 80 bp, Homo sapiens
ctgcttcatccttgtttaatgactttggtgccctcaacatctctcagagacgaaaggatctgaagaagctgaagaaaaac

SEQ ID NO: 767101 - DNA, 74 bp, Homo sapiens
atggaaggatctgttaagctcaattgttcagattccattctgtggggaaattgactgtgaggactggatcaaaa

SEQ ID NO: 767102 - DNA, 76 bp, Homo sapiens
agcatatgaaagtggattatgggtgctgaggagaaaatacttggagaatttagagatacttacaatccagctgctt

SEQ ID NO: 767103 - DNA, 123 bp, Homo sapiens
tcaccctctgccgagtctcaatatctgtcttcggtggactccttcggcagtccacccaccgccgccgcctcccagtgtggacgaatgtggaacctcgctctgtggctgtgttcccttggcact

SEQ ID NO: 767104 - DNA, 75 bp, Homo sapiens
gcaaagataagaagagaaaaagagaagatgaagaaacccagcttgatatgttgctctccctgtgcaggccccagc

SEQ ID NO: 767105 - DNA, 100 bp, Homo sapiens
tgcctgttgcacatcttgtaaaattggacaatggctctttagagagttatctgagttgccaccgatgacttcaatcacggcgtggtgctgagcagcagag

SEQ ID NO: 767106 - DNA, 81 bp, Homo sapiens
gatccttctgtcatagaaactcacatgagacaaatgcgctcagcttcaattggctcatcatatgcccgaagctcagtggtt

SEQ ID NO: 767107 - DNA, 100 bp, Homo sapiens
tcaaaggatgctgagtccggagcgcctagccctaccggactacgagtatctggttgtcacaggtagtactgatggaattggaaaatcatatgcagaagag

SEQ ID NO: 767108 - DNA, 75 bp, Homo sapiens
accttcgactatgcagagacatgagatggtagccaacccctcagtaacaaatgtggcaattattttggatctatc

SEQ ID NO: 767109 - DNA, 75 bp, Homo sapiens
accatgcatctcctcggcccctggctcctgctcctggctggagtcttttgtgcaattgtttctcaccctgctgat

SEQ ID NO: 767110 - DNA, 126 bp, Homo sapiens
gcgggtggaggttcgagcgctgttctcgctccggagccgctgcacatttcgatgccttcaattaagttgcagagttctgatggagagatatttgaagttgatgtggaaattgccaaacaatctgtg

SEQ ID NO: 767111 - DNA, 87 bp, Homo sapiens
tctctgaagaatgcagccttcctaggtccaggggttgttatctggaatctgatgatgttttgcgtctacaaatgagcataatggtaa

SEQ ID NO: 767112 - DNA, 113 bp, Homo sapiens
cgccgccatcctcagcttgggcaacgtgctcaactacctggacaggtacaccgtggcagaaatggtggagtcaatgaagaaagtagcagggatggatgtggagctgacagttg

SEQ ID NO: 767113 - DNA, 100 bp, Homo sapiens
tgggaaaccggcatgcggtgtactggaacagctccaaccagcaataaggatgacattcggctgctgccgtcagcattgggtgtgaagaagagaaaacgag

SEQ ID NO: 767114 - DNA, 90 bp, Homo sapiens
ggatgagcctgcagagcgcgcagtacctccgattattcagagctgggagagcttcccccacgatctcctttagaaccagtttgtgaagat

SEQ ID NO: 767115 - DNA, 88 bp, Homo sapiens
ggaaacctttccaacacagatgtccaagctgccaagcgcattctacattctaaaggggagctcagtgaagatagacataaacagtatg

SEQ ID NO: 767116 - DNA, 83 bp, Homo sapiens
acgtcacagagccttgcaaataatagcaagatatgtaccattttttctggatatgccgcagaaggatccgtgccagaagcaag

SEQ ID NO: 767117 - DNA, 100 bp, Homo sapiens
accgtgaccgagagcgtgaccgagagcgcgaatatcgtcatcgttagaaggcgtgcaatggaattgagttttgccctggtaaatgggaataatatccgag

SEQ ID NO: 767118 - DNA, 97 bp, Homo sapiens
gcggcgggagcacgtcctcaagcagctggagcgggtcaaggctatggtgaactaaacggtaatgctggagaaagagaaatatctttaaagaacctga

SEQ ID NO: 767119 - DNA, 51 bp, Homo sapiens
gtaaaagctgtaaaatgataacagaggtgctgctacccccgtatgatgatg

SEQ ID NO: 767120 - DNA, 48 bp, Homo sapiens
caggaggccagaaggaaatacgtcaaatttgagctgattgtgtcagag

SEQ ID NO: 767121 - DNA, 50 bp, Homo sapiens
cctacacaacaaggcggagtggagggtctcgctctgttactcaggctgga

SEQ ID NO: 767122 - DNA, 74 bp, Homo sapiens
cccttgttggggcacaaggtggcagactcatgaaatggccacagatgataagacgtccccaacactggactctg

SEQ ID NO: 767123 - DNA, 51 bp, Homo sapiens
gctgccgttaaggaccgttacgtttcccggagggagaaccgaagattacag

SEQ ID NO: 767124 - DNA, 87 bp, Homo sapiens
cagagaacagctctttgcatccggagagtggacaagaaaattactacaatgcagctagaacgtgaaaaggctcttgaacataagaat

SEQ ID NO: 767125 - DNA, 90 bp, Homo sapiens
agaaatactttcataacacatcatggggtgatgtttctctctgggaaccttctggaaagaaagtgaacactcgtgaaactgctcaggcca

SEQ ID NO: 767126 - DNA, 101 bp, Homo sapiens
gtgttcgtccgcggagatctctctcatctcgctcggctgcgggaaatcgggctgaagcgactgagtccgcgatggagtttcgccgtgaggaagatgcggaa

SEQ ID NO: 767127 - DNA, 98 bp, Homo sapiens
ggatcctgatgccaaagtagcttgtgatgtttccattcctgaaaaacccaagcttagatttattgaaagggcaccacttgtgccaaaagtaagaagag

SEQ ID NO: 767128 - DNA, 75 bp, Homo sapiens
cccgacagtcgcgggcacccctacgtcgtgtggaaatccgagatggcggcagctatgccatccacgactcccagg

SEQ ID NO: 767129 - DNA, 75 bp, Homo sapiens
gtgcccattacttctgcctggactgcattgtcgaatggtccaagccgattccacgactcttctttgcgggagaac

SEQ ID NO: 767130 - DNA, 83 bp, Homo sapiens
tctcgctgttgctggtctctggctccctcctcccagggccaggcgccgctcagaacggtttggtgcacctcgatttggaggaa

SEQ ID NO: 767131 - DNA, 88 bp, Homo sapiens
agcagctccaagatgatttgatgaaggtcctgaacgagctctactcgttcctctgtgacgagggtgcaggtatctctggggactacat

SEQ ID NO: 767132 - DNA, 100 bp, Homo sapiens
gccgagggcccggaccccgaatatgacgaggagaaggcagagcccccccaggctatgaatgccctgatgcggttgaaccagctgaagccagggctgcagt

SEQ ID NO: 767133 - DNA, 75 bp, Homo sapiens
tcagaaggaacaattcatcagtggggaattgaaggagcccatcctgaagacaagcctttgaattatgaagaaaag

SEQ ID NO: 767134 - DNA, 100 bp, Homo sapiens
actgggtcagcttcatcctcggcggcggtggccgctagctccaaggaaggttgaaatcacaaagattagacacctttttagataggtgttcttcagcacc

SEQ ID NO: 767135 - DNA, 74 bp, Homo sapiens
gttgaagccacacaaagaacaaattgcagttgtttgaggtggcacaagaatggctcaactctccaaatagagag

SEQ ID NO: 767136 - DNA, 83 bp, Homo sapiens
ctgacactttatactggaaggggtggtgaacttcaaaaaattggggaacacacgatagtaaggagcatttagcaatgatggaa

SEQ ID NO: 767137 - DNA, 75 bp, Homo sapiens
gaggccgcgaactgcatcatggagcacaggagaaaacgacgctccacacctttaacttcttccacacttccttca

SEQ ID NO: 767138 - DNA, 51 bp, Homo sapiens
ccagctctctctgggcatctggaaagagtgcttgtgatttcacgtattttt

SEQ ID NO: 767139 - DNA, 101 bp, Homo sapiens
tgaagatccattggtaaattgatcaggatttttggcctaccctccaaagaaaagaccaagatcactccatggatgaaatgacagctgtggtgaaaattgaa

SEQ ID NO: 767140 - DNA, 75 bp, Homo sapiens
gggctgtgacagctgtcagcgtctgcccagtgctccacccttctcaacgatggagtctccctctgtcgcccaggc

SEQ ID NO: 767141 - DNA, 73 bp, Homo sapiens
aggccttggccatgttcaggaagacagaggaaggagattgatgccagggacggggttgctaccaaatccatca

SEQ ID NO: 767142 - DNA, 57 bp, Homo sapiens
ggcagagaagcggcccatcctgtctgtgccatgtcctcctcacattcttccaccaga

SEQ ID NO: 767143 - DNA, 78 bp, Homo sapiens
catcaagagtgagacccatggctcactggaggaggccatgctcactgtggtttcaccgggagaagtcggcctcttcct

SEQ ID NO: 767144 - DNA, 83 bp, Homo sapiens
cccgcctccctcccgcgcgtgctgcgggtctgctcgggggtctacttcgaggtttaagatgctaccagaactatttcaagatg

SEQ ID NO: 767145 - DNA, 76 bp, Homo sapiens
ccggaaagagcgaaagaaagaagtggtggaggtcctggagtacaatgccattggaggcaagtataaccggggtttg

SEQ ID NO: 767146 - DNA, 82 bp, Homo sapiens
cctgcactactggggccaggagctccccacagccgggaagattgtcaactgcatcttcctcccgtgaggctggccgagctcc

SEQ ID NO: 767147 - DNA, 99 bp, Homo sapiens
cgctccatctggagtactttgaagaagccatgaactacttgctcagtcatcccgaggacctggacccttcccagggatcattgacatctttggtattgg

SEQ ID NO: 767148 - DNA, 51 bp, Homo sapiens
actgaaaatgatttatgcaagtttaaggtaccctcctctgaaatcaaaact

SEQ ID NO: 767149 - DNA, 100 bp, Homo sapiens
actccagcacccactcctcaggaacatttaaccaagattactttctatgaagacaaaaattttcaaggccgtcgctatgactgtgattgcgactgtgcag

SEQ ID NO: 767150 - DNA, 100 bp, Homo sapiens
aggaacattgctgtggattcccaggcatgaaagatggccagaagataacattccatggtgaaggagaccaagaaccaggactggagccaggcgatattat

SEQ ID NO: 767151 - DNA, 76 bp, Homo sapiens
ggccatcaagaaaatgtcttatagtggaaagcagtctactgagagaatggatcttggagaatgtctgaaagtccat

SEQ ID NO: 767152 - DNA, 92 bp, Homo sapiens
ccagcatcaagatgatttatggtaataagaatttacatagtacatgacgaagttaaggataaagcttttgaactagaactcagctgggttgg

SEQ ID NO: 767153 - DNA, 75 bp, Homo sapiens
agcttctggtttctaagtccatgtgccaaaggctgccaggaaggaggtggtgcccaggcaacatgggtgactgga

SEQ ID NO: 767154 - DNA, 83 bp, Homo sapiens
attgacgccttttataataaagacacttatcttgcccaagagctgggacagttaatgtttctgtaccaaagaaaacgagaaac

SEQ ID NO: 767155 - DNA, 80 bp, Homo sapiens
cttgacagtcttcggcaggaagggggatatgagactttctactcggaatatcctgagtgttgcgtggatgtaaaacccat

SEQ ID NO: 767156 - DNA, 83 bp, Homo sapiens
gcggccgcggggcccgagcgcaggaaggatcgagatcgagaccgggatcgtgaagatcggtctaaagatcgagaccgagaacg

SEQ ID NO: 767157 - DNA, 100 bp, Homo sapiens
ctgggcgacttgcgaggatgagagcgacgaagccaactgtccaggtgaatccgccatactacatcccgctggttgagctggtcccccacccggagacggc

SEQ ID NO: 767158 - DNA, 75 bp, Homo sapiens
ctgcgcggcagcctcccctggcaggggctcaagctgtggcacgagctgtgcgacctcatctcccagaatccggac

SEQ ID NO: 767159 - DNA, 99 bp, Homo sapiens
tggctacacagacattaagtatagacagctatcaagatgggcaacagtttctccacagacactacccaaagcagtccttcactacagtggcagacagac

SEQ ID NO: 767160 - DNA, 100 bp, Homo sapiens
gctgagtctcgctgctcggtgcgaggcggcggagagcgaggcctggtcaaaatgcagatcttcgtgaaaacccttaccggcaagaccatcacccttgagg

SEQ ID NO: 767161 - DNA, 98 bp, Homo sapiens
tgctgttttagagctggcagcagcatctcagcccaagagaagtcttcccacacaggttgagagaggaggggatccaattgcctgtgaggaggacacgg

SEQ ID NO: 767162 - DNA, 80 bp, Homo sapiens
accagacctacggagggagctggaaattcctgacgttcattgatctggtaaaagagaacctgctttcatgcaagatgctg

SEQ ID NO: 767163 - DNA, 74 bp, Homo sapiens
ggagggcgagcgaggaggatggcggagtcggggctcctgacgaagatcaaattcccaggggcttccctaccatt

SEQ ID NO: 767164 - DNA, 75 bp, Homo sapiens
gctgatgtcagtgttatatcctccaggaatactggccaggctaaagaacgtgccaatggaatggagcttgatggg

SEQ ID NO: 767165 - DNA, 98 bp, Homo sapiens
ggaaaaatcgagcagaaagaatgtctttcagattgagatagagagaagcctgtattcagaccacgagcttcgtgctctggatgaaaaccagcgactgg

SEQ ID NO: 767166 - DNA, 100 bp, Homo sapiens
actcaatcagtcaaaatcgtcttttcctgctggtaaataacactgaaatcctccttttagaggactcagaagaagaagaaggtgacttatgtagaatttg

SEQ ID NO: 767167 - DNA, 75 bp, Homo sapiens
ccaaccataaagatccaagtgctgttcacacagtgagatgcattctggagtcagagtattcatcgaaaagaaagc

SEQ ID NO: 767168 - DNA, 100 bp, Homo sapiens
taggtttcggcacaagtttcagcgagagaaggagaaaactgccttggttggaaccttgcagtgtgctggaattgatgttcgtctgtgtgatgttggtgag

SEQ ID NO: 767169 - DNA, 78 bp, Homo sapiens
catctagcccagaggatcggaatgacagatgtccggcctctttggcctacccccgttggctccgctgccccaggtcga

SEQ ID NO: 767170 - DNA, 103 bp, Homo sapiens
gtggacggcgggggccgagcccatgagtagggaggagaaacagaagcttggtgaacagagtatctgtcaggcaagagctgctgtgatggtttatgatgatgcc

SEQ ID NO: 767171 - DNA, 75 bp, Homo sapiens
ctagaactcagttgtgcgttgcggccagtcgccactgctgtttgtggtaaatatgccagctctagaacacatgaa

SEQ ID NO: 767172 - DNA, 75 bp, Homo sapiens
tgccgcccacgtacatgcacgccatgtggtcagcccaaggctgccccctcggtcactctgttcccgccctcctct

SEQ ID NO: 767173 - DNA, 88 bp, Homo sapiens
caaggacactgcatcgtcaaactgatcccctggccgttggaggagcagttgtggtggaggtggatacagcagtcggagaacatctggc

SEQ ID NO: 767174 - DNA, 76 bp, Homo sapiens
gtcccataaaatccaatctgatttcatagtaaagccaatcccagctgaaggaatcaagtcaaatccttccaagcgg

SEQ ID NO: 767175 - DNA, 75 bp, Homo sapiens
accgtggtgacattgtatcattggtgtgactctgacatcattagaagcatgccagaacagactggtgaaaagtaa

SEQ ID NO: 767176 - DNA, 74 bp, Homo sapiens
ggagttgctgcccttccggagtccgccccgtgaggagaatgtacgctggggaggaggaggaggaagggagcggc

SEQ ID NO: 767177 - DNA, 74 bp, Homo sapiens
aggaacaggggtcacggggcaaggagcacgtggcagcgcaggaaacagggcacctcaacacctttgcttcgaat

SEQ ID NO: 767178 - DNA, 100 bp, Homo sapiens
gatggagatgggcagacggattcatttagagctgcggaacaggacgccctctgatgaagtcctgacggccacgctggatctggaggacgtccggagctac

SEQ ID NO: 767179 - DNA, 100 bp, Homo sapiens
tcgggggctttcgcccgggtcctcctagaaattccccccgaagaagactcccccacatctggaatagcctaacatggcagaccagagacagcgctcactg

SEQ ID NO: 767180 - DNA, 100 bp, Homo sapiens
gaggccccagcccgtgaaaagtgaggttgctgaaaagccaggagtcaaaatgactgagcgctttgactgccaccattgcaacgaatctctctttggcaag

SEQ ID NO: 767181 - DNA, 83 bp, Homo sapiens
gctggccctgaggcaacggctcatcagttgatattcactgatggactccaaagaatcattaactcctggtagagaagaaaacc

SEQ ID NO: 767182 - DNA, 84 bp, Homo sapiens
tccggatcaatccagatggcagccagtcagtggtggagatggcccactgcgtgaccttggttcagctgtccatttcctgtgacc

SEQ ID NO: 767183 - DNA, 89 bp, Homo sapiens
gtggctgccatcaatggatcctgcctgggaggaggacttgagttggtagctggcagtgttgtgatggcttttgaagaagtatgcccgga

SEQ ID NO: 767184 - DNA, 83 bp, Homo sapiens
acccagaagatgagaccgcaattcgagaatcaaagggccgggagcgatgggtatttgtggtgcagcagattcccaacagtaac

SEQ ID NO: 767185 - DNA, 74 bp, Homo sapiens
ccggatgattcacactggcgagaagccattacatgaagcccaagagccaaaggaatcaccaccaccttctaaaa

SEQ ID NO: 767186 - DNA, 51 bp, Homo sapiens
ggtgacttcagtggagagcaactcaaatgtgagaaatgttttagatgaaga

SEQ ID NO: 767187 - DNA, 75 bp, Homo sapiens
cgggagttacaccgccaccgccagggctttttggattttggaactggggactcaaagtcaagtgcttcttacggc

SEQ ID NO: 767188 - DNA, 100 bp, Homo sapiens
tggctgaactcgtggcagaagaggtgacacgggagctgcttacttcatcacagggaacagacagaaccaagttgtattgttagacacactggaacaagag

SEQ ID NO: 767189 - DNA, 89 bp, Homo sapiens
ggctggctccgggggtggcgggcgcagctgctgtgacaggtgtaccttgaaagacttttaacatacgcagagatagatatctgtccggc

SEQ ID NO: 767190 - DNA, 100 bp, Homo sapiens
caactccagcacacgcctgggctcagggggaacacaggacgatttcaggtatgctgctgaaagtgggaatcctctacattggtgggcagctggtgaccag

SEQ ID NO: 767191 - DNA, 90 bp, Homo sapiens
taatgatgtcataaaagagttgcttaaattctcacccactcttggtattttgaaggttacattgattacccacctagtacaacatcttac

SEQ ID NO: 767192 - DNA, 82 bp, Homo sapiens
cctcgcccagcggccgcgacgctatggcgcactggagtaccctgttcctggcacctccaagtctattataaatagtatgcta

SEQ ID NO: 767193 - DNA, 95 bp, Homo sapiens
tcagatgtggaggagaatatatcctctaaatctgatgtgtgtataggacaaattctacgaataatacaactacttggaaccacaccacgactaag

SEQ ID NO: 767194 - DNA, 100 bp, Homo sapiens
ggaaccagatgttaaaaaattagaagaccaacttcaaggcggtcaattagaagaggtgattcttcaggcctgttacatgaacagaatatggcaaaaatga

SEQ ID NO: 767195 - DNA, 75 bp, Homo sapiens
ggggcggcgacggcgcagtgcgaagcgaaacaggtgattttcttccacccccacctccacctctagatgattcca

SEQ ID NO: 767196 - DNA, 95 bp, Homo sapiens
caggccgacctggcgctgcggagattttgtggaagtataatactttgtcattatgagatgtcgtctctcggtgcctcctttgtgcaaattaaatt

SEQ ID NO: 767197 - DNA, 96 bp, Homo sapiens
catgtcgggttattcgagtgaccgagaccgcggccgggaccgagggtatacaaaactaggatatgctggaaatacagaaccacagtttatcatccc

SEQ ID NO: 767198 - DNA, 88 bp, Homo sapiens
gtgaaagaaggaacagtgaccgatccgaagatggctaccattcagatggtgactatgagtgtgaacatggctacgcctcttcattccc

SEQ ID NO: 767199 - DNA, 100 bp, Homo sapiens
tttttgtgcagtgggcaggaagaacccatcgggcagctacacatcttgaaagagaagctcttcctgtgagactatcaagaaatccaagtggtaatgggcg

SEQ ID NO: 767200 - DNA, 82 bp, Homo sapiens
ggcagacatggcgacattgacagtggtccagccgctcaccctggacagaggtggccaaggtggaatacgtcaggaagaagcc

SEQ ID NO: 767201 - DNA, 101 bp, Homo sapiens
cgcatatcctgggtagcctctaggaagcgctagacacatcactgagcttgctggttttattaaaaaagtgcgaagcaaaaacaagaactcactctcaggat

SEQ ID NO: 767202 - DNA, 98 bp, Homo sapiens
tgctggtgaccagcgtcacgctgctggtggcccgggtcttccagaaggctgtagaccagagtatcgagaagcatttttgaaacgttggggttgttgga

SEQ ID NO: 767203 - DNA, 80 bp, Homo sapiens
ccgcccaaggtctctcgcgggcgggagaacggaaaactcccaacttcctggtaagaatgattgatgttggctgatattgg

SEQ ID NO: 767204 - DNA, 103 bp, Homo sapiens
tgatggtcagaaaaggggacacggcggtgcttaggtcactctgtgagactgctgggtcagaaaaaggataatggaaggcggcttgggggagcacgattggatt

SEQ ID NO: 767205 - DNA, 96 bp, Homo sapiens
ctcaggggcaagtacagttactctggggaggaccgtataatagacgctggccccaaaggaaactactctcgatttatgaatcacagctgccagccc

SEQ ID NO: 767206 - DNA, 89 bp, Homo sapiens
gcgcccgaatcaatcgcatcttccacgagcggttcccatttgagctggtgaagaggagaaggcagagcccccccaggctatgaatgccc

SEQ ID NO: 767207 - DNA, 50 bp, Homo sapiens
ccagcttcaaggacttctctctcgtggagtctcaggatgcaggaatcaag

SEQ ID NO: 767208 - DNA, 83 bp, Homo sapiens
ctgctgtgggcgctgctggcgctctggctgtgctgcgcgacccccgcgcatggcagaagctcctcctggggtagagacagatc

SEQ ID NO: 767209 - DNA, 100 bp, Homo sapiens
agccaacctgattaaagaagctgaagaaatgtgctcaaagtttacaagggcaatggcgaactgagcaataaggaatttgtttccatcatgaagcaacggc

SEQ ID NO: 767210 - DNA, 90 bp, Homo sapiens
taagagaaaaaactgtggctgttggtttgtggaacagacagctccttctttattgatgatgttgaatttgaagtatcatcggaccgacgg

SEQ ID NO: 767211 - DNA, 51 bp, Homo sapiens
gggaaaacttgctgcggttgctcaaggccaagaataaggagacgggtgctt

SEQ ID NO: 767212 - DNA, 82 bp, Homo sapiens
gacagcggggtaaacccgaacaattctgcgcgaggtatgctgccccacaaaaccaagcgaggccaggccgctctggaccgtc

SEQ ID NO: 767213 - DNA, 75 bp, Homo sapiens
gagaaccccaacctggaccccccgagaatgaccttgaacaatgaacggaatacggggtgctttgcattcaggaat

SEQ ID NO: 767214 - DNA, 100 bp, Homo sapiens
cttttcagctacaacatcatcttctgggaagctgcggatctgtcctccctgaaaagcatgttggaccagctgggcgtccccctctatgcagtggtaaagg

SEQ ID NO: 767215 - DNA, 98 bp, Homo sapiens
agccattcagggcctttgcctttgttacatttgcagatgatcagatggccgccctgctcccccaatgaaaggccagcttcgaagaaaagctgaaaggg

SEQ ID NO: 767216 - DNA, 100 bp, Homo sapiens
gcccaagagctatcaggggaagatatgcatcagttccatcgagccattactacagagactctacaggggcaggtaattcactggtccacaagcggtctcc

SEQ ID NO: 767217 - DNA, 76 bp, Homo sapiens
cgggcgaccccccggcgcagcagcatcatcaaggggaatgcatctttccagactgagtgtcgaagaaacaagttta

SEQ ID NO: 767218 - DNA, 100 bp, Homo sapiens
ctgcctggcgttgtgcgcagagctggaaagcatggctgttgtggagatgaagaagagaatgatgagccacccaaagtagtagttaccgaagtaaaagaag

SEQ ID NO: 767219 - DNA, 83 bp, Homo sapiens
gaagaaatttggagtgtgcgtgcgcgccgagcggtgatgtgtccaatctagatcccaacttctcatttgaaggcaccaaactg

SEQ ID NO: 767220 - DNA, 101 bp, Homo sapiens
caaagatggaaagagattatatgaagcagaaaaatcaaaaagggaatcctttgggaaattatttaatgatggtggtgctaccccagtacaggatgaacggg

SEQ ID NO: 767221 - DNA, 90 bp, Homo sapiens
tggagacggcgctgttcttcctcatgtcctggagcacgtttctcttggcagaagcctgcggatttacagatcaggtatttggatccaatc

SEQ ID NO: 767222 - DNA, 90 bp, Homo sapiens
ttcagatgggatctttccggatcaatccagatggcagccagtcagtggtggaggaccttaaagaagccaacttcgacatcaatcagctat

SEQ ID NO: 767223 - DNA, 101 bp, Homo sapiens
gtcctgaagtgatgctgggacagtcgtggaatctgtgggttgaggcttccaaacttcctgggaaggacggatcaaaatacttgctggatggtggactcaga

SEQ ID NO: 767224 - DNA, 100 bp, Homo sapiens
ttcaccaagacagacccccatctttgaccctacagggtcagaaaacctccatgtttctcatatcttgcaaaaagcaaaaattgaagtcagtgaagatgga

SEQ ID NO: 767225 - DNA, 73 bp, Homo sapiens
taagtagcttaaagatgacaccttgcattccctatttaggctacaaggagcagggcatcccacagcagctgtg

SEQ ID NO: 767226 - DNA, 75 bp, Homo sapiens
gaagagaagcccaaagacagtgaagaactcgaggcttcctgtcacttcgtgtcacatcccactcctgtccttcac

SEQ ID NO: 767227 - DNA, 83 bp, Homo sapiens
gcagctgcttagacgctggatttttttcgggtagtggaaaaccaggtgctggagaatctggtaaaagcaccattgtgaagcag

SEQ ID NO: 767228 - DNA, 100 bp, Homo sapiens
cgctcgcgggccggggcggagggttcggctgcgcggcggggctgaggcggccgcggggcccgagcgcagctagaacaacagaggcagcagttgcttactg

SEQ ID NO: 767229 - DNA, 98 bp, Homo sapiens
aactcaatgaagcacttactacttaccggaagcctgttgatggtgataactatgttcgtcggagtaaccaaagatggaagatggtaccccaaagcata

SEQ ID NO: 767230 - DNA, 83 bp, Homo sapiens
tccgtgagcgccgaggacgacgactatgaatcggagccggaccagatgaggacggggacttggttgccttttccagtgacgag

SEQ ID NO: 767231 - DNA, 100 bp, Homo sapiens
tgacattgaactcagcagaaatgaaggactactgttcgaagatttttggaagaatactgagaacggcataaagtgaagatcgacatttaaaaaatgaggt

SEQ ID NO: 767232 - DNA, 101 bp, Homo sapiens
catgagcagcctgcccaacttctgcgggatcttcaaccacctcgagcggctgctggacgaagaatgccagaggattcaacatgagcatacctatgcctggg

SEQ ID NO: 767233 - DNA, 75 bp, Homo sapiens
ccatcgaacccatccgcgacttcctggccatcgttttcttcgcctccatagaagtgggtttcaccatgttggcca

SEQ ID NO: 767234 - DNA, 100 bp, Homo sapiens
gtcgtgtcgagttcccaaaaagctccgcaggggctgtagggaggtgaggatcccaaccccactgaacacaagcggggtgcaggtgatctgcatgaagggg

SEQ ID NO: 767235 - DNA, 75 bp, Homo sapiens
cgccccgaaactttcaccgcgagcggaaagctcctgctgcttctgtaccccgcctgtccctcccagctgcgcagg

SEQ ID NO: 767236 - DNA, 51 bp, Homo sapiens
tcactttagaccctccacctaattgcagtgggtaattccagaattgattgg

SEQ ID NO: 767237 - DNA, 78 bp, Homo sapiens
aggtgccctgatgtctgctttcagtcctgaaaagctgaacgaggatgaggaagaagagtccagtaggcaggaaaccga

SEQ ID NO: 767238 - DNA, 83 bp, Homo sapiens
ctgagccgcgctgcgcagccgacgcgggaatgaagcgggcgctgggcaggttttgggatttgagattgacgcggtgaactctg

SEQ ID NO: 767239 - DNA, 75 bp, Homo sapiens
aacatgctgtactttgccaagcaccaccaagatgcctacatccgggtatcagcagatgttgcacacaaacttggt

SEQ ID NO: 767240 - DNA, 82 bp, Homo sapiens
aggatctggggatcttcgcactatcccaagaacatccagtcatggataaaaatgagctggttcagaaggccaaactggccga

SEQ ID NO: 767241 - DNA, 90 bp, Homo sapiens
ttcagagtgtatgcaagattttaataccatgttcaccaactgttacatttacaacaaggacacagcattgttggttttgccatgtactat

SEQ ID NO: 767242 - DNA, 97 bp, Homo sapiens
gccaaagagaggaaagttacagccgaatgggctacatggatccatcatccgtccttggctcaggatttggagagcttgcaccaccaaaaatggcaaa

SEQ ID NO: 767243 - DNA, 100 bp, Homo sapiens
gacaactttcgtttccctctgagggaattgggaggtcggcggccccaaaagcagccacctcccgcccctgtacctggatggccatgtgtttgcaagtcag

SEQ ID NO: 767244 - DNA, 51 bp, Homo sapiens
cttcctgtatgtcaccgtctcgctcatcttctctttctgaagaattgaaac

SEQ ID NO: 767245 - DNA, 98 bp, Homo sapiens
gccgtggggcagaggctgcggagccccagaagggcaggagtgcagatgtgatctcggcacaccgcaacctctgcctcttggattcaagcaattctcct

SEQ ID NO: 767246 - DNA, 75 bp, Homo sapiens
tcaactgcatgatccgggtgaagaagcaggtttcccggtcctctggcgaggatcctccaaggcgtctcacatgaa

SEQ ID NO: 767247 - DNA, 75 bp, Homo sapiens
tttagcgcatcatgtgatccgggtaacccaggcctgcacagtcccatgttggatcttgataatgatacacgtccc

SEQ ID NO: 767248 - DNA, 100 bp, Homo sapiens
gctctgtgcgcgcctccatctgggccatggatggtgaagatagtgatccggggagacaggaacacgggcaagacagcgctgtggcaccgcctgcagggcc

SEQ ID NO: 767249 - DNA, 100 bp, Homo sapiens
aggaaaatgggttccatgagaagtgacatcctcctcgaatcaaaaggatcaagagaaatatggattattaaatgtaacaaaaattgctgaaaatgggaaa

SEQ ID NO: 767250 - DNA, 75 bp, Homo sapiens
cctggagaactgttacaaccggctcatgggatcagtaaagcagaggtgagaactcagaagagaaatacagctggc

SEQ ID NO: 767251 - DNA, 100 bp, Homo sapiens
cggatggacagcaggccccgcgccggaaggatgccctgcagtggtctcgccatccagctacagtggagggagaggagccagaggacacggctgatgtgga

SEQ ID NO: 767252 - DNA, 90 bp, Homo sapiens
atatagagcaggtcttcagcccgtcagcaagtggcaagcctatggactcaaaggctatcctgggaatcttggaatcagaccagaccagac

SEQ ID NO: 767253 - DNA, 98 bp, Homo sapiens
agagggcagagcatcaagacaaggtggatgaggttcctggcttatcagggcagtccgatgatgtccctgcagggaagtttgcaggtcgaagtaagaag

SEQ ID NO: 767254 - DNA, 99 bp, Homo sapiens
ttggagtcggagcttcgcgacggcagcggcaagaagaaagtcagaaacatggccctggatgatgtcgtgatcctgaatgtggacaccaacaccctggaa

SEQ ID NO: 767255 - DNA, 83 bp, Homo sapiens
ctcgagacatcacttctgttcacaatgcagatcttcgtgaagactctgactggtaagaccatcaccctcgaggttgagcccag

SEQ ID NO: 767256 - DNA, 75 bp, Homo sapiens
caaggacagaatcaccagcactggctgaaggtgaaagacccctgacaaaagacaatcatcttctgggtacatttg

SEQ ID NO: 767257 - DNA, 100 bp, Homo sapiens
gataatgacgacagcaacccgaagacagggaaatttagaatttcacggtccctcatggtgtctcactccagcagacagaggattgtgtcgtgccaatgag

SEQ ID NO: 767258 - DNA, 50 bp, Homo sapiens
cctttctctcctgcctgggcaagcctcgtttaaactcatatcccaggcat

SEQ ID NO: 767259 - DNA, 90 bp, Homo sapiens
gcattggcatttttgtcacctccaacaacatccgcgagatcgagggctttgttcgcgggggtcacagctctcatggctgcagctagcgtg

SEQ ID NO: 767260 - DNA, 74 bp, Homo sapiens
ttattctggccaacagtgttaagtataatgctgaaccttcacctagccccaggattacaaggaaaagcaccagg

SEQ ID NO: 767261 - DNA, 105 bp, Homo sapiens
atgaattgtacggcacttggcgtaaagccgcttccctcaagagtaactacaaggcagctgcaatgactctccgcacggtattattgtcattgcaagcactattgg

SEQ ID NO: 767262 - DNA, 51 bp, Homo sapiens
cagaacgaaaagaagccctccgaggtcatggcaaaaccccaaaagatgccg

SEQ ID NO: 767263 - DNA, 75 bp, Homo sapiens
aatgtcagagaaatctttgacaagactgaaactgttgaggagcccatggaggaagaagaagcagccaaagaagag

SEQ ID NO: 767264 - DNA, 104 bp, Homo sapiens
cgcccgggaggaaggaacgaggcaaggagctaaagcagcgtgcgttcagccctgggctgcatcttcctcccgtgaggctggccgagctccacgctgatctgaag

SEQ ID NO: 767265 - DNA, 144 bp, Homo sapiens
agaaccagcatttcgatggcttcgtggtggaggtctggaaccagctgctaagccagaagcgcgtgactggaaggatcaccagcacatatgcggccagtcagcagctgtcaccgtccaggcagacgaagtccacgtggctgaaag

SEQ ID NO: 767266 - DNA, 100 bp, Homo sapiens
ggccaccatccggcgcctgaatatgtataggcaaaaggagcgcaggttagagcctccacctggaaaacgtgaatgccgagttgggcagtatgtggtcgac

SEQ ID NO: 767267 - DNA, 107 bp, Homo sapiens
cgggctcccgctggccgcctcgatgcaggaggacgaacaggtgtgcaactgaggaacatggctcaagaaactaatcacagccaagtgcctatgctttgttccactgg

SEQ ID NO: 767268 - DNA, 120 bp, Homo sapiens
aatgatgaagaagatccttcaaaattaaaagaggagcagcatggcatttcagtcactggtttgcagagtccaggacgactgggtttggattcagaagaggattattatacaccacaaaag

SEQ ID NO: 767269 - DNA, 99 bp, Homo sapiens
cttccaagtgatcctgctggagcacatcatcatgtgccgccttgtcacgggtcacaaggccacggcgctgcaggaggcgcctacaaatcgaggacttcg

SEQ ID NO: 767270 - DNA, 78 bp, Homo sapiens
tgccctcagctccgagtccagggcgaggtctgtctctcctgccagagtgtatacaccagttggacaaggacgctgcct

SEQ ID NO: 767271 - DNA, 76 bp, Homo sapiens
ccgagggaaccgaggcagcggaggtggtggtggaggtggagacagagtctcgttctgtcacccagcctggtgtgca

SEQ ID NO: 767272 - DNA, 83 bp, Homo sapiens
cggggatggacctccagatttccttactgagccagtccatgacagacatgcttctcaaagtacagaatgctattggagaactg

SEQ ID NO: 767273 - DNA, 100 bp, Homo sapiens
cggcaaagagatgagcttattgagttctccgggagatgttgcataaccactccttcgtgggctgtgtgaatcctcagtgggccttggcacagcatcaaac

SEQ ID NO: 767274 - DNA, 100 bp, Homo sapiens
ggcctccgccggcgcctggtgtgcttcaccatggaggagtaccatcacacaatccccgtcatcagcctgtacagcctgagagagagcctggccctcattg

SEQ ID NO: 767275 - DNA, 80 bp, Homo sapiens
atgacagggaccaggggggcggcagcgctggacacccagcctccaggttacaactgatggaaaaccaaaaatcgttgata

SEQ ID NO: 767276 - DNA, 75 bp, Homo sapiens
gtgacatttggtacatgaggttttctatggatttctggcaaaaggagcagattctggccagatttctgaagaaac

SEQ ID NO: 767277 - DNA, 100 bp, Homo sapiens
gttacatcagaaggatacagttcatgacaatgactttgagccctaccttactggacagtcaaatcagaaaatactgcagtttctacctgaacgaattttc

SEQ ID NO: 767278 - DNA, 75 bp, Homo sapiens
tggcctcggggtctccctacaccaacgtgaactttgaggcgctgatcatcaccatgtcggtagtcgggggaaccc

SEQ ID NO: 767279 - DNA, 100 bp, Homo sapiens
cgggcagcagcggcgccgtgctcgctccaggaaaatgttctgctgctgccctggatgttcttgcaaatgtgtatcgtgatgaactgctgccacatatttt

SEQ ID NO: 767280 - DNA, 97 bp, Homo sapiens
gaagttgtccatgttcacactgggtgaaggaagctgaaaccacagacatgactgagtcctccatgaagagactttgcctcccgggccaaactggcag

SEQ ID NO: 767281 - DNA, 75 bp, Homo sapiens
cggaggagcgcggccgtcttagcctgcgccgcgaggtctgcggcctcgatcccgactgggcctcctacactctgg

SEQ ID NO: 767282 - DNA, 100 bp, Homo sapiens
atccctagtgtcagcagattcagcggtactggtgtataatagatgcaaacagctataattttgcaaaaaaggaaaataactctcctgaacatctaaaaga

SEQ ID NO: 767283 - DNA, 75 bp, Homo sapiens
agaaagtgagagtcattgatcccaggaaacaagagattgttgctgtgtacatgtaccagctcttccgcagcttgg

SEQ ID NO: 767284 - DNA, 100 bp, Homo sapiens
ctaactaagcctcaactccagcagtgcctgggaggaaggaaggttgtttgatgtgtgcacagtgtcacgaacagacagagaaaccaaactaactttagtg

SEQ ID NO: 767285 - DNA, 75 bp, Homo sapiens
ggctgcgtcaccgccgcccccccagacaagatggacaccgcggaggaagatccatatcatagattttgacgatga

SEQ ID NO: 767286 - DNA, 82 bp, Homo sapiens
ctgcctgacacaggagagggccccagcagggccaccgggcggcaagacaatgcagatcttcgtgaagactctgactggtaag

SEQ ID NO: 767287 - DNA, 101 bp, Homo sapiens
agccggagtccgcggcgggcagccagagcccaggttttacacatccataagtagacctttttggagcctcaccagccaattcaatggcgtcctcttctact

SEQ ID NO: 767288 - DNA, 99 bp, Homo sapiens
ctcacatctacgccatcgcagacacggcctaccggagcatgcttcaagagggtcaccatgaagttcaatcccttcgttacctcggaccgcagtaaaaac

SEQ ID NO: 767289 - DNA, 60 bp, Homo sapiens
ctcattccatcttcattcatgactccagacagaacaacgactatcgtctattccacaaga

SEQ ID NO: 767290 - DNA, 74 bp, Homo sapiens
aacgacaggacgttggggcggcctggctccctcaggttcttctgtgtggcagttcagaatgatggatcaagcta

SEQ ID NO: 767291 - DNA, 82 bp, Homo sapiens
gtgtgattagcttcgcagtctggaaagctttaggagttcacagtactggtgtcgttcagtatttctacattgaagactggca

SEQ ID NO: 767292 - DNA, 82 bp, Homo sapiens
gttcgagaacgaccccgagacggcccggcgcccgcctgcccgcaccctcgtcctcacagacgccacagccatggccatgatg

SEQ ID NO: 767293 - DNA, 100 bp, Homo sapiens
ctctgagaaagtgagccagaaacatgctgagcctttgacaggctggagcattggatttgctaaaggagcttaagaatattcctatgaccctggaattact

SEQ ID NO: 767294 - DNA, 100 bp, Homo sapiens
tatctgacaagagcatcaaccctctggaatgtatcctgtcaggtataatgtcagtgaatggcaagaaagttcttcatatggatcgaaacccttactacgg

SEQ ID NO: 767295 - DNA, 83 bp, Homo sapiens
cctttcgtggctcactccctttcctctgctgccgctcggtcacgcttggtcgtcaaagtcctacattttagctttcagtgctg

SEQ ID NO: 767296 - DNA, 82 bp, Homo sapiens
aaggagtggataagctttggacacaggtttgcactggtcccttcaccgatgttgtcaccaccaacctaaagcttggcaaccc

SEQ ID NO: 767297 - DNA, 100 bp, Homo sapiens
ggctctgctggatgcggccgccttctactgcgagaaggagaacctcttcatcctggaggaggagcagcggatcaggctgatgccatggacaatattacca

SEQ ID NO: 767298 - DNA, 83 bp, Homo sapiens
cgctccgtggccttagctgtgctcgcgctactctctctttctggcctggaggctatccagcccaacagctccctgctcggagg

SEQ ID NO: 767299 - DNA, 74 bp, Homo sapiens
cttccggagcttctcagaagacagagggttttcttttgagctccagtgatccacaagctcagaaatacatcgcg

SEQ ID NO: 767300 - DNA, 90 bp, Homo sapiens
gctacgcctcgccatccaggagatggtctcgctcacctcgccctcagcccccgcctcctcccgcactctccggggaaccttgtacaacac

SEQ ID NO: 767301 - DNA, 90 bp, Homo sapiens
ccggagcatcccccagccagatggagaagcagccagactgccttccgggtcactgccatggaggagccgcagtcagatcctagcgtcgag

SEQ ID NO: 767302 - DNA, 75 bp, Homo sapiens
gcacgcggcgatatggaagaggagggcaagaagggcaagaaggacactcatgaggaccatgatacttccactgag

SEQ ID NO: 767303 - DNA, 82 bp, Homo sapiens
cctgccgtccttctccactttcgccagcccgtgccgcgagcgcggcctgcaggagccacgacgtttttccaccacatcaacc

SEQ ID NO: 767304 - DNA, 49 bp, Homo sapiens
ctgttgtgaacagggatgtacctaataaatgggcattcaccgcttggcg

SEQ ID NO: 767305 - DNA, 100 bp, Homo sapiens
acaccccctccgtgggtgtgtgcagtccagagcgtgagtccattcacatcctgagtgttgatgagaagaacaagttgggagccaagattatcaaagcaga

SEQ ID NO: 767306 - DNA, 75 bp, Homo sapiens
cttcctctctggacgcaggaaccctctctgacaccacagcatcaggcgtccgagctgggccacagcctgaacgag

SEQ ID NO: 767307 - DNA, 82 bp, Homo sapiens
tgtcgggttattcgagtgaccgagaccgcggccgggaccgaggcgcccggcagaatggcgggaaggtgaggcacaagcggca

SEQ ID NO: 767308 - DNA, 74 bp, Homo sapiens
tctgacagtgcttgcaggatctctcctggacaaatcaatcaggtggatgggaagagagtcccaagggatgcagg

SEQ ID NO: 767309 - DNA, 49 bp, Homo sapiens
gccacagggatcctaaaatctgtgaaaatggcattacggacatcaggac

SEQ ID NO: 767310 - DNA, 100 bp, Homo sapiens
cgaacagtggcagcgcgacctggccagctgccgcgactgggaggagcgccggaacgccgaggcccaggttgagaacttgttgcttagtaaccaagggacc

SEQ ID NO: 767311 - DNA, 51 bp, Homo sapiens
gcatggattgggagatactggaggctgcctaccacaaggactttagcttac

SEQ ID NO: 767312 - DNA, 97 bp, Homo sapiens
tatcttcgccatcgccagcatcgccaacccggactggatcaacaccggggagtctgcgggtcactggaaggactgagcgcattcaggagcctggagg

SEQ ID NO: 767313 - DNA, 100 bp, Homo sapiens
cacggagtgtatgaccacaaacagccatcaaggagcatggggaagtgattgactgtgtgcaggagctgagccactccgtgaacaagctgtttggtctggc

SEQ ID NO: 767314 - DNA, 75 bp, Homo sapiens
caggaactgtcggaacagaaccaaaggctattggatcagctcagcaggttaagtgggcagaccaacatccacctc

SEQ ID NO: 767315 - DNA, 75 bp, Homo sapiens
atgtaaatgtcagtggaaaggagagctaccatcactaagctgcgttcctttgcctgcaacaggggtcaagatgag

SEQ ID NO: 767316 - DNA, 51 bp, Homo sapiens
gcaaggctgagggacgagaacgagtttgtggggacattcatggacaattct

SEQ ID NO: 767317 - DNA, 78 bp, Homo sapiens
actggagaaatggttggcccgggaaaagatatagccagtaccaacgtatgctgagcacgctgtctcaatgtgaatttt

SEQ ID NO: 767318 - DNA, 100 bp, Homo sapiens
attggaactttgtagaagaactgctgaaaaagtccatcagtgttcagaattcaaagaagctttttcactatttgacaaagatggtgatggaactataaca

SEQ ID NO: 767319 - DNA, 100 bp, Homo sapiens
ccagagtccgcggccggggcgcgggagtacatggactggacctgcctggagcccagcccagagcatctcctcagtgctcatctctatccagtccctgatg

SEQ ID NO: 767320 - DNA, 98 bp, Homo sapiens
aattgctgaagttgaagtacaaccagcatatcaatagattaccagaagcccagttggtgaccaagaatatggcccaggtgaccaaagccctggacaag

SEQ ID NO: 767321 - DNA, 82 bp, Homo sapiens
gtagcgtccatcctgccagagactgtactgcttaggggaactgtggctgcaccatctgtcttcatcttcccgccatctgatg

SEQ ID NO: 767322 - DNA, 80 bp, Homo sapiens
gtctttgttccctgcagccctcccacggccaagtcctgtatctgccatgtctgtggcgtccacctcaacaggctgcattc

SEQ ID NO: 767323 - DNA, 51 bp, Homo sapiens
gaggagggtcacttcccgtgaaaaggtggagataagtaattaacatttcga

SEQ ID NO: 767324 - DNA, 51 bp, Homo sapiens
ggaggaggtggcggcggcgggaagatgtcgcaatggaagaagagatcgccg

SEQ ID NO: 767325 - DNA, 80 bp, Homo sapiens
gggatctcggtgctgcagacggcgagacctcctgcacaggtgaaaggtgtagcagtcactcggcctacacccacagcatc

SEQ ID NO: 767326 - DNA, 83 bp, Homo sapiens
tctcagctggtgaagacatgacgaccctggactccaacaacaacacagcttctctccaagataaaatggcaaacccaaaagag

SEQ ID NO: 767327 - DNA, 100 bp, Homo sapiens
agtcccacttccgaaaccacaagtttgccgatctcatcctgtttgggctcagtaatcagctggctgtgacattccgggaagagaacaccatcgccttccg

SEQ ID NO: 767328 - DNA, 100 bp, Homo sapiens
tgtgctgctgttcctgcaggacaaggcatgttatttgaaagcaattgagacgcaaccgaactttgcagtagcttggagtaatcttggctgtgttttcaat

SEQ ID NO: 767329 - DNA, 98 bp, Homo sapiens
gtcgaagaggagggggctgcggtggccaccgcggcggagcccgagcttcagtatcagacacagcacagcagccatctgaagagcaaagcaagtctctt

SEQ ID NO: 767330 - DNA, 51 bp, Homo sapiens
acctggcacttatgtcctccctggttagcaaaaggtgtgacaagcaacctg

SEQ ID NO: 767331 - DNA, 100 bp, Homo sapiens
gcgttctcctccgccgctcctccgggcttgccctggagccctcagtgaggattatgggaagaactttaaggatattacagatctcatcaataacaccttt

SEQ ID NO: 767332 - DNA, 90 bp, Homo sapiens
tacagggtttcagggcagaaagcagggtcaaggaggaggtcaagttggcctgaatggacctctccagctctggcttcctgctgagtccct

SEQ ID NO: 767333 - DNA, 75 bp, Homo sapiens
cgcagtctcgactttcctgggctcagagaaacagcacccaggactatcttccaaagagttctggatatcctaaag

SEQ ID NO: 767334 - DNA, 99 bp, Homo sapiens
aggctgcgagtaaaagaagccgattccagttcctgtatgatgttcaggtggagccgccaccaaaatgcagattttcgtgaaaacccttacggggaagac

SEQ ID NO: 767335 - DNA, 75 bp, Homo sapiens
cggagcataggaggaaaattcatcatctggccagaagcctgtcttagatgttcatgcagaactagacagaattac

SEQ ID NO: 767336 - DNA, 82 bp, Homo sapiens
catccgcaggctggagtggcagaagcagacttcagagtctgtagatggacggcagatccgagtagaccaggcaggcaagtcg

SEQ ID NO: 767337 - DNA, 101 bp, Homo sapiens
gaacatggcggatcggctcacgcagcttcaggacgctgtgaattcgatgaggagactgtccttcctgtttcgcagatgaggaaactgaggcttagagaagt

SEQ ID NO: 767338 - DNA, 75 bp, Homo sapiens
ggttggcgacggcagcccgagggcggcgcaaggcctgaggcccagcacaggtggagattctggacgcaaagacaa

SEQ ID NO: 767339 - DNA, 75 bp, Homo sapiens
atttcctctcgggaagagatagatcatgcagagtattacctttacaagaacttataatcaaaactgtattaagct

SEQ ID NO: 767340 - DNA, 75 bp, Homo sapiens
cgcaaagcttcttcatgagggaatctaagactttgggggcattgggtggtggctacctgcattggggccactttg

SEQ ID NO: 767341 - DNA, 73 bp, Homo sapiens
tcttaaaattctgtctcaacagccagtagaaacggaggaagttaaagctgatacattcctgtgggtcaactat

SEQ ID NO: 767342 - DNA, 100 bp, Homo sapiens
cctgagccccggaagggtgatgtggctgcggcatcgccggcctcgctatggaccagtccaccatgcctgaagtcaaagacctctcagaagccttgccaga

SEQ ID NO: 767343 - DNA, 101 bp, Homo sapiens
gtcccggccaccaagattgaaattaccgtgtcctgccgccgcttacaaacacgcagatggcaagaagattgatggcaggagggtccttgtggacgtggaga

SEQ ID NO: 767344 - DNA, 71 bp, Homo sapiens
gaagagcagcacctgcggactcgtgacatcatcaatgtgtccaacagggcgcaccctacgacgcgcacacc

SEQ ID NO: 767345 - DNA, 95 bp, Homo sapiens
gctggaaaatcagtgctgcctgtgggaagcccgccctggttggagctgcagtttcctaccagtttggttcatcatgcctagtggcgtataagaag

SEQ ID NO: 767346 - DNA, 50 bp, Homo sapiens
ccagttctggagctactggaatagatgcagatggaaacctgtgtcgaagt

SEQ ID NO: 767347 - DNA, 100 bp, Homo sapiens
gtttcctgctggctttagtttcctctggtaacttgggaatcaattgacatctatggaacttctgttatggttcaggtgaatatgtttacaaaccaaggaa

SEQ ID NO: 767348 - DNA, 100 bp, Homo sapiens
taccccgggcaaaggggagcccccagcacccaaggacccatacaatgtactggccccaaagggagcttcaggcaccagggaagaccctaatttagtcccc

SEQ ID NO: 767349 - DNA, 100 bp, Homo sapiens
ctgaatttgagaagtttgtgaactcaactggctatttgacagagcacgttcacgtccatgttcttcccaggaaggctggagactttcacaggaatgacag

SEQ ID NO: 767350 - DNA, 100 bp, Homo sapiens
gtctgccacacgctgatggtgcagcaccgcatgatggtacccaaagtcaggtttctaagcatgaattgaggaacagaagaagcagagcagatgatcggag

SEQ ID NO: 767351 - DNA, 75 bp, Homo sapiens
ctcgtgcccgtcttattgatcctggctttggaatatataaggttgatgctatgaaactgggagtaaaggaaatga

SEQ ID NO: 767352 - DNA, 82 bp, Homo sapiens
ttgattttggttctggtgccctgcttcatgatgaaccctacactgactttgatgagatgccctgtatccaagcccaatatgg

SEQ ID NO: 767353 - DNA, 100 bp, Homo sapiens
gcgctatgaagacacgcttcttctggaagaccagccaacagggcagcccaatggatccaatggtgatgaagagacctcagttgtatggcatgggcagtaa

SEQ ID NO: 767354 - DNA, 101 bp, Homo sapiens
aatgtcatctgtgaatactgcaatactatactcatcagagaacaggaggagcaaatggacagtgacattgtcattcctcaagatgtcacggaagactgtgg

SEQ ID NO: 767355 - DNA, 100 bp, Homo sapiens
gtcacttccgactagtggagtttttagccttttaacattcaaggattaggtccaaactgaagacggtacatgagcggatccccttggctggactgagcaa

SEQ ID NO: 767356 - DNA, 98 bp, Homo sapiens
agagggcggcgacggtggtggtgactgagcggagcccggtgacaggatgttgccaccttccagagaagaggtacgagatgacaagacaaccataaagt

SEQ ID NO: 767357 - DNA, 50 bp, Homo sapiens
ctgatagttgttccttgtgcagaaggtactgagcagtacagtgaatacac

SEQ ID NO: 767358 - DNA, 90 bp, Homo sapiens
taagatgctgccgactctgggcggcgaggaaggcgtctcccgggttggctcaaaaacagaagttgctgagtgcaaggagaaattcgccgc

SEQ ID NO: 767359 - DNA, 51 bp, Homo sapiens
cagtgaaggctcggggctgaagcgggtcttaaagaaagtgcagaagagatg

SEQ ID NO: 767360 - DNA, 100 bp, Homo sapiens
ggcctgcgcttgtagagactgcatccccgagacgatggcggagggagataatcgcagcaccaacctgctgatgcggaaaacgccatgcggtacataaatg

SEQ ID NO: 767361 - DNA, 89 bp, Homo sapiens
cagtctgggggcgctggcggcctgcgcagccacctcaaggggagagaccattctaacacaggtaccgtccagacagtgcctctgagaaa

SEQ ID NO: 767362 - DNA, 74 bp, Homo sapiens
actacatcccgcagtacaagaactggagaggttacctgtcctgctgccgattcctggatgacaatcagatcgtc

SEQ ID NO: 767363 - DNA, 90 bp, Homo sapiens
acagagcgacgagcaagaagcagcccaaagtcgaatgattcagacttgcaaggttatgaagacagtatggagtttccagaccatagtaga

SEQ ID NO: 767364 - DNA, 116 bp, Homo sapiens
accacatcaaagacagctttcacagtttgcgggactcagtcccatcactccaaggagagaaggaatgaatctgaagtctgctgcagtaaaacacagaaggctttaaaatgttttct

SEQ ID NO: 767365 - DNA, 74 bp, Homo sapiens
ctggatcggattttggaggcattgaagctgctgctgagcccgggaggcttttatcttgagaacatggtgtctgg

SEQ ID NO: 767366 - DNA, 82 bp, Homo sapiens
cagagagggaagagattcagccagcacactcctcgcgagcaaggatatacacatgacaccatccactgacttctataagaaa

SEQ ID NO: 767367 - DNA, 90 bp, Homo sapiens
tgtagctgcatatgcccattttgctgtgtgttacaggcccctggccccaacatggcccgtcgctctcagagctcctcgcagggggacaac

SEQ ID NO: 767368 - DNA, 80 bp, Homo sapiens
gcagcgtgcgttcagccctggggtgactgccaacagccagcccaatgtcgaatccagaaatgcaccacggacttcgtgtc

SEQ ID NO: 767369 - DNA, 75 bp, Homo sapiens
cgcagctgcgatggccgtggccgtggggagaccgtctattaactgctgaagtactgatcgagttctgcatttctt

SEQ ID NO: 767370 - DNA, 83 bp, Homo sapiens
tccggaattcatggggtgaaccatggggtgagaaggactggcagaaatacgagactgctcggcggctgaaaaaatgtgtggac

SEQ ID NO: 767371 - DNA, 100 bp, Homo sapiens
agagcgacccgtggccttgtgtttcaggtttggtgcacctcgatttggaggaagtagggcagggcccttatctggaaagaagtttggaaaccctggggag

SEQ ID NO: 767372 - DNA, 97 bp, Homo sapiens
ggcggtctgtcggcggagtcgccctcgggggctgtcagctcagcaaaacccagcagctcagattcctgccaggcagcgggagattgaaatgaaccga

SEQ ID NO: 767373 - DNA, 100 bp, Homo sapiens
tggagaattctggtcactcagtgacacacacaactcgggcctccccagcgacagaaaatgtttataggaggccttagctgggacactacaaagaaagatc

SEQ ID NO: 767374 - DNA, 50 bp, Homo sapiens
actgcaacctccacctcccgggttcaagcgattctcctgcttcagcctcc

SEQ ID NO: 767375 - DNA, 74 bp, Homo sapiens
gagattccctgggcctgcaggaagcccttccgcggaccgaaagtggccacagatgtctttaattccaaaaacct

SEQ ID NO: 767376 - DNA, 90 bp, Homo sapiens
atcaaaacaagctctttatgagaatggcatctaagatgaaatacctgtcacaaagagaacattaaaaataaaacaagagtcttctgaaga

SEQ ID NO: 767377 - DNA, 51 bp, Homo sapiens
cataggtgacctgatgagcagaaatacggaggaagacagtcctgggccttc

SEQ ID NO: 767378 - DNA, 74 bp, Homo sapiens
ggaaacctttccaacacagatgtccaagctgccaaacgtaaaattcatcctgatcagaaaaatattaatgccta

SEQ ID NO: 767379 - DNA, 100 bp, Homo sapiens
ctcagcttcggagaatggagtcttccatcaatcatatctcacagagatcatgatgcagccgtccttttggatttctttttaataatgtgtgacccttcac

SEQ ID NO: 767380 - DNA, 90 bp, Homo sapiens
gtccaagtcccggaagatcgcgatcctgggctaccggtctgtggagtattgggaaagggtcgttgtggtgcatagacccagagtatagac

SEQ ID NO: 767381 - DNA, 50 bp, Homo sapiens
tgtgtacttgctgtagatgaaaatgatcttagcaaagcaatgtctcaaga

SEQ ID NO: 767382 - DNA, 74 bp, Homo sapiens
ggccggcagggtggacggtgggctcccattcaaactcctccccacgacactctgaagcagcgacggcacagcgg

SEQ ID NO: 767383 - DNA, 100 bp, Homo sapiens
agaaacaagccctttaagtttatgctaggcaagcaggaggtgatccgaggctgggaagaaggggttgcccagggagttcccattagacttgaagttgggc

SEQ ID NO: 767384 - DNA, 74 bp, Homo sapiens
gagagatttttgggacctgaaatcttttttcatccagaggttgaaaattggtgtcctcatttaccttggagagc

SEQ ID NO: 767385 - DNA, 97 bp, Homo sapiens
ttgatattattgaaaaactcaggatatatcctcttagagggagtcaaaagatgccggtggtggtgtgcacattgagccccggtatagacagttcccc

SEQ ID NO: 767386 - DNA, 88 bp, Homo sapiens
ttgggcttcatcatggaggactacctgcagggttgtcgagctgctctgcagctccccgaagtgcataccaacagctgtgacaacatct

SEQ ID NO: 767387 - DNA, 74 bp, Homo sapiens
cacaacaaaacattcatggagggggaagttccgaggcctcatcctgctgctgaccttcctaatttacgcctgct

SEQ ID NO: 767388 - DNA, 52 bp, Homo sapiens
ttcctgcatcttttgcgctctcaagtgtcagagatggctttggattccccgt

SEQ ID NO: 767389 - DNA, 74 bp, Homo sapiens
gtcctggctcttgccctcatcctggttctggaatcctcagttcaagatgcctgctctgtgcctgtatctgagat

SEQ ID NO: 767390 - DNA, 97 bp, Homo sapiens
gagaaaacgtgtcatcagtgcatttctaaaatcgccagcaatgcatgccaatgaagatgtggaaagaatgttactaggaaacaagtgtgatatggac

SEQ ID NO: 767391 - DNA, 75 bp, Homo sapiens
acgacccggagcacccgacccctgacttgagatcttcttagcccagagagcagtggagttgagtgaggaggcaga

SEQ ID NO: 767392 - DNA, 112 bp, Homo sapiens
ttcagcactcagaatgctccaggcagtgtaatctcattccatcttcattcatgactccagacagagcttgatgcattagatgccaatgatgagttgactcctttgggacgaa

SEQ ID NO: 767393 - DNA, 95 bp, Homo sapiens
ggaggcatgcttgttcctccatcatcaagatgtgtcgtgactacccccagcttgtgctggttctgtacagagtaatgagatgtgtgacggctgca

SEQ ID NO: 767394 - DNA, 100 bp, Homo sapiens
ctccattgcttctaggacctctcagaacacagtggacagtgacaagcatgcagcagattggaataaatatgatgaccgattgatgaaagcagcagaaagg

SEQ ID NO: 767395 - DNA, 76 bp, Homo sapiens
gtttgctcagaattctcggggcggcacagttccagggaatacatggtttacaggaagcatacctacatgaggcttg

SEQ ID NO: 767396 - DNA, 75 bp, Homo sapiens
cggagctgacggtggaggttcgcggctctaacggggctttctacaaggtatatacctccggataagagggaagaa

SEQ ID NO: 767397 - DNA, 90 bp, Homo sapiens
tacaccctcacagtttgctctgctcttccaacaccagtggaagatgatcacatcccagggtggagccagccatcctgagacgtccgtaca

SEQ ID NO: 767398 - DNA, 100 bp, Homo sapiens
caacatcctgctcctgctcatggacgacgtgtcccaccggccttccgggttccagcgccaggcctggtgcctgccccaggaggatgagcatttgcattgc

SEQ ID NO: 767399 - DNA, 100 bp, Homo sapiens
agtggcttccacccagacccccggcagaaggccctgtaccgccggcttgccacagtccacatgtcccggaggacagaagatgagcctgtcggtcctggag

SEQ ID NO: 767400 - DNA, 83 bp, Homo sapiens
aagaatttcaagaacaaaggccgcgacttggaggtttccaatacttatctacaggaatcgccatgaccccagctctgagggag

SEQ ID NO: 767401 - DNA, 108 bp, Homo sapiens
tatcctcggtgctgtggtgcagagctagttcctctccagctcagccgcgtagagttgtctgctggttctcagcttgaagaagattctgcagtccttattgatcctttt

SEQ ID NO: 767402 - DNA, 82 bp, Homo sapiens
tggtgaagctgccgttctttaatatgctggatgagctgctgaagcccaccgaattagcccgcggcgccatggctcacgtcgg

SEQ ID NO: 767403 - DNA, 97 bp, Homo sapiens
ctgaggtgtatcccttagaaataagctggtaaatcaaagtgaaaaggagagcttgttgaaggaaagagatcacattttgtcaactctgggtgagaca

SEQ ID NO: 767404 - DNA, 51 bp, Homo sapiens
tgtggcgctggatccggcagcagctgtcaaatttctggaagtcatcaagcc

SEQ ID NO: 767405 - DNA, 97 bp, Homo sapiens
ctttttggagggaaagaaagagccctggactgtgaagagtgaggagaccatagctgcacagccagtatgcatacttcaggatgggaattaagcatcc

SEQ ID NO: 767406 - DNA, 75 bp, Homo sapiens
gaagtgatgctggaaaatctcaggaatctggtctcattggctgcctgtggaggaaccgattgtgtccacagatga

SEQ ID NO: 767407 - DNA, 51 bp, Homo sapiens
agcgggcggcgcgggggagatgattttaccaaatgttgcaagaactctgga

SEQ ID NO: 767408 - DNA, 76 bp, Homo sapiens
ggaatcctttagggaagttattgctgagaacctcttgctggatgccgaggccaacatcaagattgctgactttggc

SEQ ID NO: 767409 - DNA, 75 bp, Homo sapiens
agcgctggaattatgggcgtgagccactgtgcccagactcctcagacccctgcacaattgagagaaaagcccgaa

SEQ ID NO: 767410 - DNA, 90 bp, Homo sapiens
ttgctaaccaaaaagcaggatcaagctgctcgaaaaataatgaggtttcttcgccgctgtcgccacagtgttcagcctcacaggcctaca

SEQ ID NO: 767411 - DNA, 73 bp, Homo sapiens
acacgtcctcgctgctccagttctgcaacggcatcccgggcccaaatcctagacaaagccacagaatatatcc

SEQ ID NO: 767412 - DNA, 100 bp, Homo sapiens
ccagaattaaaaagctccacaaattgctcagttacaatctgcccttggaactggaaaacctgagccgcctggcctgcctagcaggcgagctccgttgcac

SEQ ID NO: 767413 - DNA, 73 bp, Homo sapiens
tcgattcagctattggaaagtttttttaatgtggttggaacaactgaggatctcccagccatccagccccggc

SEQ ID NO: 767414 - DNA, 50 bp, Homo sapiens
cttttgacaactccaatgttgactgttgcacagagcattgaggatcacca

SEQ ID NO: 767415 - DNA, 96 bp, Homo sapiens
tggcctgcgctggaggaccttgtcctgcaggactcagctgcagcacgtggccgaggagctccagcatctgctgcagtggctgatgggtgctcccgc

SEQ ID NO: 767416 - DNA, 100 bp, Homo sapiens
tgccagacttggtattcacaccattaagttgggcactgccaccctctcgtggtccaagcagcacatgagcagaaccaggtgctcaacaccaacagccggt

SEQ ID NO: 767417 - DNA, 89 bp, Homo sapiens
gaagggcatggcatctttgtgcgccagtcccagggactcggagatcatgcagcagaagcagaaaaaggcaaacgagaagaaggaggaac

SEQ ID NO: 767418 - DNA, 100 bp, Homo sapiens
gacaatgtagaggatgacttctctaatcagttacgtgctgtccccggcataggtccatctctgcagaagccatttcaggagtacctggaggctcaacggc

SEQ ID NO: 767419 - DNA, 97 bp, Homo sapiens
ggaggtggagttgagcgtcctgcggctgggcctccgggaggcagaagagaagtccctgctggtaacctggatgaggacatcattgcagaagagaaca

SEQ ID NO: 767420 - DNA, 100 bp, Homo sapiens
gggagctggacggcgagcgcgagcggcgcgagaaaggagttgaccacatttggccatttcccagaagggccccaccccaagggtgagtggccaatgggga

SEQ ID NO: 767421 - DNA, 89 bp, Homo sapiens
tgtgatggtggagtaggaggcaggtctccgcggttgaagatgaaatccactgaggagggaagtccagcaccctgtgtgccagtccagaa

SEQ ID NO: 767422 - DNA, 75 bp, Homo sapiens
cttccagtacacagacgagcatggggaagggtttggtgcaattctccattaatgaagataacatttgaattcccc

SEQ ID NO: 767423 - DNA, 90 bp, Homo sapiens
agactcctgaccctcagaatgtcgtggcattcctggtggctttccatcagaacaagcagctcatcggtgacagggggctgcttccctgca

SEQ ID NO: 767424 - DNA, 75 bp, Homo sapiens
gcggggccttccacaccccctccgtgggtgtgtggtgatttgatgaaggctgctgcaggagagttcgcagatgat

SEQ ID NO: 767425 - DNA, 99 bp, Homo sapiens
cttccacatcccccgggttacctccctgaagctgtagggccttgtgggaataggatgagtgataatccacccagaatggaagtgtgtccttactgtaag

SEQ ID NO: 767426 - DNA, 100 bp, Homo sapiens
atttgttggggagaagaggattggaggtgtcagtgttaaaggaacctctacaacgaaggtgaagccacggaagataaggatggcttaaattccttggtcc

SEQ ID NO: 767427 - DNA, 51 bp, Homo sapiens
caggaggaaaagctttctcaggaaaaaggaaacagtgacatttaaggatgt

SEQ ID NO: 767428 - DNA, 75 bp, Homo sapiens
gcggctttgaccgagaggctgctggagctcgtgtttggacgcctctagccggcccggtccttggactgaaagaat

SEQ ID NO: 767429 - DNA, 98 bp, Homo sapiens
gattctgcttcccctgggacagcactgagcgagtgtggagagaggtacagccctcggcctacaagctctttagagcctggagaaagttcttgtggaat

SEQ ID NO: 767430 - DNA, 90 bp, Homo sapiens
aggtagtcggacctttcccgctggcgcgcagcctcagctagtgcctgatggcgaaaccccagaagatgaaaatccaacagaggaaggagc

SEQ ID NO: 767431 - DNA, 82 bp, Homo sapiens
ctggccgataaatccctggctactagaactgaccaggggaacgcccttttgcttgtgactggcagggctgcgacaagaagtt

SEQ ID NO: 767432 - DNA, 82 bp, Homo sapiens
tgatattgaagcaatgcttgaggctccttacaagaaggatcttttgaagaagctattcctgcgaggaagctgaagaattttt

SEQ ID NO: 767433 - DNA, 75 bp, Homo sapiens
ggtccgggctcctggacttcgcctttcccgagccctggaggtggggagaaaaggaatgctgtctctgcaatttga

SEQ ID NO: 767434 - DNA, 83 bp, Homo sapiens
atgaaattaaagatgcatgctgatggcgataagtcattaccacagagatatagatcagctatcaggaagggacttctgccatt

SEQ ID NO: 767435 - DNA, 51 bp, Homo sapiens
caccttgatccagcggacttacggttcaaatctgaacatcaatgatgtact

SEQ ID NO: 767436 - DNA, 74 bp, Homo sapiens
ctgcggcggagactgcatcaggctctcgactgtgagctgcttgtccccatcctgcggccgtcctggggacacag

SEQ ID NO: 767437 - DNA, 51 bp, Homo sapiens
caccaagtcacatgacaagcacaatgcttcccagactgtgtatgtgaagat

SEQ ID NO: 767438 - DNA, 80 bp, Homo sapiens
tgacgcatacggcaggatcgggattgagaggctgaaaaagtgaggaagaggatggagatgaagatgaggaagctgagtca

SEQ ID NO: 767439 - DNA, 100 bp, Homo sapiens
caactctaccatgtgctagagacagccaacaaaatattcatggttcttgaggccctgttaaacctggcagagcgactgggagaggcaaagcctcgtggac

SEQ ID NO: 767440 - DNA, 100 bp, Homo sapiens
tttgatgaggtggatctgacagatgccagcgtagctgaatccagtaccaaaaacgtcaacaacagttttacggtaaacactacacgtgaagagtggtgaa

SEQ ID NO: 767441 - DNA, 82 bp, Homo sapiens
ccctactacaggactgcggacaagggctggcaggtaactaggatttctacctcaaccgcgagacctatgcaaggacggtgtg

SEQ ID NO: 767442 - DNA, 113 bp, Homo sapiens
cccagacctgccttccggggacagccagccctcgctggaccagaccatggccgcggccttcgatcatgatgctgccgccaccgccgccaccacggagcgagaagcccagatag

SEQ ID NO: 767443 - DNA, 96 bp, Homo sapiens
cgccgccgtcgtctcggtagcagccttcgccacgccggggtcttcaggagagtccatcccgatccggctcttcctggccgggtatgagctcacgcc

SEQ ID NO: 767444 - DNA, 118 bp, Homo sapiens
ctcaatatctgtcttcggtggactccttcggcagtccacccaccgccgccgcctcccaggttttaaaatcaaagatgggaaaatcggagaaaattgcccttccccatggccagcttgt

SEQ ID NO: 767445 - DNA, 73 bp, Homo sapiens
cagtgattctacatctcaagctcatattttgaagtgtttacgggagttccaggaagcgctcgcccctggccga

SEQ ID NO: 767446 - DNA, 101 bp, Homo sapiens
gggaagcagatctgaggacatctctgtgccaggccagaaaccgcccacctgcagcgcccgggggctggagaaggccaggcagcagctgcaggaggagctcc

SEQ ID NO: 767447 - DNA, 100 bp, Homo sapiens
attcaaaagatcttcaggatggagaaagtggaagatgcgaagattgcaattctcacatgtccatttgaaccacccaaaccaaaaacaaagcataagctgg

SEQ ID NO: 767448 - DNA, 75 bp, Homo sapiens
cagtacaagcacttgatgttatcacaagacaccttccctccatgagcaaaccagtccagctacgggggcccagcc

SEQ ID NO: 767449 - DNA, 75 bp, Homo sapiens
ccaccgaatcgctgtcacgccggcaggtctccaattgagaaacatggcactgtttttcctgcactctacccacct

SEQ ID NO: 767450 - DNA, 96 bp, Homo sapiens
ctcgctgcctggaccgggtctgagcgcggctgcccaggttgacctttctgcgggagttgatattcactgatggactccaaagaatcattaactcct

SEQ ID NO: 767451 - DNA, 108 bp, Homo sapiens
gacagaaaagacagtgttctgctttcatggagttcacagaagagtcgaggagtggactgttcatcaccattcatgacaaaggtcatcttgcaacaatgctgaattctt

SEQ ID NO: 767452 - DNA, 100 bp, Homo sapiens
tcatccccttccagttcgcctggccgcttcggaaccaaaaagaagcttcccagagccggggccaggagccccaagcgccctctagcagcaaacacagaag

SEQ ID NO: 767453 - DNA, 90 bp, Homo sapiens
gatcgctgcaacctttagactaatgactgtccgaaacatcgcctccatctgtaatatggttccctttctactatgagatcaagatggcct

SEQ ID NO: 767454 - DNA, 82 bp, Homo sapiens
tggacctggtcagagcgcggatggccgtaaccccgaaggaaatgttgtaaagaagaaagttctaccctttctgtcaaaatga

SEQ ID NO: 767455 - DNA, 100 bp, Homo sapiens
ctcctacctttgtgaatatgactatgtgaagagggtatattacctctctctggaattttacatgggccgaacattacagaacaccatgatcaacctcggt

SEQ ID NO: 767456 - DNA, 100 bp, Homo sapiens
gacacctttgactcttctactgtctcagaccttagcttatgttcctgaggaagaattgaaggcagcagaaatagatgaagagcacgtggaggatgacggg

SEQ ID NO: 767457 - DNA, 82 bp, Homo sapiens
aacgaggcaaggagctaaagcagcgtgcgttcagccctggggatgctgtatgattatgttgaaaggaaacgaaaagaaaatt

SEQ ID NO: 767458 - DNA, 50 bp, Homo sapiens
aaggaaaaagcagtaaagccagaggaaggccattctcaagcacaacctgg

SEQ ID NO: 767459 - DNA, 50 bp, Homo sapiens
gagagcccgtccgacagcgctgagcctctgaagagccaatccattcagga

SEQ ID NO: 767460 - DNA, 102 bp, Homo sapiens
gtgaggcctccccaaccacatggaactcagcccgtggagtctgaagcaatgcactgcagcaaccccaagagtggagttgtgctggctacagtggcccgaggt

SEQ ID NO: 767461 - DNA, 82 bp, Homo sapiens
caacgcttgttatgttttcatcacttctctccagaaggtctgtgacaagcagggaacaaggcaacggacggcgcaacccagc

SEQ ID NO: 767462 - DNA, 100 bp, Homo sapiens
cacccggcggctgatcaccaagccgcagaacctgaatgacgcctacggaccccccagcaacttcctcgagatcgatgatcccaaaatggctgggcgaaaa

SEQ ID NO: 767463 - DNA, 75 bp, Homo sapiens
gtgaaacaaactcatattgatattaattccaaaatcagggatcatagacggtatttctatgtaaacgaacagtcg

SEQ ID NO: 767464 - DNA, 90 bp, Homo sapiens
gcgcctttcgccgtggacgccgaccgtccgggacgagcgctcctggttgcagccagaatgcatgacttcaggaggactgtgaaggaggtc

SEQ ID NO: 767465 - DNA, 99 bp, Homo sapiens
attcctatgtacaaaattgccaccaaaaacgatgttgatgtccaaattgaccaggagtcctacctgcctgaagacatgatgtgggctctcttgatgaga

SEQ ID NO: 767466 - DNA, 83 bp, Homo sapiens
caaatggttctgtgcctcctatctatgtgcctcctggatatgccccacagagactatccttaaataacgacatatttgaggcg

SEQ ID NO: 767467 - DNA, 82 bp, Homo sapiens
ctttgccccaatcttgtgtgggcactgaagggggactacaggttcgagagttatgcaatggtctctgcaagatggtttattc

SEQ ID NO: 767468 - DNA, 75 bp, Homo sapiens
gaggagtgcgtcaaggactccccgcgcttcaggtgtcgtgaaaactacccctaaaagccaaaatgggaaaggaaa

SEQ ID NO: 767469 - DNA, 100 bp, Homo sapiens
ttgccaatctcccaaatcaagtatacagaaaatcggtgaagagaggttttgaattcacgcttatggtagtggtacaaatggtgatgatcatcaggtcaag

SEQ ID NO: 767470 - DNA, 90 bp, Homo sapiens
ctaagtcagagacatcaaaacctggaccttctggattacaggccaaattagcaaatttggcaatgtggaggctccttggagattgttact

SEQ ID NO: 767471 - DNA, 90 bp, Homo sapiens
tcatcgacatcagtgaagaagatcagccatgaaccagagaatcagtcagagtgctccagtgaaacagccaccacccctggctccccagag

SEQ ID NO: 767472 - DNA, 75 bp, Homo sapiens
cgtagactgagtttcactcccgacggatctttgcttctcacgccagaaggagctgagtctccccagaagaggaag

SEQ ID NO: 767473 - DNA, 82 bp, Homo sapiens
ctgcagagcgcgcagtacctccgcggggatctgatgagcttctttcttctggcatcattaacggaccttttaccatgaatag

SEQ ID NO: 767474 - DNA, 97 bp, Homo sapiens
acaaatatggaactaacagatcttaaattacagttggaaaaggccacccagcaaactctggagatgaacctcaccaacctggttaagcgcaacagcg

SEQ ID NO: 767475 - DNA, 75 bp, Homo sapiens
cgggtggcggctcgggacggaggacgcgctagtctgtcgcctggttgggcccggaaatgggacgtcgcgctttct

SEQ ID NO: 767476 - DNA, 83 bp, Homo sapiens
gttcttcttcggtccagggcggggcagaagggaggatgcagagggagaaacagagatgccctgtatccaagcccaatatggga

SEQ ID NO: 767477 - DNA, 153 bp, Homo sapiens
gcctgggtgaagactctggacctcatgaccatgtatattccagagggggatctaaagagccccagaaattcacaaaggaagaagctgtttgttttgattctgagctagatgaacatattaagtggttccagcaagaatacgtgaaaacagaaa

SEQ ID NO: 767478 - DNA, 90 bp, Homo sapiens
ttcacctttggatttcatcgcttaggtgcagattcactttataggaacagcttcagcttcagtgatgaaaaactgaattctccaacagac

SEQ ID NO: 767479 - DNA, 100 bp, Homo sapiens
gctcattatagcctcaaactcccaggctcaagcaatcctaccatgtcagccttcccagtagctggaactacagattgacatggtacatcgtaacaagtcc

SEQ ID NO: 767480 - DNA, 100 bp, Homo sapiens
ctcccaagtagctgggactacaggcctccccaaagccagtcctgtgtcaccaatcaaaggaaaggaagccgtcagcagagatgaacagaataaccaccaa

SEQ ID NO: 767481 - DNA, 75 bp, Homo sapiens
ttttgacctgtgaagatatacaggatatgggccctcacattttccaaacctgtccatctgctaactattttgact

SEQ ID NO: 767482 - DNA, 116 bp, Homo sapiens
atcaaagacagctttcacagtttgcgggactcagtcccatcactccaaggagagaaggataaggagccccgtggaatcatccctttagagaatctgagtatccgggaagtggagga

SEQ ID NO: 767483 - DNA, 75 bp, Homo sapiens
ctcccacttaccaagtcagagacctttccggacactcggatctttcgaagatggtttggctgccttggagatttg

SEQ ID NO: 767484 - DNA, 96 bp, Homo sapiens
cgaccatggcctcctccgaggtggcgcggcacctgatcctggccaatgtgatcattttcatctgtgggaacctggcgggagcctaccataagcacc

SEQ ID NO: 767485 - DNA, 88 bp, Homo sapiens
tctacctccatcaggaccccagatgtctgacagccctgtgtgacaccaagataagtaacgtgcctgtggcatttgatgatgtctccat

SEQ ID NO: 767486 - DNA, 100 bp, Homo sapiens
gccaatgaagttccaattcaaaagatgtttgaaaagctgggttcggctttccagtttggcagcagcactacaaatttcaacttcacaaacaacagtccat

SEQ ID NO: 767487 - DNA, 75 bp, Homo sapiens
atcgcaacgaacgaaataaaccagaacatcgttcttcaagttactccacaggatccgctgaacataggatgttgc

SEQ ID NO: 767488 - DNA, 72 bp, Homo sapiens
tccggaccctgagactcccctaaaggccagaaagggagtatatgttgctgcagtacgggaattttacttgtc

SEQ ID NO: 767489 - DNA, 101 bp, Homo sapiens
aggttttaaatcaagatttaacattccaacacataaaaattatttatccaacagctcctcccagactgtacaatttgttcaaggaatttttgtagaaaaat

SEQ ID NO: 767490 - DNA, 75 bp, Homo sapiens
gttacatgcccaagaggggacttgatgttaacaaatgtgagattgccagagttaaacatgaagtttctggagaga

SEQ ID NO: 767491 - DNA, 99 bp, Homo sapiens
ggggtcggcccggggctcggagaatgggcaggtgaaacgaatttctgaagatcctccttgcaaatgcccaaacaagttctgtgtggagcggctctccca

SEQ ID NO: 767492 - DNA, 100 bp, Homo sapiens
agccttctgaagtgggaagttggaaaatatagtgctataccaaaagggccaagcctctgttaaagtcattgactttggatcaagctgttatgaacaccag

SEQ ID NO: 767493 - DNA, 75 bp, Homo sapiens
tgaaagcgaagttcaggaagagtgacggttacacatcattttggaatgactgtatatcatctggattacgtggct

SEQ ID NO: 767494 - DNA, 101 bp, Homo sapiens
cacagctggacgtgggatccacacagctcagaacagttggatcttgctcagtctctgtcagaggaagatcccttgctgtgtcagcgtgttatgatgccgtc

SEQ ID NO: 767495 - DNA, 102 bp, Homo sapiens
gcttggcccttcatggaacctgtgaagagaacagaagctccaggatattatgaagttataaggttccccatgggtgaacctgatgcagcacatgaagctcag

SEQ ID NO: 767496 - DNA, 75 bp, Homo sapiens
cagcaagcaaatcagcagctgtcaagggcagcagattatcaggtgtatgagtttagagtcaaagaatctagcatc

SEQ ID NO: 767497 - DNA, 82 bp, Homo sapiens
agcgagctgagtggttgtgtggtcgcgtctcggaaaccggtagcgcttgcagcatgatggcgattttgctgacagctgccaa

SEQ ID NO: 767498 - DNA, 82 bp, Homo sapiens
ggagctgcccactctagaggagctgaaagtagatgaggtgacttaagagattaaaattaatttggttgctgttggttctgaa

SEQ ID NO: 767499 - DNA, 98 bp, Homo sapiens
gagtcttcatctacatcttcctcggaaagcttgaattcatcagcaccacgtggagaacgttcgagaggagatatttcatcaaatactccagactatgc

SEQ ID NO: 767500 - DNA, 50 bp, Homo sapiens
ggcggagcttggcaacatgcaggggaggggaccgaggctatggggggaac

SEQ ID NO: 767501 - DNA, 75 bp, Homo sapiens
gaaaaagttgttgttaaaattctcaaggccttcctggatgctctgcagaaccaggctgaggccagcagcaagatc

SEQ ID NO: 767502 - DNA, 75 bp, Homo sapiens
aatcatgaagctactaaccagagccggctctttctcggctgaatccattttgcaagggtacctggatgattcagg

SEQ ID NO: 767503 - DNA, 100 bp, Homo sapiens
ctctggtgcatgctgatgacgaaaaacctgcttttctaacccaaactgtatgtcttgatgacactacagtaaagtttgaaatatgggatacagctggtca

SEQ ID NO: 767504 - DNA, 103 bp, Homo sapiens
tggccttcgcgtctgcccggccaagaggcaaaggggaggttacgcagcaaaccatccagaagaaactggcgatggaatatgagaggagccctctggaaagaaa

SEQ ID NO: 767505 - DNA, 75 bp, Homo sapiens
gaagaagtccccgagttcaccaaaattcagacattcctaggtgacacagcaagacgttgtctctggggaaaaaag

SEQ ID NO: 767506 - DNA, 95 bp, Homo sapiens
atgctgttcgccaaaatggacagctggtcagaaatgattctctacctctgtgagtgaaagccttcagagggaagctgctaagaagcaggccatga

SEQ ID NO: 767507 - DNA, 96 bp, Homo sapiens
ggagctgtcctttgttttggattacataaaccagtcacccaagtgcattgcctttggaaacgaggactatggctatgtacagaccacatccacgga

SEQ ID NO: 767508 - DNA, 75 bp, Homo sapiens
ctgttgaaaaaaatctgggaggttgaacttattaatgaaacttccattttagaagaatacagtatcaattggact

SEQ ID NO: 767509 - DNA, 80 bp, Homo sapiens
tgaccggatattcagttgcacatccccacatcaatgcactgccaatgtctgagggaaaaggccataccaatgctggagat

SEQ ID NO: 767510 - DNA, 97 bp, Homo sapiens
tcaatattttggacaggttcttggctcttatgaagttggcactacgagatgcacttttgaaaaagagaaaaagaatgaagtaacttcctggcaagtt

SEQ ID NO: 767511 - DNA, 100 bp, Homo sapiens
tgattggaccatcccccaatcctctcatcttgtcctacctgaagtatgccattagttcccagggtgagaaggactggcagaaatacgagactgctcggcg

SEQ ID NO: 767512 - DNA, 75 bp, Homo sapiens
cattgccatcccatgcaacaacaaggtctataagaaggagaaagctcgagtcatcactgaggaagagaagaattt

SEQ ID NO: 767513 - DNA, 50 bp, Homo sapiens
aaataacccaaatcttctcaccaaggaagtgttcgccagttactacatga

SEQ ID NO: 767514 - DNA, 100 bp, Homo sapiens
cccaagcacaattccaggaagggtgtttgctgagaacaaggatgagattgctttagtcctgtttggtacagatggcactgacaatcccctttctggtggg

SEQ ID NO: 767515 - DNA, 50 bp, Homo sapiens
acgcctgccgcctgcggccgagtacaaaactttttaccaacaaaaaaaag

SEQ ID NO: 767516 - DNA, 49 bp, Homo sapiens
cggcaacggggcactgacctgggtgtttgaaattggcacaatggaagaa

SEQ ID NO: 767517 - DNA, 76 bp, Homo sapiens
tggcgagcatgcgagtggtgaaggttcctccactttggcggtggccctctgctcgacggtgccttcgctggccctg

SEQ ID NO: 767518 - DNA, 110 bp, Homo sapiens
caccaaagctacaggattctggaaccgtggagacaccgagaaaccatgagtgtaaggttaccccagagtatagacagaaatgagccgtcagactgctacagcattaccta

SEQ ID NO: 767519 - DNA, 100 bp, Homo sapiens
cttcaggaaaatgggttccatgagaagtgacatcctcctcgaatcaaaagcaaaacttagagagtaacctcaccaaccttattaagaggaacacagaact

SEQ ID NO: 767520 - DNA, 90 bp, Homo sapiens
ctggaccggcaaattaaagcaattatgaaagaagtcattccttttttgaagccattcagaagttatttcagtcatggaatgatctctagc

SEQ ID NO: 767521 - DNA, 48 bp, Homo sapiens
ctgcactgataacgtctgttacagtgccggtggtggtgtgcacattga

SEQ ID NO: 767522 - DNA, 100 bp, Homo sapiens
ggttgatatgtcagatctctctccagaagagcaatggaggtaatgcacaggtgacacaaacaaagtttctccccaatgctccgaaagctctcattgttga

SEQ ID NO: 767523 - DNA, 83 bp, Homo sapiens
catgccgctcctaagcctgcacagccgcggcggcagcagcagtgagaggtacagcacatgggaaccggaggaaaacatcctgg

SEQ ID NO: 767524 - DNA, 100 bp, Homo sapiens
gtgaaacttagtcgggatataactgttgaaagtaaaaggacaatttttctcctccataggattacaaggaatggaagttggatacactttgtgacttgta

SEQ ID NO: 767525 - DNA, 74 bp, Homo sapiens
taaccccttccgggagcctagatcctgtgctttactctgaagactcgtgtgcctaccgcatgttgccgctgctg

SEQ ID NO: 767526 - DNA, 75 bp, Homo sapiens
caggattccacagtgtcctctggaaaatgacccaacatgagtgaagtttcctgcaagaaacgggacgactatttg

SEQ ID NO: 767527 - DNA, 74 bp, Homo sapiens
attcaggagtacctggagaaagctttaaacaagttttgcacactagggaccaagaagccctcggggacactgct

SEQ ID NO: 767528 - DNA, 75 bp, Homo sapiens
ccggcgccaagccgccgtcatcttcttcctgtgccaggaagacaactgttagttttgtggcttactgctgctcca

SEQ ID NO: 767529 - DNA, 82 bp, Homo sapiens
gtatcgtatgtccgctatccagaacctccactctttcggttcctgcacttggccatcatccatgaagaaaaggcactgacca

SEQ ID NO: 767530 - DNA, 98 bp, Homo sapiens
tctccagccaaattcaaaaaggataaggagatcatagcagagtacgatactcaggtcaaagatgaccactgagcagtttacaggagatcatactcagc

SEQ ID NO: 767531 - DNA, 83 bp, Homo sapiens
gagccctgctacgagcagctgaacagggagtgcatccgccccaacccttttccccctcgtctcctgtgagaattccccgtcgg

SEQ ID NO: 767532 - DNA, 82 bp, Homo sapiens
aaccccaggactgcgcccccgggagcgggcgcccagaggtattgacctgatggacatggcttcggacatcctgcagcccaaa

SEQ ID NO: 767533 - DNA, 100 bp, Homo sapiens
gcagactttcttctgtggcaacgtggctcatcagcagcttatccaggtgacaatctccaatagacttgtgtcttcaccttgctgcattgtgaccagcacc

SEQ ID NO: 767534 - DNA, 100 bp, Homo sapiens
aagaactcaaactttttgtatctcgacactctgcaagattctctcctgaagtcccagctgacattatctctacggtagaattcaaccacacgggagaatt

SEQ ID NO: 767535 - DNA, 98 bp, Homo sapiens
tcttcttcttcttccagggactcagcacctggcagctggtggaggccattgtcttgccaatgaaccacaaggagaagtttgagaacttggggatccaa

SEQ ID NO: 767536 - DNA, 75 bp, Homo sapiens
caaggacaaacccaccttcatcaaagggatacaagaaaggtggctacaagataaccttactttaagaaaaagaaa

SEQ ID NO: 767537 - DNA, 83 bp, Homo sapiens
atctcagtgccactgacatgttgcgatggcaagccggcaggtggatattgcaactcagggctggttcattggtctgatgtgtg

SEQ ID NO: 767538 - DNA, 76 bp, Homo sapiens
aggctcatttttaatgtccaaagtggaccaagatctcattatgactcagaaaaagttgatgtagaacattctcatg

SEQ ID NO: 767539 - DNA, 75 bp, Homo sapiens
ctggcctgatgtcctcgggtcgcgatgtgtgcaacagcaccgatcttccggaagtcgagatcattagcctgctgg

SEQ ID NO: 767540 - DNA, 83 bp, Homo sapiens
accgctcaagcgtgatgaaacagttcctggaaactgccattaacctccagctttttaagcagatttggagcaagaggtggtgg

SEQ ID NO: 767541 - DNA, 98 bp, Homo sapiens
caatcccactgatgaggatcagcccatgtaacgtgcctagtgttgggagcctagcagatccagactatctgaacacaccacagatgaacacacccgtg

SEQ ID NO: 767542 - DNA, 100 bp, Homo sapiens
tttattgcttttgagcatcctgaagaagttgattatatgacggcctctttgcacctccacgtgccttcagtgcaatctgacgagctgcttcacagtaaac

SEQ ID NO: 767543 - DNA, 100 bp, Homo sapiens
cttcgccatcgccagcatcgccaacccggactggatcaacaccggggagtctgcgggcatttggcctcatcaaaggggccagagtcagcatcctcataga

SEQ ID NO: 767544 - DNA, 75 bp, Homo sapiens
gcaaagcagctacacaaagagggtcatctcttctattgtacctgcagcaatcatttggggaagaatctacagttg

SEQ ID NO: 767545 - DNA, 74 bp, Homo sapiens
gaccctggaacatcccggaagccgggaaatgactgcttttcaggaagccttggacgctgcaggtgataaacttg

SEQ ID NO: 767546 - DNA, 102 bp, Homo sapiens
tgtactggtgtgtggggccggaggagtcagctgtgtgtccagaacgtgccatggagacgcttaacggtgcactacatcctccaggaggtggtgatgggtggg

SEQ ID NO: 767547 - DNA, 75 bp, Homo sapiens
ggcagcgccagtcggggcccttccctctaagcaggaagcggctcagccccagggcagcacatcagagacaccatg

SEQ ID NO: 767548 - DNA, 75 bp, Homo sapiens
ctgaaactgcctacaagatacatagaaagtgaattttgtagaaggagaagatttagatgtagatgtagatcaacc

SEQ ID NO: 767549 - DNA, 74 bp, Homo sapiens
cgcggttgaagagcctagcgacgaggagccggctttgagcaggaagatgagaagtttttgtctgaagtttttgc

SEQ ID NO: 767550 - DNA, 97 bp, Homo sapiens
ggggcggctctcacattacctccagaaaggctgcaggctctcacccaggttgcagatgaatacatgttttccctagaagagaataagaagtccaagg

SEQ ID NO: 767551 - DNA, 100 bp, Homo sapiens
cttgccagaagttatctacaaggcgaggaaacgagacctctttcgttccttctagaaggtctggaggacgtagagttattgaaaatgcagatggttctga

SEQ ID NO: 767552 - DNA, 98 bp, Homo sapiens
gcggacaatttagtgaagtttatagagcagcctgtctcttggatggagtaccagtagctttaaaaaaagtgcagtgattcgcctttgccagtctcatc

SEQ ID NO: 767553 - DNA, 100 bp, Homo sapiens
caaagactgatggcagctcgagttgtcaaacgtgagctgaagagacgcctgaaagctgagaagaaagtagcagagaaggaggccaaacagaaagagctca

SEQ ID NO: 767554 - DNA, 80 bp, Homo sapiens
cagctggagcaggaagctgggaaaccacaaaggaatggtggatccaaccgaagagaaaggggtgctccaccactccctcc

SEQ ID NO: 767555 - DNA, 100 bp, Homo sapiens
tgacagatgccagcgtagctgaatccagtaccaaaaacgtcaacaacagttttacgacaattgtggcaattaataaagacccagaagctccaattttcca

SEQ ID NO: 767556 - DNA, 100 bp, Homo sapiens
ggtgaagaaggaagggggtgctctgaggttatcaatactctggctgaccatcatcatcgtgggactgactttggtggaagtccttggttacatgtcatta

SEQ ID NO: 767557 - DNA, 100 bp, Homo sapiens
ttcaacctgccaaaaaagtctcaccatgcaaactcccccacagcaggcaatggtggcttgctatccgggaaatggaacaggttatgttcgccacgtggac

SEQ ID NO: 767558 - DNA, 98 bp, Homo sapiens
cacaaatgctccttctcctggagacgcaactcaaggtggtggctaatgccgtagcggcattatctgaaatcagtgagtctcacccaaacagcaactta

SEQ ID NO: 767559 - DNA, 88 bp, Homo sapiens
gtcatcttctaaacagagcagcagcagcagagatgataacatgtttcagatcagccaaatggccgatgacacagtggcagaactggac

SEQ ID NO: 767560 - DNA, 119 bp, Homo sapiens
cctgcctgcccactggtcagccttcagggaccctgagcaccgcctggtctctttcctgtggccagcccaggaacttgctactaccagcaccatgccctaccaatatccagcactgaccc

SEQ ID NO: 767561 - DNA, 100 bp, Homo sapiens
gtattaaaattacaggcattagacagaaagctggaagttgaaatggaagacaaacttttgcttgagagccagctcatcctagctacagctgaaccactct

SEQ ID NO: 767562 - DNA, 82 bp, Homo sapiens
gatttattgaactctaccgccagagttcatctctaacaagtatttagtgaaacgacagagcagagactatgatgtggaatgg

SEQ ID NO: 767563 - DNA, 82 bp, Homo sapiens
gataacgaagcagctattgtccagggggatatgagactttctactcggaatatcctgagtgttgcgtggatgtaaaacccat

SEQ ID NO: 767564 - DNA, 98 bp, Homo sapiens
aactccatccagctgtctgccaaaaccatcaagcagaacagccgcaatgactatcaagaaatccaagtggtaatgggcgaagtttattcagcatccgg

SEQ ID NO: 767565 - DNA, 100 bp, Homo sapiens
gaaattctggaacacctatatggaaactcccagtacagccagcagcaggccgggtaccagcagggtgccgcgcagcagcagacgtactcccagcagcagt

SEQ ID NO: 767566 - DNA, 99 bp, Homo sapiens
atactcaccctgcttgctttgtggctatcatcaaaatcaccaaccaaaagattcacctttggatttcatcgcttaggattggctaaaagatgtgtgtga

SEQ ID NO: 767567 - DNA, 80 bp, Homo sapiens
agccttcccagtagctgggaccacaggaaacaagcctccaggtctgcttccccgcaaaggactatacatggcaaatgact

SEQ ID NO: 767568 - DNA, 99 bp, Homo sapiens
ggaaggcggtgaccaagacgctgcgggagcccggcgccggagcccaagattgctcgctgtaagcagctcatctgtgaccccagctacgtaaaagatcgg

SEQ ID NO: 767569 - DNA, 75 bp, Homo sapiens
tacgatgttgcccgtggggtgcaaaagatcctgcaggtcctggtgcttgatggtcgaggccatctcctgggccgc

SEQ ID NO: 767570 - DNA, 74 bp, Homo sapiens
cgagtgcaacatctgcaaggtccgcttcaccaggtcagattcagaggaagagcggtggcagcgctcagggatgc

SEQ ID NO: 767571 - DNA, 100 bp, Homo sapiens
cgtttctgtcgctgcagtcgtccgcggatcgcaccccctccctccctggcggagcccctgaaggagctgttcaggcagcaggaggccgtccggggaaagc

SEQ ID NO: 767572 - DNA, 98 bp, Homo sapiens
ggactactggtgcctgcgctgaaaaagtttctctgtttgaagaacataaggacatttctcacggcctgttgtgagacgtttggaatgaggaaaagtga

SEQ ID NO: 767573 - DNA, 74 bp, Homo sapiens
cgagcagcccagacagcggccacctcaagactaccatggctgcaggagtcttgcctcagaatgaacaaccatat

SEQ ID NO: 767574 - DNA, 75 bp, Homo sapiens
gtttttatgatgatgtcacagtaccatggaatgcagtagccctctgggcctgggatattgtggttgataactgtg

SEQ ID NO: 767575 - DNA, 85 bp, Homo sapiens
gcccaagaaatcaaaataaaggaaacacatttcatatactgcagacctctggggccggagagtctcctgcttcgtggagccagat

SEQ ID NO: 767576 - DNA, 83 bp, Homo sapiens
gtgtggacgtgaacgggggtcctgagcctgccccagccagtaccagcgccgtgtcaggatggctaaaggtgaccccaagaaac

SEQ ID NO: 767577 - DNA, 74 bp, Homo sapiens
agatggagagactgtggagtttgatgttgttgaaggagaaaaggttgaaccctcggatacgatagaaaatgtaa

SEQ ID NO: 767578 - DNA, 83 bp, Homo sapiens
agcagaagcagcgcctgatcgagtccctccggaactcacactccagagcagcccgacggccatggaggctgaagagacgatgg

SEQ ID NO: 767579 - DNA, 100 bp, Homo sapiens
gatatacaagacaaggtgaagcctcggaagtgcatacatagagacgtgaagccagaaaatatcctcatcacgaaacattccgtgattaagctttgtgact

SEQ ID NO: 767580 - DNA, 50 bp, Homo sapiens
cgtggaacggctgcttttggaaggtcatcaagagagagggcacaggtaca

SEQ ID NO: 767581 - DNA, 100 bp, Homo sapiens
tccacacagcagcggcagcagcaggctgcaacggagaaggggcttctttttgctaaagaacatctgcagcacatgacagaaaagcagctgaacctctatg

SEQ ID NO: 767582 - DNA, 98 bp, Homo sapiens
ctgccggtcgcagtcgcgatgtcggtggccgggctgaagaagcagttccacaaagccagccagaccacagctgagaaatctcctggagcctatttcct

SEQ ID NO: 767583 - DNA, 100 bp, Homo sapiens
cgcggaggcggaagcatccatggcggagggcggcagcccagacgggcgggcagggccgggctccgcagaccatcatcaaagaggggatgctgaccaaaca

SEQ ID NO: 767584 - DNA, 74 bp, Homo sapiens
gagtttgcatgcgtgacattgaaaaatgaggtctacatctcagttcactgattaccaaagctatgtcatccatg

SEQ ID NO: 767585 - DNA, 82 bp, Homo sapiens
tattatctttgagtctggatattcattacacaaggaagaaggtagataatgactataatgcccttcgagaaagactcagcac

SEQ ID NO: 767586 - DNA, 99 bp, Homo sapiens
ccctgttgggccccacgagtaggtcggcagcgttgctgggtggcaggccctccctatcctgaagacattagctgagagtctggcaccttttaaaggtct

SEQ ID NO: 767587 - DNA, 50 bp, Homo sapiens
gagatcctgcacatgtctttgttggatggcaagcatgtggtgtttggcaa

SEQ ID NO: 767588 - DNA, 50 bp, Homo sapiens
ctcgtagtcctgggagcacagcagaagtgctcaagaatcaaccactggaa

SEQ ID NO: 767589 - DNA, 82 bp, Homo sapiens
aagattcttctgaattgtgctgccttggccaaaagaggaattcctcctgatcagcagagactgatctttgctggcaagcagc

SEQ ID NO: 767590 - DNA, 100 bp, Homo sapiens
ggacgagtcagtggacactccaggaagagcggccccgcggggggcgatgaccgtgcgctgaccctgactcactccagataatgctctaccacaagaaaat

SEQ ID NO: 767591 - DNA, 75 bp, Homo sapiens
gccactgaaacagcccaagaagcaggccaaggagatggacgagggttgggaagaacatggaaagtgacctccctg

SEQ ID NO: 767592 - DNA, 101 bp, Homo sapiens
gtctggaggagccttctcaagaacagaggtagtcaatgctattattgaatcgggtaagactttgtcaagggaagaaagaaaaacggagcgctgcccgctgt

SEQ ID NO: 767593 - DNA, 80 bp, Homo sapiens
ggcaagatccagatcgggatttacgtggagatcaagcgcagcgatgtggccttcattggcatcaccagcactggagctat

SEQ ID NO: 767594 - DNA, 75 bp, Homo sapiens
tgaatgccagccaccagccatgggtggtttagattagaatccaaacaaggaaaacgaatcaaaaacaggggtgag

SEQ ID NO: 767595 - DNA, 100 bp, Homo sapiens
atttctccgcctcagcccaacggggaggtcatttgattgcccgcctcagaacgatggatctgcatctcttcgactactcagagccagggaacttctcgga

SEQ ID NO: 767596 - DNA, 90 bp, Homo sapiens
gcgagggcggccgcgccggctccaggctactgcagcactggggtgtcagttgttggtccgacccagaacgcttcagttctgctctgcaag

SEQ ID NO: 767597 - DNA, 98 bp, Homo sapiens
tcggccttggtcccagcgccttcccacggagcagcactcttcaccctgcacagccttgttaggagtacgtcactaacaagaccaagaagacagaggag

SEQ ID NO: 767598 - DNA, 132 bp, Homo sapiens
gtttgttatttcatattatctcggtgatgacaccatttcagtgtttgaacctatagagaggaattcagtccaaacccctgatacctcttcaaaaagaaactgattcagagacccagaaaatggtgcttacca

SEQ ID NO: 767599 - DNA, 75 bp, Homo sapiens
tgaagcaggaatctttcagatacttctagatttcatttacacagatataattgaccctgcaatcctgcgcccggg

SEQ ID NO: 767600 - DNA, 74 bp, Homo sapiens
tatgtttggatgacttgtcatgcaatcaaaatgaagttgaagcatcagataatgatttttccagaaggaacttg

SEQ ID NO: 767601 - DNA, 90 bp, Homo sapiens
gacatgagtgatgtggaggaaaacaacttcgagggcagagaccatgacttcttccagcatgtggaaatgcacctgcggtctgaacatccc

SEQ ID NO: 767602 - DNA, 105 bp, Homo sapiens
cggagtcagtcattttactgtcaagacatttcttcggcattctgcaacagacaatgcagatcttcgtgaagactctgactggtaagaccatcaccctcgaggttg

SEQ ID NO: 767603 - DNA, 76 bp, Homo sapiens
cggggacaagaaactagagcaaataaccgttttgaaattgaccagtcctgcctctgttgtagaagacatgtggtgt

SEQ ID NO: 767604 - DNA, 100 bp, Homo sapiens
tctaatggacaagccagagatgaatgtggttttgaaaaatgtcaaaccagaccaatgggtgaaggatgagtctgaatgtacttcagatgaggaaatcttt

SEQ ID NO: 767605 - DNA, 96 bp, Homo sapiens
attttcatctattgaagaaaaattcaaaattattgagagagctgaaaaatttggactcccgccagtgtttctgtagaaaatgtttcctgactgcaa

SEQ ID NO: 767606 - DNA, 100 bp, Homo sapiens
attctgtgtcaattcattgaccggatacttacagatgtaaatgttgcaattttccagattattcaaagtatcaggatgggcatgtgaagtgactgacctt

SEQ ID NO: 767607 - DNA, 75 bp, Homo sapiens
gtcggcggcggggcgaccgcgagctcgggatacgctcttcgaagtccgcagccaaacatcatgtcaatggcaaca

SEQ ID NO: 767608 - DNA, 80 bp, Homo sapiens
ataaaattgccctgaaactggttggtgaagaaggatttgtagatgacatggcagagcttctcctcggggagtcgaagctg

SEQ ID NO: 767609 - DNA, 100 bp, Homo sapiens
aaacgagccagtgatttacaatagagcaaggtcaactgcaacttggcctcttgatccaccaaaggatgagaaacaagggtggagacatgtgagaattaaa

SEQ ID NO: 767610 - DNA, 132 bp, Homo sapiens
tcaatgccttagtcaactacaccaacaggaatgcggcttcccccacatcagtcagcttcttacagtacatttctagtgaagtaaacccccccagcgatgaaacagattcatcctctgctccttccaaagaac

SEQ ID NO: 767611 - DNA, 101 bp, Homo sapiens
gcgagcccggacggcgcctctcgaacgagtgtgggcgcgaggcaggtgctggagaatctggtaaaagcaccattgtgaagcagatgaggatcctgcatgtt

SEQ ID NO: 767612 - DNA, 85 bp, Homo sapiens
gaggcagcggcggacgccgagctaagcagtgtgttccagagaacaagccttcagacatttgctatattgacgctgagctgtcagg

SEQ ID NO: 767613 - DNA, 60 bp, Homo sapiens
ctgcagcgtctccttcccgttctccaggactgtaggtaccatccagcactgcctccacct

SEQ ID NO: 767614 - DNA, 100 bp, Homo sapiens
tttcagtgtcctccttagctctgcaggtgctggctgccagctgctgcgccccccatgtagaaggtgcacctcctgggagcaggcacgtcttttggctctt

SEQ ID NO: 767615 - DNA, 118 bp, Homo sapiens
cgcaatgatgagaggatgtggtggtctactctgatgtcaatcttgagggctagaaattgcttcccaagaagaaggtgctactatacagtggatgtcatctgtagaagcaaagattgaa

SEQ ID NO: 767616 - DNA, 100 bp, Homo sapiens
gaaggcccgcggcgccccgtgctgcagaaagaaggtgcatttccagtcacccagaaccgggcgctgcagctgctttatgatctgcgttacctcaacattg

SEQ ID NO: 767617 - DNA, 101 bp, Homo sapiens
gccccatggaaggctccccttgcagaagagtgggacaacatgacaatgaaggagctactggacaagctctgctggactgacattccacgcctacgggaagg

SEQ ID NO: 767618 - DNA, 90 bp, Homo sapiens
cgaaacgtgataagaagcacctggatgagacatttgctacagcatcccacattaagtcaacgatttccatggtgtcagtgattcatattc

SEQ ID NO: 767619 - DNA, 100 bp, Homo sapiens
gtcggcgccccagagcggacgagatcacaaaatttgtccaggatagacatagagctagaagaaacagacttcgtaaagatcaacttaagaaacttcctgt

SEQ ID NO: 767620 - DNA, 101 bp, Homo sapiens
aatgcccagaatgccagcaaaacgtgggaactgagtctgtatgagctgcaccggaccccgcaggggccccaaggaccaaaagggcagaaaggtgagcctta

SEQ ID NO: 767621 - DNA, 90 bp, Homo sapiens
gaatcctgcaaaaatgtctctctatccatctctcgaagacttgaaggtatttaccttgctgtggattgctgactggatggtccatcactt

SEQ ID NO: 767622 - DNA, 90 bp, Homo sapiens
gaggccatggaccctgtctcagtggtccctttctagagataggagaagagagagatcgctgtctcgggagagaaatcacaagccgtcccg

SEQ ID NO: 767623 - DNA, 100 bp, Homo sapiens
tttaccaccaacaatggctacaaatccatgcagaaaaaacttcggagtaattggaagattcagagtctctgctggatgaaccgaatcctaacagtccagc

SEQ ID NO: 767624 - DNA, 98 bp, Homo sapiens
agaaccacattttgggtttgaagaatcttctacatggcttccgcaacttacacgtggacgaccagatggctgtcattcagtactcctggatggggctc

SEQ ID NO: 767625 - DNA, 51 bp, Homo sapiens
gaggcagccagcggatcttgggtgagagcacagagccgggataagcagata

SEQ ID NO: 767626 - DNA, 50 bp, Homo sapiens
cgaaggtgctaccatcgtgagagtaagatttatcagcaagactgttgaac

SEQ ID NO: 767627 - DNA, 75 bp, Homo sapiens
ggtctcgggggccgctctgggatcccggccaccagcaattgtccgtgtttgatgatggtgatgagcgaacattga

SEQ ID NO: 767628 - DNA, 75 bp, Homo sapiens
gacagagtcctccgtgtcctcccccgcatgacccccttgatagtgtttttagaagaagcatctcaacaggaaaaa

SEQ ID NO: 767629 - DNA, 75 bp, Homo sapiens
gtcacccgctacgggaagcaggcctcgccacagaatgtccagaggaggtttatgaccctcgatctctatatgaaa

SEQ ID NO: 767630 - DNA, 90 bp, Homo sapiens
actgcatttggacgagccatacggtgagaagcaccagagggacaggacttctagaagttagaataatatgaagtaatcaggaaatatcta

SEQ ID NO: 767631 - DNA, 98 bp, Homo sapiens
gccgggctggtcctgctgcgagccggcggcccggagtggggcggcggtgccctctggtggtcagaagatgctgtgctgtctcgttaggatgaatggat

SEQ ID NO: 767632 - DNA, 88 bp, Homo sapiens
cggaagatcgggagcgggtccttcggagatatctacctggctctgaagagactgagggactcggccaatgccaatgatgtggaaacag

SEQ ID NO: 767633 - DNA, 95 bp, Homo sapiens
caaggcaaacactccacctatgacactgacctcttttccccgctgctcaacgccatacagcagatctcggtgccggtagcgggggcagttcacct

SEQ ID NO: 767634 - DNA, 75 bp, Homo sapiens
ggatgatacaccttttccacagggaattgagttggtgctgttggcagcagcggtctgcacaaaagcaggaaaggc

SEQ ID NO: 767635 - DNA, 82 bp, Homo sapiens
tgcactgggtgattcacgtgtgcccaggccctgaggtgggccggacctgggagtggcagacttcccaagtaagaagcggaag

SEQ ID NO: 767636 - DNA, 100 bp, Homo sapiens
accgggtgctggctgaccacgctcggaccatcactgtggcactggctgatggtggccggcctgacaacacagggcgtggcctttgaagaagatggtggag

SEQ ID NO: 767637 - DNA, 100 bp, Homo sapiens
gggatatgtggcgactaaagaaaagtttgcaaactgaaaccgtgtcagttcagtcttcggtattggggaagggtgtaaaacatcgacccccaccaatcaa

SEQ ID NO: 767638 - DNA, 80 bp, Homo sapiens
agctgtgctcgcgctactctctctttctggcctggaggctatccagcgtcctctggatgtcagcatggcagccacaaacc

SEQ ID NO: 767639 - DNA, 122 bp, Homo sapiens
tgtgggacgccagtcaccagcaggagcagccaaccagcagcagccatcatggagacaccatccggaagatgaagaacgatttccggaagatggaggatgagatggaccggctggccaccaac

SEQ ID NO: 767640 - DNA, 90 bp, Homo sapiens
cctcagtgaggacttcctgcctgagatctgcaacatgatcgcccagaagggagctggaagagtgccagcgaaaccacgagggtgatgagg

SEQ ID NO: 767641 - DNA, 75 bp, Homo sapiens
ccgacacctttgcagctggctttattgaggtcacgttcgaagcttgaaattggccactgtagaagtattggcaac

SEQ ID NO: 767642 - DNA, 101 bp, Homo sapiens
ccgacgccatcaggctcaacgaggaactcaaagtggatgaggaaactgtgagccgtgagctttgaggcggtgggatgtgtcagcagaatgtctcctgcccc

SEQ ID NO: 767643 - DNA, 76 bp, Homo sapiens
cggggagctggtgtggacagaggagggcctcaaggcacttctaggacctgcctcttctcaccaagatgaactcact

SEQ ID NO: 767644 - DNA, 72 bp, Homo sapiens
aagacttggcgaagcgctgcgctcgcgcccggatccctcaggtgagaaataaggctcagcaaacattttttg

SEQ ID NO: 767645 - DNA, 75 bp, Homo sapiens
caacccaaattaccttaatttggccataaaatgcagtaaaaacaaatccagttcccaagaagctgtacaaatgct

SEQ ID NO: 767646 - DNA, 83 bp, Homo sapiens
tccatgacagtacaggattatcaggatctcatagaccgaggatggcgaaggatataattgatacagcatgtgaagtattggcc

SEQ ID NO: 767647 - DNA, 96 bp, Homo sapiens
gactcagaatcgaatctcttctccctccccttcttgtttggaaattttagcattcaggtgccaggaatgcagatgggacagccagtgccagaaaca

SEQ ID NO: 767648 - DNA, 75 bp, Homo sapiens
caaacatttcaggaactgttcaaaggacccactcttctgtttgtaaaggtgacccaagggaaagaagaaactcgg

SEQ ID NO: 767649 - DNA, 87 bp, Homo sapiens
atatttggagttcttacaacatggcagacattgacaaagataattgacgaccttgccaacctagtggagaacacagatgaaaaactt

SEQ ID NO: 767650 - DNA, 75 bp, Homo sapiens
ctgcagcagggctgtgtgagctcaggtttggtgcacctcgatttggaggaagtagggcagggcccttatctggaa

SEQ ID NO: 767651 - DNA, 82 bp, Homo sapiens
gccactgtcttctcttcctcctccaccgagtcgtgctctcgccccaacccgcgcgccaggagctgacatggacccaaatcct

SEQ ID NO: 767652 - DNA, 100 bp, Homo sapiens
tatgccaggtgaagcccaacgatcagcacttcagtcggaaagttggaacctctgacaagaccaagtactaccttcaaggaggctattctgcagaccatcc

SEQ ID NO: 767653 - DNA, 100 bp, Homo sapiens
tgccgctgttgtagatgcatcttccgtctcccctgagagggacagtcacaacttcaacagctgggcggcctcatcgacaaggctgggtttggaaataact

SEQ ID NO: 767654 - DNA, 100 bp, Homo sapiens
catggttcccgtagggttgcctggacagcagctcgtgtctgatgagaccccgctttctacaccaaccgcaagagacagccttgacaaactctctctaact

SEQ ID NO: 767655 - DNA, 98 bp, Homo sapiens
acctttctgcgagtacgagccaaccggcagacccgactgaatgcctcctgacaaggtgatccgggcgggccccgcaggaattttatcccctcaccggc

SEQ ID NO: 767656 - DNA, 88 bp, Homo sapiens
gcgtacccggggcatcctggcgccggcggcgggtactacccaggcgggaatgtgaaagatgttgcagaagtgttccagaagtggctga

SEQ ID NO: 767657 - DNA, 76 bp, Homo sapiens
ctggagacatggaccgcggcgagcaagtctcaggaggcccaggtgctgaaacaattggcagagaagagggaacacg

SEQ ID NO: 767658 - DNA, 83 bp, Homo sapiens
aaagacggaaccgccacagcactcaacactgccagtgaaagatgtagaagataaacctgaacaacaaaccagaacaagagaga

SEQ ID NO: 767659 - DNA, 100 bp, Homo sapiens
gaatcgtcactgaggttgcagttggcgtgaagggacttgcaacaaagcattgccagagaacctagtgctccttcaattcctacacctgcgtatcagtcct

SEQ ID NO: 767660 - DNA, 90 bp, Homo sapiens
aaagtgccagcagattcagtgtcatgtgaggacgtgcttcctgcttcatagataagagaagcgtaaaagatgtgttgttttcaatcaagg

SEQ ID NO: 767661 - DNA, 74 bp, Homo sapiens
tatgtctcaggcttccatgcagcctgccttaccgtgatgttgcacctgtaaccatctttttatgggtggagcag

SEQ ID NO: 767662 - DNA, 80 bp, Homo sapiens
ctcctgtcgctgcccgtgtgattactgagactcaggcagataccaacagtgaccggctcttcacagtgaacgatgttaaa

SEQ ID NO: 767663 - DNA, 100 bp, Homo sapiens
ctgagctgaacgagacatgggaggagaagctacgcaagacagaagccctgaggatggagaggtcattaaggagtccaagcaggagcacaaggatgtgatg

SEQ ID NO: 767664 - DNA, 100 bp, Homo sapiens
cagagcaaggggcttacgcagaaggacctggccacggaagatcccagtgtctgagtgaactaacagtcctgctttcagccaccatttgcacaagacaccc

SEQ ID NO: 767665 - DNA, 90 bp, Homo sapiens
tgcattttgaaacttaaggatgggatacagatttgtaggatcactgggtaccatcatcataaaatgtaaagattttcgaattattcagtt

SEQ ID NO: 767666 - DNA, 83 bp, Homo sapiens
ggtttcgggatctcggtgctgcagacggcgagacctcctgcacagacccctctgccatgaaccagtccatcccagtggctccc

SEQ ID NO: 767667 - DNA, 100 bp, Homo sapiens
gagattggacaagtatgctgcaagtgagaacatatttaacagagacgagttgtactgctgtcacaggaaatggacgctggattacaagcatggcagctca

SEQ ID NO: 767668 - DNA, 76 bp, Homo sapiens
tagcaaacatcgatggcctactggggataacattcatgcagaacatcaggagccacacaggacagttgacccaaca

SEQ ID NO: 767669 - DNA, 73 bp, Homo sapiens
gaagatgaagattttaaagagcagactagacttctcaagtgctaaggaaattcctgaagatgtagatatggaa

SEQ ID NO: 767670 - DNA, 90 bp, Homo sapiens
cagcctgtgctgctgttcctcagggatccatatgtcttgcctgcagccagcggtgctgctgttttttcaaacgaaggaaaaggaaaacca

SEQ ID NO: 767671 - DNA, 73 bp, Homo sapiens
tggaggagaatggcgccatccctaagggggtgcactatagccatctggagctgagccctggggagccagtgca

SEQ ID NO: 767672 - DNA, 50 bp, Homo sapiens
tctgggtccagccccttacttaaagcaagttgtcctcgaagaaggtacaa

SEQ ID NO: 767673 - DNA, 75 bp, Homo sapiens
gtcccaaggacctattgctatgcagttcttggatgaaatttcatctactgaaactaaagagtccagtggtacgag

SEQ ID NO: 767674 - DNA, 76 bp, Homo sapiens
cttgatccagcggacttacggcgagggcggcactgctcacaggacggctacccatccgcaatggcttctacaccac

SEQ ID NO: 767675 - DNA, 88 bp, Homo sapiens
agattctgccaattcgttttcaggagcatctccagagtaaacatcagtctccaaagataactacatcccttcttcccatcaacaatgg

SEQ ID NO: 767676 - DNA, 90 bp, Homo sapiens
gaagaaaggagaaaacagagatcctatcagatgaccttacagacaaagcagagccactacttccttcattggactgcaaggtatttctgt

SEQ ID NO: 767677 - DNA, 89 bp, Homo sapiens
gaaagaagcctgcggtgaaagtgacactgagtcagatggcaaaaatcaagcaaacccttctagacagccggggagtgttcctcgacatg

SEQ ID NO: 767678 - DNA, 93 bp, Homo sapiens
gaaggagctggagacggtcgtagctgcggtcgcgccgagaaaggcatggaagaggagatggttcgtgttacgcagtggccgtttaactggaga

SEQ ID NO: 767679 - DNA, 90 bp, Homo sapiens
ctgggcctgagcgccctcctgctgcgctacttcctggagcacctgcgtgtcagcggcctttaccactgggaccccaccggccccccgtta

SEQ ID NO: 767680 - DNA, 103 bp, Homo sapiens
gccactgtgacgggcgtgggggcctcaagctgtcccaggacatggacacctgtgaggaggcagtggagaaggtgacacagcacatccacggcctgtctgggaa

SEQ ID NO: 767681 - DNA, 82 bp, Homo sapiens
caaagcagtggccgcccgggcggcgggatccactgtccggcagaggtcaaaatgcagatcttcgtgaaaacccttaccggca

SEQ ID NO: 767682 - DNA, 89 bp, Homo sapiens
cccaggcaatgaaagatgccctggactcgggcaaatataatggctatgccccatccatcggaggctgagtgcccctagagggcagggac

SEQ ID NO: 767683 - DNA, 76 bp, Homo sapiens
gacggtccttgcattggcctccggcaggcgccccccgggggcgggaagctggtttgggactgacaatagctgacta

SEQ ID NO: 767684 - DNA, 100 bp, Homo sapiens
ctcttgaccatgtgacatctgatgctgtggaacttgcaaatcgaaggcctccccatggccacccatggaccagtcggcattcacttcctcccttctgcgg

SEQ ID NO: 767685 - DNA, 74 bp, Homo sapiens
tgcctctgatcaaagcccccaagagaggttacacttccaggggctccccactcagtccccagtcatctatcgac

SEQ ID NO: 767686 - DNA, 83 bp, Homo sapiens
cgggaggttcggttgtcgcccgttggccgcgcggcgccgcgctcggcggccgccattgcaggctggagtgcagtggcgcagtc

SEQ ID NO: 767687 - DNA, 100 bp, Homo sapiens
aaagcgtcaacatgaccgagtgcgtcccggtgcccagctccgagcacgtcgccgagatcgtgggtcgccagggggaacgcccttttgcttgtgactggca

SEQ ID NO: 767688 - DNA, 51 bp, Homo sapiens
acatctgcaaggtccgcttcaccaggccctgggcagtgacggggttcgggt

SEQ ID NO: 767689 - DNA, 100 bp, Homo sapiens
cctttgtccgtgttcggtgaccgcagcactggggaaacgatccgctcccaaaacggtcctggacccaagccagaagcctctgcaaagcttccttccagac

SEQ ID NO: 767690 - DNA, 75 bp, Homo sapiens
agcatctctggtgcatgctgatgacgaaaaacatgtggaaatggaggcccagaaagatgaaatcatctgccccag

SEQ ID NO: 767691 - DNA, 75 bp, Homo sapiens
acagggatgtgatgctggagaactgcaggaacctggcctcactaggtgatgcagtttggacggattgatggcagt

SEQ ID NO: 767692 - DNA, 74 bp, Homo sapiens
gttcccgggccgttgatcttcggccccacacggagtgcctgtgaagaaaacggggtattgccctgaggcttata

SEQ ID NO: 767693 - DNA, 75 bp, Homo sapiens
gaagatttctggccagtggagagaggaattcctcaagacaccattccagcggccctccaggcactgaagcgtaag

SEQ ID NO: 767694 - DNA, 100 bp, Homo sapiens
ctactcggccctcattctgcacgacgatgaggtgacagtcacggatgaccaactcttggatgatggcaagacactgggcgagtgtggcttcaccagtcaa

SEQ ID NO: 767695 - DNA, 100 bp, Homo sapiens
agccccaggaagctgtttatggccaaaatgcaaaatcagttgaggtacaaggagagaccgagactataatagccaccaaaactactgatgtagaaggaag

SEQ ID NO: 767696 - DNA, 100 bp, Homo sapiens
gacatctgacgacgtgaaggagcagatttacaaactggccaagaagggccttactccttcacagatcggtgatcatggagctcagcttggtctccatggg

SEQ ID NO: 767697 - DNA, 74 bp, Homo sapiens
ttgatgaaagttatgccttatgttgatatactttttggaaatgagacagactcagaattcatgattgaagaaat

SEQ ID NO: 767698 - DNA, 99 bp, Homo sapiens
gcccttccttgataagctgtttaaaccagcaatggtacaacagctccatgaacgtgatctgcacctggttgacggaccggatggacttacagcttcata

SEQ ID NO: 767699 - DNA, 90 bp, Homo sapiens
gtggaagtggttggaaatggcacctatggacaagtctataaggcagaagtcaattcatctggaaagactatctctgagtcagacttaaac

SEQ ID NO: 767700 - DNA, 82 bp, Homo sapiens
gtctcagcagtgctcgggcgcaggtgaccattgtgaggtagatattttgttctaattttccagatgaggaagctgagaccct

SEQ ID NO: 767701 - DNA, 100 bp, Homo sapiens
atgctgctgaattctggagaaagttttttggagacaatatcaccttttgccatgatagcatttctttcattggacagttccttacaagggctccactcag

SEQ ID NO: 767702 - DNA, 100 bp, Homo sapiens
cggctccgatcccggggccccgccacggtggaggatctggtgggaatggaagtggccccacatctcaaagaaaccctaaataagaacttttttgacttcc

SEQ ID NO: 767703 - DNA, 105 bp, Homo sapiens
ttctccctagcagtgaagagctgtcctgaccaagaggaccagactttgttaatgaagggtgtcaaattgagaaccaggtagatccccaccacctacagtaaaaag

SEQ ID NO: 767704 - DNA, 101 bp, Homo sapiens
tgtgcagaagttctcgaatcattctttgtacagaaattgaaaggcttcaaagctagcagatgtctttggtggacttgggaaagaggttgctagaagcagca

SEQ ID NO: 767705 - DNA, 144 bp, Homo sapiens
gtggccgtggctgacactaaagactttgtagccatcaacccgagtgcagtttcgatggaaaatgaagtattggtaaaggttttcaaggtgtcatgaaaagatggggatttaaaggccagcctgctacgcatggtcaaacgaaaa

SEQ ID NO: 767706 - DNA, 75 bp, Homo sapiens
tttagagctggcagcagcatctcagcccaagagaagatcacaaaatttgtccaggatagacatagagctagaaga

SEQ ID NO: 767707 - DNA, 76 bp, Homo sapiens
ggaagcggcagagttaggtgaaatttcagacatacacaccaaattgttgagaacaggatctcactctgtcacccag

SEQ ID NO: 767708 - DNA, 100 bp, Homo sapiens
ggtcaacaacagctggcttcctcaagcagaacactgctgggagtcctaaaacctgcgacaggaaggccgaatacatcaagcaatggtaacatctttaaat

SEQ ID NO: 767709 - DNA, 98 bp, Homo sapiens
gtagatgataaagatgatgatatccttctcaaccttgtgggatgtgaaaactctgttactgaagcatcaacaacagcaacttgtgattggcggtgacc

SEQ ID NO: 767710 - DNA, 75 bp, Homo sapiens
aaaaactggagagcttcatcaaaaatagtgatagctttgataagcaggaatttgtggatgcttatgtgaattatg

SEQ ID NO: 767711 - DNA, 73 bp, Homo sapiens
tcagacctctcatctgccagaatcagaaagaattcatcacactgtctgagatctgtatctgtggacctgaatg

SEQ ID NO: 767712 - DNA, 50 bp, Homo sapiens
cttggtgagaagaccaccacagcggcaggctacccacctttctgttctga

SEQ ID NO: 767713 - DNA, 100 bp, Homo sapiens
acctgaaaaattcaagaagttgaaaaacgcttttcacgtcacctggagagatgcacagaaaccactcagattgaggatcctcgagtacaatggcggcggg

SEQ ID NO: 767714 - DNA, 96 bp, Homo sapiens
ggaaaaactcagtgagacacaatttatcattgaataagtgttttaagaaagtggacaaagagaggagtcaggattggccatttgatgatggagctc

SEQ ID NO: 767715 - DNA, 96 bp, Homo sapiens
gaacatgtctgtacacctgtccccctgcttcagggcccactgatgatggtgaagaagagatggaagaagacacagtcacaaacgggtcctgagcag

SEQ ID NO: 767716 - DNA, 100 bp, Homo sapiens
cggagctgtgcaaggcactgggttcccccaagcggcaccacttccagcggcagcgggcagccagtgagagcacggagcaggaggagggggatgcccccca

SEQ ID NO: 767717 - DNA, 75 bp, Homo sapiens
cggcctttggtcgcctccgtgggcctcaatgaacactgatatttgcatttaatggggaacaaaagatgaagaagg

SEQ ID NO: 767718 - DNA, 50 bp, Homo sapiens
ccctccttcgcctcggagtgggatgagctcatttagaggcgagttttgag

SEQ ID NO: 767719 - DNA, 82 bp, Homo sapiens
taaggacggctctctgctcattggggcgttgaggagtgtgactgcacagaaaagttacaaaacaaatttgactttttgcgct

SEQ ID NO: 767720 - DNA, 82 bp, Homo sapiens
gtgagtgctgtgtggatgagagcaggggccttggacaagttgttactgactatgttcatggggatgccttgcagaaagctgc

SEQ ID NO: 767721 - DNA, 90 bp, Homo sapiens
ccagcctcatttagtgaacatccaattcaggtggagtggctgaaacttctcagcaggcgcatctacactagtgacctgaggagagaaacc

SEQ ID NO: 767722 - DNA, 101 bp, Homo sapiens
gtcggcccgagtgcttcctcacaaaatgatgcatcctgttgccagcagtaatccagctttctgtgggcctggcaagccttcctgcctcaatgaagatgcca

SEQ ID NO: 767723 - DNA, 83 bp, Homo sapiens
gcctcctgagtagctgggactacagggtgaggtggctttgaccccgggttgcccggccagcacgaccgaggaggtggctggac

SEQ ID NO: 767724 - DNA, 75 bp, Homo sapiens
cggagagagaaaaccatgatagaagtagaagctccaatcacaggttatggaggttttgatgactatggtggctat

SEQ ID NO: 767725 - DNA, 80 bp, Homo sapiens
gcgggcgcctgaaggagttgttgtctcggcagcgcccgcggagacgtgaagaggagtccaatgtgctgattgctgctaac

SEQ ID NO: 767726 - DNA, 75 bp, Homo sapiens
cacgagtggccagtagggctgagatgttgggagccatcaatcagccatggcaatgacaggctcaacaccttgctc

SEQ ID NO: 767727 - DNA, 90 bp, Homo sapiens
tagggctgtggtgatggatgaggtggtgctgacaatcgagcaaggaaacctgggttcagaacttggcagtaaggaatcaacaggcctcag

SEQ ID NO: 767728 - DNA, 98 bp, Homo sapiens
cgccgccggggtctgagcccgggaagaccgagacttcagctacgggacggacgagtacgacggagaggggaatgaggagcagaaggggcccccggagg

SEQ ID NO: 767729 - DNA, 100 bp, Homo sapiens
cggggacccgctgatcttccagctcccctcacccaacgtcgtgtttggtgcacctcgatttggaggaagtagggcagggcccttatctggaaagaagttt

SEQ ID NO: 767730 - DNA, 88 bp, Homo sapiens
gctgaggagaggagcgtcaacagcagcaccatggggagcagattttaagagtaaaagaagatgagaatgttccatttctactggttgg

SEQ ID NO: 767731 - DNA, 100 bp, Homo sapiens
gccagcggtgttcggcgtcctcggccgcacggaggaggccctggcgctgcccaggacatttttattccttccccaagtctggaagaacaatcaaatgatg

SEQ ID NO: 767732 - DNA, 88 bp, Homo sapiens
gagatgaggacagcactggcaatgatgaggacatcatggtggactcagattgcgcagtctctttgtggagaggacttgatcattaaag

SEQ ID NO: 767733 - DNA, 90 bp, Homo sapiens
cgaggtgctgacgtcgcaaaaaaattggatagtctgccatcatggatgttctcgcagaagcaaatggcacctttgccttaaaccttttga

SEQ ID NO: 767734 - DNA, 82 bp, Homo sapiens
ggtcgtggaagctgagcccatattaagagatgtcagggggatatgagactttctactcggaatatcctgagtgttgcgtgga

SEQ ID NO: 767735 - DNA, 100 bp, Homo sapiens
gaatttgaagatagagacaggtctcatcgggaggaaatggagcggccctccaggcactgaagcgtaagaagaggtatgagaagcagctggcgcagatcga

SEQ ID NO: 767736 - DNA, 100 bp, Homo sapiens
aggaggcagtttccctggtgaaaggatcctacaagaccctcaggctggtagtgcgcaggttctcctgaaaagaaagctgaacattcatctataaatcaag

SEQ ID NO: 767737 - DNA, 82 bp, Homo sapiens
aaggcgtctgcgagaccatggagaacggggtcctgccctccggaggagcagcctcgaggctggtggttttcagagcaggagg

SEQ ID NO: 767738 - DNA, 90 bp, Homo sapiens
gaaatagaaaaggagaaagaattgcttatacatgaaagaggggcatcaggccttgaaccggggcattgctgctgtcaaggaggatgcagt

SEQ ID NO: 767739 - DNA, 100 bp, Homo sapiens
gagtttgaggtgtacggacctatcaaaagagcgcagttgtgtagcagttgagtaatgctggttagctgttaaggtggcgtgttgcagtgcagagtgcttg

SEQ ID NO: 767740 - DNA, 90 bp, Homo sapiens
tcacggtgttctacgcagcaatagaagagctgaaactggtcagcggcctgcagcagctggcctaccacactgtgaatcgtcgctatcggg

SEQ ID NO: 767741 - DNA, 75 bp, Homo sapiens
gccacatcttcctgacccgcttcaagaagcctgctgagttcaccacagatctgggcggaccccggcaaatacgcc

SEQ ID NO: 767742 - DNA, 75 bp, Homo sapiens
aaataactgctctgtccagtgagatagaaagtgagacgagagaagagcggacatttaggaactggatgaactccc

SEQ ID NO: 767743 - DNA, 82 bp, Homo sapiens
gacctttttaattaaatatggcctgttacatgagttaaaggtgtgcaactgaggaacatggctcaagaaactaatcacagcc

SEQ ID NO: 767744 - DNA, 75 bp, Homo sapiens
agcgtggccctgctggaggcctcgctgaggaacgacgccgaggaaggtcagcccaaggccaaccccactgtcact

SEQ ID NO: 767745 - DNA, 75 bp, Homo sapiens
ggctgttgttcttttcttttccatgatatcattatatggacagtttaggagtggtggacatgacaacagagtcaa

SEQ ID NO: 767746 - DNA, 75 bp, Homo sapiens
agaagggcaggacctgggcggaggccgccaagacgattcaggggtcagtttacttcataaaaaatcattagaaaa

SEQ ID NO: 767747 - DNA, 96 bp, Homo sapiens
gttgatatcggtggtaacgacggcctcagcaggcggggaagatgaaagggtgatctgcaactctttcaccatctgtaatgcggagatgcaggaagt

SEQ ID NO: 767748 - DNA, 75 bp, Homo sapiens
gggacatgcatcgtcccctggactctctcaatgagaaagatcagtctaaagaaaaggagaagaaagtgaaaaaaa

SEQ ID NO: 767749 - DNA, 83 bp, Homo sapiens
ctttatttctcgtcggcggcgccctgcaccgcgcctcgcaaacaggttacgggcaggacttgagtggcttcggacagggcttc

SEQ ID NO: 767750 - DNA, 95 bp, Homo sapiens
acaaccacgggaagccgcggctctccaagttctaccagccctacaacaatcaaccatgacgaccgaatctggatcagactcggaatccaagccgg

SEQ ID NO: 767751 - DNA, 100 bp, Homo sapiens
ccaagacagagcgctactcctggcagtgcgtcaatcagagcgtcctgtgcggaaaaggccaaagttgttgagcccctggactatgagaatgttattgccc

SEQ ID NO: 767752 - DNA, 82 bp, Homo sapiens
aagaggaaagtcttgcctctccattttcttccgttcatgagagctcatctcctgtcctgggtgtgaacgagtatatcttacc

SEQ ID NO: 767753 - DNA, 74 bp, Homo sapiens
agaatcttccaatgggagtctctcagtagaatttcgacatttgatgcagacaatctctttgaacatgaattggg

SEQ ID NO: 767754 - DNA, 87 bp, Homo sapiens
tgggcagcgcccgcgccccgccgctgagccgtcgcggagccgcgcagccctcggagcacgcttcaaggttactgactttttatgatg

SEQ ID NO: 767755 - DNA, 125 bp, Homo sapiens
caacggccaacttcggcaagatccagatcgggatttacgtggagatcaagcgcagcgatgactgattttgcacgatttagcggaacaaatgtggaaactgactttgtagaggtgccatcgcaaat

SEQ ID NO: 767756 - DNA, 98 bp, Homo sapiens
gacggaagcccaagtggcacaaatgcagaaactccctctggtgatgatttcaggagggacacatctggggctctatgaggaggacagctttcatcctg

SEQ ID NO: 767757 - DNA, 98 bp, Homo sapiens
tgtaaagcaaagaacaaaatgaagtgtgattcaaggtgggaaatagccgcttcaggttttataggatcacattgacaaaagtaccatggagttttatg

SEQ ID NO: 767758 - DNA, 74 bp, Homo sapiens
tttattgtggtggagtccaccccgctgtgcttcagtatcagacacagcacagcagccatctgaagagcaaagca

SEQ ID NO: 767759 - DNA, 120 bp, Homo sapiens
gaggcaggttcggctggaaggaaccgctctcgcttcgtcctacacttgcgcaaatgtctccggaagttggtgaaccatctaaagaagagaaggctgtggccaagtatcttcgattcaact

SEQ ID NO: 767760 - DNA, 100 bp, Homo sapiens
gaggctaagaaagtggtgaatcccctgtttgagaaaaggcctaagaattttggcattgaacgtgctggccaaagcgctctatgacaatgtggccgagtcc

SEQ ID NO: 767761 - DNA, 98 bp, Homo sapiens
tcccggcccctgcagtccggatactcacgccagaaggaaagaccacagcaagattctttcattcgtctcctcctagcctgggggaccaggctcgaact

SEQ ID NO: 767762 - DNA, 88 bp, Homo sapiens
ggggaagacaaatatggaaacaaatactatgaagacaacaagcaattttttggacgtcattatggagcagtaacttgtgaaggctgca

SEQ ID NO: 767763 - DNA, 140 bp, Homo sapiens
tggaatcatgatgataatcatagcagcacttttcacagcatcagcagtcatctcactagttatgttcaaaaaatacaagccagctgccatgttgtgagcacataccacatagctccatggagatgcccatgtgactgtga

SEQ ID NO: 767764 - DNA, 75 bp, Homo sapiens
tgcagtgccatcggcaggaccgtggcaggagacaggctctggttacagttcagacttggttccttcaacctagag

SEQ ID NO: 767765 - DNA, 75 bp, Homo sapiens
gacctgcctgggcatagacttccttaaggtggattctccacagttttcctcgtgcgtactcacggtggaatccga

SEQ ID NO: 767766 - DNA, 100 bp, Homo sapiens
cagcagccgccgccagagcaggacgaaccgccaatcgcaaggcacctctgagaacttcagactataatgtaactgcaaactccaagctggtcattatcac

SEQ ID NO: 767767 - DNA, 100 bp, Homo sapiens
ttccgacatgactcaggatatgaagttcatcatcaaaaattggcaacatcagatgctgacctgaaagaacatatggttggaatcatattcagcaggagta

SEQ ID NO: 767768 - DNA, 100 bp, Homo sapiens
gaagatgtggacttgccctgcaccgccccctgggatccgcaggttccctacacggtctcctgggtcaaggtttctaaggtaaacggagtcactcgaatgt

SEQ ID NO: 767769 - DNA, 97 bp, Homo sapiens
aatggagaaaacaagacaagcccattcattcatttgagcatagcaagtggagccgccaccaaaatgcagattttcgtgaaaacccttacggggaaga

SEQ ID NO: 767770 - DNA, 101 bp, Homo sapiens
ctcattattttaacatttgggagaaacacagccagaaggttcgagaaaacaactacacctatgaatttgatttttcaaaagtctattggaatcctcgtctg

SEQ ID NO: 767771 - DNA, 100 bp, Homo sapiens
aagtaaaggaacccaacagagatctcttctgttctccactgctagggattgcttggcattttgtacagaaccagtttttgccagtttagccaatgttctt

SEQ ID NO: 767772 - DNA, 100 bp, Homo sapiens
gctcacatatcagagggcattatgaacgaattctcaacccctacaacttattcctgtccggagacagcctaagggtgggcaccatgtccttgaagcttca

SEQ ID NO: 767773 - DNA, 96 bp, Homo sapiens
aggggccccagcagcccccgaaggccctatcaggacatggagtatgaaagacgatgtgttcagagcaacattgttttgttgacacaagcatttaga

SEQ ID NO: 767774 - DNA, 82 bp, Homo sapiens
gcctcgtcgacatgagtgatgtggaggaaaacaacttcgagggcagataacaatgatgatgttatgttgatttctgtggaaa

SEQ ID NO: 767775 - DNA, 90 bp, Homo sapiens
ttctggagtccaaagaaaagaatacacagggacccaggatgccgcgaactgctaagaaggcaaagtgctcttaggagaagaagaagcctt

SEQ ID NO: 767776 - DNA, 75 bp, Homo sapiens
gttgctcttctccgccgcggcactgatccccacaggtacatccagacactgaaggaccacaggccccggatggtg

SEQ ID NO: 767777 - DNA, 78 bp, Homo sapiens
gaagttggaagtgtctcttagcagcgcgcggagaagaacggggagccaggaccatggccaacctggagcgcaccttca

SEQ ID NO: 767778 - DNA, 100 bp, Homo sapiens
cagaggaattgggtcccacaaggccaagtggggaagcagaaacaactcagatggagttatccccagctcccactataagaaccccgaaagttaagttatg

SEQ ID NO: 767779 - DNA, 76 bp, Homo sapiens
cgcaggcctggtgcaaacagactcaagaggctcggagaaccagcttggataaacaggggtcacatgacgacagaag

SEQ ID NO: 767780 - DNA, 105 bp, Homo sapiens
ctaaccaggcgtccgctacttcagaagagtgtactgtcgcatggggagtctgtaacgtaatagcctgcagctggtgttttgagaagccctactgctgaaaactta

SEQ ID NO: 767781 - DNA, 90 bp, Homo sapiens
aaaagcagctcttgccagttttgaataatttctgcatgaatagaccagtaagaggctcttgcagccaatgccggaacaggatttgctgtt

SEQ ID NO: 767782 - DNA, 100 bp, Homo sapiens
agaccgtgaccgagagcgtgaccgagagcgcgaatatcgtcatcgttagaaggtgcaaaatgagttgataacaaccagaagttgacttgttagtgctgtg

SEQ ID NO: 767783 - DNA, 88 bp, Homo sapiens
tctccactggttcctgggcaccgaaagcatttgacattgtgcagcaaagaaatggttatggagaagcccagtccgctgcttgtagggc

SEQ ID NO: 767784 - DNA, 51 bp, Homo sapiens
gaaaaggcctaagaattttggcattgaacacagatatgtagaactcttctt

SEQ ID NO: 767785 - DNA, 90 bp, Homo sapiens
agatgatgataatgttttcagcagcaatttgccctcagaggcatgttatgttacccagagaactttccaaacaagtacctaaaactcatc

SEQ ID NO: 767786 - DNA, 83 bp, Homo sapiens
gccaagtttcagacagaccgtgagcaaacatccagtcatggataaaaatgagctggttcagaaggccaaactggccgagcagg

SEQ ID NO: 767787 - DNA, 89 bp, Homo sapiens
acaagatggcggacggggagctgaacgtggacagcctcatcacccggctgctggagggtccctgtgcgttttattgcgacctgccggtg

SEQ ID NO: 767788 - DNA, 119 bp, Homo sapiens
cgagcagcgccagcggccgagcgggcggcttcctggcctgggcgctccggtggcggcggagcgtttgcctcagcatggagggcggggccgcggcagccacccccacagcactgccttac

SEQ ID NO: 767789 - DNA, 100 bp, Homo sapiens
ctgacttcagcgtccgggcactcgtggacttgcagtacatcaaggacccactcttctgtttgtaaaggtgacccaagggaaagaagaaactcggaggttt

SEQ ID NO: 767790 - DNA, 75 bp, Homo sapiens
aggaaataggatttaaccgctctctgcctcccaggcctgtttaaagaagaaaacccgtatgctagatttgaaaac

SEQ ID NO: 767791 - DNA, 50 bp, Homo sapiens
catcatccgctatgcaattggggccagcgagagatggagctaccgtgtcc

SEQ ID NO: 767792 - DNA, 75 bp, Homo sapiens
caaacgagattggggccatgccaaggactatgtggagggtgtgggccgaagatatgctcatgtggtgttgaggaa

SEQ ID NO: 767793 - DNA, 88 bp, Homo sapiens
gaccagaagcaaagactatgcccaattcttcaactcctaccagccagatcaacacaattgatagtgcaggtggtaccattataacgaa

SEQ ID NO: 767794 - DNA, 82 bp, Homo sapiens
gaagtttgtaagagaagttctagaaaaatgtatgagtcatccctttcaagccctgatatcttcgactccccaagtcccgaag

SEQ ID NO: 767795 - DNA, 82 bp, Homo sapiens
gaccagagttagtggaatccacatatctcctctaccagtgcctccggagccagcgtggtggccatagacaacaagatcgaac

SEQ ID NO: 767796 - DNA, 100 bp, Homo sapiens
cagctatgctcccccagacatcacaaccttggacatcctcatcatggatgatgacgacgtccccagctggcctcccaccaagctgtccccgccccagtct

SEQ ID NO: 767797 - DNA, 83 bp, Homo sapiens
ccaagaaccaaccctgccagcacctggaccttggacattcagacttcagaatgaatatgcttttaaggctattaaccagggtg

SEQ ID NO: 767798 - DNA, 88 bp, Homo sapiens
ctcccacaactgcctggtccgcgagggcgacatggagtccaatgggaaatacatcaccaaatctggaacccgtgtggaccaccagaca

SEQ ID NO: 767799 - DNA, 83 bp, Homo sapiens
ctcggatcgaatccctcacgcgggcgcggatcgaccggagcagagagctggcgagcaaggatgtcctggaacaggtggaggcc

SEQ ID NO: 767800 - DNA, 97 bp, Homo sapiens
caagaaagcattggctcaggtcttctgtgaggaatctggattgtcacctttgctgcaaaaaattacggaggagctgaaggtccccctagaggagtat

SEQ ID NO: 767801 - DNA, 89 bp, Homo sapiens
gcacgagcagcatcaggtcaccggcatcgacgacgccttcgacgagctgcagggaattaagttcaaacgaataggtgttccttctgcaa

SEQ ID NO: 767802 - DNA, 75 bp, Homo sapiens
aatattcccaagtccttcacccgggacggggaggtttactgcatcgacgcgcggttctacgggaacgtcagccgg

SEQ ID NO: 767803 - DNA, 83 bp, Homo sapiens
ggcgcctccactccgtcccccgcgggtctgctctgtgtgccatggacggggtgaggtggctttgaccccgggttgcccggcca

SEQ ID NO: 767804 - DNA, 98 bp, Homo sapiens
catgaccaccactacatcagaactgacatttcagagcactactggctcaatgattacctctctagtgacccttcagctgttaaccctggttggccatg

SEQ ID NO: 767805 - DNA, 100 bp, Homo sapiens
ctgctgctggtggccgcctgcttcagtctgtgcggcccgctgttgtctgcccgcacccgggcccgcaggccagatatttggagttcttacaacatggcag

SEQ ID NO: 767806 - DNA, 121 bp, Homo sapiens
ctgggtgaacgagcgcttccttataggatctctgcccacagtcagcagcacaacagaggcgggctttacaggaagtatggtgctggcatctgcttggcttctagagagtcttacaatcgtg

SEQ ID NO: 767807 - DNA, 50 bp, Homo sapiens
ggacatagtcaaggctacacagttagcgtccccaaaatgaaacataagcc

SEQ ID NO: 767808 - DNA, 89 bp, Homo sapiens
cagaggtttgacgcaatcctgaaggcagcgcagtcagccaatatttctgtgcggggctatcatggtgaacttacttcagattgtgcggg

SEQ ID NO: 767809 - DNA, 75 bp, Homo sapiens
aatttgctaaagaactcatcaggcacaatctgcagcagtgttgtactgctacttctataaacggacagccgtaag

SEQ ID NO: 767810 - DNA, 115 bp, Homo sapiens
cctttccaaaccagacccctgtgtcatcctcaagatgcagtctcatgggcagtggtttgagtattggtaaaggttttcaaggtgtcatgaaaagatggggatttaaaggccagcc

SEQ ID NO: 767811 - DNA, 82 bp, Homo sapiens
cagaattataaattgtactacatggaaaaggggactgataaagaacaggagcttggtgttggtggcacgagtcagtggaaaa

SEQ ID NO: 767812 - DNA, 75 bp, Homo sapiens
ttcattatatttttaatgtgcaactagcctgtgagattcaggttgcacgttttcaaaaaatacctaatggtgaaa

SEQ ID NO: 767813 - DNA, 100 bp, Homo sapiens
tgctctgtaccaactgccggaaagtgctgcggaaggtttagtccttatgagtggtataatccacacccttgcaaccctgactcagacgtggtggaaaaca

SEQ ID NO: 767814 - DNA, 100 bp, Homo sapiens
caggacctgagcaggaacctggagttttcagtgtgacaccatcgccacaacaggctcgggtctgtcctccccatatgttacctgaagatggagctaatct

SEQ ID NO: 767815 - DNA, 100 bp, Homo sapiens
cctgccagtaacacaaaattaatagcaatgaaaactgagaaggaggagatgagctttgagcctggtgaccagggccgttgctccagggagaactgcaaat

SEQ ID NO: 767816 - DNA, 75 bp, Homo sapiens
agctccaggaatcctcccaccacagtctctcaaatacttgggactacaggactggaatgtcacgtggaataccag

SEQ ID NO: 767817 - DNA, 98 bp, Homo sapiens
cggcctctgcgagccccgggtcccgccctggggccggcgatgtgccaccgaggctgaggatgatggtagattgccagacaaatatggtctctttagaa

SEQ ID NO: 767818 - DNA, 83 bp, Homo sapiens
gaggacccagaggaaacccagccgcttctggggcctcctggcggcagttcgtgccctcgtgaggctggcatgcaggatggcag

SEQ ID NO: 767819 - DNA, 75 bp, Homo sapiens
gcttctagaccctactgcggtctcggatattgccggagttttccgtctgatgaaggttggccatttgcaaagtat

SEQ ID NO: 767820 - DNA, 101 bp, Homo sapiens
agacaataagtatgttccctactcggagagcttcagccaagttttagagtggacttggttacttatataacaaggttccagtgggacatggccaaatatcc

SEQ ID NO: 767821 - DNA, 98 bp, Homo sapiens
actttgttattggagaaacatgcagattatatcgcatcctatggctcaaagaaagatgattatcacttgactacctttgtcctggatcggaaagatgc

SEQ ID NO: 767822 - DNA, 101 bp, Homo sapiens
ctcctccctagaaggaaaagtcagcgaagataaaagcagagaatttcaatctcttctaaaagggacagcaatcagacctattgctttgagagctgtgacct

SEQ ID NO: 767823 - DNA, 100 bp, Homo sapiens
ccgagctgctggagaactgaaggcggacagtctcctgcgaaaccaggcaatgggaatggtcctcgtccgaagtgagaatgggcagttgttaatgattcct

SEQ ID NO: 767824 - DNA, 75 bp, Homo sapiens
gaacagtttccggtcaatgagcactattttggattagtcaattcataccctatggtactgcagtatcgaccaaga

SEQ ID NO: 767825 - DNA, 97 bp, Homo sapiens
tcaagtaatggtgcaaagcctgaatcctattttgtaacggattatgatccaaccattgaagattcttacacaaagcagtgtgtgatagatgacagag

SEQ ID NO: 767826 - DNA, 50 bp, Homo sapiens
acttgcttgagtgtttcagtgaaaaggcaaacgaatgcacgtgcagttgt

SEQ ID NO: 767827 - DNA, 100 bp, Homo sapiens
tggatggggtgaactaccttcacacaaagaaaattgctcactttgatctcaagttccctgtattgaacactgatatacaaggaatgaatagaagtcaaga

SEQ ID NO: 767828 - DNA, 90 bp, Homo sapiens
tgggggctcatctccccgcgtccggcttggatatcttcggggacctgaagaagatgaacaagcgccagatatgttgatgatgtgatcagc

SEQ ID NO: 767829 - DNA, 51 bp, Homo sapiens
gcctagcagtcgggaccgtactgaggctttgaagacaagattcccaaaagg

SEQ ID NO: 767830 - DNA, 100 bp, Homo sapiens
ccggcgagcgccgcccgggaggcagcggctggaggagcggacgggccccgcggggcccgagggcaaggagcagtgaatatggaggtgagaccataccagg

SEQ ID NO: 767831 - DNA, 83 bp, Homo sapiens
ttcaatatcttcacccagcatggtgactctcctattccatctgtttcttcgggatcatcttcacctctttcagccacttctgc

SEQ ID NO: 767832 - DNA, 100 bp, Homo sapiens
gggagagaaatcacaagccgtcccgatccttctctaggtctcgtaggggctgggtgaccgatggcttcagttccctgaaagactactggagcaccgttaa

SEQ ID NO: 767833 - DNA, 97 bp, Homo sapiens
gccgaaggggcgtctgcggctctccgccgtccccagccctgcctctccctgggctctggtgacttcatggtcatgacgattttcttcaatgtgagca

SEQ ID NO: 767834 - DNA, 82 bp, Homo sapiens
atgcaaataaatcccactttagatcttacagctaactgtgtgccttagaaaccaggacatggatttgattgacatactttgg

SEQ ID NO: 767835 - DNA, 75 bp, Homo sapiens
cggcgccgagtcgaacggggagccgagctggagctgccgcggcgcagccaggccaagactaaggggctgcagagc

SEQ ID NO: 767836 - DNA, 90 bp, Homo sapiens
ttctgcactgtttacaggcacaggttggactccatgaaagaattgcacaaaacaaatcgacagcagcatgagaaacatctgcaaagccga

SEQ ID NO: 767837 - DNA, 75 bp, Homo sapiens
tgctgaaaacagcctcaagaaaccagtaacagattgtgttatttcaaatactgagaatatacttcacacattgac

SEQ ID NO: 767838 - DNA, 101 bp, Homo sapiens
gcggcggccggcgggaccataagggcttaactcatatatttaacccccctccaaaaagtccatgaaagacctcctcctccttctccacctccctctacaat

SEQ ID NO: 767839 - DNA, 100 bp, Homo sapiens
attcaggctccggacccataccagagaattatgatcaacttcaaccctcacttcgatttggaggacagagactgcaacccatgaaacccctgaaggccac

SEQ ID NO: 767840 - DNA, 98 bp, Homo sapiens
agttcgacacccaagagcagcttgtgcaccacatgcagatgacaatccaggctctccaggatgaattgcggatccagagggacctgaatcagctgttt

SEQ ID NO: 767841 - DNA, 100 bp, Homo sapiens
accgttggttcgtgctggactacaatgcaggactgctctcctactacacgaacactcgtgaaactgctcaggccatcaagggtatgcatatacgaaaagc

SEQ ID NO: 767842 - DNA, 75 bp, Homo sapiens
gtggtcgccgtgctctccgggcacgtcaaccccttcctcccgtatatcagctacaagagccaaatactgatcgac

SEQ ID NO: 767843 - DNA, 85 bp, Homo sapiens
gatattgctactgtgtgtgattcagaagccccatgtgccactcccctgatctgcagcttcggtaggccggtggacctggagaagg

SEQ ID NO: 767844 - DNA, 110 bp, Homo sapiens
ggcccacctgtgtcctggttgagggtctccagggttctttggggcccgaggagtttgattggccaatacaaggactgcttgttccgagcagtcctcccatgaagaaaccc

SEQ ID NO: 767845 - DNA, 87 bp, Homo sapiens
accagctgaacaggccaaagccagactacagctggttcttgaagctgctgggtatttgaagtataccatacaactgttttgaaaatc

SEQ ID NO: 767846 - DNA, 127 bp, Homo sapiens
atagactgggggctgcggcctagaggtccgggcttggagttcgcctcagacgcggtggagccgccggagtctgagaagctctccactccttcattgggacggaagtgctggtccccgcctgccctct

SEQ ID NO: 767847 - DNA, 100 bp, Homo sapiens
agcgatagcccagtggatggccattccaggtgtggatgtggaagcagccaagcgggcagaagaggaattgctccttcatgacacgaggtgctggctgaat

SEQ ID NO: 767848 - DNA, 50 bp, Homo sapiens
tgtggtctacttatcaagttaggaggaggccccgtgtgggccgcggcccg

SEQ ID NO: 767849 - DNA, 133 bp, Homo sapiens
cttccctgagcagcttaccgccctgccggcgctggagaccatcaacctggaggagaacgagatcgtaggggagccctcccagcctcccaacagcagttggcccctaagtcagaatgggactaacactgaggcc

SEQ ID NO: 767850 - DNA, 83 bp, Homo sapiens
ccagcagctgtcgccgccgctctcagatttggtcgtattgggcgcctggtcaccagggctgcttttaactctggtaaagtgga

SEQ ID NO: 767851 - DNA, 75 bp, Homo sapiens
gccaccaacagtatggaagagactctgatgcaaataggctttccttaaagtttcccatgtctcaatggactcctg

SEQ ID NO: 767852 - DNA, 89 bp, Homo sapiens
acccaccggagcctggcgcagcctccctctattaccaggattttttatcaagcagaaatgcatcgaacaacgagaatcaagatcactga

SEQ ID NO: 767853 - DNA, 83 bp, Homo sapiens
cagtgatctgccttaagggcagtcaatggtcagatattgaagagttctgcaatcgtatgggcttattttgccaaagaaaacac

SEQ ID NO: 767854 - DNA, 93 bp, Homo sapiens
ggcggcttcctggcctgggcgctccggtggcggcggagcaggttcaggagaagtggcacctggtggaggacctgtcgcgactgctgccggagc

SEQ ID NO: 767855 - DNA, 100 bp, Homo sapiens
ctgctgctgctgcccgcgtccgaggctcgcgggcggcgggcccggctccaccgggggacggctacgtgcaggcggacgcccggggccccccggaccacga

SEQ ID NO: 767856 - DNA, 90 bp, Homo sapiens
gggctcagagatccaagtgcgcgccctggcgggtccggaccaagagatttttgctgtgagaattaattaccagtaacagttcaatatggg

SEQ ID NO: 767857 - DNA, 100 bp, Homo sapiens
agtcggcggtggcggcggcaccaaggcccccaagccctccttcgtgtcgtacgtacgccctgaggaagccctccaaaaaatacggcagaagaatacaatg

SEQ ID NO: 767858 - DNA, 100 bp, Homo sapiens
acaccttgaaccagattgatgaagtaaaggtgtggcctcagtattcgtgtgccgtgagtcccactgactgcagtgctgttgagccggaggctgagaaagc

SEQ ID NO: 767859 - DNA, 100 bp, Homo sapiens
gaaagccttggctcaaggatacagagctggtagacccagtgtaatcacaagcatccttgtaagtggcaaagaggcagaggagacagcgccagagaggcag

SEQ ID NO: 767860 - DNA, 75 bp, Homo sapiens
catgctgctggcttccaagggagatgacccagaggatgccaaggcaaagtatgaatctgatgaacaagaaaagag

SEQ ID NO: 767861 - DNA, 75 bp, Homo sapiens
cccatccccccctccccgagacccaccggaccccgaacccaggtggacatgatctcactagccaagcagatcatc

SEQ ID NO: 767862 - DNA, 96 bp, Homo sapiens
gacagctgagtttcaaaggcaagagcctcaaactcaacactgcagaagatggtcttctttgtgatccgcctcattgctggccctgctgccaactcc

SEQ ID NO: 767863 - DNA, 100 bp, Homo sapiens
ccgcggaaaccgatctgcccgttgtgtttgtgaaacagagaaagataggcggccatggtccaaccttgaagcgatctgaagataaaggttggggacaggc

SEQ ID NO: 767864 - DNA, 83 bp, Homo sapiens
gccgagtgaaatcgtgcatttgcgcggagctggagtttgttcagatcatcatcatcgtggtggtgatgatggtgatggtggtg

SEQ ID NO: 767865 - DNA, 51 bp, Homo sapiens
gtcgccgcgtccttggctggcgtatccgagagactgaggtcatcgaccccc

SEQ ID NO: 767866 - DNA, 82 bp, Homo sapiens
aaagaagactcttgtcacactaattgccaacaacaatgatccaaaatacggagctggcatatacttcaccaagaacctcaaa

SEQ ID NO: 767867 - DNA, 100 bp, Homo sapiens
gaggagatgacttatctaatcagggagaatgcagctatgaattggaagttgaatcttatttacaaatggaagatgttacctcaacatttattgctcccag

SEQ ID NO: 767868 - DNA, 90 bp, Homo sapiens
gctgcgggcccgctccgacgcggaagatgaggaaactgagacccagaaaggtggaagcacttgtctaaggtcacgcctccaggaagcagt

SEQ ID NO: 767869 - DNA, 82 bp, Homo sapiens
gcttatgaattggttcgtagaggtttgagaaatgacttgaagagtcatgtgtatgtggcccggccagataagatttcaggag

SEQ ID NO: 767870 - DNA, 100 bp, Homo sapiens
tcttctgaggcgggaactgtttggctgccccagtgaggctgatgtcaacagtgaaaacaccccctcagaattcctggagaaccccagccagagctcccga

SEQ ID NO: 767871 - DNA, 114 bp, Homo sapiens
ggatgccctgcagtacctgcagaaggtctctggagacatcttcagcaggaatgaatctgaagtctgctgcagtaaaacacagaaggctttaaaatgttttcttgcataaaattc

SEQ ID NO: 767872 - DNA, 75 bp, Homo sapiens
taattccttttcgaccttcaatccagttccaaggactccacggggaattgaatgatctggcacgggaccctccag

SEQ ID NO: 767873 - DNA, 100 bp, Homo sapiens
atggcggacttctacaaggaatttttaagtaaaaattttcagaagcacatgtattataacagattcagtacctctcgccagactctcacctggatcccag

SEQ ID NO: 767874 - DNA, 97 bp, Homo sapiens
gaaaccattaagcttgtgcgtcaagtcatggggtggcactgaatcaacaagacaagcaactcaattgattaatgctttgatcaaggatccagacaaa

SEQ ID NO: 767875 - DNA, 100 bp, Homo sapiens
ggtgaggccaccacgaggaaagaggcagagcagctttgccaccggcttatggagcatggcatcatccagcatggctcgcttctcatatgtgcggatgaaa

SEQ ID NO: 767876 - DNA, 75 bp, Homo sapiens
ggaagatctttttcctcaattggaagccagttgagggaagttctccatgaatgtacgtcacaatgatgatgaccg

SEQ ID NO: 767877 - DNA, 80 bp, Homo sapiens
ggagctgtgcagccgcgaggaggcgcgggaggtgttcgagaacgaccccgagacggtcagcccaaggccaaccccactgt

SEQ ID NO: 767878 - DNA, 75 bp, Homo sapiens
cgactgtgcaggaagaaaacgagccagtgatttacaatagagcaaggcaggctgttaatgccactgggcaccttt

SEQ ID NO: 767879 - DNA, 78 bp, Homo sapiens
aagcagcagaagatcgagcaggagcgcaagcgccggcagaagcaccagtttaaacccattttcctgaacacaattgac

SEQ ID NO: 767880 - DNA, 133 bp, Homo sapiens
cccctcttacaacaagagtcctcaatccaacagcccagtgcttctgtctcgactgcactttgagaaggggatgtatggcattgagaatgaagtcttcctgagccttccatgtatcctcaatgcccggggatta

SEQ ID NO: 767881 - DNA, 82 bp, Homo sapiens
gggagaggagctgtggataacgggaggtgaatttccatgtcaacatagtcctgaggctgggaggcggcagaatgcagccaga

SEQ ID NO: 767882 - DNA, 153 bp, Homo sapiens
cacatgaaataaacaaggggcatccaaatcttgcggcaacgcccccgggacatgcatcgtcccctggactctctcaaaaacatgccaagggacaagtgttatttgacaaagtgtgtgaacacctcaatctcttggagaaagactactttggac

SEQ ID NO: 767883 - DNA, 90 bp, Homo sapiens
aagggtctctccagaaaatcttgtggacaaatccaggggaaggttatgatggagggtggtcgcagcaaagggtttggttttgtatgtttc

SEQ ID NO: 767884 - DNA, 98 bp, Homo sapiens
tgctgaggcagttggaagttatgacaccatggatctcttcaggcacactacagaactaaatatgcattaatcagttcaagaagttccctcagatgacc

SEQ ID NO: 767885 - DNA, 100 bp, Homo sapiens
accactggacctccaaggaagccacgtgcagacatctacaaccttcgatctcctgacgagtctgtggctcaggacatccccaagctgcagaaactaggca

SEQ ID NO: 767886 - DNA, 90 bp, Homo sapiens
gccttctctgtcagctctttccccgtcagcatcccagccgtgctcacgtagagacgggatttcaccatgttggtcaggccagtcccgaac

SEQ ID NO: 767887 - DNA, 76 bp, Homo sapiens
tggagatctttgtcctggacgtcaatgataacagcccacagtgttcacagaggcggggtttcaccatgttgcccag

SEQ ID NO: 767888 - DNA, 75 bp, Homo sapiens
gtaatggtagttccagtgggaccaacctgtgatgaatatgcccaaaagatcaagttttatcagccagtaatccta

SEQ ID NO: 767889 - DNA, 75 bp, Homo sapiens
aaaggaaagacttctgtgctcccgagaacttcctatcagagttgtctgatgtcctgtgggccatgctgatgcgcg

SEQ ID NO: 767890 - DNA, 100 bp, Homo sapiens
tactcgcgggaggctaacgctccgggccccgtacccggagagcggcaactcgcgcactcaaagattttaccaaatgttgcaagaactctggagttcttat

SEQ ID NO: 767891 - DNA, 100 bp, Homo sapiens
ccgcggacacgtgcggagagccgactgacactcgcagccccctcgggaggcccgacgcgactgggcccctcaggcaactttttgctccttcctacacaga

SEQ ID NO: 767892 - DNA, 108 bp, Homo sapiens
gaaattttagcacaactccggacacttgttttccagtgtgatcttacccttaaagctggtgtcctgatgtcagaagaagaagtgtttgaacttgttcctgatgatgag

SEQ ID NO: 767893 - DNA, 100 bp, Homo sapiens
gctccaagtcctatgagctcatccggaagattgaggcctacatggaaggctttgcttcacctctgggtcatgattgttctgttgacttacacaccagaaa

SEQ ID NO: 767894 - DNA, 80 bp, Homo sapiens
caggacctgtcggagaaggtggtctaccggcgcttcaccgagatctacgagttccattgtccccagttgtcctcatccag

SEQ ID NO: 767895 - DNA, 100 bp, Homo sapiens
cccgggtgcgggcccggcgccgcaccagcagaacgatgaacagactagccactttgcattgactggaaacaatggcatttacagaaagagtcaacagcag

SEQ ID NO: 767896 - DNA, 50 bp, Homo sapiens
cgagaattccgcagcccacacgataaaataccatgaggagtttgagaaga

SEQ ID NO: 767897 - DNA, 83 bp, Homo sapiens
aggaacatctctttcaatgacaaaaagtttgtcattaaacccatcgacaagaaggcacctctcatgatggagcagtccaagaa

SEQ ID NO: 767898 - DNA, 80 bp, Homo sapiens
ctttgttttcccacgctaggagctaccacaacagatctgggcggaccccggcaaatacgccctgatgggagctgctgccc

SEQ ID NO: 767899 - DNA, 100 bp, Homo sapiens
ctgcactacatccgcaagtacaaccgcttcgagaagcgccacaagaacatgtctgtacacctgtccccctgcttcaggttctgtcaggtgagctgttgtg

SEQ ID NO: 767900 - DNA, 90 bp, Homo sapiens
ctcaaaagttaggattgaagcctgcatgtggtgtgaagcagtattctggaaagtttttctaagactagtgaagaactgaaggagtcctgc

SEQ ID NO: 767901 - DNA, 50 bp, Homo sapiens
cgcttctccatctggctgctgatgggcacccatggacttggagaactggt

SEQ ID NO: 767902 - DNA, 100 bp, Homo sapiens
tggacgccgctttgttgcctgagctcctgttcgacacagtggagaccatgggaaaagactatttgtcatcagaccttctagattctatgacaggcgtttt

SEQ ID NO: 767903 - DNA, 90 bp, Homo sapiens
ggccagatggttcttacccaacgtttgatggctcatcaaactgcaatgtacaacaaataacactgtgactccaacctcacaacctgtgcg

SEQ ID NO: 767904 - DNA, 96 bp, Homo sapiens
atgtcggtggcggggctgaagaagcagttctacaaggcgagccaggacactcatgaggaccatgatacttccactgagaatacagacgagtccaac

SEQ ID NO: 767905 - DNA, 75 bp, Homo sapiens
acgtgttggacacgctgactttgtaggctccgccaagaggcgccgcaggagaaatgcactcggtgatggaaagag

SEQ ID NO: 767906 - DNA, 100 bp, Homo sapiens
cgacacagaaaccaagatggaagaattcaaggaccaattacctgctgatgaggctgtgacaaaccctgtgcccacgctgcctccactgccgggagactca

SEQ ID NO: 767907 - DNA, 99 bp, Homo sapiens
gcctcattggagtctatcctgagcccccaggctccgctcttgccagagggacaggagccatggctcagaaaatggactgtggtgcgggcctcctcggct

SEQ ID NO: 767908 - DNA, 80 bp, Homo sapiens
cttttggaatctgaacaagggattcgaagatatcccttggaaggtttcgtgactgaaaacagagaggcagggattgtttt

SEQ ID NO: 767909 - DNA, 51 bp, Homo sapiens
cggaaattgtggtgtacttgtgccatcgagtcagtggaaaggaaaaagcaa

SEQ ID NO: 767910 - DNA, 90 bp, Homo sapiens
tgcaagagcacgctatgagagatacagtggcaatcaggttctcttttgatagggccagatttgagtgtgtgaatttttgagtgaaacctg

SEQ ID NO: 767911 - DNA, 80 bp, Homo sapiens
ccaggagacgcaactcatcgggatttccagatgtgacttgcactcagaagatcagtggtcaacttcagaagctcttccac

SEQ ID NO: 767912 - DNA, 75 bp, Homo sapiens
acagcaatatctctgggctttcacaggtgatgagacaaaccatgcttctgccacatcaacacaggactttctgga

SEQ ID NO: 767913 - DNA, 83 bp, Homo sapiens
cgccgccccgaaactttcaccgcgagcgggaacaagatcactcaaggtgaaggataatctactaataccagcactttgaatga

SEQ ID NO: 767914 - DNA, 102 bp, Homo sapiens
ggtgctttcacaaaatggagagtggagaattcatggggtgaagaccatggccacaaagagtcaatcccgacgtgtcaatcccgacgatagagagctcggagg

SEQ ID NO: 767915 - DNA, 100 bp, Homo sapiens
gaaacacatttcatatactgcaggtgagaattatgaagatgatgacctagtaaattctgatgaggttatgaagaaaccatgtccagtacagattgttctt

SEQ ID NO: 767916 - DNA, 73 bp, Homo sapiens
gaaatttgattacatactgttagagaccactggattagcagaccctggtgaacacacagtgttcatcccctca

SEQ ID NO: 767917 - DNA, 100 bp, Homo sapiens
gatgccccaggcggcgggagcgtgctggtgatggagcacatggacatgaggcatctgagcagaattgaagaggagctgggcagcaaggctaagtttgccg

SEQ ID NO: 767918 - DNA, 82 bp, Homo sapiens
ctttgacgtgatggtgaacggcaagctcaccatggatgatgatatcgccgcgctcgtcgtcgacaacggctccggcatgtgc

SEQ ID NO: 767919 - DNA, 90 bp, Homo sapiens
aacgcgagtcggcgcgcgggacgaaggaccccaaaatgtatgtacagacagtgcttgatgttcataaaaaatacaatgccctggtaatgt

SEQ ID NO: 767920 - DNA, 75 bp, Homo sapiens
cgcgaatatcgtcatcgttagaagccaagatgcagattcacctggaagttctggggcccctgaaaacttgacatt

SEQ ID NO: 767921 - DNA, 50 bp, Homo sapiens
ctacatctgcagataaagtggagagcaggccagggagctggagagcagag

SEQ ID NO: 767922 - DNA, 76 bp, Homo sapiens
tgacggagaatccgtttcaggaaagataacttcattcagaggaccaagcagcgatataataatcccaggtctcttt

SEQ ID NO: 767923 - DNA, 88 bp, Homo sapiens
cggagggagccgcgggatggaccgcagcaagtcaagccagagatctgttatcaaaaatgttagtgattgatcctgacaagcggatctc

SEQ ID NO: 767924 - DNA, 75 bp, Homo sapiens
tccttgtttaatgactttggtgccctcaacatctctcagagacgaaagaggaggccgagcgtggcagcctcggcg

SEQ ID NO: 767925 - DNA, 90 bp, Homo sapiens
caaactggaggatgcctatgtattccctggggatggcgcatcacacaccaaagggcagagcggcttgggtaaatccaccttaatcaacac

SEQ ID NO: 767926 - DNA, 100 bp, Homo sapiens
atcacagacctgtacactgaccttcgagatggacggatgctcatcaagctgctggaggtcctctctggagagaggctggatcctaagcacttcaagtcag

SEQ ID NO: 767927 - DNA, 100 bp, Homo sapiens
cagcgaggacgaccagaggtcactctcgtcgccatcttggttttggcatagaatgtcaagctaaccaggcgtccgctacttcagaagagtgtactgtcgc

SEQ ID NO: 767928 - DNA, 75 bp, Homo sapiens
atggtcctgcactccatggactaaattgaacatcagaaagcctgggctttgaacctgaacggttttgatgtagag

SEQ ID NO: 767929 - DNA, 50 bp, Homo sapiens
atggaggcagaggtaaacttggagagtgcacagccagagaacaacacatc

SEQ ID NO: 767930 - DNA, 89 bp, Homo sapiens
ggaatctcactcttacttgcaatctgaggaaacggcacacagcaagaaggaggccatcagcaaactgggaagaggaccctcaccaggaa

SEQ ID NO: 767931 - DNA, 124 bp, Homo sapiens
ggggatccagtgctcccaacgcatgctcagcttcagtgacgccctgctgtccatcatcgccaccgtcatgtttctctacaataattggagttggtgttggagctggagcctacatcctggcgag

SEQ ID NO: 767932 - DNA, 83 bp, Homo sapiens
ccagataatcttctcaggacaccatccgttcaattggtacaaagctgtactttgaatactctgctcaacatgaaattcggcac

SEQ ID NO: 767933 - DNA, 101 bp, Homo sapiens
acaagtttacggtagtggtgttacgtgccaccaaagtgacaaagggggcctttggtgacatgcgtgatctgcaactctttcaccatctgtaatgcggagat

SEQ ID NO: 767934 - DNA, 97 bp, Homo sapiens
cgtcacggacactcctgagctacagagactgaagaggactcaggagcaaatcagtaatatgggggactcaaggagatttcaccaccacccatcctcg

SEQ ID NO: 767935 - DNA, 100 bp, Homo sapiens
gcctcccccggtgatgctgctgccagatgactttaaggccagctccaagatcaaggtcaacaatcaccttttccacagtgccggtggtggtgtgcacatt

SEQ ID NO: 767936 - DNA, 100 bp, Homo sapiens
ctgctgggcctgtgtgcctggaaaggaattgttttggcctaggatcatccagatccctcgggctggtggaagggccggcttcacggccaggagggccttt

SEQ ID NO: 767937 - DNA, 98 bp, Homo sapiens
gactgcagccaggtccaatcttacaagtctcaagtcttctctgcagctttaccgggactcaagagtagccttcctcgaggacctgcctttcccatttg

SEQ ID NO: 767938 - DNA, 75 bp, Homo sapiens
tggaaatgttcccagaacattgcacgatgcctcctggccctgggaggagcggggacactgaggacctctctccaa

SEQ ID NO: 767939 - DNA, 130 bp, Homo sapiens
aaaggccatggatgaagatgggcttgaattacaacaagagccaaactcattttttgatgcaacaggtacagtagcagagggagctcccattattccaatttcagctcagctgaaatacaatattgaagtt

SEQ ID NO: 767940 - DNA, 96 bp, Homo sapiens
gctcgctacagcactggattagctggaaacctcctgggagacctacattacaccactgaggctttatcctgtggataaacgcagagtgaacgagtt

SEQ ID NO: 767941 - DNA, 80 bp, Homo sapiens
cagtccatatgtaaccaaatattatggatcctatctgaagggaagaggaagaacgtctgagaaataaaattcgagctgat

SEQ ID NO: 767942 - DNA, 82 bp, Homo sapiens
gaccaacgtggaggagctgtgggtggaagataacgaaggaggcccaacttcattcaataaggagcctgacggatttatccca

SEQ ID NO: 767943 - DNA, 100 bp, Homo sapiens
gcccgcctgcggctgctccgggtgtgatgaatgcagactctgctaccattttggctgtttggatcctcctttgaaaaagtctcctaaacagacaggctac

SEQ ID NO: 767944 - DNA, 96 bp, Homo sapiens
cgctgctcgccgacaaggctgcacaacagcgtcaagggttccacactgttgggagtcgctgcaagaatcggacaggcgctgagcacctgtggctga

SEQ ID NO: 767945 - DNA, 101 bp, Homo sapiens
aggccggccaggacagcacccacacacggctgctggtagagggatgaggatatgttcatgaaatttgtaagtgaagatcttcatcggtgtgcacttttaac

SEQ ID NO: 767946 - DNA, 100 bp, Homo sapiens
cggcgagcctacgaacggggctgtcagcggctcaggaagcgcatcgaagggcgaccattgacgaggtggagacggacgtggtggagattgaggccaaact

SEQ ID NO: 767947 - DNA, 75 bp, Homo sapiens
agattccaaccttccagccccttttgaaagggaagaagagcccagacctaggggagtatgatccacttacccagg

SEQ ID NO: 767948 - DNA, 50 bp, Homo sapiens
gcgctggagttccacaactgcaggacagcatttgacattgtgcagcaaag

SEQ ID NO: 767949 - DNA, 100 bp, Homo sapiens
agatctgctacttgaactaccctaactcggcttgtaattccacatctgaagtcaaagatctattggaacagaaaagcaagttgaccatagaagtggctga

SEQ ID NO: 767950 - DNA, 100 bp, Homo sapiens
gaggcacgcaagctgatggttagattgacgaggcacactggccggaatgagaagtgtaaggctagaggatttaccgtgattgtggatggcagaaaatcac

SEQ ID NO: 767951 - DNA, 90 bp, Homo sapiens
ccaggccccggcagcgcctgggacaaggtaggtcgatttggacaattaacttatgttcgcagttatcagggagagctaaagaagggtgac

SEQ ID NO: 767952 - DNA, 90 bp, Homo sapiens
gtccctaaggctggagaccgggtccacaaagacgagtgcgccttctccttcgacacgccggcttgtctgagacgacaggaatatagaaga

SEQ ID NO: 767953 - DNA, 100 bp, Homo sapiens
tgaagtggaagaagaagaggaaatcctcttgaactcttacaccacaccttcaaagggctttgggaatctccccatctgcatggctaaaacacacttgtct

SEQ ID NO: 767954 - DNA, 100 bp, Homo sapiens
ccgggccgcgcacgccgcctcaggacctgctgaagctcacacccgtggaccacccagactgcctgccgctacaggatgccctccgcatctcccaggactt

SEQ ID NO: 767955 - DNA, 100 bp, Homo sapiens
gctgggtcccaggaatgtgctgctgttcctgcaggacaaggtgctgggtaggccaggtttcagcatcgcagacaagaagcgcaggacaggctgcattggg

SEQ ID NO: 767956 - DNA, 50 bp, Homo sapiens
gaggaaaacaacttcgagggcagagttttgagcaaaattttggactgtga

SEQ ID NO: 767957 - DNA, 83 bp, Homo sapiens
caacacatggtggaatgtatccgggaggtcaacgaggtcatccaggattctttctactaatccagatacttgttgaagtgctg

SEQ ID NO: 767958 - DNA, 78 bp, Homo sapiens
ggggtcccgaagccccctgcaggaactctacaacccaatccaggtttaaacttacacgaatcgctttctggaggagga

SEQ ID NO: 767959 - DNA, 83 bp, Homo sapiens
tgaagagcgacaagccgctggcagccgcggatctcaccgccgctcagggctgaagctcagggccctgtctgctctgtggactc

SEQ ID NO: 767960 - DNA, 100 bp, Homo sapiens
ctgaagctgaggacacacccaggaaaagactcaggacggacaagcacagtcttcggaagcctttctgagaaaagtctacagcattctttctctgcaggtt

SEQ ID NO: 767961 - DNA, 90 bp, Homo sapiens
cctgtcgctgacggcgactgcgggaggccagtccgagaaatgtggtttgtggtaggaaggaatggtggcctactccatgagcagagcctg

SEQ ID NO: 767962 - DNA, 100 bp, Homo sapiens
gtcaggagaggtgaggcaggctcgagtgcacggagcgtcccttccatcaggagagtgtcggagatgtatgcagtgtgacgccaagtttgactttctcacc

SEQ ID NO: 767963 - DNA, 75 bp, Homo sapiens
agctggcccagaaggagcaggagctagccagagccaaagaagccttgcaggtgtactaatggtcacttgatgtgc

SEQ ID NO: 767964 - DNA, 74 bp, Homo sapiens
aaggccaaggaatcactgaagatcggcgagggaggacagggggttcatcatggattgaccgactcatcagtcac

SEQ ID NO: 767965 - DNA, 75 bp, Homo sapiens
agttgcaggaaaacaagttcagggctcccactgattctacattatgagtgtgaacatggctacgcctcttcattc

SEQ ID NO: 767966 - DNA, 82 bp, Homo sapiens
aggattccaagtaactcttatttgtgtttgggaaatgggaagtaatgacagctggcacctgaactaagtacttttataggca

SEQ ID NO: 767967 - DNA, 100 bp, Homo sapiens
gaagacctcttatgctcagcaccaacaggtccgccaaatccggaagaagatgatggaaatcatgacccgagaggtgctgcccgcagatgagatccctaag

SEQ ID NO: 767968 - DNA, 127 bp, Homo sapiens
cgcgcattcggccccggacgaaggtactcgcagcacttggagcgcagaaccggccgcgcccggctttcagtccagtgtaaagctgttggagcgcgggagcaaaggtaaagaatgatgtaatgcgctg

SEQ ID NO: 767969 - DNA, 50 bp, Homo sapiens
gaagtaatggggctgtgcataggggaggcagacctgttatcctaaactag

SEQ ID NO: 767970 - DNA, 100 bp, Homo sapiens
ctgatcctaattcccttgctgatgatattgaatatgccgagtttctacattgcaaaggaaagaaatttacagattttgatgaagttcgccttgagattga

SEQ ID NO: 767971 - DNA, 90 bp, Homo sapiens
tgaaggcgaacgcttcgctggccatttaggagctctgctcaaagccagacggtcccttcaccgatgttgtcaccaccaacctaaagcttg

SEQ ID NO: 767972 - DNA, 75 bp, Homo sapiens
tacacttttcaccaaggaactggtgctgcagcgagagatggcttgttcaatcagtatatcagtcaacaggaatat

SEQ ID NO: 767973 - DNA, 100 bp, Homo sapiens
ctggtctggagggtggcatcatgcaaagaatgggttacccagaccaaactttggccatttaacggatccatttgacacaccagcatttaacaaactttat

SEQ ID NO: 767974 - DNA, 75 bp, Homo sapiens
atgctgacgaggagttcaaccaggtggagccgccaccaaaatgcagattttcgtgaaaacccttacggggaagac

SEQ ID NO: 767975 - DNA, 50 bp, Homo sapiens
aatagatgcttctaaatctgttgatgaaattcttggtgccaccattgaga

SEQ ID NO: 767976 - DNA, 74 bp, Homo sapiens
ctggagcggagccggccgtacgcggtgctgcgagggcagaacctgggccgagacgcatccagagctttcgtgac

SEQ ID NO: 767977 - DNA, 97 bp, Homo sapiens
tcaacggaattgtgttcaacctgctggccttcttggccctggcctcccactgccgggccatgctgacggaccccgtttaagaattgtttaagctgca

SEQ ID NO: 767978 - DNA, 50 bp, Homo sapiens
ataaatgaaatcttcctaagtatagttgtatcacggactgattcaccgag

SEQ ID NO: 767979 - DNA, 100 bp, Homo sapiens
agtcaccagcaggagcagccaaccagcagcagccatcatggaggttttacacatccataagtagacctttttggagcctcaccagccaattcaatggcgt

SEQ ID NO: 767980 - DNA, 50 bp, Homo sapiens
ctgacagaaattccatgcatgtagatatgtagagacgggttttcaccgtg

SEQ ID NO: 767981 - DNA, 100 bp, Homo sapiens
cggcgttatgacaggaagcagagtggctatggtgggcaaactaagccgattttccggaaaaagttccagggtcacccccgagaggacaacaggcatctgg

SEQ ID NO: 767982 - DNA, 137 bp, Homo sapiens
gatccagtttgggcacctgcagcgacctacccactacaatacctcttgggactgggctcgatttgagattgactggggcgactttggggtagaggcagtgtctgaggggactgactctggcatctctgccgaggctg

SEQ ID NO: 767983 - DNA, 75 bp, Homo sapiens
catctttttgatgtcatcggatcaagggcagaaaaggcctctcaaacactcacctcatttggaatgaagatggag

SEQ ID NO: 767984 - DNA, 75 bp, Homo sapiens
tttcagaatctttgacaatatgaaattgccagaacaacagacagaggcctactgaacttgacgcactggtatttg

SEQ ID NO: 767985 - DNA, 82 bp, Homo sapiens
ccgggaggaaggaacgaggcaaggagctaaagcagcgtgcgttcagccctggggccgactcgcgggccgctgcacccaccgc

SEQ ID NO: 767986 - DNA, 96 bp, Homo sapiens
gaccatgcgctggttcctgccggacttgcctccttcccgcagcgccgtagagatcgctcccactcaggtcacagattgacgtgcacctccacgatg

SEQ ID NO: 767987 - DNA, 100 bp, Homo sapiens
tgcaaggatgtcatggatgccctcattctgtagcttccctcgagaccagaagccagagctcaccctcccttgtgtccaggtgggactttctacaacgctg

SEQ ID NO: 767988 - DNA, 100 bp, Homo sapiens
gctggttgttccgttgcgagctgcagctgcgatctctgtggtaggcccagatttatccacctatcaatgtgctgccctcactatcacggttaatgaagtc

SEQ ID NO: 767989 - DNA, 97 bp, Homo sapiens
gtgatcgtggcggctagcaactactacaaaggagaaaacttcaggaggcagtacgacgagttctacctggcggagcaattgctaaccatccaggagg

SEQ ID NO: 767990 - DNA, 110 bp, Homo sapiens
tgaaaacatgcagcaaccactattttcttcctgcccctcgttgatgagagcattcgaagtgacctcagcagggcatccagttggagtcattcgttgcccagtttgcagcc

SEQ ID NO: 767991 - DNA, 100 bp, Homo sapiens
cctcctcccctggctggagtgccctgcctggagggagccctcctggctgggggcaaggaactccgggcacagaatcttgcttcataccccagaacctaac

SEQ ID NO: 767992 - DNA, 83 bp, Homo sapiens
gacggtcatccctgtagatgtcatgaggcgagctggggctcccagccccattgccaataccttcctccactatcgaaccagca

SEQ ID NO: 767993 - DNA, 100 bp, Homo sapiens
ccgcgtcccgctcgctgggagagaggtacctctccttttccctctccctttccctaagtgctctgtgacatgtgaaagaggaacacagaaaagattctta

SEQ ID NO: 767994 - DNA, 90 bp, Homo sapiens
gcgcagacagagctattccagcaccagcagagttcagaatgaccgaagaagcatgccgaacacggagtcagaaacgagcgcttgaacggg

SEQ ID NO: 767995 - DNA, 98 bp, Homo sapiens
acttcggggtgagcggccagctcatcgactccatggccaactccttcgtgggcacgcgctcctacatggctgtgtatttcgggcgctggctgatcgag

SEQ ID NO: 767996 - DNA, 100 bp, Homo sapiens
aaattttaaaaaattttccaaaagagagatggcagctgagtatgtcccagagaaggtgaagaaagcggaaaagaaattagaagagaatccatatgacctt

SEQ ID NO: 767997 - DNA, 90 bp, Homo sapiens
ggcacccgatatatgttctctaggccttttagaaaacatgcggaagatccatccaaaagctatgtgaaattacgagactttgtgcttgtg

SEQ ID NO: 767998 - DNA, 75 bp, Homo sapiens
ccgagagaacgagcacctcctcgaagtcatcccagttatcttcaaccaatcttgtcactcctccagcagttgtca

SEQ ID NO: 767999 - DNA, 83 bp, Homo sapiens
gagtcccggtgtctgagcatttcctcctgacggctgtacttgagcagtcacctggcacagaaatgctccacctgtaagaacag

SEQ ID NO: 768000 - DNA, 100 bp, Homo sapiens
agagttgtggaaccaaagagagctgtctccagagaagacaggctgcgggaggagctgcaggactgaggtacagaggccaggggcccagggcaggacccag

SEQ ID NO: 768001 - DNA, 100 bp, Homo sapiens
ggcgtcatggaggagatccggcggcagggcaagctgtgcgacgtgaccctcaaggtgctactcgtgagcagtagtcgccatccagacagatggattgtcc

SEQ ID NO: 768002 - DNA, 98 bp, Homo sapiens
actcctccacctttgacgctggggctggcattgccctcaacgaccactttgtcaagctcatttcctgaaaaagcggatggtggttcctgctgccctca

SEQ ID NO: 768003 - DNA, 100 bp, Homo sapiens
tgaggcttcacttccctcggtctgggcttctctgaggcggcgagagatggtcaggtctggagctcgaccgggccaggctggccagctaaactatgtggat

SEQ ID NO: 768004 - DNA, 90 bp, Homo sapiens
caggaaggactattctcattaaggacaaccctccatatgataagggagccttcagaatcgaaatcaactttccagcagagtacccattca

SEQ ID NO: 768005 - DNA, 102 bp, Homo sapiens
aaattctgaactcaggacttggcaagttttttgcatgtctgacacccatgactccacctggaccttatggctccacccagaagcaattcagcccaacaggag

SEQ ID NO: 768006 - DNA, 100 bp, Homo sapiens
gatgacataggtcacctcattcatgaaggcctacagaagggacaggtgcctggtgctgctcttcctaaccctctcaacatgctggggcctcaggccagcc

SEQ ID NO: 768007 - DNA, 83 bp, Homo sapiens
ggccgctctgggatcccggccaccagcaattgtccgtgtgctcactgatccgcctccagggccaccgccatgtcgagccgcgg

SEQ ID NO: 768008 - DNA, 75 bp, Homo sapiens
ctggctactcacagttgaagcctgattgcaggagcaggacatcgagactttacatggctctgttcacgtcacgct

SEQ ID NO: 768009 - DNA, 82 bp, Homo sapiens
aactgagtgtggacagagcacctgtcctcgccagcgcccagctggaagctgagcaagagtgagccatggagctacgtgtggg

SEQ ID NO: 768010 - DNA, 101 bp, Homo sapiens
aactccgcaaacgaaaaagaacgacatgatgcaatcttcaggaaagtaagaggaattatatccagatcgagagacagaagattctgaaagggttcaatgaa

SEQ ID NO: 768011 - DNA, 100 bp, Homo sapiens
gcagctgacttacatggaggagacgtgtcgtcactatgtggcccatgtgaagtttaaggaagaaatctctaaacgttttaaatcacatactgaccaactt

SEQ ID NO: 768012 - DNA, 90 bp, Homo sapiens
agacggccagaaagttccgccatgagctggggcacggagctgtggtgccggtggtggtgtgcacattgagccccggtatagacagttccc

SEQ ID NO: 768013 - DNA, 74 bp, Homo sapiens
tcaacagcaaaggcagcctcggaaaagacaccaccagccctgacaaattgatggccaggagatcactgccaccg

SEQ ID NO: 768014 - DNA, 80 bp, Homo sapiens
agcggaggagcccgaccgacccggttctttcagagcacggcttcggccccatcactaccgacatccgggagggacagact

SEQ ID NO: 768015 - DNA, 80 bp, Homo sapiens
ctgagccctgcgacagcctggacagcaactcagactccaattccagggtttcagaaccgcatcgcagcatctttcctgaa

SEQ ID NO: 768016 - DNA, 100 bp, Homo sapiens
ggaaatgcctggaccctgctcagaggactctatacagggacgtgatgctggagaattataggaacctggtctccctgggggtattccctcagcggatact

SEQ ID NO: 768017 - DNA, 100 bp, Homo sapiens
gaagggcacattaaaaaggaatgcccacagtttaaaggctcttcaggaactgtggctgcaccatctgtcttcatcttcccgccatctgatgagcagttga

SEQ ID NO: 768018 - DNA, 101 bp, Homo sapiens
tgcagcccttcaagaaagacttgatggtctggtagaaacaccaacaggatacattgaaaggaatgaatctgaagtctgctgcagtaaaacacagaaggctt

SEQ ID NO: 768019 - DNA, 98 bp, Homo sapiens
tacgacggcgttgatatcggtggtaacgacggcctcagcaggcggggaagatgaaagggttgcagtattttacagagctagcccaaggcacaagatga

SEQ ID NO: 768020 - DNA, 100 bp, Homo sapiens
ttttggaagaggaaccacaagaaaatcaaaagaaacttttgcccttatcagtaacacctgagttatccccaagctaaactgcgtgttcactgtggaaacc

SEQ ID NO: 768021 - DNA, 82 bp, Homo sapiens
cagctcacattctgggaggccagccaggttgcccccaagtttcctggcagtgtgtgatactgaggaggtgagcttgtttctg

SEQ ID NO: 768022 - DNA, 75 bp, Homo sapiens
gcacgacagccttgaggcccagcgctagcacccagattccctgtctcctctggaagaaaagcaggggctctcccc

SEQ ID NO: 768023 - DNA, 75 bp, Homo sapiens
gaacaggccgggcaccaaggcgcaggtatccgttacagcactgatgtgagtgtagatgaagtaaaagctttggct

SEQ ID NO: 768024 - DNA, 51 bp, Homo sapiens
atccggagcagacgcctcgggaattttaccttcaatgatgacttcagtccc

SEQ ID NO: 768025 - DNA, 100 bp, Homo sapiens
tgacagccccggattattctgcctttgaagcctcaggagtgcaagtagctgatgaagtatgtcgcattttttatgacatgaaagttcgtaaatgctccac

SEQ ID NO: 768026 - DNA, 90 bp, Homo sapiens
cctccaggacagcacctagtcgtggccggaggagtctcagagctgtcagaaagtttcagagcgtcctcagccaaggaaataaaaagccac

SEQ ID NO: 768027 - DNA, 100 bp, Homo sapiens
gtggacagaccattccaaaagcccagcagatgcacactgggcctgtgcttgatgtctgctggagtgacgtgctggagaatctggtaaaagcaccattgtg

SEQ ID NO: 768028 - DNA, 80 bp, Homo sapiens
cagacatcagccacgcatctgaccttgttgaacatggcagagaagtttctggatggagaacttcctctggattccttcat

SEQ ID NO: 768029 - DNA, 82 bp, Homo sapiens
ggaggcagaggcacttatgcttgtcagatggtcagtaggacagaaggtaacattgatgactcgctcattggtggaaatgcct

SEQ ID NO: 768030 - DNA, 100 bp, Homo sapiens
gcatgcgaagccgtccctccccgggaagggaaaaggccgaggcatcagcgtgtgaagaccgcaaagacgatcccgagtacagttgtgaacagcattgctg

SEQ ID NO: 768031 - DNA, 100 bp, Homo sapiens
gtattactggaggggcaatgcaactctcttttacacagctaactatagattattatccttatcataaagcaggtcactctggaatatagacccgtgatcg

SEQ ID NO: 768032 - DNA, 100 bp, Homo sapiens
aaagggaaggtcattgtcatcgtggggcatgtggcaaaacacacagctgagctggaccagctattccttctgttgtggcgtatccgaaaaggagtcagac

SEQ ID NO: 768033 - DNA, 75 bp, Homo sapiens
cggcgtgctgaccagcggcggggatgctcaaggtggggaagaaaacatgacagaaacagatgccttctataaaag

SEQ ID NO: 768034 - DNA, 83 bp, Homo sapiens
cctgcctcagcctccacagtagttgggattacagccaagacaatgcaaactccagtgaacattcccgtgcctgtgctccggct

SEQ ID NO: 768035 - DNA, 100 bp, Homo sapiens
cctggctgacggcaggctgtaccatcgccactgcttccggggaacactgtgaagaacatgttgcttttttcaaacagatttttggagaccaagctctaat

SEQ ID NO: 768036 - DNA, 76 bp, Homo sapiens
gcggagcaggcggaggcggataagaaagccgctgaggacaagtgcaagcagggcggcaaggagtacctgatgcggg

SEQ ID NO: 768037 - DNA, 74 bp, Homo sapiens
atccaggacagatctggagcaagtacctaagcaaagccttctagacaagctcagtggaatctgaagggcccacc

SEQ ID NO: 768038 - DNA, 101 bp, Homo sapiens
gccccgaacgggggtcttcctcctccgccgttgacagcatcgagagtaaacatgaggttacgatcctgggaggacttaatgaatttgtagtgaagttttat

SEQ ID NO: 768039 - DNA, 108 bp, Homo sapiens
ttgctgtttactgttgctgtccgtaaactggaacctctgttcactcaagggccaagaccagcttcaagtctccatggtaccagaaaacaacaacctcacagcacctga

SEQ ID NO: 768040 - DNA, 100 bp, Homo sapiens
agcaataccaggatagctgttgtttcagagaaaggtgaaaggaagcatgtttacaccaatgccaaaaagcagatgctaatttctcttgctcctcctgttc

SEQ ID NO: 768041 - DNA, 75 bp, Homo sapiens
gcgccctggcgggtccggaccaaggtgcagtagacattgttgcaatcatgatcggcaatctgaaaggcacaaaaa

SEQ ID NO: 768042 - DNA, 75 bp, Homo sapiens
aactcctcccaaaagcaagcttgctgaaggggaggaagaaaagccaggtatcatgatattagctggtttgacatc

SEQ ID NO: 768043 - DNA, 114 bp, Homo sapiens
tggcggccctcaagctgcgagtggctgtgctggaccagcagatccacttggaaaagctgtctttagccaaagcctgtgcaaatgcaaaccagcttggactggaggtgagagctt

SEQ ID NO: 768044 - DNA, 80 bp, Homo sapiens
ttcccgtccgcggcgtggagggaccttaaaggctttgatccaggagagaaatactttcataacacatcatggggtgatgt

SEQ ID NO: 768045 - DNA, 103 bp, Homo sapiens
cttagctgtgctcgcgctactctctctttctggcctggaggctatccagcaaactatgttccaacttcctgtcaacaatcttggcagtttaagaaaagcccgg

SEQ ID NO: 768046 - DNA, 76 bp, Homo sapiens
ccaaggatgtgggggcgcagatcctcctgcacagccacaagaacctaaaggcagacccagaagagctttttacaaa

SEQ ID NO: 768047 - DNA, 96 bp, Homo sapiens
gtgaattgtctcactctgtttatgagaattttatgttgctgatgaacaacttagaatggagtataaagtagagacggggtttcgccatgttggcca

SEQ ID NO: 768048 - DNA, 98 bp, Homo sapiens
tgagtgctaaactgtgtggggcgcggatgggatccagctgttagtcggatcttagcaaagcaatgtctcaagatggtgcttctcagttccaagaagtc

SEQ ID NO: 768049 - DNA, 75 bp, Homo sapiens
ggctgaggatttcaatccagaagaaattaatttgaataatcctcaggtctgcccctacaatctctatgctgagca

SEQ ID NO: 768050 - DNA, 88 bp, Homo sapiens
gcttccctgtcgccgttcgctgcgctgccggcccgctccaaaagcctagtgatgggggagcagagccggagccctgggcggatgccgt

SEQ ID NO: 768051 - DNA, 100 bp, Homo sapiens
gaggtcatgaaggacctgagcctgacgcgggccgcgcgggaagaaatgttggctatttggcgatgagaggtggtgaacagtgaccatactggtatacaac

SEQ ID NO: 768052 - DNA, 74 bp, Homo sapiens
cgcagtggtcgcttcttctccttggtcctcagaatggttggaatgaccctccagctttgaacagagtacccaaa

SEQ ID NO: 768053 - DNA, 51 bp, Homo sapiens
ctaagatggcgactgtcgaaccgcccgagcgggaagaagttccgcagcaag

SEQ ID NO: 768054 - DNA, 100 bp, Homo sapiens
gcaccttgatgttggacttcccaacctccagaccagaatggatcttggagaatgtctgaaagtccatgacctggctttaagagcggattatgaaattgca

SEQ ID NO: 768055 - DNA, 90 bp, Homo sapiens
cgggggctgcgcgggggctgtggctccgggactgcggtctcctctgagcctccggcctccataagacccaaaacagatgacacctcttcc

SEQ ID NO: 768056 - DNA, 83 bp, Homo sapiens
cgagcctgcaggatggcgcggccgagtccccgtacggccacccggcggagaggaggttcagatgagcccctgctgacttgaga

SEQ ID NO: 768057 - DNA, 75 bp, Homo sapiens
cgcttctccaccaggatcacgtttgagtgtgctcagatatcgctatcagttgagggatttgcagttgataaaatg

SEQ ID NO: 768058 - DNA, 100 bp, Homo sapiens
tgaaatgtcatgcctctgaaaatgaaggacactgccttaggaaaaccacgagaggtgtttcgacttcctacagatttgacagcatgtgacaaccgtcttt

SEQ ID NO: 768059 - DNA, 50 bp, Homo sapiens
tccatttctcctattgaggagtcaaccacccagtttggccttctctgagg

SEQ ID NO: 768060 - DNA, 82 bp, Homo sapiens
ccagatccatttacactttacacattttgaaagcgaagcagaagccgtagaatcagcggcgagcctgttgaaagaacccaca

SEQ ID NO: 768061 - DNA, 100 bp, Homo sapiens
ccagccccagccagcgacctgaacctggaggcttccgaggcaatatgagcccatggattccacaatggatgatgctgttgcgggtgactttgcattgata

SEQ ID NO: 768062 - DNA, 80 bp, Homo sapiens
ttaccacagaactgaacagcgcaacagataatcctctgaatgccaagggaacagaagcacccgcagtagtgacagaggag

SEQ ID NO: 768063 - DNA, 96 bp, Homo sapiens
acaatggacatccggacaaagagtcaaggtggggagccaacatacaatgtggctgtcggcagagctggtagagcttcatgtttcctgttgcaggtg

SEQ ID NO: 768064 - DNA, 74 bp, Homo sapiens
gcagacatctacaaccttcgatctcctgacgacaaaagcggcgccaggaaattgaacaaaaacttgaagttcag

SEQ ID NO: 768065 - DNA, 80 bp, Homo sapiens
gctgtgctcgcgctactctctctttctggcctggaggctatccagcatggtcagtaggacagaaggtaacattgatgact

SEQ ID NO: 768066 - DNA, 90 bp, Homo sapiens
ggcaaaccaggacagtggtgaagtgcagcagatcctggttggagtaaaacattccatgggaactcgggctgtgagaaatgtcctaaccac

SEQ ID NO: 768067 - DNA, 97 bp, Homo sapiens
gacttaccagggaaacttatacaggccgcttttgagaggacaagcccagattccaaaacttatgtcaagaaagaagattctatatgatatacttgcc

SEQ ID NO: 768068 - DNA, 100 bp, Homo sapiens
ctctactcactgtactgctttgaatatcgttggttcaataaagatggtgcacaaagctgtggtggaggtggacgagtcgggaaccagagcagcggcagcc

SEQ ID NO: 768069 - DNA, 75 bp, Homo sapiens
gagacccggaggaggttcgaagctgagtatgtgacagtccaacatgtttaccgtggctgatgtgttgagtcaaga

SEQ ID NO: 768070 - DNA, 50 bp, Homo sapiens
cccgcagtacaagaactggagagaaatcatagcccactaatgagttttgg

SEQ ID NO: 768071 - DNA, 99 bp, Homo sapiens
gcaggtgaacgacactctgacttccgaagatgccggactccggaacagcaagaactgcaccgaaccaggtttctgccattattacctgcccgaggagca

SEQ ID NO: 768072 - DNA, 74 bp, Homo sapiens
ggagcgcagagcgggcgagcgcgaaggagctggcaaacagccctgactgtccccagatgtgtgcctataagctg

SEQ ID NO: 768073 - DNA, 50 bp, Homo sapiens
aagcagcgtgcgttcagccctgggaacgcaggtgctggcgcccgttctgc

SEQ ID NO: 768074 - DNA, 75 bp, Homo sapiens
gggaatttactctgctttactcactttggagaacaggctcgactacctgtgaagtggatggcacctgaaagcatt

SEQ ID NO: 768075 - DNA, 83 bp, Homo sapiens
tttgtaacatccacgtcagtctagttccccagcttgtgagaagaatgagttgatgacatgctccataccagtggctagatgga

SEQ ID NO: 768076 - DNA, 100 bp, Homo sapiens
tcgtctccgagtttgcgactcgcggaccggcgtccccggcgcgaagaggctggactcggattcgttgcctgagcgccaaatcttaaaggcagaccacgca

SEQ ID NO: 768077 - DNA, 90 bp, Homo sapiens
tgtgttatgtgcagatcttaattctttgccagactctgggaactgctcgcagaaagaagaaggtggttcatagaacagccacagcagatg

SEQ ID NO: 768078 - DNA, 83 bp, Homo sapiens
atctcattccatcttcattcatgactccagacaggtcacccttgcaattatggatatttaaaagggtcagacagtgtggaggg

SEQ ID NO: 768079 - DNA, 100 bp, Homo sapiens
aagtgccttttgcctcccaccgtgattctgaggcctccccaaccatgtgcaattgcccgatgagagaaagggaaagttaaggatgctggagcagaacaat

SEQ ID NO: 768080 - DNA, 78 bp, Homo sapiens
caaaacaagcaggagactccagcagccatcgccagcagggcatcacagatttctctatgaatcatcatcaagaactct

SEQ ID NO: 768081 - DNA, 100 bp, Homo sapiens
catcaccccggacaggctgcagctcgtgtgcaacgcgctactggcccagtttacaggctgtgcatttggatcagctgctatttggcaatatgaatcactg

SEQ ID NO: 768082 - DNA, 75 bp, Homo sapiens
aatgaacattgtattgagaacaatatagatttgcaggattctcaaagttggattggtggaaacaatgaaccattg

SEQ ID NO: 768083 - DNA, 100 bp, Homo sapiens
aggagggcggcgggactgcactcgagtgtccagacctgctcgatggaaacattaccaggttttaaatggattggaagtaggataatagacctcctggaaa

SEQ ID NO: 768084 - DNA, 90 bp, Homo sapiens
ggagtacttcgccacttactttaatgagaagatctccattcctgaggaggagccgtcattgtgtggcactggacggggaatcaagagacc

SEQ ID NO: 768085 - DNA, 51 bp, Homo sapiens
gccagcccgagcaagtaaagattggatatggtggtggttttaatgaaagag

SEQ ID NO: 768086 - DNA, 51 bp, Homo sapiens
ctgttgtctgaattgtactgtcaagaggcacggaagacatatgcttgtgag

SEQ ID NO: 768087 - DNA, 100 bp, Homo sapiens
catcggtccttacagccgctcgtcagactccagcagccaagatggtgaagcagatcgagagcaagacaaagaaccggcgctgcaaactgctgcccctggt

SEQ ID NO: 768088 - DNA, 50 bp, Homo sapiens
gggatccttcacccgtgtctgaacatacggtccctaatgagcacagagaa

SEQ ID NO: 768089 - DNA, 98 bp, Homo sapiens
gcatctttgggcagccattgagattatacggaaccagaagcagattgccaacattgaccgtattacaaaggattaatgaaaatcaagttccatcctca

SEQ ID NO: 768090 - DNA, 74 bp, Homo sapiens
gtacgccctcatggggaaaatctccccggtgactttcaggaactgtggctgcaccatctgtcttcatcttcccg

SEQ ID NO: 768091 - DNA, 117 bp, Homo sapiens
cttgggggtcgagcacataacggggttcgggtgtctcgtgtgtgaacatcacagctctccacacaaggagatgcaagtcaggtgattgggcctcttactgaaggacagagaagaaat

SEQ ID NO: 768092 - DNA, 97 bp, Homo sapiens
gcacaactgcaggaacaccgtcacgctgctggaggaggtcgggccaaccactggtctgcgatcatcggaggatcccactccaagaattatgtactgt

SEQ ID NO: 768093 - DNA, 98 bp, Homo sapiens
cggagctggaatgactggcaacccagattgaagccttcagctgactgtggcccttttcgaggtctgcctctcttcattcactccatctacagctggat

SEQ ID NO: 768094 - DNA, 96 bp, Homo sapiens
ttttgattctgattggaatcctcagaatgatcttcaggaaaccactgattgcttgtgtggagaaacagctattaggagaacatttaacagcaattc

SEQ ID NO: 768095 - DNA, 75 bp, Homo sapiens
gggacagccagccagcagcaggaggaatagcctaacatggcagaccagagacagcgctcactgtctacctctggg

SEQ ID NO: 768096 - DNA, 74 bp, Homo sapiens
cgagcggagaggagatgcacacggcactcgagtgtgagcaaccgaagatttgtactttgtggaactaatgtcaa

SEQ ID NO: 768097 - DNA, 75 bp, Homo sapiens
atgccacctcatcaagaagcatgatggacaggatgtttgccctcgaggctggcccagaatgccttcattgtgagg

SEQ ID NO: 768098 - DNA, 83 bp, Homo sapiens
cagcctcaaccaggtgtccaccatctgggacgataaccctgccccctccacccacgataaggccgccatggcatcagatgaag

SEQ ID NO: 768099 - DNA, 100 bp, Homo sapiens
gtggcaggtgacagtctgcatgtgcagttttcaggctcaacgagaacctttgacaagagcacgaagtgaagaaatggggaggatcgtaccaggactgcct

SEQ ID NO: 768100 - DNA, 100 bp, Homo sapiens
ctgttccagaactgctggaagctgagacatgcagtgagaagagtaccaacttgcatgactacggcatgttgctgccctgcggaattgacaagttccgagg

SEQ ID NO: 768101 - DNA, 88 bp, Homo sapiens
acaatcaagatgaatatgaccctatggaagcagaagaagctgaggatgaagaagatggcatttccggagagttcttttgaagtcactt

SEQ ID NO: 768102 - DNA, 50 bp, Homo sapiens
cactacctcataattgaaaacagggatacaggaagatgctgacagaagag

SEQ ID NO: 768103 - DNA, 101 bp, Homo sapiens
ctccatccccgaccgccctcttctgtcttgtcggcgtggcacaagcctaatggaagatgatgaagagccaattgtggaagatgttatgatgtcctcagaag

SEQ ID NO: 768104 - DNA, 75 bp, Homo sapiens
ctcgggtaacaaccgagcccctcctcgcagccaactgaagcagcagcgggacaagctgaggcagtaccagaagag

SEQ ID NO: 768105 - DNA, 74 bp, Homo sapiens
ggcttgccctggtcttgctcggccgatgaagtgcagaggtttttttctggtggtgaccagaagatggaggactg

SEQ ID NO: 768106 - DNA, 100 bp, Homo sapiens
agcagcagctccagcaggcgctggctcctgctcagttgagaaatgctatggtgaatcgaaagacggggaagttttccatggaggtgaagaagacagtgga

SEQ ID NO: 768107 - DNA, 89 bp, Homo sapiens
ccagagtggaatagttggtcccagcttatcatcagcacagatgaggttgctccttgagggcaggacagttcttatggctttatccgttg

SEQ ID NO: 768108 - DNA, 100 bp, Homo sapiens
cgagccctggaccattatctcacccttcgaaggtgtccctggccagtgtccttccacctgtccacaagcatggggaacatcttcgccaacctcttcaagg

SEQ ID NO: 768109 - DNA, 90 bp, Homo sapiens
ctggatgccgtgatctccagcgccggcctcctcagtgcgaagaagctgcagccgcacctggccaagggtggtcttttggtgccttaatga

SEQ ID NO: 768110 - DNA, 98 bp, Homo sapiens
ctccttcagctgtcacaagaccaatatttggtatactgggcacaatccatctggtggcagctgaggagtacctgtcatttgcctttgagcattgtcac

SEQ ID NO: 768111 - DNA, 98 bp, Homo sapiens
gaacttcgaaacgtgataagaagcacctggatgagacatttgctacagcatcccacattaagtcaacgatcgactagagactgctaacaggcaactat

SEQ ID NO: 768112 - DNA, 73 bp, Homo sapiens
tgcgaccactgcccggctgccttccacctccagtgctgtttcagctgtgagttcaacatggaggcaaatcagt

SEQ ID NO: 768113 - DNA, 51 bp, Homo sapiens
acttgccctgtctcctcgcagatgagattgtgccttgccagtacatgctgc

SEQ ID NO: 768114 - DNA, 95 bp, Homo sapiens
aaggtgaaggtgcttggatctggcgcttttggcacagtctacaaggcgtttagatgccaaccatattacctcagtccccgaggacagttttgaag

SEQ ID NO: 768115 - DNA, 73 bp, Homo sapiens
attattacagcattagataatgtggaagccaggagatacgtagacaggtacgaatgtgaagaatcttttacga

SEQ ID NO: 768116 - DNA, 98 bp, Homo sapiens
acgagaaggcgccgcacctcaagcaggtggtcaggcagatgatccaacaggcccagaaggtcgcaatggaagaagagatcgccgcgctggtcattgac

SEQ ID NO: 768117 - DNA, 100 bp, Homo sapiens
aactggctaccgttcggactatttgtagtcatgtacagaacatgatcaagggtgttacactgtgctactatatcggggccacagatgatgcagccaccaa

SEQ ID NO: 768118 - DNA, 83 bp, Homo sapiens
taacagtacttgggatcccccagttccaaagtgtcttaaaggtgcaatggatgagcttcatagtctggatccaagaaggcaag

SEQ ID NO: 768119 - DNA, 100 bp, Homo sapiens
agcaatagcatctttgctccagtgcttttgccacattcaactcctcccacggttcgtattgtgcactcaggcttggcctgtaacattgaagaggagcgct

SEQ ID NO: 768120 - DNA, 98 bp, Homo sapiens
ccccgtgaccccacccatcaccccctcctcttcattccgcagcagcactccgacagacactttttcaaaaatggcaatggtatcagaattcctcaagc

SEQ ID NO: 768121 - DNA, 98 bp, Homo sapiens
aaagcttgacggcttggacgaagatggggagaaggaagcgagactcatacgcaacctcaatggagcaaccagggttttatgcacatgaaactggccaa

SEQ ID NO: 768122 - DNA, 87 bp, Homo sapiens
gcaggccgcggggagcacctggtgatggaatggggagaagatattaaagcagtttcaaaagatgaagcagtgatgttggtgaatcat

SEQ ID NO: 768123 - DNA, 73 bp, Homo sapiens
aaaaatttgagaaggaggctgctgaggtgtacaaggctgtagctgccgtccagaagtcggcagaagagttggc

SEQ ID NO: 768124 - DNA, 75 bp, Homo sapiens
ctcaggttgtgaccgtgtatgagtttcttctgatgaagatccggacaaaggacagagtctttgacagtatcagcc

SEQ ID NO: 768125 - DNA, 98 bp, Homo sapiens
gaatacctggattacctttttgaagaccacagcaccgggaagtccagtcagcggcagatggtgttcggggtggtcaccgccattgacttgctgaactt

SEQ ID NO: 768126 - DNA, 108 bp, Homo sapiens
gagtcaccagtggccctggaggaggccaaggctgaaggtgatgtggccgccctcaaccgacgcatccagctcgttgaggaggagttggacagggctcaggaacgactg

SEQ ID NO: 768127 - DNA, 100 bp, Homo sapiens
gctatgagtgtggcgaaaagggacattatgcttatgattgtcatcgttacagccggcgaagaagaagcaggctccactttgaggctctgatgaacattcc

SEQ ID NO: 768128 - DNA, 50 bp, Homo sapiens
aacatagctgtttgcagttctaagaaaactgaatatcctgatgttgcttg

SEQ ID NO: 768129 - DNA, 75 bp, Homo sapiens
gtcggcagagcaaggggcttacgcagaaggacctggccacggtgtctcgtgcctctgctggaccctgactctggg

SEQ ID NO: 768130 - DNA, 51 bp, Homo sapiens
tgcttgtgaccctgcagctcctcaaaaatgcagcagtccggcgcctggccc

SEQ ID NO: 768131 - DNA, 101 bp, Homo sapiens
ccgtggacaagctcctgctagaggaggcgttgcaggacagcccccaggtctgccatcatggatgttctcgcagaagcaaatggcacctttgccttaaacct

SEQ ID NO: 768132 - DNA, 75 bp, Homo sapiens
gccagggtccctgaagagggaagacacgcggaaacaggcctggactgtgacattgacatccagaagaccatccag

SEQ ID NO: 768133 - DNA, 100 bp, Homo sapiens
tcaggccaagaagcatccgagcgttcgagaacttgtcttggacaattgcaaatcaaatgatggaaaaattgagggcttaacagctgaatttgtgaactta

SEQ ID NO: 768134 - DNA, 75 bp, Homo sapiens
ggtgctgattgatgctcgtgactgcccacatatagtttctctggaaacccccctggtaagtgtggaggaggcggg

SEQ ID NO: 768135 - DNA, 75 bp, Homo sapiens
cttgtttaatgactttggtgccctcaacatctctcagagacgaaagaggaatgtcgggtcctcacaattcaaaac

SEQ ID NO: 768136 - DNA, 100 bp, Homo sapiens
gcccttcctagttggcattgaaggttcactcaaaggcaggctttcctcggagacgggtggcatggggagcagctagaacaatgcagattcatccataatc

SEQ ID NO: 768137 - DNA, 100 bp, Homo sapiens
caacgatacctgaggggggttgttttgatgaaagtgaaaggaagattgttgatcgaatcgacaatgatggggatggctttgtcactactgaggagctgaa

SEQ ID NO: 768138 - DNA, 50 bp, Homo sapiens
caggactccaaaatggcgtcagttgatcccagatgcagtgactggttact

SEQ ID NO: 768139 - DNA, 75 bp, Homo sapiens
gagactgtgccagtcccagccgccctaccgccgtgggaacgatcaggatcctcatgaccagccaaagagaagaag

SEQ ID NO: 768140 - DNA, 98 bp, Homo sapiens
ctgcagtccaatcctctacagcatctctttgaaagagaagagagacccccaacccttagtgcttccttcagaacaatggctgaattcatggactatac

SEQ ID NO: 768141 - DNA, 80 bp, Homo sapiens
cccgctcacctgcgctgtgatgcctgcagagctgtggcttaccagggtgcttttgagaggaagatgtcttacgattggtc

SEQ ID NO: 768142 - DNA, 76 bp, Homo sapiens
cagagcttgacccaggcactacaccagtatgcatgagcgggtgaaccgaacagaaagacagtttcgatcacttcca

SEQ ID NO: 768143 - DNA, 75 bp, Homo sapiens
tggcgtctctgtccccatctggttttagcaaaatgatgcttcaacacccaggccaggtctctgcctcggaagtga

SEQ ID NO: 768144 - DNA, 100 bp, Homo sapiens
ctgccgttcagcacccgtcgagcgtaccagcgtggctgccgatctttggctgcaaatctgcagctcctcactcagggtcagagtgagcagaagccactca

SEQ ID NO: 768145 - DNA, 97 bp, Homo sapiens
aaacagctcttcagcatctacgggaggcaaacttgtaaaacctggaacagcagcatcattgtcaaagggtatgttagagcccaccaaggaaccactg

SEQ ID NO: 768146 - DNA, 100 bp, Homo sapiens
tgtgctatactgacatcctcttcacagagcaagagaggaggtggcggtggtggccctcgcctgtggcccccgtgctgcttgcactcgaactcgtcgccat

SEQ ID NO: 768147 - DNA, 90 bp, Homo sapiens
gtttgggaggagtatgccaaccagcatggccctggacagaaatacctcagggactttttcagcgtgatgctccagtccgcaacatctccc

SEQ ID NO: 768148 - DNA, 83 bp, Homo sapiens
aagccctgtgtccaggttggaggcagccgggaggccacagtcacaccgaggagaagactcagtgggaacatccaaaaactgga

SEQ ID NO: 768149 - DNA, 100 bp, Homo sapiens
catctagaaggacaaatgaacttcaatgcagattctagccaacataaaggtgcaacagatgggattggaaaagcctacgctgaagagttagcaagccgag

SEQ ID NO: 768150 - DNA, 74 bp, Homo sapiens
gtgcttctatggcaggatatggtaataatagacgtggatggaatacaactagccagagatattccaatgtcatc

SEQ ID NO: 768151 - DNA, 75 bp, Homo sapiens
ccaagtttctacaggaagcgagggatgaggagaatttctgtgccactgtgcccaaggatggacgttcctattccc

SEQ ID NO: 768152 - DNA, 88 bp, Homo sapiens
gagactggcttcaggatgtagagggcctgcagagtcttgctatggagatacacttcaattcctacttcagtggaagagtcgggaaaga

SEQ ID NO: 768153 - DNA, 100 bp, Homo sapiens
tctgcagagagagagcgcgagagatggagatgggcagacggattcatttagagctgcggaacaggacgccctctgatgttgtatcagagtaagatggacg

SEQ ID NO: 768154 - DNA, 83 bp, Homo sapiens
caacagtgttgtgccagcctacaggaggaaaggccagactcacagaaggtggcaagtgggatgatactggtcatggctttctt

SEQ ID NO: 768155 - DNA, 100 bp, Homo sapiens
agagctccccaggggagttctctgtgtctgtgaaagtttatgtggccgaggcagacaagtggaattaggccttgctgcaggggacttcatttccttctca

SEQ ID NO: 768156 - DNA, 75 bp, Homo sapiens
aacagattggcaatgtggcagccctgcctggaattgttcatgtgaacatgggtgatcggtttgggcagatcatga

SEQ ID NO: 768157 - DNA, 83 bp, Homo sapiens
tggtccaaaacagtttacctcttatctaacaggtgtggggaagtcatgtctcctcctgcagtttacagataagcggttccagc

SEQ ID NO: 768158 - DNA, 82 bp, Homo sapiens
cttccgcctgagccccggaagggtgatgtggctgcggcatcgccggcctcgctatgctgctgtaagtaaagatgattccatt

SEQ ID NO: 768159 - DNA, 88 bp, Homo sapiens
tgccctgcgcccggggcgcgcccaccgcgccgcatccatgttcgaggtaacccttctgttatttaaagatgtaaaaaatgcgggagac

SEQ ID NO: 768160 - DNA, 100 bp, Homo sapiens
cgttgtgaaggaatgaccctaggagagctgctgaagaagatggctgtgccacccacgtatgccgatcttggcaaatctgccagggatgtcttcaccaagg

SEQ ID NO: 768161 - DNA, 98 bp, Homo sapiens
tggcgcacgtccgcgagatggcttgctccattgtcgaccagaagggtgcctctgacagctgctgcaggaaacatggccaagtttgccctgaatcagaa

SEQ ID NO: 768162 - DNA, 80 bp, Homo sapiens
ggacagtgtggacgagatactggtgccatgaaccaaggtgggaaaggaatactctgaagatagtaactccgagccaaatg

SEQ ID NO: 768163 - DNA, 100 bp, Homo sapiens
atgtatgctatgttcttgattgcttcgctgaagaagcattgaaatatattggtttcacctggaaaaggtcacagtaatgaaaggcagtaatagaaataag

SEQ ID NO: 768164 - DNA, 75 bp, Homo sapiens
ctcagccgtgtggctgctgagctctgtggagccaggctcatccacctgcagacatggggcgcagaaagtcaaaac

SEQ ID NO: 768165 - DNA, 75 bp, Homo sapiens
tatgatagcagtgggcttttcacagtgggctttactgtgttgaggtgaccaagaatatggcccaggtgaccaaag

SEQ ID NO: 768166 - DNA, 106 bp, Homo sapiens
tggactttgtttttcctgggaactgcagtctccagtgccagatagtccacagctgtcctctcttggaaaatcagattcatctttctctgaaatttccggactattt

SEQ ID NO: 768167 - DNA, 98 bp, Homo sapiens
gtgatgggaggcagcagagagcacagactatggtacaggggcccgtgctggttgaggacacttgtctgtgcttcaatgcccttggagggctccccggc

SEQ ID NO: 768168 - DNA, 98 bp, Homo sapiens
ttccacgcctgaatatacaagttgtgatgatgttgagattgaaagtgagagtgtaagtgaaaaaggtgtctgctttttcaacgtgggagaaggagttg

SEQ ID NO: 768169 - DNA, 100 bp, Homo sapiens
aacatgcgcttttgacacattggagcttgaaatccatggcccaaaatgactctaccagtggagactctcttctgtgaagaagacgaccagataagaggtt

SEQ ID NO: 768170 - DNA, 100 bp, Homo sapiens
gctcaagcagcttcttgcctgtggtaataccaagtttgaggcattgacagttgtgattcagcacctgctgtctgagcctctgcgcttagataccttcatg

SEQ ID NO: 768171 - DNA, 74 bp, Homo sapiens
cagcctcctgaggagctgggattacaggcggtgctgatgcagtcacgggaacaggtttcagaagagctggtgag

SEQ ID NO: 768172 - DNA, 51 bp, Homo sapiens
tggagccccccgggaggagcagcagctacacaatcaggacaaatgtctggg

SEQ ID NO: 768173 - DNA, 82 bp, Homo sapiens
tgctgatgaagtctacgttcattcagggcctgctgtggaagaccagccccaaagaacattctagtatgccagtagaaaaaaa

SEQ ID NO: 768174 - DNA, 76 bp, Homo sapiens
cataaagaagaagtgcttgagactgctgataaagagcttggggaagcaaaggtggtgaagcagtattttccaattt

SEQ ID NO: 768175 - DNA, 95 bp, Homo sapiens
acatacacaccaaattgttgagactacaaagcccaaggtgttatagatgaccttgtctatagtataatagaccatatacgcccagggccttgtcg

SEQ ID NO: 768176 - DNA, 100 bp, Homo sapiens
tgctgcccgcccgctgcctgcctgcctggcatctctctctcccggtgttggagcgggccggagagaagtagagtgggctgcgaggagaaggaaacaggcc

SEQ ID NO: 768177 - DNA, 101 bp, Homo sapiens
tataagccaggcatgtctcccgaggagtgcaggcgcttcaccacagacgaaacttctcctttcagaagaacaaagagtagactatgtccaagtggatgagc

SEQ ID NO: 768178 - DNA, 83 bp, Homo sapiens
ggcggcggcggcaccaacggcaccaactattcgcggagctggaatgactggcaacccaggtgctgcgacaagagactttggac

SEQ ID NO: 768179 - DNA, 74 bp, Homo sapiens
agaaggatgacaccggagtttgacgaagaggtggtttttgagccaccattggttcaggcaatcttcagcggtga

SEQ ID NO: 768180 - DNA, 97 bp, Homo sapiens
ggagttggagcagtagctctgctaattgggccaaatgctcctttaatttttgaacgagagattatggagaagtctggcgaggaaggaatgcctgatc

SEQ ID NO: 768181 - DNA, 83 bp, Homo sapiens
agccgatccagcctgcggagcctgtggggcagactagacgcttgaagcaaagctgccatcccagaagacgacatgctctcagc

SEQ ID NO: 768182 - DNA, 100 bp, Homo sapiens
aggtgaaagccaggttgaccattgctgccgttctgtacttgcttttcatgattggagaacttgtagatatcctgcaaggaaactttaagcctgatttcta

SEQ ID NO: 768183 - DNA, 48 bp, Homo sapiens
ctctcaattcaccacttggatcacagaacatacatatgatagttgaga

SEQ ID NO: 768184 - DNA, 122 bp, Homo sapiens
tgaaggcgaacgcttcgctggccatttaggagctctgctcaaagccagacggttctccagaagctggggaaggcagatgagaccaaggatgagcagtttgagcagtgcgtccagaatttcaa

SEQ ID NO: 768185 - DNA, 98 bp, Homo sapiens
ccattttaaagagctaccttcagctgacacttcctccatggcccatctatcgccggcatcctctcaagtggttacctgttcaagaatcaagcacagac

SEQ ID NO: 768186 - DNA, 82 bp, Homo sapiens
cagaccctggagcctcagttggaagcagccgatccagcctgcggagcctgtggggcaggatggtgctgctccactggtgcct

SEQ ID NO: 768187 - DNA, 75 bp, Homo sapiens
acatccagaacttccagctgcccccagtgaggtcctttggcactgaagaccgtcccacagataggcctgcgcccc

SEQ ID NO: 768188 - DNA, 100 bp, Homo sapiens
atcctcagggcgctctcccagcaaagcagtggccgcccgggcggcgggatccactgtccggcagaggtttaccattgcttgttcagagaacaattgcgag

SEQ ID NO: 768189 - DNA, 74 bp, Homo sapiens
tcaatttaagcctgatctaacccctagaaacagttggctagagatttactacatccgtccttggaagaggaaaa

SEQ ID NO: 768190 - DNA, 88 bp, Homo sapiens
ccccagcaccacctccagcccctgcgcctcgctgaagaagcatctgtagggaatccagaaggagcgttcatgaagatgttacaagccc

SEQ ID NO: 768191 - DNA, 75 bp, Homo sapiens
cgcatgatgactgcaccccgcggagatctgaaactcagcaccgaggctctgctccccactctgagagtgatctac

SEQ ID NO: 768192 - DNA, 102 bp, Homo sapiens
ggagtgggaacaggcttcggcgaacacaaagcagtgaaaggactatggatctggttttggaaatgtgcaataccaattccatccactggtgtggaatttcag

SEQ ID NO: 768193 - DNA, 97 bp, Homo sapiens
aaaccacagacatgactgagtcctccatgaagagccaagtacctggcccagatcattgtgatgggcgtgcaggtggtgggcagggcctttgcacggg

SEQ ID NO: 768194 - DNA, 50 bp, Homo sapiens
cggagaaagattctgccagaagaagaggcctcgaaaaagcccaagacagc

SEQ ID NO: 768195 - DNA, 82 bp, Homo sapiens
cagatgcagatctgaagacctattttactgataagaaaacacatctttacacactaattgaagatggggaagtatttgattt

SEQ ID NO: 768196 - DNA, 50 bp, Homo sapiens
ggacaaaggaacaggtatctcaggtaagaatgattgatgttggctgatat

SEQ ID NO: 768197 - DNA, 138 bp, Homo sapiens
atgttcaagaaactgaagcaaaagatcagcgaggagcagcagcagctccagcaggcgctggctcctgctcagctcttgcaagcttaggatatgaaaagagctgtgtgttgttcaattgtgcagccttagctagccaaa

SEQ ID NO: 768198 - DNA, 83 bp, Homo sapiens
agcagaggctgcagggccagcagtttcctgctctacgaaacgcactcttttgccttgaagcggcattggacagtggtgtcact

SEQ ID NO: 768199 - DNA, 75 bp, Homo sapiens
gcagcacttacttttccagtccttttccaagatgtcatttatcagtgcactgacaggcagaactcaccagtcaca

SEQ ID NO: 768200 - DNA, 82 bp, Homo sapiens
cgtggagatatggcgcaactgcggcgcaaatcatgagtggaggatctcaagtccacattttttggggtgctccaattgctcc

SEQ ID NO: 768201 - DNA, 50 bp, Homo sapiens
tgagccgcgcacgctacagtacaagtgggctcgggatgagtttgaaggcc

SEQ ID NO: 768202 - DNA, 75 bp, Homo sapiens
caggatgagagtgcgatggggaatccaacagaattctggtcatgcttcaccccttcctccatctgctgcacctac

SEQ ID NO: 768203 - DNA, 99 bp, Homo sapiens
agcacaacccgaagcggcctgtgacctgtgaacagggctgtggacgacatagtaaggccagagacagtgatgaagagaatgacccagacgatgaggatg

SEQ ID NO: 768204 - DNA, 100 bp, Homo sapiens
accagtggaagatgatcacatcccaggtagcagcaattgcagagacagatgaatctgcagaatcagaaggtgtaattgattctcataaacgtagagaaat

SEQ ID NO: 768205 - DNA, 100 bp, Homo sapiens
gcgcctcagtgtcagttacctccgggtgaagagcttcttccaagtgcacagagaacacccctagcatgaacagtgtgaggattccaccagctttttcacc

SEQ ID NO: 768206 - DNA, 101 bp, Homo sapiens
ggacaagatgcttcggagcattagtccagcctctgatgaagcaggagagaaagaagccaagtctgattaataaccatataccatgtcttatcagtggtccc

SEQ ID NO: 768207 - DNA, 80 bp, Homo sapiens
acttcgccaccaaaggtcttcaaggctggcctgacatggaaggtgaaacaaggcagcagcccctgcctccaggagaactc

SEQ ID NO: 768208 - DNA, 98 bp, Homo sapiens
ggcgccctacagcctactggtgactcggctgcaggctcttcagaggtgttcctgcccccagaccccatctttgcctcggccatgtctgagaacgacaa

SEQ ID NO: 768209 - DNA, 82 bp, Homo sapiens
gccgatccagcctgcggagcctgtggggcagaattcaattcgccacaatctctctctgaatcgttatttcatcaaagtgccg

SEQ ID NO: 768210 - DNA, 126 bp, Homo sapiens
cccagtcaggacacagcatggacatgagggtccccgctcagctcctggggctcctgctgctctggttcccaggttcccaattttattaatgccacgctaccacctcaggagcgcatcactgctcag

SEQ ID NO: 768211 - DNA, 96 bp, Homo sapiens
tcctttgctgcggaaaacactgaaggatgagtcttctgttacttgcaagttagcttgtacagctgtgaggaggcatttcatccttcatgaagccat

SEQ ID NO: 768212 - DNA, 100 bp, Homo sapiens
gccgggatacctatgagtgcacctgtcaagtcgggtttacaggaaaatgcaacatggcagcagcaatggaaacagaacagctgggtgttgagatatttga

SEQ ID NO: 768213 - DNA, 100 bp, Homo sapiens
aggacaccaggacctggcctgaagacatttcctctcctcccctctggatttctcagaggaaactctttatacagtgaaacaggaggaaagaaaaatgcag

SEQ ID NO: 768214 - DNA, 83 bp, Homo sapiens
tggtcagtgtggcaaccagatcggtgccaagattgtaaaccatggctgtgtggatacaagctcagcagctccaaggagaagcc

SEQ ID NO: 768215 - DNA, 90 bp, Homo sapiens
gctgatgaagggtggcacattttacagaataagtcagatgactttctgtgttcggctttccagtttggcagcagcactacaaatttcaac

SEQ ID NO: 768216 - DNA, 101 bp, Homo sapiens
acagggacacctggttccagctgcagcacgtggacgctgactcggaagtgcaggtggtctttgggaagaagcttcctgcctttgccaccatccccatccac

SEQ ID NO: 768217 - DNA, 151 bp, Homo sapiens
aaatgactgagtctaagttctctaagtactctgaaatgagtgaggaaaaacgagccaaacttcgtgaaattgaggatcaccacgatgaatgacacggtaactatctggaccaggaagttcatgaccaatcgaccgctccagaggaaacaaa

SEQ ID NO: 768218 - DNA, 98 bp, Homo sapiens
ggacacacagtgtatgctaattgcacaccacaaaccaggctctggagatgataaaggaagcctgtctttgtgtcattactctctgacctatctctaca

SEQ ID NO: 768219 - DNA, 82 bp, Homo sapiens
ccgccttccgccgtctcttcgagttcttcgtgctgctcaagcttcgagagcatgcagaggctctgcgacaagtacaaccgtg

SEQ ID NO: 768220 - DNA, 74 bp, Homo sapiens
tgctgagagtgttaattctgctcctctcctgggcggcggggatgggaggctgagaatcaggctgaaagccgggc

SEQ ID NO: 768221 - DNA, 74 bp, Homo sapiens
taagtagtctgcttcagcctttttcagctgcagaaccttggcctgaaaatgctacattatatcagcaattgaaa

SEQ ID NO: 768222 - DNA, 82 bp, Homo sapiens
acgaattcagtgatatcattaagtccagatctgaaatgcttcggttacccacagtctttcgccagatgagaccggtgtccag

SEQ ID NO: 768223 - DNA, 83 bp, Homo sapiens
cctcgacgtcttgcctgtgtcccacttgttcgcggcctatagacgagccaaactcaggctgtaccttgagcagctcaagcaac

SEQ ID NO: 768224 - DNA, 98 bp, Homo sapiens
ggcattatacaaaggccattgacctgagtgtgaaagactgagagttgaggagttactttgtggatcttgtccaaatttagtgaaatgtggaagtcaac

SEQ ID NO: 768225 - DNA, 95 bp, Homo sapiens
gtcctagataacccaactcctgagatggaagcagcgagacgttccctgtgctttagactggagcaagggtgataaaagaaaatgtggctgaagtt

SEQ ID NO: 768226 - DNA, 100 bp, Homo sapiens
ttcacacccggctcggagctgctcatcaccaaggccaagaacgggcacctggctgtgcgggcgatgatgagatctcatttgaccctgatgacatcatcac

SEQ ID NO: 768227 - DNA, 48 bp, Homo sapiens
tttcaatggattgccacagtaagaaagcataacccctactgtagaact

SEQ ID NO: 768228 - DNA, 98 bp, Homo sapiens
ctgattctcacgggcccggctgccggcccccgctctgccctggtctgtgcagacttttgcagacaaatcaaaacaagaagctctgaagaatgacctgg

SEQ ID NO: 768229 - DNA, 100 bp, Homo sapiens
attctgaggaaagtgatgctgaatttgacgaaggttttaaagtgccaggttttctgttcaaaaagctttttaaagtaaccagagagcacagagaaatgct

SEQ ID NO: 768230 - DNA, 100 bp, Homo sapiens
caatggcctacgtcgtcataccgggcttccttgccctgtccgggggctgaagaagatgcagagcagcctgaagctggtggactgtatcatcgaggtccac

SEQ ID NO: 768231 - DNA, 74 bp, Homo sapiens
cacgacagactgcacagggcatggaagctagcaacatggaccacagatatactggtgactccgctctcctctgg

SEQ ID NO: 768232 - DNA, 82 bp, Homo sapiens
ggacccgaaagccgctgggaaaagctgaccccgcactacatctacccaccagccatcgtgcagcccagcgtggtgatcccag

SEQ ID NO: 768233 - DNA, 75 bp, Homo sapiens
atgctagaattacctggaacttcatcatcatctacttcacaggaattgccatttacctaatctgggagcctgcaa

SEQ ID NO: 768234 - DNA, 83 bp, Homo sapiens
cattaatcagatactgcatttaagctaaattttcaggagtgaaaagaaaaagaggaaggaagaaacccctctcaggcaatcat

SEQ ID NO: 768235 - DNA, 74 bp, Homo sapiens
ccaggactcctctatctcctccagccccgtcgcagaatttagtctcaaaggaaacttcaaccacagcactgcag

SEQ ID NO: 768236 - DNA, 100 bp, Homo sapiens
aatgaaattgaattgaagaaaattgcacgtaatcacccaaatgccaagtatctagaagagcagaagacagagaatggaaaagataaggaacagaaacaaa

SEQ ID NO: 768237 - DNA, 87 bp, Homo sapiens
gattttttgcctttgttgattaactggacaaattcagagatcatcttcagacaccaacgaaagtgaaataaagtcaaatgaagagcc

SEQ ID NO: 768238 - DNA, 75 bp, Homo sapiens
ggtcacttcaacctcttgttggaagattattcaaaagatcctgtttgaccaaactcagagatcaattaaggcaca

SEQ ID NO: 768239 - DNA, 83 bp, Homo sapiens
cgccagctgctccggagatacggcaaatgttctgaaaaagactctgcatgggaatggcctgccttacgatgacagaaatggag

SEQ ID NO: 768240 - DNA, 100 bp, Homo sapiens
ctgtactggagccacccgcgaaaattcggccagggttctcgctcttgacgcaaacatgcagatctttgtgaagaccctcactggcaaaaccatcaccctt

SEQ ID NO: 768241 - DNA, 90 bp, Homo sapiens
gcacaggtcacagtaaggccaaaaatgtgcatactcacagagttagagagagggatggtggcctccccaccagatgccctgcgctggata

SEQ ID NO: 768242 - DNA, 88 bp, Homo sapiens
ccgcgagcaaggagcgcggaatcggggagcgtccggagctagctggatcctctaggcagattcttacgctgtatgacagtattaatgt

SEQ ID NO: 768243 - DNA, 98 bp, Homo sapiens
tcctgtcgtacgtgggacaggccacgctgtccgtccgcagtaccgacgcctgcaggatgagttccacccgttcatcgaggccctgctgcctcacgtcc

SEQ ID NO: 768244 - DNA, 96 bp, Homo sapiens
taaagcaacctatcagagagaatgatggtgttggggatgtcctttgcactgaccctgaactgccagattgacaaaaccagccagaccatagggcta

SEQ ID NO: 768245 - DNA, 90 bp, Homo sapiens
cgctgaccttcatcacagacaacagcctggtggcagcggaaggaagcagccaccctcgccatggcctccccgcccgcctgcccctcggag

SEQ ID NO: 768246 - DNA, 95 bp, Homo sapiens
ctcgcctgtgacccaggatggcatccaggagagcccatggcaggaccggcacggcgaaaccttcaccttcaggtgttaacagaactgaaatccga

SEQ ID NO: 768247 - DNA, 97 bp, Homo sapiens
gaagacccaaaggcagcaaaaacaagagtccctctaaagcagctcaaaagtatacgctcaacggcaagaaagtggaagttgccgtcaaacagatcat

SEQ ID NO: 768248 - DNA, 75 bp, Homo sapiens
tatttttcatgctggatacagcttaaagaaggatataattgacactggcaaaacaatgcagactttgctttcctt

SEQ ID NO: 768249 - DNA, 98 bp, Homo sapiens
ggtgaagcggccccagcactcccagctgcgcagggcctgccaggtggcgctcggtataccaagcttggctacgcaggcaacactgagccccagttcat

SEQ ID NO: 768250 - DNA, 98 bp, Homo sapiens
gtcggtgccccctgcccgggccctcctgaagaggcggcgctcagacaggtcggattgtttgtgctgaacgaactgtcctcttgcttcagaagcccctt

SEQ ID NO: 768251 - DNA, 100 bp, Homo sapiens
tatgaggccagccgggaggacatctacaagcggccagagactgctgctactttgaaacgtacgatagaggccctgatggacagaggagcaatagtgaggg

SEQ ID NO: 768252 - DNA, 98 bp, Homo sapiens
tctcacccagggagttctgacagctctgcgtctcagatttcaagttattcaggaccttgttgtatcagtgttgacctatcctctgagccattttgttg

SEQ ID NO: 768253 - DNA, 75 bp, Homo sapiens
caacatgagatggtggatgaacccacagtgccggtggtggtgtgcacattgagccccggtatagacagttccccc

SEQ ID NO: 768254 - DNA, 75 bp, Homo sapiens
gggtgagaccctcacttcatccggtactctgtggatatccccttggacaaaactgtcgtcaataaggatgtcttc

SEQ ID NO: 768255 - DNA, 134 bp, Homo sapiens
ggagtaatagatttttccctctaccttaaggatgtgcaggatcttgatggtggcaaggagatctctatgaagcaccagaattatcagtgaagaatatattaaatggctcacgggctactgtaaagcatatttct

SEQ ID NO: 768256 - DNA, 80 bp, Homo sapiens
ctcagttggaagcagccgatccagcctgcggagcctgtggggcagaatccagactccaaaatgatgcaaatcaacctgac

SEQ ID NO: 768257 - DNA, 75 bp, Homo sapiens
cggatactcagttgtggagagctgattcccaaatctaaaggtaatttggcccagacaagagctaggataacagtg

SEQ ID NO: 768258 - DNA, 75 bp, Homo sapiens
cgcacgtctgccgctgccaccggcgcgcccgagtaacagagattcaaaggtaccttcagaaggaaagaaatctct

SEQ ID NO: 768259 - DNA, 100 bp, Homo sapiens
gcttccaaggaccctatgggtcaagccagaagacattggacaagcaccaatagtcaatgccccagaaggtggaaaggttgacttggaagccttcagccat

SEQ ID NO: 768260 - DNA, 74 bp, Homo sapiens
agaaccatcacctcggagacccagacaatcacaggttgtgaactaaaggccgacaaagattatcactttaaggt

SEQ ID NO: 768261 - DNA, 100 bp, Homo sapiens
ctggtaacagggccttgcctagtgggccttccttcccagacctgtcaccatggcccaccgatttccagccctcacccaggagcagaagaaggagctctca

SEQ ID NO: 768262 - DNA, 95 bp, Homo sapiens
cattcctaactgcagcatactgggaaaggggaaaggttgaggcaactaacaaatgcactcggtgatggaaagagagccactattctgaagaacac

SEQ ID NO: 768263 - DNA, 100 bp, Homo sapiens
cagaaagacaaggaatgtggtgacctcacctatccatctccctcaaggcagcttttggtaagaatgattgatgttggctgatattggagtgctcattcac

SEQ ID NO: 768264 - DNA, 75 bp, Homo sapiens
aaaatggactccaaagagctaactttgtaccattcatagcagtcttgaaggagtaaaccaagccaattcagcact

SEQ ID NO: 768265 - DNA, 76 bp, Homo sapiens
tgggaccaatggttttgatgataatcatggtgttgaaactctggattctggatggctgacatgtcagactgaaata

SEQ ID NO: 768266 - DNA, 75 bp, Homo sapiens
gtcgccacagctgattttggtgaatatggccagcttcccagagagagatcaaccagctttcactcctagtggaat

SEQ ID NO: 768267 - DNA, 50 bp, Homo sapiens
tgtgatgcctgctagccaaaagggactccctggaggaaaagcggaagcgg

SEQ ID NO: 768268 - DNA, 100 bp, Homo sapiens
ctttccaacacagatgtccaagctgccaaagagaaaaggaacagttccgtaagctctttattggtggcttaagctttgaaaccacagaagaaagtttgag

SEQ ID NO: 768269 - DNA, 100 bp, Homo sapiens
tttggaccaaaggcctgtgtgctgcagaacccccagaccatcatgtacatgtcccagagcaagcacacggaggcccgggagctcatgtactcgggagccc

SEQ ID NO: 768270 - DNA, 50 bp, Homo sapiens
gcacactggacttgttcagaagtccaaactgctttgcagaaaccgcggtg

SEQ ID NO: 768271 - DNA, 82 bp, Homo sapiens
ctggagctgacagcgcgcacttcacccgcagttgggaaatcctcattgacgattcaatttgttgaaggccaatttgtggact

SEQ ID NO: 768272 - DNA, 75 bp, Homo sapiens
ccgggttgggctgtgacgctgctgctggggtcaggagtattttctgcattgcgtgctgttcctcaaaaagaagga

SEQ ID NO: 768273 - DNA, 75 bp, Homo sapiens
caacgacgactgtggcgacggctcagatgagggcgagctctgcggagttcatcctttgctgcctggcccgggacc

SEQ ID NO: 768274 - DNA, 90 bp, Homo sapiens
gttcgagcgctgttctcgctccggagccgctgcacatttcgacaaacatcatatctgaactaagtaaatggagacttaattttattgact

SEQ ID NO: 768275 - DNA, 101 bp, Homo sapiens
ggagactgcccaggtgtggtcaccatgttcctctccgcggtcttctcttccaccaacactttcttccaaatatcctgaagatgacccagactactgtgtgt

SEQ ID NO: 768276 - DNA, 98 bp, Homo sapiens
gcgcggcgcggcggccgggccctcgagacggggacgggcgaagctgtgctcaggcccgggctggacgcagagccagagctgtccccagaggagcagag

SEQ ID NO: 768277 - DNA, 75 bp, Homo sapiens
tgagcaatcactttggattgaagatactacaaaatcagtttatcaaatggcgggtgaaaaagttgagaagccaga

SEQ ID NO: 768278 - DNA, 100 bp, Homo sapiens
cattttgtgcctcctggacacctcagaggtcctgctgtactagccaccaaagcagctgctggtactaagaaatatgatcttagtaaatggaaatatgcag

SEQ ID NO: 768279 - DNA, 80 bp, Homo sapiens
ctcagacgcctcacttaggacaagttcaatcaattctcctgcttcaacctcccgagtagctggaactacaggcacatgcc

SEQ ID NO: 768280 - DNA, 90 bp, Homo sapiens
gaaggaaagagctcaaagatttggtttgaatgtctcttcaatctccagaaaggatcatgtatatgaacttctcaacaccattgatgcctg

SEQ ID NO: 768281 - DNA, 98 bp, Homo sapiens
gacagcggcaccgccagacggccagaaagttccgccatgagctggggcacggagctgtggctgtctgaaaacgtggtgaaccgcatgaaggagcccag

SEQ ID NO: 768282 - DNA, 100 bp, Homo sapiens
ccgagagcgtgaccgagagcgcgaatatcgtcatcgttagaaggtgaccaaagccacgtaatgtccgtagttcgctcatccgtccatgccagatggattg

SEQ ID NO: 768283 - DNA, 100 bp, Homo sapiens
ggtctctacgtcctggcaggagttgcagaaagcatccacctgtgggagatcattgagaagcagccaggccacattcggagcagggttttcagggaggtgg

SEQ ID NO: 768284 - DNA, 88 bp, Homo sapiens
agacagaagatgaagaggagaaaagccaagaggaccaggagcagaagaggaagagatgtgcactcccagcaacacccctgccacgccg

SEQ ID NO: 768285 - DNA, 98 bp, Homo sapiens
caaaggggaggttacgcagcaaaccatccagaagttcacttcttcaactgagatggacatgatataatctccattgagtcaaagaatggcatctagtc

SEQ ID NO: 768286 - DNA, 100 bp, Homo sapiens
tctacgataacgcgcttttgctcctcctgaagtgtctttggtccaacgttgttccaggattcctccttggtcacttttcagcagcagcctgctcttcttt

SEQ ID NO: 768287 - DNA, 103 bp, Homo sapiens
ctttgatttattggaccaactggcaacagaaaatgaaaagtagtgtggcacagataaaagatcttacacatttgttccatggcttctcagctttaaaagggga

SEQ ID NO: 768288 - DNA, 96 bp, Homo sapiens
cgtggacaagtttgcagatcgggagcgcaaggtcgccctcaaggccatgatcaaaacgtatatagtatttgaaggagaagaagggcaggatgctgg

SEQ ID NO: 768289 - DNA, 100 bp, Homo sapiens
gagctgttgaatgtttatttgaaatgggctttgaagagaggcccggcaacttggtgttgggtattttgcctttgcccgagacaaagagttgagaaacaag

SEQ ID NO: 768290 - DNA, 97 bp, Homo sapiens
caaacaaagaaatccaatggatgtgtggcacaactctgcaaataaatgtgcatgagtccaatgtgctgattgctgctaacagtcagggtacaattaa

SEQ ID NO: 768291 - DNA, 100 bp, Homo sapiens
ctctcccacctcatgatgagtgaacaagggggtcctgatgacaacttaattgaaggtggaggaacaaaatttgtctgcaaacctggagccagaaacatta

SEQ ID NO: 768292 - DNA, 90 bp, Homo sapiens
cacttcagtgcctcagagtgcagttcccaaggaggcttcaagacaaagggccccttacacaccagacagaaagagaactgccgtcctgat

SEQ ID NO: 768293 - DNA, 99 bp, Homo sapiens
tcatttcgggtttggaagaggatcagtatggcatgcccctggccatcttcacaaaggtgtgagcgacgtctcctcaccacagtgctgtgtggtctatac

SEQ ID NO: 768294 - DNA, 87 bp, Homo sapiens
ttcgtttaccacttcgccgtacgccagcatgtctccggacgccaccaagccgagccactggtgcagcgtggcgtactgggagcaccg

SEQ ID NO: 768295 - DNA, 99 bp, Homo sapiens
caacaagtgtctttggttataaattatgatctacctaccaatcgtgaaaactatattcacagacttattcgtctaatggaagagatcatgagtgagaag

SEQ ID NO: 768296 - DNA, 82 bp, Homo sapiens
ggagatgcttcagagagaggaagccgaaaacaccctgcaatctttcagacagctttgatgtggaaaatggcccttccccagg

SEQ ID NO: 768297 - DNA, 101 bp, Homo sapiens
ctaatcaagtgcgacgaaattcagacatgacaatggatgaagtccgagaatttgaacgagccactcaggaagccaccaacaagaaaatcggcattttccca

SEQ ID NO: 768298 - DNA, 98 bp, Homo sapiens
aagaggaagaagaggaagaggacgagccttcaggagccaccacaagatccaccaccagatcagaggctcagagaaactctataaaacaggtcgggaga

SEQ ID NO: 768299 - DNA, 105 bp, Homo sapiens
gtgtgctgtgttaaattcagcccctcttccagataccatttggctttcggctgtgcaggccaagctataacatcagaaatggtgaatgaatacaagaaaattctt

SEQ ID NO: 768300 - DNA, 75 bp, Homo sapiens
gagcgagccttcacctacagcatcgtgggcgccggctcccagtttgggctgacagaaatgtgactgttctctttc

SEQ ID NO: 768301 - DNA, 75 bp, Homo sapiens
gagacactggcattggaacttcctgttctgatagcgtggaaggcaagaaactatattcagtctttgactcagatg

SEQ ID NO: 768302 - DNA, 100 bp, Homo sapiens
gaaaaaggccattattcaagaaatcttgagctgcaatgctgatatcgtaagtcttcaggagcttggggagacagcccttcaccttgccgtccgaactgca

SEQ ID NO: 768303 - DNA, 105 bp, Homo sapiens
agttccttgaaagaaatagaaccaaatctgtttgctgatgaagattcacctgtgcatggtgtctgacttccagcaactgctggcctgtgccagggtgcaagctga

SEQ ID NO: 768304 - DNA, 83 bp, Homo sapiens
gaggaagaacgggagttcagaaaacagttccccctgcatgaaaaggacttagcactcaggcctgtgaatcaggagatacaaag

SEQ ID NO: 768305 - DNA, 100 bp, Homo sapiens
ttcctccctcctccgagagaccgccgaggtgcgggctgtgagagggggagcgtggagcctccgaggccgaggtgaccaagaatatggcccaggtgaccaa

SEQ ID NO: 768306 - DNA, 87 bp, Homo sapiens
cggtggactccttcggcagtccacccaccgccgccgcctcccagggaaccctactctggaaactgtcagtcccagggcactggggag

SEQ ID NO: 768307 - DNA, 75 bp, Homo sapiens
gccgcggacgcgtcatcgagtgtgacgtggtgaaaggcctgtgatacttgggctgtgatcctctagagccagctt

SEQ ID NO: 768308 - DNA, 90 bp, Homo sapiens
agacggatggcgaacgtgcaggtcgccgtgcgggtccggccgctcagcaagagtgtttctgaaagatctatccagcactccgatggccag

SEQ ID NO: 768309 - DNA, 75 bp, Homo sapiens
gaggagaggagcgtcaacagcagcaccatggcaaatggttatgagccttagagtttctgaactccaagtactgtt

SEQ ID NO: 768310 - DNA, 80 bp, Homo sapiens
gcccccaagaaggaagtcatcatgggccggcctggaacaggtgatgtgtccaatctagatcccaacttctcatttgaagg

SEQ ID NO: 768311 - DNA, 83 bp, Homo sapiens
tcgaacagagccgggagttcaagaagaacactccagagagacacctatggctgccgatgaaggctcagcagagaaacaggcag

SEQ ID NO: 768312 - DNA, 82 bp, Homo sapiens
aaagacagtcctcgtcagcactgactttcagctatggaatcgggacattagtcatgagtgccgagtgtgcggggtcacagaa

SEQ ID NO: 768313 - DNA, 74 bp, Homo sapiens
tatgaatcccacagaaaccaagtaccatgcgggatactatgaagtatgtctatggacaccatggaattcgaaaa

SEQ ID NO: 768314 - DNA, 83 bp, Homo sapiens
cacagattccagcttcggaacaagagaccctgattcatgatgttgctatcaaaagttgagaaattgtcagaagaaatcatgga

SEQ ID NO: 768315 - DNA, 75 bp, Homo sapiens
ggagaggcgacccgacccccagggcccggtgctcaggacaggctgggatatgaagaacaacagcctgaggttcca

SEQ ID NO: 768316 - DNA, 83 bp, Homo sapiens
gggctggctgcggccgccctgggccgggccccaccggacgtgcagggctcgcggcctggcaagaatgtacagctgacagagaa

SEQ ID NO: 768317 - DNA, 90 bp, Homo sapiens
agaacaccggcacaaagaacacaagaaggagaaggaccgggaaaagtccaagcatagcaacaggatatccgacatgaagccagtgacttc

SEQ ID NO: 768318 - DNA, 83 bp, Homo sapiens
ctgagcccgtccgtccgccgccaccacccactccggacacagcttttacccagcacctgtccagtgaaacaacttgataatcg

SEQ ID NO: 768319 - DNA, 74 bp, Homo sapiens
tcaatgatcgtgtcatgagacttcaccagcctccaccaagacgggacaagcagggagtttatccggcagcccaa

SEQ ID NO: 768320 - DNA, 100 bp, Homo sapiens
agaggcctacatcccacagagatacccagacaacaggatcgtctcgtccaaggtcacggagctgctggacgtctccatggagctgggctgtttcctggct

SEQ ID NO: 768321 - DNA, 50 bp, Homo sapiens
tgacgagcagcggctgtacaaggtcccgcagcccccggaagccaatagac

SEQ ID NO: 768322 - DNA, 50 bp, Homo sapiens
acaatattgatgatgtagtaagatttgaggcttaagcaacttcttccggg

SEQ ID NO: 768323 - DNA, 88 bp, Homo sapiens
tggcggtggacgagcaggaagctgcggctgagtcgaagatgctcatgaagcagcaggaccggctggaggagcgagagcaggacattga

SEQ ID NO: 768324 - DNA, 75 bp, Homo sapiens
agaaagactgtagaaaatttccagttccacagaagtttgaaaatctgaacacagttgctgagtgtctgttttctc

SEQ ID NO: 768325 - DNA, 74 bp, Homo sapiens
accattgagcagcagattggaaaagtgaatggtgtgcatcacattaagatttcttggaagaatgtacgaaaaaa

SEQ ID NO: 768326 - DNA, 100 bp, Homo sapiens
gcctggagtccgcggctggccgcgtgagtagctttacctgctgttcctgagccttacgctggccactgtcaacgcccgctggctggaaccccgcaccaca

SEQ ID NO: 768327 - DNA, 75 bp, Homo sapiens
ccatgatgcattgtcagaccctaaaggatcaaccctctgcatacagtaaaagaggaattcatagcagtgtgcagt

SEQ ID NO: 768328 - DNA, 100 bp, Homo sapiens
cttggagtccggacatctgaaacttgatgctgcttgctggggcagtaagaattgctgataaaatagaatctgggaaaacatctgtggtggtgcattgcag

SEQ ID NO: 768329 - DNA, 104 bp, Homo sapiens
gaggacttcgagctgattcagcgcatcggcagcggcacctacggcgacgtctacaaggatcccatggtccattattgcctttaccaagtcgttacagaatgggc

SEQ ID NO: 768330 - DNA, 100 bp, Homo sapiens
ggtgaacctcttggacggaaaactcatattgatgattacagcacatgggacatagtcaaggctacacatgacaaagcataaatcatggacaccagagaat

SEQ ID NO: 768331 - DNA, 78 bp, Homo sapiens
gtgtgttcgcgacctccgtctccttgactgttcgaccaagagccttgacatccggctccgggttcgagcagagtactg

SEQ ID NO: 768332 - DNA, 101 bp, Homo sapiens
tggaaaaccagttattgaatatcaagaggaggagttgttggtgtctgcaattgaactccaaggtgcagaatggtttggaaagtagctgtattcctcagtgt

SEQ ID NO: 768333 - DNA, 83 bp, Homo sapiens
gaggaactagatatgagtacttttattgatgttgaagatgagggtgatcagcccatgacctaaacctccagacaaaataaaac

SEQ ID NO: 768334 - DNA, 90 bp, Homo sapiens
gaaagctgccaaaagtgacatgcagacagcacccgatggctggaagaattctgtccggcacaacctatccctcaacaagtgcttcgagaa

SEQ ID NO: 768335 - DNA, 83 bp, Homo sapiens
gcaagaggtacacatgctgtggacaccagcacccccagacctgacccttggggaaggaatgttgagtgcagctgcatctcttg

SEQ ID NO: 768336 - DNA, 51 bp, Homo sapiens
ggccgatgccacggagcaagtgggccagaacacttcctcgtgggtactgta

SEQ ID NO: 768337 - DNA, 129 bp, Homo sapiens
gagaagtgaagcaacttgcccagctatgagagacagagccaggatttgaaaccagctcagagtcaagatctccactgaagttggcatcacaaatgttgatctttccaccgtggataaggatcagagcat

SEQ ID NO: 768338 - DNA, 50 bp, Homo sapiens
ctgttgattgagaaatgtaacacggtgattgtgtccaggggggggcgctt

SEQ ID NO: 768339 - DNA, 100 bp, Homo sapiens
tgcgagtgaagtacctcctggtgtattcacagaagccacccaagaggatccctgcgccgagacacagagcgcatctggagcccatggtctccctggagca

SEQ ID NO: 768340 - DNA, 82 bp, Homo sapiens
gacctagcacccagaagatgagaccgcaattcgagaatcaaagggccgggagcgatggttctgccggagacttccatttggc

SEQ ID NO: 768341 - DNA, 90 bp, Homo sapiens
ggcttagagaagtttggcaaattggctaagttcctacagctatctcacaccattttgctggtacagcctaccaagaggccagaaggcaga

SEQ ID NO: 768342 - DNA, 88 bp, Homo sapiens
aatgtaatttttacaaaatttgatgaagtccagaaatctggaaacatgatacaatctgcaaatggtactttagattgattgccgagcg

SEQ ID NO: 768343 - DNA, 106 bp, Homo sapiens
cagattcgcagtggtcgcttcttctccttggtggtgattctagatgtccgggttccctgcacacctgtcgccaggttaaacaaccatcgagcatgtgtcaatggca

SEQ ID NO: 768344 - DNA, 100 bp, Homo sapiens
gacgagctcagcaacatcgctatgcaggtgcggaagctggtgggcactcagcaccctctgcttaccacagccagggcagctgcaatgactctccgcacgg

SEQ ID NO: 768345 - DNA, 74 bp, Homo sapiens
cctgatcgcttggttttccttgcagtcgcctgctgctgtcgtcgggaggaactgtggctgcaccatctgtcttc

SEQ ID NO: 768346 - DNA, 75 bp, Homo sapiens
ggtaatagagcaggcaacagctgagtacaagcgcaagctagccagagtttccctggtgcgcaaagaactcaggtc

SEQ ID NO: 768347 - DNA, 100 bp, Homo sapiens
gctgtcccctctgggggcggcgatcctccctccggagccccccttcaaccctcccggaagtgagggccaattcctgtccccccagcagcatggcatcgtg

SEQ ID NO: 768348 - DNA, 82 bp, Homo sapiens
ccatcaccacgcagaacgtcaacaccaagtgcatcaccatccccaggtgaaagaacttgtcctggacaacagtcggtcgaat

SEQ ID NO: 768349 - DNA, 78 bp, Homo sapiens
aaagggtgaagcaagagaatctgaacctcgtctgtattcccacttccttccaggttacctacctgggcaaagtctcca

SEQ ID NO: 768350 - DNA, 100 bp, Homo sapiens
tgcagcccttccattttgccctgaaagtcccagatttttgctcattaacagaaaagaagaggagaatgctaagcagaagtttgtgaagatgatgtctcgc

SEQ ID NO: 768351 - DNA, 82 bp, Homo sapiens
tgcgctgtatagaccactgcagtgctgcaggtggagaaattttcagcctgtgtttacctgagttggctgaaatggtttctga

SEQ ID NO: 768352 - DNA, 101 bp, Homo sapiens
gctggactggtgtctggaccagctagagaccctacagaccaggcactccgtcagtgagatggcctccaacaagcaacagggagctgccaccaccgtgtact

SEQ ID NO: 768353 - DNA, 100 bp, Homo sapiens
aactttcacctgatccaggccaacaagggacctcaggatggaaaccagcagcctgcaccgcccgagaaggtcggctgggtccggaaattctgcgggaaag

SEQ ID NO: 768354 - DNA, 100 bp, Homo sapiens
ctggaccacggcgcagacgcgggcgagctgcggctcggacgccagcggacacgcgggcgagagaatggatcttggagaatgtctgaaagtccatgacctg

SEQ ID NO: 768355 - DNA, 98 bp, Homo sapiens
tccaggagctggcatgacgtgcaggtctctagcgccaggaagaaccggacccggcgaacctggaagtggaccatgatttcttccaggacaaggtgtgg

SEQ ID NO: 768356 - DNA, 83 bp, Homo sapiens
cctggatctttgctagaaagagaggtggacaagagcaaggaccaagtgtggaaggtcttaatgtaccaacaaaggctacttta

SEQ ID NO: 768357 - DNA, 80 bp, Homo sapiens
ccatctcgcagtacagcggcaagatcaagcactggaaccgcttccgagactgcctatgattacacaataccacctatgga

SEQ ID NO: 768358 - DNA, 95 bp, Homo sapiens
cgctggtcgctgccggaaatggccagaatgagtctgcaggtcttaaacgacaaaaatgtcagcaatgaaaaaaatacagaaaattgcgacttcct

SEQ ID NO: 768359 - DNA, 82 bp, Homo sapiens
agaagcagaagaaacagttaatcgtgatatcccaccccttacaggctttggaagtgataaagcagttaaaagagaaaatgaa

SEQ ID NO: 768360 - DNA, 51 bp, Homo sapiens
gccttggatccaggagaacggcggctggcgtgtttccttgactcaatggct

SEQ ID NO: 768361 - DNA, 119 bp, Homo sapiens
ctcagctgattcgagcaaaagtgccaattgtgaagttcagggataaagtcagggaacaacctatcttcagcactcgagctcatgtcttccaaattgacccaaacacaaagaagaactgg

SEQ ID NO: 768362 - DNA, 100 bp, Homo sapiens
atgatgagttctgagctacggaggaaccctcatttcctcaaaaccaaaattcagggcatgaagaatgctgttcccaagaatgacaagaagaggaggaagc

SEQ ID NO: 768363 - DNA, 101 bp, Homo sapiens
gaaaataatccagagatttccacagaaggactgggatgatacaccttttccacagggaattgagttggcacaagcagcatctcaagaaaacttagagcagt

SEQ ID NO: 768364 - DNA, 50 bp, Homo sapiens
gttttttctaatggctattcaagggaactgctcgcagaaagaagaaggtg

SEQ ID NO: 768365 - DNA, 75 bp, Homo sapiens
cttggccaggctggccccgagcggaactggagaaagctgagggtttctaccatgaatgaaatgaagagttattct

SEQ ID NO: 768366 - DNA, 74 bp, Homo sapiens
ttctacaccgacttcatgggccaggtcatcttcgaaggcgaccccaagctcagtgtggaggctgctggccctgc

SEQ ID NO: 768367 - DNA, 74 bp, Homo sapiens
atccagcctgcggagcctgtggggcagtttgggagcctctggtggagcaagtaattgggattcctacagtgacc

SEQ ID NO: 768368 - DNA, 50 bp, Homo sapiens
cgagaactcggagggcaccggagtgatgatgatgatgattttgatgatga

SEQ ID NO: 768369 - DNA, 75 bp, Homo sapiens
gccgccccgagcggagcctggagccctccagaatacccatcatatagcccctgaggtggcatggtgatgtctcca

SEQ ID NO: 768370 - DNA, 100 bp, Homo sapiens
ctaagacgctgtttcagagcgtttgggtcctctgaggccccttgaccagggcaagcgacttggtaatgaaggtggatgctcttctgtcagcgcaaccaaa

SEQ ID NO: 768371 - DNA, 100 bp, Homo sapiens
cctcccaccattccaagcggagaggccgggcgtcttctgagagtcagtcatatttgatcagaaattggatgaaccttcgggatgctgagacagggaagat

SEQ ID NO: 768372 - DNA, 58 bp, Homo sapiens
ctaggcatgttttatgacacagatgtttattaaccttgcaagaactcttcaggcacat

SEQ ID NO: 768373 - DNA, 82 bp, Homo sapiens
cttcaaccagcctttggtcatcaccagggtgtccccaggtgtcattgccaacccctttgcggcaggcatcggccaccggaac

SEQ ID NO: 768374 - DNA, 98 bp, Homo sapiens
gatccttcatcttggcgtcctgaactgctgggattaaaggtgagcacaaaatgccgaggcctctggtgggaatgcgtcacaaatgcttttgatgggat

SEQ ID NO: 768375 - DNA, 82 bp, Homo sapiens
cctcttcatattggcgatcctgttgtgcaccatgactcctgtgaggatgcagcactccctggcaggtcagacctatgccgtg

SEQ ID NO: 768376 - DNA, 83 bp, Homo sapiens
gataccccagttatcttttccatttctgcagcaccaatgccttcagactgtggatcctggggcgtcctttggcagtcgattgc

SEQ ID NO: 768377 - DNA, 99 bp, Homo sapiens
gctggagcagttcctggccgaccacctgctgcttatgggggcagtgggcatcggggtggcctgcctgcaggaagacttcatggcagagctgtaccgggt

SEQ ID NO: 768378 - DNA, 100 bp, Homo sapiens
tcgaccaggacccccaggcggcgttagaggtacaaacccgtagtgctgatgaaccaatgacaacatttgttgtctgtaatgaatgtggaaatcgatggaa

SEQ ID NO: 768379 - DNA, 74 bp, Homo sapiens
agggaaaagcgaggcaaggcaggcggggtgatattcatgaggatttttgcagcgtttgcagaaaaagtggccag

SEQ ID NO: 768380 - DNA, 82 bp, Homo sapiens
tgaccacccctaaaagcacctggccccgctacagcaaaccagccgcttacaaacacgcagatggcaagaagattgatggcag

SEQ ID NO: 768381 - DNA, 87 bp, Homo sapiens
ggcggcgacaagggtgttcccgaactagagtgggtaacacgtacacagacctctcggccggaatctccagggatgaccagcccctcc

SEQ ID NO: 768382 - DNA, 58 bp, Homo sapiens
tgcttctagagaaaaacctgtccttcctagaggaaccgctgctgctggccgaactcaa

SEQ ID NO: 768383 - DNA, 98 bp, Homo sapiens
cctccccagccatgtggaactttcctgttaaaggtcaagacactgtcaaaggccgtgttccattcaatggacaagatcccgttaaaggacaagtttca

SEQ ID NO: 768384 - DNA, 83 bp, Homo sapiens
gttaaggattccaagtaactcttatttgtcttgctctgttgcccaggctggagtgcagtggtgccatcatgccaacctcgacc

SEQ ID NO: 768385 - DNA, 98 bp, Homo sapiens
tccaggagcccagctcacagccaccggtaccttcttccaggtatgggctacgtgagttcgtggtgattgcccctgctgcacacagtgacgctgttctc

SEQ ID NO: 768386 - DNA, 75 bp, Homo sapiens
ggatgacatccggggctttgtgcgccaagagatgagtcagcactgtggggctgaggaagctgccctcgaaaccct

SEQ ID NO: 768387 - DNA, 51 bp, Homo sapiens
ctacttctccgtcgaccctaaaacaggtattcacttacaagcagagcacaa

SEQ ID NO: 768388 - DNA, 83 bp, Homo sapiens
acagcggcgagcagaactacggcgagcgggcaaaacaacgagtggatgagaaacccagcctgggagccgtgaagctgcaggag

SEQ ID NO: 768389 - DNA, 100 bp, Homo sapiens
agagaaccatgatggtcaattgccatgcacacttctgggtgaatcttggaagcaaccagtaccttttctctgtcatagtggatcctaaagaaatgccctg

SEQ ID NO: 768390 - DNA, 75 bp, Homo sapiens
ctctcagccggccgggatggctaccacggccgagctcttcgagcttgtactcccagagtacctcatccacgcttt

SEQ ID NO: 768391 - DNA, 88 bp, Homo sapiens
aagtacgaggacgccatccagttcatccgccaggtgctttcttctgcgacctggtactcatctacctcatcaaaaagagagagtttta

SEQ ID NO: 768392 - DNA, 100 bp, Homo sapiens
tctggagctgacagcgcgcacttcacccgcagttgttccagggtctccctccactgctgtagtaacccgggtccggggcctcggtggtgctcctgatgcc

SEQ ID NO: 768393 - DNA, 50 bp, Homo sapiens
aggatgcaccttcccctgccttggaaagcatgaagcgtgccagctctctg

SEQ ID NO: 768394 - DNA, 51 bp, Homo sapiens
ctgtgccacctgccaagaccagcagatactatcaaatcagcctgggaagca

SEQ ID NO: 768395 - DNA, 98 bp, Homo sapiens
ggcccggagggaacccctgttcttgtgccagaatggcagcatccactcggaaactgcttcttcagctcaaacaagagtgttctccgtggcccgatgcc

SEQ ID NO: 768396 - DNA, 101 bp, Homo sapiens
ctgtggagcagatccgatggagaggctgagctgctccaggacttggggcaaatagaaactgcatagcaatcgcttccagtcatgatgttcaagaactggat

SEQ ID NO: 768397 - DNA, 75 bp, Homo sapiens
gtcgcagacatggacaccaaacatttcctgccgctcgatcaatgcaatgtcccggaatggcttccatttgccagg

SEQ ID NO: 768398 - DNA, 98 bp, Homo sapiens
aaaaagacggacagcccatcgtgtgaactatagagtttgtggacagatttatattgaaaacgttgtgtgacgtgatcctcatggtccaggaaagaaag

SEQ ID NO: 768399 - DNA, 100 bp, Homo sapiens
ccggaggaggctcatgcgggatttcaagcggatcgccaacctgaagatccagctggccaagcttgacagtgaggcctggcctggggtgctggactcagag

SEQ ID NO: 768400 - DNA, 76 bp, Homo sapiens
cttccggagcttctcagaagacagagggttttcttttgagagttgggctggtcacagccttgtgatgtgtggagta

SEQ ID NO: 768401 - DNA, 50 bp, Homo sapiens
gttcaaccaaaatctcttgtacggcagtagcaggtttgttggcagatgct

SEQ ID NO: 768402 - DNA, 90 bp, Homo sapiens
gacctgttcaccagcactgtctccaccctagaggttatgaagacagtatggagtttccagaccatagtagacatttgctacagtgtctga

SEQ ID NO: 768403 - DNA, 90 bp, Homo sapiens
tgtcctttcaggaaggagccattatttatgtcatcaagaagaatgacgatgaaccttcgagatctgcggtctggggtctggttgaaagat

SEQ ID NO: 768404 - DNA, 115 bp, Homo sapiens
tgagaagtaaaaacagtttacagtactcagcaaaagaacatggaatgcctgaaaagggtcaatataaaaaggcgatagccagcctgcatcacttagcagctctccagggatccat

SEQ ID NO: 768405 - DNA, 75 bp, Homo sapiens
tgtctccagaaaatctttcagttttgccttgcgctcacaaattccatgctcagactgcagatgtatttaattttg

SEQ ID NO: 768406 - DNA, 83 bp, Homo sapiens
cagatccttgagtgataaaggagtagaggaacgtcaaggtcgtgggaaataaaaggcagttctacacagactgcagcaacggt

SEQ ID NO: 768407 - DNA, 83 bp, Homo sapiens
ccagagactgctgagcccgtccgtccgccgccaccacccactccggacacagaccatggtgaatccgggcagcagctcgcagc

SEQ ID NO: 768408 - DNA, 100 bp, Homo sapiens
ggaggggcaaagctcaagatggcggacaaaacgccaggcggatctcagaaggccagttcaaaggtttgcgaggagcgatcgcatttgccttagctattcg

SEQ ID NO: 768409 - DNA, 74 bp, Homo sapiens
cacacaaggtcgtcctggctgcctgcagcgactacttcaggatagtggctacccagagacgctggtcaacctca

SEQ ID NO: 768410 - DNA, 90 bp, Homo sapiens
gggagattgtctactgtgggcagaaatgttcccactgccaggaggcaggcgccaccttgggctgctacaacaaaggctgctccttccgat

SEQ ID NO: 768411 - DNA, 80 bp, Homo sapiens
cgggagcgcaggaggaacaaatggaaaggactagacattgcatttccggagagttcttttgaagtcacttcagaaggatc

SEQ ID NO: 768412 - DNA, 98 bp, Homo sapiens
aaccttgaggcacagtgaagacatcggtggccactccaataacagcagaccaagatcactccatggatgaaatgacagctgtggtgaaaattgaaaaa

SEQ ID NO: 768413 - DNA, 90 bp, Homo sapiens
tcaaagcgggaggctccttgtgccacattcttgcagctgcctacaaattcaagagtgaccagggatgccctccaggggacccctctctca

SEQ ID NO: 768414 - DNA, 74 bp, Homo sapiens
cctctctttactgctgaagctttacttcgagctcatggattaagttgtcatcattctgggaagaaaaaaaaaac

SEQ ID NO: 768415 - DNA, 83 bp, Homo sapiens
cagcagatcagggaccggctgctgcaggccatcgacccccagagcaaccgtccgtctccaagagagtatgaagagagtgcgtc

SEQ ID NO: 768416 - DNA, 90 bp, Homo sapiens
acgggccggaacctcaagaaggaggtcagccgggtgctgtgcaagcggtgcgacccagagtcccagagaaagaggacagtgcagaatgtc

SEQ ID NO: 768417 - DNA, 90 bp, Homo sapiens
gagctgtagaccggagctgttcctattcggccatcttggctcctccacaagccctggctctggcctttgctctgcggagctggcggcccc

SEQ ID NO: 768418 - DNA, 100 bp, Homo sapiens
ggaaaggctctcagtgaaaaagtctttcccagggaactccgatgaagtgttccaacaaaatgagcgagtgaaccaagaagaggatgacattagatccagg

SEQ ID NO: 768419 - DNA, 100 bp, Homo sapiens
cttctcccgcgcggggggcgagtaagccagcggcaggaccagcgggcgggggcccacgagagttgtaagacgttcatcgccgtgttatccttgagtaaag

SEQ ID NO: 768420 - DNA, 101 bp, Homo sapiens
aggctgtctgcctcggtacctgttactgctgctacttcctcgtttgacaccttcctggatgccttcaattaagttgcagagttctgatggagagatatttg

SEQ ID NO: 768421 - DNA, 97 bp, Homo sapiens
ttccctctacacgcaaatcccaggtgaccagtatgcactgaagatgaggtttgtggaccatgtgtttgatgaacaagtgatagattctctgactgtg

SEQ ID NO: 768422 - DNA, 100 bp, Homo sapiens
gcaacatggtgcggtcggggaataagaatggagaagctgatgccatgagcttggatggagggtttgtctacatagcgggcaagtgtggtctggtgcctgt

SEQ ID NO: 768423 - DNA, 100 bp, Homo sapiens
aggacatcgacatccaggcgaactcggcctatcgctaccctccgaagtccggaacaaaacataaccctttcatttgtactgcctccttccacacgagtgc

SEQ ID NO: 768424 - DNA, 82 bp, Homo sapiens
gaagctggtggaacagctacgcatagaagccgggattgagcgcatcaagaattcagaaggagctggcggacatcactttaga

SEQ ID NO: 768425 - DNA, 50 bp, Homo sapiens
taatcccagcactttgggaagctgaggcgggcggatcacctgaggtcagg

SEQ ID NO: 768426 - DNA, 100 bp, Homo sapiens
gatacagggtcaaaggagagcacaaccatcgcagttggaagcccatggggcaggatacatgtgctgcccttttgttctggacaaagatggagtcagtgcc

SEQ ID NO: 768427 - DNA, 90 bp, Homo sapiens
cctgtctggagcaaggaaaagatccctggaatatgaagagacacagtatggtagccacacccccaggttccctcccacttactacgctcc

SEQ ID NO: 768428 - DNA, 75 bp, Homo sapiens
catttctgatcgggaagcctcatctagcccagaggatcggaatgacagatgcatcctagaatacgtttccacacg

SEQ ID NO: 768429 - DNA, 82 bp, Homo sapiens
gccaggcgactgcagtcacgtctccaacaaccaagatgacagtcatgtccctttccagggacctcaaggacgactttcacag

SEQ ID NO: 768430 - DNA, 51 bp, Homo sapiens
tgtaatcccagcacttcgggaggccgaggcaggcggatcacaaggtcagga

SEQ ID NO: 768431 - DNA, 96 bp, Homo sapiens
gttctgtcgcctgcccgatggacgagcctcccgggaagcccctcagctgtgaggagaaggaaaagggtcctggcggcagagaccacgtcccagcag

SEQ ID NO: 768432 - DNA, 96 bp, Homo sapiens
agaaaattgttcattttactggctctgatcagagaaaacaagcaaatgctgccttccttgttggatgctacatgggacaggagagagtggcaagag

SEQ ID NO: 768433 - DNA, 75 bp, Homo sapiens
accctacggagctcgccccccagcaggtgccaggaggccactgtctgcagctcccgtgaagatgtccactccaga

SEQ ID NO: 768434 - DNA, 89 bp, Homo sapiens
ttcgaagatgccttggaaaccatctcaatttcagggcgacagctcagtgaagtcttcattcagttaccttcaaggaaagaattaccaga

SEQ ID NO: 768435 - DNA, 100 bp, Homo sapiens
tgcagccgccgcctccgacctgggcgctcagcccccggatcagcctgcctctgggctttggctcccttggcctgatgacgtccgtcctggtctgccctga

SEQ ID NO: 768436 - DNA, 74 bp, Homo sapiens
gggtcccggatccccgcgcacccggccaggaatgggtaccacagaccatgtcatcgtcctggcgtccacgaacc

SEQ ID NO: 768437 - DNA, 98 bp, Homo sapiens
cccgaagaccagccagaccatggagctcgcccccaacttccagggttgtgcctctatgacatgattcagtccagagtaacactgatggctcagcacgg

SEQ ID NO: 768438 - DNA, 75 bp, Homo sapiens
tccagagccaaggaggaagggttgtccggagaccccgcagatgtgtcttcagagagtgacagtgccatgacctcc

SEQ ID NO: 768439 - DNA, 82 bp, Homo sapiens
attgcccttaatagaagtctgccagatgtaagattagaaggtgaaacaaagagtcctcttcgtggaaaagaaaaaaatacgc

SEQ ID NO: 768440 - DNA, 102 bp, Homo sapiens
ctcggatctgctggacgaggtcttcttcaacagcgaggtggacgagaaagtgactcccctgaaaaaaccactctggctgcaaagttatctgctaagaaacag

SEQ ID NO: 768441 - DNA, 90 bp, Homo sapiens
tttttggacctgaaacagaaattctggaacacctatatggagatgttaaacatgtctaagaaaacagtttcttgttttgtgaacttcacc

SEQ ID NO: 768442 - DNA, 71 bp, Homo sapiens
tgaatgtcctggcccggatgatgaggccagtgagtgatcaagtggatgcttaaatggcagaggccaagccc

SEQ ID NO: 768443 - DNA, 98 bp, Homo sapiens
aaggggagcggctgctcaccatgtcctgcagtgacaagattgcacgtggcagtgaccctggacccagacacagcacatcccaaactcatcctttctga

SEQ ID NO: 768444 - DNA, 100 bp, Homo sapiens
ccatcccagcctcagttttctcatggatcgcttacacctgagacgaactacagaacagcacgtaccagaggtggaagtccaagtcaaacgcagaaggact

SEQ ID NO: 768445 - DNA, 100 bp, Homo sapiens
accgaggactccgctcctgcccagattaatcctaccatatgaaagatttattaaaggagaagaagataagcccctgcctccaatcaaacctcggaaacag

SEQ ID NO: 768446 - DNA, 107 bp, Homo sapiens
tttaatcaaaagagagcaaaatttaaggagttatatttggctaaagagggacctaaagggagcatcgttaccgacagcaggcaggtgcgccttgccacaggcatctt

SEQ ID NO: 768447 - DNA, 50 bp, Homo sapiens
accgagaccgcggccgggaccgagggttttttattggcacctcagtctca

SEQ ID NO: 768448 - DNA, 99 bp, Homo sapiens
cgggattggaccgacgcagccatgagacaaggtctcactatgttgcccaagcagattttgaactcctggcctaaagtgattgttccaccttgacctccc

SEQ ID NO: 768449 - DNA, 101 bp, Homo sapiens
ggaggggacgtcacatgtcattataccttcacccagcatttcatccctcgtcgaaaggattggattggcatctttagagttataagcacatgtccttggcc

SEQ ID NO: 768450 - DNA, 51 bp, Homo sapiens
attgtactggcctgctgctggcccgcaggctccctagatctttagcttcta

SEQ ID NO: 768451 - DNA, 98 bp, Homo sapiens
cattgctccggactcagccaagttccccaacggctccccgtcgtcctggtgctgcagcggcatggaagaggagatggttcgtgttacgcagtggccgt

SEQ ID NO: 768452 - DNA, 96 bp, Homo sapiens
tcgggcaagaccaccttcgtcaatgtcatcgcgactgcctctttaagctatgtcccatgaaccgctactctgcccaaaagcagttctggaaagccg

SEQ ID NO: 768453 - DNA, 100 bp, Homo sapiens
atacagcctctccagcggcccccagccgcaacccctgctgcctgtgctggtgctgctgctgtagctgctcctgtacctcaacatgctaaggacttgtgag

SEQ ID NO: 768454 - DNA, 83 bp, Homo sapiens
agactgttccaaaaacagtggataattttgtggccttagctacaggagagctggagaatgctggaggagaccttaaggatggc

SEQ ID NO: 768455 - DNA, 90 bp, Homo sapiens
ccaccatctccatcacccaccaacaacaccacaataatccacagccaaggattcaagccaaaactcgagaatttagggaacgacaagctc

SEQ ID NO: 768456 - DNA, 100 bp, Homo sapiens
tctgaaacttaaaatgcgtatcgaagttttagaaaaagagaagtcattactgagtcaagaaaagcaagaaggctcactttgtgctcaacattgcctgaat

SEQ ID NO: 768457 - DNA, 83 bp, Homo sapiens
cgtgcgacgacttactggcttcatggtgtgttccagagaacaagccttcagacatttgctatattgacgctgagctgtcaggg

SEQ ID NO: 768458 - DNA, 80 bp, Homo sapiens
gcattctcagttcataggctatcccatcaccctttatgatctgttccggtctactatgaagcccgtccagaaagtgttgg

SEQ ID NO: 768459 - DNA, 74 bp, Homo sapiens
ctcatcaagccagagctggagtatctcagttgcttttgaaatcagaaagtcagtgcagggttgtagtgttgatg

SEQ ID NO: 768460 - DNA, 78 bp, Homo sapiens
aggggtgtcggacgcagggcgctgggccgggtttcggcttcggccacagcaaaagcgaaagcttcggatctacatttc

SEQ ID NO: 768461 - DNA, 100 bp, Homo sapiens
cataaatcctagtggtggactgatttcaaagggacacccactaggcgctacagcacccagaggcctccattcaggctgttttttcagatgcccaaatgca

SEQ ID NO: 768462 - DNA, 100 bp, Homo sapiens
agaaggcatattttactattccgcaggatcagttccatgacaagaccccttatacgattatgtttggtccagataaatgtggagaggactataaactgca

SEQ ID NO: 768463 - DNA, 89 bp, Homo sapiens
gaaaaatggaccaacttctttggcaagtggacattttactggctcaaagactctccaacatgtgccttctgaccatacaaatgaaactt

SEQ ID NO: 768464 - DNA, 83 bp, Homo sapiens
aatgcaactctcttttacacagctaactatagattattatccttatcataaagcaggttcgtcaaaaaatgttgtatgcagca

SEQ ID NO: 768465 - DNA, 100 bp, Homo sapiens
acgccaggacccactggaagcctagaaatgaaatcagggtgaaatggcccacacgtgccgtggaaccatcaacctgtccaccgcgcacattgacacggag

SEQ ID NO: 768466 - DNA, 90 bp, Homo sapiens
ctgttttgccggaggagcccctcaggccgaggaggacttcatccaacccagcagccgagaagaggcccagcagctgtgggaggctgaaaa

SEQ ID NO: 768467 - DNA, 75 bp, Homo sapiens
tcatgtaaagtatgcttagttcctttccagtggtgaaaggccgagggggacggcaagatgcacatcaccctctgt

SEQ ID NO: 768468 - DNA, 100 bp, Homo sapiens
tgcaaggctgacgataaggagacctgctttgccgaggagggtgttcaaaaagaggaaagagagaagtaccgaaagttattggaacgacttaaagaaagtg

SEQ ID NO: 768469 - DNA, 75 bp, Homo sapiens
ataacctatgaaaccactcaagagatgctgaattatgccaaaaccaggaattatatccagatcgagagacagaag

SEQ ID NO: 768470 - DNA, 50 bp, Homo sapiens
gtttgttcaggaaccaccagtgacagatgatggccaaaaaatgagcaaac

SEQ ID NO: 768471 - DNA, 50 bp, Homo sapiens
ctagatcctgtgctttactctgaagactcatagtcactgccaatccttgg

SEQ ID NO: 768472 - DNA, 71 bp, Homo sapiens
ggatctaggggtgggcgacttcgcgggaccgtggcgcatgggggcgacgatggccttctgaggggctggga

SEQ ID NO: 768473 - DNA, 82 bp, Homo sapiens
ccgggacccacttcactccagtgcctccgacgcctcctgatgtcagcctgggcttctgcccaccacagccctaccgggagcc

SEQ ID NO: 768474 - DNA, 99 bp, Homo sapiens
ggcctgtagcctggcaaaaacgcacgtgtggagtgagagcgaggactgcctgcctttcttgcagctagcacaggattacatctcctcctgcggcaagaa

SEQ ID NO: 768475 - DNA, 100 bp, Homo sapiens
gagcccgagtccgcgggaagatggcggcgccgctcatccccctctcccagcaggtgacaacatccgggaattcttgctgagcctcagatactttcgaatc

SEQ ID NO: 768476 - DNA, 83 bp, Homo sapiens
ggaagagttgtggcgaggcagatcctgccccgtggccgcggccgtctctaagactttgaccccgacgcaggcttcagtgattg

SEQ ID NO: 768477 - DNA, 97 bp, Homo sapiens
cctatcgttagagtcttcctgcccaacaaacagaggacagtggcggccatcgtgagaatcatgaagatgaggaaggttctgaaacaccagcagttac

SEQ ID NO: 768478 - DNA, 75 bp, Homo sapiens
cgcatctatagtttccagatggctctaacctcagtgggtgcatttgagaagatcttttctctttggccattgtcc

SEQ ID NO: 768479 - DNA, 83 bp, Homo sapiens
cttggtgaatggagatgcagctcagcaggactgatcctttgaaatactccagccatgactaaaagagaagcagaggagctgat

SEQ ID NO: 768480 - DNA, 83 bp, Homo sapiens
ttcgcgctgctgggcacccacggagcctccggggctgcacaggaagtcctggagaacctgaaggaccgctggtaccaggcgga

SEQ ID NO: 768481 - DNA, 74 bp, Homo sapiens
ggacagtagaaaaggcttttccagtttgcataatctgctgatggcccaggagatcgtttcatcattggggaatc

SEQ ID NO: 768482 - DNA, 75 bp, Homo sapiens
gcaagcggagctcccccaagagccggaaagcttggtgctaacagtggtttgcacatcatcatctttgatgaaatt

SEQ ID NO: 768483 - DNA, 83 bp, Homo sapiens
cgccgctttctagggaccccgccccaccggctgggactcttccatgcatgcatcaatctcaaataattctacaagtaaaagga

SEQ ID NO: 768484 - DNA, 51 bp, Homo sapiens
tcctggttctggaatcctcagttcaagaaactatgtgaagcaacactctgg

SEQ ID NO: 768485 - DNA, 100 bp, Homo sapiens
ctcagctgcctgggtccccgacgagagccagccgcttacaaacacgcagatggcaagaagattgatggcaggagggtccttgtggacgtggagaggggcc

SEQ ID NO: 768486 - DNA, 100 bp, Homo sapiens
atcgacataaaagtgaattttttgagaaacacggagagttcattctgtagataatacacgcatggacctgataatccctggggaacagtatttctacctg

SEQ ID NO: 768487 - DNA, 83 bp, Homo sapiens
ttcgttattggagccaggcctacaccccagtaatcaagatgattaccaactggttcgaaaacttggtcggggaaaatatagtg

SEQ ID NO: 768488 - DNA, 90 bp, Homo sapiens
taaaagcatccaggaccagacagccatccaggaccaaccttccagttctgtctgtgaacgagttcaaccttcacttgactggagacatcc

SEQ ID NO: 768489 - DNA, 87 bp, Homo sapiens
gaggaagcggggcagccggcagctcccagactggagatgctctggggaaagcacttgcttcggcgccaagcccatctttgtgtgctt

SEQ ID NO: 768490 - DNA, 98 bp, Homo sapiens
ccgagttcatcgcctacccccatctccgcatcaggaccaagtacaagttgtgcaaagtgaggaagattactgtgggagtgaagggaatccctcacctg

SEQ ID NO: 768491 - DNA, 89 bp, Homo sapiens
tgcacagcaggaggatttcggaatcttccagggacaagaatccttcaagaaacaggaaaaaactcctaaaacaccaaaaggacctagtt

SEQ ID NO: 768492 - DNA, 76 bp, Homo sapiens
gagaagctgtcggagcttcccaaggtctagatgttgatggaatatatcgagttagtggcaatctggcaacaataca

SEQ ID NO: 768493 - DNA, 83 bp, Homo sapiens
cagtgagaagaatgagtataaaggatgggttttaactacagacccagtctctgccaagtagcccctgaagaagatgaaaggaa

SEQ ID NO: 768494 - DNA, 80 bp, Homo sapiens
acggtcacgtctacaaggcgaggcggaaagatgggccctgagacgggagttaaaggagaaagaatattctgtcctgaatg

SEQ ID NO: 768495 - DNA, 100 bp, Homo sapiens
agaaccccgagtggaagtggttcatcgagcagaggctgctcatgttctccttcgtcaacgaccgatccagctccaggtcccacaggggctcttcttcccc

SEQ ID NO: 768496 - DNA, 83 bp, Homo sapiens
cagtccacccaccgccgccgcctcccagcgccggcatcggccgcacaggcaccatcattgtcatcgacatgctcatggagaac

SEQ ID NO: 768497 - DNA, 74 bp, Homo sapiens
agtgatcactctcaatcccgggtcctggatgcctcatcccttagtttcaacaccagattgaaatggtttgccat

SEQ ID NO: 768498 - DNA, 73 bp, Homo sapiens
aggggctatttgtttggatatcctgaaagatcaatgtgtggaaccatcagagaatctacaatccctgatggag

SEQ ID NO: 768499 - DNA, 88 bp, Homo sapiens
atcgtcccctggactctctcaacctacgccactctgtgccctttagccaaggaagcccagctgaggccccgcagcgtccctgcccagc

SEQ ID NO: 768500 - DNA, 50 bp, Homo sapiens
aaatagtgatagctttgataaaaggtgggtgcggctgctatttggacgag

SEQ ID NO: 768501 - DNA, 96 bp, Homo sapiens
gtcgcgccgccgccgccgccccctccctccggtgggcccgggaggtagagaaaatggactttctggccgagaccagccagtggagctgctgaatcc

SEQ ID NO: 768502 - DNA, 101 bp, Homo sapiens
atgaaggccgagggcttcgtggatgccctgcaccgggtccggcaggtatctacgagaccccagcaggcaccatcctttaccatgctcatttagacatcgag

SEQ ID NO: 768503 - DNA, 83 bp, Homo sapiens
cgccggcccgcgggtctacttcctcaaaggttgatgataattagaagcatgctttccactgaacttcccgacaacatttgtta

SEQ ID NO: 768504 - DNA, 76 bp, Homo sapiens
aggaagtgtcacacagcagtcaagtatgtcccaaacgtctccaaactcaggctctgaattggttttgtctgaagat

SEQ ID NO: 768505 - DNA, 100 bp, Homo sapiens
gagtctcagtccgaccgggctagctttggcgaggggacggagccggatcaggagccgccgccgccatatcaggcttgtgcagacataagagccagttcag

SEQ ID NO: 768506 - DNA, 89 bp, Homo sapiens
aggtggaccatggcggtgagattccagagagatggctgcccaaagattgtcaatctggggagctctaagacagacctcttctatgaacg

SEQ ID NO: 768507 - DNA, 102 bp, Homo sapiens
gtcgccggccttggtccctgcggcgcggacgtccggcgcgggagagaaaggttttaaaatcaaagatgggaaaatcggagaaaattgcccttccccatggcc

SEQ ID NO: 768508 - DNA, 80 bp, Homo sapiens
tgaatcctcaagaatgtctgcctgtcattctggatgtgggaaccgaaaatgagtgggacaaatctgctcagtgtggatga

SEQ ID NO: 768509 - DNA, 101 bp, Homo sapiens
gaggaggcagccaagctcgtagcctgccactccgtgcatcaaatgatgccgtttggaaaaatttcccagcagttgtgtggcgtaaagaaactcccatggtc

SEQ ID NO: 768510 - DNA, 83 bp, Homo sapiens
gactctttctgttcaggccagaccctctgggagcttctcagccattttccacagatcagggggtccactggacggggcctgag

SEQ ID NO: 768511 - DNA, 100 bp, Homo sapiens
cagatcttcaggaattttactgggataattatccaaataaattgcaagcattctatccaaatgctccatcaagtatgatggtgaaggatgaatatgtgca

SEQ ID NO: 768512 - DNA, 111 bp, Homo sapiens
atttatttagcagctagtaacttcacttatttcaggctgtcaccactgactaaagaagagaaaactgcggcagagcaattcaaatttcacatgccagatttatgaagaaat

SEQ ID NO: 768513 - DNA, 75 bp, Homo sapiens
tggcgtcctggagccctcctcagaatcctgttacacctgggatttaggcactttcaatctgaaaaaatacatatc

SEQ ID NO: 768514 - DNA, 100 bp, Homo sapiens
atcaaacagatgactacccagggagaggaattacgggaacagaaagaaaagtccgaaagagctgaatttcgctaaggagtttgtgatcagtgatcggaag

SEQ ID NO: 768515 - DNA, 48 bp, Homo sapiens
aacaaagccacgaataacctataatgactctatcaagaagaatatcta

SEQ ID NO: 768516 - DNA, 100 bp, Homo sapiens
ccaaggtgctgtgcttgtgaggcacccccaggacagcacacggtgcgttcttcacaaaggtggtggatgtgggtgccacctctctgaagcttgagatctg

SEQ ID NO: 768517 - DNA, 100 bp, Homo sapiens
gatgagagcattcgaagtgacctcagcagggcatccagatggtgaccctctttcagatgtgggttgttcccctctatttcacagtgaagctgcactggtg

SEQ ID NO: 768518 - DNA, 75 bp, Homo sapiens
tttcaagaaaatggatttaaacatatttccctgtggagaagagtcaagtaccattggccaggatcaaacgcttat

SEQ ID NO: 768519 - DNA, 83 bp, Homo sapiens
gactgaagtcgcccgtgggggctgagcccgccgtctacccgtggccgctgccggtctaccagcggaagatgtcggacagcgag

SEQ ID NO: 768520 - DNA, 100 bp, Homo sapiens
acccttgcactatgctgctgcctcagggatgaaagcctgtgtagaggtataagtgtgctagcggagtgtctagattgtcctgaattgaaagcaactgcag

SEQ ID NO: 768521 - DNA, 100 bp, Homo sapiens
ctagtgcctaatgtcagaatccacatggatgggaatgtgaaaccaagggagagagtcaaaatacagacttgagtccgaagccattaatttcagagcaaac

SEQ ID NO: 768522 - DNA, 75 bp, Homo sapiens
caagactggggctgctcccatcattgatgtggtgcgatcggtggatgaagactacatccaggacaaatttaatct

SEQ ID NO: 768523 - DNA, 82 bp, Homo sapiens
acggacctgtctgggtctcagccgccaaagaccccgtccggtagggagaggatcctccacagtggtatcctgctgcgtgccc

SEQ ID NO: 768524 - DNA, 74 bp, Homo sapiens
cattgctcccattgaacatgtgctcagtggctggaagtacaagttgtgcaaagtgaggaagattactgtgggag

SEQ ID NO: 768525 - DNA, 50 bp, Homo sapiens
ggatgaatgatgacccaagtatggaagagttattcctgatgaagctaaag

SEQ ID NO: 768526 - DNA, 100 bp, Homo sapiens
gttcagattcacttccttctcatccttttccaccagctaaagggccggtgcataaacttctcccgagttccatctcagtaaaagggaagcaggaagacca

SEQ ID NO: 768527 - DNA, 80 bp, Homo sapiens
tacagccgctcgtcagactccagcagccaagatggtgaagcagatcgagagcaaggttgagaaagtggcgacttctataa

SEQ ID NO: 768528 - DNA, 110 bp, Homo sapiens
caaacaacacgcgaacacccgagatctcaggggatttggctgacgcctcacaaacctccacattgctttagatccagctaaggatccatgcttaaagatgaaatgtagtc

SEQ ID NO: 768529 - DNA, 83 bp, Homo sapiens
gaacgggggtcttcctcctccgccgttgacaggttcgagaacttgtcttggacaattgcaaatcaaatgatggaaaaattgag

SEQ ID NO: 768530 - DNA, 98 bp, Homo sapiens
accagatagatgataaaccaaacaaccagattcgaatatccaagcaactcgcagagcatgttggcagataaattgaacatgactccagaagaagctga

SEQ ID NO: 768531 - DNA, 100 bp, Homo sapiens
ggggggaatgggatttctgacgagtatcacgtgatccggcacgccatgaacctggaggccgtgaacacctacgaaggtcattaacgggctgaagcagagg

SEQ ID NO: 768532 - DNA, 75 bp, Homo sapiens
ccctcatggaggaattgccttagaccttgccaccatggaagaaagagtacaaagacgatattatgaaaagctgac

SEQ ID NO: 768533 - DNA, 82 bp, Homo sapiens
tcaccaggggagatggcacaggaggatgggagtcccagcttctggagacggggttcctggggatcttcctgtgccctctgtg

SEQ ID NO: 768534 - DNA, 101 bp, Homo sapiens
cgcgtccgccgattcctcctccttggtcgccgcgtccttggctggcgtccctccagaatacccatcatatagcccctgaggtggcatggtgatgtctccat

SEQ ID NO: 768535 - DNA, 83 bp, Homo sapiens
ggactcaacgatgtcttgggatcaattgcatatggaaatatggctcgtggacagcagaaaattcagtctcagcagaaaaatgc

SEQ ID NO: 768536 - DNA, 86 bp, Homo sapiens
cgcgagacccacgaggcgctggcccggaggctccagaaacgggtcctgctgctcaccaagtgtactaatggtcacttgatgtgcgc

SEQ ID NO: 768537 - DNA, 101 bp, Homo sapiens
tccttcagccaaagaaacaagccgtggaataggtgtatcaagtaatggtgcaaagcctgaagttgacttccccagaaatctggccaagtctgtaactgtgg

SEQ ID NO: 768538 - DNA, 98 bp, Homo sapiens
catgactggaggggcgccctgggggttcagattgcaaggtggcaaggagcagaagcagcccttacaagttgcaaagaaaagctttgacctggaaatac

SEQ ID NO: 768539 - DNA, 74 bp, Homo sapiens
tctcacctgaggtgaaccttcgaccttggacttctcagcctccagaatgtaatctatgccagcaattatgacaa

SEQ ID NO: 768540 - DNA, 113 bp, Homo sapiens
gtgcggaagctggtgggcactcagcaccctctgcttaccacagccaggcattatccaattggtttgctatttgatcttcttgcatcaagttcagctcttccttggaacatcac

SEQ ID NO: 768541 - DNA, 90 bp, Homo sapiens
gtctcttacgtctgcggaagtgcagctgcctcagttcttagcgcaggtgtctgatgatttgtgagcctcaagtgactactctgtggaatc

SEQ ID NO: 768542 - DNA, 75 bp, Homo sapiens
tgttacatttagccaacaccacactttcagaaacctctgtagaggagcaggatgcaaccgacaggctgtggccgg

SEQ ID NO: 768543 - DNA, 90 bp, Homo sapiens
agaaccgcagggacagaaacagttgggtggcctggtttgctttcgaccctggctcggcgcactcggacatcatcctctccaatgacaacc

SEQ ID NO: 768544 - DNA, 100 bp, Homo sapiens
tgtctacaatggaatctggtccaaacaatcatgggaatttccaaggggattcaaacttcaacagaatgtggcaaccagcgagggcggcactgctcacagg

SEQ ID NO: 768545 - DNA, 106 bp, Homo sapiens
gcgcttcatgatgatgcgagcagagaacttctttatccttcgaaggaagcctgtggagcttcttggacacttaatgattgttggcaagaaatgtgctgctgatctg

SEQ ID NO: 768546 - DNA, 80 bp, Homo sapiens
agtcgccgccgccccgagtcccgcagccatggcaatgacaggctcaacaccttgctcatccatgagtaaccacacaaagg

SEQ ID NO: 768547 - DNA, 49 bp, Homo sapiens
cgcgggatacgcctcagcgcggttccccctcagcccttcctggagatgc

SEQ ID NO: 768548 - DNA, 75 bp, Homo sapiens
tccggactgcacttgcgaagggagcttggggaggaagttatgaagacagtatggagtttccagaccatagtagac

SEQ ID NO: 768549 - DNA, 101 bp, Homo sapiens
gatgtgcctgcaacaacaggaaaggcaatgttatattaagcctcagaatattctgttgacaagtgaatctccattgggtgacattaagattgttgattttg

SEQ ID NO: 768550 - DNA, 100 bp, Homo sapiens
gttttatacttgcttttgcttcagcgttctgtggttgtcaacaggactgggtctcttttttgagatcttttggccagctgaccctgtgtcccaggaatgg

SEQ ID NO: 768551 - DNA, 98 bp, Homo sapiens
tgaggatgcattgtccattcgaagtgttggcagtcacagggtgactctgttttgagaagtgcaaccagatctctcctggaattcaacacaacagtgag

SEQ ID NO: 768552 - DNA, 100 bp, Homo sapiens
tgccatcctatactcagagtgctacttacagtaccacagcagttacatattctggtccgattcccatcccacttcagttcagatctcaaggaccttctac

SEQ ID NO: 768553 - DNA, 90 bp, Homo sapiens
cccggattgtcctgtggggcttccggtggctgatcttcaggatcatgcttggagcaagctgtaggtaaaacttgcctactgatcagttac

SEQ ID NO: 768554 - DNA, 75 bp, Homo sapiens
cttcctgatttctgcagctctgtgtgaagcccagccatctaatcagtctccgatgtctttaacatctgatgcgtc

SEQ ID NO: 768555 - DNA, 90 bp, Homo sapiens
gcctgacccaggcctgctcggccctcacagggagcatcaccctgcaccaccggatccggcaggcccccaacccttactcgtcggaaatca

SEQ ID NO: 768556 - DNA, 88 bp, Homo sapiens
ctgctgctggacgccaaccagctccgcgagctgcccgagatacttctcaccactgcatgaatggacatttgaaagtgccatagccaaa

SEQ ID NO: 768557 - DNA, 75 bp, Homo sapiens
ccgcagttcccgggccagcctggggcggccggccaggaaccacccgttaaggaaactgggtcccttgaagaatct

SEQ ID NO: 768558 - DNA, 75 bp, Homo sapiens
tgcagcaactgggatgctgagactctcacagaggaccaggaacgactgaagctggtgactgttttgggtgctggc

SEQ ID NO: 768559 - DNA, 75 bp, Homo sapiens
ctacgccgacatcgacgccgcgtggcaggcgctgcgcacccggtaatgaggagtacctgatcaatctgatagact

SEQ ID NO: 768560 - DNA, 105 bp, Homo sapiens
ggcctgcagcgggagctggacggcgagcgcgagcggcgcgagaaagtgatgtgtccaatctagatcccaacttctcatttgaaggcaccaaactggatgtgggga

SEQ ID NO: 768561 - DNA, 50 bp, Homo sapiens
acaaattcatcccagaaatctaagagctgttaaacgtttaatgaaagaag

SEQ ID NO: 768562 - DNA, 101 bp, Homo sapiens
gctgtatggaccttactggcaccaaccccggcagtatgagcagttttcggctttgtgagaaaccttaccatcaaacacgatggccagcaacgttaccaaca

SEQ ID NO: 768563 - DNA, 98 bp, Homo sapiens
gaggaggaagaaggcgagaagcacaggtctctaattaacagaagatggcaaagcccagccacagcagctatgtccttcagcagctaaacaaccaaaga

SEQ ID NO: 768564 - DNA, 100 bp, Homo sapiens
catgatcacccgtttggaaggggaggaggagtctcagaattctgacgagtggcagctccaaggaggcacctctgcaggtgcaactgacatgggtgaaccc

SEQ ID NO: 768565 - DNA, 75 bp, Homo sapiens
aagtatttgtggtaataacccttaccgggagtttcactgaaggttggcgtgcagtggtgtgatctcagctcattg

SEQ ID NO: 768566 - DNA, 83 bp, Homo sapiens
aagggtatctgatcaagccaacaacagtgacggaatgcctccatacatcatgttacaccagacagctatattccatgccttgc

SEQ ID NO: 768567 - DNA, 100 bp, Homo sapiens
agttatccaaaattcaactgaatgcactgatgcccagcagggctcaccagcatttcagcttcaggatggttgtgagtacgtgtttatctggagaactgtg

SEQ ID NO: 768568 - DNA, 90 bp, Homo sapiens
ctgaccattgctggcatgacgtttacaacttttgatctgggtggacatgttcaagggaggagatatcaccaaacatgatggaacaggcgg

SEQ ID NO: 768569 - DNA, 75 bp, Homo sapiens
gcctatccaaggacatgagcagtttacacatctcacccaattcaggaagtaccaccaagaacagggaaggacaag

SEQ ID NO: 768570 - DNA, 95 bp, Homo sapiens
tcgagaggaagattcttacctctttgatctcgacaataagtacctggagtagaacagaaaaattattatgtctgtgttcccttgggactcattgg

SEQ ID NO: 768571 - DNA, 74 bp, Homo sapiens
gagaagcaggacctcgggccatggtgagttggactatggatcaggtactgtgctcagcatcagaaaatgggatg

SEQ ID NO: 768572 - DNA, 75 bp, Homo sapiens
cggagaggaaggcgtggtgtggcgtctccaggggatttgggagcagcttgtcttacacaaggacgaaggaaaagg

SEQ ID NO: 768573 - DNA, 78 bp, Homo sapiens
tgacaggcatgttgtataaatgtacagtgtgggactacaatactggcagagtgggagcaccattagtttgctgtgaaa

SEQ ID NO: 768574 - DNA, 87 bp, Homo sapiens
cggcacaccatggacctcactgtgggtttacccaaggtccagcctagcccctaggcaccatgtcggacagtgatctaggtgaggacg

SEQ ID NO: 768575 - DNA, 90 bp, Homo sapiens
ctgaagaggaggtgcagatggcactttccaaagtggatgcctccggggaggaacttgctactaccagcaccatgccctaccaatatccag

SEQ ID NO: 768576 - DNA, 83 bp, Homo sapiens
cagtgactgaagcgcccgtccattccaaggtctggcgtgctcctgatcagagttactctgatctgaagattttggcgttcaag

SEQ ID NO: 768577 - DNA, 75 bp, Homo sapiens
aaggagttcacgttcatgggcgagggaacagatgagaaacccggcaatgaaaatcatacatctgtcggtggcctg

SEQ ID NO: 768578 - DNA, 98 bp, Homo sapiens
tccacttcccaagaaccttctggccaaggtgattcagattgcaacgtcatcctccacagctaaggtttgggtacccagaccccacctacctgacccgg

SEQ ID NO: 768579 - DNA, 110 bp, Homo sapiens
gagcgacggcggaacccgtgggcctgtggactgcagcctcggcggtcagcagccagacccggtccgtttggaatgcctgggatggtgccgccgcatgttcctcctcagat

SEQ ID NO: 768580 - DNA, 75 bp, Homo sapiens
cggcggctccgggacgagtgagtggatcctgggaagcgctgtgaaatgggctgcatcagtctccgagagttgaag

SEQ ID NO: 768581 - DNA, 83 bp, Homo sapiens
gtccaacctggtgctggtctccgccatcaacgattttttatcaagcagaaatgcatcgaacaacgagaatcaagatcactgag

SEQ ID NO: 768582 - DNA, 82 bp, Homo sapiens
ggtaacaaacgagggttcccgggattggaccgacgcagccatgacgcaaacatgcagatctttgtgaagaccctcactggca

SEQ ID NO: 768583 - DNA, 100 bp, Homo sapiens
gtagacttaggtctgttagaggaagacgacgagtttgaagagttccctgccgaaggggagtaggttgcatctttgttgaaatgatccaaggagttgctgc

SEQ ID NO: 768584 - DNA, 100 bp, Homo sapiens
cacctcggtcgcgatgggggcgcaggaccggccgcagtgccacttcgacatcgagatcaaccgggagccgggggctgcgatttatccagttgaaaaatcc

SEQ ID NO: 768585 - DNA, 102 bp, Homo sapiens
cagagtgtgaactcctctgtcctggatgtaaaaacagtatcccatattgcattgcaacaggcttccgttacaagatgaggtctgtgtatgctcacttcccca

SEQ ID NO: 768586 - DNA, 82 bp, Homo sapiens
ctgaatacatgatttaaacaagagatttccacagaaggcaatggatcacttggagtcctttattgctgaatgtgatcggaga

SEQ ID NO: 768587 - DNA, 85 bp, Homo sapiens
aggagtggaatattgagaaggctgaggaactcagcaaccagctagctactcgagaggttgactatagtcaatggggccaatggag

SEQ ID NO: 768588 - DNA, 100 bp, Homo sapiens
atgcagccgattgatacctgtgtctcctacccaaggacagggggacagggctctgtctcgcacttcccagatggagtggatgttgaagatgatccgactt

SEQ ID NO: 768589 - DNA, 74 bp, Homo sapiens
tcaggcgtgcgcggacggtgtgcgggtgtgtgatcctgtaaaattaaatcttccaagatgatctggtatatatt

SEQ ID NO: 768590 - DNA, 100 bp, Homo sapiens
aaggaaagcaccatgacgtccatccatttcgtggttcacccgctgccgggcaccgaggaccagctcaatgacagcttggatcctagcatgactatacatt

SEQ ID NO: 768591 - DNA, 76 bp, Homo sapiens
gtcgacatgagtgatgtggaggaaaacaacttcgagggcagagcccagttctggtgatgatttcacttttgacaga

SEQ ID NO: 768592 - DNA, 99 bp, Homo sapiens
ctgctggttagtgtgctctgagggagggtccgagccagccgctgttttgccggaggagcccctcaggccgtccagtggcattgcagagcacggatggtt

SEQ ID NO: 768593 - DNA, 98 bp, Homo sapiens
ccagactcaattgatcctcttacctcaacctcctgcgtatctgggaccacagacactggcttcatgtcctattgaccgtaaaccttttcaggcagtgt

SEQ ID NO: 768594 - DNA, 87 bp, Homo sapiens
atttggctgcagataagcagacactccagagtgaacagcctttacaggttgccagagctattaagaatggcaaaggattgcatagca

SEQ ID NO: 768595 - DNA, 90 bp, Homo sapiens
cacaaagatacgaatctcttaaggggcttcaaaagcagtggactgtcttttggattcaaagtgggcaaaggccaagaaaggagaggaagc

SEQ ID NO: 768596 - DNA, 100 bp, Homo sapiens
gaagtgcagctgcctcagttcttagcgcagtttgaaggttgcgagaaggccttttcaaggcttgaaaatctcaagatccacttgcggagccacacaggcg

SEQ ID NO: 768597 - DNA, 100 bp, Homo sapiens
aatgtgctattcaaactgccctgatgggcagtcaacagctaaaaccttcctcaccgtgtactctcatctttgggtgaaaaattgtcgggatcttctgcag

SEQ ID NO: 768598 - DNA, 100 bp, Homo sapiens
caagacgggcatcttcgccaagaacgtccagaagcgactcaaccgcgcgcaggaaaaggtgtcttctctttagggatggtgaggttggaaaaaggctcct

SEQ ID NO: 768599 - DNA, 100 bp, Homo sapiens
aaacagttgaaaagttccggcagagaattctggctccctgtaaggctgctttgtaccgcctcagtggagactggaatcccttacacattgatcctaactt

SEQ ID NO: 768600 - DNA, 100 bp, Homo sapiens
ctggacagcaaggaggaggggaccagccagggcaacaaccttcgggctgcaggggccgaggctctgggaaaactcctccaacagaacaagtccattcaga

SEQ ID NO: 768601 - DNA, 74 bp, Homo sapiens
cagcggggtccgggtccggagcgccacagttggtgttcgaggaagagacattgttgttcttggtgtggagaaga

SEQ ID NO: 768602 - DNA, 100 bp, Homo sapiens
cctgctcacgctcggcaccgcgctcgcctccctcggctcggcccaaagcagcagcttcagccccgaaccctgaccctctattctgcaccctgtgagccac

SEQ ID NO: 768603 - DNA, 75 bp, Homo sapiens
gttcgactgctagagccgagcgaagccaagagtgagccatggagctacgtgtggggaacaagtaccgcctgggac

SEQ ID NO: 768604 - DNA, 80 bp, Homo sapiens
ctgcccctattgtaagtgcagatggaacacaacaggatctagtgaaaagccatttgatgtatgcggtcagagaagaagtg

SEQ ID NO: 768605 - DNA, 74 bp, Homo sapiens
aaaaattccctcttcagtttacatatatggcagtgacatatctgaagagatggattaagaatgctttggattaa

SEQ ID NO: 768606 - DNA, 75 bp, Homo sapiens
cggttctccatcgcgcgcacggcagcctagcgcaatgaggcgggcagcactgcgagcaccaagctatggatcatc

SEQ ID NO: 768607 - DNA, 90 bp, Homo sapiens
aaatataatgacacagcagaaggactccttcgaaatggaagagggtagaagagcagaggatggctctgtcattgattatgaactgattga

SEQ ID NO: 768608 - DNA, 100 bp, Homo sapiens
cgtcgttgccttgtatttccagagaacagtagatctctggcttcctgctctgtttgttctggttgccctggaaagcctgctgctcagcccatgccccggg

SEQ ID NO: 768609 - DNA, 100 bp, Homo sapiens
ggcccgccccacagtgccctgatcctggacgtggcctgtggcacaggcctagtggctgccgaggtgttgtagaatatttgagcacaggtggagtagaaac

SEQ ID NO: 768610 - DNA, 100 bp, Homo sapiens
tcccgctccagccatgctctccgccctcgcccggcctgccagcgctgctctccgccgcagcttcagcacctcggcccagtttacaggctggtaacctaca

SEQ ID NO: 768611 - DNA, 101 bp, Homo sapiens
gtggaagctgtgagcgcccccatcccggaggtctccgccggctcccgggtactccaaagattcaggtttactcacgtcatccagcagagaatggaaagtca

SEQ ID NO: 768612 - DNA, 82 bp, Homo sapiens
tggacatctttgatatgttttttggaggaggaggaaggatgcagagagaaaggagaggatatgttcaaggaatgagtgattt

SEQ ID NO: 768613 - DNA, 83 bp, Homo sapiens
caagaaatcaagtacttcagtaagagatggggatcttgaaaatatttgtgcagccatttggacctcagtatgaggtagtgtta

SEQ ID NO: 768614 - DNA, 83 bp, Homo sapiens
gttgtgccagcgactaaaaagaggcagggcaagaatcctttcgttccatcacaaggtcgtattacagaggtgcagcaggagct

SEQ ID NO: 768615 - DNA, 98 bp, Homo sapiens
tcagaagcatgtgtcttccccagctctgcagccacatactatccgtttgttcaggaaccaccagtgacagagagatgacctggcttccaccactttct

SEQ ID NO: 768616 - DNA, 83 bp, Homo sapiens
tgcatagaggcagacctccagaactacctgtaaattatgtgaaacctccaaatgtgggagtccttcaataatgttaaacagtg

SEQ ID NO: 768617 - DNA, 100 bp, Homo sapiens
cggacctttccgagctgcttatggtgtctgccccaagtcgtcaaagtcctacattttagctttcagtgctgaacttccttctcccttaaattattataaa

SEQ ID NO: 768618 - DNA, 100 bp, Homo sapiens
tgcttcttaataccgatctacatggccacgtgcaattgctggtatagttgatcagccgatgcagaacttccagaaaacatctgaggcacaggcttcagca

SEQ ID NO: 768619 - DNA, 100 bp, Homo sapiens
accacgacatcccggcgtgactgagcaggttctgagtggtgttgctcagccagtagcttttggtcaaggacaacagtttttaccagttcatccacaaaat

SEQ ID NO: 768620 - DNA, 51 bp, Homo sapiens
atagtgcctttcagccctaccagaccattcctcaagaattttgtatccaag

SEQ ID NO: 768621 - DNA, 100 bp, Homo sapiens
cagaaggatttatacagagatgtcatgttggagaactacaggaacttggtatggcttggtcaagagcaatctgaatccaaatgcaaaggagtttgttcct

SEQ ID NO: 768622 - DNA, 75 bp, Homo sapiens
tgtgctgaagctgtctctcgggtcctcaataagcttggaggctctgctgccatgaaggtgaagattaagtgctgg

SEQ ID NO: 768623 - DNA, 74 bp, Homo sapiens
atggcgaccgggctcggggagccggtctatggactttccgaagacgagggatcgcttacacctgagacgaacta

SEQ ID NO: 768624 - DNA, 98 bp, Homo sapiens
tgcaagtggccaggctgtgaagcagtgtgcgaagatttccaatcatttctaaagaagagaggatggtgatgcaccggttacaaaagatgagaccacct

SEQ ID NO: 768625 - DNA, 75 bp, Homo sapiens
tacgtggcggcgctggaagggatgtcgtctcagcagtgctcgggcgcaggttgagaacttgttgcttagtaacca

SEQ ID NO: 768626 - DNA, 100 bp, Homo sapiens
cgctgctgctgccgctgccgccctgagtcactgcctgcgcagctccggccgcctggctccccatactagtcgccggaagatgagaatgtgcctactgctc

SEQ ID NO: 768627 - DNA, 75 bp, Homo sapiens
gtggaggcattttggggcagaatacagagatatggaatcagctgccgaacccttcagccctccgcgaggagactc

SEQ ID NO: 768628 - DNA, 78 bp, Homo sapiens
ttgaattagattacagcgatggggacacagaaggaggaactctctggaatgaaaaataaaatacaagtagttgtgctt

SEQ ID NO: 768629 - DNA, 100 bp, Homo sapiens
gcaattaattttagttcaatgcttcaaacgctcttcaggcgcagtgtgcgttcagctgtgtcagctaatggtacaccaggggttggaaaaaccacactag

SEQ ID NO: 768630 - DNA, 80 bp, Homo sapiens
acgtccggcttcggagcgggagtgttcgttgtgccagcgactaaaaagaggatgatggcttggaaaaaagtccaatgaaa

SEQ ID NO: 768631 - DNA, 74 bp, Homo sapiens
gaagtggtgtctacacttataaaaagacgagttgtactgctgtcacaggaaatggacgctggattacaagcatg

SEQ ID NO: 768632 - DNA, 75 bp, Homo sapiens
agttttgccaggtgtttgttaccttgaggcggggtttcaccatgttgcccagactggtcttgaactcctgagctt

SEQ ID NO: 768633 - DNA, 100 bp, Homo sapiens
catttggaaaaacactagagacagacggctggcaggctttgagctgggcttcgccatggccagtcctaatgccctggtcctctgggaagcccaatttggt

SEQ ID NO: 768634 - DNA, 98 bp, Homo sapiens
ctgagcgtcccagtacactgacagaggttcgatacaagaggctgttttcctagcgtggcttgctgcctttggtaagaacatgtcgtccatcttgccat

SEQ ID NO: 768635 - DNA, 96 bp, Homo sapiens
caaaaatcttagctctctcaatctctgtctgaactggatcataaatgacagatttgatgataatggctatgttaaagacgttgaagcaaatttcat

SEQ ID NO: 768636 - DNA, 51 bp, Homo sapiens
taccaaacatgtgggacattaggaaggttgtttacattcagagctctatca

SEQ ID NO: 768637 - DNA, 100 bp, Homo sapiens
ggcaccactgaagtgaccgaatgagccaaggaagtatcgcctggggatgctggaggagaggctagttccgatgggatcaaaggcacgaaaagcaaagaac

SEQ ID NO: 768638 - DNA, 90 bp, Homo sapiens
taagcactattattcatgaggcaaatgaggaacagggcaatagtatgatggtacccaattccgacagccctgatcttctgacgttgcaga

SEQ ID NO: 768639 - DNA, 75 bp, Homo sapiens
cggaccccccggatctgacggggcgggacctggcgccaccttgcagttggggaatggcggtcaatgtgtattcta

SEQ ID NO: 768640 - DNA, 100 bp, Homo sapiens
tgaccgattttaacttcctaatggtgctggggaaaggcagctttggcaaggcatgatgggcccacctcctggtatgagacctcctatgggtcccccaatg

SEQ ID NO: 768641 - DNA, 74 bp, Homo sapiens
gacgtcttccagctggagttcaacgatggcgcctacaacatcaaaggaaattggatacactcacatgaaaatag

SEQ ID NO: 768642 - DNA, 74 bp, Homo sapiens
aagagaagtcaaaagggaaggctaagaaattccttgagctcataggcattgctcagggtcagatgacagttctg

SEQ ID NO: 768643 - DNA, 74 bp, Homo sapiens
tgacaaaaaccaaagtctcttctgctgggaaatcccagtacagatcgttttgggatttgagattgacgcggtga

SEQ ID NO: 768644 - DNA, 100 bp, Homo sapiens
gccggcgctgctgagtttcttcatctacaacccgcgcttctggccgcgggaaggagagatatacaaccacttcctgttgtgtcacacttgcctgcagtaa

SEQ ID NO: 768645 - DNA, 99 bp, Homo sapiens
actcctcagacccttctgctcccggccgccgctttccgccggggcgagacccccaggtcaaactgtgctgaaaatatccgcaaacacattctgcatact

SEQ ID NO: 768646 - DNA, 83 bp, Homo sapiens
ccgagcgcaaggacagcgcgaggtccgcgcagcccagcgcagccatgtcaccgacgatgagggcgcacctgctgtcctggagc

SEQ ID NO: 768647 - DNA, 75 bp, Homo sapiens
gcatcctgctcctcttctacttggcctacatccatgaagacagtgaattctccagtgctctggagtacttgaaat

SEQ ID NO: 768648 - DNA, 76 bp, Homo sapiens
tttcatctcagcctcctcagtagctgagactacagtgccggtggcagatatcaaagccgtggtgacgggaaaggac

SEQ ID NO: 768649 - DNA, 75 bp, Homo sapiens
cgggcgcctagccccgcgcctgggcctcgccgagcccgacatgctgaggttttccctgatgaatttcacctccag

SEQ ID NO: 768650 - DNA, 74 bp, Homo sapiens
agcctgccaatgcaacagccacggaagattaagcaggctgacaaacgggctcatcataatgcactggaacgaaa

SEQ ID NO: 768651 - DNA, 100 bp, Homo sapiens
ccagaatatctcagatgagcaggctgaagggtatgtgattggcagctgtattaaacacattccaatcgcaggacgagatataacatattttattcagcaa

SEQ ID NO: 768652 - DNA, 96 bp, Homo sapiens
aaagtcacccggcggccaaaggccagtgactaccaacgtttggaccagaaggtcgaggccgaagccgtgaatcgtgccatcaccatcgccaaccag

SEQ ID NO: 768653 - DNA, 80 bp, Homo sapiens
agaaacacttcttttattttcctgtaatatatctgtatcatcggaggatttcaaatatgcgtgcattagagaatgatttt

SEQ ID NO: 768654 - DNA, 50 bp, Homo sapiens
tgcagctcaagatgagcatcttgcagtgtacacacacagttacacttcat

SEQ ID NO: 768655 - DNA, 83 bp, Homo sapiens
cgagaccgcgtgcgaggaccggccagctgcgggccgtccagcggctgtgccacttctacagcgccgtcatgcccagcgaggcc

SEQ ID NO: 768656 - DNA, 95 bp, Homo sapiens
ctcactggctcggagactcctgcctgctgaggccggaaggtggtggtcgtacgctgtgaaggcatcaacatttctggcaatttctacagaaacaa

SEQ ID NO: 768657 - DNA, 90 bp, Homo sapiens
acctggcagtgccctccccactcgcttggtccaaggcccggattgggggacacagccctatcttcagtttcatgagacccttgaacagcg

SEQ ID NO: 768658 - DNA, 97 bp, Homo sapiens
aatgagtctagacctgtcgtttgtgaaaggacatacagtgggagaagttattaaattaggtcctaatggatctccaagaagagcctgggggaaaagt

SEQ ID NO: 768659 - DNA, 74 bp, Homo sapiens
gtcggccgtgcactgcagcctgaagcgctcctggttgcagccagaatgcatgacttcaggaggactgtgaagga

SEQ ID NO: 768660 - DNA, 75 bp, Homo sapiens
aatatttcagagctccaaactgcatttccagccctacagctcaaatatcttccagaacacatattacataatgga

SEQ ID NO: 768661 - DNA, 75 bp, Homo sapiens
gagaccacttctccacatgaatattctgttttgctgcccgaagcttggaacttagtgatttggcccgtgaccctc

SEQ ID NO: 768662 - DNA, 50 bp, Homo sapiens
aagccatgatttaaatatcggcgttaagaaattggaatgggattaacagg

SEQ ID NO: 768663 - DNA, 90 bp, Homo sapiens
accgtggatgtgtatgggattgtgtatgaccttcgaatgcataggcctttaatggtgcagacagagggagtgagttttccgggagtccct

SEQ ID NO: 768664 - DNA, 100 bp, Homo sapiens
aacattatcacaaagctatcatcctgccaaactccaggctcagatgtcacaggagcagctgcattggcatggaagaatcctatttcaagctggtttactg

SEQ ID NO: 768665 - DNA, 75 bp, Homo sapiens
cgcgccccgccgcctgccgagcctttgatgtccccaagaggtttggcagttctctaccagtggaccaatcttttc

SEQ ID NO: 768666 - DNA, 73 bp, Homo sapiens
ctagcaggaatgcttactgttgcgtggttcgttattaacagagctacgaagtgaagagtgtcctcggaaagga

SEQ ID NO: 768667 - DNA, 100 bp, Homo sapiens
ccaacctgggtgctgcaggtgttcaagtgcagggagttcccgttacaatcactagtgttgcagggaggagagagcgatggcttttttcacccagaaggcc

SEQ ID NO: 768668 - DNA, 82 bp, Homo sapiens
cgtggcggagactagcgctccggagcacgggcacgacgggggcaccttctcggctgctagaggcatacacggaatacctgag

SEQ ID NO: 768669 - DNA, 110 bp, Homo sapiens
agcgggcggtgttcccggctccgtggggccgtcttcccggcgagtccgcgacggtcgccgcccacggcgaggtcttgggcgtctttggtactggcttttttaggggtctg

SEQ ID NO: 768670 - DNA, 97 bp, Homo sapiens
tttgtccagcgactccggggcctgatgaatgacatcggcactggtgaggtggattgatgatgaatcttctggcacacctggagcaactccagaacac

SEQ ID NO: 768671 - DNA, 90 bp, Homo sapiens
atttaaaggagcagccctggtgtcacctatcagtaaaagtgtgctggaattgatgttcgtctgtgtgatgttggtgaggccatccaagaa

SEQ ID NO: 768672 - DNA, 75 bp, Homo sapiens
tggaaccttcgggcaaacaggattccacagtgtcctctggaaaatgcgatgaagaacgatacagatacagggaat

SEQ ID NO: 768673 - DNA, 75 bp, Homo sapiens
aggagagacgtcgctgaggggcttgcctgaagcgagggatttggtgcttccagatgtgagttatcaggtggaatc

SEQ ID NO: 768674 - DNA, 50 bp, Homo sapiens
cgttgatcagcattactcccacaagaacactcgtgaaactgctcaggcca

SEQ ID NO: 768675 - DNA, 73 bp, Homo sapiens
agatgccgggggagcggggccttccacaccccctccgtgggtgtgtggagtctccccaggacagtgctatcac

SEQ ID NO: 768676 - DNA, 100 bp, Homo sapiens
ctcggagaccccgcgccgacggctgctcaaacatcaggatcatatctgaagatattagtgagctacaaaagaatcaaactacatctgtagccaaaattgc

SEQ ID NO: 768677 - DNA, 101 bp, Homo sapiens
agaccattagccaatcacaggagacccaaatctgcttgttatctacagaactcaaagttgtcaatacgtagaggtgtagtcgccgccgccagccgccatgg

SEQ ID NO: 768678 - DNA, 76 bp, Homo sapiens
ggaggaggaggaggaggaggaaatagaagaggagttatgggaagaagaatttattgaacgctgtttccaagaaatg

SEQ ID NO: 768679 - DNA, 100 bp, Homo sapiens
agaaggcgtctcatggcgttggaataccggctctcagcggcttaagttcttggagacgtgctgatgacaggaaagatgaccgggtggaagagcgggaccc

SEQ ID NO: 768680 - DNA, 90 bp, Homo sapiens
gctggaagacatggccactccagtcggtgttgagcacggcgagcagtctcaggcctttagtgatgatggccagaaaattagtccagaagg

SEQ ID NO: 768681 - DNA, 50 bp, Homo sapiens
cccggaaccgcgattcggcgtgtcagttgattatggaagattcccacaag

SEQ ID NO: 768682 - DNA, 75 bp, Homo sapiens
gatgagtcatgtggtggtgaaaaatgaccctgaactggaccagcaggtgaggtttatacatggggcgacaatgat

SEQ ID NO: 768683 - DNA, 98 bp, Homo sapiens
actacgtgggcaccttgcgcttcttgcagtcgatgattaaacttcaggaagtatttaaggcattttatcttggaaagcacagtggtcgaaaacttcag

SEQ ID NO: 768684 - DNA, 100 bp, Homo sapiens
cctgggcatcaccaacatagccatcgacttcggggagcaggatggagctatgacattgaagagaggaaggttccaaaacccaagtccaagtcttatggtg

SEQ ID NO: 768685 - DNA, 101 bp, Homo sapiens
tattggttggtgatggtggtactggaaaaacgaccttcgtgaaacgtcatttgactggtgaatttgagaagaaaggtaacctgacctctccactgaagggc

SEQ ID NO: 768686 - DNA, 96 bp, Homo sapiens
aattgttgtagcaggtctaaaagttcaggtccaggtgtgggacgcctgctcagaggccctgataatgtttgataaggataatttagatgacatggg

SEQ ID NO: 768687 - DNA, 100 bp, Homo sapiens
gcggcggcggcggtgccggagcgcgagcagagcggagacccccaggtcctgcgggcgcgacaattcctcctcgcttcaagaagatgaagaagtagagatg

SEQ ID NO: 768688 - DNA, 75 bp, Homo sapiens
atagagtctgctcacaatatgctgcttatggggagaagaaatcaaggctcagggtgttgattgcctttgctcagt

SEQ ID NO: 768689 - DNA, 100 bp, Homo sapiens
atggggggttgctgataagaccttcaggcctccttattaccataggaagagcctaggttccaggtgccttttcagttgctgacttctcttatggacatag

SEQ ID NO: 768690 - DNA, 76 bp, Homo sapiens
cccctctactgctccccaattacagcccacctcttgcatcgtcacctacaggcccagccccagcccaggggacccc

SEQ ID NO: 768691 - DNA, 110 bp, Homo sapiens
tgtgctttggccatgtggttccccagaaggtatctaccaaagatctttcggaatgaccggctgtgggtcatcttattgctgcagtcctaaaggaaaatggtttttcagaa

SEQ ID NO: 768692 - DNA, 90 bp, Homo sapiens
ctggcggagtctctctttccggattctgcctccctccgctaacctccgtccagttacaacacagggatcacaacaaacacaaccgccaca

SEQ ID NO: 768693 - DNA, 100 bp, Homo sapiens
gactgactggcacagtggagaaaccgcctcgaaaacggagaagcagtgacaaagcataaatcatggacaccagagaataaggtggacctcaggaatccgg

SEQ ID NO: 768694 - DNA, 51 bp, Homo sapiens
agaacgatcaaaagccaagtggcaaacgaattataaggctgtctgcagaga

SEQ ID NO: 768695 - DNA, 98 bp, Homo sapiens
ggccacttacctgactggggaactgacgggaggtgtttgacaagcgagcagccaccaaattgaaagagcagctgcacggctacttcgagtacatcctg

SEQ ID NO: 768696 - DNA, 101 bp, Homo sapiens
tggctgatactacgtattccagatggccaagcatggggatcagcacgagggtcagcactacaacatctccccccaggatttggagactgtatttccccatg

SEQ ID NO: 768697 - DNA, 88 bp, Homo sapiens
aaaacggccacggactctgacgaaaggattcactttaagagatttggaaactcttccctttggaattgctcttcccatcagagatgca

SEQ ID NO: 768698 - DNA, 82 bp, Homo sapiens
ccacctcttcaggacctactccttcctgaacctcctgttcctctgctatccgctgattcaccccaagagtggccgttcctac

SEQ ID NO: 768699 - DNA, 51 bp, Homo sapiens
gcaaggctgagggacgagaacgagattgtagaaggcatgaaacaaaaaatg

SEQ ID NO: 768700 - DNA, 74 bp, Homo sapiens
attcattcgtattatattggagattttcgacaatgaagccaaagacgtggagagagaagtttgctttattgata

SEQ ID NO: 768701 - DNA, 100 bp, Homo sapiens
atcaggtgactgtcccagaagtgaatcgcaggaaaatgctgtccagtggggtgtgtacatcaactgttcagcttcctgggaaagtagttgtggtcacagg

SEQ ID NO: 768702 - DNA, 100 bp, Homo sapiens
gggaaatcgggctgaagcgactgagtccgcgatggaggtgaactggcacaaaggttaatctcaagatgccgctagtgaaaagaaacatcgatcctaggca

SEQ ID NO: 768703 - DNA, 82 bp, Homo sapiens
gtgtggcccgacgactgtgacgaggacgaggaggcagccacggggcccctgggggagactgtggccgctttctgtctaaccg

SEQ ID NO: 768704 - DNA, 101 bp, Homo sapiens
cccagcaaacttgaaccgactaagaccccatttggagctgttagcaaacattgaccctagtccagtcaagtctctatttatgaggtggacaagcaagattg

SEQ ID NO: 768705 - DNA, 101 bp, Homo sapiens
ccgaggagcctcgcgcggcgctggagagagacaagatgtccgccagagctgcggccgccaagatgaaggatttgggggcagagcacttggcaggtcatgaa

SEQ ID NO: 768706 - DNA, 96 bp, Homo sapiens
gaggacatcgacccccgccggactgcagtgacaacgcccaagggggaggccacgtggtgcttgcgcagtgccgagtgctgatggccagtgtggggg

SEQ ID NO: 768707 - DNA, 100 bp, Homo sapiens
ccgcaaggccgcccgggaactgctgacgcttgatgagaaggacccacggcgtctgttcgaagacgccccgaccagtgcgcccagcgcccctcccagcaca

SEQ ID NO: 768708 - DNA, 100 bp, Homo sapiens
atctgatgtgatctctcagctggagcaagaagaggacctgtgcagggcagagcaggaggccccccgaggcattcccatcaagagcaccatggacaacccc

SEQ ID NO: 768709 - DNA, 74 bp, Homo sapiens
gaaagtgtgtgggaggcgttgacctgccccttgtcctggccccgcagtggtctcggaaagagggtcgtggtccc

SEQ ID NO: 768710 - DNA, 90 bp, Homo sapiens
gaaaatcatggtgaggacatgaggaaaatgtccttccagcgctgcgcccggacagacaagactgtgatagatgccaacattttcccagcc

SEQ ID NO: 768711 - DNA, 101 bp, Homo sapiens
cgcggcgagaagccccagctgcactacgcgattgcagagggaatggcatacatcgagcggaagaactacattcaccgggacctgcgagcagctaatgttct

SEQ ID NO: 768712 - DNA, 75 bp, Homo sapiens
cagggccggttctgcaccatcttcaggtcctactccaggggcgctcagtaagactttgaccccgacgcaggcttc

SEQ ID NO: 768713 - DNA, 98 bp, Homo sapiens
ccgtattctcagagtaaaagttgtttctggaattgatctcgccaaaaaggacatctttggagccagcatttttgaaacgttggggttgttggagtggt

SEQ ID NO: 768714 - DNA, 82 bp, Homo sapiens
tctctctttctggcctggaggctatccagcgagatacaactcgtcaacgaatcaaattcagtgatgacagagtatgcaagag

SEQ ID NO: 768715 - DNA, 75 bp, Homo sapiens
cactgggactttctggaggcaggttggtcaaagaaaaagtgatgtatgaaaaagaggcaaaacaacaagaagaaa

SEQ ID NO: 768716 - DNA, 98 bp, Homo sapiens
gacgctcaagtacctgtggaccgtgtgctgccactgcgggggcaagacgaagtatctccagatgaaatggccactgcttgatgtccaggcagggagcc

SEQ ID NO: 768717 - DNA, 100 bp, Homo sapiens
cctccggcccgagatgaatcctgcggcagaagccgagttcaacatcctcctggccaccgactcctacaaggcctggggcatctctgtactgaaccccaac

SEQ ID NO: 768718 - DNA, 74 bp, Homo sapiens
cttggagcccagagccacgtcaaaagcattggggagtcagcaatgtccgttgtgttaaatcagctgctgcccat

SEQ ID NO: 768719 - DNA, 100 bp, Homo sapiens
gagaagtggtggccacagtcgaaaaatcccaagttcacacaaaagatgttggacaatttctacaattttgcttcatcatttgctgtctctcaggcccaga

SEQ ID NO: 768720 - DNA, 100 bp, Homo sapiens
cccaggaggcgctggagcaacagctccccacactgcaccatgagctcagttggctgcaggagcagctagcacaggtctgcctcagccacctccctgacgc

SEQ ID NO: 768721 - DNA, 75 bp, Homo sapiens
gggaattcctctatgacaatctcatcattttctccccttcggtagaaggactcagaattcatgattgaagaaatg

SEQ ID NO: 768722 - DNA, 83 bp, Homo sapiens
ccccccaatgcggccgcgagaagcagcgggggggcaggcgatcgaagcttgcattgaaaggctctagttacagtggacttctt

SEQ ID NO: 768723 - DNA, 90 bp, Homo sapiens
ggcttattaatcagttcaatgatcccagcaacctcaccacctggctgttccttctctctacaaggcttcttctcatatcggtaattccac

SEQ ID NO: 768724 - DNA, 82 bp, Homo sapiens
acaaaatgcaaaaaaggaggccaaagactttgctccctcaacctcctggtgcggtcccggaacaaaggggctctggacacgc

SEQ ID NO: 768725 - DNA, 100 bp, Homo sapiens
ggatgaggcccaggctgatgggaaggagcacccaggagctgaaggtacaaagtgaaatcacttcagcaaacacagaagatgatgatgacgacgatgatga

SEQ ID NO: 768726 - DNA, 74 bp, Homo sapiens
cggccctcattctgcacgacgatgaggtgacagtcacgggtttttaatgaccacaacaagcaagcatgcagctt

SEQ ID NO: 768727 - DNA, 100 bp, Homo sapiens
gaatttatatagagatgtgatgttggagaactacagaaacctcgtctccctggatgctgtctttgcaggtgccatgcctacaatggcaagcatcaagctg

SEQ ID NO: 768728 - DNA, 100 bp, Homo sapiens
accgtcgccagcggagcgaacccgagagcgtggagcgggctgggccagccatggactttccccagcacagccagcatgtcttggaacagctgaaccagca

SEQ ID NO: 768729 - DNA, 100 bp, Homo sapiens
ctaattagaagagcctgggaacttggtttaatgaacacacacattccagagaactgtgttgcgacaaccaccagttaagcgtttgagacttcgtggtgat

SEQ ID NO: 768730 - DNA, 100 bp, Homo sapiens
cgggcgggggcaccgagggctaccacgttctgcggatggagtggtttatgcctggggccacaatggatatagccagcttgggaatgggacgaccaaccaa

SEQ ID NO: 768731 - DNA, 96 bp, Homo sapiens
cggatggccccaggtgtaagcgcagaaagcaggcgaacccgcggcgcaataacggagccttcacgtaaatgggtccagtcatgcctcccagtaaga

SEQ ID NO: 768732 - DNA, 97 bp, Homo sapiens
tgcgctcctgcagccttgtgctggagcaccagccagacaacatcaaggctctcttccgcaagggcaaggctccaggaggccagagctctactgaagc

SEQ ID NO: 768733 - DNA, 150 bp, Homo sapiens
ttcagagcttcgccagccctgggacaaggatgattttgcagttacctgggatccatggagtcctgctataaggtctgagaaagaaccccagtttaagtttatctacttcaaccacatgaatctcgccgagaagagcacagttcacatgag

SEQ ID NO: 768734 - DNA, 50 bp, Homo sapiens
ccaggcccggcctttctgacaagagatggactcaccctgtcacccaggtt

SEQ ID NO: 768735 - DNA, 83 bp, Homo sapiens
ctaccacctgcgggagatcatcatctgcacctaccgccagtaagactttgaccccgacgcaggcttcagtgattgccgcggat

SEQ ID NO: 768736 - DNA, 98 bp, Homo sapiens
cgaggatccggagtgtctgggagaaggatgcttaaatggcagaggccaagcccagactccagacggacatgcggataaggccctgctgcggcagatgg

SEQ ID NO: 768737 - DNA, 98 bp, Homo sapiens
cagtcactaagccagaatcctgaccttgctgcacagggctactacaaagttctgggaaagggaaagctcccaaagcagcctgtcatcgtgaaggccaa

SEQ ID NO: 768738 - DNA, 75 bp, Homo sapiens
aggtcccaggtagccgcggagcgcacccccgtgcccttttcagggggggccctcagcctcttggccttgaacggg

SEQ ID NO: 768739 - DNA, 78 bp, Homo sapiens
aacttgtagaaggttgtgaaaaaactactaggatcacgcggcatgtattgaggtggattgtagacatggaaggtgcac

SEQ ID NO: 768740 - DNA, 100 bp, Homo sapiens
tggcacctatggacaagtctataagaacagaggaagagttcctagatcaagtgaagaggaagctggctcagaccagccctgagaaagacctgttgaccac

SEQ ID NO: 768741 - DNA, 100 bp, Homo sapiens
cggctcccttcgcctccaggatgcgctgagccctacaacacccccagcggccgccggctcccccacgaggtaagaatgattgatgttggctgatattgga

SEQ ID NO: 768742 - DNA, 80 bp, Homo sapiens
attctctgacctggactacatggggcatgcgaggctgccaagaaaacaaaagcagatgaccgaggaacagatgaaaagac

SEQ ID NO: 768743 - DNA, 82 bp, Homo sapiens
taacaaatcctttctggcggcagctaatggtggcgacatgtctaagaatgtgagccagtcacagatggcaaaattgaaccaa

SEQ ID NO: 768744 - DNA, 87 bp, Homo sapiens
aggaacgtggccgacgacaccagtgagccccaagccatgtgctacattgaaacatccaacttagatggtgaaacaaacttgaaaatt

SEQ ID NO: 768745 - DNA, 100 bp, Homo sapiens
tcccaaagtgctggtattacagccagtcagaagtccagaaagaagagatagaaaagcatcagctaatgctcgaaagaggaaacattcgccttcgcctccc

SEQ ID NO: 768746 - DNA, 98 bp, Homo sapiens
cccccggaggaggcgacaaacttcgcagtgccgcgacccaaccccagccctggccgcggcccatggagcccgccggcccggcccccggccgcctcggg

SEQ ID NO: 768747 - DNA, 123 bp, Homo sapiens
tgacggagacgcagatgtggacttgaaagaagctgcagcggaggaaggcgagaatcgagagctccagatcatgagaaagctagatcactgtaacatagtccgattgcgttatttcttctactc

SEQ ID NO: 768748 - DNA, 82 bp, Homo sapiens
caggactcctttgaaggcgtggacgaggacgagtgggtggtacagaagttggtcctgccctttgggcgactgaactacctgc

SEQ ID NO: 768749 - DNA, 100 bp, Homo sapiens
catctgcaggactatgaccaggcccgccactacctcctggctgccgtgaataggcagcctaaaggatttcagctctttaaacccagtgtcatctcttggt

SEQ ID NO: 768750 - DNA, 90 bp, Homo sapiens
caggttgtgaggaccaagcacgcctcttcaaagacgagggtccccagccccaccccagccccaaaggaggctgttcgagagggacgtcct

SEQ ID NO: 768751 - DNA, 100 bp, Homo sapiens
tgtcatgctcgtcctcatctgggttctcactggccattggcttctcatggatgaaatcatgttgttgatgtcagtgttgcggtcagtactcctgcaggac

SEQ ID NO: 768752 - DNA, 100 bp, Homo sapiens
gccatgggtcctcgacctgcagggagcagaggggacagaggcaccaaggacctccaagacagggttacacatcattttggaatgactgtatatcatctgg

SEQ ID NO: 768753 - DNA, 100 bp, Homo sapiens
caaaagttgatgatcttccccctgagacagggcagggcattgttcatgcactgaccgacctcagcagccccggcatgacctcagggaacggaaactctgc

SEQ ID NO: 768754 - DNA, 75 bp, Homo sapiens
cttctgccactgctgctccgtggagatcgtcccgcgcctgccgaagtttccaagggtcacttgtgtctcgtccgt

SEQ ID NO: 768755 - DNA, 101 bp, Homo sapiens
agaggtgccacccgaggagttccgcccctttctggcaaagatgagggggattcttaaggaatccccttctggtcgaaggaaagctcttgctactagcagca

SEQ ID NO: 768756 - DNA, 90 bp, Homo sapiens
ctgagcacagcatcatcaaggacttcaccaagcaggtaaagtcagtgataaatcttttgtttgctgcatatactggagatgtgtctgcac

SEQ ID NO: 768757 - DNA, 82 bp, Homo sapiens
gccgcccgaagcgcccgcgagccgccggccgggagggatccgggtcctgaagttcaaatctgaacatcaatgatgtactagg

SEQ ID NO: 768758 - DNA, 82 bp, Homo sapiens
ctgccggctgtaaagtcatcacctcctgggatcagatgtgcattgaggaattgaaagatgttggccatcgtgatcagatggc

SEQ ID NO: 768759 - DNA, 90 bp, Homo sapiens
ttccacatgcgcttgggcctggccacaacaatacaatggtgggtgaagagaagatgtctctaagaaaccggctgtcaaagtccagggaaa

SEQ ID NO: 768760 - DNA, 101 bp, Homo sapiens
gctctttctccaagtttgatggctgatcttgaaggtttacacttgtcaacttcctcttcagtcatcagtctttaccaacagggacgcttatgtcaactggg

SEQ ID NO: 768761 - DNA, 103 bp, Homo sapiens
aagggcgcatatcttcaaagcacctagtacctcctaccattgtcaactggtatggatggcagaacagaaaatatcatatgataagaagaaacaagaagaattg

SEQ ID NO: 768762 - DNA, 97 bp, Homo sapiens
gagacgcgcgtgtgtgagcgcgccggaccaagcgggcccagaagcggatgagcgggatcgtgtgcagaagaaaaccttcaccaagtgggtcaacaag

SEQ ID NO: 768763 - DNA, 100 bp, Homo sapiens
aacccttaagaaaaagcgaaggaatttcgcagagctgaagatcaagcgcctgagaaagaagtttgcccaaaagatggttgggggccgtcccgctcctaag

SEQ ID NO: 768764 - DNA, 101 bp, Homo sapiens
agccggcgcggggtcggcgctgggctggaggcggcggagcgcgagagcttcgagcggactcaggcctccccatggccacccatggaccagtcggcattcac

SEQ ID NO: 768765 - DNA, 82 bp, Homo sapiens
gcccagacaatgccggtggaggaatttgtggctggctggatctctggttacttcttgctgcagattctgcgcaggatcggag

SEQ ID NO: 768766 - DNA, 100 bp, Homo sapiens
gcagaaggtgaaggtgctcacgggcacggacaatgcagatcttcgtgaagactctgactggtaagaccatcaccctcgaggttgagcccagtgacaccat

SEQ ID NO: 768767 - DNA, 100 bp, Homo sapiens
aagaggagggcaagaagggcaagaagtaagactttgaccccgacgcaggcttcagtgattgccgcggatcagaagcctgagcactttggctcgagacaat

SEQ ID NO: 768768 - DNA, 100 bp, Homo sapiens
gtggctaatcgtgaaccggaatacaagccagctgccatgttgtgagcacataccacatagctccatggagatgcccatgtgactgtgatgaagagctaag

SEQ ID NO: 768769 - DNA, 100 bp, Homo sapiens
tctgtctgaatgtttaattaatcaggaatgtgaagaaattctacaggtggtgattattccttgtggcattaccaatgcactttctgaagaagacaaagaa

SEQ ID NO: 768770 - DNA, 88 bp, Homo sapiens
tcctccacaaaccgagcaagtagagagcaagaggaagtcagggggaaatgagttaattggccttggtcctcacagctccaaaaagaaa

SEQ ID NO: 768771 - DNA, 75 bp, Homo sapiens
cgccggccgccgcgccgcccggcagcctcggcagtttcgccatgttccacaaggtcagagttcctcgccagagcc

SEQ ID NO: 768772 - DNA, 100 bp, Homo sapiens
gggggcctggctaaggaaaccctattacctccagtatgtccgtggttcagaccctgtattaaagcttttggacgacaatgggaacattgctgaagaactg

SEQ ID NO: 768773 - DNA, 87 bp, Homo sapiens
ccaccagaaggaaccaattccggacacataacaagcagcagtgaggacaccaaaggattcggaaacttcagatacgaaatatcccgc

SEQ ID NO: 768774 - DNA, 51 bp, Homo sapiens
ccgcgcgctgcccgaggcgccgtggtgatggtggatgaggcacacgaaagg

SEQ ID NO: 768775 - DNA, 124 bp, Homo sapiens
tatagaaattttaatctcaactgaatggaatgaacgacagcctgcaccagcctaccgtatgtgaacgggagctgtgtgtgtttgcttttcaaaccctgggagtaatgaatgaagctgctgatga

SEQ ID NO: 768776 - DNA, 100 bp, Homo sapiens
ctcagttagaaagaacacgtcagcgaaacccatctgatcgacatgttattcttctttgcaggaagccagccttggtctccacagtagaaggtggccagga

SEQ ID NO: 768777 - DNA, 99 bp, Homo sapiens
gggcgcttctttggcggtgacaggggtgcgcccaagcggggctctggcaaggtgttttcacagtcctgtgtttggtatggagagtgtggaattgcatat

SEQ ID NO: 768778 - DNA, 96 bp, Homo sapiens
gggcccggccgctgctctgcctcccggttctgccgcgcgggccctgcatgtggagctgccgtctcagcagacaaatttacatgtattggagaccag

SEQ ID NO: 768779 - DNA, 100 bp, Homo sapiens
ggagaaatttcatctcccagaagggtgttgctcatcgtttcttcccggaaacatctgcagagactagcttttcaggtcaagaaagtagtgaagactgtga

SEQ ID NO: 768780 - DNA, 82 bp, Homo sapiens
cctgaaacccgcagaggaaaattcaggcaacgcctcgcgttggagcttactccacgggaacagcctctagataatctgagtt

SEQ ID NO: 768781 - DNA, 100 bp, Homo sapiens
gtgaagcaatgcttgtcatctctttataagaagaatattcagaggctaacaaagccattcaaactcctccccacgacactctgaagcagcgacggcacag

SEQ ID NO: 768782 - DNA, 100 bp, Homo sapiens
ggaacttggctaggctggccccgagcggaaccagagaatgctgagggaaacctctctgaggtctggtcagattccaaccctggacagcagtgaacacaac

SEQ ID NO: 768783 - DNA, 74 bp, Homo sapiens
atcacagtggtggtggtgggggtagcagattgtaaaccatggctgtgtggatacaagctcagcagctccaagga

SEQ ID NO: 768784 - DNA, 101 bp, Homo sapiens
ggagcttaccgtgtctccaatgacaaacgagatgtaaaagtgtcactgtcatccacccgttttgtcaagtgtgaaaagtgtcatcatttttttgttgtgct

SEQ ID NO: 768785 - DNA, 98 bp, Homo sapiens
ccgaaacgccgccgcggagccgaggcggagccgctgtcctcgtccccagcggtcccgcccaacgcccgactctagtcttgctctgtctcccaggctgg

SEQ ID NO: 768786 - DNA, 75 bp, Homo sapiens
gaaattaaaacactggaagaagatgaagaggaactttttaaaatagtatggtgtttgcgaaaacttgcggaagct

SEQ ID NO: 768787 - DNA, 101 bp, Homo sapiens
cagggatgtcatgctggagaactacaggaacctggtctcactgggtggtgagcttcattttctccaaattggaggaacctgtgatgatattgatgaagctg

SEQ ID NO: 768788 - DNA, 82 bp, Homo sapiens
caggaacctgggcgagcagcggcgggggcccgagggatagtattgaagccagccttgaggctgcgtcctcgcatgcggaggc

SEQ ID NO: 768789 - DNA, 90 bp, Homo sapiens
gattggaaactctttgggaaagccactcgaaaagcctcaagtactacagccttccagcagccttcccagacccacagatcacacccaggg

SEQ ID NO: 768790 - DNA, 75 bp, Homo sapiens
ggacagcacttccggtcacgccatcgttgctgccttcttcgtcaaggataaaagaatcagagtgtctcaaccctt

SEQ ID NO: 768791 - DNA, 80 bp, Homo sapiens
cacctccccaggtgatgcctgaagctcaagggactgtgtccaccctcagtgtcaacagcatctccaccctggagcctgtg

SEQ ID NO: 768792 - DNA, 75 bp, Homo sapiens
agcatcggaagatcattttattgacattgctgaagtggagacaggtttattcttcagtccaaggaagcaattcac

SEQ ID NO: 768793 - DNA, 74 bp, Homo sapiens
aaaaggcctaagaattttggcattgatttccatggtgtcagtgattcatattcctgataggacttataaactat

SEQ ID NO: 768794 - DNA, 74 bp, Homo sapiens
atgctcctgggccccctcttcacattggagcttctcatttacctcgagacaacgccattattgacgagatcact

SEQ ID NO: 768795 - DNA, 82 bp, Homo sapiens
cctggggctggaaattgcgctggaccgtcgccttgctcctcgccgcggcggggactgcagacacatgcctcactcctgtcag

SEQ ID NO: 768796 - DNA, 100 bp, Homo sapiens
tttacgcggatgtcggcgaagagttcaaccagcacctcaatgacctgaagaaggagaacttcagcctcaagctgcgcatctacttcctggaggagcgcat

SEQ ID NO: 768797 - DNA, 51 bp, Homo sapiens
actatctgtggcactcttcagtacatggacctttccagctcacccccaggg

SEQ ID NO: 768798 - DNA, 87 bp, Homo sapiens
cgcatcggcagcggcacctacggcgacgtctacaagggaaaggtggcccagacagcgtgtatgtcagcttgcaagcatttagccaca

SEQ ID NO: 768799 - DNA, 100 bp, Homo sapiens
gtgaagtacaggctcagtctgcggccaagactccatcctgcaaggcttatttgcagctgggtatcaatgaaaagttaggactctctggaaggccagacag

SEQ ID NO: 768800 - DNA, 75 bp, Homo sapiens
ctttctgactgcccgcctggcactgaagccgagctcaaagttgccaaagctctgcaggaatttgacttggcctta

SEQ ID NO: 768801 - DNA, 98 bp, Homo sapiens
ggttgtagctgtaactggtgatggtacaaatgatggcccagcactaaagaaagcagatgttggatttgcaatgccgtgctatcaagactaatcaggac

SEQ ID NO: 768802 - DNA, 74 bp, Homo sapiens
tggccctcagaatttaaacttaaggaaagagtgggaaagtgagggaaacttttgagaagaactttgaaagagaa

SEQ ID NO: 768803 - DNA, 100 bp, Homo sapiens
cggtatcaaatggaaagtttttccaaatattcatctgtacagttcatagccctgatgaagcaagttactctgctctcctaataaatgcaagaaaatgacc

SEQ ID NO: 768804 - DNA, 100 bp, Homo sapiens
cggggaccgcgctcaagaggctgatggccgagtacaaacgttgtttttcaccattcagaacattgcctgaagcaggtccaccatgccgttagtaacgagg

SEQ ID NO: 768805 - DNA, 83 bp, Homo sapiens
gtgtgtgctgcctttggctgagtgtgtggagtcctgctcaggtgttagtgtcgagatggctatgaaccctgtgtaaatgaagg

SEQ ID NO: 768806 - DNA, 51 bp, Homo sapiens
cctgacggccgtctggagctgctcttattgctgaggcagttggaagttatg

SEQ ID NO: 768807 - DNA, 98 bp, Homo sapiens
cacagggtacatggaagtttctctggactccctggatctccgagtcaaaggaattctgtcttcacaagcagaaggggccagcagcctcccccgatggg

SEQ ID NO: 768808 - DNA, 75 bp, Homo sapiens
aaagcatgtctgcaacccagccattttcagggatttgtcttggctgttactatgacacgggaagcaattgatgaa

SEQ ID NO: 768809 - DNA, 100 bp, Homo sapiens
gggaaaatggcggtgtctacagtgttctcgacttcgtcgctggttctccctccagatgtcttaacccgggttagtgagtatgtgccagaaattgtgaact

SEQ ID NO: 768810 - DNA, 90 bp, Homo sapiens
cccgggcagaagaggaggatctcccacctttccaagcaaggccaggagcctgtcccaagccagatgatttaccattttccacagtggtcc

SEQ ID NO: 768811 - DNA, 100 bp, Homo sapiens
ggaggaaccagttggtggcctgggcagcctgctggaccctgccaagaagtcgcccatcgcagcagctcggaagatatggggatgacatatgcggagctct

SEQ ID NO: 768812 - DNA, 90 bp, Homo sapiens
agcgactctccatggtttctctcaggttctgagactctaggcaggctggcaggcaacaccttagggaccaggactaaaacctccagagga

SEQ ID NO: 768813 - DNA, 100 bp, Homo sapiens
aattggtttgctatttgatcttcttgcatcaagttcagctcttccttggaacatcacagtacattttaaggttctcactctgtagcccagtctggagtgc

SEQ ID NO: 768814 - DNA, 100 bp, Homo sapiens
caaggtaattttgacccagaggagcaatgatgtagccacctcctaaccttcccttcttgaacccccaggatactcattaacccacctgaaaacatggaag

SEQ ID NO: 768815 - DNA, 50 bp, Homo sapiens
tgaaacaccactgaagcattgccaaggtagatgacattaatgctgataag

SEQ ID NO: 768816 - DNA, 100 bp, Homo sapiens
atcagagacaatgatggggctcttccccagaactacaggggctctggccatcttcgtggttttggggccttgtcacagatgccagatgatttgcatcgac

SEQ ID NO: 768817 - DNA, 107 bp, Homo sapiens
ggccagggctgctgccttccagcaccttctgctcctcgtgggcatccacctcctcaaggctgcagtgcacctgccagcacaacacctgcgggggcacctgcgaccgc

SEQ ID NO: 768818 - DNA, 106 bp, Homo sapiens
gggaaggcgattggcatcgatctctccatcccttccgaggcccgacttcggactcacaccacccggcaagaactgctcactacggctccctgccccagaagtcaca

SEQ ID NO: 768819 - DNA, 90 bp, Homo sapiens
agtggcacacagataccgtttattaaaagagctgtggctgaatatattaaaggaatctgtgaacctgaactagaagaaagagaatgttac

SEQ ID NO: 768820 - DNA, 100 bp, Homo sapiens
ttcttatgaggcagtcatgggactacgaggagacagccaggtgccttcagccgctacaagagcagaagcagtgggcattggatggagctgagtacaggac

SEQ ID NO: 768821 - DNA, 90 bp, Homo sapiens
atcttcttgtatctggccagtgtgaagaggaagagcctattcagtgtacagctgcagctatcaaggctataagagaaagtggaatgaatc

SEQ ID NO: 768822 - DNA, 100 bp, Homo sapiens
cgcggacagcgggctggagcctgacgagctggcgggacctgaaggagaagaaggagaaggtggaggagaaggcaagccggaaagagcgaaagaaagaagt

SEQ ID NO: 768823 - DNA, 87 bp, Homo sapiens
tctggagtttgtgtaaaacaaaaatattatggtctttgtgcacatttacatcaaggtactccaaagattcaggtttactcacgtcat

SEQ ID NO: 768824 - DNA, 97 bp, Homo sapiens
tgtgctttggaagagtatgcctgggtcccgccgggtctgaagcctgaacaggatgaagtaggtgttccaggtagcaattcagctgacctattgcgct

SEQ ID NO: 768825 - DNA, 100 bp, Homo sapiens
tggtcgtttgtttctccaaggtttgaaaagcagctggcctgcaagagactaaggtgtcagtatgttcttcaagctgctctgctcctgggcccaagctatt

SEQ ID NO: 768826 - DNA, 50 bp, Homo sapiens
ccagtacagacaatcactccacatggatgtgatcttcgtggtggaaagct

SEQ ID NO: 768827 - DNA, 80 bp, Homo sapiens
acttcttgacaatttgcttgcgcttataaggtatgttgagtctaaaaaggacagagtcacagtagtcttcagcacagtgt

SEQ ID NO: 768828 - DNA, 50 bp, Homo sapiens
ggagcacggaacagattcaagctcagggaatctggaaacatcaaagctgg

SEQ ID NO: 768829 - DNA, 82 bp, Homo sapiens
atgggcagacggattcatttagagctgcggaacaggacgccctctgatgtcccaggtgtgacaccttcagcaggtctcaggg

SEQ ID NO: 768830 - DNA, 80 bp, Homo sapiens
aagagacccggtttctaatccctgctctgtcactaacaagctgcgtgatcttcggtcatacagcagatggaacaaaaaaa

SEQ ID NO: 768831 - DNA, 100 bp, Homo sapiens
attcatgaaaatgcagatccactgagaaagggaataagctggcggaggcagtgacctcagactctggacggtgaacggggatctcgttggacatgtccac

SEQ ID NO: 768832 - DNA, 100 bp, Homo sapiens
tccacttcagcttctttgtcaccataggagacatggacgaagccttcaaatccatcaagctcatcaaaaggggaacgcccttttgcttgtgactggcagg

SEQ ID NO: 768833 - DNA, 90 bp, Homo sapiens
ccactggacctaaaatatgaccctgatccagggacagacgtttgcttcagcctgcccaggtgtgtgacattttgaagggtgtcattttgg

SEQ ID NO: 768834 - DNA, 101 bp, Homo sapiens
ggccgtgccgaggatgccatcattgccctttccaattacagacttcacatcaagttcaaggagtctcttgttaataagatggctgtgccacccacgtatgc

SEQ ID NO: 768835 - DNA, 75 bp, Homo sapiens
ctggacggtgtgtggggtcctgtcactatttggaggaatgccagctcctgagcaggcctcattggtggaggaggg

SEQ ID NO: 768836 - DNA, 91 bp, Homo sapiens
tggggccagggaaccctggtcaccgtctcctcagcccgcggcgccatggctcacgtcggctcccgcaagcgctcgaggagtcgcagccggt

SEQ ID NO: 768837 - DNA, 82 bp, Homo sapiens
gccagtcgcctccaggccaagagggatccttcacccgtgtctgtttaagctatgaagaaggacatccctcacactctgaaac

SEQ ID NO: 768838 - DNA, 75 bp, Homo sapiens
cgattttcgccctacgttttcaacggaggactacatgaggaaataattgacttttataacttcatgtccccttgt

SEQ ID NO: 768839 - DNA, 100 bp, Homo sapiens
cgcatgattgtcggcatctcacagcttcggaaccaaaaagaagcttcccagagccggggccaggagccccaagcgccctctagcagcaaacacagaaggt

SEQ ID NO: 768840 - DNA, 100 bp, Homo sapiens
ttacactgtgatacgactgactgctgcctgctgtttcccggggagatcatgaaacgaggtcgccttcccagcagcagtgaggattctgacgacaatggca

SEQ ID NO: 768841 - DNA, 90 bp, Homo sapiens
cgcagggaggatgtcgggacaccccggaagctgggaaatgaccatgctcgacagctgaccaaggccatgatgcgaaaggccacggccagc

SEQ ID NO: 768842 - DNA, 98 bp, Homo sapiens
ggcggatctggacacccagcggtctgacatcgcgacgctgctcaaaacctcgctccggaaaggggacacctggccctagactacttggccattggcat

SEQ ID NO: 768843 - DNA, 87 bp, Homo sapiens
tccgcctgtgtcttctgcagtgattttaaccaaggcagttggtggaaatgagtcaggtcaattcagtgaagatatgatacccacagt

SEQ ID NO: 768844 - DNA, 75 bp, Homo sapiens
caaagctgttgtctcagggagcacagaagtggttgtgtcaaaccgattggtgacatctccatgctgtattgtcac

SEQ ID NO: 768845 - DNA, 100 bp, Homo sapiens
gcaatttgaacttctgaattatacaccagcagattatgagtcattttcagagcacatggatgatagcaagcaagaatctaccaccagtaaagaagaggaa

SEQ ID NO: 768846 - DNA, 100 bp, Homo sapiens
tataaaatgtcagcttttaaggtgtgcaaagatccaccttacaaagtagaagaatctgggtatgctggtttcattttgccaattgaagtttattttaaaa

SEQ ID NO: 768847 - DNA, 82 bp, Homo sapiens
gtcgtgatccagaagtccagagctgaggactgcctgtttgcaggatgaatttcatcctttcatcgaagcacttctgccccac

SEQ ID NO: 768848 - DNA, 90 bp, Homo sapiens
agctaatgaagcccagcttctgaggaaaattcagttgttgtgcctcatggagtgggtgggaggacgctactcgctgtggtcggccatcgg

SEQ ID NO: 768849 - DNA, 80 bp, Homo sapiens
gtgcaagagcagaggccttctctagaccttgccaagatggcacaggcaactgacaatgatgcaggcacctttggggaagt

SEQ ID NO: 768850 - DNA, 83 bp, Homo sapiens
aggcatgggggtccacactgcaatgtttttgtggaacatgttccagtgtctcgccccatcctcaccctcagggttcccagggc

SEQ ID NO: 768851 - DNA, 75 bp, Homo sapiens
caggcatctctctaacactcatacaaatcatgaggataaactgcaggttttgagtgatgaggtgaagaggaagca

SEQ ID NO: 768852 - DNA, 50 bp, Homo sapiens
accgtcagtttgagccagatggtgtgcaactgaggaacatggctcaagaa

SEQ ID NO: 768853 - DNA, 83 bp, Homo sapiens
ctgcgatcatcctggaacacatattactcaaatacagagtcaccaggagactaaagtccatcaaaaacatccagaaaattacc

SEQ ID NO: 768854 - DNA, 97 bp, Homo sapiens
ctaccacccgagatgccccaagacatatctgaagagatggattaagaatgctttggattaaggattgtggagcacatttcaatcattttaggattgt

SEQ ID NO: 768855 - DNA, 96 bp, Homo sapiens
gcggcgagcgagctcctgaggtacggcgtcgggtcagcagataagcagagagccctagaagaaaccaaagcctacaccacccaatccttagcaagt

SEQ ID NO: 768856 - DNA, 89 bp, Homo sapiens
acacttcaggtgcttgattttgtgcaggatccgtgctttgcccaaggagatggtctcattaaggtatgaaattgaaggctgtgaagtga

SEQ ID NO: 768857 - DNA, 90 bp, Homo sapiens
ggaccacagcattcctgaaatacatccaggaaagacatggagattctcttaaaaaggtatactcccacctcccagcttcgcacgcaagaa

SEQ ID NO: 768858 - DNA, 74 bp, Homo sapiens
aggacggcagaccctgcaaagtggtgtgagtcatcctgttctaaagcaagttgctgaacagtttctcaacatga

SEQ ID NO: 768859 - DNA, 100 bp, Homo sapiens
ccgggatcaaagtgtaccagtcggcagcatggtccaaaagaaactcttccttcaaaacctgtgaagaaagagaaggaacagaggacacgtcacttactca

SEQ ID NO: 768860 - DNA, 96 bp, Homo sapiens
tcgaggacataaggaactagtcacagtgttgctgcaacatagagctgacattaactgtcaggttttgacacaagggcgcatatcttcaaagcacct

SEQ ID NO: 768861 - DNA, 100 bp, Homo sapiens
caggaatgcatttgtcacgggcattgcaaggtacattgagcaggctacagtccactccagcatggaggatcagctgatttattcggaggatttgctgact

SEQ ID NO: 768862 - DNA, 100 bp, Homo sapiens
aatgcttcccaggctcgagttgatgcccacagggatctgctaagctagaaaaagccgagatcctgcagatgaccgtggatcacctgaaaatgctgcatac

SEQ ID NO: 768863 - DNA, 75 bp, Homo sapiens
ccccagcgcaggagccgcgcccggacccaggcaacatgaaccgtgaagaccggaatgtgctgcgtatgaaagaac

SEQ ID NO: 768864 - DNA, 85 bp, Homo sapiens
gacatcgacctgtccgccctgcggatgcagtggcagaacgtggagcacgttggtgaccagagcccctacgtcacctctgtcattc

SEQ ID NO: 768865 - DNA, 99 bp, Homo sapiens
cagtacaaacaaactataggactggatttctttttgagaaggataacattgccagctgaactccagagggagcctttgttggtgaatgaatcactaaat

SEQ ID NO: 768866 - DNA, 98 bp, Homo sapiens
tcttcatctggagtcattgctcccggagccaaggctggagtaaaactggaagtagccaacgtggtcgagatatccagtctgacggagcacttgctgac

SEQ ID NO: 768867 - DNA, 100 bp, Homo sapiens
attacacactgctgaaccaggccccagacatgctgcataggctttctggtgaggcagactgtaattaacatttgtagaagaaagagactggaaagtgact

SEQ ID NO: 768868 - DNA, 75 bp, Homo sapiens
tccaaagattaaaacttgaagcaacccttaatgtgcatgatggttgtactgttcgccatggatttccctatcaac

SEQ ID NO: 768869 - DNA, 96 bp, Homo sapiens
gtctgcgaaggccgggacccggttccccggcccacagtgggggtgtgcaaacccgagagaactgggttggtcaaagaaaaagtgatgtatgaaaaa

SEQ ID NO: 768870 - DNA, 75 bp, Homo sapiens
gcgcggccagggccccccagcgtgcgagcgcctaggggatgccgaggtggacgtattggtgaccacagctggcgg

SEQ ID NO: 768871 - DNA, 83 bp, Homo sapiens
ttggcctggaggatatttggaatagcctctcttcagtgttcacagagatgcaaccagaattgaatgatctggcacgggaccct

SEQ ID NO: 768872 - DNA, 100 bp, Homo sapiens
ctctatgataatggcagataaggttggtcaaagaaaaagtgatgtatgaaaaagaggcaaaacaacaagaagaaaagattgaaaaaatgagagctgaaga

SEQ ID NO: 768873 - DNA, 100 bp, Homo sapiens
ctctacaaaagattggaccaattctagataccaagattcagagactgtttttgatattcagaatgacagaaatagtatacttccaaaatctcaatctgaa

SEQ ID NO: 768874 - DNA, 100 bp, Homo sapiens
cgagatgggaattccaatttggaagaggcaggaaagcagcctgggagagtcccgtattctcagagtaaaagttgtttctggaattgatctcgccaaaaag

SEQ ID NO: 768875 - DNA, 83 bp, Homo sapiens
cagaaggacagccggccttggtggaggtccacagcatggagaaggtgcttcctggaggggcctgccccactgttcctgtgctg

SEQ ID NO: 768876 - DNA, 86 bp, Homo sapiens
cgggtgaccgaaaggatcatgaactagtgacctggaaaggatcttatgaatccttcagtggtctcccttacacccaccaccttcaa

SEQ ID NO: 768877 - DNA, 88 bp, Homo sapiens
gctcatctctgagacccggaggaggttcgaagctgagtatgtgacagattgaaaaggaagatcaggccaaccccaaagaagaagtgac

SEQ ID NO: 768878 - DNA, 99 bp, Homo sapiens
atggatgggctggagacaacagaaacagaaacgattgtggaaacagaatgtcgtactctcaggaggctccaccatgttcagggatttcggacgccgact

SEQ ID NO: 768879 - DNA, 100 bp, Homo sapiens
acaaggaccttgcatactgtctcaatgatggcgagtgctttgtgatcgaaaccctgaccggatcccataaacactgtcgcctgagcctccaacaacaaac

SEQ ID NO: 768880 - DNA, 129 bp, Homo sapiens
caagtacccgcgtgcatacggctgccggcatggcacattacaacttcaagaaaattacggtggtgccgtccgccaagagtgcctggtgaagaatgtgatgggatcactagcatgtctgcggagagcggc

SEQ ID NO: 768881 - DNA, 100 bp, Homo sapiens
ccatcaagaaatgaagaacgagattcagacacagggagttctgggaaatcgttcattcatttacagatgaacagaaaagactcttcttgcagtttacaac

SEQ ID NO: 768882 - DNA, 100 bp, Homo sapiens
gaagaggaaagcaaaggagtcagggatggctcttcctcaggagcctcctcaacaagcccaagagtgagatgaccccagaggagctgcagaagcgagagga

SEQ ID NO: 768883 - DNA, 95 bp, Homo sapiens
tgcaatcttaaaagaaactgtgaagcaaattcgtcagatcaaagaacaagagccatgggaccacaccaccaccaccacaaccaataggccaggaa

SEQ ID NO: 768884 - DNA, 83 bp, Homo sapiens
aaaaccggaagttggttaggctgccttcgcttctcaaggtgtcgtgaaaactacccctaaaagccaaaatgggaaaggaaaag

SEQ ID NO: 768885 - DNA, 82 bp, Homo sapiens
gctaaagcagcgtgcgttcagccctgggatcctgaacccgccgccctccccggccacggacccctccctgtacaacatggac

SEQ ID NO: 768886 - DNA, 75 bp, Homo sapiens
ccaatatctccagccgcgcagtcccgaagagtgacagagcgggatgccaccagcttgtccaaagggaagttccag

SEQ ID NO: 768887 - DNA, 98 bp, Homo sapiens
cgagggccctgggcaaggcccgacaggttgagttgttacaacaaaagttgagagaaaagttggatgaatttaatgaattggctatacagaaagagtcg

SEQ ID NO: 768888 - DNA, 97 bp, Homo sapiens
aaaatgcccctggggagacacatgcacaagacaatgcggaaaacgccatgcggtacataaatgggacgcgtctggatgaccgaatcattcgcacaga

SEQ ID NO: 768889 - DNA, 82 bp, Homo sapiens
agtaaaatggcggacctggcgaacgaaggttttaaaatcaaagatgggaaaatcggagaaaattgcccttccccatggccag

SEQ ID NO: 768890 - DNA, 100 bp, Homo sapiens
ctagaagtctggatgtcggtgggcctctgagatatgccgtttacgggctccaggaggccagagctctactgaagcggcggcggccccgggggccaggggg

SEQ ID NO: 768891 - DNA, 100 bp, Homo sapiens
atcacaacagcagcctcttcgaaatcagaaatggctgcaagcaactgacctcactagagaagtgtaccagcatttagcccactatgtacccaaaatctac

SEQ ID NO: 768892 - DNA, 82 bp, Homo sapiens
tgggaggaccggatccaggtgtggcatgcggaacaccgtgggatgctcaagtgcgcgcggagccatggttatcatgtcggag

SEQ ID NO: 768893 - DNA, 100 bp, Homo sapiens
aacggggatggctctgaaacagaaaccacctctgccatcctcgcctcagtcaaagaacaggttcaaaccttgtactactcagctgatcacaagctgcttg

SEQ ID NO: 768894 - DNA, 88 bp, Homo sapiens
cttctatcccttcagtgagcaatgctttaaactggagagaattcagttttattcaggatacagacgtccctcaccagtgccagcttgg

SEQ ID NO: 768895 - DNA, 100 bp, Homo sapiens
gagaaacaggcgccgcgggctccgcgcccggccggacccgggcccgagacctggaatggccaaatatcaaggtgaagttcaaagtttgaaactggatgat

SEQ ID NO: 768896 - DNA, 100 bp, Homo sapiens
taggaagcaaccagtctcgatctggcccaatctctcctgcaagtatcccagtttcaccagtgatcattaaagaatgggcagcttacaaaggaaagtctcc

SEQ ID NO: 768897 - DNA, 116 bp, Homo sapiens
gcgattacggcaacactggaaacttcgaaaagttggagataaaattctcggagatctgagctacagaagtgcaggtttccaccgtgcacattatgaagaaaagaaatggaggtggg

SEQ ID NO: 768898 - DNA, 90 bp, Homo sapiens
cagggggccacacgccccccctccttcacgccacacacacggagtgcatccgccccaacccttttccccctcgtctcctgtgagaattcc

SEQ ID NO: 768899 - DNA, 100 bp, Homo sapiens
tggatgcctctcatcgggagaatgctcttcaggatagtatcttggccagggaactcaaacagcagatgcaggcaaacgagatgctgctcagtggacggaa

SEQ ID NO: 768900 - DNA, 101 bp, Homo sapiens
ttcagtcaatgaagcctgtgagtggacacccttttctcaaaaaggcgccaagcccatctttgtgtgcttgcatccaactgtgatgagcctatgtatgtcaa

SEQ ID NO: 768901 - DNA, 75 bp, Homo sapiens
ctcggagcaacgagcgcagcgccgcttttctgggagaagaggctacaaggacttagtgcatcagatgtaacagaa

SEQ ID NO: 768902 - DNA, 100 bp, Homo sapiens
agcccagcctcgctagctccgcctgcggtacgtgctcccgcctccgactcaatcaggatggctaaaggtgaccccaagaaaccaaagggcaagatgtccg

SEQ ID NO: 768903 - DNA, 100 bp, Homo sapiens
ctggggagatggaggggccggggctgggctcgcaggtattttgaaggtggcgtctcatctgtctacctctgggatctggatcatggctttgctggagtga

SEQ ID NO: 768904 - DNA, 71 bp, Homo sapiens
cgggcggcgcgctgcccgaggggagcaaggacaggagagaagtggatgggccctatacctccagccgtgaa

SEQ ID NO: 768905 - DNA, 100 bp, Homo sapiens
tgcagagtcccaaggaggccctgtactatgccaaggtgtattatcgcctgggcagactcaccttctgccagctgaagggtctcacttgtcacccaggctg

SEQ ID NO: 768906 - DNA, 100 bp, Homo sapiens
gtctctctcatcgaggcccaaaccgccaaggtgactgggaagttccgcgggggtgtgaaccctttcacccgaggctgctgtgggaatgtggagcacgtgc

SEQ ID NO: 768907 - DNA, 83 bp, Homo sapiens
cctgcagcgggagctggacggcgagcgcgagcggcgcgagaaaatcccagatgcagtgactggttactacctgaaccgtgctg

SEQ ID NO: 768908 - DNA, 117 bp, Homo sapiens
aatgaatgaaccttgccctggggttaacactccagtgggatgaacagacaaaccccacaagcactgcatacgataagccatcaccaaactcagaaaatgaacaaaattctgttaccc

SEQ ID NO: 768909 - DNA, 75 bp, Homo sapiens
ccactgtgagaacaacacgcctgactgcacagagagctccgggttgacaaatggtggggtaacagaaaggaactg

SEQ ID NO: 768910 - DNA, 99 bp, Homo sapiens
gacctgccaatttaccagagataattgataacaccctgtaacagctgagccaaaaggtgtgttttgctgacttcaagcatccctgctacaaaatggcct

SEQ ID NO: 768911 - DNA, 90 bp, Homo sapiens
cgcctgttctcgggctgtttggcggagtgatcagcagctggactgtgccttggacctaatgaggcgcctgcctccccagcaaatcgagaa

SEQ ID NO: 768912 - DNA, 90 bp, Homo sapiens
gcggcgcacgcgcacggagaggaggctacttgccaggtggttgtggaggcagagaatcaggttataccttgaagggactggcataaaccc

SEQ ID NO: 768913 - DNA, 82 bp, Homo sapiens
atccagcctgcggagcctgtggggcagctccttttcccagcagcagtttgcccaccaggggaatcctgcagtgtatagtatg

SEQ ID NO: 768914 - DNA, 96 bp, Homo sapiens
tgtaaatgtatctgccctccctataaagaaaattctgggcatatttataataagaacatatctcagaaagattgaaattgacaaaccatcccagat

SEQ ID NO: 768915 - DNA, 75 bp, Homo sapiens
aactggaacttatgctgtagacatttctttgtggtttatctaaaaaccaaaggttcgatacaagaggctgttttc

SEQ ID NO: 768916 - DNA, 90 bp, Homo sapiens
attctttcgggaatagagaaaccacaggctcatgtacagtcaggaatggttccttctcatccaactgcccatgcgccaatgatgctaatg

SEQ ID NO: 768917 - DNA, 83 bp, Homo sapiens
ctggactcccggaccttcatcaccattggagacagactggtactcctggttaatcaacagcttcgtcaacggtgagtccatgt

SEQ ID NO: 768918 - DNA, 74 bp, Homo sapiens
gcgaaggcggtgctcgggccagcccttctctgccgtccctgggaggtgtcccgacccaggctaagcttgagcat

SEQ ID NO: 768919 - DNA, 75 bp, Homo sapiens
gtgcaaccaatcagagtccagtggagaagaataactgaagtgaagtgatggactccgatttggagagtagtaaga

SEQ ID NO: 768920 - DNA, 106 bp, Homo sapiens
cctacccccagcaccacctccagcccctgcgcctcgctctcgtggcattatccttcagtggggctattggactgacttttcttatgctgggatgtgccttagagga

SEQ ID NO: 768921 - DNA, 90 bp, Homo sapiens
ggaacctctatgccgacatcgacgccgcctggcaggccctgcgcaccagggggccgtggagcccatgcagatcgacgtggacccccagga

SEQ ID NO: 768922 - DNA, 100 bp, Homo sapiens
aagatttcttctgtatgaccagacaaaagatagcctgggctggaagctcttctacgtcacaggctgcctgtttgtggctgtgcagaacttggaggactgg

SEQ ID NO: 768923 - DNA, 75 bp, Homo sapiens
tgacactgaaaacaattcatctcaaacgggtgtggaaacaggaagagaactagaactggaagtaaagcattgaag

SEQ ID NO: 768924 - DNA, 50 bp, Homo sapiens
gccaaatactgtagtgctaagtgtcaggtttaaagttctagctaaccaat

SEQ ID NO: 768925 - DNA, 100 bp, Homo sapiens
gaacaccccgagatgagaggagaagagcccagcacaacgaaggatctgtgccagttcagaagcaggcgagcctcttccctgatgaaaaagaagataactt

SEQ ID NO: 768926 - DNA, 96 bp, Homo sapiens
gcgaggatcaaaatcttcgaaggagggctcccaggccagtgccagtacttgggcttgccagtggcggattacttcaagcagtggattaatctgaaa

SEQ ID NO: 768927 - DNA, 90 bp, Homo sapiens
cttatttaatcctgttacagacattgaggaaattatccgtttctggaaacattctacagtagcccgggaccctcgctttgatgatctgtc

SEQ ID NO: 768928 - DNA, 75 bp, Homo sapiens
gcgtcgccggcccagctctgtcgctgacgggaggatctgaagccggccgcaggggaacgcccttttgcttgtgac

SEQ ID NO: 768929 - DNA, 94 bp, Homo sapiens
tggtgaagctggggcggcaccggatcaccaagacggagctctgtaagaagcatcattttggtattaacaaaccagagaagatcataccatctcc

SEQ ID NO: 768930 - DNA, 100 bp, Homo sapiens
ttcgcctccatctgtaccatgacatgaagaggagcatcggcggcgtgaggaagaaatgatccgacacagagaacaggaggaactgaggcgacagcaagag

SEQ ID NO: 768931 - DNA, 100 bp, Homo sapiens
cgcgatcttaagcgcgcatctgtggaaacaattaagtattcctagtcgtaaaataaacaacacagtcagatctgctgattctaggaatggtctaaattct

SEQ ID NO: 768932 - DNA, 83 bp, Homo sapiens
gcttatggctataaaattacagggaacgtgctcagtcactttcaatgggcaccaggagaaaggttttggttcttggatctggc

SEQ ID NO: 768933 - DNA, 83 bp, Homo sapiens
gaacaaaggccgcgacttggagggggatatgagactttctactcggaatatcctgagtgttgcgtggatgtaaaacccatttc

SEQ ID NO: 768934 - DNA, 75 bp, Homo sapiens
gaatggagtcttccatcaatcatatctcacagacatctcgagatctggcgtgttttatacagtttgaaaatgtca

SEQ ID NO: 768935 - DNA, 73 bp, Homo sapiens
ctcatgaaggctgccgctcggggtctcaccctgctcttcgcctcaggtgaaattgctcaaataatggagcaag

SEQ ID NO: 768936 - DNA, 99 bp, Homo sapiens
cgactatttggcaagaagcagatgcgcattttgatggtgacagacatcacacctccagtgcaatccctgttcctaagagacaaagctccatatttgggg

SEQ ID NO: 768937 - DNA, 51 bp, Homo sapiens
gaggcagagctgcagatgctgctgagaacacactgttgcagcagctaggag

SEQ ID NO: 768938 - DNA, 83 bp, Homo sapiens
ggcactgctactgcgaagacagctggcaggtgacttaagagattaaaattaatttggttgctgttggttctgaacaaataatg

SEQ ID NO: 768939 - DNA, 74 bp, Homo sapiens
atatcttcctgtcatggttccccttctactacatgctgaagctggccctgaaggaccctgttcatacagtgtca

SEQ ID NO: 768940 - DNA, 76 bp, Homo sapiens
ataacaagcagcagtgaggacaccaaaggcatttggctttatgtcccgagttgccctacaagcagagaagatgaat

SEQ ID NO: 768941 - DNA, 76 bp, Homo sapiens
ggaggtcgtgggggccgggagtttgcggattttgaatatagggtggagccgccaccaaaatgcagattttcgtgaa

SEQ ID NO: 768942 - DNA, 75 bp, Homo sapiens
atggacatggacatgagccccctgaggccccagaactatcttttcgccaagaaggatcaagaaggtggagaagaa

SEQ ID NO: 768943 - DNA, 115 bp, Homo sapiens
cgtggcggcggcgcacgggtacctcaacttgggccaggtactccaaagattcaggtttactcacgtcatccagcagagaatggaaagtcaaatttcctgaattgctatgtgtctg

SEQ ID NO: 768944 - DNA, 49 bp, Homo sapiens
cgcaaacttgacactcaccctgaccgacttaattcagtgcacaaatgag

SEQ ID NO: 768945 - DNA, 101 bp, Homo sapiens
gaggaggaggaggcggcgcccgcggacgcaggggcgttcaatggtacatcgaggaggccattgagaaactaagcaagcggcaccagtaccacatccgtgcc

SEQ ID NO: 768946 - DNA, 75 bp, Homo sapiens
gacacagttttgacagtaattcttttgggccgttatctggaagtattttggatgtgtatagcggtgaacaaggaa

SEQ ID NO: 768947 - DNA, 101 bp, Homo sapiens
gccagcagttctccctgccctccttcaagattgacttctcggaatggaaggatgacgaggtgtggggtgcacactgaaaatgccacgctccttcctggtga

SEQ ID NO: 768948 - DNA, 75 bp, Homo sapiens
ccctgaggaagaagtcataggaacgacctgaagattatcggctataagagaataagaattgcagaaaataacagt

SEQ ID NO: 768949 - DNA, 80 bp, Homo sapiens
ttctgctgtctatactcttggaaagcacatcctaaggatacatctttgtggatttcagcaatgaagaggaagtgaagcaa

SEQ ID NO: 768950 - DNA, 82 bp, Homo sapiens
aacgacgttccatctgtggaaggacctaccaaccaggactgtacaagaaatctggaaaacttgtattcttaggtttggataa

SEQ ID NO: 768951 - DNA, 100 bp, Homo sapiens
aaactggaggatgcctatgtattccctggggatggcgcatcacacaccaaagagaaatccaagaccagtgacttatcaattccatccaaatttagattat

SEQ ID NO: 768952 - DNA, 98 bp, Homo sapiens
aagaaacacaaacactcccaacaactgggacactgccttcggccacccccaggcctaccaaggaccagtgatcctgccatgaagcagtttctgctgta

SEQ ID NO: 768953 - DNA, 75 bp, Homo sapiens
gttcgagaacgaccccgagacgttgattatggaagattcccacaagagtaccacgtcagagacagcacctcaacc

SEQ ID NO: 768954 - DNA, 85 bp, Homo sapiens
gggaagaagatcaaaacccaccatgccccaggtgtgtagctgggacggtgctggtctgagctggaccttgtctgatggcttcctc

SEQ ID NO: 768955 - DNA, 101 bp, Homo sapiens
tgtgcctgtaaaagaatacccagatgaagaagctgtttgttttgattctgagctagatgaacatattaagtggttccagcaagaatacgtgaaaacagaaa

SEQ ID NO: 768956 - DNA, 90 bp, Homo sapiens
acttgatgaatataatccattctcggattctagaacagctggacgtaaagaaagaagtgatgcactcaattctgcaatagataaaatgac

SEQ ID NO: 768957 - DNA, 75 bp, Homo sapiens
aggcggaggtccaagcggaaagagtcactttgtggcatgtatgacagccatcttaaaccagatgggtgaccagca

SEQ ID NO: 768958 - DNA, 97 bp, Homo sapiens
ggtcgccggagctctgatcgccgggaacccttgccgctgctgtcctgcgaccccaagcagacacgatgaggcgagtggtacgacagagcaagtttcg

SEQ ID NO: 768959 - DNA, 142 bp, Homo sapiens
gagctccagcgtctgcattgctccggactcagccaagttccccaacggctccccgtcgtcctggtgctgcagcggtactccaaagattcaggtttactcacgtcatccagcagagaatggaaagtcaaatttcctgaattgc

SEQ ID NO: 768960 - DNA, 73 bp, Homo sapiens
tcggtgggtcggggatcggtcgcctgagagctccagaaggtcctgagcctcggccacatcagcaccgactacc

SEQ ID NO: 768961 - DNA, 49 bp, Homo sapiens
gccgggcgtcttctgagagtcagaaagggctattgcaagacacgaagtc

SEQ ID NO: 768962 - DNA, 90 bp, Homo sapiens
acaaaactggatcaatgtcaaaaattttcccagcagtactctactattgtaaagacttcacagagaatgcagttgtcttgacttcaggtc

SEQ ID NO: 768963 - DNA, 51 bp, Homo sapiens
ctctccattgaaccctctcacaaaagtgcatggaggactgcaacagaggag

SEQ ID NO: 768964 - DNA, 50 bp, Homo sapiens
gattatacattgtaagaggtgacaacgttatcccagtcgacatcagtgac

SEQ ID NO: 768965 - DNA, 100 bp, Homo sapiens
tgaaccaccggcctgtgactgctgtggagatccagctgttggctggggaacagaccagggaattggtggatttggagaagagccgggaattaaatcacag

SEQ ID NO: 768966 - DNA, 100 bp, Homo sapiens
cagcagcgggagaagatggacaagagaaagctcgggcgacggccatcttcatccggtgtcatggagaaactccagctgggcccagagattctgcagcggg

SEQ ID NO: 768967 - DNA, 100 bp, Homo sapiens
gactgggaccatggtctacagcatcactaacaacttcccattcagccggagcggttgcagggcacacattactcggtgcagtcggacatctggagcatgg

SEQ ID NO: 768968 - DNA, 75 bp, Homo sapiens
cagcccccgcaaggatggcctttcctaccagttacatgggaattggtctttctgctcaaggtgtgaacatgaata

SEQ ID NO: 768969 - DNA, 100 bp, Homo sapiens
agaagctcaccatcctcaacgaccggggcgtcggcatgctcacccgcctctacaacatcaagaaggatgggtttccagatttccaggattctgtgcaaac

SEQ ID NO: 768970 - DNA, 101 bp, Homo sapiens
gggggacccgcccccggccggccgcagccatgacagcatcaactgggcaagtggtgaggatgaccatgtagttgccagagcagaatatgattttgctgccg

SEQ ID NO: 768971 - DNA, 100 bp, Homo sapiens
cttcgactcccgagacatcttccctgtgggctggtgttccttgactggagacaacctgcagcctcctggcaccaaagtattgtgtccagaattggttcct

SEQ ID NO: 768972 - DNA, 100 bp, Homo sapiens
aaacaatctctacatgtaaaaggccactgactcctacttcctctgtatagagcaactgttgaactcagctgcctgtaggagtggagtcaacatatcaatg

SEQ ID NO: 768973 - DNA, 107 bp, Homo sapiens
ccgggggaggcagcacggcatcccagcctcagggctgcccggacggtgttggttgggcaattctgtggtgttcttggtcacacatttatggagtttctgaagggcag

SEQ ID NO: 768974 - DNA, 90 bp, Homo sapiens
ccccagtggccctgcagccgcagcaggaatgaagctctttcgacgtgtagcagcagctttgccgggaatggaaagcacacaggacagaag

SEQ ID NO: 768975 - DNA, 83 bp, Homo sapiens
cgccgctctagcggccgggactctgaactatggcggatgtgatggtggcaggtgggatggagagcatgtccaatgttccatat

SEQ ID NO: 768976 - DNA, 75 bp, Homo sapiens
cccggagctggggcgacgaggcgattgcgggggcctgggctagggagtgatgatgaatacagtgatgatgatgac

SEQ ID NO: 768977 - DNA, 92 bp, Homo sapiens
gaagaagagaagggaaaagcaaaggagaagagacaggacgcgggaccgtgcagccgacagacgcaaacatgcagatctttgtgaagaccctc

SEQ ID NO: 768978 - DNA, 82 bp, Homo sapiens
gcaagctctttgacacacagcagttcttgtcagtaatagctcttcaagtctgcaataaaaaatggcctccaacaaaactaca

SEQ ID NO: 768979 - DNA, 75 bp, Homo sapiens
aggacaattccatttggggaccagagatggacggtcactcagcctatggaggcaccaagtatagatgagaaagta

SEQ ID NO: 768980 - DNA, 82 bp, Homo sapiens
tgccgtcggggaggattgatgtcccttcagcatcatgcagccgccgccgaggaaggttcattttccagacactgaaagagca

SEQ ID NO: 768981 - DNA, 100 bp, Homo sapiens
cccagaataaagccaagctcatctctgagacccggaggaggttcgaagctgagtatgtgacagtatgacatgatgggaagaaatcagactgctgtgagag

SEQ ID NO: 768982 - DNA, 123 bp, Homo sapiens
tccttccggctccgtcgtggaagcaggactgcgccgcgtcttcctcaaggtgctgtccctggacaccaacatcacaaaccaggtgaataagctgaaccgagacctgcttcgcctggtggatgt

SEQ ID NO: 768983 - DNA, 100 bp, Homo sapiens
atttcaccacaagaagggctgccaggtgaaagtgggagatacattggatcttctcattggagaggataaagaagcaggaacagagacagttatgcggatt

SEQ ID NO: 768984 - DNA, 98 bp, Homo sapiens
ttgagaagggtagtctcgggatgccgtccgaagtcggcgacagcggccggggcgcaggcgcccgtgcggaatggcagtatgatccatttgctgagcac

SEQ ID NO: 768985 - DNA, 100 bp, Homo sapiens
ctcctgctctaggattctcaccacgtactggctagacttatacttctcaaatcttaatttcctaaagattcaacctagaatgacactgagcaaattgcct

SEQ ID NO: 768986 - DNA, 100 bp, Homo sapiens
gcctgacatccgtagatcttgaggactggatggatgttagcctggtgcctgccttcaatgtcctggggcatgatcacaagggccacccccacactagcta

SEQ ID NO: 768987 - DNA, 80 bp, Homo sapiens
aaaagcctctgctctgcctccggggacaagaaactagagcaaataaccgttttgaaattatttaatccagagactgactt

SEQ ID NO: 768988 - DNA, 96 bp, Homo sapiens
cgagtccagcgtcgccgcagccccccaatgcggccgcgagaagcagcgggggggcaggcgatcgaagtattgcggaatgctgcagcactccttact

SEQ ID NO: 768989 - DNA, 51 bp, Homo sapiens
gggaaacacagcaacagcccagccatggaaaggtgaaggagatgagctacg

SEQ ID NO: 768990 - DNA, 74 bp, Homo sapiens
gtggtggttgcacagtcgccttttccagtttggagagacgttcttttcctccgcaaccatgtctgacaaacccg

SEQ ID NO: 768991 - DNA, 108 bp, Homo sapiens
gttccttgtggagccggagctgggcgcggattcgccgaggcaccgaggcactcagaggagggcgtgatggtgggcatgggtcagaaggattcctatgtgggcgacgag

SEQ ID NO: 768992 - DNA, 100 bp, Homo sapiens
cgatggatagcattcactggaaataaacctctcataatgaaggcccccgctgtgcttgcacctggcatcctcgtgctcctgtttaccttggtgcagagga

SEQ ID NO: 768993 - DNA, 100 bp, Homo sapiens
tttcggcatccttcttacgtcgggtggttttactggagtattggaactcaggtttggtgcacctcgatttggaggaagtagggcagggcccttatctgga

SEQ ID NO: 768994 - DNA, 75 bp, Homo sapiens
ggacagctaccgcagcatgagcgaaagctacacgctggagtgtgggcgaaatgctgaaaacttcgaccgattttt

SEQ ID NO: 768995 - DNA, 100 bp, Homo sapiens
gcgctgcgctcgcgcccggatccctcagagagagcgctgtacagcatggaatgtgcgttccaccccctgttcagtctcaccagtggggcctgccggctgg

SEQ ID NO: 768996 - DNA, 74 bp, Homo sapiens
cacgtctggtgcctctgctgggatggctgaagcagccggaggctggccaggaattacatgaacgacagccttcg

SEQ ID NO: 768997 - DNA, 100 bp, Homo sapiens
acaacattcccctcctccagcaaattctactgaccctgcagcatctaccgctcactgtagaccatctcaagcagaagaaggaggtcttcgaggggagaag

SEQ ID NO: 768998 - DNA, 51 bp, Homo sapiens
ctttgatccatttgttggaacagcttattgcaggagtgaccaggacactac

SEQ ID NO: 768999 - DNA, 82 bp, Homo sapiens
gcaagaggccccagcccgtgaaaagtgagaagaagctcattcacacagaagacccatttaatgatgaacatcaggagaggca

SEQ ID NO: 769000 - DNA, 100 bp, Homo sapiens
tacgtgttcctgctcttctgcggcgcctacctctacaaacagggctttgccatccccggctccagcttcctggctggcaaagcacacaggctgagcgctg

SEQ ID NO: 769001 - DNA, 75 bp, Homo sapiens
aaggcaaagaacctctggtgttgaaagatggtcctggtgctgcccaggaacccacgtggctcacagatgtcccag

SEQ ID NO: 769002 - DNA, 105 bp, Homo sapiens
tgaggtcacaccttcagtccttcgagcaagtgatgatgaacagtctacacagatggctgcaagttgggaagatgataaagttacagaagcatcttcaaacagttt

SEQ ID NO: 769003 - DNA, 50 bp, Homo sapiens
gggagtgatgtcttccagactcgagtgatcagcagctggactgtgccttg

SEQ ID NO: 769004 - DNA, 107 bp, Homo sapiens
gttcacgcacgggatccagagcgccgcgcacttcgtcatgttcttcgcgccctgggactggtgattgcagctggaagtgcccatgaccgagctggcgtcctccgggg

SEQ ID NO: 769005 - DNA, 75 bp, Homo sapiens
gagcatcatttgcaggaaggatgcaccccactccgagggcgacatgcacgcccagctcatcgcccagtctatcgg

SEQ ID NO: 769006 - DNA, 82 bp, Homo sapiens
ggagcccaggagcctgccccgccctggggacgaagagctgcagctcctcctgtgcggtcagcaaactgaaacttcaggccaa

SEQ ID NO: 769007 - DNA, 98 bp, Homo sapiens
cgttgcccgaccgctttccgggagactggagtcgaaggccgtgaggatgttcacggaagaccagggtgtagatgacaggctgctctatgacattgtat

SEQ ID NO: 769008 - DNA, 100 bp, Homo sapiens
gggaagcagcgtgagcagccggaggatcgcggagtcccaatgaaacgggcagccatggccctccacagcccgcagagccagagcccagaggtggagcagt

SEQ ID NO: 769009 - DNA, 50 bp, Homo sapiens
catggatatctctactcgctccaaaggccctcgggaccaaggatcacgtc

SEQ ID NO: 769010 - DNA, 74 bp, Homo sapiens
acgacggcaggaattattggaggccaggtttactggagtaggtgttagtaaggagtcaaattgactttatcagc

SEQ ID NO: 769011 - DNA, 99 bp, Homo sapiens
gtctgcgaaggccgggacccggttccccggcccacagtgggggtgtgcaaacccgagagaactgggatcctcctttgtatttggaactggaccctcagc

SEQ ID NO: 769012 - DNA, 100 bp, Homo sapiens
cttcaggagagcgccccagggcaagccccgctccggccaacaaggacaggagagagtggcaagagtacgtttatcaagcagatgagaatcatccatgggt

SEQ ID NO: 769013 - DNA, 87 bp, Homo sapiens
ggagtcagaccctctgagcaaaggggaagttgctgcgctctgctcggtgtcgtggcctcgcagatgtgtggtttattgacaatcatt

SEQ ID NO: 769014 - DNA, 96 bp, Homo sapiens
gttcctgctgacttacgcttgtttgagattgaggaacttcagcaggctttaatagtaaagcaaaatgaagagcttgaccgacagaggagaataggt

SEQ ID NO: 769015 - DNA, 114 bp, Homo sapiens
gtcagctgcaggaaggctcgcctatccaggcctggcaactcttcgtcaatgagggtgtgatgaatgcagactctgctaccattttggctgtttggatcctcctttgaaaaagtc

SEQ ID NO: 769016 - DNA, 100 bp, Homo sapiens
ttttatcaaaggagcagggaagaaggaatcatcgaggcatgggggtccacactgcaatgtttttgtggaacatgtttatcatctggacttcaagctgcag

SEQ ID NO: 769017 - DNA, 102 bp, Homo sapiens
cgcgggggagccccgggagccgcacggaatactctgaagatagtaactccgagccaaatgtggatttggaaaatcagtactataattccaaagcattaaaag

SEQ ID NO: 769018 - DNA, 100 bp, Homo sapiens
gctggtggattatcacagatctacatctgtctccagaaaccagcagatattcctgcgggacatagaacaggtgccacagctcatcagcatcggatcttcc

SEQ ID NO: 769019 - DNA, 100 bp, Homo sapiens
aacttgtaaaacctggaacagcagcatcattgtcaaagacctgctgaaactcagcctgctgggacgagtcttctttcccccttcttgtttctgccatgga

SEQ ID NO: 769020 - DNA, 100 bp, Homo sapiens
ttattcactcaagactaaaaactaaaggcctgggcctgagaactgaatcagactcagcccgcctgcacccaggtgaaatatacagccttgttgctcacac

SEQ ID NO: 769021 - DNA, 100 bp, Homo sapiens
gaattgccaaagttttggaaaagattcgacgtcaagcaattaaagaactgcctcaatttgccactggagaaaatcttcctcgagtggcagatatactaac

SEQ ID NO: 769022 - DNA, 90 bp, Homo sapiens
ttcgggggaaccagctggaaagcaccctgggaatcaatcttcctaagctgaagaacctctacctggttcactaccttatggttctgtctg

SEQ ID NO: 769023 - DNA, 90 bp, Homo sapiens
cggtttgggaccttgaacaaggcaaatatggttttggctacgtgcaggcctgccgcgccctgatgattgctgcctcggtcctgggtctgc

SEQ ID NO: 769024 - DNA, 100 bp, Homo sapiens
cccagcagctacctgatcttcagggccgcctccgagtcagatgattggtccagaaaagggcgtggtgcacctggcgacagcggccgtcctaaacgcggtg

SEQ ID NO: 769025 - DNA, 50 bp, Homo sapiens
cagcaagaacgaggaggacgcgggcttgaggtcctacctggtgtcctcca

SEQ ID NO: 769026 - DNA, 76 bp, Homo sapiens
gagcgatgttaccattgtgaaagaaggttgggttcagaagagggggaaacatgcacaattcttggattacaacagg

SEQ ID NO: 769027 - DNA, 100 bp, Homo sapiens
tagcaccttcgccctctccagccaggccaccctccagggcccactaaaaaagcgctgaagcagcgattcctcaagctgctgccgtgctgcgggccccaag

SEQ ID NO: 769028 - DNA, 100 bp, Homo sapiens
gtggtcaagttcaccatgagagggagcggcctattgccaattcatggacatgctcttccctggctgcattagtttgaagaaagtaaaatttcaagcaaag

SEQ ID NO: 769029 - DNA, 100 bp, Homo sapiens
ggccacaaatgctccttctcctggagacgcaactcaagccattggaaaagaagtttgttcgagtttcaggagaagcaactattggacatgtagaaaaatt

SEQ ID NO: 769030 - DNA, 100 bp, Homo sapiens
gtgggaacccttcggccgctgagattctgtcgtgtcgtcgctgctggcacttcaggctctgcctgatgtgtgagaagcggatattggcggcagtgaccag

SEQ ID NO: 769031 - DNA, 82 bp, Homo sapiens
agaggcaacagggacatggccacctgggacgaaaaggatgctttcattggatttggaggaaatgtgatcaggcaacaagtca

SEQ ID NO: 769032 - DNA, 97 bp, Homo sapiens
cagagaatgaaatcactttgtgtcaaaaagaaataactcagctgaagcatcagctgtcaaagctcgaaaaacagcagcagaggaaagaaaagaccag

SEQ ID NO: 769033 - DNA, 88 bp, Homo sapiens
ttctcaggcagcggcagcgcccccggcaggcgcggtggcggtggcgcgcagccagaggagcaagtccggagctttcaggtcccaacct

SEQ ID NO: 769034 - DNA, 80 bp, Homo sapiens
aggacgtggtgggaagagcaagagggtcatacagcagatggaacaaaaaaaattacaacaaggaattcctccatcagggc

SEQ ID NO: 769035 - DNA, 100 bp, Homo sapiens
ggcgtggatagcctgaaggcagccattcagtttaaatgctgcggtttggtcaatggagctgctgattggggaaataattttcaacactatcctgaattat

SEQ ID NO: 769036 - DNA, 88 bp, Homo sapiens
tgacatttaattttagggtcctttatatagaagggagagttcttgggtgtctctggggagtccctgggccagaccttcctccagactc

SEQ ID NO: 769037 - DNA, 97 bp, Homo sapiens
gagggaatgatattcagtggtgtttttctcaggtgaaaggagcagtagatgatgatgtagcagaaggacacattcagctaacgtattttagcaggtg

SEQ ID NO: 769038 - DNA, 97 bp, Homo sapiens
agcgcactggaggagcggcgggcttcagacagcttatcaaccagcccagccgtatcccttcggaacaggggggtcagcaatgtatcgacctcagcag

SEQ ID NO: 769039 - DNA, 50 bp, Homo sapiens
ctcagcctccgcctggtctctggtactccaaagattcaggtttactcacg

SEQ ID NO: 769040 - DNA, 96 bp, Homo sapiens
gttccagagcatcatttgcaggaaggatgcaccccactccgagggcgacatgcacgcaggagatggacagcctgcagcgccagatggaggagcacg

SEQ ID NO: 769041 - DNA, 97 bp, Homo sapiens
tgatcaagctactccagcagccttggtattacagggtcttcatgcactctgtcaagctgagatgatcaagttccagatgatcctcagtgagggatac

SEQ ID NO: 769042 - DNA, 83 bp, Homo sapiens
aatccttcctgtaccgcttatgccaggccgatcccgacctggactcagacaagctgtgagccgtgagctttgaggcggtggga

SEQ ID NO: 769043 - DNA, 75 bp, Homo sapiens
gacaccgggacctcctggaagccaaaaatgtgcttttaagatcagccatccacagatcaagaccttttattttgc

SEQ ID NO: 769044 - DNA, 83 bp, Homo sapiens
cttccttcgttattggagccaggcctacaccccagggcgtctctggccgagcctctttttgtggaaaacgacagcagcagcag

SEQ ID NO: 769045 - DNA, 96 bp, Homo sapiens
gtgccccgaagacataaatccctgagtgcccgggaggagccttaacaagcgcacggagccctcaaggaagctcttcgtgggcggtcttgactggag

SEQ ID NO: 769046 - DNA, 102 bp, Homo sapiens
agcgctgcgctcgcgcccggatccctcagcccgagcgggaagaagttccgcagcaagccgcagctggcgcgctacctgggcggctccatggacctgagcacc

SEQ ID NO: 769047 - DNA, 75 bp, Homo sapiens
tgcgaacacagtagtggaagatgtaaagcaatatttcgagcagtttggcaaggcaggaaactgcatatcttctgg

SEQ ID NO: 769048 - DNA, 75 bp, Homo sapiens
gccgagttcaacatcctcctggccaccgactcctacaaggtggagccgccaccaaaatgcagattttcgtgaaaa

SEQ ID NO: 769049 - DNA, 100 bp, Homo sapiens
tttaagcgactgtgactctgctgcaagttccccagatcttgagggctgggttacgacccctacaaccctgagctgcccaagccccccgcgcagagggaga

SEQ ID NO: 769050 - DNA, 100 bp, Homo sapiens
gccagaaataactgtatcctacattgctgttgcaacaatattctttaacagtggactatcattgaaaacagaggtgtgttctactccctcttctgggaat

SEQ ID NO: 769051 - DNA, 100 bp, Homo sapiens
ctctatgccgacatcgacgccgcctggcaggccctgcgcaccaggatcatccagcagctcgtcaacggcatcatcacgcccgccaccatccccagcctgg

SEQ ID NO: 769052 - DNA, 75 bp, Homo sapiens
ctggtgactcacagaaccttggcaacaagaatgggtgaatcagcaaagggaagatattgaaaggcaaaggaaact

SEQ ID NO: 769053 - DNA, 83 bp, Homo sapiens
ctcaggttcagacccgaccgttatccagtcggttcgtggagaggagagcaaattgtggctactaatttgccccctgaagatca

SEQ ID NO: 769054 - DNA, 100 bp, Homo sapiens
atttcattgtgtcccttgtggccgagtcgtcattgaattttgagaagcattctgaaaactttgcatggacagagaatcgttatgatgtgaaccgtcgacg

SEQ ID NO: 769055 - DNA, 89 bp, Homo sapiens
attaaagaagatggcattgttccacttcgttatgttaagtttcagaatgttaacagtgtaactggaaaaagaccttgatgaagttctgc

SEQ ID NO: 769056 - DNA, 100 bp, Homo sapiens
ggctgtgatttacctgggtgagacagcttgagccccatcgtggattccaagacatccctgctgagagagccaagccgcttacaaacacgcagatggcaag

SEQ ID NO: 769057 - DNA, 90 bp, Homo sapiens
gctgtccttctttgtggagagcaagacccctccctggcgatgccagattcactgggctggcagattctgcccccaaacctgtccaaccag

SEQ ID NO: 769058 - DNA, 89 bp, Homo sapiens
tctttttatgtgcgaacatgtaacaagaatccaaagaaaacaaaatggtggtatcatggtttttcgttggaatatacgttgcacattta

SEQ ID NO: 769059 - DNA, 100 bp, Homo sapiens
acctggctcaccctgtggcagaagtgggcaaggtggcagagaaggaaggatggcctctggacatccgagtggggagggacattgcttgggcctccagact

SEQ ID NO: 769060 - DNA, 82 bp, Homo sapiens
ctgggcccaggtgtggcgtctctgtccccatctggttttaggaaggcaacagcccccaggggagcaaccagggagtcaaaat

SEQ ID NO: 769061 - DNA, 82 bp, Homo sapiens
tgacacacagcagttcttgtcagggtggttctcttcccaaagtggaagccaaattcatcaattatgtgaagaattgcttccg

SEQ ID NO: 769062 - DNA, 101 bp, Homo sapiens
aagtgaggtgaaaagcttctgcagcgagaagtgctttgcggcctgccgacgagcctacttcaagagaaataaggtaatatttgaagctgaagtctcaggag

SEQ ID NO: 769063 - DNA, 75 bp, Homo sapiens
atctggtgatgaggtttaatgaggtcactcctggaagcaaggcggctctagctaatttatgtattggagatgtaa

SEQ ID NO: 769064 - DNA, 130 bp, Homo sapiens
ccgcgctcgggcgcccctcgcgcagcgctccatgcccgtgtggtgctgccgctgctccctggccggtcatttcagaactcaagacatggctgcccagtgtgtcacaaaggtggcgctgaatgtttcctgt

SEQ ID NO: 769065 - DNA, 100 bp, Homo sapiens
agaagagcagttcccaggatctgcataaaggaaggcaacagcccccaggggagcaaccagggagtcaaaatcacaccggaccagcagaagaggagcagct

SEQ ID NO: 769066 - DNA, 75 bp, Homo sapiens
ctgaacgagtgcaagcagctgtccgagtcccaggtcaagagcctctgcgagaagaataatccagaatggctactc

SEQ ID NO: 769067 - DNA, 100 bp, Homo sapiens
agaccctggaccctacctacatcctgagctacatggccccctggtttagggagggtgaaatacatatgggaggtcaagaacatttttatatggaaaccca

SEQ ID NO: 769068 - DNA, 100 bp, Homo sapiens
gcccccggaactggcatctgcagggcgtgagggctcccagagaccaggacggacgcagccatgtcagagctggtgcctgagcccaggcctaagccagcgg

SEQ ID NO: 769069 - DNA, 74 bp, Homo sapiens
taacatgtatcctggagcgaatcctaccttccaaacaggagcggttgaattctctgttttgctgtgggtgccag

SEQ ID NO: 769070 - DNA, 74 bp, Homo sapiens
ggcgctgcggtggctccctgggccgagctgagatgccgcggcagtttcccaagctgaacatctctgaagtggat

SEQ ID NO: 769071 - DNA, 100 bp, Homo sapiens
catcaacaaaaatggtcttcaagcctcaagctgtgaagttcctttacactgggagaatgcagttgaaactaattttgtggatagagaaactgttggaact

SEQ ID NO: 769072 - DNA, 100 bp, Homo sapiens
aatccgctctactggaatgtgttttccaagagataacttcaccaagatgtccagtgataggcaaaggtccgatgatgagagccccagcaccagcagtggc

SEQ ID NO: 769073 - DNA, 95 bp, Homo sapiens
gtgtgcctcggcagccttgcgctgctctaatggtccggacttccgtgtgcgcatttcacccagaacgtgtagggaccaaagtcagctacgcgtac

SEQ ID NO: 769074 - DNA, 82 bp, Homo sapiens
ctattgttgttgtcagcagacttgtttacagaaaagaaacgggtatgcaggagattagaagccagtgggcatgagcgtggct

SEQ ID NO: 769075 - DNA, 97 bp, Homo sapiens
cctcagcctcccgagtggctgggattacagaaacctttcaacgaagtctaaaaataggaagcttccagaaccaccagacaatgaggatgaagatgaa

SEQ ID NO: 769076 - DNA, 101 bp, Homo sapiens
gattatttcttcagcatggctcatattctacttcattcagaagatcaggtacacaaatgcacgcgacaggaaccagtggccacagatgtctttaattccaa

SEQ ID NO: 769077 - DNA, 98 bp, Homo sapiens
ggcacttggagtccggacatctgaaacttggcctgggctctaacatcttccgcctgctagacagcctgcgggccctgtcaggccaggctggatgtcgc

SEQ ID NO: 769078 - DNA, 75 bp, Homo sapiens
tggcggagctaacggactccgcgcggcgcaagcaccaggaaatccgagccatgagaagtcagctcaaaaagatcg

SEQ ID NO: 769079 - DNA, 82 bp, Homo sapiens
ccaatggggagcagaaggactcggacacagacctgcctagagctggaacgttacctccagagcgagccctgctatgtttcag

SEQ ID NO: 769080 - DNA, 90 bp, Homo sapiens
acaaagctgaggtccagatgaaagagaagtttctggtcactccccaggattatgcgcgagctggaagtcgagtgtgctactcaactcagg

SEQ ID NO: 769081 - DNA, 80 bp, Homo sapiens
gcggtcgaagaaggggacgccgacaaggagtgcctgtgaagaaaacggggtattgccctgaggcttatattctgcctcag

SEQ ID NO: 769082 - DNA, 83 bp, Homo sapiens
gtgaagtataggctgaggctacctgtgaacagtacgcagtgaatgttgggaatttcagagtgcctgccccggttgacatgcat

SEQ ID NO: 769083 - DNA, 74 bp, Homo sapiens
gaaactgcatctaagctgtcagaaatggattcttttaacaatcaactaaaggaaatcctaggagtgcctcatgc

SEQ ID NO: 769084 - DNA, 90 bp, Homo sapiens
ctccagattactatgtcggaacagctggatttacctgtgagacaggcaggtgcagagcattgtagaccaaggagccatggataggagaag

SEQ ID NO: 769085 - DNA, 75 bp, Homo sapiens
gtatccaagggttgtatcgaggctataaaagcacagttttaagagagattccaaaggttttcctaaaaatataac

SEQ ID NO: 769086 - DNA, 83 bp, Homo sapiens
gccaagccagcgacccaccatggagacccgctacaacctgaagagtccggcaattctgtggtgttcttggtcacacatttatg

SEQ ID NO: 769087 - DNA, 75 bp, Homo sapiens
gccatggcgctccgagtcaccagggctgagagcacagacaaaacaacaactcttagaatataaatcaatggttga

SEQ ID NO: 769088 - DNA, 75 bp, Homo sapiens
ggaaggtgcgcgagctggtggacaaagcacaacagcagttctgtagagagtttaaatatgaaggaatggcaggac

SEQ ID NO: 769089 - DNA, 100 bp, Homo sapiens
taaagcaagaaacccctgcagtacttgaagatttgcataaagccaacattcgcaccgtcatggtcacaggggaggagttgtgtggggtaatgacaatctc

SEQ ID NO: 769090 - DNA, 82 bp, Homo sapiens
cagacctcggtgtccacgctgtccccgcagcccggcagcgaacctaatccaccaatagatcaagttatacagaaaccaggag

SEQ ID NO: 769091 - DNA, 90 bp, Homo sapiens
ggcgagcctctcagccggccgggatggctaccacggccgagctcttcgaggttttataggatcacattgacaaaagtaccatggagtttt

SEQ ID NO: 769092 - DNA, 74 bp, Homo sapiens
gcaactacagcttctcctaccagctcgaagacagaatggaggaagcggaaggcgtctcggaggggagcagagga

SEQ ID NO: 769093 - DNA, 90 bp, Homo sapiens
aggaggaggctgtggtgcttgtacagtgatgatatcacgatacaaccccatcaccaagaggataagcttttgtctggtcctctgagcccc

SEQ ID NO: 769094 - DNA, 74 bp, Homo sapiens
tgtggtgtgtggctgcggcctgggcaagagccgccgcggaccatgagcctcctgacaaggtgatccgggcgggc

SEQ ID NO: 769095 - DNA, 50 bp, Homo sapiens
taatcctcactcatttcccaaagaggagatgttaaagtaacccatcttgc

SEQ ID NO: 769096 - DNA, 50 bp, Homo sapiens
gtgtggagctggagtacattctagagtggatccaaacttctacagcaaaa

SEQ ID NO: 769097 - DNA, 82 bp, Homo sapiens
gctcggagcagcagcctctgaggtttgcctgcaatgagatttcattctctacatttaaaggacatcctttctgagctgctgt

SEQ ID NO: 769098 - DNA, 76 bp, Homo sapiens
gtggcaagcaagtttaatcagacctgctcacacttcagaatagagaaggctgattcaccccaagagtggccgttcc

SEQ ID NO: 769099 - DNA, 100 bp, Homo sapiens
gtctggtgccggcgtttgggctacggttgttgttggcgactgtgcttcaagcgaccctacagcttggggcctgggctcctctgaccatcctcattgagaa

SEQ ID NO: 769100 - DNA, 51 bp, Homo sapiens
caacaccacaataatccacagccaagatccagacatttaatgtggatgcac

SEQ ID NO: 769101 - DNA, 98 bp, Homo sapiens
aacatagttttggaactagcagatgctggcgacctatccagaatgatcaagttttctggatatgccgcagaaggatccgtgccagaagcaagcctgtg

SEQ ID NO: 769102 - DNA, 82 bp, Homo sapiens
acgacctgtctcgccgagcgcacgccttgccgccgccccgcaggtgtggacactgccagcggctgcagccgacttggaatga

SEQ ID NO: 769103 - DNA, 98 bp, Homo sapiens
gatcgcgctggataaagatgcgcctctgcgatttgcaggtttgtataacaaaggatttatttatctggatgtaccaatatctgatgacagttgtatag

SEQ ID NO: 769104 - DNA, 75 bp, Homo sapiens
tcatcatgagcgatgttaccattgtgaaagaaggttgggttcagaagagggttgttgacctcctgtactggagag

SEQ ID NO: 769105 - DNA, 97 bp, Homo sapiens
cctcatgaaaactcaccagatcaacagcaacctgaggagcataggccaaaaataggactaagtcttaaactggcggatgtgatgctggtacaaccca

SEQ ID NO: 769106 - DNA, 50 bp, Homo sapiens
actgcaagaagtatgagcagctcaagattgtcctgggtcacataatgcca

SEQ ID NO: 769107 - DNA, 102 bp, Homo sapiens
gcaccatgccgctcctaagcctgcacagccgcggcggcagcagcagtgagaggttctgggccggagaaggggcgacgttcgggcaccccccgaatggacaat

SEQ ID NO: 769108 - DNA, 83 bp, Homo sapiens
cgccgcccgtccacacccgccgccagttctccaaggagaagtacatcctggactcatcgccagagaaactccacaaggaattg

SEQ ID NO: 769109 - DNA, 82 bp, Homo sapiens
agctagccgggagttacaccgccaccgccagagtcaatggttgcaggaaagtttgaagaaagtgaattacatcaaaatcttg

SEQ ID NO: 769110 - DNA, 83 bp, Homo sapiens
cgcaccgcctgctgctgctgggtgcgcgcggagccatggttatcatgtcggagttcagcgcggaccccgcgggccagggtcag

SEQ ID NO: 769111 - DNA, 98 bp, Homo sapiens
ctcatctcagcctccaaaagtgctggcattacagaacccttaggagaaatcttgagagtggacagcaattgtgaagatcgccagagagttctgtgttt

SEQ ID NO: 769112 - DNA, 100 bp, Homo sapiens
gatgtggagtggacttcctagcagagacctggagtggaagatcatttatgttggctcggctgagagtgaggaatttgatcagatcctagactcggtgctg

SEQ ID NO: 769113 - DNA, 100 bp, Homo sapiens
aatggggcggaagaaaatacaaatcacacgcataatggatgaaaggaaccgacagaggatgtgaagccactgaaagcttgactcagggaaaagaaatgtg

SEQ ID NO: 769114 - DNA, 75 bp, Homo sapiens
agggtcctttatatagaagggagagtaggagcagttgcagaagctcgaggttgaactgagagaagtcactaagaa

SEQ ID NO: 769115 - DNA, 48 bp, Homo sapiens
tggaggacgagatgcccaagactctatttgaggcttaagcaacttctt

SEQ ID NO: 769116 - DNA, 88 bp, Homo sapiens
ggagccccccagctctccctgcagatcggcgatgtggtgcgaatacaggagacgtgtggaggcaattaagttggaatatgcaaggttg

SEQ ID NO: 769117 - DNA, 82 bp, Homo sapiens
cggcaccgtcctttcctttctccctcgcgttagggactggtgattgcagctggaagtgcccatgaccgagctggcgtcctcc

SEQ ID NO: 769118 - DNA, 115 bp, Homo sapiens
ggaggccgtccagcagatggcggatgccctgcagtacctgcagaaggtctctggagacatcttcagcaggagcggtggtgccccccccgggcacggggccatgtacaacgggatc

SEQ ID NO: 769119 - DNA, 75 bp, Homo sapiens
gaagaatggcttcacatgtatgctcatcggggagatctttgagctcattactgaccaagtgccaggaagaggtca

SEQ ID NO: 769120 - DNA, 95 bp, Homo sapiens
gatggcggtgcaggagtcggcggctcagttgtccatgaccctgaaggtccaggagtacccgaccctcaagcaaaatgatgcttcaacacccaggc

SEQ ID NO: 769121 - DNA, 100 bp, Homo sapiens
ggtccacccgttacctgcctgtcaccaaggagggcccccgagacattctggatggcagaggtggcatctctggatggaaacatgcagctgactgtgctga

SEQ ID NO: 769122 - DNA, 90 bp, Homo sapiens
cggagaggtagccatgatgccccacttggtgaatggagatgcagctcagcaggctgagggtaaaaagctgggattggtaggctgggtcca

SEQ ID NO: 769123 - DNA, 100 bp, Homo sapiens
ctcgccctctgggaggcttaccgagagtttgaaagtgcgattgtggaagctgctcgggaatctgtcttgaactatcgtttcgatcctctcggcattgttg

SEQ ID NO: 769124 - DNA, 50 bp, Homo sapiens
cgggactccctggaaacctagaaatgtgatgaatacttcagaatgaaact

SEQ ID NO: 769125 - DNA, 101 bp, Homo sapiens
cgagccgatcgccgcggggcagttcgggccggctgtcctggcgcggtccgtggcactcaggtagttggttctgacatgactgtgacagttgagtttaccaa

SEQ ID NO: 769126 - DNA, 100 bp, Homo sapiens
cttgaaaacagtcatgtgaaaactcatcaccttaaggtgttaagtgtaaggatcttcatgatgaaatttctgtaaatgggttttggccaaattgggcgag

SEQ ID NO: 769127 - DNA, 100 bp, Homo sapiens
ccgggatcggttgccttgagcctggaccttcttcagattcgatcgtatgtgtacgcagaagagccaaatattgacattcacaacttcgtgggaactttta

SEQ ID NO: 769128 - DNA, 100 bp, Homo sapiens
catcaagacggaaaaagtcgatctggagcttttcccctccccgggctcttatcacgcgatggcatccactgtggaaggaggcgacacagctctgctccca

SEQ ID NO: 769129 - DNA, 75 bp, Homo sapiens
atattcattcaatgtctttggttcacatggatataaaacctagtgacagttaacaccaacatggttgatttaaat

SEQ ID NO: 769130 - DNA, 78 bp, Homo sapiens
tcaatgtccgcatcgcaaccaccgccctggccatctaccatgtgtatgtccgtggttcagaccctgtattaaagcttt

SEQ ID NO: 769131 - DNA, 75 bp, Homo sapiens
cctgaaagttatgtggctcaaatgattgtgccggatcgagctgggagatgtgacaccacacaatattaaacagtt

SEQ ID NO: 769132 - DNA, 87 bp, Homo sapiens
gcaacgtgttggaccttccggagcttctcagaagacagagggttttcttttgagagttttccgtctgatgaaggttggccatttgca

SEQ ID NO: 769133 - DNA, 100 bp, Homo sapiens
acttcttcacggaccagtttcagttcgccgatgggaaacccggagaccaaatccttggtcctgagaagtatttctcgttttcattggagatcacagcata

SEQ ID NO: 769134 - DNA, 82 bp, Homo sapiens
aaacaaactctggtttctcttcagcgttcacctctctgcgcccaaacggatctataaatttgcgcctcattttggtaagcgg

SEQ ID NO: 769135 - DNA, 75 bp, Homo sapiens
cgctctattccctgccccgggccttcttcaagagattgttgacgggaacctgaagatgaccctgggcatgatctg

SEQ ID NO: 769136 - DNA, 50 bp, Homo sapiens
caaatttgaaaggcttcgaggcagcgcaaagccttctagacaagctcagt

SEQ ID NO: 769137 - DNA, 50 bp, Homo sapiens
tttacaccagcacgtggaagatggggtaaaaggacaaacttgcgtaaaac

SEQ ID NO: 769138 - DNA, 74 bp, Homo sapiens
aatttcgtggagaagaaggccttgactatggaggcgttgccaggttattattgcagcagaactcctaaaaaatg

SEQ ID NO: 769139 - DNA, 83 bp, Homo sapiens
ggactcgctctcggcttgaccgcattcttcctcccaggtgaccctggcagcaaccccaacaaacgccagaggcagccccctct

SEQ ID NO: 769140 - DNA, 75 bp, Homo sapiens
atgacgtccgctttggagaactacatcaacccattgtttgtgctccccaaacctaaagtgatctcctgtctagag

SEQ ID NO: 769141 - DNA, 75 bp, Homo sapiens
gggaaccctggtcaccgtctcctcagtgttatagttttgccgctggactcttccctcccttcccccaccccatca

SEQ ID NO: 769142 - DNA, 100 bp, Homo sapiens
gccaatcagcatttcacattcctcatggttggttcaaaggcccaagaggatgctgagaaacttcggtccgttgtgatgccaatggaaaaggaaattgcag

SEQ ID NO: 769143 - DNA, 96 bp, Homo sapiens
cagcgagcgtcattgttgtctttctgggaactcattcccatgagatttggagcaagaggtggtggtggccttcccccgaagaaatttggtaatcct

SEQ ID NO: 769144 - DNA, 51 bp, Homo sapiens
cattcacacagcccataaagcaagacagaatgatatggaacctagcaaagc

SEQ ID NO: 769145 - DNA, 75 bp, Homo sapiens
cttcgctggcgggagcgcggttcggggccgcagaggtcaccatggagtaacaagtatgaccctcccttggaggat

SEQ ID NO: 769146 - DNA, 50 bp, Homo sapiens
ttttcagaggggaatgctaagaggcaattaagttggaatatgcaaggttg

SEQ ID NO: 769147 - DNA, 88 bp, Homo sapiens
agacattagaggtcatccaaagcagccgtcccctctgcagcctctctgacaagtgtgtctgtagtgggaagtcttcatgagctcagtt

SEQ ID NO: 769148 - DNA, 100 bp, Homo sapiens
tcattatagcctcaaactcccaggctcaagcaatcctaccatgtcagccttcccagtagctggaactacaggatgggatcagagcagctaagagaaatat

SEQ ID NO: 769149 - DNA, 134 bp, Homo sapiens
ctcacacttgcctcgccgaccgccatttcacatccagcagaggaggcgggggcagccgctgagacggtttttcacaaggcatgaacaaccgggaggtgctggagcaggtggagcgaggctacaggatgccctgc

SEQ ID NO: 769150 - DNA, 75 bp, Homo sapiens
ctctcgctcacgcagcaggagcaggggacgaaggtgctctggacccctcgggtgctgtcaaatggcgtccagttc

SEQ ID NO: 769151 - DNA, 51 bp, Homo sapiens
ctcctgaagaggcggcgctcagacagttattggagggtggtgaagagagga

SEQ ID NO: 769152 - DNA, 100 bp, Homo sapiens
cgtgttggaccttccggagcttctcagaagacagagggttttcttttgagagtcctccctgctgctgtgtggacgacacgtgggcacaggcagaagtggg

SEQ ID NO: 769153 - DNA, 89 bp, Homo sapiens
ggaggccagagcgtggagcgctgcgcggcgcggcggccgggccctcgagacggggacgaaatggtggagtcaatgaagaaagtagcagg

SEQ ID NO: 769154 - DNA, 50 bp, Homo sapiens
ccgcagctctggttcctgttgcggccgatatgatgcttcctggtgtgttt

SEQ ID NO: 769155 - DNA, 97 bp, Homo sapiens
aatattgacccgataaccatggcctacagtctgaactcttctgctcaggagcgcctaataccacttggtcatcatcagatttgaaatatttaaagtg

SEQ ID NO: 769156 - DNA, 103 bp, Homo sapiens
ctgaagaagtgcaagagcagaggccttctctagaccttgccaagatggcacaggaaatctggcattttttaaagtttgcgccccacaaagaggaaatattcca

SEQ ID NO: 769157 - DNA, 94 bp, Homo sapiens
ccaactgcagaagttgaacaagaaattagaaggagggcagcaggctgagggtaaaaagctgggattggtaggctgggtccagaacactgaccgg

SEQ ID NO: 769158 - DNA, 75 bp, Homo sapiens
gcggcgatatggaagaggagggcaagaagggcaagaagacccaagaaactcgagagatcttacatttccactata

SEQ ID NO: 769159 - DNA, 48 bp, Homo sapiens
gtccttggctgcaataatttccgaaacatctgccaaagaaggtctgct

SEQ ID NO: 769160 - DNA, 134 bp, Homo sapiens
gtccttagccaggatggaggctgttgtgaacttgtaccaagaggtgatgaagcacgcagtcacaagcacctcttcggcaaagcccacctccctctctcgcttgattccccggccatccttatcaaagaccttcc

SEQ ID NO: 769161 - DNA, 101 bp, Homo sapiens
ggaagatcatccctctcaaaatgtgctttgctgctagaaacctaagcatgccggatctggaaaacagtccaagtggtaagaagttcagaagcaagcctcag

SEQ ID NO: 769162 - DNA, 48 bp, Homo sapiens
gaagaggcctggaagggaaggaacagggattaatgaaaatcaagttcc

SEQ ID NO: 769163 - DNA, 90 bp, Homo sapiens
cagagtccgcggccggggcgcgggaggccatcgaagacggcaatttggaggaaatggaagaggaagtacggcttaagaagcgaaaaagac

SEQ ID NO: 769164 - DNA, 90 bp, Homo sapiens
aggaagagatcaatcttaccagagggccctcagccttcaagatggtcagcaaggccagcagtccacagcccaggtcaaagtccagtcccg

SEQ ID NO: 769165 - DNA, 99 bp, Homo sapiens
gaagaataagcacaagagaaagaaggttaagctggctgtcctgaaatattataaggtggatgaagactacatccaggacaaatttaatcttactggact

SEQ ID NO: 769166 - DNA, 98 bp, Homo sapiens
agtaattgagcctcaaaatgaagatggcacatggcccaggcagaccttgcagtcaaaatacttggcatatcgaaattttatgattgacacgtatcgtc

SEQ ID NO: 769167 - DNA, 100 bp, Homo sapiens
atctccagcgccggcctcctcagtgcgaagaagctgcagccgcacctggccaagggatggtgattgctcacaccaaagccttggacccctcccagcctgt

SEQ ID NO: 769168 - DNA, 87 bp, Homo sapiens
gaccacctacatggtccccaagccagaagaaatcaacctgctcaccggggagtctgatacacaggctccccacaggtgcaggaagcc

SEQ ID NO: 769169 - DNA, 82 bp, Homo sapiens
tcacgttataatcagattttgaccaagcattttgtaagtttctgtagaaaatgtttcctgactgcaatgagggaaagcggag

SEQ ID NO: 769170 - DNA, 83 bp, Homo sapiens
ggaactgatagcttatggttctccattgtgatgaaagcacatggtacagttgccagagtctgccctccgagacctcatcgtag

SEQ ID NO: 769171 - DNA, 100 bp, Homo sapiens
cgggtatgaggctgggactaagccaagggattcaggtgtggtgccggtgggaactgaggaagcgcccaagcgcaagcaccaggaaatccgagccatgaga

SEQ ID NO: 769172 - DNA, 100 bp, Homo sapiens
atggaaggcagcagccaatggagggggcgacttacgagggaattacccaacttggccatataagagaggagccacctgcagtgcctgccccaataatgac

SEQ ID NO: 769173 - DNA, 133 bp, Homo sapiens
ctagttttcagatagctttgcttacctctgaagatcacattaatcgcaaatatgcttttaaggggatgtatggcattgagaatgaagtcttcctgagccttccatgtatcctcaatgcccggggattaaccag

SEQ ID NO: 769174 - DNA, 121 bp, Homo sapiens
aatgtcttcaatgacttccttatgctctctaatacccagttcattgagaattgtcagagatggctttggattccccgttctgtgtgctgctgtctggctcctgaacccagctgtagaggtg

SEQ ID NO: 769175 - DNA, 100 bp, Homo sapiens
gcctcctccaagccggccaattccccccgcaccaaattgcatcgtttcccaggccaatgagaacagcctgctgagtgcgcagctcaagggcttccccctg

SEQ ID NO: 769176 - DNA, 50 bp, Homo sapiens
atttggagtgtgcgtgcgcgccgagcggccctcgggaccaaggatcacgt

SEQ ID NO: 769177 - DNA, 87 bp, Homo sapiens
gggcgacgtgtgtccaggcgtttgccgaggagctgatcacgcagtacctggctgagcttcggaaccccgaggagatgactcgctgtg

SEQ ID NO: 769178 - DNA, 100 bp, Homo sapiens
tgggatgtgaagtagatgataaagatgatgatatccttctcaaccttgtgggatgtgaaaactctgttactgaaggatgtcttccaagcgaccagcctct

SEQ ID NO: 769179 - DNA, 100 bp, Homo sapiens
cgtattagctaagcatagccacgcatctgaccgatttcttaagcagtctctagtgatccctgaaaagttccagcatattttgcgagtactcaacaccaac

SEQ ID NO: 769180 - DNA, 50 bp, Homo sapiens
tggatctgctgacagaactataaaggaatgatgatgtctcagtataaact

SEQ ID NO: 769181 - DNA, 97 bp, Homo sapiens
catgggctgctgcaccggacgctgctcgctcatctgcctctgcgcgctgcagttggtagttggcaaaaaaggagaaagccactaaggtacaaaagac

SEQ ID NO: 769182 - DNA, 75 bp, Homo sapiens
cgcccgaccccgtcccgaccctggccgccccgagcggagcctggagtgggtaattccagaattgattggccatac

SEQ ID NO: 769183 - DNA, 87 bp, Homo sapiens
gttctcccggtgtggccacgagtcgggcctggcctcgccctgtggatgatgatggccttgcccccgtgagctacaacctggccttca

SEQ ID NO: 769184 - DNA, 82 bp, Homo sapiens
tttacattgtcactgaatttatgtcaaaagccttgtcttaaaagaagaagcatctgattaccttgaattggatacaattaaa

SEQ ID NO: 769185 - DNA, 100 bp, Homo sapiens
ggctgcgggaaatcgggctgaagcgactgagtccgcgatggaggccaagcaatggggctggacacaaggtcggtggcccaaaaagagtgctgaatttttg

SEQ ID NO: 769186 - DNA, 99 bp, Homo sapiens
ggggcaacagctgagccgtctgggaagggatgcatctatcctgataacttaagtgactctctcttttccggtgatgaagaaaatgctgggactgaggaa

SEQ ID NO: 769187 - DNA, 100 bp, Homo sapiens
gaagaacctctcataccctcggattcagaatccatggctggaagaggtagtaaggccattgggagggcatgcctctcctcagcccacccccaccctgtgt

SEQ ID NO: 769188 - DNA, 97 bp, Homo sapiens
cacgcagtccccaggggcccggcccggggcgcgttgaagatttagatggtgctctactctcggggccagatggtgataggaatgtgaatgcaaattt

SEQ ID NO: 769189 - DNA, 100 bp, Homo sapiens
ttgaagttgacatctgacgacgtgaaggagcagatttacaaactggccaagaagggccttactccttcacagatcgcaatgccaagtgagtacacctatg

SEQ ID NO: 769190 - DNA, 46 bp, Homo sapiens
taaagttggatgtgctggaacaggagagcacacagctgctacaaat

SEQ ID NO: 769191 - DNA, 100 bp, Homo sapiens
gctttatgaaacagcttgcttcctacagtgtactaatggtcacttgatgtgcgctggctgttttatccacctactagcagatgcccggctgaaggaggag

SEQ ID NO: 769192 - DNA, 100 bp, Homo sapiens
gttctcaaccacaagtttgaaattgactttctgtgtggctggagcctgtccgaacgctttgggctgttaggggtgtattttgattacatgagaagctgga

SEQ ID NO: 769193 - DNA, 100 bp, Homo sapiens
cagctctcaggcctatacagggaatgcagtctggctggaaggcccgcttcgcccatggcatgttcaccgtgtaccctgggtttggctccattccttccgg

SEQ ID NO: 769194 - DNA, 100 bp, Homo sapiens
agtgcccagtggtctatcccagccctgtttgtggttcagatggtcatacctactcttttcaggaccaggtctccaaggacaaagcccttcagagcatggc

SEQ ID NO: 769195 - DNA, 98 bp, Homo sapiens
gtacatcactgtcgtctcatgggagaaagacactgtttcacttgtctcagcctggagcattggtaagcgtcacactgccaaagtgagagctgctggag

SEQ ID NO: 769196 - DNA, 100 bp, Homo sapiens
tccatcttctaaaccaacactcctagccaatggtggtcatggagtagaagggagcgatactacaggtgctggagaatctggtaaaagcaccattgtgaag

SEQ ID NO: 769197 - DNA, 82 bp, Homo sapiens
tgaccctcttccaggttacatacagcttacatcttgcatcctcaagcgagcaaattggtcaggagatgttggaaaaccttag

SEQ ID NO: 769198 - DNA, 95 bp, Homo sapiens
ggatcattggtttatgcaggaattaaatcaattgtaaagtcatcgttggatctcgaatacctgatgcatgcaaaacagcagctagtaaccacagc

SEQ ID NO: 769199 - DNA, 101 bp, Homo sapiens
cgaaatgctacatttggctgtgttacattctagaaaactttgtgtctactctgtctcagggaagcagctcgagagtgtcgtagaaagaagaaagaatatgt

SEQ ID NO: 769200 - DNA, 97 bp, Homo sapiens
gagaggctggcccgcagtcagatccacagcatccgggacctccagcgactcctggagatagactcccttgccttgcgccatggactggcagccagac

SEQ ID NO: 769201 - DNA, 75 bp, Homo sapiens
ttctggcgatgcagcaattccaagaagctctggattaatcgaattacagctgctagccaggaacatggactgaag

SEQ ID NO: 769202 - DNA, 89 bp, Homo sapiens
taggaggaattcttttagaagacatagaagaagcactgcccaattcccagaaagctgtcaaggacctcggacagtgatccaccctaaag

SEQ ID NO: 769203 - DNA, 100 bp, Homo sapiens
atttggctttgcctttctggacacagaagtatttgtgacagctggcattcctcgttcagtattgaaagattggcgtaaagtcaagaagctgaagcaaact

SEQ ID NO: 769204 - DNA, 100 bp, Homo sapiens
gacaacgacagcgacggctacgccgaagcactcgttccgggggtgaagcctcctgcgccggccttgcctcggtaatgctacagccctttgactatgatcc

SEQ ID NO: 769205 - DNA, 80 bp, Homo sapiens
tgaacggcgtcgtcgggccgccgcagcccgccgaaggcgcggattcagaccaggatgtagcactcaaacttgcccaggag

SEQ ID NO: 769206 - DNA, 149 bp, Homo sapiens
ggctgcccacgggggctccgcggcgtcctcggcgctgaaggggttaattcaacagttcaccaccattaccggccatttcataattctgaatcatgtctgataacggagaactggaagataagcctccagcacctcctgtgcgaatgagc

SEQ ID NO: 769207 - DNA, 98 bp, Homo sapiens
gccgagccacccgcccgcccaaggtctctcgcgggcgggagaacggaaaactcccaacttcctgatgccacttcaaatgaacaacaagagcttttctg

SEQ ID NO: 769208 - DNA, 73 bp, Homo sapiens
ccaggccagtccctgatccctgacctaatgttatcgcggaatgatgaaaatgtaaggtcatctggggcttggg

SEQ ID NO: 769209 - DNA, 50 bp, Homo sapiens
ccctgctgctgtcttcaaagaagatgtgcactcccagcaacacccctgcc

SEQ ID NO: 769210 - DNA, 82 bp, Homo sapiens
aaggcggcagctcctggcgctgcgggcgtccccacaggttcagccgtctgtatatctccccagatacctgaaactgaccacc

SEQ ID NO: 769211 - DNA, 88 bp, Homo sapiens
cagagatgcccagctgtgaccagtgctccgcttgcagagctccaaacgagaatggaagccgctggaggaccgtagctgcacagacata

SEQ ID NO: 769212 - DNA, 96 bp, Homo sapiens
aacaattttatttaaccacggtgcagttcagaatattgctcacctactaacctcactgtcctacaaagtattactctggagagaaaaaggctccag

SEQ ID NO: 769213 - DNA, 74 bp, Homo sapiens
aaggattccaagtaactcttatttgctagaagaaccacacctcttttggaatatattaaaaatagaaaattaga

SEQ ID NO: 769214 - DNA, 73 bp, Homo sapiens
gccgcgccaggccggggggcggctttgaacttggcctactccagcatttacggcagctaccggaacttcgtgg

SEQ ID NO: 769215 - DNA, 76 bp, Homo sapiens
gaagatctgggtgcccgtggaccacaggccctcgttgcccagatctccaagcgcttggtgaccctggcccggggac

SEQ ID NO: 769216 - DNA, 73 bp, Homo sapiens
ctgggaaacccacaggaggcaaccacactagtttagaacctcaagaaggcatgaagccagcccctgcagtgcc

SEQ ID NO: 769217 - DNA, 75 bp, Homo sapiens
aaaagctgctacttatggaagatacaaaggttttcggctttgtgagaaaccttaccatcaaacacgatggccagc

SEQ ID NO: 769218 - DNA, 74 bp, Homo sapiens
tctataatggtggcgtggaggccgtttcaaccttactgggtcatcagactagtgctgagtcttggggtactggc

SEQ ID NO: 769219 - DNA, 88 bp, Homo sapiens
ggtcctctggtcttccctgaccccgcggccggacgacccaagcccgctgagcaggatgaggggagtaactattcccagtcagaggcgc

SEQ ID NO: 769220 - DNA, 100 bp, Homo sapiens
gtggatatgagtgctagacggagctaccagagattcactgactgctataagtgcttctaccagttgcagcctgcgatgacacagcaaatctatgacaagt

SEQ ID NO: 769221 - DNA, 101 bp, Homo sapiens
agcagaggacgcggccaggcgattcggtgaagcgattcctgcaggcgttggttcccctctttgacctgacatggctccttactatgaagccttgtgcaaat

SEQ ID NO: 769222 - DNA, 82 bp, Homo sapiens
aaagctgagctgcgaggaaaatggcggcgggagtttcagctgtgagttcaacatggaggcaaatcagtgccccctggttgtg

SEQ ID NO: 769223 - DNA, 75 bp, Homo sapiens
gccaaggattctgcctggccctgggaagagaagcctagatatctggatctctcaccccgtcactcagggtggcgc

SEQ ID NO: 769224 - DNA, 101 bp, Homo sapiens
tggaagctatgggtacggaggcaactcggcgacagcaggctacaacaatgcagatcttcgtgaagactctgactggtaagaccatcaccctcgaggttgag

SEQ ID NO: 769225 - DNA, 75 bp, Homo sapiens
cgagcgcccagcgccgcgccgggaggtggtataagttgaaatccaaaccaggaaagaaggacaaggagcgaggag

SEQ ID NO: 769226 - DNA, 100 bp, Homo sapiens
gctcagcggtgggcagtcctagtccgaggtgccaccgtggaaggacagaatgggagaccagtgtaaatttgatcatgatgcagagatagaaaagaaaaag

SEQ ID NO: 769227 - DNA, 75 bp, Homo sapiens
ctcgggcagaggcgacctccccgcgttccatgcgcacagggacaggggtttctggcacagccctgagtgtgaatt

SEQ ID NO: 769228 - DNA, 100 bp, Homo sapiens
gcttcccctcctgtctccagttctccacgctctgtctcctcaacctctacctggcggagactgaagttgctgaagatcctcaacaagtttcaactgtcca

SEQ ID NO: 769229 - DNA, 75 bp, Homo sapiens
ggcccacctgtgtcctggttgagggtctccagggttctttggggcccgaggtgtgatgaatgcagactctgctac

SEQ ID NO: 769230 - DNA, 50 bp, Homo sapiens
aatacattaaaaactactcatgtggattttgcctaccattttacagtatt

SEQ ID NO: 769231 - DNA, 102 bp, Homo sapiens
ttctgtcctggcataaggatcccttcactctcggaagtgttccgtgaaaagtctgtccccatctcctgagtcctcggcatcgccagttccatccactcagcc

SEQ ID NO: 769232 - DNA, 83 bp, Homo sapiens
aaatgaaaatgctgttgtatgcagtgaaagagttgctgaactacaaagaaagaggatgaagcatcttcccaaactgatttaag

SEQ ID NO: 769233 - DNA, 73 bp, Homo sapiens
aatgaagttgatggatttagatgttgaacaacttggaattccacaatggccaatgtacatggtggactatgcc

SEQ ID NO: 769234 - DNA, 43 bp, Homo sapiens
cactcctgggccgtccctgaagtctgaccagtgcacaggactt

SEQ ID NO: 769235 - DNA, 88 bp, Homo sapiens
gacagccggcgctggctgtggtcggtgctggcggcggcgcttgggctcttcttccgtgtgtgctaagatcgtgcagctcctggggcag

SEQ ID NO: 769236 - DNA, 50 bp, Homo sapiens
ctcagatccagtgataattgacaggctgatcagctgaccgaagaacagat

SEQ ID NO: 769237 - DNA, 118 bp, Homo sapiens
cttcacctgcagaagcgtgtcgttctgcaccagcgccttgatcgagtacttgaggtgagaagccctaccactgcaactgggacggctgcggctggaagtttgcgcgctcagacgagct

SEQ ID NO: 769238 - DNA, 83 bp, Homo sapiens
gccctcaggcccgtggccgctgtccaggagctctgctctcccctccaggagtctggtgaaggcagaaattcatcagactgtag

SEQ ID NO: 769239 - DNA, 100 bp, Homo sapiens
gcggcatcaagcaggtccggacccactggctgctggagcttgtcaccaccagatatggatcagaaactttcgaagttggtagaagagctcacaacttcag

SEQ ID NO: 769240 - DNA, 75 bp, Homo sapiens
gaaagtcattgccattaatgtggatgatcctgatgcagccaattataatggccctggccaacgtcaacattggga

SEQ ID NO: 769241 - DNA, 82 bp, Homo sapiens
ctcatgttcagcatccccaggctggccatcgtgtggagccttcacgtaaatgggtccagtcatgcctcccagtaagaagcca

SEQ ID NO: 769242 - DNA, 100 bp, Homo sapiens
gaggacaacgactaccaccgcagcgacgagcaggttgtggcagcactgcctgaaggtatgagaccagattctaatctttatggttttccatgggaattgg

SEQ ID NO: 769243 - DNA, 90 bp, Homo sapiens
ccttccggcagaagctggtcagtcaaattgaaggagaacgacctgctcagaatgagaagaggaaggagaaaaacataaaaagaggaggca

SEQ ID NO: 769244 - DNA, 98 bp, Homo sapiens
gtaatacattactgcagagaaacacggaaactaggaagaggaaattaactatctgtacttataagggcactccacagaaggatgttattatcaagtca

SEQ ID NO: 769245 - DNA, 75 bp, Homo sapiens
cacaatattaaaactttacctgggaattcaaagaagctttttcactatttgacaaagatggtgatggaactataa

SEQ ID NO: 769246 - DNA, 100 bp, Homo sapiens
atggtggtgctccggcttgcgacgggcttctcccaccccctcacgcagagtgcagtcatgggccaccgcagacaccttccagttccccgacatggaccac

SEQ ID NO: 769247 - DNA, 102 bp, Homo sapiens
cgagaggatctggtgtaccaggcgaagctggccgagcaggctgagcgatacgacgggactttgaacatgtcggggatcgccctcagcagactcgcccaggag

SEQ ID NO: 769248 - DNA, 82 bp, Homo sapiens
ctggccgccatcctgcagctgggcaacatctgcttctcctcctcagagatgtgcactcccagcaacacccctgccacgccgc

SEQ ID NO: 769249 - DNA, 74 bp, Homo sapiens
ctgcaatttgccatttatttgtaataagacaatgcagatcttcgtgaagactctgactggtaagaccatcaccc

SEQ ID NO: 769250 - DNA, 75 bp, Homo sapiens
caggtgcccaccggcctcggcctggatgggcagcgccagaggccaccagcccctcgggttccaagatgcagctac

SEQ ID NO: 769251 - DNA, 90 bp, Homo sapiens
gcctggcatactttgaagatcgtcatgggagacagaagagatgggtgatgaagaagttttctcctggttgaagtgtgcaaagggacagtc

SEQ ID NO: 769252 - DNA, 57 bp, Homo sapiens
gtggtgtgtggcacaaaatgcaacacgtattctagtcaagaagaaagccagaggaag

SEQ ID NO: 769253 - DNA, 100 bp, Homo sapiens
aacgtgagagaagaaaaaacacgctcagagataacctatctcagtggttcaatagcatccccagatgtcaaattaaatcttggtggagattttatcaaag

SEQ ID NO: 769254 - DNA, 98 bp, Homo sapiens
gacgcggcctcggaccagccatttcggtgtagaagtggcagcacggcagtggtgaactatgacaatgtagtggacacaggttctgaaacagatgagga

SEQ ID NO: 769255 - DNA, 75 bp, Homo sapiens
cagaaattgactgcactctggtggctaacagaccccttgttgaaatgggacagttggcagcggctctgatgagcc

SEQ ID NO: 769256 - DNA, 97 bp, Homo sapiens
gaggctctgcggctggtccaggccttccagtacacagacgagcatggggaagattgtgactgcagcgcggcagggacccagggcaacgcctgccgga

SEQ ID NO: 769257 - DNA, 78 bp, Homo sapiens
gcggccaaggtgccggccgacaccgatttggtcgtattgggcgcctggtcaccagggctgcttttaactctggtaaag

SEQ ID NO: 769258 - DNA, 80 bp, Homo sapiens
tgcaggagcacaacaccacactgcagacccagaccgccaagctgcagctggcacagtgatgtttgagtatggaatgcggc

SEQ ID NO: 769259 - DNA, 75 bp, Homo sapiens
atgagaaatgaagaagctagtaagcagctggagattgagaggatccagaatccagatctctggaatagctaccag

SEQ ID NO: 769260 - DNA, 75 bp, Homo sapiens
cggagaggcacggaggagccgctggggctgccgccacggccgcccggagcctctttgaaatgtgctgctagtggg

SEQ ID NO: 769261 - DNA, 75 bp, Homo sapiens
ctcggcgctgcgatccgcgcatataacgggaaatcctcattgacgattcaatttgttgaaggccaatttgtggac

SEQ ID NO: 769262 - DNA, 82 bp, Homo sapiens
gacgtaccaaacaggcacgagataagcaaagaatggccgagtggattctgaggaccggaggagccgccactgcccgtacctg

SEQ ID NO: 769263 - DNA, 74 bp, Homo sapiens
aaacttacagggttgccaccaggtagttggcaaaaaaggagaaagccactaaggtacaaaagacactggacaac

SEQ ID NO: 769264 - DNA, 100 bp, Homo sapiens
ggatttcagcctgcacggatggtcttgaaacacaaatggtttttggagaggagttcattacttcggaagtggtacaatttaatgatacaaaataaggatg

SEQ ID NO: 769265 - DNA, 85 bp, Homo sapiens
cggcagaggattcgctcccagagcagctgcggccaggtcacagcctacaatcgggacagctttgataccactcggcagaggctgg

SEQ ID NO: 769266 - DNA, 74 bp, Homo sapiens
cgacgagtacgactacctattcaaaggtttgtccagaggggttgcgtttatccggtttgacaaacggtcggagg

SEQ ID NO: 769267 - DNA, 50 bp, Homo sapiens
cctccaccccccactcgcagtccccaagtctacgccttctccgtcggcag

SEQ ID NO: 769268 - DNA, 75 bp, Homo sapiens
acaaggaaacctactgttgcactgtctgctgttggtggatcatccatgccatggagtatgaacttcagatccgtg

SEQ ID NO: 769269 - DNA, 75 bp, Homo sapiens
ggcaagcatggagttggcaccccaaaagaaagattgatgttctgccagaaattgtggaggctgtggaagggaagg

SEQ ID NO: 769270 - DNA, 90 bp, Homo sapiens
gaccatgcagtcagctacgggaattcagtactctgtaacacccagctaccaggtcagatggcaaaaatcaagcaaacccttctagacagc

SEQ ID NO: 769271 - DNA, 100 bp, Homo sapiens
gggggagggcggcttgctagacgacctggagcgtctgtcaggctaggaggagggggaggagagctggtgcaacaacgagagtgagtggtcccagatccac

SEQ ID NO: 769272 - DNA, 96 bp, Homo sapiens
tacgaaatgctgtgccgtggggagggtatcaaaatggaacattaagccatcatgtaagaagtccagctattctgttggagtgaccaagttgaaaaa

SEQ ID NO: 769273 - DNA, 74 bp, Homo sapiens
aggtgtaagcgcagaaagcaggcgaacccgcggcgcaataacgacacgaatgcagagtttgagtccagatccca

SEQ ID NO: 769274 - DNA, 101 bp, Homo sapiens
gtgttgctgcgagtgggacgcgcactggtcggtgccggctcaggagccggggtactccaaagattcaggtttactcacgtcatccagcagagaatggaaag

SEQ ID NO: 769275 - DNA, 75 bp, Homo sapiens
gctggaggaggccagctctacaggcggattaaagcaaggagagccaatcatgactggcaaaacacagaccagcaa

SEQ ID NO: 769276 - DNA, 100 bp, Homo sapiens
ggctgggctttcctcacccgggaaactgttaaggcagcaataatagaagagcagaaacgaagtgaaaaggctgtggaagaggcagtgaaaagaacaagag

SEQ ID NO: 769277 - DNA, 100 bp, Homo sapiens
gttgcggcagtcgcgtcccgggagcgtcgctgcctggtgaacgggaatctttaaccagtttcagtgtagtagtgaaaaagtgcttccatctgacactctc

SEQ ID NO: 769278 - DNA, 75 bp, Homo sapiens
gaatatttagcaaggattcaaggctttcaggaaatgggtcctgatgaatatgaagagatggaagaagaggaggag

SEQ ID NO: 769279 - DNA, 50 bp, Homo sapiens
tcttgcaacagtggccgcacgcataggacctgaaggagaagaaggagaag

SEQ ID NO: 769280 - DNA, 85 bp, Homo sapiens
tgagttccacctcattttagagtatcaagcaggttctcctgaaaagaaagctgaacattcatctataaatcaagaaaatggcact

SEQ ID NO: 769281 - DNA, 96 bp, Homo sapiens
tgaagatggacgaggtcctgtacagcatcgccgagaagacttccttgccgtccaggaagggatttcgacaccagaccaccaagtttttgtatcgct

SEQ ID NO: 769282 - DNA, 75 bp, Homo sapiens
gccaccgcaacccatgggtggccagggattctgagaacaccttctgcagtggggaccatgtgtcctggcacagcc

SEQ ID NO: 769283 - DNA, 50 bp, Homo sapiens
gatgacattttcaggaaaatcctgtatgaatctgatgaacaagaaaagag

SEQ ID NO: 769284 - DNA, 96 bp, Homo sapiens
aagaaaagaaaaatgagcaactcctttcatggaattagaccacctcaacttgaacaaccaggtaccttgtggtctataatcctttagaacaagacc

SEQ ID NO: 769285 - DNA, 90 bp, Homo sapiens
tgaacctggaagttgtgctttttaagttgatgtagaacattctcatgttcgatttctgggaaacctggtattgaacctgtgggattgtgg

SEQ ID NO: 769286 - DNA, 75 bp, Homo sapiens
cggcgggactcaggcctgcctgcgaaggtctacttccccagcaggacagcatcattctcctatatcttctagaca

SEQ ID NO: 769287 - DNA, 100 bp, Homo sapiens
tcaagggatagacgtcgaggaggcagccgttctcgctctcgttcccgttccaaatctgcagaaagatacattgcctttgacttccataaggaatgtaaaa

SEQ ID NO: 769288 - DNA, 83 bp, Homo sapiens
tgtctgcgagccaggattcccggtttttagaacttcagccataaaaatgggcagaattttccttgatcatatcggtggtaccc

SEQ ID NO: 769289 - DNA, 82 bp, Homo sapiens
cccgcccgccttccgccgtctcttcgagttcttcgtgctgctcaaggtatgggggcaccttccagaacgtgtctgtgcagct

SEQ ID NO: 769290 - DNA, 83 bp, Homo sapiens
attattttgcaccactggatgttgtttactggtattaatctctggagaagacacatccacagttagcactttcttcagatgct

SEQ ID NO: 769291 - DNA, 100 bp, Homo sapiens
gaggatgaagagctggagagcgccgaggacgacgagcgcagctgtcggggccgcgagtcggacgaaggtcccagacaagccaatgaagagcatcaagtat

SEQ ID NO: 769292 - DNA, 104 bp, Homo sapiens
gaggacccacgcgtgacccgggccaagtacttcattcgagatgagtttctggcgttggagaccagggccagccctggccacaccccaggctgtgtcaccttcgt

SEQ ID NO: 769293 - DNA, 90 bp, Homo sapiens
ccgcgcccctcggacggccacgagactcggaacctctgtattactggcaacagactgaagatgatttgacagtaaccatacggcttccag

SEQ ID NO: 769294 - DNA, 76 bp, Homo sapiens
atcagctatggagataggcagatgagtgttggggatgtcctttgcactgaccctgaactgccagattgacaaaacc

SEQ ID NO: 769295 - DNA, 75 bp, Homo sapiens
ccttttggaggctgccaggataataaggaaggagctggcaaacagccctgactgtccccagatgtgtgcctataa

SEQ ID NO: 769296 - DNA, 98 bp, Homo sapiens
gcagacaaagaaaggagtggcccgtatggatttcatgagggccgttgctccagggagaactgcaaatatcttcatccacccccacatttaaaaacgca

SEQ ID NO: 769297 - DNA, 83 bp, Homo sapiens
cggagctttcgcagctggagaagtatggtttgaagtggtgaacatggatttttctcggcttcacatgtacagtcctccccagt

SEQ ID NO: 769298 - DNA, 75 bp, Homo sapiens
cccgggtcatctccagatgctagggttatgggaggtggaatttaattctcctccccttgaatatgggctggacaa

SEQ ID NO: 769299 - DNA, 101 bp, Homo sapiens
ggatgactatgagtatgagctattatagaaaccatgcatcgccctgagcaactggtggtttgtggcccacctgacagacctgctggaccactgcaagctcc

SEQ ID NO: 769300 - DNA, 96 bp, Homo sapiens
agacagcgtccacagcctgctcagcatcctggacatcatcaccgattatatctgtccaagatgcgagtctggttttatcgaggagcttccggaaga

SEQ ID NO: 769301 - DNA, 90 bp, Homo sapiens
tacagctttgatcgatttctgggataaggcctcaggagtgcaagtagctgatgaagtatgtcgcattttttatgacatgaaagttcgtaa

SEQ ID NO: 769302 - DNA, 75 bp, Homo sapiens
ggaagtaggggtgcacctcagcactatcccaagactgctggcaacaggagttttgcatcccttgctttggctgag

SEQ ID NO: 769303 - DNA, 60 bp, Homo sapiens
cacagataccgtttattaaaagagctgtggctggccgttgctccagggagaactgcaaat

SEQ ID NO: 769304 - DNA, 100 bp, Homo sapiens
atcatgtctggtggctccgcggattataacagccctctggaccccgaggttggaccctactgtgacacacctaccatgcggacactcttcaacctcctct

SEQ ID NO: 769305 - DNA, 75 bp, Homo sapiens
ggagtgaggggggcgaggaaacgcaatcaaatgatgccgtttggaaaaatttcccagcagttgtgtggcgtaaag

SEQ ID NO: 769306 - DNA, 100 bp, Homo sapiens
aagtaatggtgcaaagcctgaatggaatgcagtagccctctgggcctgggatattgtggttgataactgtgccatctgcaggaaccacattatggatctt

SEQ ID NO: 769307 - DNA, 73 bp, Homo sapiens
catgccgctcctaagcctgcacagccgcggcggcagcagcagtgagagttgggccggtgcacaaacagcgtgg

SEQ ID NO: 769308 - DNA, 82 bp, Homo sapiens
ctgagcccaggccacagtaccctattcacgctctgtgcttgtgccaagattctgattcccagcatagccacgaagtgatgcc

SEQ ID NO: 769309 - DNA, 88 bp, Homo sapiens
gtttacttttaattttgcaaagaatccaggacaaaaaggattaggtacaaattctgagctgtctaacccctctgaaacggaatctgag

SEQ ID NO: 769310 - DNA, 75 bp, Homo sapiens
gtgaggtacaggctcagtctgcggccaagactccgtcctgcaagggcggcgactggcggcgcgatggacctgacc

SEQ ID NO: 769311 - DNA, 100 bp, Homo sapiens
agacagcaaggactcacccaaagacagggaagtggcagaaggaggccttccccgggcggagagcccctctccaggcttcttctcatatcggtaattccac

SEQ ID NO: 769312 - DNA, 97 bp, Homo sapiens
agcagataacagcctgtatgatcctgaaaggattgacatgtacgtggaggggacactggatctgctggaactgcttatcatgcatcctttcttaaaa

SEQ ID NO: 769313 - DNA, 50 bp, Homo sapiens
ctcatgggcacggctcgggacgaaccaagagccactgagagaggaagact

SEQ ID NO: 769314 - DNA, 99 bp, Homo sapiens
atccattcaggatgggaaaccacgcaggcaaacgagaattaaatgccgagaaggccagtacgaaccaggacaatcctgtgattgatgaaatagacttcc

SEQ ID NO: 769315 - DNA, 76 bp, Homo sapiens
gtccagtggcacgatttctgctcactgcagcctccacctcccggcctcagcctttgacgacccctatgccctggtg

SEQ ID NO: 769316 - DNA, 80 bp, Homo sapiens
tacgccctcttcctcctggccagcctcctgggcgcgggttactcactataaacaatatccacccaacacaagcaaagttt

SEQ ID NO: 769317 - DNA, 99 bp, Homo sapiens
gctgaagagagaagatggcgcttgacggaccagagcagggccaattcctgtccccccagcagcatggcatcgtgtgctgaaccctctgagccctctgcc

SEQ ID NO: 769318 - DNA, 109 bp, Homo sapiens
tatcctctgtttctctgctgcaccgacctcgacgtcttgcctgtgtcccacttgttcgcggcctatagactgattcttgctattccaaatcctcttccacgttgacagc

SEQ ID NO: 769319 - DNA, 101 bp, Homo sapiens
cagcactgccaaatagcagaagaataccatgaggtcaaaaaggaaatcaccctgcttgagcaaaggaacaaagtgaaaaggagagcttgttgaaggaaaga

SEQ ID NO: 769320 - DNA, 83 bp, Homo sapiens
gcaataatgtcatctctatggaagaaattggaccatacactttctcagatcaggtcaaccagatgtagtggtgaaagaagatg

SEQ ID NO: 769321 - DNA, 82 bp, Homo sapiens
cagcctgcggagcctgtggggcagaaacagagcctcactctgtcacctaggctggagtgcagtggtgcaattatggctcact

SEQ ID NO: 769322 - DNA, 100 bp, Homo sapiens
cggcccctgtgtgcaaccctaacaaggccatcttcacggtggatgccaagaccacagaggtgttccccccacactggggctcccactactgcgaggagtg

SEQ ID NO: 769323 - DNA, 100 bp, Homo sapiens
cggcgcagttgcgaaactgagaaacaatgtgatgagaaccattcatggggtgggagagatgatgacccagatggtactcagtagaggctccatcttcccc

SEQ ID NO: 769324 - DNA, 96 bp, Homo sapiens
tgtaacaaatgtgatgacaagaaggagagatctctgctgcctgcattgagggggaggtggggaagacagggctccagctaccacaggacgggctct

SEQ ID NO: 769325 - DNA, 82 bp, Homo sapiens
ccgatttaaagctgagctgcgaggaaaatggcggcgggagcaaattcaacacccaacagcttccttaatagcaaaggtagca

SEQ ID NO: 769326 - DNA, 82 bp, Homo sapiens
agacttctcgtgggcagcctcccctcggaactcgggcatcatggcctcagaataccctctaccatctgctttggtcagggtg

SEQ ID NO: 769327 - DNA, 99 bp, Homo sapiens
tcaagtggaaacaactgtctgataacaacgaacttgatgcaagtgataggtttgccaaggtcagacctctcatcatccggatgaactgcaatttccaga

SEQ ID NO: 769328 - DNA, 75 bp, Homo sapiens
ggatggagagaagtcatggaactgaaaaagcactgactgctctgcttaagtacatgtcccagagcaagcacacgg

SEQ ID NO: 769329 - DNA, 74 bp, Homo sapiens
tgccaatgttggagccgtctgcaaagtgtccccggcaagaagaaggaagaggcccagcagaagggactcgctga

SEQ ID NO: 769330 - DNA, 100 bp, Homo sapiens
gagatcagaatttatttacctctgtttatccaacgctctctcagcagcttccaagagaaccaatggaatggagaagtggcagaaatctgaagctatcatg

SEQ ID NO: 769331 - DNA, 49 bp, Homo sapiens
ctggattctaaaatttgaatagcacaaagttatcattgttgggctggat

SEQ ID NO: 769332 - DNA, 82 bp, Homo sapiens
aaagtttttaccaagagatgataatgaaaaaacgtcttgaagagtttcaacttatgagagcatttcttgagacttaaagtgg

SEQ ID NO: 769333 - DNA, 74 bp, Homo sapiens
tccgaactggcgcaggggccgctgcggcaagttcacggcgaagcagctggagaagctggccaagaaggcggaga

SEQ ID NO: 769334 - DNA, 100 bp, Homo sapiens
aaatcgcctcccgagaagaagttgaggcgctatggggatatgagactttctactcggaatatcctgagtgttgcgtggatgtaaaacccatttcacaaga

SEQ ID NO: 769335 - DNA, 74 bp, Homo sapiens
cttcaagccgtgggaggagcggaccgaccgctccaagaaaatggacccaagtggggtcaaagtgctggaaacag

SEQ ID NO: 769336 - DNA, 90 bp, Homo sapiens
accagagccatccttcgggagaggatatgtagcgaggaggaacgcgctaaggcaaagcacctgatgggcttaggtcacgagcaaggattt

SEQ ID NO: 769337 - DNA, 50 bp, Homo sapiens
gacagtcacaattttgtaataaggagaagatggtataaactggtccatca

SEQ ID NO: 769338 - DNA, 76 bp, Homo sapiens
ggatgccctgcagtacctgcagaaggtctctggagacatcttcagcagttaccggtattgtaagaacaagccgtac

SEQ ID NO: 769339 - DNA, 76 bp, Homo sapiens
accctgctaaccttagcagaagaaaggacggtagacctgcccaagtctcccaaggcaagaaggtaaatcagtactt

SEQ ID NO: 769340 - DNA, 98 bp, Homo sapiens
tgggatccctgagttgttgagcccaatgagagatgctccctgcttgctgaaggtgcaccagctatatgaaactatacagcgctggagccccattgcct

SEQ ID NO: 769341 - DNA, 74 bp, Homo sapiens
actacagaaacctggtctccctagcgggctacattgagagacctcagctgattcgagcaaaagtgccaattgtg

SEQ ID NO: 769342 - DNA, 98 bp, Homo sapiens
gcggacatcactttagaccctccacctaattgcagaggattgcggcctgttggcagaagagtagtgtcttgggccccagctgacctgatgaatatcaa

SEQ ID NO: 769343 - DNA, 50 bp, Homo sapiens
gtctggaggagctctacacgaagaactagaagaaccacacctcttttgga

SEQ ID NO: 769344 - DNA, 100 bp, Homo sapiens
ctcaaagtccacatcactctttgaaacagcatgggaagcaaaggccatggcagtaatagcgtgtttatctgacacggaccagaaaaatatggctcaggag

SEQ ID NO: 769345 - DNA, 100 bp, Homo sapiens
agaactcggaggaatagtacaacaattatgagccgtcacagcctgattatgatgaagatgactatgatgctgattgtgaagacattgattgcaagttgat

SEQ ID NO: 769346 - DNA, 80 bp, Homo sapiens
gaacgaggcaaggagctaaagcagcgtgcgttcagccctggggtcctagaccagaaggagcacaggctggatggccgtgt

SEQ ID NO: 769347 - DNA, 100 bp, Homo sapiens
ttacggcaacactggaaacttcgaaaagttggagataaaattctcggagatctgagctacagaagtgcagagacgagttgtactgctgtcacaggaaatg

SEQ ID NO: 769348 - DNA, 100 bp, Homo sapiens
ccgtctgcttcgggcctctggaatttagcgctcgcccagctagccgcagttacatccttgctaagccccactccggctacagctcttgctgtcagatacg

SEQ ID NO: 769349 - DNA, 74 bp, Homo sapiens
tgcagcggcaacccccagcggcttaagccatggcgaacagatggagtcggataactgttcaggaggagatgatg

SEQ ID NO: 769350 - DNA, 90 bp, Homo sapiens
gaagattgcaactttgagtcagacctgtaggcctgatagactgattaaaccacaggacttcagggccacaggtgctgccaagatgctcca

SEQ ID NO: 769351 - DNA, 90 bp, Homo sapiens
aaggaaactgctgaaaacagcctcaagaaaccagtaacagattgtgttatttcagatcccaaactctcctctgagctccgttgtaccttc

SEQ ID NO: 769352 - DNA, 101 bp, Homo sapiens
agaggacgagggggccaaggcttcctccggggctgacagataaggcagtgaaggactattccgcttaccgttcttcccttctcttttgggccctcgtcgat

SEQ ID NO: 769353 - DNA, 71 bp, Homo sapiens
gatcaagccaacaacagtgacggaatgcctccatacatgtcctggcattgatgtgcctgctccagacatga

SEQ ID NO: 769354 - DNA, 75 bp, Homo sapiens
ctctgtccgggggcctggctaaggaaaccctattacctccagcttgccgggattgctgtccttgccattggacta

SEQ ID NO: 769355 - DNA, 76 bp, Homo sapiens
gaaagatggatttttgcatgagacgcttctggacagataattcagcattggcgtatttgcttgtcccaatacaaga

SEQ ID NO: 769356 - DNA, 50 bp, Homo sapiens
gaaccatctcctgagaaagcatccttttcagaatgtaactggtcactaca

SEQ ID NO: 769357 - DNA, 100 bp, Homo sapiens
atcttcaggcaaagaaaaaggcagtgattcatttaaatctgagaagatggataaaatctcctccggtggcaaaaagctctgtgcagtgtgcctagaagac

SEQ ID NO: 769358 - DNA, 100 bp, Homo sapiens
ctcacggctcagctgcctctctggtctccaactagtattatgagaggagtcaatcagagtccaagtggtaagaagttcagaagcaagcctcagttggcaa

SEQ ID NO: 769359 - DNA, 50 bp, Homo sapiens
tacatccgcgtcaagccccatcctaatctcaggggcgatataatcaatga

SEQ ID NO: 769360 - DNA, 98 bp, Homo sapiens
gccgagccgctggccgacgagcggagcctcaggagccggcggggacgccatgcgagccaggcctcattgctacgatttcagagtaccctggtaatagc

SEQ ID NO: 769361 - DNA, 98 bp, Homo sapiens
taaaggatgttcatgaagattcaataacagttgcatttgaaaacaacttcctgcctgacacagctcacttcaagaagtgcacaatgtcagaacgtgga

SEQ ID NO: 769362 - DNA, 100 bp, Homo sapiens
tcaagcacatccttgctaatttcaaaaactaccagaaccaggaagacagcgcttccagcaacccgtttgcactccccaactctgtcactccccccttacc

SEQ ID NO: 769363 - DNA, 73 bp, Homo sapiens
cacgaccagctgaaccgcctcaagcttccacagcgcggcacctgtacctccggggtggcgctggggttggctc

SEQ ID NO: 769364 - DNA, 83 bp, Homo sapiens
ggcagtggaaaatgcgctcgggctggaccagcagtacaaaatggttcgttacatcagaaggatacagttcatgacaatgactt

SEQ ID NO: 769365 - DNA, 100 bp, Homo sapiens
cttcagtatgcagtccctatcatcagccagcagggggagattcagaacaatttgtgggcaggaaatgcaagtggtggttctgtggttacttcatgcatgt

SEQ ID NO: 769366 - DNA, 75 bp, Homo sapiens
ttgggaacgaggggtgaagcggcccagattgaaaaggaagatcaggccaaccccaaagaagaagtgaccaaggag

SEQ ID NO: 769367 - DNA, 101 bp, Homo sapiens
aaagttgagtctctcctgcgccgagccttcggggcgatgtgtagtgccttccatagggctgagtctgggaccgaggttggtacagaggatataccctccaa

SEQ ID NO: 769368 - DNA, 100 bp, Homo sapiens
agagcactagcaaccgatgacgtattgaggcccacacctctgggattggctgtcctgcttcgacagccttgaaagtggggtggcgctccaaccccctttg

SEQ ID NO: 769369 - DNA, 80 bp, Homo sapiens
gttctttactactaagcaccgttggtatcctcatggacggtgtgactgaagaaatatcaaatgtttcctagtaagacagc

SEQ ID NO: 769370 - DNA, 100 bp, Homo sapiens
caccgggtgagctcaccgcccagcccaaaccaggagattgcgagggagcgatgcggtgcagcgcgcatcaagatggtgctcatgtggaccagtggtgacg

SEQ ID NO: 769371 - DNA, 83 bp, Homo sapiens
cctacagaaccgtcccaaaatatggcaaagaaacctattctgagccaagacaatgcaaactccagtgaacattcccgtgcctg

SEQ ID NO: 769372 - DNA, 90 bp, Homo sapiens
gccgggccctgtcgcgaacctccggcgcgctgccccgccggaccgtgggtagaatggttttgaagaagaaaaaacctgctttctgactga

SEQ ID NO: 769373 - DNA, 75 bp, Homo sapiens
cagaggcagagctggttactgcggaggctgtgcggatctgactgcagccatgagcagcaatgagtgcttcaagtg

SEQ ID NO: 769374 - DNA, 75 bp, Homo sapiens
tcacttttgagtgcaactgccttccagccgattcgaagacagtctcttacacctcctcctcagaacactattaca

SEQ ID NO: 769375 - DNA, 82 bp, Homo sapiens
tcgctcccatcgtcatctttgcatccaaccgaggcaactgtgtcatcagacaatgcagatcttcgtgaagactctgactggt

SEQ ID NO: 769376 - DNA, 75 bp, Homo sapiens
gatggaaatctggctgagtgtgaaagattggaccagaccctgaattcttctagctcctccaatcccattttatcc

SEQ ID NO: 769377 - DNA, 75 bp, Homo sapiens
tgacttcaactatgctactaaaggaacccttctctgaagcaacagctcttctcctacgccattctgggctttgcc

SEQ ID NO: 769378 - DNA, 100 bp, Homo sapiens
ccaacatggcagcggggttcgggcgatgctgcaggacttaattcagtgcacaaatgagatgaatgtgaacatcccacagttggcagacagtttatttgaa

SEQ ID NO: 769379 - DNA, 100 bp, Homo sapiens
gtctggtcactcgctctcctctggggactgcagagaagcaggacctcgggccatgggtggaaaatgaggttgatcgcagcattcagaaagtgtataagac

SEQ ID NO: 769380 - DNA, 100 bp, Homo sapiens
ccgccatggcccgctggatcccgaccaagaggcagaagtacggggttgctattgtggacgatgaaaggctctctgcagaggagatggatgagaggaggcg

SEQ ID NO: 769381 - DNA, 50 bp, Homo sapiens
aacagtgattctttcttaaaaatgcttctgaaagttctgctgaagacagt

SEQ ID NO: 769382 - DNA, 90 bp, Homo sapiens
ggaagacctattatcagatcaaccaccaaagtgggaaacattgaaatcaagttgagtggtgattttatgcaatggcttcaagccacagtt

SEQ ID NO: 769383 - DNA, 148 bp, Homo sapiens
gtcgccatggatgtggaacggagtcgcttcccctactgcgtggtgtggacgcccatcccggtgctcacgatattccccgagtccctccggtggctaatggccacccagcagtttgagtctgcaaagaggctgatcctccacttcacac

SEQ ID NO: 769384 - DNA, 58 bp, Homo sapiens
cgagaaccgtcagtttgagccagatggactacgagaaagccctgttcttcccctgcaa

SEQ ID NO: 769385 - DNA, 96 bp, Homo sapiens
tgtggctggtgtggcaatgaggacaaccccacactgggacggggctgaggaagctgccctcgaaaccctccagaagacatctgtcctgcagaggcc

SEQ ID NO: 769386 - DNA, 74 bp, Homo sapiens
gcctatggcaactgtgtcacggttttcacacaacagaaaccacctgacatccacccgctgaagcgcactgctgt

SEQ ID NO: 769387 - DNA, 74 bp, Homo sapiens
tctcatcttttgcctggaccttgcatattttgggctgcagcgctggtggaggaggaaactcgcagataccgacc

SEQ ID NO: 769388 - DNA, 100 bp, Homo sapiens
aacctgccgtctccgccatcgagcgcccctccgagctggggttggacgctgccagtttgcacagcagcagggagtgcatccgccccaacccttttccccc

SEQ ID NO: 769389 - DNA, 100 bp, Homo sapiens
cctgactaaagcttgaaatgctacatttccaaggctgccgcgggcggacacgccagaggaggaggccggggaatggccgcggtgtggcagcaagtcttag

SEQ ID NO: 769390 - DNA, 95 bp, Homo sapiens
cggaacccgagctggagctgaagcgcaggctgcggggcgcggagtcgggagctcgtttcctggctgatgaagacagagagcctggctcttctgcc

SEQ ID NO: 769391 - DNA, 100 bp, Homo sapiens
caggaatggagacgccattggatgttttgtccagggcagcatctctggtgcatgctgatgacgaaaaacaggtcctgctgtactagccaccaaagcagct

SEQ ID NO: 769392 - DNA, 96 bp, Homo sapiens
cgatatagctacctcagattggagaaaatttgcctcaaagcgagtctcaaaggtgttcctggatttgaggttggagcaatcactgaagaaactgaa

SEQ ID NO: 769393 - DNA, 75 bp, Homo sapiens
gctccatcgacctcaaggacatcaacttccggccgcagatgtcccaggctgctggaagactacgtggaagccatc

SEQ ID NO: 769394 - DNA, 101 bp, Homo sapiens
tgccagggtccctgaagagggaagacacgcggaaacagggtatgcggccccctacctgacagtgttcagcgagaactccatcgatgtgtttgacgtgagga

SEQ ID NO: 769395 - DNA, 75 bp, Homo sapiens
tcagaccctggacccctgatcttaatgagctttgcagccttcaacaactaaactggtaggtggcagcagaggaag

SEQ ID NO: 769396 - DNA, 75 bp, Homo sapiens
aatcactgcaccttaaaaacaaaagattgagctgcactgtattcctagaccaagaagcgggacgttcaccatggg

SEQ ID NO: 769397 - DNA, 114 bp, Homo sapiens
ctacatgtactcggggggcggctctgcgctggccgggggcgcgggcggcggcgccggcaggaaggtcatgaaacgagtgcgtaccgagcagattcagatggcagtgtcctgcta

SEQ ID NO: 769398 - DNA, 100 bp, Homo sapiens
atcaacctggagctctacgcctcctacgtttacctgtccatggagttaagtatgacattgacctgcccaacaagaaggtctgcattgaatctgagcacag

SEQ ID NO: 769399 - DNA, 51 bp, Homo sapiens
ttgcagaaagtttaaaggaaaacgctttcacagcaaagtggggcaccaagg

SEQ ID NO: 769400 - DNA, 100 bp, Homo sapiens
agcaaaaagaatgccctgtgcagaagactatggtgttgaaagcagcaggggcctagaagacattaaaccgataccacagaaatacaaaggatcattagag

SEQ ID NO: 769401 - DNA, 82 bp, Homo sapiens
catcgacaagacgatccgggtaaagttccagggaggccgcgaagcaactacactgcgctgcatcggactcgacgcccgctgg

SEQ ID NO: 769402 - DNA, 119 bp, Homo sapiens
gaatttatcccagaagcctcaggtcctgggtccagagaagcaggatggatcttgcgaggatctagtgaaaagccatttgatgtatgcggtcagagaagaagtggaggtcctcaaagagc

SEQ ID NO: 769403 - DNA, 83 bp, Homo sapiens
cttcgcaggcccagacgacgcgcgcgcagcagaggtgtccaggacctgcctgctcacggttcgtgtcctgcaggcccatcgcc

SEQ ID NO: 769404 - DNA, 75 bp, Homo sapiens
ccagctttctttgcagagaagcttcatcaagccatgaaacccactgatgatattgtcctaatggcacaaacgctg

SEQ ID NO: 769405 - DNA, 100 bp, Homo sapiens
attcaacagaacttagcataaatgctgaagagccatccaaaactctgtttgtcaaaggcctgtctgaggataccactgaagagacattaaaggagtcatt

SEQ ID NO: 769406 - DNA, 83 bp, Homo sapiens
ggcagagagcggcctccgaggacaatgcagatcttcgtgaagactctgactggtaagaccatcaccctcgaggttgagcccag

SEQ ID NO: 769407 - DNA, 75 bp, Homo sapiens
gatggctgcagacaagcctgcagtgtccccagttgtcctcatccagggtgctattcgagtccagcctgaagggcc

SEQ ID NO: 769408 - DNA, 89 bp, Homo sapiens
ccatcctctacagcatcggcagcaagcctctgcaaatctgggacaaaaagggcttcctgaagaatgagaaggacaatgccctgctgtct

SEQ ID NO: 769409 - DNA, 100 bp, Homo sapiens
gaaggaggaggacaaagagcccctcatcgagctcttcgtcaagagacagggcagggcattgttcatgcactgaccgacctcagcagccccggcatgacct

SEQ ID NO: 769410 - DNA, 100 bp, Homo sapiens
tattaactactatggaatgcaaagatttggaaccacagctgtccctacgtatcaggttggaaggctggatgacaccaaaatcctcccaggcaacatgaag

SEQ ID NO: 769411 - DNA, 95 bp, Homo sapiens
ctcaaattgatgctaactggaacttcctggagatgatggtgaaaaaggagatccaggagaagagggaaagcatggcaaagtgggacgcatggggc

SEQ ID NO: 769412 - DNA, 112 bp, Homo sapiens
caagtagcccgagagagcacctacttgtcctccttgaagggctccagatttggagcaagaggtggtggtggccttcccccgaagaaatttggtaatcctggggagcgtttgc

SEQ ID NO: 769413 - DNA, 98 bp, Homo sapiens
gctgtgcttgtgtttatgggttcactggtccacagtgtgaaagagcaggtgcaacaggttcaggtgtttgctgacgtccagtgtacagtgaatctggt

SEQ ID NO: 769414 - DNA, 90 bp, Homo sapiens
gagctattagagattgtgaagaagaatttcgatctccgccctggggtcattgtcagctgggtcttactggggatctggccagccttgggg

SEQ ID NO: 769415 - DNA, 100 bp, Homo sapiens
cagctacctgctgcaccacctgccctggcttgtgggcagcctgggcgtgctgctgctcgacaccatcagcgacgagctggggctgcagaagaagctacgc

SEQ ID NO: 769416 - DNA, 98 bp, Homo sapiens
agcagttctctgatttttatattttattcctcttcctatccaatccctgccttttgagtccaggtggatgcagaaaatgcgattgtgcatatgggcgg

SEQ ID NO: 769417 - DNA, 99 bp, Homo sapiens
ctgtctctggctatgttggtgggatgttacgtggccggaatcattcccttggctgttaatttctcagaggtcagggccctttgaagtacgagcagacct

SEQ ID NO: 769418 - DNA, 83 bp, Homo sapiens
ctgcagtcggcactgctactgcgaagacagctggcagacatgtcatgctgcccaaggacatagccaagctggtccctaaaacc

SEQ ID NO: 769419 - DNA, 82 bp, Homo sapiens
tctgttgcctggctttgctgccccaggaggtcctggacattcaaaataacctttaccagctgctggagccagttctgcttct

SEQ ID NO: 769420 - DNA, 50 bp, Homo sapiens
cttggcttcgagatggcttcggtaaagagaaatgtgtatgaccttacaag

SEQ ID NO: 769421 - DNA, 98 bp, Homo sapiens
actcttaggccctgccgggacctgctgaatcggaacctgcaatttaccaagacctgtacacacattacatggatgggcgtgttttgggcgtgctagag

SEQ ID NO: 769422 - DNA, 75 bp, Homo sapiens
cctgggctcaagcgatctacccaccttaccctcccaaagtggtgagattacagattcgggaactggagcctctcc

SEQ ID NO: 769423 - DNA, 49 bp, Homo sapiens
cgcaaggccgaagccaaagccaggtaatcattcctggggtatttatcca

SEQ ID NO: 769424 - DNA, 100 bp, Homo sapiens
atgtgtgaagttcttgctctacgtcctcctgctggccttttgcgatgcactgcgcaactctggtggcgatgggctggggcagatgtccttggagttctac

SEQ ID NO: 769425 - DNA, 100 bp, Homo sapiens
aacgcacttcatcttcatccctccggagaaaaagaatgtgaaattgactaaatacatgtagtttatgccaacgtgacttcattcatacagatgaaccaag

SEQ ID NO: 769426 - DNA, 75 bp, Homo sapiens
gagggaggtgggaggctctaggctccaagacgccgtcgcttgagtagccggatcgagctgggagatgtgacacca

SEQ ID NO: 769427 - DNA, 100 bp, Homo sapiens
gcagcttcaagcttaggaccacccaccatgcctatccaggctcagggtttggagcggccaccaaggccatgtgcatcggcctgcggtactggaagcctga

SEQ ID NO: 769428 - DNA, 75 bp, Homo sapiens
gccagcccgccagcatgccccagtccaaagtgatgcagtttggcaaagggaagtcgtgttgctaccggtttctga

SEQ ID NO: 769429 - DNA, 100 bp, Homo sapiens
gaatgcctattcagaatggcagattcaggagagagtttgtgccagggcgtgattgactacattttctattccaagactcatatgaacgtgcttggtgtcc

SEQ ID NO: 769430 - DNA, 75 bp, Homo sapiens
caagtacatatgatttcagctgcaatggcaggccctgggaggagcggggacactgaggacctctctccaaattgg

SEQ ID NO: 769431 - DNA, 101 bp, Homo sapiens
gttattggagaaacatgcagattatatcgcatcctatggctcaaagaaagatgattatccgccctgcccgcaggccatgtggcccccgctgttgctgctgc

SEQ ID NO: 769432 - DNA, 83 bp, Homo sapiens
ctccgaccagtctgggggcgctggcggcctgcgcagccacctcaagctaagggagaacattgagcaattcttcaccaaatttg

SEQ ID NO: 769433 - DNA, 127 bp, Homo sapiens
tctcaatatctgtcttcggtggactccttcggcagtccacccaccgccgccgcctcccagcaaccatgaagttgaaggacacaaaatcaaggccaaagcagtcaagctgtggcaaatttcagacaaa

SEQ ID NO: 769434 - DNA, 98 bp, Homo sapiens
ccagtggatctgcagcaatgaagaatgtccagaataaaagccagggatccatctttgtccggatacacgccccgtggcaggtgctggccagagaggca

SEQ ID NO: 769435 - DNA, 100 bp, Homo sapiens
gcgacccgggatgttcagtctgatggccagttgctgcggctggttcaagcggtggcgggagcctgtcaggcccttccatactttgaccggctagactatg

SEQ ID NO: 769436 - DNA, 75 bp, Homo sapiens
gctgccccagtggaggacatggctcggaggatttctcttcagcaacgggtagcagaattggaaaaaattaatgca

SEQ ID NO: 769437 - DNA, 80 bp, Homo sapiens
ataggactaagtcttaaactgggattcagaatccatggctggaagaggtagtaaggccattgggagggcatgcctctcct

SEQ ID NO: 769438 - DNA, 58 bp, Homo sapiens
ccgggccccgagcgcccgaacagaagtttccaagggtcacttgtgtctcgtccgtggg

SEQ ID NO: 769439 - DNA, 75 bp, Homo sapiens
atctgcaggaaccacattatggatctttccattgaagccatgaagaaggcctaccaggaagagctgagccgagag

SEQ ID NO: 769440 - DNA, 96 bp, Homo sapiens
agcatcacaagtccatgctgctgccgttaatggagataagggtgctctacagaggctcatcgtaggataaaagaatcagagtgtctcaacccttga

SEQ ID NO: 769441 - DNA, 90 bp, Homo sapiens
gccgtatccagcgactacgcggccgcggagacctacctgcggcgtcggcagctgctgctccgaggtggacccaagtggagagattgtgga

SEQ ID NO: 769442 - DNA, 96 bp, Homo sapiens
tcattttcaagtatgctgatccagatcgggagtgccacccatgccatccaaactgcacccaagggtcagcccaagactaccccgtcggtcattctg

SEQ ID NO: 769443 - DNA, 98 bp, Homo sapiens
gctccgggaaggggctgacggccgtgcccgaggggctcagcgccttcacccaagcgctgtcagccatgtcatctgagcctcccccaccaccacagccc

SEQ ID NO: 769444 - DNA, 100 bp, Homo sapiens
gcgaagctggccaaagcctgcccagacggctcacctgtgcgggatggaacaaaaggaggactgacaaatggtagtggtcgatatatctctgcagcacctg

SEQ ID NO: 769445 - DNA, 97 bp, Homo sapiens
ggacccagcagacatgaacgctctcgctctgggtccctcagaatatgactctctgcctgaaaatagcgagacaggtttgtgttgctagttaagctag

SEQ ID NO: 769446 - DNA, 75 bp, Homo sapiens
gaccaactgtatatgatcatgcgcaccttggccatgcttgacctgtgaccgcatcaagcagtcagcagctggcac

SEQ ID NO: 769447 - DNA, 75 bp, Homo sapiens
acgatccatggcatcccggggctttgacggctttatcctgtggataaacgcagagtgaacgagtttggggagtcc

SEQ ID NO: 769448 - DNA, 75 bp, Homo sapiens
gacttgactcttcaaacacaaagaggcggatttccctgactgaagaccatgttgcaggcccacagctgcctacag

SEQ ID NO: 769449 - DNA, 101 bp, Homo sapiens
gaagtcttcaggcgagctcaccacatgctacagcttgccttgcgccatggactggcagccagacgagcagggcctgcagcaggtcctgcagctgctcaaag

SEQ ID NO: 769450 - DNA, 100 bp, Homo sapiens
cccgttccatctatgttggcaatgctgagcagtccaaagtcctgagcgccgtggaggaccgcatggacgagctgggtgctggcattgcacagtccaggcg

SEQ ID NO: 769451 - DNA, 95 bp, Homo sapiens
tggcaagagaggcatcctccttgaagtatttggctgaggagttttcaatcccagtaaatttggaaggcaaagccagccctctgtcacttctacaa

SEQ ID NO: 769452 - DNA, 97 bp, Homo sapiens
tcgacgccatcatgaccacggcccagagtctataggatcgggtgaaccaccaaccggcaattgaaagctgcacagcctgaaattacctttattcaat

SEQ ID NO: 769453 - DNA, 90 bp, Homo sapiens
aacgtggctgcaaccttagcgacatcaggaagaacagggtcgaggatcgaggtgaaggcagaaattggagatgttagtattttagtaaat

SEQ ID NO: 769454 - DNA, 100 bp, Homo sapiens
ccacgaggtctgccccaagttccccttaacttgtgacggctgcggcaagaagaagatcccccgggagaagcaggatacagacgtccctcaccagtgccag

SEQ ID NO: 769455 - DNA, 75 bp, Homo sapiens
tcttcgttgccatgaggaaagaattctccgagtgatatcagtatcaagataaaagtttggaatgggagaaaaatt

SEQ ID NO: 769456 - DNA, 80 bp, Homo sapiens
agaagtccagagctgagaaggactgcctgtttgcaggtgtctctgccaacagactcatgggtggtgccatgcagcttacc

SEQ ID NO: 769457 - DNA, 78 bp, Homo sapiens
agaagcagcagaaaggccgcggcatgggcggcgctggccgaggttatcaatactctggctgaccatcatcatcgtggg

SEQ ID NO: 769458 - DNA, 87 bp, Homo sapiens
gcatcaagaaacccaagctgctgagccaagagtcgaagctaaaccagaagttcaatctcagccacctcgtgtgcgtgaacaacgacc

SEQ ID NO: 769459 - DNA, 76 bp, Homo sapiens
atggcattgcttgggccccacattcatcctgccacatctgcactgcagggagaaaactggttgtcctggatgtttg

SEQ ID NO: 769460 - DNA, 100 bp, Homo sapiens
cacagaaatggtatcaagaaaccccgatcacaaagatacgaatctcttaagggggagaactacgatgacccgcacaaaacccctgcctccccagttgtcc

SEQ ID NO: 769461 - DNA, 120 bp, Homo sapiens
gaacagctggtaccactgtgggcaaaggagttacaacagttactcttccgatgattttcaattccaggtgtattggcactctagtgctcacataatgggtgaagccatggaaagagtcta

SEQ ID NO: 769462 - DNA, 51 bp, Homo sapiens
atatacagttcatctgtgttatcaggccgctacctgtctgaggaacccgag

SEQ ID NO: 769463 - DNA, 74 bp, Homo sapiens
cgctggggcggggaccttgccttgcccggggccagctgcgggccgtccagcggctgtgccacttctacagcgcc

SEQ ID NO: 769464 - DNA, 100 bp, Homo sapiens
tgctgcagtacgtgcctcatgatcgcttcaacaagaatgactcccggcgtggctcgggctccccggaagacacccctcgaagcagtggtgcctctagcat

SEQ ID NO: 769465 - DNA, 99 bp, Homo sapiens
cacccgtgccgcgctggtggagaagcgccttcgctatctcatggacacagaagtctgggaagttgacgagcagatagatcactacaaggaaagccaaga

SEQ ID NO: 769466 - DNA, 119 bp, Homo sapiens
cgtggaggagctgtgcagccgcgaggaggcgcgggaggtgttcgagaacgaccccgagacgtgtactaatggtcacttgatgtgcgctggctgttttatccacctactagcagatgccc

SEQ ID NO: 769467 - DNA, 75 bp, Homo sapiens
ggccacatggtgtcagatgaatatgagcagctgtcctctgaaggtggatgagaatggcaaaattagtcgccttcg

SEQ ID NO: 769468 - DNA, 74 bp, Homo sapiens
cgacaagccgctggcagccgcggatctcaccgccgctcagggttgcatatggccaagtccttggagttatagga

SEQ ID NO: 769469 - DNA, 90 bp, Homo sapiens
gttccataaaccgaagctgctgaaaccacagagaaaagtcacgctgcaagccagggctgagcaggaagaagaattcattagtaacacttt

SEQ ID NO: 769470 - DNA, 75 bp, Homo sapiens
agcctccaaaaatcagcatttcagggaaaaggttttgggatttgagattgacgcggtgaactctgtccagttttc

SEQ ID NO: 769471 - DNA, 82 bp, Homo sapiens
caggaagaagaggtgaagctcaaggcacaggtggcccgatcccagcaggacattgaaaggtttggtgcacctcgatttggag

SEQ ID NO: 769472 - DNA, 75 bp, Homo sapiens
tcagtgtggtggatcatttcaaccggtcctgtccctgctatcagtggggcactgaagaaagcaggactgagtctt

SEQ ID NO: 769473 - DNA, 96 bp, Homo sapiens
attggagcaagggaaagaaccctggctggggaaaagggaagtgaaaagagatctgttttcaggcaatctgaaagcaaatcctgtttagatgcaggc

SEQ ID NO: 769474 - DNA, 115 bp, Homo sapiens
agcgagccagcgcccggagcaagcggagctcccccaagagccggaaagactaaatgtgttaaatgggcttgccaacaatatggatgatttgaagataaacaccgatattactggt

SEQ ID NO: 769475 - DNA, 98 bp, Homo sapiens
gcgaccctgagccggcgcccgtggtccggccatggacgacctcgacccgtccaagaagcagggaccatggctggaggaagaagaagaagcctatggat

SEQ ID NO: 769476 - DNA, 80 bp, Homo sapiens
aatctgcgacaatttgtagaaagtcttcttccagggaacttggtggagaaagtaaacagtgttgacctcagagctgctag

SEQ ID NO: 769477 - DNA, 100 bp, Homo sapiens
tatggaggcatatctgaggtgaatcaacctgccgaattgatgccccagttttctacaattgagtacgtgatacagagtgatcagcagctggactgtgcct

SEQ ID NO: 769478 - DNA, 75 bp, Homo sapiens
agccatcttcccatctcagccttcaaagtgtgggattacagtactatactggcaattgctggagaagattttgca

SEQ ID NO: 769479 - DNA, 100 bp, Homo sapiens
aacaccagatagtggaaagaaaccatgtgctgaaatgtttgacgacactgatggtttggtaaaatgtcggttccaggaccttaccaggcggccactgggc

SEQ ID NO: 769480 - DNA, 82 bp, Homo sapiens
gttcatcgaccagctcagcaaccgcgtgaaggacctgatggcggcggcggcggcgcccgggagccggagccttcgcggcgtc

SEQ ID NO: 769481 - DNA, 90 bp, Homo sapiens
atgggtactctttcctcgtggaatttgaagattctacagataaatcagttggttgaatctggcgatgtggaacccatggatatggagggc

SEQ ID NO: 769482 - DNA, 50 bp, Homo sapiens
tgaaaggaaatccggaattatcacagacaataattcggcatagacctgct

SEQ ID NO: 769483 - DNA, 100 bp, Homo sapiens
taagactgttagattttgggatcttcgagtaccaagttgtgttcgtgttgttggcacaacatttcatggaactgattgatgagtgtgaaaagaaaaagag

SEQ ID NO: 769484 - DNA, 113 bp, Homo sapiens
gcgcgcagggcctgcagcgggagctggacggcgagcgcgagcggcgcgagaaagtgtcgtgaaaactacccctaaaagccaaaatgggaaaggaaaagactcatatcaacatt

SEQ ID NO: 769485 - DNA, 82 bp, Homo sapiens
ctaccggaggcgggacatctccagcaccctcatcgccctggccgacaagcacgcaagttatgaagacagtatggagtttcca

SEQ ID NO: 769486 - DNA, 50 bp, Homo sapiens
agcccgacgaggagggctgcctctcgggttggatcccagagaccgtggag

SEQ ID NO: 769487 - DNA, 75 bp, Homo sapiens
ggaggcctcgctgaggaacgacgccgaggaagttggggaatggcggtcaatgtgtattctacctcgataacccaa

SEQ ID NO: 769488 - DNA, 100 bp, Homo sapiens
cctcagcctcccgggtagctgggactacagactgttgggcgggagctgctgctccatctgattgactatctcgtaaccagtgatggcaaagaccctgaaa

SEQ ID NO: 769489 - DNA, 99 bp, Homo sapiens
ggaagcgtgcaaatgccagaaagaggatttggccagagcgttttgtgttggaatgttgcatcagcaggtagaagaacatgaaaaaatcaagcaagagat

SEQ ID NO: 769490 - DNA, 90 bp, Homo sapiens
tgataaccacccaaggcccaaaagcgtcaaactcaccaaaaacaacatctttccagaaagagtgtgtgatccagtcttgggtgacaagtg

SEQ ID NO: 769491 - DNA, 98 bp, Homo sapiens
ggcttgccccgctatgacgtgctgggggtcatcgacagctgcaaggaggccgtcaccttcaaggccgtcagacaagcctatcagcttatcactgtggt

SEQ ID NO: 769492 - DNA, 100 bp, Homo sapiens
cctgagcctgctgtcgctggggacgtgcctgggcctggcctggtgacagattgactgggatcccctcgcacatcctcaacagctccccatcagaccggca

SEQ ID NO: 769493 - DNA, 83 bp, Homo sapiens
gctgggcatccagggctcgtacttctgctcgcaggtgtgaatgacagaggtggtgccatccagcgcgctcagcgaggtcagcc

SEQ ID NO: 769494 - DNA, 78 bp, Homo sapiens
gactgctgtgctagcaatcagcgagactccgtgggcgtaggaccctccgagccaggaccccaaattacgtgaactttt

SEQ ID NO: 769495 - DNA, 100 bp, Homo sapiens
ccctgcagccttctggtataccatcgtcaccatgacaacactagggttgcgtaggaggctctgtctggtatcttgaaagaagaactatacaggactcccc

SEQ ID NO: 769496 - DNA, 100 bp, Homo sapiens
aattttaggtggcagtcgcaacccatactattcggacagatggcacagaaaccgctgcgcctctgatgaccaaacacccaggcaaacgtctgggttgtgg

SEQ ID NO: 769497 - DNA, 82 bp, Homo sapiens
agaaggccaagaacccccaggagcagaagtccttcttcgccaaatacgaggatacgaagcgttttcggcttcctgcccggag

SEQ ID NO: 769498 - DNA, 98 bp, Homo sapiens
acgccagacctgcgggtccggagtccccactacgtccattccacgaggtgtttcagggtaactctaactttcgggacccagtgcaaaacaatttcatc

SEQ ID NO: 769499 - DNA, 80 bp, Homo sapiens
caggcggccagccagctggaggactccatcaagaatgctggaggaagggtgtttgtccactgccaggcaggcatttcccg

SEQ ID NO: 769500 - DNA, 82 bp, Homo sapiens
cagacgctgccagcatcgccgccgccaggccaagactaaggggctgcagagcggggtggacattggcgtcaagtactcggag

SEQ ID NO: 769501 - DNA, 75 bp, Homo sapiens
aaggggcacgggcacccccgcggtccccgggaggctagagaggctgacccgcggctgattgagtccctctcccag

SEQ ID NO: 769502 - DNA, 100 bp, Homo sapiens
gcgccccacccgcaccccatctggaccgcatcgctgaatgtgcccggacctgcgccttctgggtgtaaattttgataccaccattgccgccttcccctca

SEQ ID NO: 769503 - DNA, 85 bp, Homo sapiens
gtttagaaatggaaaaatgtagtgttctgccagttctggataatccactgtccaagaaggttcgaggcctcattgatagcttacg

SEQ ID NO: 769504 - DNA, 98 bp, Homo sapiens
tcgggaaatggccgctgtgtggttgcaacggagataaattcccggaaccgcgattcggcgtgtcagttgcagataataatgaagatgttgatggtgat

SEQ ID NO: 769505 - DNA, 89 bp, Homo sapiens
gccttgggcctcgcgccggctatggccgtgccctggggctgagccctcaggtttacccaaggtccagcctagcccctaggcaccatgtc

SEQ ID NO: 769506 - DNA, 113 bp, Homo sapiens
tacagactgtggtgcctacccccatcactgcttccctcagccataacagggctgacgcgccactatgtagcgggtttcgggcgggccacgcgtgcgggacaggaacccaaccc

SEQ ID NO: 769507 - DNA, 100 bp, Homo sapiens
ccgtgcctgtcttcagatcttcacagcacagttcctgggaaggtggagccaccagcctctccctgaccaagatcactccatggatgaaatgacagctgtg

SEQ ID NO: 769508 - DNA, 100 bp, Homo sapiens
gaaatgtgaatctcaggagagagcagccagagtgatatctcccggggccaattcagcatctctacctggccatcctaacaaggtgatttgtgaaagggtg

SEQ ID NO: 769509 - DNA, 96 bp, Homo sapiens
aagaagggaaggcgcgagtgaggaaaggaggtactgtagaagcctccccagctttctgaggatgatatctggctaaaaagcgagggagacaactat

SEQ ID NO: 769510 - DNA, 90 bp, Homo sapiens
cctttgttactcactgtgttcggattcgacacctcttagaggctgcaatcccagagagagttgaagagatccctcctgaagttcctacag

SEQ ID NO: 769511 - DNA, 100 bp, Homo sapiens
gggccacgtgcagcggggagggacgccctctgccttcgaccggatcctggagggtgtgaagacagagaatgaccacatcaacctgaaggtggccgggcag

SEQ ID NO: 769512 - DNA, 98 bp, Homo sapiens
tttggtggacatgaaggaactgggcatatgggagccattggctgtgaagctgcagacttataagacagcagtggagaaagggataaacagcacttcca

SEQ ID NO: 769513 - DNA, 50 bp, Homo sapiens
cgaagccgaaaaaggcagcagcgaagagagagcaggagattcggatgggt

SEQ ID NO: 769514 - DNA, 100 bp, Homo sapiens
gcgactgggaggagcgccggaacgccgaggcccagggctctgccagcagacagccttggcacacaggcacaagggctggagcccagagatgagagtgccc

SEQ ID NO: 769515 - DNA, 75 bp, Homo sapiens
tttgaagagttctgcgttttgccagtcacctctcaactgtgtgccaaagatttcctttgacctcgctgagtacac

SEQ ID NO: 769516 - DNA, 82 bp, Homo sapiens
ggccaagtacgagcgacaggagttcatctacccggagaagcaggagccctactcggcagggcgtgatggtgggcatgggtca

SEQ ID NO: 769517 - DNA, 95 bp, Homo sapiens
gaatattttactcatgttccaagagtggtgtgcttgtgatctgccactgcagagccccgccatggaagacacgccgttggtgatatcgaagcaga

SEQ ID NO: 769518 - DNA, 100 bp, Homo sapiens
gagggttcccgggattggaccgacgcagccatgcaacacagtcactcctggcggcaaaccaaacaaaaccagagtcatctggggaaaagtaactcgggcc

SEQ ID NO: 769519 - DNA, 75 bp, Homo sapiens
ccttggccaccctggtccagcgagtcggagagcgaggagaaggttgtcacctatgaccacattgggcccaacgtc

SEQ ID NO: 769520 - DNA, 101 bp, Homo sapiens
ccaggaatatcgatacaacaccaacaggtgactattatatggttaaaaagattttggaggaaaacagttcaggtgacttgaacataaattgcgtagatgtg

SEQ ID NO: 769521 - DNA, 96 bp, Homo sapiens
gggcggaaacggctgtctgatggccccagaggctggcagtgatggtgaaagcataggaaactgccccttttcccagaggctcttcatgattctttg

SEQ ID NO: 769522 - DNA, 75 bp, Homo sapiens
ggacaggcagagtgctgatgtgaaaaataccacgacaaaaccaccctaatctgaagacagcatgtacacagccat

SEQ ID NO: 769523 - DNA, 51 bp, Homo sapiens
ggcaattactggatggaatgatattccagatgacctgagaattaatttatg

SEQ ID NO: 769524 - DNA, 83 bp, Homo sapiens
gggcactctggctctgccctggctgctgaacaaggagctgccctgcatcaacaccgattctgtttcactgaggccatctatcc

SEQ ID NO: 769525 - DNA, 138 bp, Homo sapiens
gaacaggcattatacgcaaggctgaagaagcagttggtaactaacagtacatctttttctaaggtattagaaaactactcggatgctccaatgacaccaaaacagattctgcaggtcatagaggcagaaggactaaag

SEQ ID NO: 769526 - DNA, 100 bp, Homo sapiens
agaagctcaccttcaacaaccccaccacggagttccggtacaagctcctgcgggccggcgggctacccggagaacggcgtggtccagatgaactccaggg

SEQ ID NO: 769527 - DNA, 98 bp, Homo sapiens
ctacttcctctgtatagagcaactgttgaactcagctgcctgtaggagatgcgctctgtgctgcggaaggcgggctccccgcgcaaggcccgccgcgc

SEQ ID NO: 769528 - DNA, 90 bp, Homo sapiens
gtggaaaatgagcatcctcaagaggcggggtttcaccatgttgcccagactggtcttgaactcctgagcttaagcaatccacctgcctcg

SEQ ID NO: 769529 - DNA, 50 bp, Homo sapiens
cggttcttctgacattcttaattacaggaagatgttaccgagtacttcag

SEQ ID NO: 769530 - DNA, 96 bp, Homo sapiens
caaggatgtactgcttgtggcacaaggggagatggctttggaagaatttttgaagcaggagctccccacaccaagtgagaatagcatgccaccagg

SEQ ID NO: 769531 - DNA, 98 bp, Homo sapiens
cgcgacggccgctcggaaatcggtctgcggaagagggagctgctgaaggagctgctaccagtcatcgggcagaacctccgattccagcgcctcttcac

SEQ ID NO: 769532 - DNA, 100 bp, Homo sapiens
gtgcaaccgtggcgagcgctgcccctacatccacgatcccgagaaggtggccgtgtgcaccagctacggagttcgagaagtggaccaagtgaaacgtctc

SEQ ID NO: 769533 - DNA, 85 bp, Homo sapiens
gctggtgggctgcaaatccaagaaggggctgtcctcgtcctccagctgttatctggaagcttagaccatgctcagcctccaagca

SEQ ID NO: 769534 - DNA, 100 bp, Homo sapiens
ctctcggctttcctggtcagcagcgacttgagtattgggaaagggtcgttgtggtgcatagacccagagtatagacaaaatctaattcaggctttgaaaa

SEQ ID NO: 769535 - DNA, 100 bp, Homo sapiens
tgtagataagcaactggattttttaactgaagatagtgcctttcagccctaccagcacgtcagctaactgttcagatgatgcaaaatcctcagattcttg

SEQ ID NO: 769536 - DNA, 100 bp, Homo sapiens
cagacttggaatcctcagatgagactgatcacagcagcaagaaatgagccgtcagactgctacagcattacctaccggtacctcgaagtgtccaccatcc

SEQ ID NO: 769537 - DNA, 50 bp, Homo sapiens
ctcagctctcggcgcacggcccaggcttgtaattccacatctgaagtcaa

SEQ ID NO: 769538 - DNA, 100 bp, Homo sapiens
ggccgagatgtctcgctccgtggccttagctgtgctcgcgctactctctctttctggcctggaggctatccagcagcgcatcagcgaggaggtggggctg

SEQ ID NO: 769539 - DNA, 90 bp, Homo sapiens
ccgcgccgcaccgcaccgcgcgggcggccatggagcgagcctagggcccgacagaatctgaattatccagaacagaaagttgtgactgtt

SEQ ID NO: 769540 - DNA, 80 bp, Homo sapiens
cgctgaggcgggcgttttcttggatgaattgcttgctttggagcgggacgaccctgggacagtctccactggggcagatc

SEQ ID NO: 769541 - DNA, 100 bp, Homo sapiens
ctgggtgatcaatggcgagacagtgcctggggaacatcaggtagctacagcaagctgggtagcaggcagatccaaaggatatcatgaagtttccagggcc

SEQ ID NO: 769542 - DNA, 100 bp, Homo sapiens
cgcctttccagcatgcaggggctgctcaggaaaatgtttataggaggccttagctgggacactacaaagaaagatctgaaggactacttttccaaatttg

SEQ ID NO: 769543 - DNA, 82 bp, Homo sapiens
ctcgatccgctgctcgcacgggagccagctgggtggtgagcgagtgctgtgctttcatgggcctcttctttatgaagcaaag

SEQ ID NO: 769544 - DNA, 100 bp, Homo sapiens
cgggcagcaggatggtggtggatgcggccaactccaatgggcctttccagcccgtggtccttctccatattcgagccttcatctcctcgtcctccaggca

SEQ ID NO: 769545 - DNA, 83 bp, Homo sapiens
ctcagacattctgctgtattccttaagaattgattcggaaggccatgcagctaactttgtagaaacagaacaaattgtgcact

SEQ ID NO: 769546 - DNA, 75 bp, Homo sapiens
tacgttcttcatccattagttatagtcaagagtctggagcagcaggtagccaatctgaattctaaggacctctca

SEQ ID NO: 769547 - DNA, 80 bp, Homo sapiens
tgaaggctatatctgaagctcaagaatccgtaacaaaaacaactaactactctacagacagagtctcgctctgttgccca

SEQ ID NO: 769548 - DNA, 75 bp, Homo sapiens
tcaaagactccggctgcaagcacagggggactcgggcaagggtgccgaagatagacaagaggcacacagagacag

SEQ ID NO: 769549 - DNA, 98 bp, Homo sapiens
cagcctcgctctccgccgcccgcaccgccgcccgcgccctcaccagcccgcagggccccggaccccggcttccaggagcgcttcttccagcagcgtct

SEQ ID NO: 769550 - DNA, 100 bp, Homo sapiens
tccagaaagcggcttatcgaacagagccgggagttcaagaagaacactccagaggaagggaaaaggccgaggcatcagcgtgtgaagaccgcaaagacga

SEQ ID NO: 769551 - DNA, 75 bp, Homo sapiens
gaaaacactatcctctgagatcccagatcatgaggtgttggggatgtcctttgcactgaccctgaactgccagat

SEQ ID NO: 769552 - DNA, 100 bp, Homo sapiens
ggcagaggcgacctccccgcgttccatgcgcacagggacaggggtgctgactgggttacttttttaaacactaggaatggtaatttctactcttctggac

SEQ ID NO: 769553 - DNA, 100 bp, Homo sapiens
tatcaagccacaatttccatcaaaaagtgattaagcagagaatggagaagaaggttgattccaggtctggctctgggagaggagtggacagcagctggtt

SEQ ID NO: 769554 - DNA, 75 bp, Homo sapiens
caaacttctcgaccgagaaacggctgtccccttttctgggactattcaaggaggtctccaggacggacttcagat

SEQ ID NO: 769555 - DNA, 145 bp, Homo sapiens
cgtgttgggagtgtgactgcctgttcatgcagagagatgtgtacatatcccacgtgaggaaggagcacgggaagttggaaaatggatataccttatttgattatgatgttggactgaatgatataattcagctgctagttcgccc

SEQ ID NO: 769556 - DNA, 100 bp, Homo sapiens
gctgaaggccttcagagtccttggggtgattgacaagaacaccaatcagggtcttcaggcctggaagattgaagacattccagccaacaaaatgtccatt

SEQ ID NO: 769557 - DNA, 83 bp, Homo sapiens
agcgctaccgcgagctgcaccggcgctccgtggaggagccgcgggagcttgggaaagtcgaggtgacggtgtttgaccctgac

SEQ ID NO: 769558 - DNA, 82 bp, Homo sapiens
atcatgtcgcgttacgggcggtacggaggagaactccatccggcacaacctgtcactgcatagtcgattcatgcgggtccag

SEQ ID NO: 769559 - DNA, 100 bp, Homo sapiens
ggaacgattgggctgagcagaggacgacatgttgcttttcgtggagttcctctgtgacgagggtgcaggtatctctggggactacatcgatcgcgtggac

SEQ ID NO: 769560 - DNA, 59 bp, Homo sapiens
gcggatctcatatcttcacttggcaaactcaacaaggaattgaatgatctggcacggga

SEQ ID NO: 769561 - DNA, 89 bp, Homo sapiens
gtccagcatgaatcccgaatattggctgattgcaattctggcccaactcaaccctctctttggaccgcaattgaaaaatgaaaccatct

SEQ ID NO: 769562 - DNA, 82 bp, Homo sapiens
tcttcctcctgtgcaccctcttcatcaggtttacccaaggtccagcctagcccctaggcaccatgtcggacagtgatctagg

SEQ ID NO: 769563 - DNA, 100 bp, Homo sapiens
gcgagtcggaggaggacgaggacttggaaggctcaaactgtccaggttgctgaagttgaaccacagtcacagccacagccttccccagaacttctgcttc

SEQ ID NO: 769564 - DNA, 101 bp, Homo sapiens
gtcgctgctgctcgttcgagtcgcagagaccaagaagcgtcagtgtaaagttctttttgagtacattccacaaaatgaggatgaactggagctgaaagtgg

SEQ ID NO: 769565 - DNA, 101 bp, Homo sapiens
cctgggtctcaacatctatgagcagaatgacaggttttaaaagccttggcctcagaggaccctttccaggttctgaaagagtctttcttcttcaaaccttt

SEQ ID NO: 769566 - DNA, 88 bp, Homo sapiens
ccagtccaagagccggcggcatgacgatgcgcaggaccattgtcaagatcccttctaccctggaggtcgacgtggaggacgtcaccgc

SEQ ID NO: 769567 - DNA, 101 bp, Homo sapiens
agtggggacgtccggcttcggagcgggagtgttcgttgtgccagcgactaaaaagaggctatacctccctttgaatttgctttcaaagatgagcgtatctc

SEQ ID NO: 769568 - DNA, 75 bp, Homo sapiens
cccaggacccccaagccgccgcggacgcagtactatactggcaattgctggagaagattttgcaattgttgcttc

SEQ ID NO: 769569 - DNA, 87 bp, Homo sapiens
cacagccaacttccaacaagatgtgggcacaaaaactaccattcgcctgatgaactctcagcgcaaatctgtccaaggctgcctggg

SEQ ID NO: 769570 - DNA, 74 bp, Homo sapiens
gcagtggtcgcttcttctccttgtgtgggccaaactgaaattgcagaaggcttcagaacgatggcagcctgaca

SEQ ID NO: 769571 - DNA, 98 bp, Homo sapiens
agttatacataagccattttccgaatatacaggacctgggaggaaggcaaggtgctcatctttgatgactcctttgagcacgaggtatggcaggatgc

SEQ ID NO: 769572 - DNA, 109 bp, Homo sapiens
cacctgcatggctctggggaggaggaggaagaggaagaggaggatgacccacttggtgccacacctccctggatgatccaagatgaagaatacattgctgggaaccaag

SEQ ID NO: 769573 - DNA, 83 bp, Homo sapiens
ccgttccttcgcgcgtgaggctgcggctctgacgacaatgcagatcttcgtgaagactctgactggtaagaccatcaccctcg

SEQ ID NO: 769574 - DNA, 51 bp, Homo sapiens
actgtatttgggctgcagcacaggtgacatgtacagccatgatgggaatac

SEQ ID NO: 769575 - DNA, 100 bp, Homo sapiens
ggaactggatgtcagcaagaatggatgtcacatgtacttcagtttgaggataaaagcagaaaagtgaaagatgcaagcatgcaagactcagatacatttg

SEQ ID NO: 769576 - DNA, 100 bp, Homo sapiens
caggcacccaagcgggcggcagtttctgatgaagaattgaaaagaagagtagctgaggagctggcattggagcaagccaagaaagaatccgaagatcaga

SEQ ID NO: 769577 - DNA, 48 bp, Homo sapiens
agatccgcgaggttgtctgctaaacacgaccctcctctgagtagcatc

SEQ ID NO: 769578 - DNA, 95 bp, Homo sapiens
cgcctctccaaggccctcttcccgccggagcccctgggtgaagtgatgaacctcctgatgttcctgtcgacgtgggatgggaaggtcccacagcc

SEQ ID NO: 769579 - DNA, 96 bp, Homo sapiens
tccgtcgcggagccggagggcgggaggaacatgacatcgcggagttttccaagagataacttcaccaagatgtccagtgataggcaaaggtccgat

SEQ ID NO: 769580 - DNA, 74 bp, Homo sapiens
tgagatgattgccaaacccccagatggagtctcattctgtcgctcaagctgaagggcagtgccgtgatcttgac

SEQ ID NO: 769581 - DNA, 100 bp, Homo sapiens
aaggtggcccagaattttccagtgccctgaaaaataggcaggctgtccctgcaggatcccacgtacggctgaatcttcagactggggaaagagaggcaaa

SEQ ID NO: 769582 - DNA, 100 bp, Homo sapiens
agaaagagctcttccagcattattctttctcagactgagatgcactttcagctacgtggtgaacatgggtctgattgacaaactgtgtgcctgcttcctc

SEQ ID NO: 769583 - DNA, 75 bp, Homo sapiens
cgaagcttaagtagctacaggggaaaatattctgaggtcttcgccttgatcgtgttctcctgcatctatggtgag

SEQ ID NO: 769584 - DNA, 100 bp, Homo sapiens
ctggtattttttggagcttccatcctggttcttccaaagtgcccggacccaaaacaggaacctactttggggataaaggattatttggtcttctggattt

SEQ ID NO: 769585 - DNA, 88 bp, Homo sapiens
cacagatgatacctttgatccagaacttgcagcaacaataggtgctgtcctggagccgagagctgccttgcgcttggcgcgccctgca

SEQ ID NO: 769586 - DNA, 100 bp, Homo sapiens
gatattgaagaggaagaactgaccagagctgatcccgagcagcgtcatgtacccctgttatcaatactctggctgaccatcatcatcgtgggactgactt

SEQ ID NO: 769587 - DNA, 73 bp, Homo sapiens
tttcaactcttatactctcacagggcggcgactggcggcgcgatggacctgaccgggctcctgctggacgaag

SEQ ID NO: 769588 - DNA, 74 bp, Homo sapiens
gaagcgcgcgggcaaggaagtgctgctggaagttgctgatcatctgggctgtgatccacaaacccggttctttg

SEQ ID NO: 769589 - DNA, 85 bp, Homo sapiens
gagcagtaacggcacaaaccaaaccagaggacagatcccacagatactctactatagatggatgatgcttggaagtataatggag

SEQ ID NO: 769590 - DNA, 88 bp, Homo sapiens
aacacactgcagcaagaacaaaccaggatgttgcttcagagtgtgaagtcaaatgcatgccaacattccagttttttaagaagggaca

SEQ ID NO: 769591 - DNA, 75 bp, Homo sapiens
tgaagtgcagaggtttttttctggcctggtctccaagtcctctcctaagaagcctcgtggacgtaacatcttcaa

SEQ ID NO: 769592 - DNA, 75 bp, Homo sapiens
accatgctggtttgcttcagactggatgagacctgcacgcagtggctcacagcagcacgatttgtgacagcccga

SEQ ID NO: 769593 - DNA, 83 bp, Homo sapiens
tcacccagcatttcatccctcgtcgaaaggattggattggcatctttagagtgaagttttgggattactaggacacaatggag

SEQ ID NO: 769594 - DNA, 96 bp, Homo sapiens
ccagcgaagtcttcatcaaccgggaccgtggcttcggcttcatccgcttgaaagttcaggagccctggaaaggagaaggaataagacggcaggagg

SEQ ID NO: 769595 - DNA, 82 bp, Homo sapiens
ctccccagccatgtggaactatccctttgacttgagactagtaggaggagacaacctctgctctgggcgactggaggtgctg

SEQ ID NO: 769596 - DNA, 75 bp, Homo sapiens
gcaatccttacctggttagacggattgaggagctcaacaagagccattgctgctgagattgttctaaagggacaa

SEQ ID NO: 769597 - DNA, 83 bp, Homo sapiens
ctcggcaaaacggccacggactctgacgaaagacaatgcagatcttcgtgaagactctgactggtaagaccatcaccctcgag

SEQ ID NO: 769598 - DNA, 96 bp, Homo sapiens
ggtcttacagcaaactcttccaccaccagtgttccagatgcttctgactaagctcccaacaattagtcagttttttgctccactcaagcctgttag

SEQ ID NO: 769599 - DNA, 74 bp, Homo sapiens
ctgaagtcggtgtctgctgcgttcacggcaggattcggttagggaatgggtactgttcaaaaaggaatgcccca

SEQ ID NO: 769600 - DNA, 82 bp, Homo sapiens
cagcaagatcggcaggcgagattgcctgacccaggcctgctcggccctcacagggagaaccaggtgcatcagcgcattgcgg

SEQ ID NO: 769601 - DNA, 75 bp, Homo sapiens
tcgtgtgcctgatgatcacgcagctggctggcttcagtggaccaggcatgagccagaaggagagctctaagtctg

SEQ ID NO: 769602 - DNA, 75 bp, Homo sapiens
gccgccgcctgtgcgcctctgctgagtcgtccgtgtgaacgtggttcagaacaacctggccctactcatctacct

SEQ ID NO: 769603 - DNA, 98 bp, Homo sapiens
ccagcgtgggcagccgggagatggccgaggccttcgccggggagatccctaaggtcctcgtagccggatgatgcagaacttactcttggaagaaggcg

SEQ ID NO: 769604 - DNA, 98 bp, Homo sapiens
gcctcgggagtcggcgtccaggctcggagcgcgacacggagactaggtggcaggtggagccccctgagctgcccgctgatctgcagcactggatctcc

SEQ ID NO: 769605 - DNA, 82 bp, Homo sapiens
ggccagctacagcccccatatggaactgtggctgcaccatctgtcttcatcttcccgccatctgatgagcagttgaaatctg

SEQ ID NO: 769606 - DNA, 83 bp, Homo sapiens
tgcaggcctcctgctgctcctgtttgtggttctccaaggagaagtacatcctggactcatcgccagagaaactccacaaggaa

SEQ ID NO: 769607 - DNA, 85 bp, Homo sapiens
tccagatgtccttctaggctcaacagaatattccacctgccttgacatgtgccctggttgttgctatgaaacagctatgacaaga

SEQ ID NO: 769608 - DNA, 101 bp, Homo sapiens
actccatactgaggaggaaaattataatgtggttgcaccaggctgtctttcacaatccaggagttatggtacagcacctgtaaatcttaacatcaagacag

SEQ ID NO: 769609 - DNA, 80 bp, Homo sapiens
agatctgaagacctattttactgataagaaaacacatctttacacactaactggtgaaactgcgtgctgtaagctgggac

SEQ ID NO: 769610 - DNA, 50 bp, Homo sapiens
ttcacatatttgctcaacaaaatgatcagcgtctgagagaagaaatggaa

SEQ ID NO: 769611 - DNA, 90 bp, Homo sapiens
gatcccttcactctcggaagtgttccggtgacagtggatagtggaaacaggagatcgtggatcctccttcaaaaatggaggatggaaagc

SEQ ID NO: 769612 - DNA, 133 bp, Homo sapiens
cagcaactgtgtatgccagattcacagatttattgtgaacactctgaaagacggaaggtatgggatgcgatatgtggccaaagtcctgaaggcaactctggcagagaaattccctgacgccacagacagcgag

SEQ ID NO: 769613 - DNA, 100 bp, Homo sapiens
aactaagaccaagtcctcgctggactgctcagggtgccagacctcatcgtgttcctccaagaaaagctggttatattgaagacctggttttgatgctgcc

SEQ ID NO: 769614 - DNA, 74 bp, Homo sapiens
aggacacctggaagccgggaaatgaggttctacgtggcttcctcccggcagctgaagcgcctcgagtcggtcag

SEQ ID NO: 769615 - DNA, 75 bp, Homo sapiens
ttaatgtgttggggcgcgagaggaaggcggtgcttatttcgaatcatgcccccttacccaggaatggaacaacct

SEQ ID NO: 769616 - DNA, 100 bp, Homo sapiens
cccgatctccccagcagcagcaacagcagcgtcctccccaccccacctgccaccgaggccccctcttcgcctcctccagcaaagatttctgaagacgtct

SEQ ID NO: 769617 - DNA, 50 bp, Homo sapiens
caaactctggctggagtcacacattctcctcaagagttactgatctatga

SEQ ID NO: 769618 - DNA, 53 bp, Homo sapiens
aagaaatcctgataagaactgctttgacccagatgatgtggtaccagttggcc

SEQ ID NO: 769619 - DNA, 97 bp, Homo sapiens
tcagttttctctgccagtgtctgggtgggaaagaacatggtgttccaatcctcatctctgagatccatccggggcaacctgctgatagatgcggagg

SEQ ID NO: 769620 - DNA, 100 bp, Homo sapiens
aggatcgtcaggctctaaacaaaattctggcccgatgagagaaagggaaagttaaggatgctggagcagaacaatggatttctctttctctttcatgcaa

SEQ ID NO: 769621 - DNA, 82 bp, Homo sapiens
ccagcgcctcttctaccggggcaagcagatgtccagctcgccgctgtccaagaaacgtcgcgtgtccgggcctgatccaaag

SEQ ID NO: 769622 - DNA, 85 bp, Homo sapiens
cctggaagttgtgctttttaagttttcatggagtgataatgaaaggagcagcagccgcattaatatcccagagagagcaagtgga

SEQ ID NO: 769623 - DNA, 51 bp, Homo sapiens
cttgccgcacaaaaagctagagaggtggttattaacttggtgatgcttttg

SEQ ID NO: 769624 - DNA, 75 bp, Homo sapiens
ggatgcgcaaggtggagagccgcggggaagggggcagagaggcacaacccgatctcccagagaaggagaagtgcc

SEQ ID NO: 769625 - DNA, 75 bp, Homo sapiens
agcacatgcagcccatctgctgacattgggactactactgagatactggttccagaactctgtgctatacatcca

SEQ ID NO: 769626 - DNA, 76 bp, Homo sapiens
tataccctgaagagccaactagacatcttgagcctcctgaaacaggcggtggaagcagggcagagccgaagcagcc

SEQ ID NO: 769627 - DNA, 100 bp, Homo sapiens
aagcagcagtttatctgatatctatcaggctacagctccagttggaggtccaaaacgtgttctcgtgactcagcaatttccttgtcagaatccattacct

SEQ ID NO: 769628 - DNA, 100 bp, Homo sapiens
agaactcgatggtgttgtgagagatttctgcagtgaagattgctgtaaaaaatttcaggattggtactacaaggtcgatggccaggtggtcttcataaac

SEQ ID NO: 769629 - DNA, 75 bp, Homo sapiens
gaagaagttgcgaaggatccccaacggggaggccaacgtgaagaaggcgccctgcgtccggcagaggaggcgagc

SEQ ID NO: 769630 - DNA, 75 bp, Homo sapiens
atcttcaaagaatgatatttccaaagtttgcagaaaagaatatgaggttttagctaaagaagatactgaggcagc

SEQ ID NO: 769631 - DNA, 102 bp, Homo sapiens
gaggtggtggaagaaactgtggcagaggtgactgaggatcagggagcttccaaggcatttgatacctttttgatgggaagaagggctctgaggagctccaag

SEQ ID NO: 769632 - DNA, 75 bp, Homo sapiens
gggctggtatcattcccatcctcatataactgtttggccttcacatgttgatatggctcgtggacagcagaaaat

SEQ ID NO: 769633 - DNA, 90 bp, Homo sapiens
cgcacggagcggccgggggctcggccgggccgtcccggcctgcgcagcctgaggggccctcctcgccaaagacagcctagagaggacggc

SEQ ID NO: 769634 - DNA, 96 bp, Homo sapiens
cgactggttgaattcgtggatgcaaaacctgtggatacagagggacagaggcctactgtacatggcacatggcgtcctgcctctgcggctctgccc

SEQ ID NO: 769635 - DNA, 51 bp, Homo sapiens
gaccactcggcgcacagagaccacggacattctgagcatgtgagacctgag

SEQ ID NO: 769636 - DNA, 75 bp, Homo sapiens
gaggagcactttgaggacatggcctccgacgaggacataaaaatggctacaaacttcctagcacatgagaagatc

SEQ ID NO: 769637 - DNA, 100 bp, Homo sapiens
ccggctcggctctcgctgcggcagacgggctcccccgggatgatctacaggcttgtccagccggaagccctgagggcagctgttcccactggctctgctg

SEQ ID NO: 769638 - DNA, 100 bp, Homo sapiens
tcgtatagtcttccgtcacttagctgaccatgggcaactttctgggatccagcgagcgacatggtttagtaatgtcatcagagcccacactcgcctcgag

SEQ ID NO: 769639 - DNA, 82 bp, Homo sapiens
caaaggcagcattctttctttccttaggaaaaaattcgtattttacatggagaagtgaacaaagtgaaactggatcagaaaa

SEQ ID NO: 769640 - DNA, 82 bp, Homo sapiens
aacgagatcagctccctcaaaggagggtgtgaagacagagaatgaccacatcaacctgaaggtggccgggcaggacggctcc

SEQ ID NO: 769641 - DNA, 98 bp, Homo sapiens
acagaaggtggagcccgggcggttgctgatatgtgttcaagatgagtgggatgggagaaaatacctctgacccctccagggcagagacaagaaagcgc

SEQ ID NO: 769642 - DNA, 97 bp, Homo sapiens
cggcgtataccaacccaccccacatggcccacgtacctcaggtggtagccctcggagaggtaccagatgggactgtggttactgtcatggcgggtaa

SEQ ID NO: 769643 - DNA, 98 bp, Homo sapiens
gacgggtccaggaaagaggaggaggaagacagcacattcaccaacatttctcttgcagatgacatagattcccgacagttaagcaatggggagacatt

SEQ ID NO: 769644 - DNA, 100 bp, Homo sapiens
tgtggtggcttccgtttgttggtggaggaggtggcaggcctcggcgataatgctctaccacaagaaaatggcctctcacctggggccattgctggcattg

SEQ ID NO: 769645 - DNA, 100 bp, Homo sapiens
ccccgaatatgaaattgcatgtgaacacgaacactctaattgcctcctgatagcacacagaaaggggtatagaacaggctatgcttacaggcatcctctc

SEQ ID NO: 769646 - DNA, 80 bp, Homo sapiens
accccgcggccgcaccttcccgccttctcagctggcccgagataacttcttccgctgtggtgtgctgtatgaggactccc

SEQ ID NO: 769647 - DNA, 75 bp, Homo sapiens
gtcgcgtctcggaaaccggtagcgcttgcagcatgggtaacaagatgctcaactatagtgctcccagtgcagggg

SEQ ID NO: 769648 - DNA, 83 bp, Homo sapiens
tgagggcagcgccggttccttgcggtcaagatgctgcaaaacgtgactccccacaataacagaagatggctgtgccacccacg

SEQ ID NO: 769649 - DNA, 86 bp, Homo sapiens
gttcttgtttgtggatcgctgtgatcgtcacttgcaaattgtggctactaatttgccccctgaagatcaagatggctctggggatg

SEQ ID NO: 769650 - DNA, 82 bp, Homo sapiens
gagacggtcaacatctggactcacttcctgcccacctgacctcctgccccccgaggtctgcagtctcctgaacccagcagcc

SEQ ID NO: 769651 - DNA, 100 bp, Homo sapiens
tgtccctgaccatggctccctgcagtaccctttaacgggctgtcacatggtgactgaagaacttcattccataacgtttgaaacacagatctgcctctat

SEQ ID NO: 769652 - DNA, 100 bp, Homo sapiens
caaagccctgcagcgcctggtgaagaagcctgtgcccaagctcatcgagaagtgctggaccgaggacgaagtgaggggtctggttgctgcttacagtggt

SEQ ID NO: 769653 - DNA, 75 bp, Homo sapiens
ttcgttcagtgggacttgcttcacgggtgtccgcaatgttgccagtgtctgtctgcagattggctacccaactgt

SEQ ID NO: 769654 - DNA, 100 bp, Homo sapiens
ccagcagctgtgggagccccgagaacgcctccagcggggatgacacagaagccaacaaatggaattttcttgagcatgtttctaatcgttttgccattgg

SEQ ID NO: 769655 - DNA, 148 bp, Homo sapiens
gtggccaccaagcagggcaacgctgtgaccctgggagattactaccagggccggaggattaccatcaccggaagtctggagcccggcactgtggtcataacagagcaggcagtggatacctgcttcaaggcagagtttgagcagattg

SEQ ID NO: 769656 - DNA, 83 bp, Homo sapiens
aaggaatccatgtttcttccaagaagcagacttgggaagatccccatgaaaaagataagagcacgaactgctttggagataat

SEQ ID NO: 769657 - DNA, 51 bp, Homo sapiens
ctggatttagtgaaatgccgtatgcagaaaacaccacagggatggcgagaa

SEQ ID NO: 769658 - DNA, 90 bp, Homo sapiens
cgcctgtcttcatccaccgtggcaatatcctattccccagaccgagggaaatcctcattgacgattcaatttgttgaaggccaatttgtg

SEQ ID NO: 769659 - DNA, 88 bp, Homo sapiens
gtcgacggtccccactttcccctgagcctcagcacctgcttgtttggaaggtgaaaggtgtagcagtcactcggcctacacccacagc

SEQ ID NO: 769660 - DNA, 75 bp, Homo sapiens
ggacacgcaggaacggctccagcatcaagatccgtctgacaggtaccagctggaggatgagtctgcgcatttgga

SEQ ID NO: 769661 - DNA, 100 bp, Homo sapiens
atcagtgacttgtatgagcccattgatgatggttgtgagagccaggtggccaagactaagcagcagattgaggagcagcgggtgcaggtgcaggtggtgg

SEQ ID NO: 769662 - DNA, 50 bp, Homo sapiens
gtcggcgagcccccgcggcgacagggggtgaagccagccagttttgacaa

SEQ ID NO: 769663 - DNA, 75 bp, Homo sapiens
ggccgcaccttcccgccttctcagatggaaatcatattatgtagaatacttgggtgacatctgcctgagagatct

SEQ ID NO: 769664 - DNA, 83 bp, Homo sapiens
accaggaggaggttttcaggaccaaaattgtggaaaagtcactctgggactggtgattgcagctggaagtgcccatgaccgag

SEQ ID NO: 769665 - DNA, 89 bp, Homo sapiens
cggaacgaaagtgaacaggagccgctcttaggcgacacacctggaagcaggatctggaaatagtatattcctatttacatggtatggaa

SEQ ID NO: 769666 - DNA, 51 bp, Homo sapiens
gggtggacaatgctctgttgtgccatttccaaagcagccaggaacatcagg

SEQ ID NO: 769667 - DNA, 74 bp, Homo sapiens
taaccctagcactttgggaggccaagagatggacagagacgtatgtgcgttggtctcctaagggcacctacctg

SEQ ID NO: 769668 - DNA, 102 bp, Homo sapiens
caaatgaaggccaagagaaccaagttggaatggtaacaaaaccagcaaatgaacaatcccaggacttctcaatacacaatgaagattttccagcattaccag

SEQ ID NO: 769669 - DNA, 91 bp, Homo sapiens
ctgggaaactccccatgcagccccctctcagctccatgagctccatgaaacccactctgtcgcacagagtcttgctctgtcacccaggctg

SEQ ID NO: 769670 - DNA, 100 bp, Homo sapiens
gaagcacctcatgcaagcgagggacctgggactgctcacagccaggacccagatgatgtggtaccagttggccaaagaagagcctggtgttggtgcatgt

SEQ ID NO: 769671 - DNA, 96 bp, Homo sapiens
ttcagaaggaacttgcagaaatcacattggaccctcctcccaactgtagatatgggaaggttggctgtatctcacttccacttcgtgagatgaccg

SEQ ID NO: 769672 - DNA, 75 bp, Homo sapiens
gaaaatgagcctcgcgaggccgacaagagccacccggagcaggtactccaaagattcaggtttactcacgtcatc

SEQ ID NO: 769673 - DNA, 85 bp, Homo sapiens
gcgttgctatacagaatctttggatatgtgcatcagtggtttatgccaatatttaggtcagttaacgtccataccaggatacctg

SEQ ID NO: 769674 - DNA, 83 bp, Homo sapiens
gggacattattgcgcgtggaacggctgcttttggaaggctgtctgtccccagaccccagagcacgtccggcaccaccatgact

SEQ ID NO: 769675 - DNA, 50 bp, Homo sapiens
gctacaaatgcctctgtgatccagagagctggcggtcaccatggcaatgc

SEQ ID NO: 769676 - DNA, 83 bp, Homo sapiens
ctggctcctgtcgacttggtggtcaaaaagccaaatcaccaaaatgtccagttagaacaagaatttagcattctgcaaaagaa

SEQ ID NO: 769677 - DNA, 100 bp, Homo sapiens
agcaggaagggagatgcagcatcccagtttttggtcttctgtcaaaaacacagggatgagtttctccggatctgcgctgacctcttccgcctggtgccgt

SEQ ID NO: 769678 - DNA, 100 bp, Homo sapiens
cttgtgtttgtcaagcattttcaattgtatttccgttcatttacaagttattttctcttcttctgaaaaagagatcttgggtctcattctgtcacccagg

SEQ ID NO: 769679 - DNA, 55 bp, Homo sapiens
gggcagaggctgcggagccccaggagggtctatcagccacagtctctgcaagttt

SEQ ID NO: 769680 - DNA, 100 bp, Homo sapiens
ctgtgtaccgtgcaagacggaagcagtttgctgacattgcctacaactaccgccagcaagataacccctgtgacagaaggctactgttgctgtaacaaag

SEQ ID NO: 769681 - DNA, 74 bp, Homo sapiens
ccggcctagcgtcctggaattacttcaatcaagttcgagaacttgtcttggacaattgcaaatcaaatgatgga

SEQ ID NO: 769682 - DNA, 98 bp, Homo sapiens
gcggcaccggatcaccaagacggagtaaacaaatccgagctatgctgggccagttcagccaggcagaagccttattaatgaaagctggagtgcagcca

SEQ ID NO: 769683 - DNA, 50 bp, Homo sapiens
cagcacaccgtaccgacagtgggcatccagatggtgtgtgagacgttgac

SEQ ID NO: 769684 - DNA, 100 bp, Homo sapiens
agaaaaactggctctggatctccgattgtcaagttctcgagcagcttctatatatcctgctggatgacattgtccttacccattctctcttcctcccgac

SEQ ID NO: 769685 - DNA, 74 bp, Homo sapiens
caccctggtggcctttccctccagctctgtctatcctaccaagctgcaagctttcttcctggtggcagatgaca

SEQ ID NO: 769686 - DNA, 90 bp, Homo sapiens
acaaggagggaaaaaagagcaggtggaaaaggaaaggtacggggctgatgttgacgtcaaccaccacctgactcctgatgtccagcctcg

SEQ ID NO: 769687 - DNA, 100 bp, Homo sapiens
cagagccgtgcatggggctgctccccaggacctgagcaggaacctggagttttcagctgtccccaatctcttcatgctggaaacagtggattctgtgaag

SEQ ID NO: 769688 - DNA, 100 bp, Homo sapiens
gaggagaaggcacccgcggaaccgacggctcaggtgccggacgctggcggatgtgcgagcgagatctgggacatgagcgatgatgagaccatctgagatg

SEQ ID NO: 769689 - DNA, 75 bp, Homo sapiens
ctccaagcagctctacaccgtggccgtctcctgcctcctgcttgcaaatgttcagcctgttgcctatgaagagcc

SEQ ID NO: 769690 - DNA, 83 bp, Homo sapiens
tggggatcttcgcactatcccaagattcccagaagttgtgcatgagttcctgtgaggagagttggcatcttggaaatcaaaga

SEQ ID NO: 769691 - DNA, 105 bp, Homo sapiens
ccgacatcaattacgccaatgtggacggactcactgccctgcaccagacaatgcagatcttcgtgaagactctgactggtaagaccatcaccctcgaggttgagc

SEQ ID NO: 769692 - DNA, 75 bp, Homo sapiens
ttaaggtcttcagcggggcgctccaggaggcactcacaggtcaaaatgcagatcttcgtgaaaacccttaccggc

SEQ ID NO: 769693 - DNA, 82 bp, Homo sapiens
caaattaaagcaattatgaaagaagtcattccttttttgaaggggatgttcgtctaaccccagaagactttgctagagctca

SEQ ID NO: 769694 - DNA, 100 bp, Homo sapiens
cgcactgtagctgagccaatggagttactcgtagtcgagaggccggcatcactggagtggtggcgcagctgtttcctccgagatgggatctcgctgtgtt

SEQ ID NO: 769695 - DNA, 96 bp, Homo sapiens
taggatatcagcactaaacatcgtgggggatctcttacggaaagtaggggcatcctctggtatcacgattccaaaacccccaaagccaccagataa

SEQ ID NO: 769696 - DNA, 75 bp, Homo sapiens
gaggaaattaatgcaaattcaagcagagtgtggaggtatcctgactggtccttacggttctattaagtctccggg

SEQ ID NO: 769697 - DNA, 100 bp, Homo sapiens
cggggccccagaggccgcggacaccgacctggagatggaccagcttttgggaaatatgattgaaatgtgggttgatcgaatggacaacattacccagcct

SEQ ID NO: 769698 - DNA, 101 bp, Homo sapiens
tttcttgtgagttgaggtgaacatctgaatcccctcggggaactgaggtgaattcatcattggccgagttatcaaagccatgaataacagctggcatccgg

SEQ ID NO: 769699 - DNA, 51 bp, Homo sapiens
aactgaaaatgacattgctaattatgaatcaaatgcaacaggaaaaagagc

SEQ ID NO: 769700 - DNA, 83 bp, Homo sapiens
ggagcaggagaaggcctggaggaagcagtcccgcaggaagattgtaaaccatggctgtgtggatacaagctcagcagctccaa

SEQ ID NO: 769701 - DNA, 51 bp, Homo sapiens
gcggcgtgtcaggtggttgcggagctggtatcatctttatcagaaagtgag

SEQ ID NO: 769702 - DNA, 75 bp, Homo sapiens
tactgggtcagcttcatcctcggcggcggtggccgctagctccaaggaagatggaggaacattgggaggctcttt

SEQ ID NO: 769703 - DNA, 75 bp, Homo sapiens
ggcctcattttgctgatttctcttgagctcagggctcgtgcaatccgcttcagacaggatggtaacgaagccgtc

SEQ ID NO: 769704 - DNA, 93 bp, Homo sapiens
cgtggccttagctgtgctcgcgctactctctctttctggcctggaggctatccagcggaagatcagttttcctgccatccaggctgctccctc

SEQ ID NO: 769705 - DNA, 50 bp, Homo sapiens
gagggtctgcaagcagatgataaagcacaacattctgaaattttttggtt

SEQ ID NO: 769706 - DNA, 82 bp, Homo sapiens
attattgcgcgtggaacggctgcttttggaaggtgagacacagtaacctggttgaactctgcatctggaaagctgaagactg

SEQ ID NO: 769707 - DNA, 50 bp, Homo sapiens
gggctccggctggtctgtggtgaggagatcatgcacgccctgaagatgac

SEQ ID NO: 769708 - DNA, 101 bp, Homo sapiens
ccccgccgctcccgggggccgtgacggaaggcgacatgccaattcatgaacttctcagcctttatggttatggtagtactgttcgactacctgaagaagat

SEQ ID NO: 769709 - DNA, 50 bp, Homo sapiens
gtttggagaccagaatgatgatactctgaatcaggaaacccaggcccaac

SEQ ID NO: 769710 - DNA, 106 bp, Homo sapiens
ttttttcgaaagctgggtttcccgggagatcccaggcggtgacagagtggagccatggctagagggaactgggaacagccaggtgccccaaagcaaatacgcggag

SEQ ID NO: 769711 - DNA, 82 bp, Homo sapiens
caaggtcggcagagcaaggggcttacgcagaaggacctggccacgcccgttttacggagaagacttttactgtgaaattcct

SEQ ID NO: 769712 - DNA, 90 bp, Homo sapiens
ctgcatgaagacagtggctggcggtgcctggacgtacaagtccaagccttgtcatcggccagtaagtttgaagcagagttgaaagctgag

SEQ ID NO: 769713 - DNA, 100 bp, Homo sapiens
cagctggtggctggagcgaccccttgttctttggtggcgctgacaccattcgcttttcacccaagatgatttgatgtcttataaaactctgatgaaccat

SEQ ID NO: 769714 - DNA, 51 bp, Homo sapiens
ctggacccatgtcactgaccccctcatagctgctggagccagttctgcttc

SEQ ID NO: 769715 - DNA, 90 bp, Homo sapiens
cactgtgcatcgcccactccagaagtagcatggaaatggagggcatcttcaaccacaaagtcttcgagtgcttcgactgaccatgatccc

SEQ ID NO: 769716 - DNA, 98 bp, Homo sapiens
tgaccgcttgtgcctggggattccccctggtgaggaccccacagccgcccagcatggcccagcggcactcagacagctccttggaggagaagctcctg

SEQ ID NO: 769717 - DNA, 98 bp, Homo sapiens
cggaaggcgagtgccaggagggagagatcctggccacaggcagtacggcatggtgctcgaatgtgattgatggagacctctgtgagcagttcaattcc

SEQ ID NO: 769718 - DNA, 108 bp, Homo sapiens
aaatgctgcacatcccttaatagtcatctacataggagaggtctccagattctttttcaatgaggagaacactacctccaatagaagggactcttggcctttctgctt

SEQ ID NO: 769719 - DNA, 56 bp, Homo sapiens
atcattctgttgaagaaacgcttaacccaatggagtttcactcttgttgcccaggc

SEQ ID NO: 769720 - DNA, 80 bp, Homo sapiens
cgggccgtcaccctgcctcccctgcgtcccgccaccggccgcttctgtcctcggaatttatgcaaatattctcatgaggt

SEQ ID NO: 769721 - DNA, 80 bp, Homo sapiens
gactcgggagccggagctttggaacgaggagtggcgcccattaagcgtcaagctgatgttcctggagaccagcgctctca

SEQ ID NO: 769722 - DNA, 98 bp, Homo sapiens
ttccgatttaaagctgagctgcgaggaaaatggcggcgggaggttttaaaatcaaagatgggaaaatcggagaaaattgcccttccccatggccagct

SEQ ID NO: 769723 - DNA, 100 bp, Homo sapiens
ccgcgggaatgtcgacgaggagctgaggtcctggctataagtcaccatggcacagcaagctgccgataagtatctctatgtggataaaaacttcatcaac

SEQ ID NO: 769724 - DNA, 90 bp, Homo sapiens
caagctacactgaatatgtcttctaccgaattgaatgatctggcacgggaccctccagcacagtgttcagcaggtcctgttggagatgat

SEQ ID NO: 769725 - DNA, 100 bp, Homo sapiens
gggagtaacaccaactggaaaaccttgtatgaggtcaaatccgagaacctgggccaaggcgacaagggtacccagtgtgttgaacaaattcaagagttgg

SEQ ID NO: 769726 - DNA, 118 bp, Homo sapiens
aggactggggcctcattttggatatctgtgataaagttggtcagtctcgcactgggtcccaaaccagttgtcttcctgcaacatggcttgctggcagattctagtaactgggtcacaa

SEQ ID NO: 769727 - DNA, 75 bp, Homo sapiens
aaccttcgactatgcagagacatgagatggtagccaacccctcagttcgatcctttggtacagaagacagaccga

SEQ ID NO: 769728 - DNA, 101 bp, Homo sapiens
ccccaatcaagttcaccgaaaatcagtgaaaaaaggttttgagttcacactgatggtggtcggccagaacacaaagcgtgaatccggaagaaaagttcaat

SEQ ID NO: 769729 - DNA, 83 bp, Homo sapiens
gaagatgaagaaacccagcttgatatgttggttttaggagaagttttagcacaacttctgcttcttcccaaaaggagattaac

SEQ ID NO: 769730 - DNA, 100 bp, Homo sapiens
acagccacagtcagtgggaagctgaccctgcggatcaacgtgtgttactggcgagagatggttcctgggagctatggtgtgtcccaggcctttccgtgct

SEQ ID NO: 769731 - DNA, 75 bp, Homo sapiens
cgagaactggaaggctatgataagagcaaaggcacaacaccacttgctccaccacctaaacctgttcgaagaaga

SEQ ID NO: 769732 - DNA, 99 bp, Homo sapiens
ggccgccctggggacgcagacgccaaggcccctccggccagggccgggagccgggccggcctagccaggaatggccaacctgctgacgggccccaaacg

SEQ ID NO: 769733 - DNA, 100 bp, Homo sapiens
acagtcacaattttgtaataagcacaatcctggaggaagagaaggctcagcaagaagagcgcatgaggatggagtccagaagacaggccacagtgtcctg

SEQ ID NO: 769734 - DNA, 82 bp, Homo sapiens
gcaacttacccgagaacgtgcgggaagagaagatcatcgagcatttcaaacgttctccaaggagaagtacatcctggactca

SEQ ID NO: 769735 - DNA, 82 bp, Homo sapiens
agttataccaagtggatagtagaacttatctactggatttccgtagtattgatggctcttcctggagaacagcaagctggag

SEQ ID NO: 769736 - DNA, 100 bp, Homo sapiens
tgcaaggggtgtttttccgtaagcatactcagtgaaggtggtgtttttaaggctcatcttactttcccaaaagattatcccctccgacctcctaaaatga

SEQ ID NO: 769737 - DNA, 100 bp, Homo sapiens
agtccttaaaggtttccaacattcctgtcactgctattaggatatcttatactgattgtgactgcagcgcggcagggacccagggcaacgcctgccggaa

SEQ ID NO: 769738 - DNA, 50 bp, Homo sapiens
gagcttatcagagctctacttgggaaatttggcacatggaagcatgcacg

SEQ ID NO: 769739 - DNA, 101 bp, Homo sapiens
cctctttgaaattgtaacaacgtctcgaactttctatgtgcaggataaagatggtgatagagcagttcaccatgcagcttttggagatgaaggcgctgtta

SEQ ID NO: 769740 - DNA, 49 bp, Homo sapiens
tgatcttggacttccagcctccagaactacggggtctcactctgtcgcc

SEQ ID NO: 769741 - DNA, 83 bp, Homo sapiens
agaaaatccacaagaacgcactttcctcccagacaacatctggggaagatgtacgagacttcacaaaggtacttaagaacaag

SEQ ID NO: 769742 - DNA, 74 bp, Homo sapiens
ctggccatcgttttcttcgcctccatagtgagaaggcaaccaaagtgcaggacatcaaaaacaacctgaaagag

SEQ ID NO: 769743 - DNA, 51 bp, Homo sapiens
ctgcgctcgcgcccggatccctcagggacacttgacattcagggacgtggc

SEQ ID NO: 769744 - DNA, 75 bp, Homo sapiens
aattgagcaagggagtgatgccggttatctctgtgaatctcagtctgaacagcagaagaagcaacaggaggctga

SEQ ID NO: 769745 - DNA, 89 bp, Homo sapiens
gctggctctggctgtggcaaatgtgactgccatggagtgaagggacaaaagatgccttcaattaagttgcagagttctgatggagagat

SEQ ID NO: 769746 - DNA, 80 bp, Homo sapiens
agccaaatgccagactgattgtcatgctcagggaccctgtggagagagatcgcggattcaggtgtggctctatgagcaag

SEQ ID NO: 769747 - DNA, 75 bp, Homo sapiens
gctcatcgacagggaaaacttcgtggacattgttgatgccaaggccctccacgcccttcaggaggagcaggccag

SEQ ID NO: 769748 - DNA, 98 bp, Homo sapiens
cagacatacatcatttaaagggcagaagctcctcctggggtagagacagatcttattgatgttggattcacagatgatgtgaagaaaggaggccctgg

SEQ ID NO: 769749 - DNA, 100 bp, Homo sapiens
tccgcagggccagtgagcaggtgtggcatgtgctggttctacctcaagatgtttgaggactaccccaaatctcggaaagcccttattccattcatctttt

SEQ ID NO: 769750 - DNA, 74 bp, Homo sapiens
tttggggcccgcgccgcgcgccggcggcaccatgaagtcagcggaggaaggccaagactaaggggctgcagagc

SEQ ID NO: 769751 - DNA, 75 bp, Homo sapiens
ctgtccagcatgactcatccccgggagtgttgactgcgctgagcacagacccaagtgtgctggggaagtaccgag

SEQ ID NO: 769752 - DNA, 125 bp, Homo sapiens
gacctgtacagcatcaactacctgcactttggggagcctaagtcctggagcctcctcaacaagcccaagagtgagatgaccccagaggagctgcagaagcgagaggaggaggaatttaacaccgg

SEQ ID NO: 769753 - DNA, 100 bp, Homo sapiens
gtttttcaggaagacttggccaggccgtgttccgtgtctctggattcaagtcccaggagtcctgaccagagagcagggccgttgctccagggagaactgc

SEQ ID NO: 769754 - DNA, 75 bp, Homo sapiens
ggtggaggaggtggcaggcctcggcgtgtactaatggtcacttgatgtgcgctggctgttttatccacctactag

SEQ ID NO: 769755 - DNA, 88 bp, Homo sapiens
atgcaagtgatgatggaatcttggccaaaatcgtgactgcctgcgctgctgacttaaggccccaacaccaaacacagaagcaacagcc

SEQ ID NO: 769756 - DNA, 50 bp, Homo sapiens
tggagctgcctgctgtgaacctgaaggggactcattggcgccccctgagg

SEQ ID NO: 769757 - DNA, 100 bp, Homo sapiens
ctggcacctgctgcctgcccagaggccacccagcctcctagacagaagctccaccatgaggcgaggtggatggaggaagcgagctgaaaatgatggctgg

SEQ ID NO: 769758 - DNA, 74 bp, Homo sapiens
acccaggcgcggagggaagacgccctggtgctcaccaagcaagggcaagccaagtctttgaagactgaagactt

SEQ ID NO: 769759 - DNA, 100 bp, Homo sapiens
aagagcctggttacagtttcgactcctctctgcaagtgaataggcccagaaaggtacatatgaagatccatgagaaggaccctaacagtgccacagccac

SEQ ID NO: 769760 - DNA, 82 bp, Homo sapiens
cttccagacactggaaaactggatgctgcagacactgaacgaggagccagtgacgctgaccggaaaggagattgagattgac

SEQ ID NO: 769761 - DNA, 73 bp, Homo sapiens
aggtctcacctgaggtgaaccttcgaccttggacttctcagcctccagaatgcgctggagagcgaggtggctt

SEQ ID NO: 769762 - DNA, 75 bp, Homo sapiens
gacaatttgcttgcgcttataagagcaacaagatatggatttggatatagaatttgatgtacaccttggaatagc

SEQ ID NO: 769763 - DNA, 100 bp, Homo sapiens
agaattgcagttagaagaagaagctgccgtttttcctgaagttgcgaattacatgaatgacagtcttcgaaccaatgtgtttgttcgatttcaaccagag

SEQ ID NO: 769764 - DNA, 80 bp, Homo sapiens
gactgattacaagaatcctatagaccagtgtaataccctgaatcccgtattgaaattgttggcggagatgagttcatttt

SEQ ID NO: 769765 - DNA, 82 bp, Homo sapiens
tgggtgagtgcaccgcgttctcgcacgcgtcatgggccgccttcaacaacaacgtgagcgtggcctacgagtgcctgagcgc

SEQ ID NO: 769766 - DNA, 75 bp, Homo sapiens
caggatgcgctgagccctacaacacccccagcggccgccggctcccccacgaggccactcttcacctccaccatg

SEQ ID NO: 769767 - DNA, 100 bp, Homo sapiens
ctcgagagcgtcatcgcccccgactgtggagaagtgtccggggtagccccgttacaggtcccctcttgctgttggctgcacatcaggaaggctgtgatgg

SEQ ID NO: 769768 - DNA, 100 bp, Homo sapiens
cctcggcctcccaaattgctgggattacagcaatactacatcctgctgatcctgacggacggcgtggtgaccgacatggccgacacacgggaggccattg

SEQ ID NO: 769769 - DNA, 74 bp, Homo sapiens
gtaacccgaataagctgtcagactttgatagattttaccaaatgttgcaagaactctggagttcttatggtagt

SEQ ID NO: 769770 - DNA, 100 bp, Homo sapiens
ggcacagggcctcgcctcactatggcagcagcacggcacagcacgctcgacttcatgctcggcgccaaagggaccagttactctccacaagaaaattcac

SEQ ID NO: 769771 - DNA, 100 bp, Homo sapiens
atatacagatggtccaggagaagctttgaaggctgtgaaggaaatagttgacaaacagggacataccaaagtattgagttttacgattccatctttatcc

SEQ ID NO: 769772 - DNA, 98 bp, Homo sapiens
agacaagctcagaactgagaagctgtcaccacagctatcatggtgaacttacttcagattgtgcgggaccactgggttcatgttcttgtccctatggg

SEQ ID NO: 769773 - DNA, 100 bp, Homo sapiens
tgggagatttggaacagctttgagaagagcaaggagatctgcccaaggagaatccatatgaggatgtggacttaaagagccgaagagcaggacgaaaatc

SEQ ID NO: 769774 - DNA, 101 bp, Homo sapiens
tcggcaagcgcgcagtgtcgactccccggtctatgccaggcgcatctcagagaatgcagaatctattgatcttaaacagtttttcgaccaacatttttcac

SEQ ID NO: 769775 - DNA, 98 bp, Homo sapiens
tcctccccatttccgcgctcccgggaccatgtccgcgctggcggcttccacagcgcggcacctgtacctccggggtggcgctggggttggctccatga

SEQ ID NO: 769776 - DNA, 83 bp, Homo sapiens
ttgccgatccgccgcccgtccacacccgccgccagggaaatgatggcgggaacacagcaaaggagaccatgtcctggagaggg

SEQ ID NO: 769777 - DNA, 100 bp, Homo sapiens
gcgacgcggggccatgtgcaggaccctaacgacaggcgcctccggcccatttacggtactccaaagattcaggtttactcacgtcatccagcagagaatg

SEQ ID NO: 769778 - DNA, 101 bp, Homo sapiens
aatgtcaccctcccagcaacagtggataaagcaacatttatggttggcagctatggacctcggcctgaggagtatgagttcctcactccagttgaggaggc

SEQ ID NO: 769779 - DNA, 100 bp, Homo sapiens
ggcgagtccgcgacggtcgccgcccacggcgagatgactgtccaagtgcctccaaagtgtacaaagcatcagattcagcagaagcaattgaggcttttca

SEQ ID NO: 769780 - DNA, 51 bp, Homo sapiens
ccctggaaccgcagacctctgggcttcctgctgctggaacccaatgtgaat

SEQ ID NO: 769781 - DNA, 74 bp, Homo sapiens
aagaagagttaaatgccctcaagtcgacaggggatgggaccctagagctaaatctgcttcgtaatgttgatgct

SEQ ID NO: 769782 - DNA, 80 bp, Homo sapiens
gtgtggccaacgagctcaacgccaggcgccgctcctttacaggggaggtcatcaaggcttgggacattgccatagccacc

SEQ ID NO: 769783 - DNA, 100 bp, Homo sapiens
cgcgcactttttggatcggcatctagtctttccgcttcttgaatttctctctgtaaaggagaatgtgaaaacctttgcatcttctgatagtctagccaag

SEQ ID NO: 769784 - DNA, 101 bp, Homo sapiens
cattgctacacatgctaaaagatgacagacttggacaacatgtcccaacattacatcccattggtagctggcagtgttgtgatggcttttgaagaagtatg

SEQ ID NO: 769785 - DNA, 88 bp, Homo sapiens
tggaggagctgctgctggacgccaaccagctccgcgagctgcccgagagagatgcaggtcagctcctccagtaccacaacttctgaga

SEQ ID NO: 769786 - DNA, 100 bp, Homo sapiens
ctgggcgaaaattggatgtgaaaatgaagccagaccgaggacattggctccctggattatcaagagtttgtagttgacattgaatccaggctgaggatgg

SEQ ID NO: 769787 - DNA, 100 bp, Homo sapiens
cccagcctcttcatttttcggtctggaatgatatttgctgcaccatcctttgatgacaagatcctggaagttgtagcaatatttgatagcatgcaaatgg

SEQ ID NO: 769788 - DNA, 50 bp, Homo sapiens
gcaacgtaaaatccttggaaaaggaacccagtgacttgattgtaaaaatt

SEQ ID NO: 769789 - DNA, 75 bp, Homo sapiens
gcatcggagtcttgcaggctaattcccaagcggaaattctagaattggccggcaatgccgcgagggacaacaaga

SEQ ID NO: 769790 - DNA, 100 bp, Homo sapiens
atgtctgatcccttgctcccatccctgcagcatgaacaaggtatggtctctctggcagtgatgtcctggataatgtagcatatgctcgagcgttcaacac

SEQ ID NO: 769791 - DNA, 80 bp, Homo sapiens
tggagcttcggaagaaggtagaggttctagagaacactaataggaagccctcaatctagaagagtagaggtccaaaggtg

SEQ ID NO: 769792 - DNA, 98 bp, Homo sapiens
cggagtctcagtctgacatccacactcgaaaacctttccccgtcagcaaagcatcacaatcagaatggcaaacatcagcagatctcaggcagacttca

SEQ ID NO: 769793 - DNA, 76 bp, Homo sapiens
atcccaactgagctggatcaactttgtgtccctggtgatgttggaacattaatgatggaacatggccaaacttcag

SEQ ID NO: 769794 - DNA, 100 bp, Homo sapiens
cagcaatggcggaaggagaagatgtgccgccgctgccaacgtcgagcggcgacggctgggtcgtctactcaatttgagctgctccacagttcccaccttt

SEQ ID NO: 769795 - DNA, 101 bp, Homo sapiens
agcttcggataatgaagaggaggaggatgagaaaggcaacagcggaagcaatggcaccagcatgatatcattgatcattcctcccaaagaccagatttcac

SEQ ID NO: 769796 - DNA, 46 bp, Homo sapiens
gctttaaagaatacacttcaacaatttgcaacccaaaatgtcttta

SEQ ID NO: 769797 - DNA, 90 bp, Homo sapiens
gtggagacgctccgtgcctgcgaggagtatctgcggcagcatgacaaggaagattgttgatcgaatcgacaatgatggggatggctttgt

SEQ ID NO: 769798 - DNA, 74 bp, Homo sapiens
cgggaactagaccggagtggaaccaggaaaggacacattgtgatcaaggctgagggtaaaaagctgggattggt

SEQ ID NO: 769799 - DNA, 100 bp, Homo sapiens
actccccagagaagaaggactctgatttcttcacagaacacactcaattgttgaatgttgggtcacgaagatctcaacctggccaaagaagagaacccag

SEQ ID NO: 769800 - DNA, 99 bp, Homo sapiens
tcagctggatattgagatggaaggatgactatgagtatgagctattatagaaaccatgatagaagaagtcagagatgccatggaaaatgaaatgagaac

SEQ ID NO: 769801 - DNA, 75 bp, Homo sapiens
aagaaacaagccgtggaataggtgtatcaagtaatggtgcaaagcctgaaggactgctgagatgtcctctattct

SEQ ID NO: 769802 - DNA, 96 bp, Homo sapiens
ggcaggcaatgtggtcaattcaggagggatggtcatgaaaattggagcctgcccctcggcccataagcccttgttgggaactgagaagtgtatatg

SEQ ID NO: 769803 - DNA, 75 bp, Homo sapiens
gccccagatcagttcattggcatctttgctcaaaatagacctgagaatgtttctccatcccagagagatgaagta

SEQ ID NO: 769804 - DNA, 78 bp, Homo sapiens
tctccagaatttggaaactattttgccatggtctccatgaactgatttttttgtgcagtgggcaggaagaacccatcg

SEQ ID NO: 769805 - DNA, 100 bp, Homo sapiens
accaggactacagtaaggctgaaatcattgaagtgcttggagtgcagaactgaaagaggtatcgtgatttccgatacccacctggacacccccaggagta

SEQ ID NO: 769806 - DNA, 100 bp, Homo sapiens
gctgtctgcctcggtacctgttactgctgctacttcctcgtttgacaccttcctggggttcatagtggcgtcatgcacgcagactcctgcaagttcccct

SEQ ID NO: 769807 - DNA, 75 bp, Homo sapiens
gtcggatttcaccacaagaagggctgccagctccagcggcgccatgagcaaatgaaaaagaatttggaagcacag

SEQ ID NO: 769808 - DNA, 83 bp, Homo sapiens
cgcagagcgccgaggaggctttcctgctggtggcaaccgcctacgagacactcaaggatctcaaagatttcatgagacaagct

SEQ ID NO: 769809 - DNA, 129 bp, Homo sapiens
ctggggcccgccgccccgcgggggagggcggagctggcgcggcccctagctttctccttctggtgtggggcccgagaagaacatgagctgcctgtggacatggaaaccatcaacctggacagagatgca

SEQ ID NO: 769810 - DNA, 74 bp, Homo sapiens
ttttgatttatcacatttctggagcaagtacagatgaaaactttcggaagagaaagttgcctgtggtaagttca

SEQ ID NO: 769811 - DNA, 100 bp, Homo sapiens
caccatgacgtccatccatttcgtggttcacccgctgccgggcaccgaggaccagctcaatgacaggagttaaagttcctcgtaattttcgcttgttgga

SEQ ID NO: 769812 - DNA, 82 bp, Homo sapiens
aagagattcagccagcacactcctcgcgagcaaggtcacccgtgtgaacagaaagtgagaggttgtagcacattgccaccgt

SEQ ID NO: 769813 - DNA, 96 bp, Homo sapiens
tggtcactttatttccatagaagacaataaggttctgggaacacataaagtcctcctcatgcagaagtaccggcggtgcggctttccgcagctgtg

SEQ ID NO: 769814 - DNA, 75 bp, Homo sapiens
tgttctgtagtcagcacaaatctgaagatggtgtcaaagagaaattctggtgcagtagacattgttgcaatcatg

SEQ ID NO: 769815 - DNA, 100 bp, Homo sapiens
aagaaaaccccgaggagccctgttccaaagcctcctggaccgtccaagaaagtgggaagctttggggtggccggtttgtgggtgcagtggaccccatcat

SEQ ID NO: 769816 - DNA, 83 bp, Homo sapiens
acttctctggggactctgaacttccctggtcgaacagttttttctaatggctattcaaggcaaggagggcaccatgagctggc

SEQ ID NO: 769817 - DNA, 100 bp, Homo sapiens
agcagctgcgccgggaggcagagcggctcagccagcggcagacagaacgggacctgtgtcaggtgaaagcagccttcacaagagcttacaataaggaagc

SEQ ID NO: 769818 - DNA, 82 bp, Homo sapiens
taccgactgcttttggaataaaaagattcccaggatgtgagcaacacgggaccgatgactgtccaagtgcctccaaagtgta

SEQ ID NO: 769819 - DNA, 98 bp, Homo sapiens
ttctctgaggcggcgagagatggtcaggtctggagctcgaccgggccagcaaggggccagcagcaattgaagaatgctgtaattggtttcataaaaga

SEQ ID NO: 769820 - DNA, 50 bp, Homo sapiens
caaccccttcgagcaagacgtggaaatggaatctatttggaatttgcaga

SEQ ID NO: 769821 - DNA, 99 bp, Homo sapiens
agccgggatctcaggtcctcgggggcggcggccacgccaaggacggaccagtattaaagagggacagctattgaagcaaaccagttctttccaaaggtg

SEQ ID NO: 769822 - DNA, 99 bp, Homo sapiens
ggaagaggagcaagggcctgcagatcatcctatgtctcctttcctcttgggccgggcactttgggctgccagtcggttcactgttgctatgtcccctga

SEQ ID NO: 769823 - DNA, 75 bp, Homo sapiens
gctgcccccacacgacagtgaggacgctggtcagaaacattttggggctactgtgtgcaagtcttgtggtatgat

SEQ ID NO: 769824 - DNA, 109 bp, Homo sapiens
acattccaattcaagaggaggagaggggttgttttataaactgcctggccgaatcagccttttcacgctcaagtatgcaaccgaggatggacttatacacacaaatgac

SEQ ID NO: 769825 - DNA, 83 bp, Homo sapiens
caagacaccagggaattgaatttacaagattttagtcatcttgaccacagactgcactttaaattctggatgacagacctatc

SEQ ID NO: 769826 - DNA, 76 bp, Homo sapiens
acggacaacctcagaggacaacgaagtgttcgattccgaagaggctcaatctgtaaatccttctagtgttgatgaa

SEQ ID NO: 769827 - DNA, 100 bp, Homo sapiens
ctgactgtggagatggcggctcagaagataaacgaggggctggaacacctcgccaaagcagagaaatagcatcaagcatgatggaaccatgtgtgatacc

SEQ ID NO: 769828 - DNA, 75 bp, Homo sapiens
acagtcctcgtcagcactgactttcagctatggaatcgcgtgaagcctctgcgggccttcttttcgtcttatttg

SEQ ID NO: 769829 - DNA, 139 bp, Homo sapiens
cactatgaagcccctctgttggaacgtctttcccagttggactcttgtgttcatcctgttctagcatttccagatgacttcacgaaaacctcgtgaagagcgagatgtgtctcaatgtgaaagtgtcgcttccactgtt

SEQ ID NO: 769830 - DNA, 75 bp, Homo sapiens
cggagctgggcgacgagctgaccctgggagacatcgacgcatgtattccactgatgagaacctgatcctttcccc

SEQ ID NO: 769831 - DNA, 82 bp, Homo sapiens
caagctgaccaagaagccaaagaactggctaggcaaataagctttaagtactgccaaatctgtcgaaagggagataatgaag

SEQ ID NO: 769832 - DNA, 75 bp, Homo sapiens
actgggtcaccagagtttgagagagtatttcgggcacaaattggcagagggggtcgatttgggaggaaaggtgtg

SEQ ID NO: 769833 - DNA, 88 bp, Homo sapiens
tcaagggagtcgaccccaacagcaggaatagctcccggaaggagtcaagactgagaacaacgatcatattaatttgaaggtggcgggg

SEQ ID NO: 769834 - DNA, 86 bp, Homo sapiens
ggcggcggggccagaggctcagcggctcccaggtgcgggagagagacaatgcagatcttcgtgaagactctgactggtaagaccat

SEQ ID NO: 769835 - DNA, 75 bp, Homo sapiens
gctgtggctgaactacgacaacacattgctgagcttgaaatccagatcatcaatgctgtggtactgttgatttta

SEQ ID NO: 769836 - DNA, 106 bp, Homo sapiens
tcatgttgttgccgtgtgtgctggaaacaaaatattcatgctggatattgagattgcgcagtctctttgtggagaggacttgatcattaaaggaatcagcgttcat

SEQ ID NO: 769837 - DNA, 75 bp, Homo sapiens
ctggcttcagaaaaggatgctgcagccatggagagcaacgtgaaagtgcagagggttgtgagtcccggcccagcc

SEQ ID NO: 769838 - DNA, 100 bp, Homo sapiens
cgctctcttcctggctgcgtccctagggcaggaagatcccaacagtttgcgccataaatataactttatcgcggacgtggtggagaagatcgcccctgcc

SEQ ID NO: 769839 - DNA, 98 bp, Homo sapiens
ggggtcgtcactgtactggtatagcaatcaaatgattttctaccctagcaaggatggtacgaagattccaatgttcattgtgcataaaaaaggcataa

SEQ ID NO: 769840 - DNA, 90 bp, Homo sapiens
aggtggagctccggcagccgccctgggtcaggagacaaacaaccagtcggcctcccccagcagggggcagacccaagccccagcccaagc

SEQ ID NO: 769841 - DNA, 74 bp, Homo sapiens
cggagtcagcgatggtgcccggcgaggagaaccaactggtcccgaaagaggtgccaatgggtcatgtttggtta

SEQ ID NO: 769842 - DNA, 50 bp, Homo sapiens
atcctcctggccaccgactcctacaagacgatgagatgttctccgacatc

SEQ ID NO: 769843 - DNA, 100 bp, Homo sapiens
accccaagtgcacatggctgaccacccctaaaagcacctggccccgctacagcaaaccagaggtgaatgacgggctgtgcaacctgctcatcgcgccctg

SEQ ID NO: 769844 - DNA, 83 bp, Homo sapiens
ccaggacgacgaggagcagggcctgactgcgcaggaactgaaattaccattcacttttttaagtggacatattcatgaattga

SEQ ID NO: 769845 - DNA, 82 bp, Homo sapiens
gtttgcggttcagccctttgatgaccgcagcaggggtttgccaacttgttaataagatggaggagaatactggcaaggttaa

SEQ ID NO: 769846 - DNA, 101 bp, Homo sapiens
tacaacagatgagcaaagaatgacagcaagaggcaaaacttcggacatagaggccaaccaacctttggaggcattaagaagaaatgcactcaccatgagca

SEQ ID NO: 769847 - DNA, 80 bp, Homo sapiens
gtcatggtggacaaggtcctccagaaggcatgaaccagcaatattaccctgatgcactgccagtgaaagatgtagaagat

SEQ ID NO: 769848 - DNA, 100 bp, Homo sapiens
gggagaaatccccactcctccaagaaccaacccccaaattggctgggacaggatgagctttctgatgttagccaaggcggatctaaagctaccactccag

SEQ ID NO: 769849 - DNA, 100 bp, Homo sapiens
gtctatgtcccggaactcctccattgccagtgatatgttggtcaaagaaaaagtgatgtatgaaaaagaggcaaaacaacaagaagaaaagattgaaaaa

SEQ ID NO: 769850 - DNA, 90 bp, Homo sapiens
aaaagacctattatgagaggcttccatatcgaactctcagaaattgagcccaatgtattccttcgaccttttctggaagtgattcgctct

SEQ ID NO: 769851 - DNA, 100 bp, Homo sapiens
gccaggcgatttatgggaaagaggcagacattttcctgggacccagatgatgtggtaccagttggccaaagaagagcctggtgttggtgcatgtgctttg

SEQ ID NO: 769852 - DNA, 73 bp, Homo sapiens
ccacgctgtccgtccgcagtaccgacgcctgcaggatgccggctccaggagcagcagtggaggtcgggaacgc

SEQ ID NO: 769853 - DNA, 96 bp, Homo sapiens
tgcttctaccggaggcgggacatctccagcaccctcatcgccctggccgacaagcacgcaagtgctgaaggtcgccatcctggctgagaagtacgc

SEQ ID NO: 769854 - DNA, 90 bp, Homo sapiens
cctccccagccatgtggaactcaacccgatagcagaagggtcaactcttctgttggattttctgttttgcagcatacaagcaatgaccca

SEQ ID NO: 769855 - DNA, 100 bp, Homo sapiens
tccagccccaaatgcctcccccctactcttcatctcgtctgtacccagaggcatttcatccttcatgaagccattcaggattttgaattgcatatgagtg

SEQ ID NO: 769856 - DNA, 100 bp, Homo sapiens
atcctcagcgaggtctccacccgctcgcgctccaagctccctgcggggaagaacgtgctactgctgggtgtcatggagaaactccagctgggcccagaga

SEQ ID NO: 769857 - DNA, 101 bp, Homo sapiens
ttgcgtgtgttgaaagtacaattctattgcacatcaatgatatcatcccagacccatcctcatgccaacaaactacccttgaaggattctttcacttacga

SEQ ID NO: 769858 - DNA, 100 bp, Homo sapiens
aggttattgaattcattggagaatgaatgctgttctgaatttgattgttcctcatgtggttaatttggttcattctttcaaaaatgatggtctgccttca

SEQ ID NO: 769859 - DNA, 100 bp, Homo sapiens
cctgggccagcctggctctgtgctgcgggtgctctgaaatgactgctgtccatgcaggcaacataaacttcaagtgggatcctaaaagtctagagatcag

SEQ ID NO: 769860 - DNA, 75 bp, Homo sapiens
ggcgcgagtgaggaaaggaggtactgtaggtggagccgccaccaaaatgcagattttcgtgaaaacccttacggg

SEQ ID NO: 769861 - DNA, 100 bp, Homo sapiens
gggagggccaggacagcgacagcgatcagctgttttacaccaagatcttcttggacccggagaagaggaaattcattgtacaacacacgaaccccttcaa

SEQ ID NO: 769862 - DNA, 74 bp, Homo sapiens
caaggaccagaagaaactgcaccggaaatgtgcctaccaggccatcgaggagggcacgctggaggagatcgaag

SEQ ID NO: 769863 - DNA, 83 bp, Homo sapiens
agaaacatgtattggttattctaacagacatgagttcttatgctgaagcacttcgagaggccaagaataaaatctttatgaac

SEQ ID NO: 769864 - DNA, 100 bp, Homo sapiens
caacgtgtggcggctcgcgacccccggcaacccggagaaggtctacagagcggcctgcgccagcgagtgacagttaacaccaacatggttgatttaaatg

SEQ ID NO: 769865 - DNA, 82 bp, Homo sapiens
ctcgaagacatcaaaagctggattcgagggcagaagctcctcctggggtagagacagatcttattgatgttggattcacaga

SEQ ID NO: 769866 - DNA, 100 bp, Homo sapiens
ccgcggtcttcccaggcgtcgcggagagcaggacccccgcagcaaacacaagtttaagatccacacgtactccagccccacgttttgtgaccactgtggg

SEQ ID NO: 769867 - DNA, 74 bp, Homo sapiens
gaacaacagtcaggccaagccttctgcctgtgatgacgcaaacatgcagatctttgtgaagaccctcactggca

SEQ ID NO: 769868 - DNA, 75 bp, Homo sapiens
ggatcttcaaagggtaaatgtaccctggaagagggatactggacctgtgataggaggagatgttaaagtaaccca

SEQ ID NO: 769869 - DNA, 151 bp, Homo sapiens
ggcacctgaagaagtttcagaagccagaagagaaaacaaaagaccaacccttgagggaagagaattatctctaaggagttggtgactaagtattctcagcagatggtgaaaggaatgctccagttactttcaaattgtccagcagagactg

SEQ ID NO: 769870 - DNA, 148 bp, Homo sapiens
aaataaggaaagttgactgaaaatggggcggaagaaaatacaaatcacacgcataatggatgaaaggaaccgacaggtgaattatgtaacctcattacgctggatgtagctcacaatcaacttgaacaccttccaaaggagattggaa

SEQ ID NO: 769871 - DNA, 75 bp, Homo sapiens
catgttcaccagcaccggctccagtgggctctgttattgcttacaactcagaaggtaaaagtaatccaagtgaag

SEQ ID NO: 769872 - DNA, 75 bp, Homo sapiens
tcagctccacattgagagcaaaatctacaagatgatgcagggaggaggccctcgggaccaaggatcacgtcatga

SEQ ID NO: 769873 - DNA, 74 bp, Homo sapiens
gaggaagattcttacctctttgatctcgacaataaggcacgaaggcagttccagtctcagctggctgacctgca

SEQ ID NO: 769874 - DNA, 75 bp, Homo sapiens
actataggtatctgtcaaccatccatgaccggtgtctgctgagagaaaaggagttcatgatcaagtgttgcccac

SEQ ID NO: 769875 - DNA, 100 bp, Homo sapiens
cgacagaggatgccgaaccactccatatgccaccacgggctgttccctgaccctgcaccatacggagaaaccagaacatgaagacatatgtgaataccgt

SEQ ID NO: 769876 - DNA, 75 bp, Homo sapiens
caaactggccaagaagggccttactccttcacagatcggcatacttttttgatgcaccagagatggaccatctcc

SEQ ID NO: 769877 - DNA, 99 bp, Homo sapiens
gccgtgtctctgcccacgtcgagcgtgcccgagacccgagggtgtccgcaatgttgccagtgtctgtctgcagattggctacccaactgttgcatcagt

SEQ ID NO: 769878 - DNA, 104 bp, Homo sapiens
ctcatcagaggcagcaaagagacttgcagagtgcgttaagacatgtcctggacttgaacagtatgctattaagaagtttgctgaggcatttgaagctattcccc

SEQ ID NO: 769879 - DNA, 100 bp, Homo sapiens
cgaggacccgggctgggctttcctcacccgggtttcccaggcagctgcagacttgaaacagttctgtctgcagaatgctcaacatgaccctctgctgact

SEQ ID NO: 769880 - DNA, 76 bp, Homo sapiens
tcctattgaacctagtggtgtattagcaatatgattatgacagcagcaccatccgaaagaagatatttcaagaggc

SEQ ID NO: 769881 - DNA, 108 bp, Homo sapiens
gtgattcttgtcgccttttgtggagaaatttgcccgctaacaggccatctgtgtgagcaaattgtggctactaatttgccccctgaagatcaagatggctctggggat

SEQ ID NO: 769882 - DNA, 100 bp, Homo sapiens
aaagtttttttaatgtggttggaacaactgagggaagcttgtgggctgtgccatcatccatgtcaatggagacagcccagaggaagtggtccgtgccaca

SEQ ID NO: 769883 - DNA, 99 bp, Homo sapiens
cggctcacctgtgcgggatggaacaaaagtgcacgatctgattttctggagagatgtgaagaagactgggtttgtctttggcaccacgctgatcatgct

SEQ ID NO: 769884 - DNA, 100 bp, Homo sapiens
ttatcagaggttaaaatttgaaagaggtgactgcttagaaaactgcacagcatctgatgaaattagcgaataagaacatcaaccatgtcttacactccag

SEQ ID NO: 769885 - DNA, 100 bp, Homo sapiens
tggggaagggcatggacaagaagaaggcagccgagtgcttgtgatttcacgtatttttgctgaactcgtaaaagagacacttggatggtggattaaccag

SEQ ID NO: 769886 - DNA, 100 bp, Homo sapiens
cattgccagtgggacgtctgagactttctccttcaagtacttggcagatcactctcttagcagactaggactcaatgaaattgctgcccccatgttcctg

SEQ ID NO: 769887 - DNA, 100 bp, Homo sapiens
agccttcagttacatactgattctttaagaaaatcagataacttgtactggagagaaatcctacaagtgtggctctgattgtactttctccacaagcttc

SEQ ID NO: 769888 - DNA, 100 bp, Homo sapiens
tgtctcggcagcgcccgcggagacgtgaagaggtatgtgacgcattcccagactcttcagccaactgagcatcagcttcttcacagcaattgggtcctga

SEQ ID NO: 769889 - DNA, 76 bp, Homo sapiens
tccgtacaaaaccatggcaatgtctgagtgtcagtcctggaatcaagatgtgagaccaagaaattatttctgaaga

SEQ ID NO: 769890 - DNA, 80 bp, Homo sapiens
ttcatcctcttcctcttcctctcggagctcaccggatttataacgacagaagtaagatggctgtgccacccacgtatgcc

SEQ ID NO: 769891 - DNA, 78 bp, Homo sapiens
gcctactacgagtgtgacatagttctaggtgctggagttcagcgggagccagaaacgcttcgttaagggactcaggca

SEQ ID NO: 769892 - DNA, 100 bp, Homo sapiens
gtttggaaaaatttcattagagataccccatgtttccccatcactcgaggagtctgggcagagactggactacaccgtgggagaatctgcaaaggtgttg

SEQ ID NO: 769893 - DNA, 80 bp, Homo sapiens
cgccgcatggaggccggctgaggagcgccgctgcctcgcctcgttccagggtctccctccactgctgtagtaacccgggt

SEQ ID NO: 769894 - DNA, 75 bp, Homo sapiens
gattttttgcctttgttgattaactggacaaattcagataagcaacgatgtgctgagctgaagaaagccttgtgt

SEQ ID NO: 769895 - DNA, 100 bp, Homo sapiens
tgatagtgacattgaagctcgccttaatagttggaatcttgggggggcagctggcattttatgctatgtgggagcctatgtcttcatcacttatgatgac

SEQ ID NO: 769896 - DNA, 87 bp, Homo sapiens
gagccgcgaggagacagctgaggcccgcggagaccaggggtgctggagaatctggtaaaagcaccattgtgaagcagatgaggatcc

SEQ ID NO: 769897 - DNA, 100 bp, Homo sapiens
ctgcacccactattttgtaatgacagccaagaagcagagcctgctcgacaaaggtgtcatcattaacgtctctaattaacagaagatggcaaagcccagc

SEQ ID NO: 769898 - DNA, 75 bp, Homo sapiens
aaccggaagaaactgtccgagaagcccaaagccttcacctaccaccatatccaggagatcatggtccagctgctg

SEQ ID NO: 769899 - DNA, 100 bp, Homo sapiens
agcaaagaaaacctccctgtgctcaataccagaataatctgcccaggaaaggaggtggctgatagatggtacagtgaaatcaagaactataacttccagc

SEQ ID NO: 769900 - DNA, 74 bp, Homo sapiens
gtcccctgccccgggcaaagcccatctggtccgccgagcagagcagataaaatccccccatctctgtactccac

SEQ ID NO: 769901 - DNA, 90 bp, Homo sapiens
agcaagaacagagagagaggtggacagatctgagagatactgaggtgtctgacttccagcaactgctggcctgtgccagggtgcaagctg

SEQ ID NO: 769902 - DNA, 100 bp, Homo sapiens
cttcacttggcaaactcaacaaggatcagttcttaagagcagccccggtaactggaggaatgggagccgttttgatgagaaaaatgggctggagagaagg

SEQ ID NO: 769903 - DNA, 98 bp, Homo sapiens
acaagatggaaatcatctctttagaattctcggcctgaggggactgtacaatcttgttggacaccaggagatggctggagtgcaatggtgcgatctcg

SEQ ID NO: 769904 - DNA, 100 bp, Homo sapiens
tccggcgcatcatggcggctggccgggcccaggtcccttcctccgttttccagaagagattcaatggctcagtaagtttcttccgcggctggaatgacta

SEQ ID NO: 769905 - DNA, 95 bp, Homo sapiens
aggaagcagagtggctatggtgggcaaactaagccgattttccggaaaaaggtcatcctgtacagttctacagcatgaataggcctgcctctcgc

SEQ ID NO: 769906 - DNA, 99 bp, Homo sapiens
accgtcctagaaggattcagcgggaacacaacgttgttcagttgctcacacaatttctggctggccatagacagtgaggagacaaggattgagaatggg

SEQ ID NO: 769907 - DNA, 50 bp, Homo sapiens
gaagacgtggagcgctgcggcggctgaaatgggacgtcggtcatcagata

SEQ ID NO: 769908 - DNA, 75 bp, Homo sapiens
ggatgctgcagacactgaacgaggagccagtggatggaggttctctggatcaagtcctgaagaaagctggaagaa

SEQ ID NO: 769909 - DNA, 90 bp, Homo sapiens
aatgttccttcagctctgccatcactccctgccgggtcaggaaatcttaaagaaactctccaccttttctaagtagtgtatcaaaatcta

SEQ ID NO: 769910 - DNA, 50 bp, Homo sapiens
gccaattcgttttcaggagcatctccagaattcagtttgcctgttctgta

SEQ ID NO: 769911 - DNA, 106 bp, Homo sapiens
ggcagtgcaggaactggcaaatcatgtctccttcatcagttcattgagaataagtgtgtttcccattaaacactaccaggacaaaatcaggccttacatccagctg

SEQ ID NO: 769912 - DNA, 100 bp, Homo sapiens
gaggcacagagtttgctgcgagctctcttcaaacggaacccctgcaaccggctgggaccacagccgctttgtcaactgtgtgcgattctctcctgatggg

SEQ ID NO: 769913 - DNA, 99 bp, Homo sapiens
ggcggctccaccgacactacgcggacgcctcctgccgcaggaccaagaatcgccttcagccctgtctggtgcatccttggcagaaagtgaggaggaaaa

SEQ ID NO: 769914 - DNA, 100 bp, Homo sapiens
aggggcagtgggcgcggggaagcggtcttgcgagtggctggttccctgcagaagagcacagaagtgatgaaggccatgcaaagtcttgtgaagattccag

SEQ ID NO: 769915 - DNA, 82 bp, Homo sapiens
ctagagtccaataaaatcgctgcctcccagctgtttggatcacagagaggtgctggagaatctggtaaaagcaccattgtga

SEQ ID NO: 769916 - DNA, 88 bp, Homo sapiens
aaaacttcctcgaatttcagcgtaaactgcagcatgatgttctgaagcttgaggtcacaatccaaggtccggctcctccgcgtcccag

SEQ ID NO: 769917 - DNA, 94 bp, Homo sapiens
ggacgcgcccggcgcccctgagccggccgagcggcgacggaccgcgaggtttacccaaggtccagcctagcccctaggcaccatgtcggacagt

SEQ ID NO: 769918 - DNA, 100 bp, Homo sapiens
gggagttcaagaagaacactccagagtttaggggaggaattgacctgggcattgaggagccatttccagggagctggggagcacagcaggaacagagggg

SEQ ID NO: 769919 - DNA, 87 bp, Homo sapiens
tgggcttggaacagggctgcacacctttctgctttatctgccaaggccacctttgatgccatttctaagacctacagctacctgacc

SEQ ID NO: 769920 - DNA, 99 bp, Homo sapiens
catctccgacacgggctctgcgggcctcatgctcgtcgagttcttcgccccctggttcctctcctggctgaaatttatggtatagaaggaaacattttc

SEQ ID NO: 769921 - DNA, 98 bp, Homo sapiens
ccgacggacgcacgggcgggcggccgggagccatggagcgcggccctggggcccgggggcgcgggccggggtgctccaccgggggacggctacgtgca

SEQ ID NO: 769922 - DNA, 95 bp, Homo sapiens
gcgccggggttcggtggcctctagtgagatctggagtacatgctacagaggactcaagatcaagatgaaaatgtggctttagaagcctgtgaatt

SEQ ID NO: 769923 - DNA, 100 bp, Homo sapiens
catttgaagggggaagtctcttgcaaattccagtcaaggccctaaaatataggtccgagtggacagatgaattaaacacgtacagagtggaagcagcttg

SEQ ID NO: 769924 - DNA, 82 bp, Homo sapiens
atttcaacaaatggacgtacttgagggcttgaatgtcttggtgacaatatctggcagaaggagaagacagcctgaagaagat

SEQ ID NO: 769925 - DNA, 75 bp, Homo sapiens
acaagaccagcttcgtgtcctttggctacttctacaagtccgaacagccagtccagcaaaatgaacagcattgtc

SEQ ID NO: 769926 - DNA, 75 bp, Homo sapiens
agagccgctgggcgccggagccgaggcgagcgccgcgcgcaccactgaaatgcactcggtgatggaaagagagcc

SEQ ID NO: 769927 - DNA, 83 bp, Homo sapiens
ctcgcttgcagttcagcgaccacgcatttgaagacatgctggagaacccactgaacagcacccagtggatgaatgatccagaa

SEQ ID NO: 769928 - DNA, 83 bp, Homo sapiens
ctgggagtggtggtagcccacagtgagtcagtaatgcacacgaatccggaagtgacgccagaagaagaggaagtgaaggctac

SEQ ID NO: 769929 - DNA, 82 bp, Homo sapiens
cggggttcgggtgtctcgtgtgtgaacatcacagaatgctgcctttttatatggtcttggtttggtctacttccattataat

SEQ ID NO: 769930 - DNA, 43 bp, Homo sapiens
cgcgacgggtctgcggcttaggctaatttgacaggacatgctg

SEQ ID NO: 769931 - DNA, 51 bp, Homo sapiens
gtggaccgccccacctttcttgacaagtgccgtgttcacatggaccaactt

SEQ ID NO: 769932 - DNA, 83 bp, Homo sapiens
gaatgcccatgccaaggcctcccgcacctcgtccaaaggttggaaagaaccatgactgtattcaggaaggcacatgaactgaa

SEQ ID NO: 769933 - DNA, 127 bp, Homo sapiens
tgaaaggttttggttatgctgaatttgaggacctggattccctgctcagtgccctgagtctcaatgaagagagtggtgcacgtatcaacatctcagaagggaattgtcctgagagaattatcacttt

SEQ ID NO: 769934 - DNA, 82 bp, Homo sapiens
gattctgaccatttctcatgaacagaaacacctaggaagggagaactgtccacaggtcctggctaccctgggaagagacaag

SEQ ID NO: 769935 - DNA, 112 bp, Homo sapiens
ctgggcctgacagagaaggctcactcaaggatcagttggctttagcaattgacagagaaagagctggacccagatgggctgaagaaggagtcagagcgggatcgggcaatgc

SEQ ID NO: 769936 - DNA, 73 bp, Homo sapiens
acgcagcgagccagggatgtgagcggcgccccgcggcatggcagcctcaggtaagaatgattgatgttggctg

SEQ ID NO: 769937 - DNA, 50 bp, Homo sapiens
gctctctctggaccgatcccactgtgaccccagggtttgaagaaaaggag

SEQ ID NO: 769938 - DNA, 73 bp, Homo sapiens
atggcacaactgtccacgtaggcattcaccccagcaaggtggcgttcaagatgtacttgggcatcactccaag

SEQ ID NO: 769939 - DNA, 75 bp, Homo sapiens
ccgaacctacggacaagacctccaccacgcagagaatccagcctgaattcttccatctctatgacaacaagccca

SEQ ID NO: 769940 - DNA, 83 bp, Homo sapiens
ccattgatctcttggagcagctggggatcatgcactatgggactgagtaacattctctttgtgatggccttcctgctctctgg

SEQ ID NO: 769941 - DNA, 74 bp, Homo sapiens
gagaagctacaaacaagaaatgggaaaactcgaaacagatttttctacatcagcatcagcatctgcgtcaccat

SEQ ID NO: 769942 - DNA, 83 bp, Homo sapiens
attgacaaagctctggagaaaatgcagcgggaagaacaatgtattttatatcttggaccaagctcatcatgtcactacagtga

SEQ ID NO: 769943 - DNA, 75 bp, Homo sapiens
ctatgtgcagcaaacaactaataaagaacttgccattgaaaggacatgaagaatgcaaccctctccctgaattct

SEQ ID NO: 769944 - DNA, 75 bp, Homo sapiens
agggcagtcggcggagcttcgccaaggctggcgcagtcggtactccaaagattcaggtttactcacgtcatccag

SEQ ID NO: 769945 - DNA, 100 bp, Homo sapiens
ctacgaggtgtcgcccgtggccctgcagcgcctgcgcgtggcgttgcagaagctttccggcacagaaacagcccagatctcctcttaagcggaaaagaga

SEQ ID NO: 769946 - DNA, 87 bp, Homo sapiens
aggataaaattcaggatttcttaaaggatagccaattgcagtttgaggctatgacaaatcctctgagggaaatcgacaaaattgtgg

SEQ ID NO: 769947 - DNA, 50 bp, Homo sapiens
gggagctgagcgtggaggcctcatgaataatccagaatggctactctgat

SEQ ID NO: 769948 - DNA, 50 bp, Homo sapiens
cccggggagaggcaccatgagcgctgtcaataccagcaaatatgcagaaa

SEQ ID NO: 769949 - DNA, 90 bp, Homo sapiens
caccgccctacacatcaaactccgggccacaggaggaaataggaccccagaagaacgggccgccgccgccaagaagtataatatgcgtgt

SEQ ID NO: 769950 - DNA, 100 bp, Homo sapiens
cccgcagcctcgcgcccgccgccgcccgtccccaggtctcataacaacaaactgcagtctacagcttcttaaagttcagcgtgttaacctaacataaaac

SEQ ID NO: 769951 - DNA, 100 bp, Homo sapiens
atcaacgacaacttgagcacaggccagaggcattgatgtgcagcaggtttctttagtcatcaactatgaccttcccaccaacagggaaaactatatccac

SEQ ID NO: 769952 - DNA, 82 bp, Homo sapiens
tgaggatgttacagatgctggtcttaccacttatcatctccagtcttgtcacaggcttgctatcagaggaagtggagaatgt

SEQ ID NO: 769953 - DNA, 99 bp, Homo sapiens
caccttgaccctggggaccttcctcgtgggagctgcgctggccgctggcctactctggaagttcagcctgctcaaggtggtgttcgtggtcttcgcctc

SEQ ID NO: 769954 - DNA, 75 bp, Homo sapiens
tgaggagccagacgacaagcacacactatggcgctgaaacggattaataagatgcttgtttgctactgatgggtg

SEQ ID NO: 769955 - DNA, 100 bp, Homo sapiens
cttttgtaacttttgatgatcatgatacagttgataaaattgttggttggcaacattgtacaagtcacccagccagaaggaatgcacagtactgtttcaa

SEQ ID NO: 769956 - DNA, 139 bp, Homo sapiens
gaacccgtggactaagaacgcattgccgccggtcctgaccaccgtgaacggacagtcccccccaggaaacgttttgatggtaaattacaatcagaatcaactaataatggaaaaaataagagagatgtagatttcgaag

SEQ ID NO: 769957 - DNA, 100 bp, Homo sapiens
gagatcaacggggtgactggtctctttccttcaaactacgttaagatgacgacagactcagatccaagtcaacagtcaaatgcagccctgaggatttggc

SEQ ID NO: 769958 - DNA, 51 bp, Homo sapiens
ttgcacatttcaacagtcatgcagatgtacattgaagatgtcagtttctac

SEQ ID NO: 769959 - DNA, 51 bp, Homo sapiens
tctactgctatatgcgtcaggccgataagagtcaactactggattttctgt

SEQ ID NO: 769960 - DNA, 82 bp, Homo sapiens
gaagttgggaactcagaccgtaccttgcaacaagactgcatcaacccgacattcctttcttataccaatgtgaaatttccag

SEQ ID NO: 769961 - DNA, 50 bp, Homo sapiens
cgacaattgcaggatgcacagattctggtcctagcagaagatgtgactca

SEQ ID NO: 769962 - DNA, 100 bp, Homo sapiens
cgttgaagcacaatgatccttttgctcctggtggaacagttgttgcagcaagcgattcaggttggcagagtcagcatatatgattccaaaaggcaatccg

SEQ ID NO: 769963 - DNA, 75 bp, Homo sapiens
ctggtcttggaaggcagtggaaacctggtgctatacacaggagtggttcggtcatttggagaattggtacataag

SEQ ID NO: 769964 - DNA, 110 bp, Homo sapiens
cacacatgcgccctggctactggcccacaagatccagtctccgcaagagaaggaagctctttatgccttaacgctgggcaccaaagaaggttacctcaccaaacagggag

SEQ ID NO: 769965 - DNA, 100 bp, Homo sapiens
cccggggccatggccggaatgcagtaccctcagcagcaggacccagatgatgtggtaccagttggccaaagaagagcctggtgttggtgcatgtgctttg

SEQ ID NO: 769966 - DNA, 51 bp, Homo sapiens
ggatgaggtgaaagactatgtggccaagactgtttcagactccaagccaga

SEQ ID NO: 769967 - DNA, 100 bp, Homo sapiens
gggtaacatacttcaacaagccagatatagatgcctgggaattgcgtaaaggggtccacattcagtcgtcccagactgtggagtcgagtggtttgtacac

SEQ ID NO: 769968 - DNA, 98 bp, Homo sapiens
cctaggccggtgggtgagtgcaccgcgttctcgcacgcgtcatggaggtcccaggtgattgaaaagtttgaggccttggacattgagaaggcagagca

SEQ ID NO: 769969 - DNA, 50 bp, Homo sapiens
ggggaaagtgctaaagccgctgagggtctgacatttcaggaggtggagaa

SEQ ID NO: 769970 - DNA, 100 bp, Homo sapiens
gatatttgcctttagtgcactcttctccttcacagtaaagtggctgggcaattgaaggaacagactaaaaatcgtgtcctggaaggaaactacaggtact

SEQ ID NO: 769971 - DNA, 82 bp, Homo sapiens
gctagccatcttctaattttcattccttcaaagttacctgaccttaaagatgctgaagctgttcagaagttcttccttgaag

SEQ ID NO: 769972 - DNA, 98 bp, Homo sapiens
tttctatcagcaccccagtctttacttgaagacaaaaaggaaccattttctcaggctgtcctttggaggtataaattctctcagcttaaaggttcttc

SEQ ID NO: 769973 - DNA, 75 bp, Homo sapiens
gtctgcatcgcagaggccaggggctgcgctggcctcggcacaccagtgccacccgctgccccggacgctgagcgt

SEQ ID NO: 769974 - DNA, 83 bp, Homo sapiens
atgaatcctgcggcagaagccgagttcaacatcctcctggccaccgactcctacaaggtagctacagcaagctgggtagcagg

SEQ ID NO: 769975 - DNA, 100 bp, Homo sapiens
caagtcctcgctggactgctcagggtgccagacctcatccttcaaaagcagtggactgtcttttggattcaaagtgggcaaaggccaagaaaggagagga

SEQ ID NO: 769976 - DNA, 82 bp, Homo sapiens
gggccaacagcggcctctagtgtctggaggaggaagtgtcagcgctactgccgcaggccacgtgctgtacgccgacatcaag

SEQ ID NO: 769977 - DNA, 75 bp, Homo sapiens
caacactgtagagatcacccccacctccaacggacctcctgacaaggtgatccgggcgggccccgcaggaatttt

SEQ ID NO: 769978 - DNA, 82 bp, Homo sapiens
tatggtgaactcattgtcttaggctgagttgatggcttccggagaactggcatagctgcagaatatgagtagtgtcccaaga

SEQ ID NO: 769979 - DNA, 74 bp, Homo sapiens
ggtgccagagtttgtagcctattggaggaaaacacaccaagatgatgaagaacgagagcttcaaatggatcctg

SEQ ID NO: 769980 - DNA, 99 bp, Homo sapiens
ccgggggaggcagcacggcatcccagcctcagggctgcccggacggtgttggttgggctgctaggggagctgatcctggaccgtcacaactttgccatc

SEQ ID NO: 769981 - DNA, 90 bp, Homo sapiens
atttttatggatgaaatagatgctattgtacgtagagaaatcgacactcttaatgaacgtttagctgctgaaggacaagcgattgatgga

SEQ ID NO: 769982 - DNA, 75 bp, Homo sapiens
ctgccctatttgcagtggagtcttggaggagccagtacagggaacagtcactgaggataagaacaatgcctccca

SEQ ID NO: 769983 - DNA, 82 bp, Homo sapiens
gatgactccttttcccacccaggtatcagcagatgttgcacacaaacttggtataccttgctacaatagcagattctaatca

SEQ ID NO: 769984 - DNA, 74 bp, Homo sapiens
acacacccaggaaaagactcaggacggacaagcacagtcttcggaaggtgtacgcggtggaggccagtgagatg

SEQ ID NO: 769985 - DNA, 90 bp, Homo sapiens
atctaattccaaaaacaataatgcaccttatgatcaataacaatgagtcttcatcaacccaaattccagactacacctgagcctttccat

SEQ ID NO: 769986 - DNA, 101 bp, Homo sapiens
ctacctgacaccacagccacccttggtgatgagcctcggaaagtgctcctgcggctgtatggagcgattttgcagatgtggtgaagcagcgcttgcagatg

SEQ ID NO: 769987 - DNA, 90 bp, Homo sapiens
tagtgaagaggatcttgaatttcttaatgcatccaaagccttctggcaaagccaatggtggcagagtctacatagaactatgcttcgtgg

SEQ ID NO: 769988 - DNA, 51 bp, Homo sapiens
catgaactagtgacctggaaagtactatactggcaattgctggagaagatt

SEQ ID NO: 769989 - DNA, 84 bp, Homo sapiens
tccaactggtcatggtttcagttgcgatgcatgcaagtcggaggaaacgctagtgcattattgtctatggagccccacctgcag

SEQ ID NO: 769990 - DNA, 101 bp, Homo sapiens
tttctactggacttcatgcttagatacatgtataacaaggtatggcatttcaaatatagatacaaccattgaaggaacgtcagatgacctgactgttgtag

SEQ ID NO: 769991 - DNA, 83 bp, Homo sapiens
ctgtgggcacagacaaggagctcagtgacctcctggacttcagcatggggcagaaccccttcgagctggccttctccctagac

SEQ ID NO: 769992 - DNA, 100 bp, Homo sapiens
gatgttggagaactatagcaatctggttttcttggaccattaaaaatctcaagtgacgactttgggaaactctggttatccttcgcaaatgatgtgaaac

SEQ ID NO: 769993 - DNA, 90 bp, Homo sapiens
ccaagggcgcccttcccctggatacggtcactttctacaagttggctggggaacagaccagggaattggtggatttggagaagagccggg

SEQ ID NO: 769994 - DNA, 83 bp, Homo sapiens
cgggcggcttcctggcctgggcgctccggtggcggcggaggtgccaagtcctgccctgccaacttcttggcagctgccgacga

SEQ ID NO: 769995 - DNA, 100 bp, Homo sapiens
aactggaggaaaaggtcgcctctttgctgcaccaggtgtcctggagacagagatcctgaaggagctagacgagtgctacgagcgcttcagtcgcgagaca

SEQ ID NO: 769996 - DNA, 83 bp, Homo sapiens
aattatccaaagcatcactgacgtctctacagcggaacaatgtcgttcttcccccaaaagcatgatttgctgcaataaaaaat

SEQ ID NO: 769997 - DNA, 100 bp, Homo sapiens
actgccttcagcagcaccgagactggctctgcggagacactcatgccaacaagaacctgtgcccctccttcctaacctgaggcctggggttcctcagacc

SEQ ID NO: 769998 - DNA, 101 bp, Homo sapiens
accaaggtacccaatgcctgtttattcaccatcaacaaagaagaccacacactgggaaacatcattaaatcgtttcaagtgccccatttgctccaagtctg

SEQ ID NO: 769999 - DNA, 82 bp, Homo sapiens
gagctgagtggttgtgtggtcgcgtctcggaaaccggtagcgcttgcagcatggttttgagcaaaattttggactgtgaagc

SEQ ID NO: 770000 - DNA, 90 bp, Homo sapiens
gctgcttttgatgtctgacaacgtggatcgttgttttgaaacatattaataaggcagcggaaagaagaaatatgaatacggctccatcaa

SEQ ID NO: 770001 - DNA, 75 bp, Homo sapiens
ggagatgtagaaaaagccatggtgaagtaacacagaaggataaaacatagctctgctggcagaaacagctctgag

SEQ ID NO: 770002 - DNA, 75 bp, Homo sapiens
ggtaattactattcgtctgagagaatggctggagtgaaaaggctctcagtgtctgagttaaatgaaatcctggaa

SEQ ID NO: 770003 - DNA, 83 bp, Homo sapiens
cccttcgcgagcggctgctgagcgtgcagcaggatttcacctccggggcgtgatggtgggcatgggtcagaaggattcctatg

SEQ ID NO: 770004 - DNA, 75 bp, Homo sapiens
attgatgctcaccagcttcaagctcatgtggacaagaaaaatggagtgctggcatacattgggaattttcgcctg

SEQ ID NO: 770005 - DNA, 100 bp, Homo sapiens
gtgccttttgcctcccaccgtgattctgaggcctccccaaccatgtgcaattgagccttcacgtaaatgggtccagtcatgcctcccagtaagaagccag

SEQ ID NO: 770006 - DNA, 100 bp, Homo sapiens
cgccactgccgcagccaggagatggttcgggcctagcggagccgggactggagctcaactgaagttgatgacatgattcggaaatcaacaaacctgttgc

SEQ ID NO: 770007 - DNA, 98 bp, Homo sapiens
gctgttgtgacaagaaaagctgtggcaaccgaaatgagactccctcagatccagtgataattgacagatatggccgcgtggaaagtgtcaaaattctt

SEQ ID NO: 770008 - DNA, 100 bp, Homo sapiens
ctcagactagtctgaaagggaaaacccccattcattctggattggtggatctgaagtacaaaatattttccagatccaagagttgaagattggctcctca

SEQ ID NO: 770009 - DNA, 75 bp, Homo sapiens
gctcccctgagggttcccttggatcagactcctcttttttatccatggcaggttcgagactataagaggcttacc

SEQ ID NO: 770010 - DNA, 100 bp, Homo sapiens
agtgaggcggagctgtccccagagaccctatgcaacgggcagctgggctgcagtgaccccgctttcctcacgcccaggcggacctggtgaatgacctggg

SEQ ID NO: 770011 - DNA, 49 bp, Homo sapiens
gcggagtctgacccggggcccaggaattgaatgatctggcacgggaccc

SEQ ID NO: 770012 - DNA, 82 bp, Homo sapiens
aaactggacagcgaggacaaggacaaagaaggcaaacccctgctgaagagcctggagacacaggccccatccttcccaatgg

SEQ ID NO: 770013 - DNA, 105 bp, Homo sapiens
tatctgtcttcggtggactccttcggcagtccacccaccgccgccgcctcccaggatatgtgatggcgtccagtttggagctgggataaggttcctgtagccgac

SEQ ID NO: 770014 - DNA, 100 bp, Homo sapiens
ggacatgggctcctgaagttgcgccgctgccggtcgggggaagagacctgacagagctacgaagtgaagagtgtcctcggaaaggaagtggggttgttaa

SEQ ID NO: 770015 - DNA, 82 bp, Homo sapiens
tgagaacaagagagaggacggcagcgccaagcaggagctgaaggacttcagcacttttccagccattaactccaggctctcg

SEQ ID NO: 770016 - DNA, 50 bp, Homo sapiens
aaggattccaagtaactcttatttgcccgagtgattgatgtatctaatgg

SEQ ID NO: 770017 - DNA, 103 bp, Homo sapiens
ttttccgttgccggtgccggcctagcgtcctggaattacttcaatcaaatccagctccaggtcccacaggggctcttcttccccacgaaaaagatcttattca

SEQ ID NO: 770018 - DNA, 100 bp, Homo sapiens
taccacatgtactgtctcaccccgtccatgtctgagccccctgaagaaaaagaaggggagcgttcaattccaaacagctgctttatttggagaaataccg

SEQ ID NO: 770019 - DNA, 75 bp, Homo sapiens
cagtatttctttggcatcactgcagctagtaatttgccttctggattaacgcctgtaaaccttgcagtattgaaa

SEQ ID NO: 770020 - DNA, 90 bp, Homo sapiens
ttcccgacgacccctgctccggcggggaagtgagcaagagttgctggagaatgtaaccctaatccataaaccagtgtcgttgcaaccccg

SEQ ID NO: 770021 - DNA, 100 bp, Homo sapiens
cctcgctcctcggcgccatgaccacaaccaccaccttcaagggagtcgaccccaacagcaggaatagctcccggaagctattttgccagccacttcatta

SEQ ID NO: 770022 - DNA, 50 bp, Homo sapiens
ttgcatgggttgatgagtggtatgtatgccaccacgggctgttccctgac

SEQ ID NO: 770023 - DNA, 98 bp, Homo sapiens
caacatgctcctagcagaagcctatggatctggagttttaaccatgctgaccaacgaaactggctttgaaatcagttcttctgatgctacagtgaaga

SEQ ID NO: 770024 - DNA, 100 bp, Homo sapiens
tagtggtggactgatttcaaagggacacccactaggcgctacagtgggttgtcttctggcctcagagtatcccttatcagaaccttgggcccctgggccc

SEQ ID NO: 770025 - DNA, 75 bp, Homo sapiens
ccatttgtgttcggacagcccctttccttccagcagcctcagcttcagagctttaccgccagcacctgttcagaa

SEQ ID NO: 770026 - DNA, 87 bp, Homo sapiens
ttgcacccagtcctgcagcgccagcagctggactatggcatctatgttatcaaccaggaagttctccagcagctgattgtaatgaat

SEQ ID NO: 770027 - DNA, 100 bp, Homo sapiens
gttaacgtctctgttagttcagagggcaccccggctctgccccagactggcataccaacagaggctttggtgaaggggtccatttcgagaatgcccattg

SEQ ID NO: 770028 - DNA, 50 bp, Homo sapiens
cacagagttagagagagggatggtggttactcactataaacaatatccac

SEQ ID NO: 770029 - DNA, 51 bp, Homo sapiens
cagaacatgatcaagggtgttacactggtccaggaggcccaggaggtcctg

SEQ ID NO: 770030 - DNA, 83 bp, Homo sapiens
ctctgctgtttcctaaggattttcagcaccttgccccaaaatcactatggagatgaccgccatggccacggaggacccccaga

SEQ ID NO: 770031 - DNA, 83 bp, Homo sapiens
cacggcgcagacgcgggcgagctgcggctcggacgccagcggacacgcgggcgaggttaaacccatccagagtaatggctgcg

SEQ ID NO: 770032 - DNA, 51 bp, Homo sapiens
gggggagaacatctgctttgagcgccaccaggaatacttgaagatgctggc

SEQ ID NO: 770033 - DNA, 128 bp, Homo sapiens
tggtttccagcgccaagacttctgcaggagagcctccgctgggctttcaagttggtagctacagcaagctgggtagcaggcagatccaaaggatatcatgaagtttccagggcctttggaaaaccaga

SEQ ID NO: 770034 - DNA, 100 bp, Homo sapiens
cagaaggaagcacaaaaagggacagtcggagtgtgaggaagaggctgtctgtgtcattatgtgtgcgtcggtcaagtataatatccggggtcctgccctc

SEQ ID NO: 770035 - DNA, 76 bp, Homo sapiens
aaagaaaccatcgggaagatttcagctgccagcaaaaggtggctacggaccacaacatggataacacgtcaactgt

SEQ ID NO: 770036 - DNA, 97 bp, Homo sapiens
ctgaccagccccgaggaggaggagcacgtggagctcactgctgagtaagttctggagggatcctgcctcttggagccttcgcagccaggcagctgtg

SEQ ID NO: 770037 - DNA, 75 bp, Homo sapiens
gaaagtgtgatgttcgcgtatttcttgacaggctggagcattggatttgctaaaggagcttaagaatattcctat

SEQ ID NO: 770038 - DNA, 100 bp, Homo sapiens
gggagtgttgaagactctgcctcctacaaatatgggaagatggtgaaaggaatgggaggtgctatggatttagtgtccagtgcgaaaaccaaagtggtgg

SEQ ID NO: 770039 - DNA, 104 bp, Homo sapiens
cgcgcgcagggcctgcagcgggagctggacggcgagcgcgagcggcgcgagaaagagcggtggtgccccccccgggcacggggccatgtacaacgggatcgggc

SEQ ID NO: 770040 - DNA, 75 bp, Homo sapiens
ctgacgacgtggagtttaagtctggagcaggcactgagctgtctgtgcgcgaatgcattgaacgaatcccatgga

SEQ ID NO: 770041 - DNA, 51 bp, Homo sapiens
gcggtcgccatcagacccgcgaaggtgagaagccctaccactgcaactggg

SEQ ID NO: 770042 - DNA, 98 bp, Homo sapiens
gaggaattcagtttcttggggataaccgtctcctcaggaggaatgttggttcagaaactgaacaccaatgatctccagtccgaaagaacaccatttga

SEQ ID NO: 770043 - DNA, 100 bp, Homo sapiens
gcgcgccctggcgggtccggaccaaggacatagctcgccttttgcaagaaaaggagttacaggaagagaaaaagagaaagaaacactttccagagttccc

SEQ ID NO: 770044 - DNA, 84 bp, Homo sapiens
tagtgagttgaaactcttggaggaagcaaccatttcagtctgcaggtcattaggaatgtgggtgccggcaggacaggcgattgg

SEQ ID NO: 770045 - DNA, 83 bp, Homo sapiens
atctctatgatcctccaccagatgtcagttgtgttgatgtagataccaacactatttctcatgcctccggagccagcgtggtg

SEQ ID NO: 770046 - DNA, 75 bp, Homo sapiens
agcactactcagacatcttcaccaccacagagcccatcaagcccgagcagggtcaacatatttcactggcaccta

SEQ ID NO: 770047 - DNA, 50 bp, Homo sapiens
aagaaaatgccgaaggcactcagacagatgatgactttgaccagtttgat

SEQ ID NO: 770048 - DNA, 82 bp, Homo sapiens
tacatgaggagaacttctcggtgaggtgccctaagcacaaggtagcagtagctgatgtgcagtttggccccatgagatttca

SEQ ID NO: 770049 - DNA, 75 bp, Homo sapiens
cccgactcggtgattgaggacaagaccatcgagctcatgttgcagaatgaagaagagtctggagaacctgaacag

SEQ ID NO: 770050 - DNA, 100 bp, Homo sapiens
gaatctgtagctgctcctataactgttcgtgcttacttaaatcagacagttacagaattcaaacaactgatttcaaaggattggccatttgatgatggag

SEQ ID NO: 770051 - DNA, 53 bp, Homo sapiens
cttctggtggttgccactcgcctgaggatattcaggacattctgaaggtgctg

SEQ ID NO: 770052 - DNA, 87 bp, Homo sapiens
taaaggtggtagttgaggagttgctggccaaaggggcctgtgtacttgctgtagatgaaaatggaactcttggtgtaataacagaag

SEQ ID NO: 770053 - DNA, 75 bp, Homo sapiens
ccctggcgaggcaggaatggccccgaggcctccgaccgccgcgccccagtggcgggaccactggatgcagtgtgt

SEQ ID NO: 770054 - DNA, 100 bp, Homo sapiens
caggccatcaacaagctgaaccccaaacccaaattcttcgttctgtgcggcgacctcatccacgccatgccaggacagaactgtaccgctctctttttgg

SEQ ID NO: 770055 - DNA, 74 bp, Homo sapiens
taaaggcggacggcatcggggtcggggatctgcacagcgggacggcaaggaatgagtccctggaacgccagatg

SEQ ID NO: 770056 - DNA, 76 bp, Homo sapiens
gttagcagtcacgacctccagcacagggcacagtcttttgctgagcgcctgcgcctgggaattgcagtgattcatg

SEQ ID NO: 770057 - DNA, 90 bp, Homo sapiens
cttggttcctgagagattaaggatgatgttttctgttgtataatgaacagcagtattatttgaacaaagatggagtctccctctgtcacc

SEQ ID NO: 770058 - DNA, 51 bp, Homo sapiens
tgtatggccgccgtcgcaagaaagccagccccagtgcctgctgagccgttt

SEQ ID NO: 770059 - DNA, 100 bp, Homo sapiens
gctttagcccacatttctggtgcatcaagctttgaaccacgatctttgatcacctctgataaggcattttgttcccaacatcacctttggtcaccctgtg

SEQ ID NO: 770060 - DNA, 82 bp, Homo sapiens
tccaatctgagcgtgctgcggacggcgctgcggtacatccagaccatggtgaatccgggcagcagctcgcagccgcccccgg

SEQ ID NO: 770061 - DNA, 125 bp, Homo sapiens
tcaatgcacgcaagatgaaatttgctctgctaaaaggctccttcagtgagcaaggcatcaacgagtttctcaggatgcagcagtctcggccctggctgctctatgcagtgaatattacatgaagg

SEQ ID NO: 770062 - DNA, 76 bp, Homo sapiens
gattcatgacaaaatcatggagttgctgatgattcctctgatcatgtcagtactttatgtctgggcccagctgaac

SEQ ID NO: 770063 - DNA, 50 bp, Homo sapiens
ccagaattcaattaaagtggctcagacctgcctagagctggaacgttacc

SEQ ID NO: 770064 - DNA, 82 bp, Homo sapiens
gaggatgtggtggtctactctgatgtcaatcttgagggctagccaggaggaagaagaggaggatgaggaggctgcctcaagg

SEQ ID NO: 770065 - DNA, 100 bp, Homo sapiens
acagctagaaggttggctttcacaagtacagtctacaaaaagacctgctagagccattattgcccctcactgttggaggcccatgatattgtggcatcaa

SEQ ID NO: 770066 - DNA, 98 bp, Homo sapiens
gccgccccattatgatgatgtcgaggtaatggtcaatggccaatcctcttacacctttgaccatagaatcaagcctgaggctgtgaagatggtgcaag

SEQ ID NO: 770067 - DNA, 75 bp, Homo sapiens
cacgctgtgcttgagaccaacctgacgggtaccttctacatgtgcaaagcagtttgttagctttaggactgaagc

SEQ ID NO: 770068 - DNA, 75 bp, Homo sapiens
atgtcatccttgcagacctcaacctctcagatgccacttcaaatgaacaacaagagcttttctgtcagaagttgc

SEQ ID NO: 770069 - DNA, 90 bp, Homo sapiens
caagaacagctaaaatgaaagccatcattcatcttactcttcttgctctcctttctgtaaacacaggattcttctcatcgcagtgctcca

SEQ ID NO: 770070 - DNA, 83 bp, Homo sapiens
cagccgatccagcctgcggagcctgtggggcagacaggtgatttggcttctgcacagttaggaggagcaccaaaccgatggga

SEQ ID NO: 770071 - DNA, 96 bp, Homo sapiens
cgcgccactcctcccggaggcgacatggggcacccggtgtaccgcggcgagaagccccagctgcactacgcgattacgtgtgaaaatgaacttgtg

SEQ ID NO: 770072 - DNA, 100 bp, Homo sapiens
cgcacgggagccagctgggtgatgctaaagaaaacccttatggcgaggatgacaataagagtccattccccctgcagcccaaaaacaaacgcagttatgc

SEQ ID NO: 770073 - DNA, 75 bp, Homo sapiens
aacatggactgaagtatccagcgctcattgggaatttagttaaggagcgcctggaccatgctgctgagcgcctac

SEQ ID NO: 770074 - DNA, 82 bp, Homo sapiens
cgggcaagaggcggatggacacggacgtggtcaagctgtaatgagagatccaaacaccaagcgctccaggggctttgggttt

SEQ ID NO: 770075 - DNA, 100 bp, Homo sapiens
cctccggaccttcaagactgtctttgctgagcacatcagtgatgaatgcaagaggcgtttctataagaattgcctgatgtgtgagaagcggatattggcg

SEQ ID NO: 770076 - DNA, 83 bp, Homo sapiens
caatattctactttctgtctctatgaatgtgactaccctggttacctcatatgagatcatgaatcagacagataaaaatcaac

SEQ ID NO: 770077 - DNA, 98 bp, Homo sapiens
gagctgaatatcgaggccaaggacaggatcccagtttcctacaagcgaacaggattctttggaaactatatcgagaagtttactgactttcttcggct

SEQ ID NO: 770078 - DNA, 100 bp, Homo sapiens
ggccggcgatagcccggcgctcatgacagaactgataaatttcaaacggaagagagtggcagcatttagaaagaatctaattgaaatgtctgaactggaa

SEQ ID NO: 770079 - DNA, 100 bp, Homo sapiens
cgctgctgctgccgctgccgccctgagtcactgcctgcgcagctccggccgcctggctccccatactagtcgccggcttgcattgatgacaatgttgata

SEQ ID NO: 770080 - DNA, 103 bp, Homo sapiens
gctgaacgtttagaggcaacagaataccttgtctcagctgctgaagctggtcaagagcaatctgaatccaaatgcaaaggagtttgttcctggggtgaagtac

SEQ ID NO: 770081 - DNA, 75 bp, Homo sapiens
ttgagtccaaagtaccctccttctactaccggcccacgccctccgactgccaggcgaagctgtgctcaggcccgg

SEQ ID NO: 770082 - DNA, 74 bp, Homo sapiens
tcaagtcctggctgaagccacggctgggacaggaagccacagccaagaagacgctggagggaggctgttaggag

SEQ ID NO: 770083 - DNA, 101 bp, Homo sapiens
atagcttctgacagtggagacactggcattggaacttcctgttctgatagcgtggaagtattcaagaaatgctgacaggccagaggctctgccactccgaa

SEQ ID NO: 770084 - DNA, 51 bp, Homo sapiens
aacgagctgagctggcagagtcgataaatcatacggtgattttagatgatc

SEQ ID NO: 770085 - DNA, 89 bp, Homo sapiens
actagacccacagctgttaaagcaacagcatttggaggctacttaagtgaagtagtagaagaaaatactccaccaaaaatggaaaaaga

SEQ ID NO: 770086 - DNA, 83 bp, Homo sapiens
cttggactgagtcctgcaggacacaggacttcctcgttctgcccatcttcctaacaaggctatggctgataacagcagtgatg

SEQ ID NO: 770087 - DNA, 100 bp, Homo sapiens
ggagaggtggaaacagcggatgattctggaactgggagaagatggctttaaagaatacacttcaaagaatagtgacagtggtacaggaaagaaagaaaaa

SEQ ID NO: 770088 - DNA, 100 bp, Homo sapiens
tatgcaggtggtctgtgaagccacacagtgtccagatacgaggttggactaaatgctcttccttcagaggattatccggggcatctactcaatgaaaaac

SEQ ID NO: 770089 - DNA, 80 bp, Homo sapiens
cattgttcagaaaagacttgcaagcagctagacaatgcagatcttcgtgaagactctgactggtaagaccatcaccctcg

SEQ ID NO: 770090 - DNA, 90 bp, Homo sapiens
cgagtcgggctctggaggaaaagaaagggccaattcctgtccccccagcagcatggcatcgtgtgctgaaccctctgagccctctgcccc

SEQ ID NO: 770091 - DNA, 100 bp, Homo sapiens
gggagaggaccggtttgcagatctctgtgctgttgaccattcccggagtaataaatccagttggagcagcagtgatgagaagaggggatcgacacgttcc

SEQ ID NO: 770092 - DNA, 100 bp, Homo sapiens
ctcgggaggaggacctgatcaagactgatgatgtcctggatctgatgagccaagccccccgagaggcccctgctcgtcgggccccatcctcagcgcagta

SEQ ID NO: 770093 - DNA, 89 bp, Homo sapiens
gcaggcctcgtgccgttacggccatcacggcggccgcagtggcgtcctggagccctcctcagccatgaagctcatgactgctctggtga

SEQ ID NO: 770094 - DNA, 100 bp, Homo sapiens
gatgtgagcaacacgggaccggtgaaagaacttgtcctggacaacagtcggtcgaatgaaggcaaactcgaaggcctcacagatgaatttgaagaactgg

SEQ ID NO: 770095 - DNA, 74 bp, Homo sapiens
gttccatgatgggaagtgacatgactggtcgaattgacaaatcttaccctacagtatgtggccacacaggacca

SEQ ID NO: 770096 - DNA, 116 bp, Homo sapiens
caccatcgaggagacctactcgaaggcgatggcgaaactctccaagctggccagcaacgggacccccatggggttaaatgagggacatactgtgtacttggaacgccacatttgcg

SEQ ID NO: 770097 - DNA, 98 bp, Homo sapiens
ctggtgatcggctccttaccagctcacctctcaccgcgcatgtttggaggccttggacaagattcgctatgagagcctgacagacccttcgaagttgg

SEQ ID NO: 770098 - DNA, 75 bp, Homo sapiens
cggcggctgatttagaaggaggttcaggctacggtgagccgaagctccgcagacgctccctgacggcccattggc

SEQ ID NO: 770099 - DNA, 50 bp, Homo sapiens
attgaattttgctactcagataaaagggaggaaataatgctggccataca

SEQ ID NO: 770100 - DNA, 75 bp, Homo sapiens
gcgggggaggagaggagcggccggcccgcctgtcttattgaagttaaaacagatgagtttcctcgccatgggagc

SEQ ID NO: 770101 - DNA, 100 bp, Homo sapiens
ctcaagttgctactcgggacgctgcacctcccgcgccgcacggtggacgaggaagtctgcggtcttgcagttcttcagactgctttaataaagtgatgcc

SEQ ID NO: 770102 - DNA, 100 bp, Homo sapiens
ccacgggcctctccgggcgggagcccagggtggcggcgcctgcggccgagcgccgggagcaggagaagatggtataaactggtccatcagtgacaaagac

SEQ ID NO: 770103 - DNA, 100 bp, Homo sapiens
aaaaagaagcgggagaatctgggcgtcgctctagagctattcaaagtgtgattagagctgggcttggtggcttgcatctacagttccagctacccaggag

SEQ ID NO: 770104 - DNA, 100 bp, Homo sapiens
agattcttcaaggtggggttggcatcccccacatacggcaactttttgctccttcctacacagaaacccattatacttcaagtggtaaccctcaaaccac

SEQ ID NO: 770105 - DNA, 100 bp, Homo sapiens
atgtggtatgataccagcaactggtctattatatcatttaaaccacatggctatctaaagagtgacctaaaacttgacaacgtgatgctcgattctgagg

SEQ ID NO: 770106 - DNA, 146 bp, Homo sapiens
gacgagaccgcggcgtctccagcctcggtaccatggccgggatcatcaagaaacaaatcttgaagcacctctccagcccctgcctgacttctcacgagtccctggtctgacattgcccagtggagccttctcagactgcttgacca

SEQ ID NO: 770107 - DNA, 82 bp, Homo sapiens
ccgagatcctggatacaggtgcagagaactgtggctgcaccatctgtcttcatcttcccgccatctgatgagcagttgaaat

SEQ ID NO: 770108 - DNA, 96 bp, Homo sapiens
cttacgtagataagacactgcaacacaaagtctggtggataaagtatctcgaagacagagacctgatatgaatatattatttctaaatatgaaagt

SEQ ID NO: 770109 - DNA, 100 bp, Homo sapiens
ccctgctgaaatcgctgggctgcagattggagacaagatcatgcagggtattaacgtgtcagggctgagtgttctgggatttctctagaggctggcaaga

SEQ ID NO: 770110 - DNA, 113 bp, Homo sapiens
aagtaatcagtctttgacaagtgatgagaagctgtcggagcttcccaagggaggagatgaagtggcggcagtgggcggacgactggctggtgcacctgatctcccccaatgtg

SEQ ID NO: 770111 - DNA, 100 bp, Homo sapiens
gtgtctttgctgagggtcacattgagctgcaggttgaatccggggtgcctttagaatggagaagctgatgccatgagcttggatggagggtttgtctaca

SEQ ID NO: 770112 - DNA, 100 bp, Homo sapiens
cggcgcgcgaggtcaagctgctgctgctcggtatcgatatcctgaagcttgtagcagcccaagtgggaagccagtggaaagatatctatcagtttctttg

SEQ ID NO: 770113 - DNA, 83 bp, Homo sapiens
cacggggtgctgcagatcctgttccagattcccaacctgctgagcatccgcacacccactcaggagttggggcccagctccca

SEQ ID NO: 770114 - DNA, 98 bp, Homo sapiens
tggacatccttggggctgctgagacagggactttgaacatgtcggggatcgccctcagcagactcgcccaggagaggaaagcatggaggaaagaccac

SEQ ID NO: 770115 - DNA, 102 bp, Homo sapiens
tcaacgacgtgcagaccctcaaggatggacggcacccgcagggcgagcagatgtaccgcaggctaggtcctttcacaaaactgttcctgtgaaagcatttcc

SEQ ID NO: 770116 - DNA, 100 bp, Homo sapiens
aacaaattcttctcggagtacttcagaagttaatccacaaatgcttcaagacttgcaagctgctggatttgatgagggttggatgactgcctgcaacaat

SEQ ID NO: 770117 - DNA, 75 bp, Homo sapiens
gaaggcttcaaaggctgtcgcaaggaggaagggtccctccattaagcagttcatggacatcttctcgctaccgga

SEQ ID NO: 770118 - DNA, 132 bp, Homo sapiens
ggacggggccgggcgacctgggcaccagcaggacccgaggccaggagccaggggcccagaagatgcctgctctgtgcctgtatctgagatcatcgccgttgaggaaacagacgttcacgggaaacatcaagg

SEQ ID NO: 770119 - DNA, 100 bp, Homo sapiens
tgctcttcctcccttcgctcgcaccatggtggtttggctttgaatgacagcaagaactctgtctttaatggcttcattggtagcgtatgatgattcggac

SEQ ID NO: 770120 - DNA, 71 bp, Homo sapiens
acgtgcggtgctcgtcgggagtgatcacctaccctacagacaggacagctggagcccctgctgtcccggtt

SEQ ID NO: 770121 - DNA, 82 bp, Homo sapiens
cctgccgtccttctccactttcgccagcccgtgccgcgagcgcggcctgcaggaggtgaaatgacaatggatgctctgttgg

SEQ ID NO: 770122 - DNA, 75 bp, Homo sapiens
gtctactgtgaaatcgatgggtctggaaatggatggactgtgtttcagaagatggcgggtgaaaaagttgagaag

SEQ ID NO: 770123 - DNA, 78 bp, Homo sapiens
agaatcaaagggccgggagcgatgatagggatgaggaagaaatgaccaaacgagatgacaaaagagatatcaacagat

SEQ ID NO: 770124 - DNA, 83 bp, Homo sapiens
ggaaataggatttaaccgctctctgcctcccaggtactggctgtgatcgaacttctcaaccctcagagacttagatcttccac

SEQ ID NO: 770125 - DNA, 100 bp, Homo sapiens
ctggtacaagatcactgactctgaggacaagggcaacctcctcctgacaggtgacaaggatcaactggtgatgctcttggaccagatcaacagcaccttt

SEQ ID NO: 770126 - DNA, 75 bp, Homo sapiens
agaccgtgaagagaaagatgcaggtttgtgaaatggctgctgacatttctgaatccagcggggctgactgcaaag

SEQ ID NO: 770127 - DNA, 87 bp, Homo sapiens
gtctgtgaagccacacagtgtccagatacgagggttttgcactgattgcaaaaataaagtcctccgagcatacaatatccttattgg

SEQ ID NO: 770128 - DNA, 76 bp, Homo sapiens
atcagggaaagccagtgcctatgggcgtggagcgcatcgacgagcccggcctgcggagcctgcgcactgcacggca

SEQ ID NO: 770129 - DNA, 98 bp, Homo sapiens
aagacatttcctgctcggaaccttgtttactaattgcgcattctacattctaaaggggagctcagtgaagatagacataaacagtatgaggaatttgc

SEQ ID NO: 770130 - DNA, 83 bp, Homo sapiens
cgttcctggtcaatcatgacttcacccctctggaggaattacatgaatgacagtcttcgaaccaatgtgtttgttcgatttca

SEQ ID NO: 770131 - DNA, 102 bp, Homo sapiens
gccgcgcagctcctggcctattacttcacggagctgaaggatgaccaggtcaaaaagggggatatgagactttctactcggaatatcctgagtgttgcgtgg

SEQ ID NO: 770132 - DNA, 96 bp, Homo sapiens
cgagaccagaggccgaactcgggttctgacaagatggccgggctgccccgcaggatcatcaagggggaaccgtgaaggactgagccgcacctcaag

SEQ ID NO: 770133 - DNA, 90 bp, Homo sapiens
taggagcggtccctgcgcttgctgctgggaagtgggtagctacagcaagctgggtagcaggcagatccaaaggatatcatgaagtttcca

SEQ ID NO: 770134 - DNA, 82 bp, Homo sapiens
gtggaccacatagacatttacgcggatgtcggcgaagagttcaaccagatctttgtagaatttgatggctgtaactggaagc

SEQ ID NO: 770135 - DNA, 90 bp, Homo sapiens
cagaagctgctgaaattcctgaataagcactacaatctggagaccacagtcccacagggaaatgtttcaacgtgcgcaagcgttgcggcg

SEQ ID NO: 770136 - DNA, 50 bp, Homo sapiens
ccatccctggaggagacctggcagcagacttaattcagtgcacaaatgag

SEQ ID NO: 770137 - DNA, 75 bp, Homo sapiens
agttcctggtccacaacgtcaaggagctggaagtgctgctgatgtgcaacaaggcatttgataccttagctaaag

SEQ ID NO: 770138 - DNA, 83 bp, Homo sapiens
ccgtccttctccactttcgccagcccgtgccgcgagcgcggcctgcaggagatggagaaggaggagacaacccgggagctgct

SEQ ID NO: 770139 - DNA, 75 bp, Homo sapiens
ccagcgatatcctggatgagaagcagatctttccaagatgagatgggattctccaacatggaagatgatggccca

SEQ ID NO: 770140 - DNA, 100 bp, Homo sapiens
agtggagagcgccagagtaatggctctgtcccaaatgggctacaacctgagcccccagttcacccagcttctggtctcccgctactgcccacgctctgcc

SEQ ID NO: 770141 - DNA, 75 bp, Homo sapiens
cgtcgatatgcagaaacactctttgacattctggtggctggtggaatgctgggtttttgccagtcacattgacaa

SEQ ID NO: 770142 - DNA, 75 bp, Homo sapiens
ggccagcaggggcagatggcaagtggagacagcaatctcaacttcagaagaacatgagctgcctgtggacatgga

SEQ ID NO: 770143 - DNA, 99 bp, Homo sapiens
tgagaccatctaccagtctgcaagcgtcttcaaaggagccccacatgagtttaattggttggggtcagataagaagaggagtgacaatcaagccaacag

SEQ ID NO: 770144 - DNA, 98 bp, Homo sapiens
tttgatgcagcatttgttcactgtaaacttcataatgggataaacagagacagcagcatgactggtgatcccattaagatactaatgccatcactgtc

SEQ ID NO: 770145 - DNA, 76 bp, Homo sapiens
atggagttgcaggactatgttcagaaaacctactcagaagacacctaccgattcaattagcagagcctcacagaca

SEQ ID NO: 770146 - DNA, 83 bp, Homo sapiens
gcggggaaccaaggagacgctcctggcactgcaggcaaatgaagaggattcttccagttctctagtgaaggatcacctttttc

SEQ ID NO: 770147 - DNA, 74 bp, Homo sapiens
cattgacatgtcatgcctgggtgcagcttctctagctggccttgctgttgggaaatcctcattgacgattcaat

SEQ ID NO: 770148 - DNA, 75 bp, Homo sapiens
aagacactgaagaaagcatcgtcctaggaatggatttctcctctaatgacagtcacccacaaaagctgtatataa

SEQ ID NO: 770149 - DNA, 82 bp, Homo sapiens
caggattgttcctgagggagccaaaaaagtgtttggtgtataaaacagaccaagctcaagatgtaaagaagattgagaaatt

SEQ ID NO: 770150 - DNA, 100 bp, Homo sapiens
cgaggctcccttgacaggcggctttgcatcggaaatcagctctacagttcagttggtgaggatagccaaggttctggggacagaagatttatatgactat

SEQ ID NO: 770151 - DNA, 74 bp, Homo sapiens
atgagaccctggtggagtttgctattgcctcccccactggcaggattgccatgagttgtggagtaagaaacggc

SEQ ID NO: 770152 - DNA, 51 bp, Homo sapiens
ggccttcccagccatgcagaactaattctgaaggtggactctatgtatgca

SEQ ID NO: 770153 - DNA, 75 bp, Homo sapiens
agcacttccggtcacgccatcgttgctgccttcttcgtcaagcaaaagctgatgaagcattgaaagccaaagaaa

SEQ ID NO: 770154 - DNA, 100 bp, Homo sapiens
gaattaggggaaaagaaacctcgtcggagagcagaggagggccctcctggacccgggagcggaccctggtggcggtgaagcccgatggcgtgcaacggcg

SEQ ID NO: 770155 - DNA, 100 bp, Homo sapiens
cggaggtgggctagcactgaaactgcttttcaaggtgtgatgaatgcagactctgctaccattttggctgtttggatcctcctttgaaaaagtctcctaa

SEQ ID NO: 770156 - DNA, 75 bp, Homo sapiens
tgtctatggaatttgcaccaaattgaaaacatctcccaatgaaggggcaatgttaaatattgttcaagattcagc

SEQ ID NO: 770157 - DNA, 100 bp, Homo sapiens
cggcggctcctgccctctcgctttccctctcgcgtctctggctgcaggctaccggctctctgaccagttccacgacatcctcattcgaaagtttgacagg

SEQ ID NO: 770158 - DNA, 100 bp, Homo sapiens
ttggtggccttgcatggtttctgcagatccactccttcacagctataccaaacttaaaggctcctgcttctgggtggccgtgctggatggcaacgtggtg

SEQ ID NO: 770159 - DNA, 100 bp, Homo sapiens
ctccagggtgtcaggactaagagaagtcacaaaacagcagatttcccaagagcagcggaaaatgatccagtcacaggcctcaggagtgcaagtagctgat

SEQ ID NO: 770160 - DNA, 100 bp, Homo sapiens
cggagaagacaagggcatcgccgcctcagccgccgccgccgccgttttcgcctgcagctgctcaccggtggagccttttgccagcttgaccgaggccgtg

SEQ ID NO: 770161 - DNA, 80 bp, Homo sapiens
tggtctctgttggtgtagaagccaaaatcagccaaactggcaagacgcagtcaagaacgggacaatcttggcatgttggt

SEQ ID NO: 770162 - DNA, 98 bp, Homo sapiens
actttgatactatctacagcattttgcagtctcaccaacggctttgggggtgcgaggagcgagcaggagccgggcggcggcctggggaggaaggccac

SEQ ID NO: 770163 - DNA, 100 bp, Homo sapiens
ccggagagttctgcatgttgattcacatatctgaagagatggattaagaatgctttggattaaggattgtggagcacatttcaatcattttaggattgtc

SEQ ID NO: 770164 - DNA, 101 bp, Homo sapiens
ggctgcgggagccgggctaggacgccgagcggtgactccccgccgctcccgggggccgtgacggaatatgatgaagaatgggctaagaaaattcagagtga

SEQ ID NO: 770165 - DNA, 83 bp, Homo sapiens
gaacgggccaagcaggtgaccatggcagaactgaacgccatcattggggcagggcaagaatcctttcgttccatcacaaggtc

SEQ ID NO: 770166 - DNA, 75 bp, Homo sapiens
accaggcgaagctggccgagcaggctgagcgatacgacggtggtgaaattgcctctacctttgatcacccagaac

SEQ ID NO: 770167 - DNA, 100 bp, Homo sapiens
gaagactagtctattggttaccggtgtatacgccagatgaccgaagctggctttggtgctgacatcggaatggagaaattcttcaacatcaagtgccgag

SEQ ID NO: 770168 - DNA, 83 bp, Homo sapiens
cgatgttgcagctcagccctgaagaaaagggaaaacttgctgcggttgctcaagtagagacggggtttcaccttgttagccag

SEQ ID NO: 770169 - DNA, 83 bp, Homo sapiens
cgagagcctaactttgcaaccattggtctgcaggacatcactttagatgatggaggagttggcggggagccttgggcccctct

SEQ ID NO: 770170 - DNA, 50 bp, Homo sapiens
tccaacaacatccgcgagatcgagatcagtgtactgttacccggacatac

SEQ ID NO: 770171 - DNA, 75 bp, Homo sapiens
caaaaccaacgcctggctcggagcagcagcctctgagcttcaagtctggatagtcagaagtttgtgacagtgccc

SEQ ID NO: 770172 - DNA, 75 bp, Homo sapiens
ccggaatcccgctcggagccagccagccgtcccgagctaccagcagggtccctgatgggcctgggtgacattatc

SEQ ID NO: 770173 - DNA, 74 bp, Homo sapiens
ctctttgcatccggagagtggacaagaaagtgggaagaagagcgctatcctgaaggcatcaagtggaaattcct

SEQ ID NO: 770174 - DNA, 83 bp, Homo sapiens
ctggggctggaaattgcgctggaccgtcgccttgctcctcgccgcggcggggactgcagaagtttccaagggtcacttgtgtc

SEQ ID NO: 770175 - DNA, 100 bp, Homo sapiens
gttaacctcttcaaacgacctttgcccaaatccaaaccaggtttcacagatggcagtgttacattgaacaaaggagacatcacccgggaccggcatagca

SEQ ID NO: 770176 - DNA, 90 bp, Homo sapiens
catagagctgacagccccagatagcaatgatgatgtgaaaacagaagctgtggctgccatggcccgtgatgagaagaattactatcaaga

SEQ ID NO: 770177 - DNA, 73 bp, Homo sapiens
tcggtcgcctagtctggagaactagtcctcgactcacgacgctatgtccagcaaaggctccgtggttctggcc

SEQ ID NO: 770178 - DNA, 82 bp, Homo sapiens
aaggaagtattagaaatgagctgaagaccattcacaggtgctccatacttgcttgcagtgcctacgtggctctggctttggg

SEQ ID NO: 770179 - DNA, 50 bp, Homo sapiens
tccagcctgcggagcctgtggggcaggtgacagtggatagtggaaacagg

SEQ ID NO: 770180 - DNA, 50 bp, Homo sapiens
gggtgacgtgtgcattgagtaaaccactactgggttggggtctccacgac

SEQ ID NO: 770181 - DNA, 100 bp, Homo sapiens
tcctttaccttgtggaaatgatttcctcaggactccagattatctacaacactgatgagatggcgtttaatgattgcttcagtttgaactaccctggcaa

SEQ ID NO: 770182 - DNA, 90 bp, Homo sapiens
ggttcggctgcgcgagcggagggaggcggagacacctatggctgccgatgaaggctcagcagagaaacaggcaggagaggcccacatggc

SEQ ID NO: 770183 - DNA, 100 bp, Homo sapiens
tgactccccggccaagaaatgccggctgcggaggaggatggactcggggagaaagaacaggccgcgagaaccagcagaaatccaccaatgtagtctatca

SEQ ID NO: 770184 - DNA, 76 bp, Homo sapiens
tgaatagttctactccttctacaggtgtgtatgaaatacatgctacaggatttaactatcagaatgaagatgaaaa

SEQ ID NO: 770185 - DNA, 103 bp, Homo sapiens
ggcttcggagcgggagtgttcgttgtgccagcgactaaaaagagcaaccatgtccaagggacctgcagttggtattgatcttggcaccacctactcttgtgtg

SEQ ID NO: 770186 - DNA, 84 bp, Homo sapiens
aacaacctctcctcttcgtctccgccatcagctcggcagtcgcgaagcagcaaccatgaacatccagtcatggataaaaatgag

SEQ ID NO: 770187 - DNA, 78 bp, Homo sapiens
aaattactatcagtgatatacttagatcctgctcacactaaaatatgaaccacaaacacacagagaaacaacctgttc

SEQ ID NO: 770188 - DNA, 51 bp, Homo sapiens
gcttgggctcgcgccgctgaagtctcaggacgggcgctttggagccggccc

SEQ ID NO: 770189 - DNA, 106 bp, Homo sapiens
cagaagcagcaaaggaacctctaccagtcgaacaaattaatgagtttgaagaagctgtcaatttctttacttgggctcttaaaattaacccatgttttctggatgc

SEQ ID NO: 770190 - DNA, 75 bp, Homo sapiens
ccgccgccccctcccggggctgaccgcgtcgtcaaaggagtgaaacacaaatcttttctaacggctgaggactgc

SEQ ID NO: 770191 - DNA, 126 bp, Homo sapiens
gctgcttggcacgtggctcccttggtgttccccttttactgccaggacactgagatttggagagctcttcaccaccaggagtgttccttgagaaggactatgagatttaccgggattacagtgcgg

SEQ ID NO: 770192 - DNA, 100 bp, Homo sapiens
ctgcatacggcctcaggacatcaaggagcgccgagcagtcatcatcctcaggaaatgcactccatccgcaacctgccatccatgcggttccgtgagcagc

SEQ ID NO: 770193 - DNA, 100 bp, Homo sapiens
ctgaccgtatctgggtatttggaggtgccaaccaatcaggaaatcgaaattgtctacaagtcctgaatcctggtgtgatccctcacatccacaaatctct

SEQ ID NO: 770194 - DNA, 100 bp, Homo sapiens
ggggagcggggcgcggcgggaaggagcgggcgacccggtgtgtgggccagcggagctccgggaggacatgtatgcccaggactctatagagctactaaca

SEQ ID NO: 770195 - DNA, 111 bp, Homo sapiens
ttttgaaatggaagcctcccagtctgaattctgtggattttcgtctaaaaataacaagaatgggaggagaaggaagatgcagcacactgtcaaaatatccggagacgccag

SEQ ID NO: 770196 - DNA, 87 bp, Homo sapiens
caagagcgtgccctacttcaaggataagggtgacagcaacagctcggcgggctggaaggatgaagtaggtgttccaggtagcaattc

SEQ ID NO: 770197 - DNA, 50 bp, Homo sapiens
gctgcagccatggccccaatcaaggatcctgcgcatccagaaagagacgc

SEQ ID NO: 770198 - DNA, 100 bp, Homo sapiens
tgcttcctgctggccgtgctgctgcagtgagccccatgcacggttctatgcagctcagatagtgctaacattcgagtacctccattcactagacctcatc

SEQ ID NO: 770199 - DNA, 100 bp, Homo sapiens
cgagaacagaatttcttttggcacctcctctccgcgcgttcttggggggcaagattcttgccaagagaattaatgtgcgtattgagcacattaagcactc

SEQ ID NO: 770200 - DNA, 98 bp, Homo sapiens
cgagggtctgaagttcacgactactagaaggggaggggagtggaaaggctctcagtgaaaaagaaatctcccaagcctaagaagaagaagcacaggaa

SEQ ID NO: 770201 - DNA, 76 bp, Homo sapiens
tccagagctgaggactgcctgtttgcagagttgctggagaatgtaaccctaatccataaaccagtgtcgttgcaac

SEQ ID NO: 770202 - DNA, 90 bp, Homo sapiens
ggcagccaggcaggtccgtgaagctgtgttgtcctggagtgactgccgggcatacccagatggaagtagcaaagaaaagagaagagcagc

SEQ ID NO: 770203 - DNA, 101 bp, Homo sapiens
taaacaactaaatcaacagtatgaaaaattatttcataaatggatgctgcaattacaagcttcttcgagacaccttcacttccctgggctatgaagtccag

SEQ ID NO: 770204 - DNA, 102 bp, Homo sapiens
gcatcagtgttatctcgaccagaggctagtaggactggagagggtactagatggaaacttgagaaaggactgcttattgataacagctaaggtattcctgga

SEQ ID NO: 770205 - DNA, 90 bp, Homo sapiens
ggttctgccactggggcatataatgccttggaaacgtttatggttggctgtgggagatgtgatgactggtttcatggtgattgtgttggg

SEQ ID NO: 770206 - DNA, 83 bp, Homo sapiens
caaactgtcggcttcaaagagaaaaggcaacatcctgtcacaggccatgctctggcaaaaacagtgcagccgtagcagagcgg

SEQ ID NO: 770207 - DNA, 51 bp, Homo sapiens
cggaccagccggcgcaagcgggcgaagggatacccacccaccatcccaggg

SEQ ID NO: 770208 - DNA, 96 bp, Homo sapiens
ggagatacccattttgactcagatgagccatggacactaggaaatcctaatcatgatgatgtgaaatctggcaactatacagtgttacaagttgtg

SEQ ID NO: 770209 - DNA, 100 bp, Homo sapiens
aatggccacacgcgtacccccgtagcggaaaaacgtggatcatccatgccatggagtatgaacttcagatccgtggcggagacaagccagccttggactt

SEQ ID NO: 770210 - DNA, 82 bp, Homo sapiens
caggacatcttgaccatcttcaagcgcctccgctcggtgcccactaacaaggtactccaaagattcaggtttactcacgtca

SEQ ID NO: 770211 - DNA, 98 bp, Homo sapiens
aaacgggtcgcccgcgattctcagggattgatcgcctcttcaggacctgaaggagaagaaggagaaggtggaggagaaggcaagccggaaagagcgaa

SEQ ID NO: 770212 - DNA, 101 bp, Homo sapiens
ttgaagtgtcattctacagtgtttcagatgacaatgctccctctccttatatggccatgttttatggatgagtatgagaagactgaggaagaattacaaaa

SEQ ID NO: 770213 - DNA, 142 bp, Homo sapiens
gccaatccattcaggatgggaaaccacgcaggcaaacgagaattaaatgccgagaaggccagtacggccccttcacagatgtagtcactacaaatcttaaattgcgaaatccatcggatagaaaagtgtgtttcaaagtgaa

SEQ ID NO: 770214 - DNA, 74 bp, Homo sapiens
cactgcgggccggcgaaagctggccttcctggatgctctgcagaaccaggctgaggccagcagcaagatcatcg

SEQ ID NO: 770215 - DNA, 82 bp, Homo sapiens
ggggcttccgcctcgtgggcggcaaggacttcgagcagcctctcgccatttcccgggaaatctggcattttttaaagtttgc

SEQ ID NO: 770216 - DNA, 96 bp, Homo sapiens
aaggacattccaggcagaggcaaggcagagatcctacaagaatccaggatgatgatcccagattgccagcgcaggttggaagccgcatatttggat

SEQ ID NO: 770217 - DNA, 75 bp, Homo sapiens
gaggaggaggaggcttgggcttgcgccgttgaaggtcatcatcagatttgaaatatttaaagtggatacaaaact

SEQ ID NO: 770218 - DNA, 74 bp, Homo sapiens
tatcagtgatggctcttctctggaagatcttgtggttggaaaagagactgttcaaaccactgaggatcagattt

SEQ ID NO: 770219 - DNA, 82 bp, Homo sapiens
aaacgaggcgccgcgttggcgcttggacggcgggaaccggctccggagcgagaacgcgcgaactacacggtggtgaacacag

SEQ ID NO: 770220 - DNA, 101 bp, Homo sapiens
gctcagaggtcctgggctgggaccccgacagccttgctgactatttcaagaaggtgcaaatatatacagagcttcataatcagcccaagaccacatagagc

SEQ ID NO: 770221 - DNA, 82 bp, Homo sapiens
aattccggcggctgccgtgactccagtgcaaggcccaggagcttttttcctgttggaattggggagcatctgcagtcattta

SEQ ID NO: 770222 - DNA, 76 bp, Homo sapiens
ttgactttccatcttcagttcgaatacatttattgaccaaaatggcagacattgaatggagtttcactcttgttgc

SEQ ID NO: 770223 - DNA, 100 bp, Homo sapiens
aaatacaactggaaaacagctttttgatcaggactcaggtacttctgccctccctttggtctccctgttcttctatgtggtgacagatggcaaggaagtc

SEQ ID NO: 770224 - DNA, 75 bp, Homo sapiens
gattcgccaagagaagaatctaacaaacggcaaagaacttactgattcttgaggaacctggcttctgtatttacc

SEQ ID NO: 770225 - DNA, 73 bp, Homo sapiens
ataataacacctggaataacagccacatagcactggtgggtcaagtgcacgggggactcatgggtgtgattca

SEQ ID NO: 770226 - DNA, 76 bp, Homo sapiens
agctttgcgcaacgccaacctcaggcgagatgtatgaaaacaaagttgcagtacgtgacagagtggcatttgcttg

SEQ ID NO: 770227 - DNA, 75 bp, Homo sapiens
ttaaaagaaactgtgaagcaaattcgtcagatcaaagaacaagctaccagagattcactgactgctataagtgct

SEQ ID NO: 770228 - DNA, 75 bp, Homo sapiens
attttgagatgatacgagggatgaaaatgaaactgaatcctcaaaattccgacttgcaattgtgaccaaatatat

SEQ ID NO: 770229 - DNA, 98 bp, Homo sapiens
cgcaggcggccgcacaggttccaggtctttaacgtgagcccgctgcaggtgtgcggcccagtccgagacagcagacattcacggcatggtgtaactcc

SEQ ID NO: 770230 - DNA, 74 bp, Homo sapiens
aggaggatggcggagtcggggctcctgacggtatactgcaacatccagatggcacagttttgaaacagttacaa

SEQ ID NO: 770231 - DNA, 75 bp, Homo sapiens
gcagtctaaacctgtgaccacccctgaagaaattgcacagctccctgcggtttctgagttctccaccagtgagac

SEQ ID NO: 770232 - DNA, 99 bp, Homo sapiens
ttgcatttgtttctgctgaccgcgggccctgccctgggctggaacgaccctggttggccttcattccacgatgtgatcaattctgaggcaatcacattc

SEQ ID NO: 770233 - DNA, 75 bp, Homo sapiens
cccggaacatggactctgactcttgcgccgccgccttccacccggaggccaggtcagagcagcccaccatgggat

SEQ ID NO: 770234 - DNA, 95 bp, Homo sapiens
cggccctggaggccggcagctggcgctggggatccctgctcttcgctctcttcctggctgcgtccctaggtgtcagctgtgatgcatgtttaaaa

SEQ ID NO: 770235 - DNA, 50 bp, Homo sapiens
gctcgggacggaggacgcgctagtgtgtcgtgaaaactacccctaaaagc

SEQ ID NO: 770236 - DNA, 96 bp, Homo sapiens
gctcgtcaccgccccctcctgccccttcatgcatgcgcggaggccgcctgctagcaagaaaatgaaactgaagccgtggtcacgtgacaggacatg

SEQ ID NO: 770237 - DNA, 95 bp, Homo sapiens
atgggcaacgtggtaagaccagtgaattccacgaacatgagcccactgctgcacttctatggccgtaaaataacaacgaacttgatgcaagtgat

SEQ ID NO: 770238 - DNA, 74 bp, Homo sapiens
gcgatggaaagaaaatagttagttaccaggttgcacgttttcaaaaaatacctaatggtgaaaatgagacaatg

SEQ ID NO: 770239 - DNA, 82 bp, Homo sapiens
gcctgcagcgggagctggacggcgagcgcgagcggcgcgagaaagttgggcccgaaggcatcctgcagaacggggctgtgga

SEQ ID NO: 770240 - DNA, 88 bp, Homo sapiens
acatcgcagaggccgactgggagagtgtctccagcatcctgcaagtgtatgcaaccgaggatggacttatacacacaaatgaccaggc

SEQ ID NO: 770241 - DNA, 80 bp, Homo sapiens
agatggcggcggagctggtggaggccaaattccagggtctccctccactgctgtagtaacccgggtccggggcctcggtg

SEQ ID NO: 770242 - DNA, 100 bp, Homo sapiens
actccagagtatttggctccagaaataattctcagcaaggaagaaggtagataatgactataatgcccttcgagaaagactcagcaccttgcctgataaa

SEQ ID NO: 770243 - DNA, 51 bp, Homo sapiens
atctgttatttcgagcaggagaatgactgagctgatggaactgtgaatcaa

SEQ ID NO: 770244 - DNA, 100 bp, Homo sapiens
attcaaacaaccaaccctgatttcctgcttctccttttcatgagtgttcctgtggtctctgcacctcctttctcaggcttatggctatgggccatacggt

SEQ ID NO: 770245 - DNA, 75 bp, Homo sapiens
ttagcagtcacgacctccagcacaggtgcgagaagatgtactaaattcattgaataacaactttcttcaaacgct

SEQ ID NO: 770246 - DNA, 50 bp, Homo sapiens
acagtgtgtgtgcagcgagggctgacacctggatttcattagcatcatga

SEQ ID NO: 770247 - DNA, 75 bp, Homo sapiens
agcgaccccacagtgcagcgctccgtgtttgcatcggtggacaaggtgccaggtactccaaagattcaggtttac

SEQ ID NO: 770248 - DNA, 82 bp, Homo sapiens
tcagccccaaacaggacgaaggcgtgctgaagtgtactaatggtcacttgatgtgcgctggctgttttatccacctactagc

SEQ ID NO: 770249 - DNA, 75 bp, Homo sapiens
ttaaggtcttcagcggggcgctccaggaggcactcacagtcatgttgtcataggaacaactggagaagaataaag

SEQ ID NO: 770250 - DNA, 85 bp, Homo sapiens
cagacataaaattcgatggattcaacatcaacacttgcagggaaatgatcagtctgttggattgctagcaatgtctcccacactg

SEQ ID NO: 770251 - DNA, 82 bp, Homo sapiens
gttccatcatggcgtcaatgcaggcacaattcagattcagaagcgtcaacagttagtcagaaagatacatgaagatgaattg

SEQ ID NO: 770252 - DNA, 83 bp, Homo sapiens
tcggtagaactttgccttcctgaatctttttccctgcactacgaggaagacaattctgtggtgttcttggtcacacatttatg

SEQ ID NO: 770253 - DNA, 100 bp, Homo sapiens
gctaaaacattttgagaaatttcaggatacagcagaagcattagcagacagacagtctagcagtgcttccttggagaccctgttagcacttcttcaggca

SEQ ID NO: 770254 - DNA, 100 bp, Homo sapiens
gtaattcgtggcctgggagttcagcttttagagcaggtgtatgatcttttggaggaggaggatgaatttgatagagagtatgattcatccagccttccag

SEQ ID NO: 770255 - DNA, 108 bp, Homo sapiens
atgggatgcttatggaatgtgcgagaacacggggacaaaagtggctctcaatccagcacatgcacattgaagcaagttaaaggatttaatatgaagcacagaagcaga

SEQ ID NO: 770256 - DNA, 100 bp, Homo sapiens
gctgaacgtggacagcctcatcacccggctgctggaggagtgtgaacatggctacgcctcttcattcccgtccatgccgagcccccgactgcagcattca

SEQ ID NO: 770257 - DNA, 100 bp, Homo sapiens
tcgacgatctccatatttcattgcaaggagtataccatgctgtgtctgttatgcggcaaagccgaagatactatcagtattctccctgatgacccccgac

SEQ ID NO: 770258 - DNA, 100 bp, Homo sapiens
ctgtcctcgtccccagcggtcccgcccaacgcccgactctgagccagtctacttgatgacttatacaagtatttcttcttccatcactcccacggagaca

SEQ ID NO: 770259 - DNA, 100 bp, Homo sapiens
agcccactcgagccgcagccatgtctggggacgagcaggtggtccattatggctgacatgcaaaatctggtagaaagattggagagggcagtgggccgcc

SEQ ID NO: 770260 - DNA, 100 bp, Homo sapiens
caaaccaaactggagctggtgcagcaggaattgggatcgtgtcgctgcgataagccaatggacacgtcagtgttatctgaagaaggaggagagccttttc

SEQ ID NO: 770261 - DNA, 88 bp, Homo sapiens
tgaggcgaggctagggaggacctcacttccccggggtgtaataatgttaactgaggtgaaaggtgtagcagtcactcggcctacaccc

SEQ ID NO: 770262 - DNA, 136 bp, Homo sapiens
tgtggcagtgcccgtcggcgggctgggggcggcacgactggaggcacaaggaggacgccggcgtcttctgctcaggttgtggcagcactgcctgaaggtatgagaccagattctaatctttatggttttccatggg

SEQ ID NO: 770263 - DNA, 100 bp, Homo sapiens
tctgatttggggatctctagcctacaggatggcttggccttgcacataaggccaaaatcctgagcatgatggaagacaataagcagctcgcgctccgcat

SEQ ID NO: 770264 - DNA, 51 bp, Homo sapiens
gtgaatttccatgtcaacatagtccagggcgttacctactgcagagaaagt

SEQ ID NO: 770265 - DNA, 96 bp, Homo sapiens
aggagagtaaaaagaacttcctggagaaactgaagcgggacgttgaggtcccaggtgtgacaccttcagcaggtctcagggaagatggcagcccta

SEQ ID NO: 770266 - DNA, 82 bp, Homo sapiens
caccagcaccgcagatgttgtcaaggtggcctaccaggaggccaggggtgtcgccatggcattagtatcatttgaagacgtg

SEQ ID NO: 770267 - DNA, 100 bp, Homo sapiens
ctagtatataatggtgtttaccaaatcatggtgtcatggaaagggatttactttatactgactctgttttggggaagcttttttggaagcattttcatgc

SEQ ID NO: 770268 - DNA, 96 bp, Homo sapiens
ctggacaacaaccggccgctggaggcgctcatggaggtgtctgtgtctggtactccaaagattcaggtttactcacgtcatccagcagagaatgga

SEQ ID NO: 770269 - DNA, 83 bp, Homo sapiens
cttcaaacgggcagggctctaggaaacatatgttacgatagccgattggtccaaaggaagattttttccattgtttgaaatgt

SEQ ID NO: 770270 - DNA, 83 bp, Homo sapiens
cttactgttgcgtggttcgttattaacaggcccacccttcctccattctgagcacataaaaaccccacactcagccagactca

SEQ ID NO: 770271 - DNA, 74 bp, Homo sapiens
cagtcttctaccttggaatagtgaatgaataactgaagtgaagtgatggactccgatttggagagtagtaagac

SEQ ID NO: 770272 - DNA, 75 bp, Homo sapiens
cgggctggagacatggaccgcggcgagcaagatttgaggcttaagcaacttcttccggggaagagtgccagtgca

SEQ ID NO: 770273 - DNA, 90 bp, Homo sapiens
gaggcaatcatatgaagtttctgtcttaactgcagtaaatccacaagaggtgtgggacgcctgctcagaggccctgataatgtttgataa

SEQ ID NO: 770274 - DNA, 75 bp, Homo sapiens
cctgttccgcttctcagaggacgccttcaacaccaccttcatctccaccatcgtgttcctttctgccgaaattct

SEQ ID NO: 770275 - DNA, 74 bp, Homo sapiens
cccagatgctcataaggattgtcctctttctacaaaaggccaatggccatgtgtctcaggatcaagaggaaccc

SEQ ID NO: 770276 - DNA, 74 bp, Homo sapiens
cgctccccgccggctgtccgcaacctccgccagcgtcggtccctgggcaggccatggttgcttgttatccgggc

SEQ ID NO: 770277 - DNA, 97 bp, Homo sapiens
tacgcggtgcagctgccgacaccccagcctgttgctgacactagtggctaccagggcatggtggacggaggctcaaacatcgcagaggccgactggg

SEQ ID NO: 770278 - DNA, 100 bp, Homo sapiens
cttactcaaccttctgataacctgcttcattattgttatgtacactgctatcttaaggaagatgagaatgtgcctactgctcctgatcctccaagtcaac

SEQ ID NO: 770279 - DNA, 90 bp, Homo sapiens
aagcgaagccttgaaaaagctgccctgagacggtgtcccgccgaaaggatcctcagtcttccacaatgaaccctgtttacagccccgtgc

SEQ ID NO: 770280 - DNA, 98 bp, Homo sapiens
tcatcatgagcgatgttaccattgtgaaagaaggttgggttcagaagagggatgaacgacaatctccttgagagctggagcgacctcgacgagctgaa

SEQ ID NO: 770281 - DNA, 75 bp, Homo sapiens
tttggttataaattatgatctacctaccaatcgtgaaaactatattcacagagagggagccggcatcagaaaaca

SEQ ID NO: 770282 - DNA, 100 bp, Homo sapiens
cgagccagccgctgttttgccggaggagcccctcaggccagtgcagcagctgccccgagccccgtgcttggcaacattccccccaacgatgggatgccgg

SEQ ID NO: 770283 - DNA, 102 bp, Homo sapiens
aatgcagtgcgcatggacgaggctcgggataacgcctgcaacgacatgggcaacgcggtaaaaatattgcttcggtgggtgacgcggtacagctgcccaagg

SEQ ID NO: 770284 - DNA, 75 bp, Homo sapiens
atttggagtgtgcgtgcgcgccgagcgacctgcctagagctggaacgttacctccagagcgagccctgctatgtt

SEQ ID NO: 770285 - DNA, 100 bp, Homo sapiens
ggcagatcgagcagctgcgtcgctgcgagctcatcaaggagagcgaagtcaaggccctgtgcgctaaggccaggcatctctgacacgctgtgggccatcg

SEQ ID NO: 770286 - DNA, 71 bp, Homo sapiens
cgtactccaaagttgttcaggaacggcacaagatgctggtcttggggtgtcaattttactgtgtgtcagag

SEQ ID NO: 770287 - DNA, 59 bp, Homo sapiens
ttaatgaaaactgggatagattgcaccctggagaggcaggaagttatgttcgtgatgat

SEQ ID NO: 770288 - DNA, 95 bp, Homo sapiens
tggtttacctggcactcctggacaggatggattgccagggcttcctggcccgaaaggagagcctgtgcaagttttgaaactgcttttgaatttgt

SEQ ID NO: 770289 - DNA, 51 bp, Homo sapiens
atatgaacgtggctatgccttcatggtacaaacccgtagtgctgatgaacc

SEQ ID NO: 770290 - DNA, 75 bp, Homo sapiens
aaacatctcaccaatttcaaatctggtagttgatgtcacttggcgatattcctgcaaacatgaagaggtgattgc

SEQ ID NO: 770291 - DNA, 100 bp, Homo sapiens
acagtgaagggagagaagtggatttgggagacatttaggagtgctccacagtcccttccagaaccagtggcatcagcacattccagcagtgcagagtcag

SEQ ID NO: 770292 - DNA, 90 bp, Homo sapiens
gtgagtcagcctgcagcctcgtcagactcggagacgtctgacagtgacgatgaggtagaattgggctatttgctgaagcttcttggtggc

SEQ ID NO: 770293 - DNA, 100 bp, Homo sapiens
cacgatgagctcaatcggcactgggggaggaataagtttttttcatctgtaatttggaagccaagtcagtaacaaaatgaaaccagtaaagcatctgttg

SEQ ID NO: 770294 - DNA, 90 bp, Homo sapiens
gtagccctgtacttcatcgacaaggggcaatgttaaatattgttcaagattcagcacttttggaagccattggttgccagatggagatgg

SEQ ID NO: 770295 - DNA, 50 bp, Homo sapiens
aaaaaggcacaggttccttgaacagatcaacaaactccatttatgtaaac

SEQ ID NO: 770296 - DNA, 98 bp, Homo sapiens
cctgacacacagaagttccttcgctttgcagaacttcagaggacgaggaaacaatcgtggctacaaaaatcaatctcagggctacaaccagtggcagc

SEQ ID NO: 770297 - DNA, 90 bp, Homo sapiens
cgccgcagcagccatggccgagcgccgcgccttcgcccagaagatcagcaggtgaatgaaaactttgccattgatttgatagcagagcag

SEQ ID NO: 770298 - DNA, 100 bp, Homo sapiens
gcccccggcccgcgctgcccgcactcctggtcctgctcggggctctgttcccagggcctccctaacttcatggacatcagatgccttgcggatgaacgac

SEQ ID NO: 770299 - DNA, 100 bp, Homo sapiens
tctgcccgccgccgattgaaaacactaatgaacttactgcgccatttgaaattcacacgcaccaacaaaatggggagaggccaatgagacttgaaccctg

SEQ ID NO: 770300 - DNA, 100 bp, Homo sapiens
gaagatggcggatctggaggagcagttgtctgatgaagagaaggagatatgtcagtattgaattctcccagacatcagagctgtataatgcatgttgata

SEQ ID NO: 770301 - DNA, 75 bp, Homo sapiens
gttaatcttggcgacattgacaatgatggctttgaagattgcaacagaggcaatagaaaatattaggacagttgt

SEQ ID NO: 770302 - DNA, 74 bp, Homo sapiens
ttcgaccccccgcccgcctaccacgaggtggtggacgcggagcaacttgagttggtggaaccaagtggctggat

SEQ ID NO: 770303 - DNA, 76 bp, Homo sapiens
cagctagtaatttgccttctggattggtgataaaagaaaatgtggctgaagttacccgaagttcagcttgcagtgt

SEQ ID NO: 770304 - DNA, 76 bp, Homo sapiens
aacctcagaggacaacgaagtgttcgtttcaccagtgatcattaaagaatgggcagcttacaaaggaaagtctcct

SEQ ID NO: 770305 - DNA, 88 bp, Homo sapiens
gtctaagtccaaagatttttacccaggataaaagaatcagagtgtctcaacccttgacaagaggaccaagtgcctttattccagagaa

SEQ ID NO: 770306 - DNA, 50 bp, Homo sapiens
ggcctcccaaagtgctgtgattacaggatctcactctattccccaggcta

SEQ ID NO: 770307 - DNA, 51 bp, Homo sapiens
tcaaacaggagctggagcagctcaaagagctgtgttcaattacaaaaaaag

SEQ ID NO: 770308 - DNA, 82 bp, Homo sapiens
ccgacctcgacgtcttgcctgtgtcccacttgttcgcggcctatagatcgatgctatagaagacaaacaagggaaggttttt

SEQ ID NO: 770309 - DNA, 90 bp, Homo sapiens
gtgccaggcgccggccggctgcgaagacgcggtgggccgcccctccggtcagcagcaaggacaagatggagtaaaagtccagcaagctac

SEQ ID NO: 770310 - DNA, 50 bp, Homo sapiens
cagatccagtgataattgacaggaaaaagtgacccattttgtgtggtaga

SEQ ID NO: 770311 - DNA, 100 bp, Homo sapiens
gagacaaagacagctaacaaaattgcttcggaagctagtttttcatctagtgaaggaagtcctttgtcaagccactgttccatccctgacccatctttgt

SEQ ID NO: 770312 - DNA, 100 bp, Homo sapiens
tgaataccgcttcctggagttcacgactctgagtgctggtcatggaggcggagcagaccaagaccaggagcgagctggtgcataaggagacggcagccag

SEQ ID NO: 770313 - DNA, 113 bp, Homo sapiens
aggctcagagaaagcagagggtgagatggatgagtccagcattctaagacgaagagggctccaggacatggatttgattgacatactttggaggcaagatatagatcttggag

SEQ ID NO: 770314 - DNA, 73 bp, Homo sapiens
gaggacgggaccccggcgcccccaccccatccccgggaggaagggaaaaggccgaggcatcagcgtgtgaaga

SEQ ID NO: 770315 - DNA, 100 bp, Homo sapiens
aacgtctctctgccgtgaatcattcctgcagatgaaaaagtgtgacttggcagctgggatctgctaagctagaaaaagccgagatcctgcagatgaccgt

SEQ ID NO: 770316 - DNA, 75 bp, Homo sapiens
tccccttctactacatgctgaagctgcaagctttcttcctggtggcagatgacatcatggattcatcccttaccc

SEQ ID NO: 770317 - DNA, 100 bp, Homo sapiens
aagggcatcccttattcctgagcattcaagccctgttcaagattgccagatatcccaggaaagtggtcacggtctagatcacattctcgatccagaggaa

SEQ ID NO: 770318 - DNA, 100 bp, Homo sapiens
aggaccctacagaagatgctgaagctgaggacacacccaggaaaagactcaggacggacaagcacagtcttcggaaggatgaagtcattgctgtttccga

SEQ ID NO: 770319 - DNA, 101 bp, Homo sapiens
aacacgagatttttctcctatttcagcagttggccacaacttcattgctgggaaaagttcatttgatgaatacagttcagaacttaaatctggaaggttgg

SEQ ID NO: 770320 - DNA, 90 bp, Homo sapiens
tcctacccagtgcagatcgcccggacgcacacggcaatggtggcttgctatccgggaaatggaacaggttatgttcgccacgtggacaac

SEQ ID NO: 770321 - DNA, 74 bp, Homo sapiens
aggcaccgctggaacactaatgaggttttctgtctcaactggtctctgacaagcctctgactgaatgtatccgt

SEQ ID NO: 770322 - DNA, 74 bp, Homo sapiens
cgacgcctcggaccgggctgcgccgcgggagttcgagagctccttaataagcatttatagtcagtttttggcag

SEQ ID NO: 770323 - DNA, 75 bp, Homo sapiens
tgcagaggagaagcagtctgtatggcagaaagcaatggatcatattgaggctaaagaacgtgccaatggaatgga

SEQ ID NO: 770324 - DNA, 80 bp, Homo sapiens
gagcttacccagcacatctacactctcaatggctacccctacatgaacaagaacctggactggttcccccggatgcgggc

SEQ ID NO: 770325 - DNA, 90 bp, Homo sapiens
cttctccggggcattgcatggccgggagccaaatgagctggcaccagaacctgaacgagcctctgactccaggttatcatggattcccag

SEQ ID NO: 770326 - DNA, 75 bp, Homo sapiens
ccgccgcgcccgggatgtattcgtccccgctctgcctcacccaggtgaaaggtgtagcagtcactcggcctacac

SEQ ID NO: 770327 - DNA, 100 bp, Homo sapiens
gctgatcttccagctcccctcacccaacgtcgtcaggaggatgcattagcacaacaggcctttgaagaggctcggagaaggacacgcgaatttgaagata

SEQ ID NO: 770328 - DNA, 101 bp, Homo sapiens
aatgagatcacaggacatacctacaagtgcacaaatggagtccagaggaggctgtaagagccatcgccaagatccggtcatacatccacatcaggcctggc

SEQ ID NO: 770329 - DNA, 82 bp, Homo sapiens
gaaaatcatccatctaaagcaccagtaaaatatggtgaactcattgtcttagggagtagatcccataatagatcacgttcaa

SEQ ID NO: 770330 - DNA, 75 bp, Homo sapiens
ctagccctgcagacagaggtgtgctgacgacctgctacaacagaaagctgcagaaactggagggcagcagtggac

SEQ ID NO: 770331 - DNA, 121 bp, Homo sapiens
tgaaggagaagaaggagaaggtggaggagaaggcaagccggaaagagcgaaagaaagaagtggtggaggaggatgaagaaggttataacgatggagaggtagatgacgaggaagatgaaga

SEQ ID NO: 770332 - DNA, 85 bp, Homo sapiens
aaggggactatcctctggaggctgtgcgcatgcagcacctggtcatggaaaatggaagatttgcaaaatacaaatattttaccca

SEQ ID NO: 770333 - DNA, 97 bp, Homo sapiens
ctgttcgccacctgggaggtggacggctccagccccagctgcgtgcccagagttgtctgctggttctcagcttgaagaagattctgcagtccttatt

SEQ ID NO: 770334 - DNA, 50 bp, Homo sapiens
gaacagtacgcagtgaatgttatcgaaagctgctttgcgtcgcagttgga

SEQ ID NO: 770335 - DNA, 75 bp, Homo sapiens
agaagaaaagagtagagatgtctgtgccaaatgggagatcaccctgagactataatggaagaagtgaaaataaag

SEQ ID NO: 770336 - DNA, 100 bp, Homo sapiens
tcaaatgcaagtccaagaggaggaggaggcggaggtccaagcggaaaggcaatgaagagtctccattgaatgttttgggaggattgaaactgaaagccaa

SEQ ID NO: 770337 - DNA, 80 bp, Homo sapiens
agtggataattttgtggccttagctacaggagagactgacaggccaactgttatagaatacgatgatcacgagtatatct

SEQ ID NO: 770338 - DNA, 100 bp, Homo sapiens
ggcgtggatccagtgggccgcctgctgctggtgcgcgtgggggtgatcagcttcgcccagaaggctgccctgagcacactgcactgctcttctgtcctcg

SEQ ID NO: 770339 - DNA, 109 bp, Homo sapiens
ggtgaagctgtctcaaacattcaagaaaacacacagactccaactgtacaagaggagagtgaagaggaagaggtcgaagtggttctggaaactttggtggtggtcgtgg

SEQ ID NO: 770340 - DNA, 100 bp, Homo sapiens
gcggccgcggccatggcgtacgcctatctcttcaagtacatcataatcggcgacacaggtgcaaaaacttcaagctattctaaagccaatgatgttgaga

SEQ ID NO: 770341 - DNA, 100 bp, Homo sapiens
cttcaggttcccaaggagatctggcttctagtagatcacctattcaaatacgcctgtcaccagggggtgctcaaaggatttaaaggagaactaattcatg

SEQ ID NO: 770342 - DNA, 100 bp, Homo sapiens
tgaaggggtgtaaacatgtcggagtctggggagatgagtgaatttggctacatcatggaattgatagctaaaggcaagaaatctccaaattggacatcca

SEQ ID NO: 770343 - DNA, 80 bp, Homo sapiens
aatgcctggaatgatgatgtctcatatgtctcaggcttccatgcagcctgccttaccgttatggctgcagcttcgattgc

SEQ ID NO: 770344 - DNA, 60 bp, Homo sapiens
acctttattggagacaaaaccttagaagaacccgaagaacctaaagtgctaacaccagaa

SEQ ID NO: 770345 - DNA, 100 bp, Homo sapiens
gaggaatgaagatggtgaaagaagagctatgataactcctgctctccgagaagcccttactaaacaaggtcctgttttgctgcgttcctactgtctctat

SEQ ID NO: 770346 - DNA, 94 bp, Homo sapiens
ctggggccagggaaccctggtcaccgtctcctcaggtgtccctggagtccaacgcgtccatgagctccaacacaccactggtgcgcatcgcaag

SEQ ID NO: 770347 - DNA, 74 bp, Homo sapiens
tccagcgtgtctccagccgtgatgctcagccagcattgggcagcccccgcttcctgctcccctacccccttcac

SEQ ID NO: 770348 - DNA, 112 bp, Homo sapiens
atggaagatgaggaggtcgctgagagctgggaagaggcggcagacagcggggacgggctctacgagtgcattctctgtgcctgctgtagcaccagctgccccagctactggt

SEQ ID NO: 770349 - DNA, 81 bp, Homo sapiens
tgttcatgaaatttgtaagtgaagatcttcatcggtgtgcacttttaacagacatatctgaagagatggattaagaatgct

SEQ ID NO: 770350 - DNA, 73 bp, Homo sapiens
ctgtctcgccgagcgcacgccttgccgccgccccgcaggggggacaggccccacctcggacacaggctggggc

SEQ ID NO: 770351 - DNA, 75 bp, Homo sapiens
ctcaaccagaaggaggctgtggcctatgcagtcaactcctggaccactagtaccatgctcgacagctgaccaagg

SEQ ID NO: 770352 - DNA, 98 bp, Homo sapiens
tcagccaagtgaaaggcactatcgagattggaaccacagaaggcttctagtgaggacgttgccagctccccggagcgccactacacgcccttgccttc

SEQ ID NO: 770353 - DNA, 119 bp, Homo sapiens
gcgactcgcttctttcggttctacctgggagaatccaccgccatccgccaccatggctcttgtcaggatggtgaagctgttcatcggaaacctgccccgggaggctacagagcaggaga

SEQ ID NO: 770354 - DNA, 100 bp, Homo sapiens
gggggaagtagagagataacaaaagctgctcagagtctcaatgaacttggaccttttccagtggtgagtttaatggtgggatctgttgttctgagcatgg

SEQ ID NO: 770355 - DNA, 100 bp, Homo sapiens
ttctgacttgagcctgcagtgtgctgtgagagatctaccactagcagatataatttctacagtagaatttaatcattctggagaattactagcaacagga

SEQ ID NO: 770356 - DNA, 75 bp, Homo sapiens
tggccctgagtctttgggggcagcctgcagaggctgcggatttcagatgcatgccaggtttccactgattgccag

SEQ ID NO: 770357 - DNA, 75 bp, Homo sapiens
gctgtctctagcatcacctctcagcacgattttcccgagagttcacaggtctctaattaacagaagatggcaaag

SEQ ID NO: 770358 - DNA, 50 bp, Homo sapiens
tgcacaccaaaccctgggttagagcaagtttgggatatgagattgaaaat

SEQ ID NO: 770359 - DNA, 50 bp, Homo sapiens
tgaaacaccactgaagcattgccaagaattcttccatctctatgacaaca

SEQ ID NO: 770360 - DNA, 104 bp, Homo sapiens
agttagtcgcagacatggacaccaaacatttcctgccgctcgcaagagtgagccatggagctacgtgtggggaacaagtaccgcctgggacggaagatcgggag

SEQ ID NO: 770361 - DNA, 112 bp, Homo sapiens
ctgcagaggcgctggagctgggtcagtccgccgctcaccccgcggccgcaccttcccgccttctcaggaagcaatgaggctccccaagaacacacctgaggaaaaggacagg

SEQ ID NO: 770362 - DNA, 82 bp, Homo sapiens
tttctcacgacgggccgagcctgccactgttcctcaagccaggacctacgcacctgttgtgagtggtgttatagttctgcag

SEQ ID NO: 770363 - DNA, 82 bp, Homo sapiens
tcatctctaaaggtccttctaggagagaggtgaaagggtacttttgacttcagtgacattgctgtctatatattcaataaac

SEQ ID NO: 770364 - DNA, 100 bp, Homo sapiens
ttccgctcggatcccttggcgtacacggtgtgcaaggggagtcgtggcgtcgtctgcgaccgctgccttctcgggtaagaatgattgatgttggctgata

SEQ ID NO: 770365 - DNA, 90 bp, Homo sapiens
gttaggagactgaatcaaggtccagagaaggtggaggaatcctgatactgagcggtgactttggcaggctatggcttcgccttccgctat

SEQ ID NO: 770366 - DNA, 100 bp, Homo sapiens
ggaagacccctggctctataagctgaattatggcagcccagtcaagtgccgaaaacatttgaagagtcggagattagtcagtgcaaaacagcttggtgtg

SEQ ID NO: 770367 - DNA, 75 bp, Homo sapiens
ccaaaatgaaggatgtacaaacatccacaccagtttgtgatggacgcctctgaccccacccagctctctgcatcc

SEQ ID NO: 770368 - DNA, 83 bp, Homo sapiens
cgaggagtagtcgctggagtccgcgcctccctggacgaagttatacggaagcgtctcctcattgatggagatggtgctggaga

SEQ ID NO: 770369 - DNA, 75 bp, Homo sapiens
ggcggattccagccccgagcgggacagcgcggcggggagcgacgaaggcggggtttcaccatgttgcccagactg

SEQ ID NO: 770370 - DNA, 97 bp, Homo sapiens
gccttacatcaggatatgcctgaggagagctctgaggaggattcactcaggagagagaatcatagtgaaatcgaaaggcgcagacggaacaagatga

SEQ ID NO: 770371 - DNA, 98 bp, Homo sapiens
gatctctacataaaggattatttacatccatatgtagaagcaggcaatccccaggcaagacctctcagggtgaatctgtaaaatatttcctggataac

SEQ ID NO: 770372 - DNA, 95 bp, Homo sapiens
tttctgcagctttgatggggcaaatgaaaatgtttggcatgtgctggaggcagatgtcatggaggaagtagagatgatggtggagagcctcctgg

SEQ ID NO: 770373 - DNA, 100 bp, Homo sapiens
gcagaggctacggggctcggtttggctgactggggagtcggcaggcggcaggtggccctcatgacactgacgctcttcccggtccggctcctggttgccg

SEQ ID NO: 770374 - DNA, 83 bp, Homo sapiens
taagccttaaagagacaggacggtcgattggtctgaaattcttgaagagacagggacccagacatggagctgcgggaagaagc

SEQ ID NO: 770375 - DNA, 80 bp, Homo sapiens
tgcccgctcacctgcgctgtgatgcctgcagagctgtggcttaccaggtgtgatgaatgcagactctgctaccattttgg

SEQ ID NO: 770376 - DNA, 98 bp, Homo sapiens
catttatcaccttctgtggaaaggaagctgcacaggaagccgtgaaactgggaagcagtgcgttatatcaatgaaaacctaattgttaacacagatga

SEQ ID NO: 770377 - DNA, 75 bp, Homo sapiens
gcggagtctccttgctctgggctgctccaggccaggccatgcggggcaactccaacaacattgccaccgtggaca

SEQ ID NO: 770378 - DNA, 90 bp, Homo sapiens
atgataaagacttagtagaagctttggaaagagatataatttcccagaatcccaatgttcgatggttatcaactggcaaacatctcttca

SEQ ID NO: 770379 - DNA, 98 bp, Homo sapiens
ttccactcgtggtatgagagtggataatataatcaactcctctgcctgtgatcctggtggagggattgaaatgtctgagttcatccgagaggccacac

SEQ ID NO: 770380 - DNA, 96 bp, Homo sapiens
aggacctggcagcagaggatgatgagggcttcagtgcagacgcagtggtggccctggagcagtatgccagcaagctctggattaatcgaattacag

SEQ ID NO: 770381 - DNA, 96 bp, Homo sapiens
ctggacatacagaaattgttgaatttttgttgcaacttggagtgccagtgaatgataaagacgatgaacggaaaacagttcttccttcaaagcatg

SEQ ID NO: 770382 - DNA, 83 bp, Homo sapiens
aagctgagcctttctggacagaccaacctgtcagtgctgcaattgaggctgtgaagctgggcagggtttcagctgagctgagg

SEQ ID NO: 770383 - DNA, 75 bp, Homo sapiens
ttttacttttctcacaaaaacttgtaagcattggggctttccagctctcacagaaccttcagcatccccagctgc

SEQ ID NO: 770384 - DNA, 100 bp, Homo sapiens
ctgcccagacggctcacctgtgcgggatggaacaaaaggggatgtggagacgctggtagcggggccaggaaggctccggacggagcaggttttctggacc

SEQ ID NO: 770385 - DNA, 87 bp, Homo sapiens
cttctgaattgtgctgccttggccaaaagagggctacttctacaagtccgaacagccagtccagcaaaatgaacagcattgtctacc

SEQ ID NO: 770386 - DNA, 95 bp, Homo sapiens
gaagaagaagattaacctggagttaaggaacagatccccggaggaggtcccgcggcagtgctggtggccatggttcccgtagccagaaggagttg

SEQ ID NO: 770387 - DNA, 100 bp, Homo sapiens
agatcctgaacttcaccatcctacagatcttccctttcacctatgaaagcaaacgtatgggcatcatcgtgcggaaatggaatctatttggaatttgcag

SEQ ID NO: 770388 - DNA, 108 bp, Homo sapiens
ctccgcaccgcggcttaaatgatgtattttgtgatcgcagcgatgaaaggtgtggacactgccagcggctgcagccgacttggaatgacctgggagacaaatacaaca

SEQ ID NO: 770389 - DNA, 50 bp, Homo sapiens
ccgaccacttgcggcctgagtatgggagaagaaatgggtgaccgttggtg

SEQ ID NO: 770390 - DNA, 50 bp, Homo sapiens
ctcaagcagaggcctacacgatttactggcaagtgaaccggagcaaacga

SEQ ID NO: 770391 - DNA, 50 bp, Homo sapiens
ggagaagccgcccaaagaactggaagatgttaccgagtacttcagtgaat

SEQ ID NO: 770392 - DNA, 75 bp, Homo sapiens
tgctgcgtcctgctgaccttcgaagggtcagacaggtattatccccctcgagaagaggaaacaaatgaaatagaa

SEQ ID NO: 770393 - DNA, 80 bp, Homo sapiens
atttccccagagcgtcttgatccttttgcagatggaaattcacagtatggccaacagcaagatgcataccagggaccacc

SEQ ID NO: 770394 - DNA, 100 bp, Homo sapiens
agtgccacgaccatctcgcactaccctgactacagctggagcgcccagaggcgagccctggtggaggaagagggacctgatttcccatcgccttctgtcc

SEQ ID NO: 770395 - DNA, 83 bp, Homo sapiens
gaacaagcccatcgtcacctggcttgtcaatgaggcagatcagattcaggttcgacgggcagccaatcaatgaaactgacact

SEQ ID NO: 770396 - DNA, 76 bp, Homo sapiens
gtctatgccccaggaattgtgtcagcatcacaatttacctgtagtcaaccacagtctgaaaatattaaggtatttt

SEQ ID NO: 770397 - DNA, 89 bp, Homo sapiens
gccggatcggggagcgcgtggggctctgcctggatgacgcgggcgcaggcctggccctgtcgacaggaactctgcgaccttcaagtcgt

SEQ ID NO: 770398 - DNA, 119 bp, Homo sapiens
cgcaaccattgacgccatgtcgggttattcgagtgaccgagaccgcggccgggaccgaggtccctgaagaggaaggagaaggaatatgagcatgaaatggagcggctggcacgtgagaa

SEQ ID NO: 770399 - DNA, 75 bp, Homo sapiens
gtggaagcagattgcttctgtcatgaaggtggcaccttgacgaggtctttttagagctcaaggatggtcagcaga

SEQ ID NO: 770400 - DNA, 83 bp, Homo sapiens
ctttgagtttcggagaggagtaaagaggtcatcatcagatttgaaatatttaaagtggatacaaaactatttcagcaatgcag

SEQ ID NO: 770401 - DNA, 100 bp, Homo sapiens
agtcctagtccgaggtgccaccgtggaaggacagaatggtcctccaagacctgggagactttttggctgccaagcgagccctgaagaaggcctacaggct

SEQ ID NO: 770402 - DNA, 100 bp, Homo sapiens
tcacttccgtcaggagaggtgaggcaggctcgagtgcacggagcgtcccttccatcaggagaggttgcactgctgtgatccatcctcatctcctaaagat

SEQ ID NO: 770403 - DNA, 90 bp, Homo sapiens
caactgcctgccgcgccgagggaccgccgggcggcggaaagcagaagtcctggagggtatttgggagccaaaaagaaaaagaagaaacag

SEQ ID NO: 770404 - DNA, 51 bp, Homo sapiens
atgccttgccgtagggatgtctcgagatggacggctgtctcaagacccaga

SEQ ID NO: 770405 - DNA, 74 bp, Homo sapiens
tccattgttcgtgttttaaggcgccatgaggttttgagaacagagtgctgttttagagctggcagcagcatctc

SEQ ID NO: 770406 - DNA, 100 bp, Homo sapiens
acagagatctacaaccttggagcccagagccacgtcaaactttccagagtgttgaatcttccaccagaaaacttgatcacatcaatatctgcagttccaa

SEQ ID NO: 770407 - DNA, 99 bp, Homo sapiens
acaggcgtgtgtcactgcgcccagagtcgggccacaaaaagttaaaaagtaccatccagagaagcacagaaacaggcatggcagctgaaatgagaaaga

SEQ ID NO: 770408 - DNA, 87 bp, Homo sapiens
cggcgacagagcgagcgcggcgcggggccaccatgggggcccagctcagcacgacaatgcagatcttcgtgaagactctgactggta

SEQ ID NO: 770409 - DNA, 75 bp, Homo sapiens
actcacatgagacaaatgcgctcagcttcaattgttgctagtgatatctcgctaacaggaggctcagtagtacag

SEQ ID NO: 770410 - DNA, 76 bp, Homo sapiens
agcctcccgagtggctgggactacagatgccggctctggtatggaagaggtagaattaagctgggaagattatcta

SEQ ID NO: 770411 - DNA, 90 bp, Homo sapiens
tattgcattccaacagctcattttatgttgctttcaccaacaatcaccagtggtttacacaacattgcaaggagcattgaaactcgaaac

SEQ ID NO: 770412 - DNA, 51 bp, Homo sapiens
cgtcgggagtgatcacctaccctacagacgttggaacttgccaggaatcca

SEQ ID NO: 770413 - DNA, 100 bp, Homo sapiens
tcctgaggcaactggacatggagttgatctctctaaaacgtcagcttggaactgcagttggctttttgctaccaccagttttagtacccaacacacagaa

SEQ ID NO: 770414 - DNA, 90 bp, Homo sapiens
ggttggcaccactgaagtgaccgaatgaggctccaccaaagcctgtacccaagaccattgacaaccagcgagtgtatgatgaaaccacag

SEQ ID NO: 770415 - DNA, 90 bp, Homo sapiens
gtttccccctgttgcagggttttgtttatataactcaagttgtttggctaaattcttcagtctcaggaggaggtctgcgatttgctccat

SEQ ID NO: 770416 - DNA, 88 bp, Homo sapiens
taaagagagatgaatatttgaaaaaagtggaggacaagagaataagctgagtcagtgctgattctctcaaatagagcttgaaggataa

SEQ ID NO: 770417 - DNA, 80 bp, Homo sapiens
agatcgtcgccacctggatgctggaggtcagcaggctgcccagcagcggcgaggctgcagccacgcccaccatgtccatg

SEQ ID NO: 770418 - DNA, 78 bp, Homo sapiens
atccgtatcccaactgttagcaatgacatcgactgggatttctgcttccatatgattgctgtcacgtctaatgtggct

SEQ ID NO: 770419 - DNA, 100 bp, Homo sapiens
ggagaaagtcgtcttccacttgcacgaaagctttcctaggccaaaaagaggagttggaaaaaaccttggatgtctttaatataactatagctagacagac

SEQ ID NO: 770420 - DNA, 50 bp, Homo sapiens
gcatacatctttcttcgacaaaggctgtacaggaagaggcacatacaaag

SEQ ID NO: 770421 - DNA, 100 bp, Homo sapiens
ggccagcaagatcctcattgtagactggagttcctatcagactgagattgggcagaccctggacctcctcacagccccccagggcaatgtggatcttgtc

SEQ ID NO: 770422 - DNA, 98 bp, Homo sapiens
gtcctggcaggagttgcagaaagcatccacctgtgggaggaccctcgagatgcccctcctccaactcgtgctgaaacccgagaggagcgcatggagag

SEQ ID NO: 770423 - DNA, 83 bp, Homo sapiens
gggactgccacgtccaagcaaaccgggaaaggagaggatcccggagccgtgtggcaaaggagcagagaactttgacaagttct

SEQ ID NO: 770424 - DNA, 96 bp, Homo sapiens
attgaagcaaattgaaggcacaggaatatccatgtcggcttgtagagagattgcagctgctttgtaccgcctcagtggagactggaatcccttaca

SEQ ID NO: 770425 - DNA, 101 bp, Homo sapiens
aggaggcttgtgtcatctgccagcatttatgaaactgtgctccaagtaggatcgcccaggaccacaccgcagcgtaactgcaggcctctcagcgaaaaagg

SEQ ID NO: 770426 - DNA, 75 bp, Homo sapiens
cagattcgcagtggtcgcttcttctccttgtggctttgaagcgtatgttgaatttcaatgtgcctcatattaaaa

SEQ ID NO: 770427 - DNA, 75 bp, Homo sapiens
gaaagaagattccattatggaggaagagagaacccagcgggtgccgcttctccacccgaggcttccacctccaac

SEQ ID NO: 770428 - DNA, 74 bp, Homo sapiens
ttgcagcagagccagcagctagcgcaggtgctggagaatctggtaaaagcaccattgtgaagcagatgaggatc

SEQ ID NO: 770429 - DNA, 80 bp, Homo sapiens
acacgcccatccttggacttcctgaaaatgacccagtctctgctttctatccgtcaagatgataaagtcgtgtgcccgag

SEQ ID NO: 770430 - DNA, 73 bp, Homo sapiens
ttgttttttcctgtatgaagcggttggcaccactgaagtgaccgaatgaggtcaaaatgcagatcttcgtgaa

SEQ ID NO: 770431 - DNA, 90 bp, Homo sapiens
ctcggtcagcagctgctctcccagccgcgccagcctcctcactggcctgccccaggacctgaagccaggcaacctggctgtgaatgagga

SEQ ID NO: 770432 - DNA, 97 bp, Homo sapiens
cagaagtttatcaaggctgtcacacatcaagttaaatttggtcaacaaaatccacgtcaggtctttcccgcggtgacttcccttgggctgaatgaac

SEQ ID NO: 770433 - DNA, 75 bp, Homo sapiens
tttaaaaatatagaggaatcttggatccaaaaatatgacagacaccaactctacaacattacctgtcatatactg

SEQ ID NO: 770434 - DNA, 100 bp, Homo sapiens
gtgacagcgtcatcacggcattttattggtccaagacaagctgctgctatctgcgtgccacttactggtctcactggccaccaccgtgcggcccgtcttt

SEQ ID NO: 770435 - DNA, 74 bp, Homo sapiens
gctgtgaataatatagctggtattgaagagttcccagaaatgaatgctatgatcatgcgacggttcagtttgcc

SEQ ID NO: 770436 - DNA, 100 bp, Homo sapiens
ttatggctgctgttgtccaacagaacgacctagtatttgaatttgctagtaacgtcatggaggatgaacgacagcaaactgaaaatatggtccactaacc

SEQ ID NO: 770437 - DNA, 90 bp, Homo sapiens
aagctcccgcggtactacaagaacatcggtctgggcttcaagacacccaaggaggtcgatgagcagatgcttaacgtgcagaacaagaac

SEQ ID NO: 770438 - DNA, 75 bp, Homo sapiens
cagcgtttattttacatggctttcaccttcttataatcatggtgcaatggatgagcttcatagtctggatccaag

SEQ ID NO: 770439 - DNA, 89 bp, Homo sapiens
gggacattcattgcggaataacatcggaggagaaggtgctggagaatctggtaaaagcaccattgtgaagcagatgaggatcctgcatg

SEQ ID NO: 770440 - DNA, 86 bp, Homo sapiens
gcctcgtcgacatgagtgatgtggaggaaaacaacttcgagggcagagttgagaggaacagcagtccctgtgttgatggattgagg

SEQ ID NO: 770441 - DNA, 100 bp, Homo sapiens
agcgcatctgcctggggccagtgaggagaatgcatctagacagagcttttcgtgctgctgagattctgacaatggagatattaattatgattatgttcat

SEQ ID NO: 770442 - DNA, 75 bp, Homo sapiens
atggcttcatcgctaatgtagctcacacttttgtggttgatgtagctcagggtgctgccccacgtcccccaccaa

SEQ ID NO: 770443 - DNA, 146 bp, Homo sapiens
gctcctgtaactgtacatattgatcatcttgtggtagagagaagtgacgatggctcttttcatatcagaggaattgatgccaacataaaggatagcttaggtagaactgtcttggacattctgaaagaacatccatctcagaaatc

SEQ ID NO: 770444 - DNA, 75 bp, Homo sapiens
caagctctgccacgaaggtgccaccgatgacaacatcaggaggtggaggtttctgtgactgtggtgatactgaag

SEQ ID NO: 770445 - DNA, 101 bp, Homo sapiens
aatcttttacaaagcatgggagtgcagctgcctgacaacaccgatcacagaccaacaaaaatacatgctacaggatttaactatcagaatgaagatgaaaa

SEQ ID NO: 770446 - DNA, 100 bp, Homo sapiens
gggactcagaggagtacttcgccacttactttaatgagaagatctccattcctgaggaggaggtttactcctggcttgggggcattaggaagcactggag

SEQ ID NO: 770447 - DNA, 83 bp, Homo sapiens
attacacttcgactctcaaagcaataccaggatagctgttgtttcagagaaagactgaaatcgccaagagattgaatacgatt

SEQ ID NO: 770448 - DNA, 100 bp, Homo sapiens
agagaatgttacattaacttgcacagcagaaaaccaactggagagaacagtaaactccttgaatgtctctgctaatgtggcaccatttattgagtttctg

SEQ ID NO: 770449 - DNA, 75 bp, Homo sapiens
ctttgatccagaacttgcagcaacaataggctcgggttatgtatgattttgctgctgaacctggaaataatgaac

SEQ ID NO: 770450 - DNA, 100 bp, Homo sapiens
ggggctgctcccatcattgatgtggtgcgatcggctcatccaaaatacttgagttgtattgcaatcagctgttttttcctagctgccaagactgttgagg

SEQ ID NO: 770451 - DNA, 75 bp, Homo sapiens
cccaggcgcggagggaagacgccctggtgctcaccaagcaaggtatctgggctcatggcgactactgcagaatca

SEQ ID NO: 770452 - DNA, 75 bp, Homo sapiens
gaaacaagaaaacatcaaagaggtctagcaaagaatatggctcaagcctggaagatgacgtggtgggggacactt

SEQ ID NO: 770453 - DNA, 96 bp, Homo sapiens
acggcagccacgggggcagccgtcgcagtcgccgtcccacacgggctgcggacaccaagggttgctagggttacatctcagatctttggactctcg

SEQ ID NO: 770454 - DNA, 75 bp, Homo sapiens
aagcttctcagacgtgcacaccatggatctgggttggatggcaagcatgtggtgtttggcaaagtgaaagaaggc

SEQ ID NO: 770455 - DNA, 100 bp, Homo sapiens
gcagcggcagcggcaggaggagcgcgagagctcccagcaggcccagcgccagtacagctctctgcctcggcacgtgtggttctcaaatataggcattctg

SEQ ID NO: 770456 - DNA, 100 bp, Homo sapiens
gaaaccttttggattacaactgttcatcctcacctatgcaaagaaagggaagctattgctgggattttgaggaggatgcagactcatctgagcgtatcat

SEQ ID NO: 770457 - DNA, 100 bp, Homo sapiens
caggattccatggtagctgggatgttagggctcagtattggtaaaggttttcaaggtgtcatgaaaagatggggatttaaaggccagcctgctacgcatg

SEQ ID NO: 770458 - DNA, 83 bp, Homo sapiens
cgacgaccggatcctgaggaggcagctgcggtggcagctgctgagttctcggtgaagtgatcctggtgcacgcctcgttgcgc

SEQ ID NO: 770459 - DNA, 97 bp, Homo sapiens
tgatggcgcagatcgagctgtggacccatccagacaagtaccccgttggggttcatttcctgcccaagaagtatgagatgtacaccatcgagcggaa

SEQ ID NO: 770460 - DNA, 51 bp, Homo sapiens
gcgtcagaggtccctgtttgataggtttcccatccacataccaagctgatg

SEQ ID NO: 770461 - DNA, 90 bp, Homo sapiens
ggctgctgctgccctgcgcgctgctggctgccccgagtgcgagatcgagcgtcctgagcgcctgaccgcagccctggatcgcctgcggca

SEQ ID NO: 770462 - DNA, 82 bp, Homo sapiens
ggactccttcggcagtccacccaccgccgccgcctcccagagcttgcatggagatggtcccctgcggctgctgctgctgccc

SEQ ID NO: 770463 - DNA, 54 bp, Homo sapiens
gaacggagctttcgcagctggagaaggactcagtggcatttgaggatgtggcta

SEQ ID NO: 770464 - DNA, 103 bp, Homo sapiens
tggcaattcaccgaattcgaatcaccctaacaagccgcaacgtaaaatccttggaaaagggtgctggagaatctggtaaaagcaccattgtgaagcagatgag

SEQ ID NO: 770465 - DNA, 83 bp, Homo sapiens
ttcaaaaatcagcagaggatgcagggctctcgaaatatcggccagctagctcccgatctgctttaataccccagcactcagca

SEQ ID NO: 770466 - DNA, 89 bp, Homo sapiens
gcaacaagtgtctttggttataaattatgatctacctaccaatcgtgaaaactatattcacagttggaaatctacatttctgaaggaac

SEQ ID NO: 770467 - DNA, 75 bp, Homo sapiens
gaaggaagtcagccacccgttcctcatcaggctgtgaactgtcacccctacaactcagcttgcaaccagccctgg

SEQ ID NO: 770468 - DNA, 75 bp, Homo sapiens
gaaccctgaggacctccgcatgtttgccaggttcgggatgagtatcggcaggactacgatgctgggagaggaggc

SEQ ID NO: 770469 - DNA, 90 bp, Homo sapiens
atctaaccagacaagaaatagtatcattattcaacgcatttggaaggaaacaggaagagcgagtacagcaagtacgcaagaaattggaag

SEQ ID NO: 770470 - DNA, 87 bp, Homo sapiens
actatcctcggtgctgtggtgcagagctagttcctctccagctcagccgcgtagtagagatggggtttcgccgtgttagccaggatg

SEQ ID NO: 770471 - DNA, 74 bp, Homo sapiens
ttaggaccacccaccatgcctatccaggatcttttgccagaaatgagggcatactggcctgacgtaattcactc

SEQ ID NO: 770472 - DNA, 100 bp, Homo sapiens
gccggcgcggggtcggcgctgggctggaggcggcggagcgcgagagcttcgagcggactcaggcttctctacagtttagcctttaatgccaggtttctga

SEQ ID NO: 770473 - DNA, 100 bp, Homo sapiens
gaatggcgccgctggagatcctttcctgcttttggtttccctggcaggggttgaactgtggagtgtgtggcctccagggtcgtatagacctccccctcct

SEQ ID NO: 770474 - DNA, 90 bp, Homo sapiens
gaagactccaaatgaaccgcagttggaattcatccttggaaagaccacagcaagattctttcattcgtctcctcctagcctgggggacca

SEQ ID NO: 770475 - DNA, 101 bp, Homo sapiens
tgggactggttgaccaactggtggaacccctgggtaacgatgggggtccatcctcttcaagtaagactacaaacaagtttgagggactatcccagcagtcg

SEQ ID NO: 770476 - DNA, 75 bp, Homo sapiens
aaaaccagtcaagtttttggaaggcgagcttattcatgatgatcagttccatgacaagaccccttatacgattat

SEQ ID NO: 770477 - DNA, 50 bp, Homo sapiens
gagaatgaagggaatgaatgaagtgtcagagctatcagcttcccagtttg

SEQ ID NO: 770478 - DNA, 100 bp, Homo sapiens
ctcttcggtacgtgaagaacgacttcaagagtatcctgcctacggtgggcttgggttcagctatgtggacctagtggaagggttacatgatggacacttc

SEQ ID NO: 770479 - DNA, 75 bp, Homo sapiens
ggagtatgtgatcagtctgacattcgaggacacagattagctttatttgctcaccgtgaagatggacctggaatc

SEQ ID NO: 770480 - DNA, 98 bp, Homo sapiens
cttggcagtcagcgacaagctatccaacaactaagagatcaggactccagtagcagtctttatcagtaccatatgcttatcagtgctgtgcattttgg

SEQ ID NO: 770481 - DNA, 83 bp, Homo sapiens
gcagcctgggggccacagctgcttcaggaaatcctcattgacgattcaatttgttgaaggccaatttgtggactcctacgatc

SEQ ID NO: 770482 - DNA, 100 bp, Homo sapiens
aactttactgagaattttccacctcctgacacaacaccactcagccagaaatgtacacacaggagagctggctgcagtaaaaatcattaaattggagcct

SEQ ID NO: 770483 - DNA, 75 bp, Homo sapiens
ctgctgtctccttagctgctcacatatggatactttcacagttcaggtggactttgatgctcccctgggctacaa

SEQ ID NO: 770484 - DNA, 95 bp, Homo sapiens
cgccgcgccgcagtcggtcgtccgctggacaagcacgagggcgcgctcgagacgctcctgaggtgatctttagacagtgactgagtatggatcat

SEQ ID NO: 770485 - DNA, 51 bp, Homo sapiens
cgcgtgctgatccgccagcgccatatcaggccagcggaagcctgccacctc

SEQ ID NO: 770486 - DNA, 100 bp, Homo sapiens
ggacagcgacaccgagggggaggacattttcaccggcgccgcggtggtcaaatgacctccaccttcaacccccgagaatgtaaactgtccaagcaagaag

SEQ ID NO: 770487 - DNA, 101 bp, Homo sapiens
cttgcttatcaccgagaggcagcagaagcactgcctggccttcagggggccgaaggccagagaccaggatttggctacggaggcagagcgtccgactataa

SEQ ID NO: 770488 - DNA, 80 bp, Homo sapiens
catctccaagaacgtgctcttcgctcacctggatgacaacgagaggaggaattggtggagagaaggcgcaccatgatgga

SEQ ID NO: 770489 - DNA, 100 bp, Homo sapiens
gggatgcagaggatcagaaccggtacctggatggcatgataaatttgcgcctcattttggtaagcggaaaaacaaaagagttcctgttttctcctaacga

SEQ ID NO: 770490 - DNA, 100 bp, Homo sapiens
gcccaacagaatttatatagagatgtgatgttggagaactacagaaacctcgtctccctgggattctcaaagttggattggtggaaacaatgaaccattg

SEQ ID NO: 770491 - DNA, 74 bp, Homo sapiens
ccgtcccaaaatatggcaaagaaacctattctgaggtctgtagcctttgctgagtcaacactactcacagtgaa

SEQ ID NO: 770492 - DNA, 75 bp, Homo sapiens
ccggcttcctgggagcctgggcccccgctgtccacacccaagcaggctctgggttgggtgtgcccccacactcgg

SEQ ID NO: 770493 - DNA, 75 bp, Homo sapiens
tttaattttagggtcctttatatagaagggagagtagggtccatgcctttttagagcagtggggactcgttaatt

SEQ ID NO: 770494 - DNA, 98 bp, Homo sapiens
aatcttgaatcatgaagctactaaccagagccggctctttctcggatgggcaacactccagattcagcctcagacaacctcggtttccgctgtgctgc

SEQ ID NO: 770495 - DNA, 83 bp, Homo sapiens
cttctcccgactatttggcaagaagcagatgcgcattttgatggcaaaaatattttgattctggggattacaacatggctaaa

SEQ ID NO: 770496 - DNA, 50 bp, Homo sapiens
ccggggggctcacagctgcctgcatcccgtaactcccaagtaaggtacct

SEQ ID NO: 770497 - DNA, 98 bp, Homo sapiens
cgggcgccaccgctgccacctccgcgagctcaaccagaacgtaagttctttccaaagaaaatttgttggtgaggtgaagaggtgtgaagagctagagc

SEQ ID NO: 770498 - DNA, 100 bp, Homo sapiens
aggaaaatgatcagaaaaagaaagaagccaaagagaaaggtacctgggttcaactaaagcgccagggccgtaggcagccatggcgcccagccggaatggc

SEQ ID NO: 770499 - DNA, 109 bp, Homo sapiens
gcatttttgttttaggtttggattttctttcccttattccagttgatccccagggtgaagcagtcagagctgttcgacaggtggaagagcctccagatgtgcaaatggg

SEQ ID NO: 770500 - DNA, 128 bp, Homo sapiens
attaagggaaaatggatgtagaaaatgagcagatactgaatgtaaaccctgcaggaaacctgtccagtttaagtcgtcttggtctgagatataacagactgtcagcaatacccagatcattagcaaaa

SEQ ID NO: 770501 - DNA, 83 bp, Homo sapiens
cttgcctacccgccggcccgcgggtctacttcctcaaagcagcccctgtcaaagggaacaggaagcagtccacggagggtgac

SEQ ID NO: 770502 - DNA, 99 bp, Homo sapiens
agttgtgcgttgcggccagtcgccactgctagggaatctggaaaaattgcaatcaaaacatcatttctctaagaaaattttgggtaaccgaagttctgg

SEQ ID NO: 770503 - DNA, 50 bp, Homo sapiens
gttcaagaagaacactccagagctcagaattctgcaaatgcagattttgc

SEQ ID NO: 770504 - DNA, 74 bp, Homo sapiens
ggcgctggtctgctcccagccggctcagctgtcgcaggccctggaggagctgggaggccagaaacaaagagcag

SEQ ID NO: 770505 - DNA, 75 bp, Homo sapiens
cttccaaagaatgccacagaatcaggggaggcatgcttcaggacattaaattgtatgattggacagatgaagcat

SEQ ID NO: 770506 - DNA, 87 bp, Homo sapiens
aaatcctataacaatgcagtgtataaaggatgccttccgtgccttccatcaagatctcaattttgtgcgcaagttcctacagcccct

SEQ ID NO: 770507 - DNA, 74 bp, Homo sapiens
tttggagaaatataaacttctgccagataggaactgacagctggctgacagaaaacttatccagggagagaaga

SEQ ID NO: 770508 - DNA, 90 bp, Homo sapiens
ttcagaagctggtcgccgccggcagacaggggcaagtgtccgagtggtgaatcagctacttacagagatggatggtctggaagcacgcca

SEQ ID NO: 770509 - DNA, 130 bp, Homo sapiens
cgcaccgagcccttccaggacggctacagcctgtgcccgggccgggagctgggcagacaatgcagatcttcgtgaagactctgactggtaagaccatcaccctcgaggttgagcccagtgacaccatcga

SEQ ID NO: 770510 - DNA, 100 bp, Homo sapiens
gccaagatgtctgacatggaggatgatttcatgtgcgatgatgaggaggactacgacctggcctcattgaatttgaagaatgtgacactgctagtgcagt

SEQ ID NO: 770511 - DNA, 100 bp, Homo sapiens
ccccgctcctgctgctgccactcgtcattctgatgcccgccaagtgccggatggagtgctgtgatgtgccagccgagacactctacgacgtcctacacga

SEQ ID NO: 770512 - DNA, 98 bp, Homo sapiens
aagagacgtctgatgaacctcatgcgggatgtggagcgggagggcctggactgggacctcatcttcggaaatgtgtggacacctacaagtaccttttc

SEQ ID NO: 770513 - DNA, 75 bp, Homo sapiens
ctgaagcctggaaacgaggcactcagttggaagagtccagcaagcttacctgtggcccatacctgcttcaatcaa

SEQ ID NO: 770514 - DNA, 83 bp, Homo sapiens
ggctcagatcagtggccgaggccccagaggtctgcctcagccacctccctgacgctgtcccactgtgtggatgtggtgaaggg

SEQ ID NO: 770515 - DNA, 100 bp, Homo sapiens
catccttcaatgacacttttgtccatgtcactgatctttctggcaagacaggaagataatatgacctcagtaacaaaccacttttctcaatcaaagctgg

SEQ ID NO: 770516 - DNA, 82 bp, Homo sapiens
tccgttctctcaggctcccgttcaggctcacagaacatttcctgcctgttgctcacactctgttgtccacagcatacccgca

SEQ ID NO: 770517 - DNA, 75 bp, Homo sapiens
gaagctgagaatgctgtttcctcagctaatgatgctggctactttaatgatgaaatggcaccaattgaagtgaag

SEQ ID NO: 770518 - DNA, 93 bp, Homo sapiens
gttggaagcagccgatccagcctgcggagcctgtggggcagtttcgagaggcccgtgccatgagaccgcctggggtgagcaaggcgacctggg

SEQ ID NO: 770519 - DNA, 75 bp, Homo sapiens
ctttcatgcagtgacatgttgataaaaaatgatggagctggtcaggctcaccatcgagaagcagggacgtccgtc

SEQ ID NO: 770520 - DNA, 75 bp, Homo sapiens
aacggcctcgtgttcggtttgatgcatgaacttacgagaggtgttaaaaaaatatggtaaagatgttggtcttca

SEQ ID NO: 770521 - DNA, 98 bp, Homo sapiens
cgcgaagcgctggtggcgggcccgggctgcggcgtgtgcgcgcccgccagctgctccggagatacggtggtcttggaggcattgggatgggacttggt

SEQ ID NO: 770522 - DNA, 116 bp, Homo sapiens
gcggccgagcgggcggcttcctggcctgggcgctccggtggcggcggagactcggtgaaatacctggagtgctcagctctcacccagagaggcctgaaaaccgtgttcgacgaggc

SEQ ID NO: 770523 - DNA, 90 bp, Homo sapiens
gcgaggtccgcgcagcccagcgcagccatgttgaagaagcctcagcggaggcgatacggcctcctcgccaacactgaggaccccacggag

SEQ ID NO: 770524 - DNA, 92 bp, Homo sapiens
actttcgccagcccgtgccgcgagcgcggcctgcaggaggtacctgccgtgggcagatctgagctttcttcttggacaccccatacccacag

SEQ ID NO: 770525 - DNA, 75 bp, Homo sapiens
ccgccatccgggagaagctggcctgggccaagaccagagtgaactccgagcaggaacacttcctcattgtccctt

SEQ ID NO: 770526 - DNA, 74 bp, Homo sapiens
tcggttctctacttccaacagaagaaggtgcttcctggaggggcctgccccactgttcctgtgctgagttccag

SEQ ID NO: 770527 - DNA, 120 bp, Homo sapiens
gtcttccccagctctgcagccacatactatccgtttgttcaggaaccaccagtgacagaagcacaggaagcttggaaacatgactgtgacggtgaagaagactgtcccctctcctgaggc

SEQ ID NO: 770528 - DNA, 83 bp, Homo sapiens
cagccaggagtcatgagcgacagcggcgagcagaactacggcgagcggatcacttaggaaaatggctgttggtatgatcctag

SEQ ID NO: 770529 - DNA, 75 bp, Homo sapiens
aaggaaggcgtccgttggccttcgtacccgtcttgattgagatctctcaaaggccttggttctgacagaaattgg

SEQ ID NO: 770530 - DNA, 83 bp, Homo sapiens
ccaagcgcatgatccgcatggccaagaaagcttatagcttcattgcaccatgtgtggcatttgggcgctgtttggcagtgatg

SEQ ID NO: 770531 - DNA, 90 bp, Homo sapiens
agagagaccgggacaataacatccaattcactgtgggagaggagaccttcacggcatggtgcaactcccacctgcggaaggcaggcacac

SEQ ID NO: 770532 - DNA, 100 bp, Homo sapiens
gaaaaagtaccatcatttgaaacagctgagatctgtatctgtggacctgaatgttgatccctcgcttcagattgacatacctgatgcgctcagtgagaga

SEQ ID NO: 770533 - DNA, 75 bp, Homo sapiens
cagcctcctgaggagctgggactacagctaagcctctcagttcagaaatggaatggagatccagtatggagaaaa

SEQ ID NO: 770534 - DNA, 83 bp, Homo sapiens
cttccttatacgtcaatgagcactatccacacgacaggcctacactctattcaaacagcagaaaaatatggctcaggagacta

SEQ ID NO: 770535 - DNA, 75 bp, Homo sapiens
tgagcagtgcagaaaattccttgtctggaagctgccaatccttggacagaatcctaatgtacctggctagctggt

SEQ ID NO: 770536 - DNA, 98 bp, Homo sapiens
ggctctttagctgaaatacttctgaaggttagaaaatggatttctgactggaatctcaccactgaaaaaaagcacacccttttaagactactttatga

SEQ ID NO: 770537 - DNA, 98 bp, Homo sapiens
agtgtgttgacaataatcagtctgttctagtatctgcacatacctcagcgggaaaaacagtatgcgccgattgagtcagcagatactggagttatttg

SEQ ID NO: 770538 - DNA, 87 bp, Homo sapiens
aatttgcaaatgatatacaacttctaagtccagaagcactggaaatccatggatcattcacatggcttggacaaacacagtataaac

SEQ ID NO: 770539 - DNA, 98 bp, Homo sapiens
ctcttgatccacttgctgataaaatacttatcagtatcttatatgttagcttgacctatgcagatcttattccaggtggtccgtactgagaagaacag

SEQ ID NO: 770540 - DNA, 100 bp, Homo sapiens
ctgagttcggccggtccgagtcactgtgcgtcgcctgggcccgttcctggtcttctcccccagagctctgaagatgagtgggttgaggctgttccatccc

SEQ ID NO: 770541 - DNA, 80 bp, Homo sapiens
aatatttcgagcagtttggcaaggattttttatcaagcagaaatgcatcgaacaacgagaatcaagatcactgagctaaa

SEQ ID NO: 770542 - DNA, 90 bp, Homo sapiens
aataccgcagaccattgtaattcatgcaaagtgcagaggaaagttccacttccagaaaaagaactacagaagacgatatccccacactgc

SEQ ID NO: 770543 - DNA, 75 bp, Homo sapiens
ggtaatgtgtccattcgagggcggatcctctctggttagctcccagcgatgccagatgggatcagcacagccctg

SEQ ID NO: 770544 - DNA, 50 bp, Homo sapiens
gacccgcggacagatagcaaaccaggttggcgctgtacgtttatgagtac

SEQ ID NO: 770545 - DNA, 83 bp, Homo sapiens
atttgtggctggctggatctctgatcttgattttgccagccttgctcgaggttttgccctgctgaggatgcccaagatgccag

SEQ ID NO: 770546 - DNA, 83 bp, Homo sapiens
ggtgtggtacgtgtacaggtacctgctgagtgaaaaagattgagaggatccagaatccagatctctggaatagctaccaggca

SEQ ID NO: 770547 - DNA, 121 bp, Homo sapiens
cagctaaaggatgtgaccattttggcagctactaaccgtccagataggatagacaaggttgtgacaaagacctttcatggtgcaggcttggttgttccagtagataaaaatgatgttgggt

SEQ ID NO: 770548 - DNA, 100 bp, Homo sapiens
aagtatcatctgttactataacacctaccaggtatacatggactggtacgagaagttccaggacaggctcaacaagaaggtggtactcctgacaggcgag

SEQ ID NO: 770549 - DNA, 75 bp, Homo sapiens
aaagatgtagatgagagaaatgaggaaatgttcaggctggagactatgtgctaatccatgcaggactgagtggtg

SEQ ID NO: 770550 - DNA, 90 bp, Homo sapiens
aaaatctggtgaaattgccggcaagagggagttaaggacattccaggcagaggcaagaacactctgctccagccaaggtggtgagggcag

SEQ ID NO: 770551 - DNA, 98 bp, Homo sapiens
ttcgggcctagcggagccgggactggaggctcaaagtctaactccccaggactataatctgaggtggtcaggccttttggtgacagtgggtgaagtcc

SEQ ID NO: 770552 - DNA, 75 bp, Homo sapiens
actattactcgttgctgaacgtgcgcagggagaccatggtgaatccgggcagcagctcgcagccgcccccggtga

SEQ ID NO: 770553 - DNA, 100 bp, Homo sapiens
tttggctttgcagacagcacagtcttacaggttttagctaaagaagatactgaggcagctattcaatcaatattatacaaagaaaattctgtaattaagg

SEQ ID NO: 770554 - DNA, 97 bp, Homo sapiens
ccttgctgcccttgttgctggtgtcgtctactggctgtacatgaagaagtcaaaactggaatcagccattttaccaagaaagttgggtttcttttac

SEQ ID NO: 770555 - DNA, 132 bp, Homo sapiens
aattctgcctaagccaactcgaaaaagccgtacaaaaaataagcaaaagcgtcccaggaggggatgcgggagagaagggagacaaaggcgcccccggacggcctggaagagtcggccccacgggagaaaaag

SEQ ID NO: 770556 - DNA, 100 bp, Homo sapiens
cagtggagagaggaattcctcaagacaccattccagtggtggcacaaaggctgaggaagctagaatttcctgtgaaggacagtggagaacccagtgtccc

SEQ ID NO: 770557 - DNA, 75 bp, Homo sapiens
ctctgctcttcagtacaatcctatcatctgttacgtactgcaagtcagcattccgatagcagtggttttgctgaa

SEQ ID NO: 770558 - DNA, 100 bp, Homo sapiens
aggagttacaccaaatgtagaaccttttctccatggtaacagtgtggtttgtgatgaaaatggttccaagggctatggatttgtacactttgagacgcag

SEQ ID NO: 770559 - DNA, 85 bp, Homo sapiens
gtgacctggggaacctgctcaaagccctgggtcgcttggaagaagccaagaataactgaagtgaagtgatggactccgatttgga

SEQ ID NO: 770560 - DNA, 50 bp, Homo sapiens
ctgggcttccggatcgagggcatcaagatcccatggacaaaactgaaaac

SEQ ID NO: 770561 - DNA, 74 bp, Homo sapiens
gttcacgactctttactagtgacagctccacaaccaaggaggaggatgattacgacgtgatgcaggaccccgag

SEQ ID NO: 770562 - DNA, 100 bp, Homo sapiens
gctgtgtcttggggccctttgggacgagtgctgtgactgtgttggtccaatgatgcatcagcagcctccttctcagcaatacaatatgccacagggaggc

SEQ ID NO: 770563 - DNA, 83 bp, Homo sapiens
ctactacgtggtgcttggaaaggaggaggacttcatccaacccagcagccgagaagaggcccagcagctgtgggaggctgaaa

SEQ ID NO: 770564 - DNA, 73 bp, Homo sapiens
aatcaagctatccaaatgcgattagttgatgtggcctgcaagatgcacctacctgatgggagagcccagccag

SEQ ID NO: 770565 - DNA, 51 bp, Homo sapiens
ttgccagaatcaaccaccttctaaatctcaactttcatcctttgaaacgtg

SEQ ID NO: 770566 - DNA, 100 bp, Homo sapiens
gccatctacctggacatcgatggacgcattcagaaggcctgcgtaagtgaggaaacagctgatcctgctcctgtggcctccagcctcagcgaccgaccag

SEQ ID NO: 770567 - DNA, 100 bp, Homo sapiens
gacaatttaaccaagaaaaattaccgagccagccagcaggaaatacagcatttgtggacatcggatacccaaggagacgaagctgaagcaggagaaggag

SEQ ID NO: 770568 - DNA, 76 bp, Homo sapiens
gtagaaggagaattcctacttcagagctatccagtatgcattcttagaaaccagatatacaaagacaagatctctg

SEQ ID NO: 770569 - DNA, 75 bp, Homo sapiens
ggagcatgcagagggaagtccccagagggccctgtccaggtttccccacttgctctggagcgggactgtgctgaa

SEQ ID NO: 770570 - DNA, 112 bp, Homo sapiens
cccacctgagcccccgctgagcagcccagccagtcagcacaaaggaggacgtggtgcagaccatgaattacgtggggcagttagccggccaggtgtttgtcaccgtgaagga

SEQ ID NO: 770571 - DNA, 100 bp, Homo sapiens
cctcctaaggagctggtgtcttcatccagaagggacagtttgtgccagctctccagagagaaaaggacctccgggagaagaactggaaggccatggaggc

SEQ ID NO: 770572 - DNA, 75 bp, Homo sapiens
acattcccaacagccaccaccaccaccagatggtgaaatgacaatggatgctctgttggctcgattgaaacttct

SEQ ID NO: 770573 - DNA, 75 bp, Homo sapiens
cagcctcttctgaaacactgggagttaatagagtggatacaaccttgctgaagatgaagaatatacaatattgag

SEQ ID NO: 770574 - DNA, 75 bp, Homo sapiens
cttgcatccacagtaaacagggacagtcattttgtttactcattcagccctgttgcaggtcccaataaactcttc

SEQ ID NO: 770575 - DNA, 51 bp, Homo sapiens
gctggatgccgagcgcctcaagcgcgagggactttgaacatgtcggggatc

SEQ ID NO: 770576 - DNA, 100 bp, Homo sapiens
tgcagctcggggtgggtggctcatttcctggccgctcctgggcttcgcgcctgtttctaccgacttcgctcagtataacagctatggggatgtcagcggg

SEQ ID NO: 770577 - DNA, 82 bp, Homo sapiens
ctgtaaggagccgcggcggggggaaaatggagcccttcaccaatgtttgcagaaaaaacttcagcatgtgccaggaacacaa

SEQ ID NO: 770578 - DNA, 82 bp, Homo sapiens
tcacattgacagcaatggaaacagtagtccgggctgctcacctcagccgcacatgaagtgggaaaactcttgcctttgccat

SEQ ID NO: 770579 - DNA, 90 bp, Homo sapiens
cttcaatctgcaagatttcagagacacggtggatgatctcatttcagatttgttcccgacaaggagttttctggttcagaccgtagacag

SEQ ID NO: 770580 - DNA, 100 bp, Homo sapiens
gtcaaggtggcctaccaggaggccaggggtgtcgccatgatcaatgtccgagttaccaccatggatgcagagctggagtttgcaatccagccaaatacaa

SEQ ID NO: 770581 - DNA, 80 bp, Homo sapiens
agcctcccaagtagctggaattacagctcatgatggagcagtccaagaagtcctccctcatggtggcccgcagtattctc

SEQ ID NO: 770582 - DNA, 134 bp, Homo sapiens
cgggccgtgcagctccaagagctgtggcccgggggcctcttctggaccaggaaactctccacattcatctgaaaactacattaagatgaagacctttgaaggtttctgtgctttgcatctcgctgcaagtcaag

SEQ ID NO: 770583 - DNA, 75 bp, Homo sapiens
aagggaccaaggtggaaatcaaacagtcaatgcatgtgttgatgtggtgctctcaggggtgaagctcttgcaggc

SEQ ID NO: 770584 - DNA, 100 bp, Homo sapiens
tgctcaatgaccgctaccgcaagctgctcctgcagccaacaacgtctgcttctgatcgactcgccgctgcacaataccttcctggagctctggaccatgg

SEQ ID NO: 770585 - DNA, 82 bp, Homo sapiens
cggatttctctatctgatagagggacaatgaagcctttgaagtgccagtctatgaagaggccgtggtgggactagaatccca

SEQ ID NO: 770586 - DNA, 49 bp, Homo sapiens
gtttgaagcctttcatgtttttaagtgggtaattccagaattgattggc

SEQ ID NO: 770587 - DNA, 83 bp, Homo sapiens
ctcagttggaagcagccgatccagcctgcggagcctgtggggcaggttttcacctcaaatggccccacggtgatcatgcccac

SEQ ID NO: 770588 - DNA, 51 bp, Homo sapiens
gttagctttgaagtggatcctaccagattgaaaggtatggattccctcctg

SEQ ID NO: 770589 - DNA, 50 bp, Homo sapiens
gcgcgtggaacggctgcttttggaagtcgctgggtaagtcggagtgccac

SEQ ID NO: 770590 - DNA, 100 bp, Homo sapiens
cggcagtcggatagacaataccacaacaacacattttgcagagggtctcattctgttgcccaggctggagtgcagtggtgcgatctcggctcacagcaac

SEQ ID NO: 770591 - DNA, 75 bp, Homo sapiens
tgctcaacacactcaagaacaggtgaggtcccagcttgaagagaaagaaaacaagaagttccctgtgtttaaggc

SEQ ID NO: 770592 - DNA, 88 bp, Homo sapiens
gacgtggctattgtgaaggagggttggctgcacaaacgaggtctggtccgagagcaggaggctgggctgctgcagttcctccgcctgg

SEQ ID NO: 770593 - DNA, 97 bp, Homo sapiens
agtgttactcagacttatttgtttcatagctctactgatttcttctctggaggctggtgaccaagaatatggcccaggtgaccaaagccctggacaa

SEQ ID NO: 770594 - DNA, 105 bp, Homo sapiens
gggacccaccccactgcccttcattggaaactacctccagctgaacacagagcacatatgtgactccatcatgaagatcagtgagcgctatggccccgtgttcac

SEQ ID NO: 770595 - DNA, 90 bp, Homo sapiens
agaccatgctggccggggtgcagtaccccagctccatcaacctcacgctgcacctggcagctttggtgtcttcatccttctctcctacct

SEQ ID NO: 770596 - DNA, 100 bp, Homo sapiens
agagagggattacagaaaggagaacaccttatttcaggagcgagaacccgagcagcgccatgagcaacactaccgtcgtccccagcactgcaggtccggg

SEQ ID NO: 770597 - DNA, 50 bp, Homo sapiens
tgaggacgcagatgtctggtaatgagacctaatctgggagcctgcaagtg

SEQ ID NO: 770598 - DNA, 75 bp, Homo sapiens
ctcccgagtatctgggattacaggtcagttttagaattagcctgtctaagtcaggcatggtgccacgtgtctata

SEQ ID NO: 770599 - DNA, 100 bp, Homo sapiens
gcagatgatgcagaggagcgagctgagcgcctccagcgagaagttgagggagaaaggcgggcccgggaacagaatcctcactatggatgggctcattgag

SEQ ID NO: 770600 - DNA, 75 bp, Homo sapiens
cagcgcgccaaaaccgggacggacaagaccctggtgaaggaggtcgtacagccatcccaggcctcaggacctgag

SEQ ID NO: 770601 - DNA, 98 bp, Homo sapiens
gttcaccttggacccactttatagagaattgaattcagcattattctggcagacattcacaaagaactgacaaggaaagaagagagattcaagcctgg

SEQ ID NO: 770602 - DNA, 80 bp, Homo sapiens
ctacaggcgctgacggccacccctccagtctaacaaagtgccagtggtgcagcaccctcaccatgtccaccccctcacgc

SEQ ID NO: 770603 - DNA, 103 bp, Homo sapiens
gccggccagaagcgggcggcgcgggggagatggctgaccccgcactacatctacccaccagccatcgtgcagcccagcgtggtgatcccagccgcccctgtcc

SEQ ID NO: 770604 - DNA, 96 bp, Homo sapiens
gccccgcagcccagcagccccgcagcggcgccgaggacagtgcagccgagttgcgtctccctcgcgcgagaaatttaaaagcctgttgattcaaga

SEQ ID NO: 770605 - DNA, 51 bp, Homo sapiens
ccggccccggcagcggtgtccagctcctactatactggcaattgctggaga

SEQ ID NO: 770606 - DNA, 74 bp, Homo sapiens
actccttcggcagtccacccaccgccgccgcctcccaggggaacgcccttttgcttgtgactggcagggctgcg

SEQ ID NO: 770607 - DNA, 100 bp, Homo sapiens
agttcgagatcaccttcgagtgcatcgaggacctgtctgaaggtctcggcgcggaagatggccggcggcgtggacggccccatcgggatcccgttccccg

SEQ ID NO: 770608 - DNA, 75 bp, Homo sapiens
ggccctgaggctgcaccaagtggcgaaggagccggctccaagatcttcagtttagatcttggaggcatatcaact

SEQ ID NO: 770609 - DNA, 50 bp, Homo sapiens
cgcagcgccccgcagagcagtcgagatgcatcatcccattcagatgaaac

SEQ ID NO: 770610 - DNA, 100 bp, Homo sapiens
cactcggctcctgtcgtccgttctctcaggctcccgttcaggcaacgccctgctgcggcggctggtccgcattggggtgctggatgagggcaagatgaag

SEQ ID NO: 770611 - DNA, 82 bp, Homo sapiens
aacctgggcgagcagcggcgggggcccgaggggaagcaaaatgtggattcagcaaacaaattctggaaatactaaatagtac

SEQ ID NO: 770612 - DNA, 101 bp, Homo sapiens
agattgctgaccaggggcttgagagctgggttctattttccctcctcaaactgactttgcagccacggagagaatgaagactattctcagcaatcagactg

SEQ ID NO: 770613 - DNA, 83 bp, Homo sapiens
aaagtggcggtgcggatacgacccatgaaccggcgagggaaatcctcattgacgattcaatttgttgaaggccaatttgtgga

SEQ ID NO: 770614 - DNA, 83 bp, Homo sapiens
ttccagaggctttgtggtgcgggacgcaccctggaccgccagcagcagtgagaagattctgcctgatcaatgcaggagtcctg

SEQ ID NO: 770615 - DNA, 100 bp, Homo sapiens
aagaagctgaggatgaagaagatggacagtcattttgtttactcattcagccctgttgcaggtcccaataaactcttcataaggttgacagaagcaccct

SEQ ID NO: 770616 - DNA, 100 bp, Homo sapiens
aagatatggaagctgtggacttgaggatttacacttaaggaaggatggggaaaatgtggaatgggtgcgcacagcctcgggaccgcgactcagaattcac

SEQ ID NO: 770617 - DNA, 75 bp, Homo sapiens
cagaatcagttgttggagaaaattaaaggcaagaaattatagagcagcttctatcaaatattttccacaaggaga

SEQ ID NO: 770618 - DNA, 100 bp, Homo sapiens
caaacacaaggacctacaacagcagctggtggatgccaagctccagcaggcccaggagatgctaaaggaggcccagagcaagagaggcatcctcaccctg

SEQ ID NO: 770619 - DNA, 100 bp, Homo sapiens
aaaagtagaaattgatcagcaacaactaactcagcagcaacttaatggaaactaggctctgtatgtggatgtgatccgtgtgaacagctactactcttgg

SEQ ID NO: 770620 - DNA, 50 bp, Homo sapiens
aacctgttacaaacagtcctctatacctggactacagacgagtgcccaac

SEQ ID NO: 770621 - DNA, 51 bp, Homo sapiens
cagaggacgacatgttgcttttcgtggagattcagaaaaaccagggatctt

SEQ ID NO: 770622 - DNA, 74 bp, Homo sapiens
ctggtaacagggccttgcctagtgggccttccttcccagatcaatgaactgagccatgttcaaatccctgttat

SEQ ID NO: 770623 - DNA, 126 bp, Homo sapiens
gagaccggagcgccgctcgccgcagacttacttccccggctcagcagggaaagatcgcccaggaccacaccgcagcgtaactgcaggcctctcagcgaaaaagggggaaagcaaagacccgggtgt

SEQ ID NO: 770624 - DNA, 75 bp, Homo sapiens
aaggagctggacaagattacagccaagcacgcggccaaggggaactctccagtgaagaagccaagtcttctaaag

SEQ ID NO: 770625 - DNA, 51 bp, Homo sapiens
cttcaggaagtgcatttagctgggatgaaatttggtgagcggcctccacct

SEQ ID NO: 770626 - DNA, 73 bp, Homo sapiens
ctggagacgtccagcctgacattcacctgacttctgcagaacaatgatgatgtgcctgcagatatggttgcag

SEQ ID NO: 770627 - DNA, 100 bp, Homo sapiens
ttggatgagttaatgggccgggaccgaaacctagccccggacgagaagcgcagcaacgtgcggtgggaccacgagagctgttctaagaacggaagcatct

SEQ ID NO: 770628 - DNA, 78 bp, Homo sapiens
tgccggcggcatgatccgacacgccggggcgcccgcgcgcggggaccccacggggtgagcatgggtttatgcgtctta

SEQ ID NO: 770629 - DNA, 100 bp, Homo sapiens
aggaggggcatggagccgccgcgggcctgctgagctccggagcgcggcagccggcggcacggttttgaagagacaggggacacgctctatgccccctatt

SEQ ID NO: 770630 - DNA, 74 bp, Homo sapiens
agaaccaggaaaacctttcaatgaactgtgggattatgaaggacacattcagctaacgtattttagcaggtgga

SEQ ID NO: 770631 - DNA, 95 bp, Homo sapiens
cgctccgtggccttagctgtgctcgcgctactctctctttctggcctggaggctatccagcagagagcgctgtacagcatggaatgtgcgttcca

SEQ ID NO: 770632 - DNA, 82 bp, Homo sapiens
accatattaatgcagatgaggcgttctttggtgaaatgacaatggatgctctgttggctcgattgaaacttctgaatccaga

SEQ ID NO: 770633 - DNA, 100 bp, Homo sapiens
ttctggattcagagacagaaaagctgctgagcttcgtgcttatctgaaatctaaaggagctgagatttcagaagagaactcggaaggtggacttcatgtt

SEQ ID NO: 770634 - DNA, 74 bp, Homo sapiens
aggactgaccatgctggatcacgaacaggcaactttggctttggggattcacgtggtggcggtggaaatttcgg

SEQ ID NO: 770635 - DNA, 100 bp, Homo sapiens
ccgctgcgctcaatgacagggaccaggggggcggcagcgctggacacccagcctccaggaatacaggagtttccagaaaatataaaaaattgtaaagttt

SEQ ID NO: 770636 - DNA, 90 bp, Homo sapiens
ttgttgaatgtttatatgttaactttgactttgatggggctcagaaaaagctgagggaatgtgaatcaacggagtctcactctgtctccc

SEQ ID NO: 770637 - DNA, 50 bp, Homo sapiens
taaagagtaaagttgtgctcaacggcaatgccaccgtagataagttggag

SEQ ID NO: 770638 - DNA, 82 bp, Homo sapiens
ccgcgagcaaggagcgcggaatcggggagcgtccggagctagctggatcctctaggcaggccaagtcctgtatctgccatgt

SEQ ID NO: 770639 - DNA, 83 bp, Homo sapiens
ggacatctatgccaacatcttcatcatcaaatgcagccgagagacagagaaggagcatcagatccatgctgctgctgactcgg

SEQ ID NO: 770640 - DNA, 100 bp, Homo sapiens
gagaaaacggaatctaatcaggaggttgctaacccagaacactatattaaacatcccctacagaacagaagtgtcggaggaaggcttccagattccagct

SEQ ID NO: 770641 - DNA, 75 bp, Homo sapiens
cggagctttcgcagctggagaaggtggcccatcccctgcacccctgcaccccaaacgcagcccgacgagcacggg

SEQ ID NO: 770642 - DNA, 100 bp, Homo sapiens
tacagcttggtgaagagttactagctcaagcttttacccagcacctgtccagtgaaacaacttgataatcgtttcgaggggcgtccgccgggttaggaag

SEQ ID NO: 770643 - DNA, 82 bp, Homo sapiens
tccagtcctgcagtggaaagattgatcagttcgctgttgcgaacatgtgatttggaagagcttaattggcttagtgtcgact

SEQ ID NO: 770644 - DNA, 90 bp, Homo sapiens
aggatacctggtctgcttccagatggaattcctcattgttattgtggaaagacagagtattgggaaagggtcgttgtggtgcatagaccc

SEQ ID NO: 770645 - DNA, 83 bp, Homo sapiens
ccgcgggctccgcgcccggccggacccgggcccgaggtgaggcggaaccaaccctcctggccatgggaggggccgtggtggac

SEQ ID NO: 770646 - DNA, 100 bp, Homo sapiens
tagaaggaccaagatggcagcagtgactctgctggctttggcgtatacacagagagatggctgcccaaagattgtcaatctggggagctctaagacagac

SEQ ID NO: 770647 - DNA, 90 bp, Homo sapiens
tacgcctcctacgtttacctgtccatggtattgatgaagatgaccctactgctgatgataccagtgctgctgtaactgaagaaatgccac

SEQ ID NO: 770648 - DNA, 75 bp, Homo sapiens
ggcctgggagctgcctctgaggaacacgccgcagacctgcctagagctggaacgttacctccagagcgagccctg

SEQ ID NO: 770649 - DNA, 82 bp, Homo sapiens
tatcgggtggcggctcgggacggaggacgcgctagtctgtgagccgtgagctttgaggcggtgggatgtgtcagcagaatgt

SEQ ID NO: 770650 - DNA, 48 bp, Homo sapiens
gacttggtactattctctctcccagggtaaaatccagtacaaggaata

SEQ ID NO: 770651 - DNA, 88 bp, Homo sapiens
ggcgtttgtagaagaggagcatctgctccaggtttattacccagaactctttgtctgggtcagtcaagaaccatttccaaacaaggac

SEQ ID NO: 770652 - DNA, 123 bp, Homo sapiens
ctgaggctcattttgcagttgttgaaattgtccccgcagttttcaatcatggtacctcatcgcccatccttatcaagcttagaaacgttaatggtttcacagaagtctgaaattgagtattta

SEQ ID NO: 770653 - DNA, 97 bp, Homo sapiens
gttgagattgcccgagaagtgaccccagcaaaagaaaaatattgctgtacctaaattcaatatgccgagattttgctgtcctggaggaccacaccct

SEQ ID NO: 770654 - DNA, 90 bp, Homo sapiens
atgaagtaatttgcagtgaaattttaagcgactgtgactctgctgcaagttccccagatcttgaggcatccccaatggattggacaattg

SEQ ID NO: 770655 - DNA, 51 bp, Homo sapiens
cccgcgttcacagccccagcgcagacaagccaaacggctcctgggacagat

SEQ ID NO: 770656 - DNA, 82 bp, Homo sapiens
tgcagcgcgctcggaggcctcttccagaccatcatcagcgacatgaaggtgtttcccattaaacactaccaggacaaaatca

SEQ ID NO: 770657 - DNA, 97 bp, Homo sapiens
tgtaccatttccacttgatgtcatcacgcagaaggggtgaaagagactcggtgacagatacagatcatcagaaaagcccttactgaggaaaaacgtg

SEQ ID NO: 770658 - DNA, 99 bp, Homo sapiens
gcagcctctcgggatgacaccactctgaatgcactgaacacaatgatgcagtttgcttggcagagctataagcgttatgcaatggggaaaaacgaactc

SEQ ID NO: 770659 - DNA, 76 bp, Homo sapiens
gaaatacccagactgttactacaacctcgggcgtctgctggcatcagtcatcttgaaacaatatgtggagactcac

SEQ ID NO: 770660 - DNA, 100 bp, Homo sapiens
gtcaaacagaaaattcatcccacatcagttattagtggctatcgacttgcttgcaagtactgctataaccagaatttggtagaaaaaggatttacttgtt

SEQ ID NO: 770661 - DNA, 75 bp, Homo sapiens
gggtcttcgtgctgctcgacgtgctgtgcttactggaatcccttggcaccatgtcctgtgtgcattataaatttt

SEQ ID NO: 770662 - DNA, 76 bp, Homo sapiens
gcagatctctacgaacttgtacagtatgctggaaacattatcccaaggctgtgttggggatgtcctttgcactgac

SEQ ID NO: 770663 - DNA, 98 bp, Homo sapiens
ttcaccaacctcaaggacacctcctccaaggtcatccagtccgtcgctaaatcgctgccgttttgcccttgggagtaggatgtggtgaaaggatgggg

SEQ ID NO: 770664 - DNA, 79 bp, Homo sapiens
tacaggcatgcaccaccatgcccagcttgttgcagatccttgtgccagcaacccttgtcaccatggcaactgcagcagc

SEQ ID NO: 770665 - DNA, 98 bp, Homo sapiens
aagtgctgggattagaggcgtgagccactgcacctgacctaagctacatgaatgtgtaagatcttggaggaagacagcagagagagagagagagatca

SEQ ID NO: 770666 - DNA, 100 bp, Homo sapiens
cttttccttcggagcagcagccctgtccggcatctgtcttgagctcccagcaaggttctcctgaaaagaaagctgaacattcatctataaatcaagaaaa

SEQ ID NO: 770667 - DNA, 83 bp, Homo sapiens
cgtggagtcccggtcgagaggcggcgcccgcgccgagcgccagccagggactttgaacatgtcggggatcgccctcagcagac

SEQ ID NO: 770668 - DNA, 82 bp, Homo sapiens
tacaagtccgcggagcagggggaggtggtgcaagtgtaatctccatgccactgtatgtgtgtatgacaacagcaaattgaca

SEQ ID NO: 770669 - DNA, 50 bp, Homo sapiens
ttgacatctgtacttcaagaaagatttgcttgtaaatgcatcacgaagag

SEQ ID NO: 770670 - DNA, 82 bp, Homo sapiens
ctggaagaaaaagatacaacgaactagcacaacgagggtaatgtgaggctacaggagatgatggcaacaatgtgccaggaac

SEQ ID NO: 770671 - DNA, 95 bp, Homo sapiens
gctttttttctccagccgagaggacgcggctgtgatatacgaagagaacaccttctgcagtggggaccatgtgtcctggcacagccctttggata

SEQ ID NO: 770672 - DNA, 100 bp, Homo sapiens
ggcggctcctgctcttcctggactcctgagcagagtttctcttcagcaacgggtagcagaattggaaaaaattaatgcagaatttttacgtgcacaacag

SEQ ID NO: 770673 - DNA, 82 bp, Homo sapiens
ggatatcgacgtcgtgatccagaagtccagagctgaggactgcctgtttgcagggccgagaactactggtggcgtggccaga

SEQ ID NO: 770674 - DNA, 51 bp, Homo sapiens
gtgaaagaaggttgggttcagaagaggggtttaaatgtgatactggtgtag

SEQ ID NO: 770675 - DNA, 98 bp, Homo sapiens
cggctggcggtcacctggcacaccagcgcccgcaggatgcccaggtcctggatgcctcatcccttagtttcaacaccagattgaaatggtttgccatc

SEQ ID NO: 770676 - DNA, 98 bp, Homo sapiens
gttggacacggtgtgcagacacaactacgaggtggcgttccgcgggatcttgcagaggagaggactatacaggctccaacccaagttccagtggttgt

SEQ ID NO: 770677 - DNA, 101 bp, Homo sapiens
gaatgaggaggacgaaatggacatgacttggcaggcattccagaccctccaaacatgtcagcagaattaatccaattgaaagccaaggagcgacacttttt

SEQ ID NO: 770678 - DNA, 74 bp, Homo sapiens
ccttgcatggattgggttttcagctgaaggtaccccaatctgaagtcagtaaatgaactaatctacaagcgtgg

SEQ ID NO: 770679 - DNA, 75 bp, Homo sapiens
cgaggagctgttcatcgaacagaaggttttcctcctccaccaggcgctccacctccatctcttataccaacaata

SEQ ID NO: 770680 - DNA, 100 bp, Homo sapiens
gaaaacatcaaatcatttcttcgaccagagcaaaggttttgtgaacatttaaaagatgaaaaaggtgaagaatcccagaagcggtttatcttgaagcgag

SEQ ID NO: 770681 - DNA, 78 bp, Homo sapiens
agatgagaaacccggcaatgaaagatgctgaaaacgccattcaacagatgggtggccagtggcttggtggaagacaaa

SEQ ID NO: 770682 - DNA, 83 bp, Homo sapiens
cgccggcaagagctcggtgctggagaacttcgtgggccgttggctgattgcaattctggcccaactcaaccctctctttggac

SEQ ID NO: 770683 - DNA, 50 bp, Homo sapiens
cgcggctccggtcacgtcaccgtgccccttcacagatgtagtcactacaa

SEQ ID NO: 770684 - DNA, 99 bp, Homo sapiens
gcagtgggtcccggacaaggagctgcatcttcctcccgtgaggctggccgagctccacgctgatctgaagatacaggagagggacgaactcgcctggaa

SEQ ID NO: 770685 - DNA, 75 bp, Homo sapiens
tgggtcagctagtatgcaggctaggcaaactcacgcttcctgggctgttacagtcaatggacttatcaacactga

SEQ ID NO: 770686 - DNA, 111 bp, Homo sapiens
gctaggatgatcgaggttgtttgcaacgaccgtctggggaagaaggtccgcgttaaatgatgtcctggaacaggtggaggcctatcaagctgaggctcgtgaggctctggc

SEQ ID NO: 770687 - DNA, 85 bp, Homo sapiens
aaaacaagggaggagaagacaagctaaaaatgattcgggaatatcggcaaatggctgaccggttccctgatgtgttacctgcttc

SEQ ID NO: 770688 - DNA, 101 bp, Homo sapiens
ctgaagcgggaagggtggtcagcaggcacaggagaagcgaatatgatctttaatctcatgaagtacgacagctacagccgcttcttaaagtctgacttgtt

SEQ ID NO: 770689 - DNA, 98 bp, Homo sapiens
ccagagcctggagtctgcgaaggccgggacccggttccccggcccacagtgggggtgtgcaaacccgagagaactggaatggcaccttgaaaattatc

SEQ ID NO: 770690 - DNA, 100 bp, Homo sapiens
cgcttatcagcattatctagtcctttccaccccgaaattcgccccgattaaagactgtgttgcattatcagataagggcctcgctctgttacccaggctg

SEQ ID NO: 770691 - DNA, 98 bp, Homo sapiens
cagaggggtccatacggcgttgttctggatccattggaggaaatagcagaaagttctccccagacggcagccaattcagcagctgagctgttgaagca

SEQ ID NO: 770692 - DNA, 96 bp, Homo sapiens
gaggacacacccaggaaaagactcaggacggacaagcacagtcttcggaagtttaacttacatgtgtagagctggagcaattcggacagatgataa

SEQ ID NO: 770693 - DNA, 50 bp, Homo sapiens
ggctacgctgaccattgcccagtacaggatgtggtggatacccaccctgg

SEQ ID NO: 770694 - DNA, 100 bp, Homo sapiens
gcgggcgccaggaccggccgaacgcagagctgaaagtacccatggcagacaagcctggtaacacagtgaatttccggaagctgctactgaaccgttgcca

SEQ ID NO: 770695 - DNA, 83 bp, Homo sapiens
ccaagaccagcctactacagaaatttgctttggaggtctacacatttactgggtttttagaacttcagccataaaaatgggca

SEQ ID NO: 770696 - DNA, 75 bp, Homo sapiens
ccaaaggacagttagaagacagtagctccagaaagccatgggtcctaaaatcaccctaaatgacctcatccccgc

SEQ ID NO: 770697 - DNA, 100 bp, Homo sapiens
ccgggatcgtgaccgagaccgtgaccgagagcgtgaccgagagcgcgaatatcgtcatcgttagaaggtgttcatgaaaaaaatgcacaaaatcctgcct

SEQ ID NO: 770698 - DNA, 95 bp, Homo sapiens
gaagagacgagtgcggtaacaccgttcacagagctagccggacgtcctccgactcaagatcctgtgcgcaggtggcagtgagtacccttttcctc

SEQ ID NO: 770699 - DNA, 75 bp, Homo sapiens
gtcttgctcggccgatgaagtgcagaggtttttttctgaggcgttggggctgaacctctgctcccatggaaccgg

SEQ ID NO: 770700 - DNA, 100 bp, Homo sapiens
ctgtgatctcctgaggttcaagagagacttcagaaggctcttgcagccaatgccggaacaggatttgctgttgctgagcctcaaatcgcaatgttttgtg

SEQ ID NO: 770701 - DNA, 100 bp, Homo sapiens
gacaaccgcagccacagcgcccacttctttgagtttctcaccaaggagctagccctgggccaggaccggatgaaagcgtgactcagcttggtcaggagct

SEQ ID NO: 770702 - DNA, 83 bp, Homo sapiens
cggacaagctgcacatccagatgaatgatgtcatcaccgtcatcgagggaagcgccgtgccgtccctgcagtgacaccgaggt

SEQ ID NO: 770703 - DNA, 100 bp, Homo sapiens
caacagtgtggataaattacgcttgcataccaccaatcacaggcacgaggcggccctgaagctctacaagccacttccggctcctgcgtcgctccggaag

SEQ ID NO: 770704 - DNA, 75 bp, Homo sapiens
ggacagctaccggcgcatccttatggattccccagctttccgttgcacaaacagtgaagtgacagtccagcccag

SEQ ID NO: 770705 - DNA, 100 bp, Homo sapiens
ccacttcatgcctgtcatgttctccctgacttgggacatggcctgtcggattatcctgcccccagagaaggcccagccccagcccaggggaccccagacg

SEQ ID NO: 770706 - DNA, 50 bp, Homo sapiens
ggggagaagccatcatttgacagagttactggaggtgaactgtttgaaga

SEQ ID NO: 770707 - DNA, 83 bp, Homo sapiens
catcgacaagatgcgccgcgccagctcctactcctccctcaactccctcatcgtccctgaagaggaaggagaaggaatatgag

SEQ ID NO: 770708 - DNA, 100 bp, Homo sapiens
agcaaggagaggagccttggttctcagaggaggaattctcaaaccagagtcacccaaatgccatactgctgttaacatatgtgacactggagactttgtc

SEQ ID NO: 770709 - DNA, 90 bp, Homo sapiens
ggagaggcgggcgggaggccggaaacatggtagaatggtgcttacctcaagatattgaccttgaaggtgttgagttcaagtctatggcca

SEQ ID NO: 770710 - DNA, 100 bp, Homo sapiens
tacttggagatgatgaaattacaagtttgaacaatttgaaagcaccattgggtttaagctgccaaaccatcgagctgccaagcgtttatggaaagtatgt

SEQ ID NO: 770711 - DNA, 99 bp, Homo sapiens
atggatgtgggttacaaatttaagaacagatgaacaaggccttattgttgaagacctagtagaagaggatggagatgaagatgaggaagctgagtcagc

SEQ ID NO: 770712 - DNA, 74 bp, Homo sapiens
cggatagacaataccacaacaacacattttgcagagacaaagaggcagctgaacgtctttcaaaaacagtagat

SEQ ID NO: 770713 - DNA, 97 bp, Homo sapiens
gctattcctgcttactctaaaagaggggacattgtttttgtgtagcctttccagtaaatatatgactcagggaaaagcctcagcgaagaggacccag

SEQ ID NO: 770714 - DNA, 50 bp, Homo sapiens
gaatgacctgtcgcctgccagctctggggatggcattcctactgtatttg

SEQ ID NO: 770715 - DNA, 101 bp, Homo sapiens
caggcgaactcggcctatcgctaccctccgaagtccgtgaatccctgttgttactatccatgccagcaccagggcatctgtgtccgcttcggccttgaccg

SEQ ID NO: 770716 - DNA, 83 bp, Homo sapiens
cgccgaggcaccgaggcactcagaggaggacacaatgtttgcacgaggactgaagaggaaatgtgttggccacgaggaagacg

SEQ ID NO: 770717 - DNA, 75 bp, Homo sapiens
gacgaggccgggacttggccgagcggatcctaataaggggaaaatggagttcatgatcaagtgttgcccacacca

SEQ ID NO: 770718 - DNA, 95 bp, Homo sapiens
cgcagccacgcggaggcggcggggagccgcgcgcggcagagatggacagagacgtatgtgcgttggtctcctaagggcacctacctggctacctt

SEQ ID NO: 770719 - DNA, 75 bp, Homo sapiens
agcctcttgtcccttcattgtcatctgcttttgagagtgttcttatcagctgtacaacctgccatagtgaatttc

SEQ ID NO: 770720 - DNA, 98 bp, Homo sapiens
tacttcagttgcgcagacagtatcaagtgtcatggagaaactccagctgggcccagagattctgcagcgggaaaatccaaggcttatttatgccaggc

SEQ ID NO: 770721 - DNA, 100 bp, Homo sapiens
acaatcaaaaagaaagctgctgttatcatcatggctgtagagtccatgaaccagttcgaattgcctatgacaggcctcggggtcgtcccatgtccaaaaa

SEQ ID NO: 770722 - DNA, 90 bp, Homo sapiens
gccattccagcactggactcatggaggctgagcatttattcagagaagatggcgaattagaagatggtgaaatagacgatgcaggatttg

SEQ ID NO: 770723 - DNA, 100 bp, Homo sapiens
gcctgagcgcaactagcggcgggtcgtgggcacctccaggagagaacattgaaagtattctctaagctatttgaagagagtgactaaatgcacctgggtc

SEQ ID NO: 770724 - DNA, 82 bp, Homo sapiens
cgctagggaagatcgcaccgcggacgcccgctgagcttggcgcacgggccgaccagctacaacatcaccacgggtctgtacc

SEQ ID NO: 770725 - DNA, 100 bp, Homo sapiens
aggagactacctgtacagatctggatggattttgggatatggttagttttcaggctgatgaattcatccgagcaaatgccaccaacaagctgacagtcat

SEQ ID NO: 770726 - DNA, 82 bp, Homo sapiens
gcagtggtcgcttcttctccttggagttaagtatgacattgacctgcccaacaagaaggtctgcattgaatctgagcacagc

SEQ ID NO: 770727 - DNA, 83 bp, Homo sapiens
caacgagaagcacagcaagaacatcacccagcgcggcaacgtcgccaagacctcggacgcacaagaccagccactgctaccgc

SEQ ID NO: 770728 - DNA, 90 bp, Homo sapiens
atgaaggccaaacagctctacattatgaacgaggtcactcggacactatggtgttcttttacctgtggattgtcttttatatcatcagtt

SEQ ID NO: 770729 - DNA, 75 bp, Homo sapiens
gcgcacgtcgggacggtccgggcggggccggggggaagcttcgagagctgtgcccaggagtgaacaaccagccct

SEQ ID NO: 770730 - DNA, 98 bp, Homo sapiens
tagcggatttgccaaaagactacctcttgagtgagagtgaagatgagcggatgtgatgctggtacaacccagagtagaatttattctgtctttcattg

SEQ ID NO: 770731 - DNA, 100 bp, Homo sapiens
actgctcctatttggtgggaccttgggcaagtcagttttaagggaatggatccaattacacgtcaagtaggacaacatattgaaatggaaccagagtggg

SEQ ID NO: 770732 - DNA, 83 bp, Homo sapiens
ccgggcctggcgccctgaggggaagagcggcccggcccgagtgtacccatcagtggaaccaggatggttaaaggcaacttatg

SEQ ID NO: 770733 - DNA, 100 bp, Homo sapiens
ataacagaacctgggcagacctcacacagactctccacgccttcctagcagattccatgcaagcatgttttttgctatgactgtgctattttacatgaaa

SEQ ID NO: 770734 - DNA, 110 bp, Homo sapiens
cagcgacagcgatggagactgcagctcgacaggaatgcttcagtatcagacacagcacagcagccatctgaagagcaaagcaagtctcttgaaaaaccgaaacaaaaaaa

SEQ ID NO: 770735 - DNA, 90 bp, Homo sapiens
gtcaaaaagcttggatttcctgaaattgttgaactggatgtgtggccgacgacgatgccctcgctgaggagcgcatgcggagaggccaga

SEQ ID NO: 770736 - DNA, 74 bp, Homo sapiens
aacttagtgttatgccaaaagatgaagacattctccaagtgaaatcatagcccactaatgagttttggagccag

SEQ ID NO: 770737 - DNA, 100 bp, Homo sapiens
cagagagcaacgtcaactattacaatcgcttgtacaaaggagagtttaaacagccaaaacagttcattcatattcagcaagaagctcattcacacagaag

SEQ ID NO: 770738 - DNA, 98 bp, Homo sapiens
ccggccgcgcgcgccagcaagaagatcctgctgcccgagcccaggcctccggtgtggctgtctctgatggtgtcatcaaggtgttcaacgacatgaag

SEQ ID NO: 770739 - DNA, 82 bp, Homo sapiens
tcgcggtgggtcctcgcttgcagttcagcgaccacgcaaacggggattcagcgtccgatcctttggaacagggactcacgtg

SEQ ID NO: 770740 - DNA, 83 bp, Homo sapiens
gcgacagcggcttggaagtgctctaccagagttgcggtgactctgttttgagaagtgcaaccagatctctcctggaattcaac

SEQ ID NO: 770741 - DNA, 82 bp, Homo sapiens
tggaaacgcttgtagggtttcaccaggtagtcaaaccacacactccattaataaggtttcctgacagaagagacaatcctaa

SEQ ID NO: 770742 - DNA, 83 bp, Homo sapiens
gctggaggaagaaaatcgcatgctgccccaggagctcttgtccctggcaaagcgaaagcgcagtgactctgaggagaaggagc

SEQ ID NO: 770743 - DNA, 75 bp, Homo sapiens
ccgcagtctgctctccccgcccgcggcccgtgcagaggctgggaggcggcagaatgcagccagaggagggcacag

SEQ ID NO: 770744 - DNA, 88 bp, Homo sapiens
aaattggatgtgaaaatgaagccagaccgagggagagagatggtggattacatctgccagtacctgagcactgtgcgggagagacgtg

SEQ ID NO: 770745 - DNA, 82 bp, Homo sapiens
gagccgagcacgcgggtctgtcatcatgtcgcgttacgggcggtacggaggaggtgacttaagagattaaaattaatttggt

SEQ ID NO: 770746 - DNA, 100 bp, Homo sapiens
atgagacagcagccaaacccccagctcccatggctattgaagaacaagtggctgttatctatgcgggtgtaaggggatatcttgataaactggagcccag

SEQ ID NO: 770747 - DNA, 100 bp, Homo sapiens
cccagctgcacacgacctgttccatgctgtcatgggccgtacactcagcatgaccctgagatggctccgaagtcaaaaaagaaggggcaccccgggaggg

SEQ ID NO: 770748 - DNA, 118 bp, Homo sapiens
tcagtgtcacaaaaccatttatgttaccccctgttgcagccagctcccttaggaatgacagcagtagcagtaatagaaaatcagtcgcctatatgccttatgctgaggtcaaacgtgc

SEQ ID NO: 770749 - DNA, 50 bp, Homo sapiens
cggagcgccagctcaatgaactgagatctgtatctgtggacctgaatgtt

SEQ ID NO: 770750 - DNA, 98 bp, Homo sapiens
atgctacagtttgaatcacaaagaatttcacattatgagactgtcacagagaagcacaaaatgaatgttccagaaacgatgaatgaagttcttgatat

SEQ ID NO: 770751 - DNA, 80 bp, Homo sapiens
gggacaagaaactagagcaaataaccgttttgaaattgatttctctctgatcaaacggacagttcaggactcagaatcta

SEQ ID NO: 770752 - DNA, 75 bp, Homo sapiens
gaccagcaggaggaatctcctttgcatggtacctgcgtcgagctctgcacaggtgactgggactgcaaccccgga

SEQ ID NO: 770753 - DNA, 50 bp, Homo sapiens
ggacggcgaggccctcatgtaccacacgaatgtgaaagatgttgcagaag

SEQ ID NO: 770754 - DNA, 100 bp, Homo sapiens
tttggaattcagttatcaagctttagagcctggctactcacagttgaagcctgattgcaggaggatggactcagacaagttctggaggagatgaaagctt

SEQ ID NO: 770755 - DNA, 100 bp, Homo sapiens
atagtgttagttccacagatggggaggacagtctagagagaaagaaatgggacgtcggtcatcagatactgaagaagaaagcagaagcaagagaaaaaag

SEQ ID NO: 770756 - DNA, 141 bp, Homo sapiens
ggccatgtgcccctctactcctcctcatctgtccccaccacaatcaatacgattggaaccagcacaagtacaagggacaccgtggtgtttaaggatggccagtactggatccgaggccggacctcagtggacatcatcaag

SEQ ID NO: 770757 - DNA, 74 bp, Homo sapiens
ccgacttcaaggatcttgagactcaaccccatatgggtttttaatgaccacaacaagcaagcatgcagcttact

SEQ ID NO: 770758 - DNA, 87 bp, Homo sapiens
cctgcgcttggggatcctctgtacgcccgttcactgatcttaccaatatatttgagtccttcctgcctcagttattggcctatccta

SEQ ID NO: 770759 - DNA, 75 bp, Homo sapiens
acagaggggaacagatttcagtgtcctccttagctctgcaggtgaaagatattctctcaaaggtccagaaaaatc

SEQ ID NO: 770760 - DNA, 100 bp, Homo sapiens
gtatacccaggatattatctaacgtttctaacaggggtgttaatgacattagcagcaagagctcttgctaagtactgtgacaacttactgaagaagtcag

SEQ ID NO: 770761 - DNA, 83 bp, Homo sapiens
cggcgcggcagcggagggacggcagtctcgcgcggagcaggccgggctctcgccatgggtcactgtcgcctctgccacgggaa

SEQ ID NO: 770762 - DNA, 100 bp, Homo sapiens
gtgcctacgtcctgcctcgcaatgagggagcatgtaccccagtgacaaccatgagtggaaaaaactaattatggttcagcactggcctgagacagtatgc

SEQ ID NO: 770763 - DNA, 75 bp, Homo sapiens
gaatactgtccgagaaattataggtgatgaactagtccaggtacagaaatcatttgaagttccacaggctaaagc

SEQ ID NO: 770764 - DNA, 108 bp, Homo sapiens
tgaaaaggcgatcttcctgtttgtggataagacagtcccacagtccagtgagctgaagagacgcctgaaagctgagaagaaagtagcagagaaggaggccaaacagaa

SEQ ID NO: 770765 - DNA, 88 bp, Homo sapiens
aactgcgggactgcggcggcgccggcctccggggagaaacggtgcttttgaagatgatgatatcacgcacgttgaaggaagtgtagat

SEQ ID NO: 770766 - DNA, 75 bp, Homo sapiens
ggctgctcagctgctgactgatgaggcactgtggacatcctcatcatggatgatgacgacgtccccagctggcct

SEQ ID NO: 770767 - DNA, 98 bp, Homo sapiens
ctgcaaagatgctgtccgtgcgcgttgctgcggccgtggtccgcgcccttcctcggcgggccggactgacgcaaacatgcagatctttgtgaagaccc

SEQ ID NO: 770768 - DNA, 83 bp, Homo sapiens
gtttactgttgcgttttgcagacaacactttctcaggttgagttgttacaacaaaagttgagagaaaagttggatgaatttaa

SEQ ID NO: 770769 - DNA, 89 bp, Homo sapiens
ctgagtgctaaactgtgtggggcgcggatgggatccagctgttagtcgggagactacctaggtggagaagcgtactgggccggcggcct

SEQ ID NO: 770770 - DNA, 75 bp, Homo sapiens
cagcttcgaaggcgaccttccttgctttcagaatttcacccaggttctgacagaaatggaatctatttggaattt

SEQ ID NO: 770771 - DNA, 100 bp, Homo sapiens
agagtgagggcagcctggcctatgtgaaaggcggtctcagtacattcttcgaagcacaggatgccctctcagtagagacggggtttcgccgtgttagcca

SEQ ID NO: 770772 - DNA, 84 bp, Homo sapiens
ctgtcttcggtggactccttcggcagtccacccaccgccgccgcctcccagctggagaagaagcaggcgctccctccattccag

SEQ ID NO: 770773 - DNA, 74 bp, Homo sapiens
aatgaccacctagagccttggatccaggagaacggcggctgggagccgaacattaatgccagatcaagttggcc

SEQ ID NO: 770774 - DNA, 50 bp, Homo sapiens
tggatctttgctagaaagagaggtctgcccaagatggaggtgtttcagga

SEQ ID NO: 770775 - DNA, 100 bp, Homo sapiens
cacctcctcagtcaacacccttgagcccacctccactcactcccaaagccaccaggaccctaagaaccaggctgtgcgcatccaggagggccggtaccgc

SEQ ID NO: 770776 - DNA, 74 bp, Homo sapiens
gacgaagaaccggaaggaggaaaaggaacgggagggaggaagaaactacaggatctcatgcacatctcacgggc

SEQ ID NO: 770777 - DNA, 97 bp, Homo sapiens
cagccatcctgggaccccaggcgtgcaggttctctttgagggtgtcatggagaaactccagctgggcccagagattctgcagcgggaaaatccaagg

SEQ ID NO: 770778 - DNA, 75 bp, Homo sapiens
caggccctcgttgcccagatgcgcattggagtgactgtctggcatcaccaagatgacactccacgccacccgggg

SEQ ID NO: 770779 - DNA, 96 bp, Homo sapiens
acagtcatggatctggaagctgagggcacgtgtttgcggttcagccctttgatgaccgcagcagaacttcctgcagggactgctcaccaaagaccc

SEQ ID NO: 770780 - DNA, 100 bp, Homo sapiens
tccggaggcccggccacctctgagaagggagacgacgctgctgggtccgctgagcggggcgacccgagagtcctgtgtatggaaactcacatgagtcagc

SEQ ID NO: 770781 - DNA, 100 bp, Homo sapiens
gatatgtcttgcagtctcatatttctcctctgaagatacagtttatgtaacttgatggaagaaaatggaattactccaaaaagacaagtgctcaagcagc

SEQ ID NO: 770782 - DNA, 93 bp, Homo sapiens
ctttgggcggggcggagccgagagccacactttcaagtaaaccagggactttgaacatgtcggggatcgccctcagcagactcgcccaggaga

SEQ ID NO: 770783 - DNA, 101 bp, Homo sapiens
acattctcacgatgactgttgaactggaaaaactaacgctagccctaattaaaccagatgcaatatcaaaggctggagaaataattgaaataataaacaaa

SEQ ID NO: 770784 - DNA, 100 bp, Homo sapiens
ctgcgcgagtggagctctgaagaagctctgagcggagttgtgttcttccccagattgctcgctgtaagcagctcatctgtgaccccagctacgtaaaaga

SEQ ID NO: 770785 - DNA, 98 bp, Homo sapiens
tggagggcaaggcgggaacacattgggaaaatgaggtacgttagtgttcgcgattttaaaggcaaagtgctaattgatattagagaatattggatgga

SEQ ID NO: 770786 - DNA, 100 bp, Homo sapiens
ggaaggctcaagatggcgtgcttgttggagaccccaatccgcatgagcgtcctttcggtgattttacaacgagatgctgctctccatagggatgctcatg

SEQ ID NO: 770787 - DNA, 75 bp, Homo sapiens
ctagcgaatttttggagcatctccacccaggaacctcgccatccagaatgaactttgaggcgctgatcatcacca

SEQ ID NO: 770788 - DNA, 100 bp, Homo sapiens
ttaacaagcgcacggagccctcaagaccgaccaagaccatcactatgaccgatggagactatgattatctgatcaaactcctggccctcggggattcagg

SEQ ID NO: 770789 - DNA, 100 bp, Homo sapiens
ctgaaggaggttcgagatcacatgcaggactctttcttaatgcagcctgagcagcaagatgaagagcgacgtcggcagctgagagagagagctcgtcagc

SEQ ID NO: 770790 - DNA, 99 bp, Homo sapiens
gtcaaaactttacaagttaattgaagagtcttgtccacagctggcaaattcagtgcagatcagatatgtgcagcgggggctacagcgagtggggctaga

SEQ ID NO: 770791 - DNA, 83 bp, Homo sapiens
cgacgtcttgcctgtgtcccacttgttcgcggcctatagcgcgagcccagcattgacctgctgcaggccttcgtggagcactg

SEQ ID NO: 770792 - DNA, 96 bp, Homo sapiens
cagatactagagctggccacactgcaggacattgggaagccatcagtggcctatgtacataccacgccgggtctgccttcaggctgggaagaaaga

SEQ ID NO: 770793 - DNA, 76 bp, Homo sapiens
caattccttagcattggccgaagagttaaggtacttttacagcgggttgatgaactagagaagctattcaaagatc

SEQ ID NO: 770794 - DNA, 100 bp, Homo sapiens
ccacgcctgaaaggcgactctcctgtgactctgttttgagaagtgcaaccagatctctcctggaattcaacacaacagtgagctgtgaccagcaaggcac

SEQ ID NO: 770795 - DNA, 82 bp, Homo sapiens
gcaggagcgggtccagcttcaggagtactggcggaggggctggacgttccacgccaaagctcatcagcatcggatcttccta

SEQ ID NO: 770796 - DNA, 83 bp, Homo sapiens
ctggaagtggagctccccacggcctcggaccctcagcaccaccgacacaacatttgcctgcaacaaggacagcggccagtggc

SEQ ID NO: 770797 - DNA, 83 bp, Homo sapiens
agttcagaagagccaaggaataaacatgcaatgaacccaaaaggggaacaggcacggtctcctggtacccaacaataccaccg

SEQ ID NO: 770798 - DNA, 82 bp, Homo sapiens
cccggtgtctgctcctgtcgccttcgcctcctaatccctagccactatggtggtctttgggaagaagcttcctgcctttgcc

SEQ ID NO: 770799 - DNA, 74 bp, Homo sapiens
cgcaggtggacttcttgcaacaggttaacgtgtatggcgtgtgcgtgccaggctactgcagcactggggtgtca

SEQ ID NO: 770800 - DNA, 50 bp, Homo sapiens
atcctctacctcaagtatgagccaggttggcaacattgtacaagtcaccc

SEQ ID NO: 770801 - DNA, 75 bp, Homo sapiens
gccaaaatcagcagtctcctggaggagcagttccagcagggcaagcttcttgaaatgactgctgtccatgcaggc

SEQ ID NO: 770802 - DNA, 97 bp, Homo sapiens
aaagaggaaggaagaaacccctctcaggcaatcatgtacagacatcaatgaatgtgaaattggagcacacaactgtggcaaacatgctgtatgtacc

SEQ ID NO: 770803 - DNA, 75 bp, Homo sapiens
ctggctttgagagttatgaggcgcttccccagcacaaactgacctgcttcaggttggatggcaagcatgtggtgt

SEQ ID NO: 770804 - DNA, 96 bp, Homo sapiens
agcccccttataagccaaaagctacactacaacaacaggagtgcaaacttctctacagccgaaaagagggtcaaaggcaagaaaacaaaaacaaaa

SEQ ID NO: 770805 - DNA, 99 bp, Homo sapiens
agggctctgaaagctagaagaaaaggtgtacttgcaagaaacctcaggacttgagtaacagcaacatgatgctctcccctcctcggaggatgatgatga

SEQ ID NO: 770806 - DNA, 75 bp, Homo sapiens
aagtccagagctgaggactgcctgtttgcagaatcctcactatggatgggctcattgaggacattaagcatcggc

SEQ ID NO: 770807 - DNA, 100 bp, Homo sapiens
cccgttcggggtgatgattgaagaactgagtgtggacagagcacctgtcctcgccagcgcccagctggaagctgaggtgcgttcttcacaaaggtggtgg

SEQ ID NO: 770808 - DNA, 100 bp, Homo sapiens
cgccggcgcctcctcctgccattgttcgtcgggctgcagcagtggcgggcgcaggagcccggccccggagccaccgagttgaagtattgataacaccaag

SEQ ID NO: 770809 - DNA, 82 bp, Homo sapiens
cggccgccatcgatgaccccggtcgcggacttgcttcaggctggccaccccccatgatgataattccgaagaaggcttccac

SEQ ID NO: 770810 - DNA, 99 bp, Homo sapiens
ctccgctagcaatcgcatcatcggtgccaaggaccacgcatccatccagatgaacgtggccgaggagcttactccacgggaacagcctctagataatct

SEQ ID NO: 770811 - DNA, 75 bp, Homo sapiens
gtcttctacagtggctgttgaagaggctgaagcttcagctttagctgcagctgcctctgttcagccacttgcaac

SEQ ID NO: 770812 - DNA, 83 bp, Homo sapiens
gagcgacaagccgctggcagccgcggatctcaccgccgctcagggttccatcataatgaatggatccaatatggcaaatacat

SEQ ID NO: 770813 - DNA, 100 bp, Homo sapiens
ctttgaaaatcaacgacaacttgagcacaggtgtatgcaacagcgttattgcaacaggctaacgaaaacagacaaaattcaactggaaaagcatgttttg

SEQ ID NO: 770814 - DNA, 51 bp, Homo sapiens
taaaaggtgtcaagaagctcagaatgttgaagactgggatagtttccaagc

SEQ ID NO: 770815 - DNA, 104 bp, Homo sapiens
caaatccaagatggcggccagcaggaggctgatgaagtgcaccaattccagctggacatcactgtgaaaatgggacgggataaagtccgagaaatgtttatgaa

SEQ ID NO: 770816 - DNA, 75 bp, Homo sapiens
tccattcttttccttattcttctgatgtggatccagaaagatgtgcgggacatcctcaccccaattcagattgaa

SEQ ID NO: 770817 - DNA, 100 bp, Homo sapiens
ctgcccgcggggatcccgtcagccgccgcttacaaacacgcagatggcaagaagattgatggcaggagggtccttgtggacgtggagaggggccgaaccg

SEQ ID NO: 770818 - DNA, 90 bp, Homo sapiens
aagccgtggaataggtgtatcaagtaatggtgcaaagcctgaagttagaaaatggatttctgactggaatctcaccactgaaaaaaagca

SEQ ID NO: 770819 - DNA, 100 bp, Homo sapiens
gactgctcctcagcccacctcacagagctaaaacgtcatcctctcttcagtgatgtggactgggaaaatctgcagcatcagactatgcctttcatccccc

SEQ ID NO: 770820 - DNA, 83 bp, Homo sapiens
gggagttcccgtccatgctggccctctctggttaatttggagtggcccctggagtcagtttcctacaccatccgaggccccac

SEQ ID NO: 770821 - DNA, 90 bp, Homo sapiens
taacagacgaggaatcagctttgaagtgggagcccagttggaagcccgggaccgtttaaaaaactggataaaagaatcagagtgtctcaa

SEQ ID NO: 770822 - DNA, 82 bp, Homo sapiens
acgggcatgccaagaagatgagaccgggggaggcgacgctaagttgctgatcgtggcgtctgcgctcctcagaccaccggca

SEQ ID NO: 770823 - DNA, 75 bp, Homo sapiens
tttgctatgatcattgacaaactggaagaggtggtgatctttgtgaagtctgtgcagcggtgcattgccttggcc

SEQ ID NO: 770824 - DNA, 89 bp, Homo sapiens
ccttcagccaagcggcctaaactctcatctccggccctctcggcgtccgccagcgatggcacaggttgaccccctgtttacagtgccag

SEQ ID NO: 770825 - DNA, 90 bp, Homo sapiens
cgtcatcctgctgctgaagatctggaagacgcgctcctgcgccggtgagaagccctaccactgcaactgggacggctgcggctggaagtt

SEQ ID NO: 770826 - DNA, 75 bp, Homo sapiens
tgcccaccggcctcggcctggatgggcagcgccagagggaaacctgtttgacttcttacgcttgacggaatggcg

SEQ ID NO: 770827 - DNA, 100 bp, Homo sapiens
gtactcgccggacccggtggtcgtccgcggctccggtcacgtcaccgtaacatccatgatagcagtcttctgtaaatcgaacttttcaagaattctctga

SEQ ID NO: 770828 - DNA, 75 bp, Homo sapiens
cggcgagcgcgagcggcgcgagaaagtggatcagtacaagggaaagcgggatttggagtcactgagggagtacgt

SEQ ID NO: 770829 - DNA, 74 bp, Homo sapiens
agaaactatgggacacagatatgttgaagtaaccttcgagaaagctttgaatgccggcttcatccaggccactg

SEQ ID NO: 770830 - DNA, 97 bp, Homo sapiens
ggtttgctgagctggttggccctgtgatccctcaagactggtccacggagtgtatgaccacaaacagccatcaagacagagtctcactcccatcgcc

SEQ ID NO: 770831 - DNA, 73 bp, Homo sapiens
tcgaggcggacgcgcggctgcgtcaggaccatggccaacctggagcgcaccttcatcgccatcaagccggacg

SEQ ID NO: 770832 - DNA, 82 bp, Homo sapiens
gaccgcgcgcagggcctgcagcgggagctggacggcgagcgcgagcggcgcgagaaaaagatggcagtgaacgtatactcaa

SEQ ID NO: 770833 - DNA, 74 bp, Homo sapiens
cagatgcctcgcagagcaccaggcccaccgtgaaaggctcccacatcaggacgagaaggagccctcgagttacc

SEQ ID NO: 770834 - DNA, 74 bp, Homo sapiens
acgagaattccgcagcccacacgatggagtttcactatgttgcccaggctgatctggaactcctgacctcaagc

SEQ ID NO: 770835 - DNA, 74 bp, Homo sapiens
ctccgaagatgggggatttctacgacccggagcacccgacccctgagccgttgatgctcactgccatcagctgc

SEQ ID NO: 770836 - DNA, 100 bp, Homo sapiens
atgagattgaggctgccttgagggagctagaggccgagggcgtgaagctggagctggccttgaggcgccagagcagtaacagaactttcgatgggagagc

SEQ ID NO: 770837 - DNA, 100 bp, Homo sapiens
cgacccgctccgcctgacccctatgatgaagagggcgtccactggagctcagtttgcccagctggcccagctgagcccccaggagcgtctgagccgggag

SEQ ID NO: 770838 - DNA, 90 bp, Homo sapiens
agctcaaagttattttacattgtgttaaaatcatcacacaacaggttcaaccaagtaaaatcttacccaaaccagtgacagcaactctac

SEQ ID NO: 770839 - DNA, 83 bp, Homo sapiens
cagcgggtgacatggaaggggcagtacaagcttacgtctctgctcttcagtacaatcctcaatctgaagaggatgtaagtcag

SEQ ID NO: 770840 - DNA, 82 bp, Homo sapiens
cgcgctactctctctttctggcctggaggctatccagcgatgatcggctgaatgtaacagaggaactaacgtccaacgacaa

SEQ ID NO: 770841 - DNA, 85 bp, Homo sapiens
catcgtggggcatgtggcaaaacacacagctgaggaacttagtgatttggcccgtgaccctccagcacaatgttctgcaggtcca

SEQ ID NO: 770842 - DNA, 82 bp, Homo sapiens
ccgccaacgcgcaggtgctagcggccccttcgccctgcagaccagcatctcagacatgtcgaaaaagatgttttgatcccta

SEQ ID NO: 770843 - DNA, 100 bp, Homo sapiens
tatgcgaccacagaaggaaattcaacagaacttagcataaatgctgaagctgctgaaatagttcgagaaatcgaaaatatagagaagactaggatgcgtc

SEQ ID NO: 770844 - DNA, 101 bp, Homo sapiens
gtgcacctgctcgagatgaggaagttaagaaactaaaggacattaaggaaatagtgccccttttcaggtattcccggcgtttccacaagactctaaggcgc

SEQ ID NO: 770845 - DNA, 51 bp, Homo sapiens
ggggatgtgagcgctgagcccttggcagggagatacttcaggggattaccg

SEQ ID NO: 770846 - DNA, 88 bp, Homo sapiens
aactcattgaacaggtgatgaaggaggagcacaagggccgttgctccagggagaactgcaaatatcttcatccacccccacatttaaa

SEQ ID NO: 770847 - DNA, 75 bp, Homo sapiens
cttccttgctactgcagaacttgcaggaacagagtttgtagctgggaacctcagaacctgttctggatccacagc

SEQ ID NO: 770848 - DNA, 100 bp, Homo sapiens
tgcagctcatctctattgatgagtccttataggacagttcttcgagataatgcaataccaacaatatttgatcttaccagtcatttgaacaacccacata

SEQ ID NO: 770849 - DNA, 74 bp, Homo sapiens
aatgtgaagagtccttcaaaaatgccagaaatcaacgccaaggtggaggaaggagaggccagtctaccctcccc

SEQ ID NO: 770850 - DNA, 96 bp, Homo sapiens
tggggatttgcattcagagatcaggaagaggacttggagctactttcatccttaggaatgttatcgaaggacaagatggagtctcgttctgttgcc

SEQ ID NO: 770851 - DNA, 50 bp, Homo sapiens
cagccttgtcccgggagcttaagggtgtgctggaccggttttctcaaatt

SEQ ID NO: 770852 - DNA, 100 bp, Homo sapiens
cgatctgccatgtattccagaaaggccatgtacaagaggaagtactcagccgctaaatccaaggacctgaaggagaagaaggagaaggtggaggagaagg

SEQ ID NO: 770853 - DNA, 100 bp, Homo sapiens
cctcggcttccgcccctttccggcggagtggagatcctattcagaggggccggtctctctaaatatgccccaggtcctaggcctacttacaagcctccag

SEQ ID NO: 770854 - DNA, 100 bp, Homo sapiens
gaccgtcttcccagtcccatcaagagaaaaccacagactctgggctcactgaagtggagcacatgatccagaagaaccaatgtctcttcaccaacaccca

SEQ ID NO: 770855 - DNA, 96 bp, Homo sapiens
gagacagtgcagggaagagagaccttagaaaggatcaggactggcggacatatggcatccaggagaaagatgtcttgccccttctccagataatgg

SEQ ID NO: 770856 - DNA, 126 bp, Homo sapiens
tcctacctgaaacatacggagattgacaatcaatgggccatcttggacgtgtggcaaaggagcagagaactttgacaagttcttcacacgaggacagcccgtcttaacaccacctgatcagctggt

SEQ ID NO: 770857 - DNA, 90 bp, Homo sapiens
ctgctgccagtcccctgccccgggcaaagcccatctggtccgccgagcagatgaaggatttgggggcagagcacttggcaggtcatgaag

SEQ ID NO: 770858 - DNA, 96 bp, Homo sapiens
acagccttcgaatcggcgggccattcatgataagatgtattgctgtccttgaatattagcccatttgaaaacgcctgggaagttcagccatcagta

SEQ ID NO: 770859 - DNA, 100 bp, Homo sapiens
tgccatggacgacgaggaggagacgtaccggctctggaaaatccgcaagaccatcatgcaggatcatccagcagctcgtcaacggcatcatcacgcccgc

SEQ ID NO: 770860 - DNA, 75 bp, Homo sapiens
gaaacggtttgtggctggagtaggagcaaacagcaatttggtgaggattcatcaacctccagtatgatgtctgtg

SEQ ID NO: 770861 - DNA, 90 bp, Homo sapiens
gtggtttcttgtgaggacgcggcagcccgtggagtcggctgagggaaaagcgaggcaaggcaggcgggacaatcatatcctgattcagcc

SEQ ID NO: 770862 - DNA, 90 bp, Homo sapiens
ctcacctgaggtgaaccttcgaccttggacttctcagcctccagaatgttctgtgccaatgacccggaggtgtttgttcaggcggctctc

SEQ ID NO: 770863 - DNA, 101 bp, Homo sapiens
gccatcttcaaaatttcaggtcttaaatctgggctgatggagttatgagaacaatgaacacagaaaaactcctaaaaactgtaccaattattcagaatcag

SEQ ID NO: 770864 - DNA, 101 bp, Homo sapiens
atgcacagttagacctctgtgaggatgaagatgtatcttgtcaactgttagccacgcagatgccgattgctttgtgtgtgtcttcctgagccatggcgaag

SEQ ID NO: 770865 - DNA, 82 bp, Homo sapiens
ctggggcagtgattggaaaaggaggcaagaatattaaggctctccgtacagactctgtgtcagcatttgctccaatttgcaa

SEQ ID NO: 770866 - DNA, 101 bp, Homo sapiens
agaggagcatgaatggagcaaaatggcggatcatgtgcaggccccttcacagatgtagtcactacaaatcttaaattgcgaaatccatcggatagaaaagt

SEQ ID NO: 770867 - DNA, 50 bp, Homo sapiens
ctcccaaagtgctgggattccaggactgcgggctgcagctgagcggggag

SEQ ID NO: 770868 - DNA, 100 bp, Homo sapiens
atcaaatatgacccaagcattggtatctacggcctggacttctatgtggtgtctgacttccagcaactgctggcctgtgccagggtgcaagctgagcact

SEQ ID NO: 770869 - DNA, 100 bp, Homo sapiens
catccagcaggagatcactgtcctcagtcagtgcgacagcccctacatcacccgctactttggctcctacctaaagctgctgctggacacccactcgctg

SEQ ID NO: 770870 - DNA, 90 bp, Homo sapiens
ctggacttcgcctttcccgagccctggaggtggggagaaaagttaattgctggccctcggagagtggaaatggctgtgatgtcaacatag

SEQ ID NO: 770871 - DNA, 80 bp, Homo sapiens
atttaaaagatttcttaatgaaaatgaaagaaagtccacatttccaaaagtccaaggtattctaccttgtaaatactgtt

SEQ ID NO: 770872 - DNA, 82 bp, Homo sapiens
gccgaagaagcatcgttaaagtctctcttcaccctgccgtcatgtctaagtcagaggatcaagagaaatatggattattaaa

SEQ ID NO: 770873 - DNA, 100 bp, Homo sapiens
acataccaattcttgaatgacatccgagcgaaagagaaagaggccataggaaaaggatacagagtagagtttcatgaacctgaaacttggtggaaatttg

SEQ ID NO: 770874 - DNA, 83 bp, Homo sapiens
cctggagcttgacgcgctggagcttgagagacctcccagtgccaagtgtataagcgtgtccagaattggtgggtctcactgac

SEQ ID NO: 770875 - DNA, 100 bp, Homo sapiens
accacacatgtattaagatttgtattggtaaaggttttcaaggtgtcatgaaaagatggggatttaaaggccagcctgctacgcatggtcaaacgaaaac

SEQ ID NO: 770876 - DNA, 96 bp, Homo sapiens
gtggaggccatcaggggccttgataacacagagtttcaagcctccttgaagctgcccttgaagacttcccgactctacaataacttggagacagag

SEQ ID NO: 770877 - DNA, 90 bp, Homo sapiens
tgagtggaggcatcagggggttggagccttgtgaacagggaacctgccccccaacacttggaagtttaagtgctgtggggctgctaacta

SEQ ID NO: 770878 - DNA, 82 bp, Homo sapiens
aactgagtgaaaatacagccaagatcttggcaaagcttctccctcagtatttagaccaggcgccatgtcagaaccggctggg

SEQ ID NO: 770879 - DNA, 100 bp, Homo sapiens
gcaacgagggaatagtggacgaactgcacgtgtacaacacgggggaacgcccttttgcttgtgactggcagggctgcgacaagaagttcgcccgctccga

SEQ ID NO: 770880 - DNA, 100 bp, Homo sapiens
cccagccaccagcaaccccccaggtcatggaaaatggaagatttgcaaaatacaaatattttacccatgtcatgatcaataagacagatatgctaatgat

SEQ ID NO: 770881 - DNA, 73 bp, Homo sapiens
gaagatatgcatcagttccatcgagccattactacaggcacgtgtggttctcaaatataggcattctgatggg

SEQ ID NO: 770882 - DNA, 75 bp, Homo sapiens
cgggggcggcgtgcggcctagcgtctcaggtgaaaggtgtagcagtcactcggcctacacccacagcatcgacct

SEQ ID NO: 770883 - DNA, 97 bp, Homo sapiens
aactcagcaaacagatattacctcaaccgatttaaggatgcttataggcaagctgttataggggaagcatttctccttgcattggtttgctggtatg

SEQ ID NO: 770884 - DNA, 100 bp, Homo sapiens
aattacatattccagtaatggtggatgaagttgttcattgtttgtcaccacaaaaaggacaggctatgaccagggccagagcactcagatctcagtcaga

SEQ ID NO: 770885 - DNA, 75 bp, Homo sapiens
catggctagacctgaaaatttcttccaaggttgatgcatctctctcagagatcgccacatcacagaatcgtatct

SEQ ID NO: 770886 - DNA, 116 bp, Homo sapiens
gtcttccccagctctgcagccacatactatccgtttgttcaggaaccaccagtgacagaagaacatacatatttaccttcctactcagttctcggttatttatgcatccgtatgag

SEQ ID NO: 770887 - DNA, 100 bp, Homo sapiens
gcgacgcaagatggcagccaccacgggctcggaaactggcgatggaatatgagaggagccctctggaaagaaaaggacagaccctgtgctttcatgaaag

SEQ ID NO: 770888 - DNA, 83 bp, Homo sapiens
ctgggatcccggccaccagcaattgtccggcgaggattaaatccaccacacagggtgaaatctatctccatgacaacattcac

SEQ ID NO: 770889 - DNA, 75 bp, Homo sapiens
cgcagcctggggactctgcctcgtgccgctgagcctggcgcagatcggaaaatgttggggcttttcaggaagcat

SEQ ID NO: 770890 - DNA, 51 bp, Homo sapiens
gggtgtccatgattctgcaaagccctgctttaccgccagcacctgttcaga

SEQ ID NO: 770891 - DNA, 51 bp, Homo sapiens
ccggaatgtcatccagcgagtgattaggagccagcaccgctctttgacctt

SEQ ID NO: 770892 - DNA, 85 bp, Homo sapiens
acaagtggtactaggattatacattgtaagaggtgacaacgtgacgaatgccttagtttccactttccagcctggatcccctcac

SEQ ID NO: 770893 - DNA, 100 bp, Homo sapiens
gtttcattgctttcaaagttcctttgcaaaaggggatgatggaactaacaaagaagccacaagcacaggaaagttgaaccaggagaatgagcacatctat

SEQ ID NO: 770894 - DNA, 83 bp, Homo sapiens
tgttctcgctccggagccgctgcacatttcggccagaagcggactcctagaagaggggagcagcaaggatggaatgacagccg

SEQ ID NO: 770895 - DNA, 99 bp, Homo sapiens
ctcagaagccatgcccctcaggctggaacttgccctgtctcctcgcagatgagaactgctttctgaagcaagtttccaagaagctcttcaggaaagcat

SEQ ID NO: 770896 - DNA, 100 bp, Homo sapiens
ttctgttgatgaccctcttccaggttacatacagcttacatcttgcatcctcaagcgatcgtcagtatttaaacagatcacatcatgcgtgagtacaagc

SEQ ID NO: 770897 - DNA, 59 bp, Homo sapiens
caagatgcggatccgggcctttccgctcaactgagaagtcatttccttggagatcaaca

SEQ ID NO: 770898 - DNA, 100 bp, Homo sapiens
ggcagcggctccttcggagacatctatctcgactcggtgaaatacctggagtgctcagctctcacccagagaggcctgaaaaccgtgttcgacgaggcca

SEQ ID NO: 770899 - DNA, 101 bp, Homo sapiens
aatcccagcactttgggatgctgagaaaagaatggtttgtcattcattgaaacttcggccctagactctacaaatgtagaagctgcttttcagacaatttt

SEQ ID NO: 770900 - DNA, 129 bp, Homo sapiens
gaacggcaaagtcatgggagcagagctcagacatgttctcaccacccttggtacatgtcccagagcaagcacacggaggcccgggagctcatgtactcgggagccctgctcttcttcagccatggccag

SEQ ID NO: 770901 - DNA, 114 bp, Homo sapiens
cccgggaggaaggaacgaggcaaggagctaaagcagcgtgcgttcagccctgggcaaattgtggctactaatttgccccctgaagatcaagatggctctggggatgactctgac

SEQ ID NO: 770902 - DNA, 83 bp, Homo sapiens
ggaattttgaagtcaccactgaggaggaattcaccctgttcgtctatgaggaaatatcattctgcaaaagaagcttatgaaca

SEQ ID NO: 770903 - DNA, 100 bp, Homo sapiens
tcacaatcaaagaactggatctttatctggcttactttgtccacactccggacatccacgacagcgatggcagttccagcagcagccaccagagcctcaa

SEQ ID NO: 770904 - DNA, 100 bp, Homo sapiens
ttactggcataattactcatcatgatctcttcacccgcaccatgatcgttatgaatgatcagttttaaccgtgattggagataccacaaagaagaacgag

SEQ ID NO: 770905 - DNA, 140 bp, Homo sapiens
ctcgttcggtggtttcttgtgaggacgcggcagcccgtggagtcggctgagggaaaagcgaggcaaggcaggcggtgctttctcctgctcaagacagccacacgaacacggatctccccccagtgtcagagcagatcatg

SEQ ID NO: 770906 - DNA, 100 bp, Homo sapiens
ggaagcaggactgcgccgcgtcttcctcaaggtggggttcggggggccaccgaatcgctgtcacgccggcaggtgctggggagtcagggaagagcaccat

SEQ ID NO: 770907 - DNA, 90 bp, Homo sapiens
aacagctatcccagcctcttcatttttcggtctggaatgactgtaaactttgatttaacaaagaactacttagatttaattataacctat

SEQ ID NO: 770908 - DNA, 101 bp, Homo sapiens
atgataaagggctctgaaagctagaagaaaaggtgtacttgcaagaaacctcaggacttgagtaacagcaacatgggccatgaaatgacaagcattggact

SEQ ID NO: 770909 - DNA, 96 bp, Homo sapiens
gacagcacaggtcacagtaaggccaaaaatgtgcatactcacagagttagagagagggatggtgtgtgcaacttgctttggtgtttgctgttttat

SEQ ID NO: 770910 - DNA, 100 bp, Homo sapiens
gtggaatagctccagctatcacatttcacaggacatgcaacgccagtttcgtcactgatgttcactaccatcagacctcctaatgagagccagccctttg

SEQ ID NO: 770911 - DNA, 113 bp, Homo sapiens
cttttgtaacttttgatgatcatgatacagttgataaaattgttggtgcttttgaagatgatgatatcacgcacgttgaaggaagtgtagatcctattcgagatatagaaata

SEQ ID NO: 770912 - DNA, 100 bp, Homo sapiens
aatccaattcagctttttgtgctgccagcaagaaatgatcagtagcaccagtgtttatggacttgtcttacaaggaccggcactggcatgaagcctgttt

SEQ ID NO: 770913 - DNA, 75 bp, Homo sapiens
ccgacccttaccctcagcgagagaagtaacctccacaagaatcggaatgtcagttaatgctattcgcaagcagag

SEQ ID NO: 770914 - DNA, 100 bp, Homo sapiens
agtctacgatgtcacccgcttcctcaacgagagctcttccccgcagctctgggagacgtggaggcctctgaagctgaagaccacttcttcaacccacgcc

SEQ ID NO: 770915 - DNA, 83 bp, Homo sapiens
cggcgagcagaactacggcgagcgggtcagcccaaggccaaccccactgtcactctgttcccgccctcctctgaggagctcca

SEQ ID NO: 770916 - DNA, 98 bp, Homo sapiens
cgaatgacttcagattccatggcaggtcaaaatcagaactggtaagatttctgcatatctggaagcgagtcacgtcccagcgctgctccctggagttt

SEQ ID NO: 770917 - DNA, 83 bp, Homo sapiens
gtctgcgagatcgagcggcgggcgctgcgcaccaagggcgtctactgggctgtctgaaggggctggcaggcagtgtgcgtggg

SEQ ID NO: 770918 - DNA, 83 bp, Homo sapiens
gaccacatagacatttacgcggatgtcggcgaagagttcaaccaggacatggatttgattgacatactttggaggcaagatat

SEQ ID NO: 770919 - DNA, 90 bp, Homo sapiens
cgctggagtcggagctgcagcagaggcaaagcaggcaacaacatgctgctggtgggggttcatggcccaaggaccccctgcgaggagatc

SEQ ID NO: 770920 - DNA, 98 bp, Homo sapiens
cagccacatgcatttctcctcagtggaccagcttcaccagaactgaagcagattacctggctcagtgtcacagggctgctgatggtggtcttcggaga

SEQ ID NO: 770921 - DNA, 75 bp, Homo sapiens
gcgaaggtgaccggggaccgagtccttgctggtgcagacgaagcggcgggctctggagaagattgaccttaagtt

SEQ ID NO: 770922 - DNA, 83 bp, Homo sapiens
gcaaagaacagacgtcggaaaccttggaagtgggatttatttcagtgattcgctcaggtaggtagccatccaagcttcctgaa

SEQ ID NO: 770923 - DNA, 90 bp, Homo sapiens
tcgtcctccgcaagaaattctcggccagccgcttctgggacgactgcatcaagtacaactgcacggttgtaacctccatttctgacatcc

SEQ ID NO: 770924 - DNA, 96 bp, Homo sapiens
ttttgcagcctgcaccggccaacggtcaccatcagaaaagctaagtttgctgtatagtgaggatcaggagatctgatcctgattgcagaaccttcc

SEQ ID NO: 770925 - DNA, 83 bp, Homo sapiens
cgactaccaccgcagcgacgagcaggtgacttaagagattaaaattaatttggttgctgttggttctgaacaaataatgagtt

SEQ ID NO: 770926 - DNA, 83 bp, Homo sapiens
catgcccaaatcccggaaactccagcgtgtctccagccgtggattatatctgtccaagatgcgagtctggttttatcgaggag

SEQ ID NO: 770927 - DNA, 80 bp, Homo sapiens
gcggacggcgacgcagcccgcggcagaaggccaagtggcatcagagctgagtgatggacgacctgcagtcccagaacctc

SEQ ID NO: 770928 - DNA, 74 bp, Homo sapiens
agaacaagctcagactgcaaagaggatgctgagaacttgctggagtcacagccactgggatcctttctcatcag

SEQ ID NO: 770929 - DNA, 75 bp, Homo sapiens
tcctgatgtctgttgtgagctgcacactcaagggtgtgataatttgaagaaaacaggtctgaaacaaggtcttac

SEQ ID NO: 770930 - DNA, 87 bp, Homo sapiens
tcttccccatctccaaggaccagcctcgggttccaattgtggacaagataaggaccattgctcaggctgtctatggagccaaagata

SEQ ID NO: 770931 - DNA, 90 bp, Homo sapiens
cgctgctcgagctgctgctggattgaactcagagaagccggggggaagatggtgaaaggaatgggaggtgctatggatttagtgtccagt

SEQ ID NO: 770932 - DNA, 100 bp, Homo sapiens
gcagtcttattcctcctcctgttcctatgtggaactccccaggctgcaggagtttatacagagaaatcctcttcttatcattagtgtctctaggaagaga

SEQ ID NO: 770933 - DNA, 97 bp, Homo sapiens
actacttcactgccatcctcctcatcgaccaccagggcatccagggcattgtggatgcctaccgccaagccctgccccaagttcgcctctatggccc

SEQ ID NO: 770934 - DNA, 50 bp, Homo sapiens
ccgccgtcagagccgccctatcaggtgtctgacaacaaagcatccctgcc

SEQ ID NO: 770935 - DNA, 83 bp, Homo sapiens
aatgaagccacggacccttgcgggtgtacaactatgagcctttgacacagctcaagaatgtcagagcaaattactatggaaaa

SEQ ID NO: 770936 - DNA, 50 bp, Homo sapiens
gccgcgagcgcggcctgcaggagtttgtgatggacgcctctgaccccacc

SEQ ID NO: 770937 - DNA, 98 bp, Homo sapiens
tgacaacttgacttctctggggactctgaacttccctggtcgaacagttttttctaatggctattcaagctgcgcagttggacagcattggcttcagc

SEQ ID NO: 770938 - DNA, 98 bp, Homo sapiens
cctgcacctacggccacgaggacgtttactcctggcttgggggcattaggaagcactggaggctcttcgggaactaatggatctaacgccacacctag

SEQ ID NO: 770939 - DNA, 101 bp, Homo sapiens
tgagttgcttttaggcttgctggcccgcggggctgtccaggcacgcgaggcccctcaggtagctacagcaagctgggtagcaggcagatccaaaggatatc

SEQ ID NO: 770940 - DNA, 83 bp, Homo sapiens
tctctttctggcctggaggctatccagcagttgtctgctggttctcagcttgaagaagattctgcagtccttattgatccttt

SEQ ID NO: 770941 - DNA, 111 bp, Homo sapiens
ggtacggctgctcaactgcagtgactttgcattcacagtgaggtgctggcggaggagtccatagtatgtctgcagaaagccctaaatcaccttcgggaaatatgggagcta

SEQ ID NO: 770942 - DNA, 100 bp, Homo sapiens
cgggaggtgaatttccatgtcaacatagtcctgagatgctgcaatttgtcagtaatcaagtgggagagttccctgacttgttttcagaacagctgtgtag

SEQ ID NO: 770943 - DNA, 75 bp, Homo sapiens
ggaaaaagtggttctggaaaagcggggaaagacagtacaatgtagattataaactggagacttacttgaagattg

SEQ ID NO: 770944 - DNA, 100 bp, Homo sapiens
gggctcgtagcatagtaataatccaaataaactgaagtttcttctgggtccatcaccaaagagcagatgccaaatctgtgggtaaacctcacaagtgcaa

SEQ ID NO: 770945 - DNA, 73 bp, Homo sapiens
cgaccacgtaatgtgccagtcatcactggtagcaaaggctattcaagatctctggcagtggaggaagtctctt

SEQ ID NO: 770946 - DNA, 98 bp, Homo sapiens
atgagccccggcacccccggaccgaccatgggcagatcccaggctcttgcagccaatgccggaacaggatttgctgttgctgagcctcaaatcgcaat

SEQ ID NO: 770947 - DNA, 74 bp, Homo sapiens
atgccgaggtggatggtgtggatgaagaggaggaggacgaagtctgcgaaacttgtatctgttttaaagaaggc

SEQ ID NO: 770948 - DNA, 100 bp, Homo sapiens
acgactgggatcctacgtgcatgaagatggacgaggtcctgtacagcatcgccgagaaggataaaagaatcagagtgtctcaacccttgacaagaggacc

SEQ ID NO: 770949 - DNA, 109 bp, Homo sapiens
cccacctcgtctgggctcgcggcgtctccggggaaagccgtggccccgagggcggatccgaggatcagattttattaagacctctactggaaaagaaacagtaaatgcc

SEQ ID NO: 770950 - DNA, 100 bp, Homo sapiens
cacctctctacaccctcaacaagcctttgctcagtggaacggaaaacagttcttccttcaaagcatgcagtacctgaagtaatagaagactttctctgca

SEQ ID NO: 770951 - DNA, 82 bp, Homo sapiens
gctgtcgtgaagacatctgcgtgtgcggggtgcgtgggtgcctggagatgaagctggaaagatactggatgatgaagctgcg

SEQ ID NO: 770952 - DNA, 75 bp, Homo sapiens
cattcaggtgatttagtggattctaagacttggggaaagagtacagagagtgaccaagaatatggcccaggtgac

SEQ ID NO: 770953 - DNA, 109 bp, Homo sapiens
cagcaccgcgcccatggcagagccagaccgctcatcttggcagccaacagggatgaattctacagccgaccctccaagttagctgacttctgggggaacaacaacgaga

SEQ ID NO: 770954 - DNA, 100 bp, Homo sapiens
gtgtttggagacttcaaagatgtattgtgcagagatggcagcggttctgaggcaagagtactgaaatttgctttataatttacttgattatccaagttgt

SEQ ID NO: 770955 - DNA, 108 bp, Homo sapiens
ggcaattgatcccaagttgtcgacgaccgacagggtggtgaaaggttttcaaatggaacattttgatgcatcacttagtacctatttcaaggcattgctaggccctcg

SEQ ID NO: 770956 - DNA, 74 bp, Homo sapiens
gcggaggctgacgaggaggcggatcccccggcgtcaggaaacctgtaggaagtgtcagggactctggaaagaac

SEQ ID NO: 770957 - DNA, 100 bp, Homo sapiens
aaatttatatcattaccttagaggaagaagcactccagagacgactaaatgccgaatatgtgggagtccatgtcctgcagtgtggcctgatgtaatcaaa

SEQ ID NO: 770958 - DNA, 100 bp, Homo sapiens
tgaccagagtattgccgcggtggaaatggagttacagatgtagagctaaaacgactgaaggatgctttcaagaggacctgtggactctcatattacatgg

SEQ ID NO: 770959 - DNA, 50 bp, Homo sapiens
gaaactgtacattgaagcagagcccctcatatggaaaatttgaaatgcag

SEQ ID NO: 770960 - DNA, 90 bp, Homo sapiens
gggtcccccttcctggtggctgtgaagggatttttgccaagcctgaccatgttaagatgacatatccaaagactcagcttcagcattcac

SEQ ID NO: 770961 - DNA, 100 bp, Homo sapiens
ctggaggtgcagggccaggaggaacatgaggtggatgaagactacatccaggacaaatttaatcttactggactcaatgagcaggtccctcactatcgac

SEQ ID NO: 770962 - DNA, 80 bp, Homo sapiens
gccacaatgaccagtcacaatggttacagaaaccactcaagaaggttattattgaagaaactggtaatttgatacagact

SEQ ID NO: 770963 - DNA, 75 bp, Homo sapiens
cgaggagcgggaagagttgctgggatgaggagcgggaaggcctcctgcaccctggagaccgtgtgggaagacaag

SEQ ID NO: 770964 - DNA, 83 bp, Homo sapiens
gttgctgccatgactttgatgagctgtgtttgaagacagagactctccaacatgtgccttctgaccatacaaatgaaacttcc

SEQ ID NO: 770965 - DNA, 82 bp, Homo sapiens
ttcctcaacgacgcggacatggtcatgagctttgtgaacctggaagtccattggaatattaagcccaggagttgctttgggg

SEQ ID NO: 770966 - DNA, 101 bp, Homo sapiens
gcgcgcccgcggccctccgtcccgccccggccggctggcggtcacctggcacaccagcgcccgcaggatgcccagtagagacggggtttcacgatgttggc

SEQ ID NO: 770967 - DNA, 100 bp, Homo sapiens
acctgctactattgctactccagcagtatttgaacacatggaacagctctgaagatggctgtggtagatatctatcattccaggttaaaggagagacaaa

SEQ ID NO: 770968 - DNA, 74 bp, Homo sapiens
caacaggtgtttcaaggaactaattctctggcttcaccagcctccaccaagacgggacaagcagggagtttatc

SEQ ID NO: 770969 - DNA, 96 bp, Homo sapiens
aaagaaaagatccaaggagaatataagtacacccaagtgggtcctgatcacaacagaaagatcattgctcctcttgtaactcgtcatggaaagctg

SEQ ID NO: 770970 - DNA, 100 bp, Homo sapiens
ttttactgaagaataagagtctggttgataccattaagtgcctaattcaaatgggagcagcggtggaagcgaaggggctaaactgcacggtcaagaatag

SEQ ID NO: 770971 - DNA, 74 bp, Homo sapiens
aaggggttcagcttattgacttctcaccttgtgaaagggagagagaaacccctcctcgttttgcccagcatggc

SEQ ID NO: 770972 - DNA, 50 bp, Homo sapiens
ccgccgaggactccagcacaccgagggtctatcagccacagtctctgcaa

SEQ ID NO: 770973 - DNA, 100 bp, Homo sapiens
cagcctcccgggtagctgggactacagtgaagctgcactggtggaggttcctagtgatctggatcttgttctctgctgtcacagcctttgttaccttccg

SEQ ID NO: 770974 - DNA, 74 bp, Homo sapiens
ctgactcgtgtccaggagattcttgacaatgttcaggcagaagctcctcctggggtagagacagatcttattga

SEQ ID NO: 770975 - DNA, 82 bp, Homo sapiens
agcagcgtgcgttcagccctgggcgtttagtgggctacagatggcatggcatctaaaaccttacaatgcttgattttcatac

SEQ ID NO: 770976 - DNA, 100 bp, Homo sapiens
tgtccaggagtcagtgggtccactggtagcccccacccctctccgtccatggccccagatgacacttcagcttggatatataagcagagtgacagcagga

SEQ ID NO: 770977 - DNA, 80 bp, Homo sapiens
aagatggcgacgcctttggcggtaaattcggcacttctcagaacttctggatgagttttcccagaacgtcttgggtcagc

SEQ ID NO: 770978 - DNA, 75 bp, Homo sapiens
agtcggaaagttggaacctctgacaagaccaagtactaccttcaagggcaagtgtccagagaatggctgggatga

SEQ ID NO: 770979 - DNA, 82 bp, Homo sapiens
gaacaatgacaaaagacaatttctgctggagcgactgctggatgcagtgaaacaggtacttacaatttcatcagaaattcct

SEQ ID NO: 770980 - DNA, 75 bp, Homo sapiens
ctccttcggcagtccacccaccgccgccgcctcccagctgtgagccgtgagctttgaggcggtgggatgtgtcag

SEQ ID NO: 770981 - DNA, 75 bp, Homo sapiens
gtcgggcggcgtttggtcccgggagcctcgccgggtctggtgagctgtaccttctttctggcagtgaatggtctg

SEQ ID NO: 770982 - DNA, 100 bp, Homo sapiens
ctcctcgcaaagcgtcgagatcccgggcgggggcaccgagggctaccacgttctgcggggccagatattcgaagcttacaacatggcagctttgtggaaa

SEQ ID NO: 770983 - DNA, 51 bp, Homo sapiens
cgcggactctccccgcgatgatgccgtcgagtaatcctgcctgtgtctgta

SEQ ID NO: 770984 - DNA, 119 bp, Homo sapiens
catcccagacgaagacagtccctggatcaccgacagcacagacagaatccctgctaccagtctgaatttcctgctgctgttcacaaagatgctttttatctttaactttttgttttccc

SEQ ID NO: 770985 - DNA, 49 bp, Homo sapiens
ccagaagcgggcggcgcgggggagatgcgagtgatagacagccaagcag

SEQ ID NO: 770986 - DNA, 98 bp, Homo sapiens
tgatcacgcagctggctggcttcagtggaccagcatgcttccagaagagtggtgcatcagtggttgctattcgaaaatacatcatccataagtatcct

SEQ ID NO: 770987 - DNA, 75 bp, Homo sapiens
caacttcgcggtggtcaagcgggccacgcacctcgtcaccaaggccaagcctcagtcaccttctgctgaacagct

SEQ ID NO: 770988 - DNA, 74 bp, Homo sapiens
ggacgagcagcagcggctcctcaacacccctcgaaggtgagacgtggtcttgtaacacagtggttaagaatgtg

SEQ ID NO: 770989 - DNA, 104 bp, Homo sapiens
ccggctggtggccgccaagtgcacactggcagcccgtgtggacagtttccacgagagcacagaagggaagcagcgtccgtctccaagagagtatgaagagagtg

SEQ ID NO: 770990 - DNA, 59 bp, Homo sapiens
gcacgacctccgactactttctccttcaagttctaacgtgcctgatctactgagaccaa

SEQ ID NO: 770991 - DNA, 50 bp, Homo sapiens
ggtttagcggcagcctcttcggtggagcgaatcaaggagcgtgtggagga

SEQ ID NO: 770992 - DNA, 75 bp, Homo sapiens
acgcaagaaccagttaactgtacaaactacacagctcatggaacaagatcactcaaggtgaaggataatctacta

SEQ ID NO: 770993 - DNA, 90 bp, Homo sapiens
tcgaggccctgctgcacgacctcagctcccagaggatcaccagcgtggcggacaaggcaaaatctcagcaagttcggacctctagtacaa

SEQ ID NO: 770994 - DNA, 101 bp, Homo sapiens
ctgaaggacaacggctctattttactggggtccgccatcgtctcgtccgccggtcctggctcttcttaagccctacaggtggcaactactagcccaactgc

SEQ ID NO: 770995 - DNA, 103 bp, Homo sapiens
acctggaaaccaagtcatatgaacatgcagcagaactgattaaaacagtggcatctcgctatgatgaatatgttaatgtgaaggatttttctgacaaaatcaa

SEQ ID NO: 770996 - DNA, 100 bp, Homo sapiens
cgccagctggtagaaattgcagccagggatattgagaaacttctgagcaacagatctaaagccctggtggacactggcctgagactgtctgcagttgcac

SEQ ID NO: 770997 - DNA, 100 bp, Homo sapiens
cgacaagccgctggcagccgcggatctcaccgccgctcaggtgatgtcttggcattgcccattttcaagcaggaagattccagccttccattggatggtg

SEQ ID NO: 770998 - DNA, 100 bp, Homo sapiens
agatgaaaaccctgtacctcacgtattgtgccaatcacccttctgcagtgaatgtcctcacggaacacaggacgcttccattgcacacagattccatgtg

SEQ ID NO: 770999 - DNA, 98 bp, Homo sapiens
cgctccttgcccgagaacatccagtttgatgtttactacaagatgatgattattccccaccttctaagagacaaagaccaacgagccaccacagccac

SEQ ID NO: 771000 - DNA, 75 bp, Homo sapiens
ctggtcccctgctttaaccatcgaaaatgagcggctcgtctactccatgtgctccctctgccaggaggagaatga

SEQ ID NO: 771001 - DNA, 100 bp, Homo sapiens
gcggaggcagaggtggaggcgctttgaaaggagaatgaagtttctagattagaagacataatgcagcatttaaaatcaaagaagcgggaagaaaggtgga

SEQ ID NO: 771002 - DNA, 74 bp, Homo sapiens
cgatcctgtaactgccaaacccaagttggttggagatgtggattttgaaggaaagtacacaggaagatgctatg

SEQ ID NO: 771003 - DNA, 100 bp, Homo sapiens
ttatgaagaagaaattattcacatgcttgaatactgtggagaccgtatccttgatgagcttgacaaagacgatagtacccatgagtctctgtctcaagaa

SEQ ID NO: 771004 - DNA, 50 bp, Homo sapiens
ctgctctagcgagcagttcgaggagatctcattcgtcggttcggatccaa

SEQ ID NO: 771005 - DNA, 75 bp, Homo sapiens
cccgctgccgtcgccgccgccaccatgcccaagagaaagcctcagtaccacgggctgcaggtggccgtgtccaag

SEQ ID NO: 771006 - DNA, 75 bp, Homo sapiens
tttcccagagttccttgatatgttagaagaatcaccatttctgaaagtctcagccaatttcttctccagtcatcc

SEQ ID NO: 771007 - DNA, 98 bp, Homo sapiens
ccctctccactcccatcttcaggcaagtgagaaacagatggtggtggtgtgcaaggagtccccaaaggagtatctccagcctttcaaggacaaactag

SEQ ID NO: 771008 - DNA, 102 bp, Homo sapiens
ctccagggtgtcaggactaagagaagtcacaaaacagcagatttcccaagagcagcggaaaatgatccagtcacagcttcagctttagctgcagctgcctct

SEQ ID NO: 771009 - DNA, 82 bp, Homo sapiens
cgcgccgcccggcagcctcggcagagtgcctggtgaagaatgtgatgggatcactagcatgtctgcggagagcggccctggg

SEQ ID NO: 771010 - DNA, 100 bp, Homo sapiens
gttactctagaattattagatggcattgtgtccagatctggcaccctgacttatgaagcagttcaccaaacaacgcaagttggattggggcagtctttgt

SEQ ID NO: 771011 - DNA, 100 bp, Homo sapiens
tggttttgaaaagttcatgctgtcccttcattgaattttagtctcctgcacatagttactccagctatgactctggcaaaaatgagagtgtagaccgagg

SEQ ID NO: 771012 - DNA, 73 bp, Homo sapiens
aacaaagctatcaatatattgctggaagggaattcagacacatctctgccatccaggaccctgcccaccctgc

SEQ ID NO: 771013 - DNA, 100 bp, Homo sapiens
gattacgccccctatcctatccgcaaacagttcatcctaagttccactataaacaggctcatgactcgggcacagacacttcttgcgtgactttttccta

SEQ ID NO: 771014 - DNA, 100 bp, Homo sapiens
ggcggctaaggaaaggtgccacagcagagacgcgaaggagaggccctagaaccaccctgtccccagaggggctggttctgccatgagtactgatgcttac

SEQ ID NO: 771015 - DNA, 75 bp, Homo sapiens
agccaagatggtgaagcagatcgagagcaaggattatagctgagaaggtaaaggacgttctgtttatccgacccc

SEQ ID NO: 771016 - DNA, 100 bp, Homo sapiens
aagactcactggccgaatggcagcagtagatgacttgcaatttgaagtattgctaccagtagtgcagtttcaaaggaactcaccagacttttgaaaatac

SEQ ID NO: 771017 - DNA, 125 bp, Homo sapiens
ctctgcgccggcccgctcactccgcccggccccagccctagcgctggccgcgaccccggcggtcacagatgtgacattgatgtgtccactgaagccatgtatgctgcaaccagacgagaagggtt

SEQ ID NO: 771018 - DNA, 99 bp, Homo sapiens
caaaggagctggcccagcaactttcccagaacgcaccgcaagctccctcctcgtactaaggctcgtacgtctgcatcgattatcttacgtggggcaaat

SEQ ID NO: 771019 - DNA, 101 bp, Homo sapiens
gttggtctgctggtgggactcaatgttctcgatgccaatctctgcttgaaaggagaagacttggattctcagaactttgaggtggaggctgatgacttggt

SEQ ID NO: 771020 - DNA, 82 bp, Homo sapiens
aaggcaccgacgtcatcatgctgaccaccaatcagatccgtaagaggagatgctctgctgaggggcagttgctatggttaca

SEQ ID NO: 771021 - DNA, 96 bp, Homo sapiens
gaagcagtggtttaccaccatccaccaaaaagtcagtgaatttaggaggacttttactccaagcactcctggaatattggcctagaacacatgtga

SEQ ID NO: 771022 - DNA, 100 bp, Homo sapiens
ggttccggctgcagcccgaccagtccaagagccggcggcatgacgagttcattttaatcgtgatggatccttgatagtttcaagtagctatgatggtctc

SEQ ID NO: 771023 - DNA, 82 bp, Homo sapiens
cctcggacccatcgccgcttctagaccctactgcggtctcggatattgccgggtgacttaagagattaaaattaatttggtt

SEQ ID NO: 771024 - DNA, 90 bp, Homo sapiens
aaaagaacgacatgatgcaatcttcaggaaagtaagaggatccccgtcgaggtcaagatcaagatccaggtctatttcacgaccaagaag

SEQ ID NO: 771025 - DNA, 51 bp, Homo sapiens
actggattgggaaagaccatggcagagcaagcaccagaagcaccaggcttt

SEQ ID NO: 771026 - DNA, 108 bp, Homo sapiens
tgccggccgggattcgcggcccggagctcgggaccggtgctggagaatctggtaaaagcaccattgtgaagcagatgaggatcctgcatgttaatgggtttaatggag

SEQ ID NO: 771027 - DNA, 100 bp, Homo sapiens
gcttctttaagggctacgggaagatcctggaggtggatctgaagaacggatcagcttgaacgggtctttttacgacttggccatgctgaaacagatgaac

SEQ ID NO: 771028 - DNA, 133 bp, Homo sapiens
ccgcagagtggacctgcaggtacttggatctccagtgggagctgccctctcgaaggcaggacagcggtggcggcagctagtgtcagcagtgggatacctgcgcttgaaggacatcatccaccgtgacatcaag

SEQ ID NO: 771029 - DNA, 75 bp, Homo sapiens
gctatgtgaacgtgacagtcaagccaggagagattaaacagattctagaaaatgaacttcagatacctgtgtcca

SEQ ID NO: 771030 - DNA, 75 bp, Homo sapiens
ggacctagcaactccttcctcgctaacatgggagttgctgggagcctgagcacctttcgtttttcggctcagaga

SEQ ID NO: 771031 - DNA, 75 bp, Homo sapiens
tgttgattaactggacaaattcagcaaaccaagatggagtatgagtggaaacctgacgagcaagggcttcagcaa

SEQ ID NO: 771032 - DNA, 101 bp, Homo sapiens
gagaagggggaaatggggctgggggccgtccccgggagacaggcggccttccgagagggactggagcaggccgtgcgaccctgaccaccttccagcgcgca

SEQ ID NO: 771033 - DNA, 88 bp, Homo sapiens
agaaacccctcctcccctagcttcactcaatgttagtaaggtgcccccacttgactctcgccccagctccccagccctctacttcacc

SEQ ID NO: 771034 - DNA, 98 bp, Homo sapiens
tgagggaaaagcgaggcaaggcaggcggctgctagtctatggggtccttacaaagacatttggcataaagtgggaaatgctctttggagaagacaacc

SEQ ID NO: 771035 - DNA, 82 bp, Homo sapiens
gagcggcggcggcggcagcgggtcttgggtcctccgagagcagcagcggaattacatgaatgacagtcttcgaaccaatgtg

SEQ ID NO: 771036 - DNA, 99 bp, Homo sapiens
cggctgccctgcagtcgcctccaacacccgctgctgcccgcccgctgcctgcctgcctggcatctctctctcccgtgccggtggtggtgtgcacattga

SEQ ID NO: 771037 - DNA, 75 bp, Homo sapiens
tggagttcacgactctgagtgctggttccagagagattcctggaagttgctcagatcacattacgggagtttttc

SEQ ID NO: 771038 - DNA, 100 bp, Homo sapiens
aagtcagacgtgaggaaggacctacctccttggtcaaagctgggatgggattgaggaaactcggcttaacattgacaagatctcagaacatgtagaggag

SEQ ID NO: 771039 - DNA, 83 bp, Homo sapiens
gtgcactccgcacctcggggacattattgcgcgtggaacggctgcttttggaagaggctgggaggcggcagaatgcagccaga

SEQ ID NO: 771040 - DNA, 50 bp, Homo sapiens
tggaggtggacgccatcgtcaacgccggtttattttcttgaaaaggctcc

SEQ ID NO: 771041 - DNA, 100 bp, Homo sapiens
atgaacatgcctccattcacctgtgggacctgctggaagggaaggaaaaacctgtatgtggaaccacctttttgtttggctatgccaccacagtcatccc

SEQ ID NO: 771042 - DNA, 100 bp, Homo sapiens
cttcaaccccaggggaccagaggaactcagccctgattgcgggagttctgggaaatcgttcattcatttacagatgaacagaaaagactcttcttgcagt

SEQ ID NO: 771043 - DNA, 75 bp, Homo sapiens
aggagctccaggcccgtcggcgcggaggctgatcaggctgccaaggtagagaagatgcgccagagcgtcctcgag

SEQ ID NO: 771044 - DNA, 90 bp, Homo sapiens
gagctggacggcgagcgcgagcggcgcgagaaactggtaggtgagtgctgtcctcggctcactttcctcaagctctccggctgccacggt

SEQ ID NO: 771045 - DNA, 74 bp, Homo sapiens
cacatgtgggccttgttcaagccaggggcacgttccgctttgaaagacctgatggctcccactttgatgttcgg

SEQ ID NO: 771046 - DNA, 90 bp, Homo sapiens
aggcactcatcctgcacgccggcgagtgccagcggttaagcagctgcaggaggaaacgccacctggtggtcctttaactgaagctttgcc

SEQ ID NO: 771047 - DNA, 75 bp, Homo sapiens
agagacacagcaggagaaatggatgctggaggagaagagccgcattcaccagtccacctatggcaagagcctagc

SEQ ID NO: 771048 - DNA, 82 bp, Homo sapiens
agcctgcactgtgccttaacagaaggtcttgagattctaagtgggaatcatttcaggtctctaattaacagaagatggcaaa

SEQ ID NO: 771049 - DNA, 90 bp, Homo sapiens
gtaaagtggttggttgcagttgtgtagtagttaaggagcgattggttacatgggaacaagtgcctttgtccgaaaaatctatactaatgt

SEQ ID NO: 771050 - DNA, 83 bp, Homo sapiens
gggagggtccgagccagccgctgttttgccggaggagcccctcaggccgagtcatggccggcttcaacatggggggcgacctc

SEQ ID NO: 771051 - DNA, 74 bp, Homo sapiens
caggatttacacagacgtggggcgatgcttgtgaccctgcagctcctcaaaccctccagtgccctggtagccgc

SEQ ID NO: 771052 - DNA, 82 bp, Homo sapiens
ccggaagcggatcgggtggagtgtaggtcatatcgccgcgaccaaagcccagcagggctggctcgtggccggcacggtgggc

SEQ ID NO: 771053 - DNA, 75 bp, Homo sapiens
acggcatgatgttcgtccgcaacgattgcaagatacactctgtgcagttttagagagagacacactcagtattcg

SEQ ID NO: 771054 - DNA, 83 bp, Homo sapiens
ggcgttggtgggagccgtgctctacctctatccggctttgaacttggcctactccagcatttacggcagctaccggaacttcg

SEQ ID NO: 771055 - DNA, 74 bp, Homo sapiens
ttggcaaagcttctccctcagtatttagaccaggtatggcctcacaagtcttggtctacccaccatatgtttat

SEQ ID NO: 771056 - DNA, 99 bp, Homo sapiens
aagctgctggaaggcgaggagagcaggcggatgtcagatgggctttttctacaaaaatgcagggaagttgcagaaagctgtaaagatattaaatttaat

SEQ ID NO: 771057 - DNA, 100 bp, Homo sapiens
caaacatcttccaccacagcttagagcatccatgagtatgttttctgatttcctgcagtcttttctgaagcactcttcgagtacagtttttgatcttgtg

SEQ ID NO: 771058 - DNA, 90 bp, Homo sapiens
ccagcagggcccctgggctcccggaagaaaaagctcattgagctacaggctgggaagaagtctctggaagaccaggtggagatgctgcgg

SEQ ID NO: 771059 - DNA, 100 bp, Homo sapiens
cgcggcaggatctcccggctctcggtccgggacgtgcgcttccccacgtcgcttgggggccacggcgcggacgccatgccctctgattctgttcacatta

SEQ ID NO: 771060 - DNA, 100 bp, Homo sapiens
catgcgacttcgacaacttaaacggcttcaggcaaatatgggtgcaaagctgagatctgtatctgtggacctgaatgttgatccctcgcttcagattgac

SEQ ID NO: 771061 - DNA, 110 bp, Homo sapiens
ggggagagccactgacgccgggaccgggaccgccgccgccgccgccaccatgaaggtagaagatagcaccatgccgattcgtcgaactgtgaattctacccgggaaactc

SEQ ID NO: 771062 - DNA, 71 bp, Homo sapiens
tccagatcctcctagaagtagttacttggaaagtccaagaggcccaagttacatgagcatgcagcatacct

SEQ ID NO: 771063 - DNA, 111 bp, Homo sapiens
gaaaggctgcggccccgcgccagagggccggtggctcctccgggcttctgaggacccgcagggagcgggtttccctgagagacctccgtacttttaaggtggaacatgagt

SEQ ID NO: 771064 - DNA, 100 bp, Homo sapiens
cggctctgtaggaaggaacttggttccccctccctcagcttccgccccaaaaggtggagtggctgaaacttctcagcaggcgcatctacactagtgacct

SEQ ID NO: 771065 - DNA, 89 bp, Homo sapiens
gagaactagcaggccttacggtggccaatgaagcagactcactaacttatgatgaattcctcctgatcagcagagactgatctttgctg

SEQ ID NO: 771066 - DNA, 83 bp, Homo sapiens
aaggcgattggcatcgatctctccatcccttccgaggcccgacttcgatgtgaagttcatttccaatccgccctccatggtgg

SEQ ID NO: 771067 - DNA, 98 bp, Homo sapiens
agtgctggactggcagcaaagtgaccgttggagtttaatgagaggaatatactcatcatcagtctatttagaagagagtctcgctctgttgcccaggc

SEQ ID NO: 771068 - DNA, 75 bp, Homo sapiens
caacatggagaacaagaccacgtgggaaacggggtctctgggggatccagtgacgtgcccaaccacagagaccag

SEQ ID NO: 771069 - DNA, 100 bp, Homo sapiens
tctccctctctcccatctaccctgctgcgcggggcctgtgggctcgggatgagtttgaaggcctcttcaagcagccagcagaaaatgtcaaccagtacct

SEQ ID NO: 771070 - DNA, 75 bp, Homo sapiens
gagtgccaaaatgctgcacagatctaccgtcgcgtgaccagtgtattggataacagaattctgggtcatgtttaa

SEQ ID NO: 771071 - DNA, 116 bp, Homo sapiens
gggaacgactgcggcgcgctgctggacgaagagctctcctccttcttcctcaactatctcgctgacacgcagaaataagcgggttttgaaaacaaaaaaaagaaggagtggaagag

SEQ ID NO: 771072 - DNA, 100 bp, Homo sapiens
gtgaatggaaaccagatgaagaagatgagatttcggccgcggagttcttcacgctgcagctgtggagatggcaaggagccacagaccatcacccagctca

SEQ ID NO: 771073 - DNA, 75 bp, Homo sapiens
aaaaggtggcgtggctggcgattcgtgttcgtgagggccttttctggttgcagtccatgagctgggaaaggaggc

SEQ ID NO: 771074 - DNA, 90 bp, Homo sapiens
cggcgttggaggccaccgtttccagagaagaagttcgtgccccaattcctcaaaagcaggaaatactggtggaaccagaaccattatttg

SEQ ID NO: 771075 - DNA, 83 bp, Homo sapiens
cccgccgctgctaaatatatccgtaggaatggagagggaccggatctcagaaaaatggctacaaacttcctagcacatgagaa

SEQ ID NO: 771076 - DNA, 98 bp, Homo sapiens
cacaatgctacactgcagtcacacacactggcagactccatccccagcagccctgcttcttcacagttgaatagccaggtctggctgggtcggcacaa

SEQ ID NO: 771077 - DNA, 74 bp, Homo sapiens
cacgctcgacttcatgctcggcgccaaaggcaaggattactgcaaagtaatatttccatatgaggcacagaatg

SEQ ID NO: 771078 - DNA, 100 bp, Homo sapiens
cacaggcttccagtacgagctggttaggaggcacagggcgtcggacctgcacgagctgtctggatgataatgaagataattcaaatgatgggacccagcc

SEQ ID NO: 771079 - DNA, 83 bp, Homo sapiens
ggggaaccaaggagacgctcctggcactgcaggaactgtggctgcaccatctgtcttcatcttcccgccatctgatgagcagt

SEQ ID NO: 771080 - DNA, 100 bp, Homo sapiens
gttttacccagtggtgaaagaaggacggacactggatgccaagcaaaatgatgcttcaacacccaggccaggtctctgcctcggaagtgagtgcttctgc

SEQ ID NO: 771081 - DNA, 100 bp, Homo sapiens
ttttgggaaggtgcaaggggtgtttttccgtaagcatactcaggctccacataaacacggtttccttgaaggccgccatgcagagctgtgcttcctggac

SEQ ID NO: 771082 - DNA, 83 bp, Homo sapiens
gttgcgggccccgggacctgggctgggaacccgcggtggagcgggacacgaacgtgcccccgcctctcctggactcttttcaa

SEQ ID NO: 771083 - DNA, 98 bp, Homo sapiens
acgtcagcgggctgcagcgcgccaaaaccgggacggacaagaccctggtgaaggaggtcgtacagggcgtctctggccgagcctctttttgtggaaaa

SEQ ID NO: 771084 - DNA, 106 bp, Homo sapiens
cctataatcaagtaaaaacaatagctcaaggaaacctttccaacacagatgtccaagctgccaagttatcaatagtctggctgtctatcgtcatcgtgagactgac

SEQ ID NO: 771085 - DNA, 101 bp, Homo sapiens
attgcaatcatggtgcagaaataccagtccccagtgagggtgtacaaatacccctttgaattaattatggctgcctctggctgtacctggcagggagcagc

SEQ ID NO: 771086 - DNA, 87 bp, Homo sapiens
gcgagttcctgcgcggctgcggggcttccctgcggctggagtctcaggaggaggtctgcgatttgctccatgccgcacccttccaaa

SEQ ID NO: 771087 - DNA, 75 bp, Homo sapiens
tccaaagcctgcgcgagaggagccgggacacgcctagcgcgggctccaggagctggaggagggaatgatattcag

SEQ ID NO: 771088 - DNA, 89 bp, Homo sapiens
ggcgcagcctccctctattaccagaatgattacggacctgaagccaaagaacaagatgcgctagtggacagattgctgaccaggggctt

SEQ ID NO: 771089 - DNA, 100 bp, Homo sapiens
tgcagcggggcatcatcaagatggctaggcagctggaagagaaagaccgagtgctaaagaagcaggatgcattctacaaagaacagctggctagactgga

SEQ ID NO: 771090 - DNA, 115 bp, Homo sapiens
gaaaacgctacgtgagctgggccctgggccagaggcagaaaacggacggaagaaaaggtctggccggctgaagccgacgtagcttctctgaacagacgcatccagctggttgagg

SEQ ID NO: 771091 - DNA, 100 bp, Homo sapiens
tcatagagctgggagcagagattaaaagagttcggcgaggaactccagaatacaagatgagctttgatccaaaccttctccacaacaatggacataatgg

SEQ ID NO: 771092 - DNA, 124 bp, Homo sapiens
agatgaggagctggcgggcaaatacgcagagctgggggactggtgcgcccggaggattctgcagcacgtgcagaacatggctctctatgctgacgtcggtggaaaacaattccctgtcactcga

SEQ ID NO: 771093 - DNA, 100 bp, Homo sapiens
aagggcctgcctggtgacagcttctacatcagttcctgggcttcccgatggactcgagtttttactatgtgagcatcccggtgcctgcacagcaaggact

SEQ ID NO: 771094 - DNA, 100 bp, Homo sapiens
catccttgtggatgatgatagtgactttgggaaatcctcattgacgattcaatttgttgaaggccaatttgtggactcctacgatccaaccatagaaaac

SEQ ID NO: 771095 - DNA, 100 bp, Homo sapiens
ctggactctgcagagtgaagagaaaatagcaaacgatccagacggcagggagtgcatcaaaggtgtgaacacaggccgccatggcatcagatgaaggcaa

SEQ ID NO: 771096 - DNA, 100 bp, Homo sapiens
agtggtgctgtcagcgcggccgtcggagacatgggagacccggggtcggaaagtggagcctttcaggctggcatggagagcttaaggggcaactgaagga

SEQ ID NO: 771097 - DNA, 100 bp, Homo sapiens
gaagccaacagcgaggctttcagttctttggaattccattcttttccttattcttctgatgtggatccagagcagtcattatggcgaaccttggctgctg

SEQ ID NO: 771098 - DNA, 96 bp, Homo sapiens
aagaacgcctacgggcgcattatcctgcaggggcataaggaaatggtggcaggcacttcctcctaacaagaaggaagtagttaaagaaaatataag

SEQ ID NO: 771099 - DNA, 100 bp, Homo sapiens
atttaacgaatggggttgtgatggcccaggttcttcaaaagatctccagggtttgagccacaatgtgatcttcaccttggattctttgttaaaaggagac

SEQ ID NO: 771100 - DNA, 59 bp, Homo sapiens
ggcggagaaaaggccgctgcgcaggggagctgtttcaatagtcatgggcattcccacag

SEQ ID NO: 771101 - DNA, 90 bp, Homo sapiens
tcctgctctgggaccggaggagacatcggcctctgcaggcttgccgaagaagggagatatggctcgtggacagcagaaaattcagtctca

SEQ ID NO: 771102 - DNA, 50 bp, Homo sapiens
tacaagagatttcgactgtggaagatatgtaactggttcatcaatgcccg

SEQ ID NO: 771103 - DNA, 82 bp, Homo sapiens
gaacttcaatgcagattctagccaacataaaggtccgtaaaagccctgggctcagccagagcagggcagaggatgacgggat

SEQ ID NO: 771104 - DNA, 95 bp, Homo sapiens
ttttatgatttgtatttgactgagagaaacccactgaagacgtctgcgtgagaatagagaccaccgaggtaactaggatttctacctcaaccgcg

SEQ ID NO: 771105 - DNA, 100 bp, Homo sapiens
cttcgttcgattattagctttagtgaaatgggctaataatgctggcaaagtggaaaaatgtgcggaactttatattgctgttggaatatctggagccatc

SEQ ID NO: 771106 - DNA, 75 bp, Homo sapiens
tgggccagcaatcctcagacgcctcacttaggacaagtccacttctggtaattcatcctacagatatacttgcag

SEQ ID NO: 771107 - DNA, 100 bp, Homo sapiens
ccgccccctccggcgtgttcatgcccccgggtgtactaatggtcacttgatgtgcgctggctgttttatccacctactagcagatgcccggctgaaggag

SEQ ID NO: 771108 - DNA, 100 bp, Homo sapiens
tctgtatccgctgctcttgtgacgttgtggagatggggagcgtcctggggctgtgctccatggcgagctggaattcagaaggagctggcggacatcactt

SEQ ID NO: 771109 - DNA, 98 bp, Homo sapiens
gggcacccaccctgcccctgccgaggcaggcgcccaccgccggcggtgatgcggctgtgaagccctagtcggagactcctgtgctgaccagaatagaa

SEQ ID NO: 771110 - DNA, 75 bp, Homo sapiens
gctgggatctatgacatattgctggctcttatcttccttcatgacagagaaagcgtctctagcagctgatatccc

SEQ ID NO: 771111 - DNA, 74 bp, Homo sapiens
gaattgttcacaaatacacgttctgatcttgatatatttttgccatcatggatcagtttggagatatattagaa

SEQ ID NO: 771112 - DNA, 75 bp, Homo sapiens
tcgatctcctcgtctcccgctccgccctcccttttccctggtgcagagcattgtagaccaaggagccatggatag

SEQ ID NO: 771113 - DNA, 75 bp, Homo sapiens
ttctttggcatcactgcagctagtaatttgccttctggattctccagtgatccacaagctcagaaatacatcgcg

SEQ ID NO: 771114 - DNA, 73 bp, Homo sapiens
gcctgggcctgagcagcatcgttggcgtctggtacctgctgaggaagatggcccactgcgtgaccttggttca

SEQ ID NO: 771115 - DNA, 75 bp, Homo sapiens
tcgcatcgctgccgccaacgggaataacaagcctttgtattcatttgaagataatgcagactatgtttatgatgt

SEQ ID NO: 771116 - DNA, 95 bp, Homo sapiens
caagttggtcgcttccctgcgccaaaggcaatacagctaaagtatacattgagattcaggatgaaaataatcatcccccagtgtttcagaaaaaa

SEQ ID NO: 771117 - DNA, 49 bp, Homo sapiens
tggcaaccgcctacgagacactcaaggtactccaaagattcaggtttac

SEQ ID NO: 771118 - DNA, 82 bp, Homo sapiens
gtcatgagctttgtgaacctgggtcctgaacgaggctgtgggggccctgatgtaccacaccatcactctcaccagggaggac

SEQ ID NO: 771119 - DNA, 90 bp, Homo sapiens
gctttttctaactatttcaagatgatatttattcaccaaacaaggatttaagtgccctgtatgctcaaaatttgtatcctcagatgaaat

SEQ ID NO: 771120 - DNA, 98 bp, Homo sapiens
cttatggcggcgctggagagggggcgctgagctgttgggatggcccactgcgtgaccttggttcagctgtccatttcctgtgaccatctcattgacaa

SEQ ID NO: 771121 - DNA, 90 bp, Homo sapiens
ctggccacttgcttgggatcctttatcctggtcatcttctatttccaaagttgctatcaagatcatagataagacccagctggatgaaga

SEQ ID NO: 771122 - DNA, 100 bp, Homo sapiens
tcccaaggctcggaagaggaagagtaatgaaatggaggagatgaacaagagaactgggcaacccatgatccacatctacctggacaaggaaacaggaaag

SEQ ID NO: 771123 - DNA, 100 bp, Homo sapiens
tgtctcgcaacatgacaaggtccaggagagaaggggatacgggtggcctctaagaaatatgtctccaaagaacttgccaaagagattcgtgtcaaagcag

SEQ ID NO: 771124 - DNA, 106 bp, Homo sapiens
gcagctcctcctggaaaaagcaagctgaagacatcaagaagatcttcgagttcaaagagaccctcggaacgtgtcgtgaaaactacccctaaaagccaaaatggga

SEQ ID NO: 771125 - DNA, 100 bp, Homo sapiens
cgccgctgggcctgcaggtctctgtcgagcagcggacgccggtctctgttccgcaggatgttcacacaaaagatgttggacaatttctacaattttgctt

SEQ ID NO: 771126 - DNA, 89 bp, Homo sapiens
ctgtctgttcagacttcagcttggtgaaacctcgacctgtctcccagttggttgcacagcaggttactcagcagtttgtgcctcctaca

SEQ ID NO: 771127 - DNA, 74 bp, Homo sapiens
acatgagtgatgtggaggaaaacaacttcgagggcagagccaaggagcgggagctggaactgaagaacacctgg

SEQ ID NO: 771128 - DNA, 75 bp, Homo sapiens
cagcaaagatggtacaaaagagtctttggaggatgcggctttgatgggaacttagtgatttggcccgtgaccctc

SEQ ID NO: 771129 - DNA, 75 bp, Homo sapiens
aatacttgggtgacatctgcctgagagatctccaagaattacagattcttctttggagcagaataaaagatctgg

SEQ ID NO: 771130 - DNA, 99 bp, Homo sapiens
agagaggcgagccacccagtgggggtccttctacagcccagcccagacggccaacaatccctgcagtgacttgattagagaccaaggatttcgtggtga

SEQ ID NO: 771131 - DNA, 87 bp, Homo sapiens
acatgtggaaggtgcgcgagctggtggacaaagctgagtctgccaaaaaagaggtggttgctgaagtggtaaaagccccgcaggtag

SEQ ID NO: 771132 - DNA, 98 bp, Homo sapiens
taagctcctgtgtgacaagtattacatggcctcacctgacctggagatccaggagatcaatggtaactaggatttctacctcaaccgcgagacctatg

SEQ ID NO: 771133 - DNA, 97 bp, Homo sapiens
tgagtgaattttggcacaaactgggctgctgtgtggtagagaaaccccagccgtgtcagatcatataccctcgccagcagctgctgaccctccgaga

SEQ ID NO: 771134 - DNA, 90 bp, Homo sapiens
ctctgccccgccgccccgtctgggagaaataactttggctgtcatcctgactctactgggacttgccatcctggctattttgttaacaag

SEQ ID NO: 771135 - DNA, 99 bp, Homo sapiens
cccgtgacccttcaggtgtaccatgggctgctgagcttcacggtgcatcccaagcccaagatcttaaatctgacccaggccttgaaagacaacaagagt

SEQ ID NO: 771136 - DNA, 100 bp, Homo sapiens
tctgggatgagcaaggtgtaaagggctttgaccagcttcgacttgaaggattgctttgtgatgtgaccctgatgccaggtgacacagatgatgctttccc

SEQ ID NO: 771137 - DNA, 75 bp, Homo sapiens
tggacgatatctaatattacagctggaaatagggcacagatccagggtatgcagaagttggctagtcaatacctg

SEQ ID NO: 771138 - DNA, 100 bp, Homo sapiens
atcttgtcgcgagctgctgatacagaagagatggatattgaaatggacagtggagatgaagcctaagaatatgatcagccttcacagttgttgatcacat

SEQ ID NO: 771139 - DNA, 100 bp, Homo sapiens
agagaaaaccacagactctgggctcactgaagctgattgctgaggaaggggtggacagcctgaatgtcaaggagctgcaggcagcgtgtcgggcacgagg

SEQ ID NO: 771140 - DNA, 82 bp, Homo sapiens
gcggcgaggagaacgtcccgctggatctgacccgagcaattctgtggtgttcttggtcacacatttatggagtttctgaagg

SEQ ID NO: 771141 - DNA, 82 bp, Homo sapiens
cgaccggctccgcagcaagatggcggacgagaaggacagggaaggattggaggctgttgtcattggagaagttcatgagaat

SEQ ID NO: 771142 - DNA, 80 bp, Homo sapiens
aacagcaacaggtctcaattaatccacattcatctcaatggaaggatcctgccttaagtcaacttatttgtttttgccgg

SEQ ID NO: 771143 - DNA, 100 bp, Homo sapiens
ctcgcagtgagtgttacagctcttaagaacggggaagataaccgaagggtggtttgagaaacccaccaggccaactgggaattagaattgattcaaaact

SEQ ID NO: 771144 - DNA, 90 bp, Homo sapiens
cgacgacagaaccctgtacaatttgatagtcattcgtaatcagcaggccaaagactcagaggtgcgagaagatgtactaaattcattgaa

SEQ ID NO: 771145 - DNA, 75 bp, Homo sapiens
cagaggagcccatggcatcatagttgtgtatgatgtgacagatcagatcgaccttcagaagatgcccttggggaa

SEQ ID NO: 771146 - DNA, 50 bp, Homo sapiens
aaagaaacttcctcagtaaagcgtgaaattgatcttcaaattctctccaa

SEQ ID NO: 771147 - DNA, 83 bp, Homo sapiens
cttcctggagcacctgcgtgtcagctccttatccagcagccctcaagcccagccccctcggccagcagagctgtcagatgagg

SEQ ID NO: 771148 - DNA, 87 bp, Homo sapiens
agccgcggccatggacctggcggatccggcctgccctggcccagctcaacacctgatttcggccggaaggtggtggtcgtacgctgt

SEQ ID NO: 771149 - DNA, 75 bp, Homo sapiens
tgcgggagaccgggttgggctgtgacgctgctgctggggtcaggttttgggttggtgaaactggatgtgaaaaca

SEQ ID NO: 771150 - DNA, 80 bp, Homo sapiens
aaagggcctaaagaagatgcaggccaacaatgccacactggtgtgtctcataagtgacttctacccgggagccgtgacag

SEQ ID NO: 771151 - DNA, 96 bp, Homo sapiens
cgggttagggggccggcgcccgcggttcaggagaactacgatgacccgcacaaaacccctgcctccccagttgtccacatcaggggcctgattgac

SEQ ID NO: 771152 - DNA, 78 bp, Homo sapiens
ccacatatatgcgaatctataagaaaggtgatattgtagacatcaaggtaaaaatgcatttgcaaagggagaaaatga

SEQ ID NO: 771153 - DNA, 100 bp, Homo sapiens
taaggaacagcgagctgtttgacccctttgacctcttcgatgtgcgagactttggaaaggctttgaagacgacccccaggctgtgctgcagacaatgagg

SEQ ID NO: 771154 - DNA, 80 bp, Homo sapiens
ccgcggtggggcgttgccatggagacgcgggcggcagcagtgcctgatttgagatggggtcccaggtctcggtggaatcg

SEQ ID NO: 771155 - DNA, 50 bp, Homo sapiens
ggaaattttcgctcttacaacaatgttgtggacatcggatacccaaggag

SEQ ID NO: 771156 - DNA, 98 bp, Homo sapiens
tattctctcggcctgtcagcaaagtgagagttacgtgtgtgcatccaatgaaccatttcgtaaagtcgattacaccaaaaatattaatccaaactggt

SEQ ID NO: 771157 - DNA, 90 bp, Homo sapiens
aacaagcggttctctaccctgtaaagacagccgctcaggaagcaatcttgcatgcgtctggaaatggcacaaccaaggactactgcatgc

SEQ ID NO: 771158 - DNA, 97 bp, Homo sapiens
acagtgaccgtggggttcctcgcccagagcgtcttggcggattatcattggcaatggcgttcattccttacgagtggctttactgcagtttatttct

SEQ ID NO: 771159 - DNA, 115 bp, Homo sapiens
atggcgaatgtggctgataagtctagattcaccaatgtcaaacagtttattgcaccagatatccttggaacagaagatcttattgtggaagtgacttccaatgatgctgtgagat

SEQ ID NO: 771160 - DNA, 75 bp, Homo sapiens
gatttttggcctaccctccaaagaaaaggtggtgtgacaagaatgactgtctccctggtggttattgtttttgag

SEQ ID NO: 771161 - DNA, 75 bp, Homo sapiens
ggaaatagtgtgtttccaattttgaacactttggagagcacagggatcagttgtccttgtttttttttggtcttt

SEQ ID NO: 771162 - DNA, 97 bp, Homo sapiens
gtccccgccgaagtcaccgtgatcctgttagatatcgaaggtaccacaaccccgattgctttcgtgaagggaagacatgtaaggaatttgcataaga

SEQ ID NO: 771163 - DNA, 83 bp, Homo sapiens
cccggacagagcccgtggtcgcgcagatgatatcatcaagttgaatcgaaaggaagggaagaagcagaattttccaagactaa

SEQ ID NO: 771164 - DNA, 82 bp, Homo sapiens
gaggacgagatgcccaagactctggtctcatgttccggtgcagcgccagctgttgtgaggacagccaggcctccatgaagca

SEQ ID NO: 771165 - DNA, 50 bp, Homo sapiens
tggagacatggaccgcggcgagcaagggctattgagtggccagacttccc

SEQ ID NO: 771166 - DNA, 98 bp, Homo sapiens
actgaagaggactcaggagcaaatcagtaatgtatgataagtattatcagcaacataatagttctgggcatcttcattaagtacaaggaacttcggac

SEQ ID NO: 771167 - DNA, 75 bp, Homo sapiens
cgatggagcagcgaaaacgtggttgtagagttccgtgactcccagagtctgtagaagaggcgacaccagggcttc

SEQ ID NO: 771168 - DNA, 100 bp, Homo sapiens
aaaacagagcttttggaatctgaacaagggctgctctgttaaaagcgaaaatgaaacaattgcctgcggcaacagttcgactcctttcaagttctcagat

SEQ ID NO: 771169 - DNA, 51 bp, Homo sapiens
gggagactggagtcgaaggccgtgaggtaccagaggtttgaaaaggcattt

SEQ ID NO: 771170 - DNA, 100 bp, Homo sapiens
tcgggtcgccggagccgcgccccaccccgccagctccagagccacgtacggcatcatcctctcactggccctggctggcattcttggcatctgtattgtg

SEQ ID NO: 771171 - DNA, 96 bp, Homo sapiens
cgggactctggggaaaatggctgcgtcttcgagtgggtcctgtattaataggaagttcacatggtggtgtcaacattgaagatgttgctgctgagt

SEQ ID NO: 771172 - DNA, 82 bp, Homo sapiens
ggggagcggtacctcgcctcggtgcagggctccgccccgtcgcctggaaaggtgtggtggacacaggcctattcatcaacat

SEQ ID NO: 771173 - DNA, 75 bp, Homo sapiens
cctgcatccgagtccccgggagtgatgcctcttagtcttctcagccattcaacaaagacagttatggacttcgtg

SEQ ID NO: 771174 - DNA, 92 bp, Homo sapiens
cgagcgcaaggacagcgcgaggtccgcgcagcccagcgcagccatgtactccaaagattcaggtttactcacgtcatccagcagagaatgga

SEQ ID NO: 771175 - DNA, 100 bp, Homo sapiens
tgacataacttcccatccagccaggagtctgcactcttcagtctttgcagattgtaaaccatggctgtgtggatacaagctcagcagctccaaggagaag

SEQ ID NO: 771176 - DNA, 83 bp, Homo sapiens
ctgaagtagcaaaggcaagaaggcaacgacgttccatctgtggaaggacctaccaaccagctcattgctatggacagtgctat

SEQ ID NO: 771177 - DNA, 90 bp, Homo sapiens
cagcgggaaccgcaggcgccgaagcccggccgtaagaactaaaatggtctactgcaaaattgatcagacccagagaaaagtagttgtcag

SEQ ID NO: 771178 - DNA, 74 bp, Homo sapiens
tccctttccagaagatgattccaacgccaccaattccaacctggcagaaggagaagacagcctgaagaagatgc

SEQ ID NO: 771179 - DNA, 75 bp, Homo sapiens
gccacactgtgtgctgtgagagctgcgccgcccagctacaggatactatttttgagacaacaaattaaggaactt

SEQ ID NO: 771180 - DNA, 100 bp, Homo sapiens
cgcaagaccttcaatatcaaaaatgactttactgaagaggaggaagcccaggccaagatcaaggctcgagatcttcgcgggaagaagaaggaggagctgc

SEQ ID NO: 771181 - DNA, 75 bp, Homo sapiens
tgctgacttacgcttgtttgagggtgctgataagactgtgaaaggcccagatggactgaccgcctttgaagccac

SEQ ID NO: 771182 - DNA, 50 bp, Homo sapiens
caaaggagagctccgtggagagaagatgatgaggagtctgatgaggaagc

SEQ ID NO: 771183 - DNA, 74 bp, Homo sapiens
tcctccgggaccggagtcagaaccctccgcagagtaaaggcggctgagccagaggccaactgcagaggaactgg

SEQ ID NO: 771184 - DNA, 117 bp, Homo sapiens
ttggaagtgtgaaagcattgatggaatgtgctttagaagttaaaaaggacaaagtggccttggagagtatgcctctgctaggcttcaccattgctccagaaaaggaagagggcagca

SEQ ID NO: 771185 - DNA, 73 bp, Homo sapiens
accaatcaccatggaccttactggtgatctgtgaaaatggttcgctattcacttgacccggagaaccccacga

SEQ ID NO: 771186 - DNA, 50 bp, Homo sapiens
gcggaaacctggagtggaaggtctggcttcagccttgtcatgaaccaccc

SEQ ID NO: 771187 - DNA, 75 bp, Homo sapiens
gcacgctgctggtcagccagttccgctcctgtcagggagagctggtgacggcctccaaggccatcattgaaaagg

SEQ ID NO: 771188 - DNA, 82 bp, Homo sapiens
cgggatctaaagccagaaaacatcgtcctgcagcaaggagaacagaggaacccagtgacttgattgtaaaaatttacagagc

SEQ ID NO: 771189 - DNA, 80 bp, Homo sapiens
cgccttgggacagggggatttggaaatgtcatccgatggcacaatcagatgtgtcttgctgaatcagggctctcttatcc

SEQ ID NO: 771190 - DNA, 100 bp, Homo sapiens
agacatcgaagcagggcgaggcgcagagggcgttgcggactcatgccccagtcggcagtgcggcaggatgaagttaaaggaagtagatcgtacagccatg

SEQ ID NO: 771191 - DNA, 100 bp, Homo sapiens
gatgctggaaaacttccagaacctggcctcactaggttccccgaggaaaccgtggcccgagcgccggccaccgcggcccgctgcgaccaggacagcgccc

SEQ ID NO: 771192 - DNA, 82 bp, Homo sapiens
cccccaaactgtcacagaaagagctgttaacacttcctagataacgggaaattttgtctgtggctaaaaaaaataaaaagga

SEQ ID NO: 771193 - DNA, 100 bp, Homo sapiens
gaatattctgttttgctgcccgaagcttggggagcgtgttcaatacgtggaaacccatgtgggttgtattgttagaagatggaattgaattctataagaa

SEQ ID NO: 771194 - DNA, 74 bp, Homo sapiens
agaggcccaccctggagtaaccctcactggagaatccagagaacaccttccaccatgaccacctcagcaagttc

SEQ ID NO: 771195 - DNA, 50 bp, Homo sapiens
ggataatcttcccctccatcgagacctgatggccaaaagaaaggaagaaa

SEQ ID NO: 771196 - DNA, 76 bp, Homo sapiens
ttctcagaggacgccttcaacaccaccttcatctccaccatcggtcatcttccacgatgttgctgtgctgacggat

SEQ ID NO: 771197 - DNA, 100 bp, Homo sapiens
atcatggtgtcaggaaagctggatgctgtcatgaaagctcggaaggacattgttgctagactgcagactcaggttgtggcagcactgcctgaaggtatga

SEQ ID NO: 771198 - DNA, 75 bp, Homo sapiens
cgagcgcttgatgtgcgcggagagcaatcgccgggacagctgcaaggtcgcctgcgaggccgctggccaggcctg

SEQ ID NO: 771199 - DNA, 74 bp, Homo sapiens
gtggcatctcctctcacggatgcctcgatgacaacggcaacacgacaagaagtccttggcctctaccgcagcat

SEQ ID NO: 771200 - DNA, 90 bp, Homo sapiens
tggaaattgccaaacaatctgtgactattaagaccatgttggaagcctcctgacaaggtgatccgggcgggccccgcaggaattttatcc

SEQ ID NO: 771201 - DNA, 89 bp, Homo sapiens
ctagttaagtcccaaggtgtcaacgacaatgaggagtactgcagactatgccatgttcaaggtgggacctgaagctgacaagtaccgcc

SEQ ID NO: 771202 - DNA, 90 bp, Homo sapiens
gtgaagaggcttctgaaactacacaaggaccgctctggattaatcgaattacagctgctagccaggaacatggactgaagtatccagcgc

SEQ ID NO: 771203 - DNA, 51 bp, Homo sapiens
atcgtcagcatccgaagaatccagaatggccaaagttttctggtcttggat

SEQ ID NO: 771204 - DNA, 98 bp, Homo sapiens
acgatgccggggatcgacaagctgcccatcgaggagacgctggaggacagcccgcaggtttaagaattgtttaagctgcatcaatggagcacatacag

SEQ ID NO: 771205 - DNA, 100 bp, Homo sapiens
ccaagtgccatcttcaaaatttcaggtcttaaatctggtcctgagggagtctaacaagttagcagaaatggaagaaccacccttgcttccaggagaaaat

SEQ ID NO: 771206 - DNA, 83 bp, Homo sapiens
cgcctggcctcactcaaacagtaaacgagacaggtgctctagttcacagctataggggaacaggtggaatatttgaagtttgc

SEQ ID NO: 771207 - DNA, 80 bp, Homo sapiens
gatctcgggctcggaacgagactgcacggttatacattggctcttcaaagacgttcacctcatcagagaaatccctgact

SEQ ID NO: 771208 - DNA, 100 bp, Homo sapiens
agtctcccattagaatatcagtatccacagaaggagcaaatacttcttcatgccccttcacagatgtagtcactacaaatcttaaattgcgaaatccatc

SEQ ID NO: 771209 - DNA, 96 bp, Homo sapiens
ggcatggtcatattacatcggatatctgcggctgatcctgccagttgtggtcagaaatgagaagacatgaaatgttgagggaggagctgcgacaga

SEQ ID NO: 771210 - DNA, 100 bp, Homo sapiens
ggaaatgcatgtgcaaggcaggatatgaagagaaaaatggcacctgtcaaggtgtaccttcagttgaatttttagaatctcccattacggcagtagacag

SEQ ID NO: 771211 - DNA, 74 bp, Homo sapiens
aactatgatcccattaccacagcaacagatatgtggaacatgcttaccctgctgatgaactcatgcctttaacc

SEQ ID NO: 771212 - DNA, 100 bp, Homo sapiens
ctagaatcaactgagagagatgcttaaaaatcaccagttactttaatgaggttacgactcactgattaaaaagagggactttttcaaatactttgcactt

SEQ ID NO: 771213 - DNA, 76 bp, Homo sapiens
gaaaagctgaggaagcaggcggagaagagacaagcatttaaatcaaacggtattgagatggattgggttatgaaac

SEQ ID NO: 771214 - DNA, 99 bp, Homo sapiens
cccgagcggaactggagaaagctgagggtttctgctttgggacaaccatacatctaattccttaaagtagttttatatgtaaaacttgcaaagaatcag

SEQ ID NO: 771215 - DNA, 90 bp, Homo sapiens
tgaacccacatgcctctaccaatggacagctctcagtccacactcccaaaagggaaaggttgtgcagcctgactctgaagaagctggtgg

SEQ ID NO: 771216 - DNA, 75 bp, Homo sapiens
ttacaggagtcctccacttgccactggttccgatgaagttaaattccgtcaagatttaatgaatattgcgggcac

SEQ ID NO: 771217 - DNA, 50 bp, Homo sapiens
attggatgtgaaaatgaagccagaccgagacaggcaaatgtacactgggg

SEQ ID NO: 771218 - DNA, 82 bp, Homo sapiens
cccagaccctggagcctcagttggaagcagccgatccagcctgcggagcctgtggggcaggacactcatgaggaccatgata

SEQ ID NO: 771219 - DNA, 100 bp, Homo sapiens
gcagctcacctttgtgctgaagctgccctacgcctggtcaaacctggaaatcagttaatagggaaaggaagtttggtgatggaggggcagaaacacctga

SEQ ID NO: 771220 - DNA, 75 bp, Homo sapiens
aaattgggaacaatcaatgagaggccggagaaggatgataaagactatgctttaaaacaaatagaaggaactggg

SEQ ID NO: 771221 - DNA, 100 bp, Homo sapiens
cccatgccatcagtatgagcgcctatctgcgagaacagagaagggagctctatagtcggagtggagaactgcaagagttgaacaatgaccatagttgaca

SEQ ID NO: 771222 - DNA, 100 bp, Homo sapiens
gcgccgctgctcccggaccgggccgcgcacgccgcctcaggtggatggggaaggatttaagaacactttggaaacttcatcgttgaacttcaaagtaact

SEQ ID NO: 771223 - DNA, 75 bp, Homo sapiens
caggagagcgccaccttccttgaagttgcagttgccaatacctatgcctgtaaggggctagacaggattgaggag

SEQ ID NO: 771224 - DNA, 101 bp, Homo sapiens
aagaaagctgcggcctgtatcaccagaggagattagacgtagcagattaggcatatatggtgctggttgtctcattacggaaggatgtcgtggagagggag

SEQ ID NO: 771225 - DNA, 100 bp, Homo sapiens
gccttgaacgtctggactctagggaccctgctgaatagctggggctacaggcgtgtgtcactgcgcccaggctccagtgatcattctacatatattgtac

SEQ ID NO: 771226 - DNA, 100 bp, Homo sapiens
gaccgagaggttcagggagctgttgctgtatggccgtaagaagctggtaacatcaggagtcagttcctatcagcatacatctgtgacattggagttcttc

SEQ ID NO: 771227 - DNA, 98 bp, Homo sapiens
gccggaagctggttttcaggccacaaatgctttcacagtgactgtcgggcctccagaaaacattgaggtgaccccaggagaaggctccctcatcatca

SEQ ID NO: 771228 - DNA, 100 bp, Homo sapiens
gggaggcagcgcgggatcccagcctcaggcgtgcgcggacggtgtgcgggagctagagttaatgccaaagacagcaaatggttgacacctttacacagag

SEQ ID NO: 771229 - DNA, 50 bp, Homo sapiens
taataccaagaaagccccacttggccagcgatctgtacatgagacccagg

SEQ ID NO: 771230 - DNA, 90 bp, Homo sapiens
acagtaccctcccattcctcccatgctactgctgtgaccacctcaaacatcccagtcggttcctctcctggctgaaatttatggtataga

SEQ ID NO: 771231 - DNA, 51 bp, Homo sapiens
gtggtaggctatgaccacgagaagccagattgttaaaggaaatgggctggc

SEQ ID NO: 771232 - DNA, 87 bp, Homo sapiens
ccggtctccggtactggagccggcggctgcggccggcagccggcagctttgcagcgggtctctaattaacagaagatggcaaagccc

SEQ ID NO: 771233 - DNA, 151 bp, Homo sapiens
gtattgtttggagccaggtagagtgaagtcctacagagttatcaggttccagaccctgccttctcttctgaaagggtgctgaaaagtcacccaccacttcagctgaccttaagtcagacaaagccaactttacatcccaggagacccaagg

SEQ ID NO: 771234 - DNA, 96 bp, Homo sapiens
tcagacagatcgccggggaggcagcgcgggatcccagcctcaggcgtgcgcggacggtgtgcgggtaaaaagaacgtattctcatggtacttacag

SEQ ID NO: 771235 - DNA, 100 bp, Homo sapiens
ggtgacctgcacccgcttcaccgacgagtaccagctctacgaggatattggcaaggtgactatgaccagagcaggaccaaagtgctgcacatgagcctga

SEQ ID NO: 771236 - DNA, 75 bp, Homo sapiens
gtcgacggtccccactttcccctgagcctcagcacctgcttgtttggaagtaccttctccaggcaaattccgttc

SEQ ID NO: 771237 - DNA, 100 bp, Homo sapiens
gttctgacaagatggccgggctgccccgcaggatcatcaagtgatgtcttggcattgcccattttcaagcaggaagattccagccttccattggatggtg

SEQ ID NO: 771238 - DNA, 100 bp, Homo sapiens
gcggccgccgcaagaaagtgtccttcgaggccagcgtggccctgctggaggcctcgctgaggaacgacgccgaggaaggacacagtgcgtaaggtacctc

SEQ ID NO: 771239 - DNA, 75 bp, Homo sapiens
tgtatcaagtaatggtgcaaagcctgaagcactaactgtgacatctatgaccttttttatcatcgcacaagcccc

SEQ ID NO: 771240 - DNA, 90 bp, Homo sapiens
tgtggtacagagtgttgagaagtttattcagaaagttattattgcagcagaactcctaaaaaatgcagatgaattagtcaaacagaaaat

SEQ ID NO: 771241 - DNA, 100 bp, Homo sapiens
gctgtggataacgggaggtgaatttccatgtcaacatagtcctgataatcaccagaatgggagtgaatgacttgtggcaaattttggagcctgttaagca

SEQ ID NO: 771242 - DNA, 100 bp, Homo sapiens
ccttaggagataatgaagagaggaccagagtatctactgacaaaagacaggttgcagtattttacagagctagcccaaggcacaagatgaaaattattaa

SEQ ID NO: 771243 - DNA, 100 bp, Homo sapiens
ccagcctcaggaatttatggtcgcctttttgaatgaggaactgatgaggagtttcaacagagacaggcggattttttgtgccattctctccactcacagc

SEQ ID NO: 771244 - DNA, 87 bp, Homo sapiens
gagacagtcatggggttgataactcgcatgtttaaacaaactgctattgccaaggcttaccttcaacagactcaagaactggttata

SEQ ID NO: 771245 - DNA, 75 bp, Homo sapiens
tccttcggcagtccacccaccgccgccgcctcccagtttttccagaaaggaggagtcaaggaagcccttagtgaa

SEQ ID NO: 771246 - DNA, 50 bp, Homo sapiens
aaaaagtatcgtcgagaagcctatcatcgctgttaaacgtttaatgaaag

SEQ ID NO: 771247 - DNA, 74 bp, Homo sapiens
cagccttggtctgagtggactgtcctgcagcatatatagcagtgacgaggatgatgaggactttgagatgtgtg

SEQ ID NO: 771248 - DNA, 83 bp, Homo sapiens
gcaagaaccagttaactgtacaaactacacagctcatggaactgtggctgcaccatctgtcttcatcttcccgccatctgatg

SEQ ID NO: 771249 - DNA, 75 bp, Homo sapiens
gacagctctgcggctcgggccctgaggatttaagtgccctgtatgctcaaaatttgtatcctcagatgaaatgga

SEQ ID NO: 771250 - DNA, 100 bp, Homo sapiens
ggaaaggtctgccttacaagggacaccatagcctctcaccctaaggggcttcgtgggacacatatgcaacatgcctatgatttttacaagcctgatatgc

SEQ ID NO: 771251 - DNA, 90 bp, Homo sapiens
agcggcgccgagaggccgtgcgggacgcgggcgccaggaccggccgaacgcagagggtggtgatcatgaactcgatcctggagcgcatgt

SEQ ID NO: 771252 - DNA, 75 bp, Homo sapiens
ctccacggaaagcagcttcagcagcactccagaatatcatcacccttgcagaaactggctctctggacttcagaa

SEQ ID NO: 771253 - DNA, 90 bp, Homo sapiens
caccgcccttcgcagccgcctctgccgccgccgccgcgttggcctcgccgcccctgctcggattgaaagtggagctgtttggaaacaagt

SEQ ID NO: 771254 - DNA, 100 bp, Homo sapiens
acagccggttcaccagcctggacaaaggagagaatgggactctcaggatcgctggtgacacagccctcaacaaaaacatccacgagtccgtcagcgccca

SEQ ID NO: 771255 - DNA, 90 bp, Homo sapiens
ctgctgtaagacagtctaaactacgaaatacaccttatcagattcagtttaaggagaaagtgctgtggaccgctatcaccctctttatct

SEQ ID NO: 771256 - DNA, 83 bp, Homo sapiens
cgcaccgccagcgacctccgccgcagagtcccaccgccacagggagtaccctgacttctaccggaagctctacggcctcttgg

SEQ ID NO: 771257 - DNA, 73 bp, Homo sapiens
accagctccgaaatcaccaccaagtgtggacgaatgtggaacctcgctctgtggctgtgttcccttggcactc

SEQ ID NO: 771258 - DNA, 100 bp, Homo sapiens
gtaatcaaagacggcaacgcgcttatcagcgctatgagaactgatgaaaccaaggccctgaaaggttcaccaagttgccagggtcgtgcagatcaacaaa

SEQ ID NO: 771259 - DNA, 75 bp, Homo sapiens
gaattttccttgatggtcaaaagattaagaaattttactgcaggataaaactccaggataaaactgtcaagtgcc

SEQ ID NO: 771260 - DNA, 100 bp, Homo sapiens
atccataatcctcaggccttgagtcctcagttcacaggctgatgcacctaatccaggactcattccagatgcagatgcagtaggcgtaactgttgtgcta

SEQ ID NO: 771261 - DNA, 109 bp, Homo sapiens
cgcgcccgggaggaaggaacgaggcaaggagctaaagcagcgtgcgttcagccctggggtgtccctggccagtgtccttccacctgtccacaagcatggggaacatctt

SEQ ID NO: 771262 - DNA, 75 bp, Homo sapiens
catcctggaacacatattactcaaatacagagaaatatgaacagggattcatcacagaccctgtggtcctcagcc

SEQ ID NO: 771263 - DNA, 75 bp, Homo sapiens
tcggctctgcgcctctgcccgcggatctggggcaacctggtacaagctactctccagagagaccggatcttcaaa

SEQ ID NO: 771264 - DNA, 90 bp, Homo sapiens
gtttatctcaaggcctgagtagccggtaacaaacgagggttcccgggattggaccgacgcagccatgaatctcgctctgtcgcccaggct

SEQ ID NO: 771265 - DNA, 100 bp, Homo sapiens
aacaccctggaagccgagaaatgattgacctgcgttacgaagctcagaatctagaacacttccaggtcaacttccggaatgtgaaagccgtcaagttccc

SEQ ID NO: 771266 - DNA, 101 bp, Homo sapiens
gactgcggccacgcctgaaaggcgactctcctgtttggtgcacctcgatttggaggaagtagggcagggcccttatctggaaagaagtttggaaaccctgg

SEQ ID NO: 771267 - DNA, 50 bp, Homo sapiens
gttgtgccagcgactaaaaagagatatccagttctggaacagccggcagt

SEQ ID NO: 771268 - DNA, 98 bp, Homo sapiens
aaaggcaaaggcaaaggcggctcgggagattcagccgtgaagcaagtgcagatagatggccttgtcattaaatttgacggtggagaggaagtacttat

SEQ ID NO: 771269 - DNA, 100 bp, Homo sapiens
tcactaaaggtcactttccgaagatggctgaatgtgcgcatttccattatgagaatgttgagttcggcagcatacagcttggaactgcagttggcttttt

SEQ ID NO: 771270 - DNA, 100 bp, Homo sapiens
ggaacgacagccagggccaggttcttgatggccagtctcagcatctcttccaacagaaccaggcctccccatggccacccatggaccagtcggcattcac

SEQ ID NO: 771271 - DNA, 83 bp, Homo sapiens
cttcgagtgacccgggtgccgaggagcgggaagagttgctgggtgtactaatggtcacttgatgtgcgctggctgttttatcc

SEQ ID NO: 771272 - DNA, 58 bp, Homo sapiens
cagattcgcagtggtcgcttcttctccttggagaggccccctttcatccctgaaggag

SEQ ID NO: 771273 - DNA, 98 bp, Homo sapiens
agagatgaggccggagcccaccaagttctgggaagtggccctggtacagtggacggaaagtgtgggcttaaccctggtgggccgagaccagtcttcca

SEQ ID NO: 771274 - DNA, 82 bp, Homo sapiens
acatgttcacgcacgggatccagagcgccgcgcacttcgtcatgttcttcgcgccctgtgtctgcgagattaatctctcatg

SEQ ID NO: 771275 - DNA, 96 bp, Homo sapiens
aggaggcctcggttggatgcgaaggagctgcagcatccaggctatgtccaaactgggtcttcggcaggttacaggagttactagagtcactatccg

SEQ ID NO: 771276 - DNA, 75 bp, Homo sapiens
gttcacacaaactggtcagcgtttccctggagaggaagaggcaaggaggagccattggatgaaagctcagtgaag

SEQ ID NO: 771277 - DNA, 83 bp, Homo sapiens
cctcctcctctaccgtcaccgaagacttcagcgaggattccgagactcaaagtcctctggctcacagcctctcagccctgcag

SEQ ID NO: 771278 - DNA, 100 bp, Homo sapiens
ctctagcagacaagatcagatccacagtatcgtcagtgaagcaggagcatcaatctacagtgtcagccctgaagctaacaaagagatgccagggctggac

SEQ ID NO: 771279 - DNA, 100 bp, Homo sapiens
cttcataaaatgattcgactcattacgcatgggcttggtggagaaggctatctcaatttcatggttaatggccagccaagaccccttgaatcaagtcagg

SEQ ID NO: 771280 - DNA, 76 bp, Homo sapiens
tgtgtttgtgaaacagagaaagataggcggccatggtccaaccttgaaggctgaactccagtgcacccagttagac

SEQ ID NO: 771281 - DNA, 75 bp, Homo sapiens
caagggctgtatgagctctcagcaagcaactttgagctgcacgttgcacaagagctgctgggccgctacccggag

SEQ ID NO: 771282 - DNA, 100 bp, Homo sapiens
cacacattgcgcagtcgggaccatcgccggagcctgaggacacttctctgtcgtcacagttagtccattggaaatgctaaaacaaccaggaatgataata

SEQ ID NO: 771283 - DNA, 85 bp, Homo sapiens
cctctcgccaagggccccaatgagtggcacacagtctactatcaccgacagatctttataaacaacgagtggcagaactcagaga

SEQ ID NO: 771284 - DNA, 82 bp, Homo sapiens
gaagccgctcggccgcgtggtgctggagctccttcccgaactcacaaatcctgacgagctcctgtcttatctggaccccccc

SEQ ID NO: 771285 - DNA, 75 bp, Homo sapiens
tcggagcttcgctcggaagggtctttgttccctgcagccctcccacgataacgaaggaggcccaacttcattcaa

SEQ ID NO: 771286 - DNA, 82 bp, Homo sapiens
aagaaggaagtcatcatgggccggcctggaacagctgcctgtggaggaaccgattgtgtccacagatgaggtcatcttccca

SEQ ID NO: 771287 - DNA, 75 bp, Homo sapiens
tccgctcctcctgcttttctacccgtcgtcacccgggagagccggaggtgttcttcaacggtgccaacgtccggc

SEQ ID NO: 771288 - DNA, 83 bp, Homo sapiens
gttttcccctcggcactaggcagcggaggagcccgaccgacccggccttcctggatgctctgcagaaccaggctgaggccagc

SEQ ID NO: 771289 - DNA, 80 bp, Homo sapiens
caacccagcacagcaaggcagtcacaccaagacctgcctagagctggaacgttacctccagagcgagccctgctatgttt

SEQ ID NO: 771290 - DNA, 98 bp, Homo sapiens
caatagctcaaggaaacctttccaacacagatgtccaagctgccaacatttacacagatgtggaagacatgaaagagcaagaaatagtgagcaggata

SEQ ID NO: 771291 - DNA, 75 bp, Homo sapiens
ttttggcaagagttggatcaacccagagctattgccttagatccttcaagtgggagctgatgcagcagaatggga

SEQ ID NO: 771292 - DNA, 98 bp, Homo sapiens
aagaatgggggtatgctacagccacctcttgatatcagaaaaccaggactctgcagatgttgatcctcaggagcattcatttactcgaactattgatg

SEQ ID NO: 771293 - DNA, 83 bp, Homo sapiens
ctcaattacacttcgactctcaaagcaataccaggatagctgttgtttcagagaaagatgcggcattccaaaagaactcactg

SEQ ID NO: 771294 - DNA, 100 bp, Homo sapiens
gaaaggatgacatatttttggacctgaaacagaaattctggaacacctatatggttgatggacggatggctacatggatgtgatggagatggtttactat

SEQ ID NO: 771295 - DNA, 100 bp, Homo sapiens
ggctcggcggcgggcggcagcatgtcggtggcggggctgaagaagcagttctacaaggcgagccagaagctgttgtgaaggcagagcagcatctgctgaa

SEQ ID NO: 771296 - DNA, 75 bp, Homo sapiens
ttgtaatatacttcatagattcatcaaatagccggatcgagctgggagatgtgacaccacacaatattaaacagt

SEQ ID NO: 771297 - DNA, 100 bp, Homo sapiens
ggaggagccagtatctgtgtcgccgccgcccgcggcgtccccggtttggtgttgcggcgcccaccttcgggaggatcagatggcccactgcgtgaccttg

SEQ ID NO: 771298 - DNA, 76 bp, Homo sapiens
tcggctgctctgggggattcgtgcgcggaaattcagtgaacattatcactccttgtgtaaagcagtgcatcaccta

SEQ ID NO: 771299 - DNA, 75 bp, Homo sapiens
tggaaaaccagttattgaatatcaagaggaggagttgttgatttatgtgatcagtttggctgaaccccgtctgcc

SEQ ID NO: 771300 - DNA, 101 bp, Homo sapiens
atcgattctacatgattcagtccttcacacagttccctggaaatgggctatacaaagcggaccagcggtttgggccaggtgtcgagacctaccccgatggc

SEQ ID NO: 771301 - DNA, 96 bp, Homo sapiens
tgaaatgaaagctcctttggtttgtctaccagtttttgtctccagagacccagatattaatgcacacgcctgtgttactggtaaacccatcagcca

SEQ ID NO: 771302 - DNA, 100 bp, Homo sapiens
gtaacccagatcgctactaccccgcagttcccggacatgatcctctccgcctctcgaggtggataataatgtcacgaggcatttggataaagtattaaaa

SEQ ID NO: 771303 - DNA, 100 bp, Homo sapiens
ttgcgggcagtggacgcggttctgccgagagccgaactgcacctactactggggcttcgccgcgtggatggcctattacatcaatcaccctctctacact

SEQ ID NO: 771304 - DNA, 100 bp, Homo sapiens
tacggagcctgcagagggtcccacggtggaagcgagagaggaggactgggactcttcaattaatctgacatttcacaaatccaaaattgccgtggatgaa

SEQ ID NO: 771305 - DNA, 75 bp, Homo sapiens
tggcaagagaatactacagtgaagctgatgccagagatggggtctcaccacctgcccacgctggtcttcaactcc

SEQ ID NO: 771306 - DNA, 95 bp, Homo sapiens
tttaacatttgggagaaacacagccagaagggtgataaaagaaaatgtggctgaagttacccgaagttcagcttgcagtgtaattcagaagagtt

SEQ ID NO: 771307 - DNA, 100 bp, Homo sapiens
gccacggccgtgagccggccctgcgccggcaggtcgcgggacatactgtggcgcggtgatgatgatgcttatctgtgtattcatgaagatcagactgtgt

SEQ ID NO: 771308 - DNA, 74 bp, Homo sapiens
gcggctactgcaagaacgagtcgggcagccgctccaatggtacatacctaggagtattaattggcatttatgga

SEQ ID NO: 771309 - DNA, 145 bp, Homo sapiens
aggagccgccgccgccgccgccgtccattcgctgcggagccggaggaggaggggagaggcctggaggacaccaacatgacaggaattccaggcttggactggagtgaagccctcaagatccacaaagacaaaaccagcccgagtc

SEQ ID NO: 771310 - DNA, 90 bp, Homo sapiens
tcttgaatgaatgaaaaactgtggatacaagggaggctgccggcgtggaccgcgggaaggcggggctggggctcggcgggaggccacccc

SEQ ID NO: 771311 - DNA, 82 bp, Homo sapiens
ctaacttctactgacgaagcttggaagttgcagaagatatcccgatgtctgtgggtataatcgatcctagggctaatccaac

SEQ ID NO: 771312 - DNA, 100 bp, Homo sapiens
gaaacagaagatgagattatgcctgaggttgtggaaaaggaagattactcagagattatagggagcatggtgggtttgttgaagcagttgctggtgcaac

SEQ ID NO: 771313 - DNA, 98 bp, Homo sapiens
cgagccgcaggagagacacgctgggccgaccccagagcggcgctggacaggccatcagcatcagcaaagccatcaacacccaggaggcccccgtgaag

SEQ ID NO: 771314 - DNA, 100 bp, Homo sapiens
agtgaggccaagctccagtgtcccacttgcatcaagctgggcatccagggctcgtacttctgctcgcagctgagatctgtatctgtggacctgaatgttg

SEQ ID NO: 771315 - DNA, 98 bp, Homo sapiens
ctcattgatagcttacgggcacagagatcccggtacatgaaggctgtattcgtgcctggccaatggcagtgcggatgagtttcagcgaggggatcagc

SEQ ID NO: 771316 - DNA, 75 bp, Homo sapiens
ctaactgtgtgccttagaaaccagagcttctcgaaacaagtctgagaagaagcgtcgggaccagttcaatgttct

SEQ ID NO: 771317 - DNA, 50 bp, Homo sapiens
ggaacccgacatggattccacagtgttctaagaacggaagcatctgggct

SEQ ID NO: 771318 - DNA, 50 bp, Homo sapiens
ggaagcgcggggcggcggcgaaaggacgaatctcattttcagcttctgcc

SEQ ID NO: 771319 - DNA, 50 bp, Homo sapiens
ctttttgccataaattctaacaacaaggctttttgcatttgggggaacat

SEQ ID NO: 771320 - DNA, 49 bp, Homo sapiens
ccttttccctctccctttccctaaggcggccgcccgccttggcccgtct

SEQ ID NO: 771321 - DNA, 99 bp, Homo sapiens
aaccgcagtatcatgctggccaagaagatcatcattaaggacggaggcacgatatttggatttgacctgcattttggaatttatctacacttaaaatgc

SEQ ID NO: 771322 - DNA, 98 bp, Homo sapiens
ccgggcactgttgctgctgcgggaggttaatgttcgtgaagaaattgaagagttttttccaagaatgtggaagataaatcaagataaaagaaggctaa

SEQ ID NO: 771323 - DNA, 158 bp, Homo sapiens
ttgcaggtgccagagaaatcctcccagaaggagctggaggccatgggcttgggcaccccttcagaagcgattgaaattgaatacttggacctcagccaacctctcgaacagtattcacctagttaccctgacacaagaagttcttgttcttcaggaga

SEQ ID NO: 771324 - DNA, 75 bp, Homo sapiens
gtcgtgttctgatcactactgacttgttgcatctgatgctgttcagatgcagagagagtggagctttgcgcggac

SEQ ID NO: 771325 - DNA, 100 bp, Homo sapiens
atgttgtcctgtgctggggctgacagagagaatggcttactacacctccaggatgcagttccccatggagatggcggcagctccgggacgaccagggcct

SEQ ID NO: 771326 - DNA, 100 bp, Homo sapiens
aatttcaagcctgccagagtttgaaaaatcctctttatcagatcaatcatcggtgcgagcccctatggttaatccaacattaggtgttcatgaagctgac

SEQ ID NO: 771327 - DNA, 82 bp, Homo sapiens
gacgacttgtctttcaagaaaggagagaagatgaaagtcctggaggaaatttaattccttttcgaccttcaatccagttcca

SEQ ID NO: 771328 - DNA, 88 bp, Homo sapiens
accgcaagctgagcgagctgtcagagcccggggacggcgaggccctcatgtaccacacgggtttggaaatcccttgtctccaggttgc

SEQ ID NO: 771329 - DNA, 100 bp, Homo sapiens
gagagaaactctataatgtcatcagcctcgagtttagccacaccaggctggagaatatggtgcagaggccctccacgctccttgctcggattgaacgtat

SEQ ID NO: 771330 - DNA, 75 bp, Homo sapiens
tttggggttgccatcggcccgtagtatgtgaaaaagccggcgattagatactgaagaattaagtttgccagatat

SEQ ID NO: 771331 - DNA, 85 bp, Homo sapiens
aagattgaaggaaggtgatacaatgatggggcagcaagtggccaagtcctgtgaagtcatagactgggtgagtgaagatgatcag

SEQ ID NO: 771332 - DNA, 50 bp, Homo sapiens
ggaaggagtgacagatactaagccagttttcggctttgtgagaaacctta

SEQ ID NO: 771333 - DNA, 75 bp, Homo sapiens
cagcagcagcagcgcatctccttcaggcatctctgggaaaggacctggggctggtgaggggcccggaggagcctt

SEQ ID NO: 771334 - DNA, 83 bp, Homo sapiens
tcagaagtcactcgcagtcccgtcagcccagactttaagtttgccatgtacccaccgtcgatgatcgcaactggaagtgtggg

SEQ ID NO: 771335 - DNA, 82 bp, Homo sapiens
aatgctgatggtttcattgatctagaagagtatattgaaaatgtggacacagacttgccaggcagcctggggcagagtgaag

SEQ ID NO: 771336 - DNA, 100 bp, Homo sapiens
gagaaccctacttgcctaaatgaggaatgtctttcctaccatctaaaatacgaaggtttctggctggggtctccctctgttgtccaaggctggagtgtag

SEQ ID NO: 771337 - DNA, 50 bp, Homo sapiens
aataaacatacaagctacatttcgggtgagcgagtgctgtgctttcatgg

SEQ ID NO: 771338 - DNA, 49 bp, Homo sapiens
caagatggacaccgcggaggaaggtcgatccagtgtttacaagggaagt

SEQ ID NO: 771339 - DNA, 75 bp, Homo sapiens
gtgaagcaacttaatcgggatatcgaggaatgtatcctgtcaggtataatgtcagtgaatggcaagaaagttctt

SEQ ID NO: 771340 - DNA, 83 bp, Homo sapiens
ggcctacgtgcgggtggtcaccgagaagtccccgaccgactgacgagccaaactcaggctgtaccttgagcagctcaagcaac

SEQ ID NO: 771341 - DNA, 90 bp, Homo sapiens
ccgagcaaacagaggcgctcatccacagagccacatctgttagtgccggtggtggtgtgcacattgagccccggtatagacagttccccc

SEQ ID NO: 771342 - DNA, 100 bp, Homo sapiens
gtgtcttctcattgcagtcagcagaaaagctaaagaattacctccaaagccattgtcaagaccacagcagtcatctgcaccagtccagctgaactctggc

SEQ ID NO: 771343 - DNA, 75 bp, Homo sapiens
gaagcatcgttaaagtctctcttcaccctgccgtcatgtctaagtcagagggggagctgatcaccttctattact

SEQ ID NO: 771344 - DNA, 112 bp, Homo sapiens
cgggggtgaagcctcctgcgccggccttgcctcgggagctctgccagtgccggccgggagaaggcaattgctcctgctgtaaggagtgcatgctgtgtcttggggccctttg

SEQ ID NO: 771345 - DNA, 97 bp, Homo sapiens
ggacggcgcggcagagtccccgtacgcctacagtaacgctccaccgggggacggctacgtgcaggcggacgcccggggccccccggaccacgaggag

SEQ ID NO: 771346 - DNA, 99 bp, Homo sapiens
ctcttcctatgcacactgcaactacttccagtcccacccgctgtacctgtgcaatgccagtgatgacgacaatctggagcctggattcatcagcatcgt

SEQ ID NO: 771347 - DNA, 82 bp, Homo sapiens
ccgagaacgtgcgggaagagaagatcatcgagcatttcaaacgtcctcctgcatatgcccaagaggattgggagtggaatgg

SEQ ID NO: 771348 - DNA, 82 bp, Homo sapiens
ctgccaggcgccatcatcggcatagcccgggagatgcagccagtttacaggatcagttcttaagagcagccccggtaactgg

SEQ ID NO: 771349 - DNA, 74 bp, Homo sapiens
catctccaagcaatgttcattttactccgcccagaagacaacatcaggctgcctacagcctggctcccgcgacg

SEQ ID NO: 771350 - DNA, 100 bp, Homo sapiens
caacatgggaggatcaatgcagagaatgaaccctccccgaggcatggggcccatgggtcccggcccacaggatcttaagattgaaagtgatgttcaagaa

SEQ ID NO: 771351 - DNA, 74 bp, Homo sapiens
gccgcggtgaggagagccatgggacgggcagtcaaggccaagaataaggagacgggtgctttggctgcggccaa

SEQ ID NO: 771352 - DNA, 88 bp, Homo sapiens
ggaacacaaccatagcctgtttcgtagccatattaattgacacagaatttccaggtgttgtggtgcgaccaattggtgaatttcgtag

SEQ ID NO: 771353 - DNA, 99 bp, Homo sapiens
tagctaaacaaaccaagatagaatatggagcagtagaggatggtgcaaccatgacttttttcaagtggatgaggatcgcagtacggaacctgaccgatt

SEQ ID NO: 771354 - DNA, 82 bp, Homo sapiens
gcggtgacccgctaccggaaggccatcgccaaggtgagaagccctaccactgcaactgggacggctgcggctggaagtttgc

SEQ ID NO: 771355 - DNA, 82 bp, Homo sapiens
gtgattctttactcagctgagtgtgccacacaggtagccctggacggcattcagtgttttgcgtctgcttctgcgctttgcc

SEQ ID NO: 771356 - DNA, 73 bp, Homo sapiens
gatcatctgctacttttcctgcagcagttgggccacaattgctgccagtcggcaggccagctccccaaacacc

SEQ ID NO: 771357 - DNA, 101 bp, Homo sapiens
ggaccacaaacgagggccaagaggatcacaggaaacctcgacctgtctcccagttggttgcacagcaggttactcagcagtttgtgcctcctacacagtca

SEQ ID NO: 771358 - DNA, 75 bp, Homo sapiens
ctcatgttctgcacctcaggagggaattcagcctcagtgatgtccatgagactatatcatcatgtacatagaaaa

SEQ ID NO: 771359 - DNA, 51 bp, Homo sapiens
ggtggtcgcgttgactagaaaggtaaaaatgtctccatcgtatcatcagtc

SEQ ID NO: 771360 - DNA, 86 bp, Homo sapiens
gatcatgtctgcgagccaggattcccgacggcgggcgctaacaccaccgacaaggagctagaggttctctccttgcacaacgtcac

SEQ ID NO: 771361 - DNA, 100 bp, Homo sapiens
ctactgcagtgctttggacacttactatggttcgatctggggctaatgttctaatttgtggtccaaatggctgcggaaagagttcacttttccgtgttct

SEQ ID NO: 771362 - DNA, 100 bp, Homo sapiens
cagagcaagcgacaggagcggaagagaagaagcacagccaaccctgcctacagcggcctcctggagaccgaggtatagctgtggaccaactgtatatgat

SEQ ID NO: 771363 - DNA, 90 bp, Homo sapiens
gaattgcatgggaaaatcatggaagttgattactcagtctctaaaaagctaagaatagcctaacatggcagaccagagacagcgctcact

SEQ ID NO: 771364 - DNA, 97 bp, Homo sapiens
agaaggtcgcgaaggcagtaccgtttcctcagcggcggctgcatcttcctcccgtgaggctggccgagctccacgctgatctgaagatacaggagag

SEQ ID NO: 771365 - DNA, 98 bp, Homo sapiens
tggaatcccaacaagccctttgaccaagagacagcctggagctgttgcccaaagaattggaagtcatttagttccaactgctactttatttctactga

SEQ ID NO: 771366 - DNA, 82 bp, Homo sapiens
ctaaagcagcgtgcgttcagccctgggggtatttgtggtgcagcagattcccaacagtaacctcctcctcctggtgacagac

SEQ ID NO: 771367 - DNA, 100 bp, Homo sapiens
gaagaagcgcagaaaactcctccagcagatccggcttgcccagaaagagaagacagccatggaaggttcgtgctggccgtgggcagcgccgtctttgatg

SEQ ID NO: 771368 - DNA, 98 bp, Homo sapiens
gctgtccccttccaggtggcccagaaagagaatccagactccaaaatgatgcaaatcaacctgactggatttttgaatggaaaaaatgctcgagaatt

SEQ ID NO: 771369 - DNA, 75 bp, Homo sapiens
tctggcagttggtgagcatcatggcaaccgttgtgaaaccagcccagagaagttacgggatttgcccccggggct

SEQ ID NO: 771370 - DNA, 83 bp, Homo sapiens
gggcggtggctacggacgccggagccgcagccttttccccacgactctgaaagaggacagcgttcccaatgtcccagtttaag

SEQ ID NO: 771371 - DNA, 51 bp, Homo sapiens
tatcctcacagaaaactatgggggcaaatgcaaaccagtccagctacgggg

SEQ ID NO: 771372 - DNA, 99 bp, Homo sapiens
tcattcgtccttatgacagacaggaatctgagggctctgacttacttgagtttttagaagtacccagatttgacaaagaaaacccttttgaaggcctgg

SEQ ID NO: 771373 - DNA, 82 bp, Homo sapiens
cggattaaagctaaagacatagttcctggtgatattgtagaaattgctggttggcaacattgtacaagtcacccagccagaa

SEQ ID NO: 771374 - DNA, 80 bp, Homo sapiens
ccagtcggtgctccggggaggtcacctgacgaggagtgcctccggagccagcgtggtggccatagacaacaagatcgaac

SEQ ID NO: 771375 - DNA, 50 bp, Homo sapiens
gtctggaggagccttctcaagaacagaggcagccggtgaaggttgtgtac

SEQ ID NO: 771376 - DNA, 128 bp, Homo sapiens
ttgtctctgaaggagttcaagaattcccagaagaggcagcatgcggaaggcattgctgggagcctgaaaactgtgaatgaagccactggtgaaggaccgggaagctgagcttctgtactttgctgatg

SEQ ID NO: 771377 - DNA, 88 bp, Homo sapiens
gaggagcatgaatggagcaaaatggcggatcatgtgcaggaggagacatcacagctttcccagatcgggaggaaaaatatggaatgtg

SEQ ID NO: 771378 - DNA, 98 bp, Homo sapiens
caacagcgaggaagaagaggacgacgacgacgaggaagaggaggtttctgaggatcagttgtgtggccgggaccctactctcactgatgagctgctga

SEQ ID NO: 771379 - DNA, 74 bp, Homo sapiens
agatgtctgacagccctgtgtgacaccaagataagtaacaagcagggtccctgaggtcggtgctcaataaagag

SEQ ID NO: 771380 - DNA, 100 bp, Homo sapiens
gcgaatatcgtcatcgttagaagaccaggccactctggatgacatggagaagtctgtgaatgatgatatgaaacgaatcataccctggattcagcaactt

SEQ ID NO: 771381 - DNA, 100 bp, Homo sapiens
ttgaggaagagcgagccagcgcccggagcaagcggagctcccccaagagccggaaagaacatccagtcatggataaaaatgagctggttcagaaggccaa

SEQ ID NO: 771382 - DNA, 88 bp, Homo sapiens
tggaggcggcgggatggaggcggcggccgactatatcatcatgtacatagaaaaatccaaaggattctgcaaaaaagctactagaacc

SEQ ID NO: 771383 - DNA, 75 bp, Homo sapiens
tgcctcagcctcccgagtggctgggattacaggagacccggtgagcctccattgataaaaggttggcttccttat

SEQ ID NO: 771384 - DNA, 82 bp, Homo sapiens
tcccccccgcagactgagaagccgacccactacaggtgtctcccagtctgctaaagccctaaggccatcaccatggacttcc

SEQ ID NO: 771385 - DNA, 75 bp, Homo sapiens
cttctctcgcttcggactgcgcaacgctgcgctctgggctgacagcttcgggctcagaatcaggttctgaaaaaa

SEQ ID NO: 771386 - DNA, 82 bp, Homo sapiens
gacggtcgccgcccacggcgagtatcctagaaggaaaacatcaccatggctacagaaattggttctcctcctcgttttttcc

SEQ ID NO: 771387 - DNA, 82 bp, Homo sapiens
ttcacttcacctctttctggaaaccaggtgattgaaatctctgaatatcgaacccagctctatgaatatctacaaaatcgaa

SEQ ID NO: 771388 - DNA, 100 bp, Homo sapiens
aaaaaggataaggagatcatagcagagtacgatactcaggtcaaagcaaatccagtttgctgatgacatgcaggagttcaccaaattccccaccaaaact

SEQ ID NO: 771389 - DNA, 90 bp, Homo sapiens
gtttaaagtactttcaacaaaggaaaaatatattcagggggaagagatgtaatagatttcacattatggcagttactaaagaagcacgtg

SEQ ID NO: 771390 - DNA, 74 bp, Homo sapiens
cggcatccggctcccgcccgtcttcaggttgctccttcaggctggctacgacccagagctccgggacggggacg

SEQ ID NO: 771391 - DNA, 100 bp, Homo sapiens
ttgagatgatccttacggaaaaggaacagattgttcctaaaccagaagaggaggttgcccagaagaaaaagatatgagggaaggcaccattggagatatg

SEQ ID NO: 771392 - DNA, 100 bp, Homo sapiens
tgtagaaagtgaaatcagaggagatgtaactatcgatgctccagaaaacctagatgagcagattaagaaagtgtcccagcagatccttgagaagcgagcc

SEQ ID NO: 771393 - DNA, 100 bp, Homo sapiens
acgaaagctttcctaggccaaaaagagactacatgaggaaataattgacttttataacttcatgtccccttgtcctgaagaagcagctatgagaagagag

SEQ ID NO: 771394 - DNA, 100 bp, Homo sapiens
ggcagctccagcccggcccggcagcgacatggaagagttttgcggcctccaggtggtggatccaatttttcattaggttttgatgaaccaacagaacaac

SEQ ID NO: 771395 - DNA, 96 bp, Homo sapiens
ggggattttgtcagcttgtcgtcaaggttgaaatcacaaagattagacacctttttagataggtgttcttcagcaccactgacaacacggttctga

SEQ ID NO: 771396 - DNA, 75 bp, Homo sapiens
agccagcgccagctgcagccctggccgcgcactcgcctcagctgagcctggattttctggcatccttaaatcttg

SEQ ID NO: 771397 - DNA, 82 bp, Homo sapiens
cagccccccacagcagaaccccagctctacccacggtcctgaacgaggctgtgggggccctgatgtaccacaccatcactct

SEQ ID NO: 771398 - DNA, 101 bp, Homo sapiens
aaaaggaagtttgtcctgtcctggatcagtttctttgtcatgtagccaagactggagaaacaatcttatcatggatacaaccaaatgatggaatgcctacc

SEQ ID NO: 771399 - DNA, 100 bp, Homo sapiens
cctggaggcggcgggatggaggcggcggccggtgatggcccgctccctctccccacccccggagctggaagaaagggatgtggccgcatactcggcctcc

SEQ ID NO: 771400 - DNA, 73 bp, Homo sapiens
ggagcctccggagggaccaccagtgctctcgctccagggagtttatagcatctgtggattttggtacccacgg

SEQ ID NO: 771401 - DNA, 90 bp, Homo sapiens
gctgctgcttcaatgtccgcatcgcaaccaccgccctggccatctaccatgtgatgaagactggcccatttgcagagcactccaaccagc

SEQ ID NO: 771402 - DNA, 100 bp, Homo sapiens
aaacagcccagctcgcgcttcagcgtcccggcgccgtcgcgccactcctccgagttgtctgcattcaaaagagcattctattaaagctaccttaatttgg

SEQ ID NO: 771403 - DNA, 99 bp, Homo sapiens
aggggtacccctcagggaggccacagtccggggctggggcgctcattgatgcagtgatcacacaacaccttccaccatgaccacctcagcaagttccca

SEQ ID NO: 771404 - DNA, 100 bp, Homo sapiens
ttcttccagcttctgctgtccttctttgtggagagcaagagcaatggtggaacaaagcggcaaaagatatcccatcaaaattatatagcctatcaaaagc

SEQ ID NO: 771405 - DNA, 82 bp, Homo sapiens
gaaggcagagcgtgtggcatctccacctcaaggagctgcttatcatccagactttccaacagttctgacagctttagaaata

SEQ ID NO: 771406 - DNA, 50 bp, Homo sapiens
caggaatgggacctcgagtcactgtgacctgtcatttactccatccttta

SEQ ID NO: 771407 - DNA, 142 bp, Homo sapiens
gaggagatcgccacctccatcgaacccatccgcgacttcctggccatcgttttcttcgcctccatagatgaaatcatgcaccaggacatcgtcccgctctgtgctgccgacatccaggaccagctaaagaagcgctttgctt

SEQ ID NO: 771408 - DNA, 100 bp, Homo sapiens
ccatgatgctgctggaatctcctatagatccacagcctctcagcaaagaacagtctgaacttgatcaagatttggatgatgttgaagaagtagaagaaga

SEQ ID NO: 771409 - DNA, 50 bp, Homo sapiens
ccggaggcagcgggggaccggcaggcatacttttttgatgcaccagagat

SEQ ID NO: 771410 - DNA, 98 bp, Homo sapiens
aagaagataatcgtcaagcacgtgacggtcatcggcggcgggctgatgggcgccggcattgcccaggttttcccatcatatgattcccggtcctcctg

SEQ ID NO: 771411 - DNA, 101 bp, Homo sapiens
agctcctacttccagaaaaagtgctcctgggactccaggataccaggcgaggattaaatccaccacacagggtgaaatctatctccatgacaacattcaca

SEQ ID NO: 771412 - DNA, 86 bp, Homo sapiens
ccgcgctggtgcagccaccctcgctccctctgctcttcctcccttcgctcgcaccatggtaagaatgattgatgttggctgatatt

SEQ ID NO: 771413 - DNA, 100 bp, Homo sapiens
atgcttcggcattagagaaagagattggtccagaacagtttccggtcaatgagcactattttggattagtcaatgattgtcaccagacctgcaatctatg

SEQ ID NO: 771414 - DNA, 74 bp, Homo sapiens
cagccgtggagaacctcaagaacatcttctcaggcacgtggactccctttaatccagtgactgtcaggtcgatc

SEQ ID NO: 771415 - DNA, 100 bp, Homo sapiens
ttctttggtggctgcacctcattcatcatcttcatccccgagtaaggactcctcaagaggagagacgccacaggtcatcatctggatcatcccattctgg

SEQ ID NO: 771416 - DNA, 100 bp, Homo sapiens
cttgggaaagtagaagctgcactgaagaattgtccacttattgacaacatctgtgcttttgccaaaaggctacagatgcacatgttgaatggagctcttc

SEQ ID NO: 771417 - DNA, 90 bp, Homo sapiens
cccctccaaacctcaccagtaacaggagactgcagcagacccaggcccaggtggatgaggagctgactggcatctatcacaacaactatg

SEQ ID NO: 771418 - DNA, 82 bp, Homo sapiens
ggatccgcagccccttcgcgaagcccgagcgagaccgggcgacaggcaggttgaactcccaccacctgatcttggaccaagt

SEQ ID NO: 771419 - DNA, 97 bp, Homo sapiens
gaccagcagtatgacaccttccacaatggcagctgggtccacctcaccatcaacgaaagaagacatagctcatccagcaagccgcctttggccgttc

SEQ ID NO: 771420 - DNA, 100 bp, Homo sapiens
cagagcttgtgtagcgtcagatccttgagtgataaaggagtagaggaacaatgacactgccattgaaatagacaactgcagcagctacaagataccctct

SEQ ID NO: 771421 - DNA, 80 bp, Homo sapiens
gtacctttatgaaccagtgtatcccaactcttcacagaggtcctccaggatcaaggggaccactgattccaccactgctg

SEQ ID NO: 771422 - DNA, 89 bp, Homo sapiens
ggaaggagagaaaatggcgtccacgggctgaagccgacgtagcttctctgaacagacgcatccagctggttgaggaagagttggatcgt

SEQ ID NO: 771423 - DNA, 88 bp, Homo sapiens
gcgaagccaggcagcttcctgaagatgatgggctggagcaggtatctgatggtataattgccccaggatatgaagaagaagccttgac

SEQ ID NO: 771424 - DNA, 74 bp, Homo sapiens
cgtcacccttcctgcgattctacttagagacgagttgtactgctgtcacaggaaatggacgctggattacaagc

SEQ ID NO: 771425 - DNA, 83 bp, Homo sapiens
gagttgttgtctcggcagcgcccgcggagacgtgaagaggaactgtggctgcaccatctgtcttcatcttcccgccatctgat

SEQ ID NO: 771426 - DNA, 100 bp, Homo sapiens
cccggggggctgcagcgccgttagtgcccacgggccatcgatgcacccctcggagctaatagcggagatgagaaacagtgggtttgcactgaaacgaaat

SEQ ID NO: 771427 - DNA, 82 bp, Homo sapiens
ggactgactggggttctgagactccctgtcccggaccgcagatgtgaagttcatttccaatccgccctccatggtggcagcg

SEQ ID NO: 771428 - DNA, 50 bp, Homo sapiens
ttctgctgcatttcctgcccagagtgcacagccagagaacaacacatcac

SEQ ID NO: 771429 - DNA, 144 bp, Homo sapiens
taaggcagcccctgcatctcagtcctgacatcgctgtccctggagcatcctccgctggagctggagcttgacaggatgaactgctggaggagctagaggagctggagcaggaggaattggcccaggagttgttaaatgtgggcg

SEQ ID NO: 771430 - DNA, 83 bp, Homo sapiens
cctcactgtcaagcacgagctgcggactgaatggagatgtatgcatttcgattcttcatccgcctgtagatgacccacagagt

SEQ ID NO: 771431 - DNA, 78 bp, Homo sapiens
tacaacatcacttcttctgtttgcagtggttgtacgtggacactataaaggtcagcaaattggcaaagtagtccaggt

SEQ ID NO: 771432 - DNA, 78 bp, Homo sapiens
tctacctagaacgttttggtactggaattacaactattatcctcctgtagagtggcttttcatggcctgccactgaaa

SEQ ID NO: 771433 - DNA, 100 bp, Homo sapiens
gccggacttgcacgtggagaaagcattatggtgacaagctgaacatggagctgagtgagaaatacaagctggacaaagagagctacccagtcttctacct

SEQ ID NO: 771434 - DNA, 89 bp, Homo sapiens
ggatccatttctcctattgaggagtcaacaccgattattgaccgacctattcgaggtcgtggtggtcttggaagaggtcgagggggccg

SEQ ID NO: 771435 - DNA, 82 bp, Homo sapiens
atctgggagcgcgatgagcctggaacggaagtgaggatcacctacagatgtgtatatctcatgattgatatggagaaactag

SEQ ID NO: 771436 - DNA, 80 bp, Homo sapiens
cccgtcccgaccctggccgccccgagcggagcctggagctagatgaggaagaggagcgaaggaaaaggcgccgggagaag

SEQ ID NO: 771437 - DNA, 100 bp, Homo sapiens
tcagccctgtcctccctctgaccagtgctgctgtgacgaatctttcagttacaggcaaaataatcctatggtgaaaaaaatcaacaagataatctctgct

SEQ ID NO: 771438 - DNA, 75 bp, Homo sapiens
tgactccgagggaggggccctggacatgtgctgcagtgagaggctaccgggtcccagtagggatggcacaatcag

SEQ ID NO: 771439 - DNA, 100 bp, Homo sapiens
ctggatgaagctgctgctgcactgacacggatgaaagcagaaaacagccacaatgcaggacaagtggacacgcatgaaggaactgactctcaagcagacc

SEQ ID NO: 771440 - DNA, 74 bp, Homo sapiens
cagaactttccaagcgggggaaacttggcggcgggtcgtttatacgcaatgcagactggaatgaagatcgatag

SEQ ID NO: 771441 - DNA, 96 bp, Homo sapiens
cgcggcggacttacgtcacgcctcctggcacaggatctagtgaaaagccatttgatgtatgcggtcagagaagaagtggaggtcctcaaagagcaa

SEQ ID NO: 771442 - DNA, 95 bp, Homo sapiens
ggctactatagtcacaaccacagcatcctcatcggcatcactgaacccttccaggcaaggtgaccccatggcaaggcgcaagccagaagggtcca

SEQ ID NO: 771443 - DNA, 100 bp, Homo sapiens
gcagactgacaactgtgagacatgcacttgctacgaaacagaaatttcatgttgcaccctgtgtgatgaatgcagactctgctaccattttggctgtttg

SEQ ID NO: 771444 - DNA, 98 bp, Homo sapiens
cggtgttcaccgagtatcaggccagtgcgtttgggaatgtcaagctggtggtccacgactgtcccgtctggaaaaaagcagcaagcctcggcagcagt

SEQ ID NO: 771445 - DNA, 100 bp, Homo sapiens
cagaccgggcgagcagagtaagaagcagaaatgcccggcgaagccacagaaaccgtccctgctacagagcaggagttgccgcagccccaggctgagacag

SEQ ID NO: 771446 - DNA, 88 bp, Homo sapiens
cgctgcgggtggcggtggtgtgctcgagcaaccagaaccggagcatggaggcgcacaacatcctcagactgtgagctgcttgtcccca

SEQ ID NO: 771447 - DNA, 50 bp, Homo sapiens
tgcaagattcgatgtgccaacgagaccaaatctcagtctgtggtagaagc

SEQ ID NO: 771448 - DNA, 88 bp, Homo sapiens
gaaagctttccagcagtcagttgaacaagacaacttatttgatgctaaagtaaataatgccagcctgattggactgggttatactcag

SEQ ID NO: 771449 - DNA, 83 bp, Homo sapiens
ctgggcttcgtccagatcgggaaggcgccgtgccgtccctgcagtgacaccgaggtgctcctagccgtctgcaccagcgactt

SEQ ID NO: 771450 - DNA, 100 bp, Homo sapiens
tcggaagtgaattcggattgtttgctgggacttgccatgaggtgttgaagccttgtttcactgagttggagagactggacctaaatggcgcagcatgact

SEQ ID NO: 771451 - DNA, 75 bp, Homo sapiens
cgacggcgcagtgcgaagcgaaacagattttgaagatgatgatctctacggccagtctgtagaggatgattattg

SEQ ID NO: 771452 - DNA, 98 bp, Homo sapiens
caaagggagacgtcatttgctactatgggaaccgaggggagcctgatcctatcgttttgacgccagaacatgcccaatgtccgtgatcatgatgcctc

SEQ ID NO: 771453 - DNA, 100 bp, Homo sapiens
tttgaacaactttccgaatctgcaaaagaagatactgcttctaaactaggacccatagaagctatccagaagtcagtccgattgtttgaagaaaagaggt

SEQ ID NO: 771454 - DNA, 100 bp, Homo sapiens
cggaatctaatcaggaggttgctaacccagaacactatattaaacatcccctacagaacagaatgacctggatgaccctgaaagaggaatgatttttgtc

SEQ ID NO: 771455 - DNA, 75 bp, Homo sapiens
accttccccgttcggcagccaagacatacagcagcccccactgcaaagccttctagacaagctcagtggaatctg

SEQ ID NO: 771456 - DNA, 75 bp, Homo sapiens
cagcaaagcatttttatttcaagagttttgccgaattgacaagcccctgtgtcacagtgaggatgagaaactcag

SEQ ID NO: 771457 - DNA, 58 bp, Homo sapiens
caaaaccgtcctgctgcttgctgaccaaatgatttgatgagcctgtcccagacctctg

SEQ ID NO: 771458 - DNA, 97 bp, Homo sapiens
aatttgccaatgtttccacaatggaaccaattgttttacagtctgttccgcatgatcgttataataaggcgcggatcaagaagatcatgcagacgga

SEQ ID NO: 771459 - DNA, 98 bp, Homo sapiens
catgtgtgatagaatggttatctatttcttcattgctgcttcttatgctccatggacccttcccgaaggccccgcgtccctggagtggagaactctga

SEQ ID NO: 771460 - DNA, 75 bp, Homo sapiens
ggggaaggcgcctgaagaggacgaagggggatatgagactttctactcggaatatcctgagtgttgcgtggatgt

SEQ ID NO: 771461 - DNA, 75 bp, Homo sapiens
agatgttgtcaaggtggcctaccaggaggccaggggtgtcgccatgtctgaagttgcagccggagtgaagaagag

SEQ ID NO: 771462 - DNA, 90 bp, Homo sapiens
tggaagcttcctgaggccaccccagagtcagaagccgctatgcttcctggacagcttgcagaaccttcctattatccttgccgtaaataa

SEQ ID NO: 771463 - DNA, 75 bp, Homo sapiens
acacgaagagctgccgtcgctgcagagaccccgctatggctgatggtgattgctcacaccaaagccttggacccc

SEQ ID NO: 771464 - DNA, 75 bp, Homo sapiens
aataagctatatactttggttacctatgtacctgttaccactttcaaaaatcgtctggggaatatttttcatctt

SEQ ID NO: 771465 - DNA, 100 bp, Homo sapiens
ctgaaattgatagcagtttgaatgacatcgctattgcggttccgaggcagtgggaagagatgcggcccctggacatcgtcgagctggcggaaccggagga

SEQ ID NO: 771466 - DNA, 75 bp, Homo sapiens
gaataccagtcccgacactaactatactctctactattggtgtcagttgtacccgaggcgttctcagcagcagca

SEQ ID NO: 771467 - DNA, 59 bp, Homo sapiens
cgagagcgtggagcgggctgggccagatgcttcaggactgccccaaggcccgcagggag

SEQ ID NO: 771468 - DNA, 101 bp, Homo sapiens
gaaaggcggcggtgcgtgttgctgcgagtgggacgcgcactggtcggtgccggctcaggagccggggggccacctacagatgctcctgcagtggacacagc

SEQ ID NO: 771469 - DNA, 83 bp, Homo sapiens
ctgcttattgttgtgtcagtgaattaggagaacttggaaaggttcagtttcgtgacccatggtctgaaaaagttcttttcttg

SEQ ID NO: 771470 - DNA, 82 bp, Homo sapiens
tccactccgtcccccgcgggtctgctctgtgtgccatggacggaagaggactgtcagaaggacgtagaaggcacggttttac

SEQ ID NO: 771471 - DNA, 75 bp, Homo sapiens
ccgcacactgctacatcgatgacagaggattcaggcttgggcactgtttaaaggaaagttccgagaaggcatcga

SEQ ID NO: 771472 - DNA, 100 bp, Homo sapiens
gatgccattgcacaagctgtgaggggcctcatcaccaaggcctagggcgggctgcaggccgggaggtcgagagagactttgcctccgtgtattcccgtct

SEQ ID NO: 771473 - DNA, 96 bp, Homo sapiens
cgtgaccgagaccgtgaccgagagcgtgaccgagagcgcgaatatcgtcatcgttagaaggtgacatgatgacattgctaatgaagaaagacacct

SEQ ID NO: 771474 - DNA, 97 bp, Homo sapiens
cagcattatattgaaacactacagcgcaggattgaagaagagcaggtgaagtcccgcttggcttttgggaagcccctggtggagcagggcacagtgc

SEQ ID NO: 771475 - DNA, 75 bp, Homo sapiens
cagtgatgtgaagaggttcagctgtcctaatcctcactgccgaaagtgctcatctctcagagatctagaacttgc

SEQ ID NO: 771476 - DNA, 75 bp, Homo sapiens
gagatttcaatggtgatggcatagatggagtctactcttcatcttgtgttgagacttcgtggtggtgctaagaaa

SEQ ID NO: 771477 - DNA, 100 bp, Homo sapiens
aggagctgtgccagccgcggtgcgccttctccacgctgggccgggtgttgcgcctggcctacagcgaggctgccaatgttttcagttgcaccaagcttag

SEQ ID NO: 771478 - DNA, 100 bp, Homo sapiens
ggccagcccaccgacaaaatggatttggatctactggacctgaatcccagaattattgctgcaattaagaaagttggtgttggtattaggagatctgcac

SEQ ID NO: 771479 - DNA, 100 bp, Homo sapiens
cctggtgcagagcgccgtctggagccgagatggagccctggtgggcacggcgtgcaagacttcccaagtaagaagcggaagaggagccgctggaaccaag

SEQ ID NO: 771480 - DNA, 75 bp, Homo sapiens
caacgcggtgcgcgaccgggagctggacctccgggttggagcagtgccagtcctttccaaagaatgtgcatcagg

SEQ ID NO: 771481 - DNA, 75 bp, Homo sapiens
cgaatatcgtcatcgttagaaggtgactgggtacctggatatgtgatcgagtattcttctgggtgtttctatgag

SEQ ID NO: 771482 - DNA, 90 bp, Homo sapiens
atctttgtggctgtgcttgccaggcctggctccatgttctagaacagatcagacattttgtaatgatgcctgaaataaacactaaccacc

SEQ ID NO: 771483 - DNA, 80 bp, Homo sapiens
cggattcatttagagctgcggaacaggacgccctctgatttccagggtctccctccactgctgtagtaacccgggtccgg

SEQ ID NO: 771484 - DNA, 83 bp, Homo sapiens
ggaacacctcgccaaagcagagaaatacggagctggagtttgttcagatcatcatcatcgtggtggtgatgatggtgatggtg

SEQ ID NO: 771485 - DNA, 100 bp, Homo sapiens
cctcccaaagtgctgtgattacaggagtacgaccccagcaaagcgacctttgtgaaggtggtgccaacccccaacaatggctccacggagctcgtggccc

SEQ ID NO: 771486 - DNA, 96 bp, Homo sapiens
agaaccaatagtattaacaaagtggagacatagcaccattgtattggacactaatgataagatagaagaagtcagagatgccatggaaaatgaaat

SEQ ID NO: 771487 - DNA, 74 bp, Homo sapiens
aagaaattcccacctgtcaaagaggcacaaatcctgaagagcccgtgggcgtggactgctcatctgtaaagaaa

SEQ ID NO: 771488 - DNA, 83 bp, Homo sapiens
gtgtgcctgatgatcacgcagctggctggcttcagtggaccagattattacagtggtggctactatcctgcacaggacccggc

SEQ ID NO: 771489 - DNA, 90 bp, Homo sapiens
cccccatggaggcgaggtagagttggggtcgcagttcattctgaatctagacttgctcagcctaatcaagttcctgtacaaccagaagcg

SEQ ID NO: 771490 - DNA, 76 bp, Homo sapiens
aagtctagattcaccaatgtcaaacagtttattgcaccaggtatggcggctctgaatggaggacttggcgccacag

SEQ ID NO: 771491 - DNA, 50 bp, Homo sapiens
cggagtccgccccgtgaggagaatgctatttccttcgtgctaccatcagc

SEQ ID NO: 771492 - DNA, 90 bp, Homo sapiens
gaaaagaaactacagtcatcacaatggtctggatggtcgagtcccagacaccagaagtctgaatttggagaaggctggggtagatactag

SEQ ID NO: 771493 - DNA, 75 bp, Homo sapiens
ccgacttcctcatgaagagactccagaaagggggagtagaaaatgtatatacacagcatcaacctttcctacatg

SEQ ID NO: 771494 - DNA, 97 bp, Homo sapiens
acttaaaacctgaaaacattggaccacacaaagtcttactgctccagggcccacaacggcagtgtcctacatgtcggtgaaatgtgtggatgcccgt

SEQ ID NO: 771495 - DNA, 90 bp, Homo sapiens
ccccgctgagcgatcccaccgaagcagcgtgtcctccgtgggagcccgaggcacgcagatcctgtgcacagcccaggcagcgctgggcaa

SEQ ID NO: 771496 - DNA, 73 bp, Homo sapiens
gtcaggtggaacccatgcctggagcctcaccgcttcaatgacacagagatgaatgaaccaaatgcctatggaa

SEQ ID NO: 771497 - DNA, 74 bp, Homo sapiens
catgatcaacaaggccacgccctacaactacccaggagcttctggaagaggtgaagaaggaattgcagaaagtg

SEQ ID NO: 771498 - DNA, 98 bp, Homo sapiens
tgaaagccaaaaaggagaattctctctttcagtttggacatcacatttcacagtcagaaggacagcgaactaaagaagaaatggtcaacacaaaagct

SEQ ID NO: 771499 - DNA, 50 bp, Homo sapiens
gcagaaggttgtgactttagtatacacaggaacgaatgcaggaatttggg

SEQ ID NO: 771500 - DNA, 76 bp, Homo sapiens
ggcggcgctggagagggggcgctgagctgttgggggtttggaaatcccttgtctccaggttgctgggattgacttc

SEQ ID NO: 771501 - DNA, 83 bp, Homo sapiens
catccgccatgctccaaacaacttggcctcagaacgccaatctgaattgccaacgcaaagcaaagcgagcttccccagtattc

SEQ ID NO: 771502 - DNA, 100 bp, Homo sapiens
tcagtttctaatccagttcacagaaagattatggattggatatgtctacttctggatgcaaattttactgttgttgtaatgatgccagaagcaaagaggc

SEQ ID NO: 771503 - DNA, 51 bp, Homo sapiens
gacctccggggaggcctgccgctgtaaggtgtacctggccttgggcctgac

SEQ ID NO: 771504 - DNA, 50 bp, Homo sapiens
cagcatctcccttcatgtctgggtcatgatgcaagtgctgctggaccagg

SEQ ID NO: 771505 - DNA, 75 bp, Homo sapiens
gctgagtacgacagcctcaaacaggagctggagcagctcaaagagccctatgcaggtatgcaagcctacgcttat

SEQ ID NO: 771506 - DNA, 75 bp, Homo sapiens
catcaaacatcttccaccacagcttagagagctaaaacgtcatcctctcttcagtgatgtggactgggaaaatct

SEQ ID NO: 771507 - DNA, 78 bp, Homo sapiens
tgagattggaacccgcaaaatatgccaggtgaaagaacttgtcctggacaacagtcggtcgaatgaaggcaaactcga

SEQ ID NO: 771508 - DNA, 100 bp, Homo sapiens
ctcgcttgcattcagctcctctgtgtttgccgcctgggaggagagacttcagcatgcaaaccttcatctgttcggcttgcaccgtcattttcattccatg

SEQ ID NO: 771509 - DNA, 100 bp, Homo sapiens
gtttcaagtaatggcccaggtaatcgggctggatcatcaagtagccgaagggtgtatcaaggtcagaagaagtcaaaagaagctttgtcccactatcaag

SEQ ID NO: 771510 - DNA, 100 bp, Homo sapiens
aagaagataattacaagcggacacgggaatatatccgaagcctgaagatggttccaagtattccctatctagatccctcatgtccatgatccggaaacga

SEQ ID NO: 771511 - DNA, 97 bp, Homo sapiens
agctccttggggtttccggctgcagggcggtaaggatttcaacatgcctctgacaatctctagtactgaccactgctctaagcagtgttggggcaat

SEQ ID NO: 771512 - DNA, 100 bp, Homo sapiens
cggggctgtgatagaccaagggctgatcacgcggcaccacctcaagaagcgggcctgaaactagaggaccgttctgtggtgccccgagatgtggtccggc

SEQ ID NO: 771513 - DNA, 89 bp, Homo sapiens
cccgattgactggcctgcttggcaaggcaagtagcggcggcgcttcaagttaaacaggtgttcaaggagctggagtttctgggttggta

SEQ ID NO: 771514 - DNA, 87 bp, Homo sapiens
cggctttagtggcagcatgaagcgcaccccgactgccgaggaacgagagcgcgaagctaagagggtctcgctgttggagttggattt

SEQ ID NO: 771515 - DNA, 90 bp, Homo sapiens
cacccttgaagctgagaaatggtttggtgcacctcgatttggaggaagtagggcagggcccttatctggaaagaagtttggaaaccctgg

SEQ ID NO: 771516 - DNA, 50 bp, Homo sapiens
cacttaccaggaccacttgtgctatgttgcaggcagatgatgaagatgac

SEQ ID NO: 771517 - DNA, 51 bp, Homo sapiens
cactggggccccagtgggcgtgggcgaaggatggcacagtgttcgacggcc

SEQ ID NO: 771518 - DNA, 75 bp, Homo sapiens
catcgagtcactttgcctggacaggaggaaccctgtttggcagttctctaccagtggaccaatcttttcatcccc

SEQ ID NO: 771519 - DNA, 82 bp, Homo sapiens
ttgtggagccggagctgggcgcggattcgccgaggcaccgaggcactcagaggagccaacatcccatgcaccatcgtggaga

SEQ ID NO: 771520 - DNA, 75 bp, Homo sapiens
cttgtgctgagttttcttttcatgtaccaagtcttgaagagcttgctggagacaaagaaacagccttggtataat

SEQ ID NO: 771521 - DNA, 100 bp, Homo sapiens
tggagagctcatctggaattttgccgatttcatgactaaccagtaaatacatgctacaggatttaactatcagaatgaagatgaaaaagtcaccttgtct

SEQ ID NO: 771522 - DNA, 74 bp, Homo sapiens
tttgatacctttgatagcctttcactaagtattccagccgccacatggactcagattgatggacaacttttctt

SEQ ID NO: 771523 - DNA, 98 bp, Homo sapiens
tgacatcgagttccctccccccttcgggcgggaggcatatccagagatttctcgaatgctggcagccaaaaccgttttggctatccgttatgatgctt

SEQ ID NO: 771524 - DNA, 100 bp, Homo sapiens
gcttgacaaaatccagtccagccacaacttccagctggagagcgtcaacaagctgtaccaggacgaaaagcaccagcaacaagtggtgcaggctgtggaa

SEQ ID NO: 771525 - DNA, 74 bp, Homo sapiens
tgcccggcgaggagaaccaactggtcccgaaagagcatcctggtggggaagaagttttaagggaacaagctgga

SEQ ID NO: 771526 - DNA, 75 bp, Homo sapiens
ccaaatgggtctgttcctggagacagaattacttttgatgctttcccagtttgcagctcaccttgtgaagatgaa

SEQ ID NO: 771527 - DNA, 76 bp, Homo sapiens
gccctacagctacttctccaaagaggcagcccggaagctcatgcaccctgtgctggagtccctgaggaatactgac

SEQ ID NO: 771528 - DNA, 75 bp, Homo sapiens
aaaatattggtacttcaaacatgcaagttggaatgaggagaaggcagagcccccccaggctatgaatgccctgat

SEQ ID NO: 771529 - DNA, 73 bp, Homo sapiens
aatggagaagtaaagattttgctgaaaacggttaagaagattgtctaccaaatatagaacagaaaagatatat

SEQ ID NO: 771530 - DNA, 80 bp, Homo sapiens
gttcttgcctcaggccagtcgcctccaggccaagagggatccttcacccgtgtctgagacacctatggctgccgatgaag

SEQ ID NO: 771531 - DNA, 87 bp, Homo sapiens
ctggcgtgcactccgcacctcggggacattattgcgcgtggaacggctgcttttggaaggtcccaactaattatgcaggcggaggca

SEQ ID NO: 771532 - DNA, 100 bp, Homo sapiens
agcacctggagaggggccgcggaaacctggagtggaagggtgaagaatttcatgacgtggaggatgcagagacctacaaaaagatgctggctcgggacga

SEQ ID NO: 771533 - DNA, 100 bp, Homo sapiens
atgatggcgagtgctttgtgatcgaaaccctgaccggatcccataaacactgtcggagagtggtagaggcacagaagatgatgaggctgttgaactgtgg

SEQ ID NO: 771534 - DNA, 75 bp, Homo sapiens
ccacattcaaccaggttgtgttgaagaggatggagatgaagatgaggaagctgagtcagctacgggcaagcgggc

SEQ ID NO: 771535 - DNA, 100 bp, Homo sapiens
ggatgcctccattcctgcttctcacctgcctcttcatcacaggcacctccgtgtcacccgtgggttcgagcatacgggccaggtttggagaaatctggat

SEQ ID NO: 771536 - DNA, 82 bp, Homo sapiens
tcaggatatgacaggggtaacacccttccagatgatttttgaggttgaatttttaggagaagaaggaactggcttgggaccc

SEQ ID NO: 771537 - DNA, 100 bp, Homo sapiens
ggtccgggtccggagcgccacagatcgctggtgacacagccctcaacaaaaacatccacgagtccgtcagcgcccagatccggaaaaactttgccaagag

SEQ ID NO: 771538 - DNA, 100 bp, Homo sapiens
caaggacccaggggatcacctaatgccagaagccatacggtgttctctcgagtggaggaggagcacctctgggagtgtaagcaactgggggtctactcgc

SEQ ID NO: 771539 - DNA, 75 bp, Homo sapiens
tcaacatctctcagagacgaaagcatactggagcatagtgaaagagtctattttgaagcttcaaacttagtgctg

SEQ ID NO: 771540 - DNA, 101 bp, Homo sapiens
tcccgagtagctgagactacagatctttaatctcatgaagtacgacagctacagccgcttcttaaagtctgacttgtttttaaaacacaagcgaaccgagg

SEQ ID NO: 771541 - DNA, 75 bp, Homo sapiens
ggcctccccagccatgtggaactgaccagtcctgcctctgttgtagaagacatgtggtgtatataaagtttgtga

SEQ ID NO: 771542 - DNA, 100 bp, Homo sapiens
gtgatatggatatgccttgttgccatgggatacctgttcatgtgttttggaggcaccgtctctccctgggaccaggggaagatggtgaaaggaatgggag

SEQ ID NO: 771543 - DNA, 98 bp, Homo sapiens
agatatcgaggtggatggaaagcagagcatcctggccagaacaagccaaggagccaagacgagagggacacacggacaaacaacagacagaagacgta

SEQ ID NO: 771544 - DNA, 75 bp, Homo sapiens
gcgcctgcacttagccccgcgcccgaggggtcgggccccggctcagtggtcccaggcagctcgggtgtcggaacc

SEQ ID NO: 771545 - DNA, 86 bp, Homo sapiens
acgagagctccgtgcgggtggctgtcagacaatgcagatcttcgtgaagactctgactggtaagaccatcaccctcgaggttgagc

SEQ ID NO: 771546 - DNA, 75 bp, Homo sapiens
ccagctcccggcactgctacctctgacccaaagcaggatttgtacacacagatatgacgaaagacttgaaagaag

SEQ ID NO: 771547 - DNA, 83 bp, Homo sapiens
gtgctgggcctctgctgcgtcctgctgaccttcggttgactatagtcaatggggccaatggagccaagtgtatggaaacccac

SEQ ID NO: 771548 - DNA, 100 bp, Homo sapiens
gcgcacggcggcgccgagcgtgcggccggagaagcggcggtctgagcccgaactggagcctgagcccgagccggagagcgggaacagcttccacgtgttc

SEQ ID NO: 771549 - DNA, 75 bp, Homo sapiens
cagagagaaaattgagacggagctaagagatatctgcaatgatgtactggctggagtgcaatggcgccatctcgg

SEQ ID NO: 771550 - DNA, 100 bp, Homo sapiens
aaactattcatcagcttactagtagccctgaagatattctaatggagccaacttctggccttgggatcattctggacagtgtgtgtggaatgtttcccca

SEQ ID NO: 771551 - DNA, 50 bp, Homo sapiens
agcacatctcagtgaatttgcaagtgatttaatccagagactgacttcac

SEQ ID NO: 771552 - DNA, 75 bp, Homo sapiens
accttgagaccctgagactttcagaaacttattcacagttaccaaagctgcatgtgcagtctttgccaacaaaaa

SEQ ID NO: 771553 - DNA, 101 bp, Homo sapiens
agcatatacttttgaaggtgcaagatactatataaagtactaggttttgacaagcttgcatcatgcgtgagtataagctagtcgttcttggctcaggaggc

SEQ ID NO: 771554 - DNA, 88 bp, Homo sapiens
cagacgctgccagcatcgccgccgccagacttctgcctggtgtcgaaggtggtgggcagatgccgggcctccatgcctaggtggtggt

SEQ ID NO: 771555 - DNA, 100 bp, Homo sapiens
gctctgtgtactgtgaggaagattatctggaaaaagctcctcaatttctgaagagaaaggtgactctgatgatgagaaaccaaggaaaggagaaagacga

SEQ ID NO: 771556 - DNA, 100 bp, Homo sapiens
tggatggggccaaggctaaggctattctggatgcctcacggtcctccatgggcatgaagacaacagtgagcgaggcagaacatcccctcttatgtgaagg

SEQ ID NO: 771557 - DNA, 98 bp, Homo sapiens
ctggagaagctgaccctgggcatcacgcgcatcctagaatgtgtataaagacgagtataacagcttcttgaagggcatcggatggatccctattggtt

SEQ ID NO: 771558 - DNA, 100 bp, Homo sapiens
gatagaagtcaagttgaaccagcagcgggcaaaactgttccgatttgcctctgagaacgatctcccagaatggaaggagcgaggcactggtgacgtcaag

SEQ ID NO: 771559 - DNA, 50 bp, Homo sapiens
agaatacagagatatggaatcagatttcttcgccaagcgcaagagatcag

SEQ ID NO: 771560 - DNA, 90 bp, Homo sapiens
ccctggtggaggcggcttggcggagattcggagccgtcagcagcttagaccatgctcagcctccaagcagccttgtcatcgacaaagaat

SEQ ID NO: 771561 - DNA, 100 bp, Homo sapiens
tatggggaatactttcctggcacaggagacttgagggaggagaagctggagctgcagaagttgctggagagggtgcctatccctgtaaaggagagcattg

SEQ ID NO: 771562 - DNA, 90 bp, Homo sapiens
accagcagcaccaggagtccctctccgcccagttacaaggtgcgagtactccagaaggaactggctgcatccacctctgaagacacgcac

SEQ ID NO: 771563 - DNA, 101 bp, Homo sapiens
gccgccgccgccgcccagagactgctgagcccgtccgtccgccgccaccacccactccggacacagctcatgatggagcagtccaagaagtcctccctcat

SEQ ID NO: 771564 - DNA, 49 bp, Homo sapiens
gctgaagctgggcatctggggcgactgtgaaccagaagagctgactgac

SEQ ID NO: 771565 - DNA, 83 bp, Homo sapiens
agggacaatggtcaccgtctcttcagtcatctcagcaaaacttaaggaaaataagaagaattggtttggaccaagtccttacg

SEQ ID NO: 771566 - DNA, 100 bp, Homo sapiens
ggtctccggcagcagcggcctcgccgccgcccgtctcctgtcgcgcagcttcctccgtccattcaactgcaattgaatattggagttgagcagattcgag

SEQ ID NO: 771567 - DNA, 100 bp, Homo sapiens
tgggcggtggatccggacccctgcccctgtctaatctgctaagaatcttgacaaaacttttggaagtgtcagatgatccccaagtcttagctgttgctgc

SEQ ID NO: 771568 - DNA, 100 bp, Homo sapiens
gctacttaccacctgccgccggttgccggaggccatcgaggaagtgaagaagtctcctactccctccctccagtactgcgagaactgtgacacccacttc

SEQ ID NO: 771569 - DNA, 74 bp, Homo sapiens
gcagctgtcgccgccgctctcagtcttcaggcagtgacagtggtgggagcagcagcagcagcagcagcagcatc

SEQ ID NO: 771570 - DNA, 83 bp, Homo sapiens
gaaagccaacacaccattcatgccacagggcactgccacattgatacaggaggaggcctcggtggtaccagaagaggaggggc

SEQ ID NO: 771571 - DNA, 100 bp, Homo sapiens
gaagctgaaacgaaagggagccgccagcgcgtttggctgtgacctgacggagtatctggaaagctcgggacaggatgctgtgttggggtggaagaggagg

SEQ ID NO: 771572 - DNA, 82 bp, Homo sapiens
gggacagccgcccctggtgcacacaccctcgtattctcctgcccttccccagtaatccagtccctcatagcactggtgaatg

SEQ ID NO: 771573 - DNA, 100 bp, Homo sapiens
tccctcgtcgaaaggattggattggcatctttagaacatatggaaagttgatcatgtgctggagcgcttgcagagtgaaagcctggtgaacagaaggaaa

SEQ ID NO: 771574 - DNA, 100 bp, Homo sapiens
ggcggcccagctctctctgacacagtcccggcccaggcccctgagctggagggatggaaaactcctctgcagcatcagcctcctcggaggcagggagcag

SEQ ID NO: 771575 - DNA, 98 bp, Homo sapiens
ccaacagcacagctaatcttgtcaagaccatcaaggcgcagacggggaagcggagccaacatgccagtggcccggagctgggtttgtcgcaaaactta

SEQ ID NO: 771576 - DNA, 100 bp, Homo sapiens
acatgcaggtcctctataccgcactgcagcacagctcagagctggcgcccaaggagctggtgagcaggctgctgcacctgcacttcaaggatgacaagac

SEQ ID NO: 771577 - DNA, 100 bp, Homo sapiens
gaggggcgaagaggacgagggggccaaggcttcctccgggggtacaggcatccttcacctgctattgttgcaagaacagtcagaattttacatacactac

SEQ ID NO: 771578 - DNA, 90 bp, Homo sapiens
taacgacaagaaaaacaatcgcttcaatgatgggaaggtggatcccgccgggaggtactttgctgagccattggaacatccgttaatcag

SEQ ID NO: 771579 - DNA, 83 bp, Homo sapiens
cttgccttgaaggacaagaacagcgccgtcaccagcagctcattgctatggacagtgctatcaccctgtggcagttccttctt

SEQ ID NO: 771580 - DNA, 83 bp, Homo sapiens
ccccaattcagcagagaatattttcaaggggggctgaaggtgatgtggccgccctcaaccgacgcatccagctcgttgaggag

SEQ ID NO: 771581 - DNA, 98 bp, Homo sapiens
cccccacctttcctcaggagtcatttctgttccgcacaggcctgctgaactgggtgctttatataggcttcttacagtacatttctagtgaagtaaac

SEQ ID NO: 771582 - DNA, 126 bp, Homo sapiens
gtgtccatgctctttttgctgcagtggtggaacagattcacaagtttgcccagctccttcccatttatgagagagccacatgacatcagcccatagactgtggagagtattccagatctatcacat

SEQ ID NO: 771583 - DNA, 100 bp, Homo sapiens
gttaccctcttcttcccctcagccattgagagggtgtcagaggcaatcgtcagcatccgaagaatccaggttatcaatactctggctgaccatcatcatc

SEQ ID NO: 771584 - DNA, 82 bp, Homo sapiens
tttgaaatactggtagatccatacatgcatgaggaagtaaaaatgttgagtagttcaaaatctatgaaggaactcactgaag

SEQ ID NO: 771585 - DNA, 75 bp, Homo sapiens
aagatggcgactgtcgaaccgagtcactcaagggaaaggattaatgccagatggtaccagcagatttacttgcaa

SEQ ID NO: 771586 - DNA, 101 bp, Homo sapiens
gcacatgtctgggaggataattgggatgatgacaatgtagaggatgacttctctaatcagttacgatagctttccaatgattagacgaattgattctttct

SEQ ID NO: 771587 - DNA, 90 bp, Homo sapiens
gggcaggaatgcgtcctgagcagcagccccgcggtgctggcgggtccatatggaatatttgctggtagggatgcctccagaggactggcc

SEQ ID NO: 771588 - DNA, 101 bp, Homo sapiens
ttcctctgtccaaggccagggacctgtgaccatggaagcaggaatcgtgcgggagctgaaaagtcgaggagtggcctacaaatccagagacacagctataa

SEQ ID NO: 771589 - DNA, 100 bp, Homo sapiens
tgctgttttgaaaaagctgcaagggacattagtcatgagtgccgagtgtgcggggtcacagaagtgggtctttctgcatatgcaaagcacatttctggcc

SEQ ID NO: 771590 - DNA, 103 bp, Homo sapiens
gggagcgcgatgtggagcgcttctttaagggctacgggaagatcctggaggtggatctgaagaacgggtcgtagttcccccgctccctgggaaagcgtttttg

SEQ ID NO: 771591 - DNA, 100 bp, Homo sapiens
ctgaggagccggagagggtgctggctgccgcgcggccgaggtgtgtagctgggacggtgctggtctgagctggaccttgtctgatggcttcctccaaccc

SEQ ID NO: 771592 - DNA, 96 bp, Homo sapiens
cagagatcaaacctgtcgccacagagcagctgttgagcaccttcctaactgtagattctgaaaaagagttccacgtcctcccttatcgagtctttg

SEQ ID NO: 771593 - DNA, 83 bp, Homo sapiens
ctgtgggccgcctgtcagtgtgggctgtgtctctgcagggcaagaggctgaggggatctggcggtggagcgctaggatcagac

SEQ ID NO: 771594 - DNA, 100 bp, Homo sapiens
cccacgactgcctgggacctggccaagggctccacacaccaagaccaaggaatgcagctatatgtaaaccaaaggaagattttgacttcatcttattcag

SEQ ID NO: 771595 - DNA, 80 bp, Homo sapiens
taatatacagaaatctccagagaccccagttattaaagcttttggcatcttgaagcgagcggccgctgaagtaaaccagg

SEQ ID NO: 771596 - DNA, 98 bp, Homo sapiens
aaaaatcttgtacctgatgccgatattcaacgctttcgatgacaagattctgcagatcattacggaattgataaaaacagagaataactgaaactgaa

SEQ ID NO: 771597 - DNA, 75 bp, Homo sapiens
gcgcccgcgccctccgcgcgacgccaggagtacgagagggcctccaaagtggaccagtttgtgacgcgcttcctg

SEQ ID NO: 771598 - DNA, 100 bp, Homo sapiens
taagcagtgatgaagacctcgaaataattgttgatcaaaagcagaattctgaaggtggactctatgtatgcatgaatacatttttggcctttggaaggga

SEQ ID NO: 771599 - DNA, 97 bp, Homo sapiens
gatgtcatcttcaaattggagcaaggagaagagccgtgggtaggagatggagaaattccaagttcagattctccagcttcagttgtggagggccaaa

SEQ ID NO: 771600 - DNA, 81 bp, Homo sapiens
gtgtgctgccactgcgggggcaagacgaaggtgtcgtgaaaactacccctaaaagccaaaatgggaaaggaaaagactcat

SEQ ID NO: 771601 - DNA, 100 bp, Homo sapiens
ccttttacttatgttaatcatagactttcgacattggagtgcttcattaccacgagataggcaatacgaaaggtttctgggtgtctctggggagcccctg

SEQ ID NO: 771602 - DNA, 101 bp, Homo sapiens
gagcaaaatctacaagatgatgcagggaggaggtgcagacccgcagctctgatgagcccatgaccacctttgttgtctgcaacgagtgtggaaaccgctgg

SEQ ID NO: 771603 - DNA, 83 bp, Homo sapiens
cgaaggaggaggcgttgccggaaagttggagtgactggtccccctgatccacaagtccgctgtccctctgtcattgagtttgg

SEQ ID NO: 771604 - DNA, 100 bp, Homo sapiens
ggagatatggcgcaactgcggcgccttgccttgcgccatggactggcagccagacgagcagggcctgcagcaggtcctgcagctgctcaaagactcacag

SEQ ID NO: 771605 - DNA, 82 bp, Homo sapiens
ctggactgcagtgactatgttctagttaaagaagagtgtaagagtcctaaagctgagtgttggtcccaaaaaatgtccaata

SEQ ID NO: 771606 - DNA, 100 bp, Homo sapiens
cctctcagcaggcctttgctggacagatgaagagtgacttgtttctggatgattctaagaggctggaggaagtacccctggaggtgctgaggcagaggga

SEQ ID NO: 771607 - DNA, 100 bp, Homo sapiens
ggcagccccggggcggcggccgaggctacagagccggcggcaggggatggcaagatagcggcgcgggagcgtaccaatggcttcctttgggtggaagagg

SEQ ID NO: 771608 - DNA, 100 bp, Homo sapiens
tttagaacagaaactccattggaaccccgaggacaaaggggtcctggtgttcctggaacaggctctcatccagtatgcccttcgcaccttgggaagtcgg

SEQ ID NO: 771609 - DNA, 49 bp, Homo sapiens
tacttcgacgaacactacgagtaccggctccttcctcagagaagcttcc

SEQ ID NO: 771610 - DNA, 97 bp, Homo sapiens
gagcggacgggccatacccaataaccaggtgcttggcaaaatcgagcgggccattgcttggatttacactgggcaacgtggttggaatgtatctggc

SEQ ID NO: 771611 - DNA, 101 bp, Homo sapiens
atttgttaaggattccaagtaactcttatttggatgtgaagttaccccagatgtaaacatttcaggccaaaaatttaacattaaactcctgattccagttg

SEQ ID NO: 771612 - DNA, 82 bp, Homo sapiens
aaggcactgctttttcatgacgacgttggacctctcgaacaaccagctgagcgagatccctgcagagcttgcggactgcccc

SEQ ID NO: 771613 - DNA, 100 bp, Homo sapiens
acctacctgaggatgatcaagcggagttcgatgcgggtctgggatccccaaggcctgggcaggcatagacttgaaggtacaaccccaggaacccctggtg

SEQ ID NO: 771614 - DNA, 98 bp, Homo sapiens
tctggccccgagatcagaatgccgcggatactctgttttcaaggaagctgaatgggaaatacagacttgagcgacttgttccaactgcagtgtatcag

SEQ ID NO: 771615 - DNA, 80 bp, Homo sapiens
accctcaacaaacaccagcgctttgggcctgggttctgaggaaaacgcaatggtggccatggacttgggctctccctcgc

SEQ ID NO: 771616 - DNA, 90 bp, Homo sapiens
gatacctgtaagaaaggccttagtaggcctttctaagtctcctaaaggatgtgatatggggagattgttaacattaatctcgtgcgggac

SEQ ID NO: 771617 - DNA, 75 bp, Homo sapiens
agattgttcctaaaccagaagaggaggttgcccagaagaaaaagcctacgaggacaagcagaaactcaagcggac

SEQ ID NO: 771618 - DNA, 100 bp, Homo sapiens
tcaccaaactggaggatgcctatgtattccctggggatggcgcatcacacaccaaaggtttgtgggggagagaaaccttatttgtctccagacattctag

SEQ ID NO: 771619 - DNA, 104 bp, Homo sapiens
caaaggcatattgggcacccctacaaaaggaattcagcagctgaatatcaagacctttgaattcaacaagaagttaagacatttatagttgtctaacaacagac

SEQ ID NO: 771620 - DNA, 75 bp, Homo sapiens
aattgattgatgctcaccagcttcaagctcatgtggacaagtttaagctatgaagaaggacatccctcacactct

SEQ ID NO: 771621 - DNA, 75 bp, Homo sapiens
gcctgctgcggcctgtgtatgatccggactcgtgagctgaagtgcagatgaccacattcaagggggaaccttctg

SEQ ID NO: 771622 - DNA, 100 bp, Homo sapiens
tgccaccgcgtggtgcttgccgcagccagcaactatttcagtcgtgagatggagaataaagaaactctcaaagggttgcacaagatggatgatcgtccag

SEQ ID NO: 771623 - DNA, 143 bp, Homo sapiens
cttatcgtcatgctaagcagaataaaaaaaattcgtcatgctttttacttggttctctgacagcagacgaagatggtggatgcttccaaaagcatcgaagctgtccatgaggacatccgcgtgctctctgaggacgccatccg

SEQ ID NO: 771624 - DNA, 74 bp, Homo sapiens
gtcctcatcatcccgtcagagctgaggtacttcgtgaagctccagatcctgtttgcgggggaagccacacatcg

SEQ ID NO: 771625 - DNA, 95 bp, Homo sapiens
gatcctggatgaaaagcccaagttactccacaggatccgctgaacataggatgttgccacaaaatctacctcgtgtatttttctctttcactcat

SEQ ID NO: 771626 - DNA, 78 bp, Homo sapiens
tgactaccctggttacctcatatgtttattaatgcccggagaagaatagtgcagcccatgatagaccagtccaaccga

SEQ ID NO: 771627 - DNA, 51 bp, Homo sapiens
acagccaatttcatgctccactataggagaactatgccatttttgggtcag

SEQ ID NO: 771628 - DNA, 73 bp, Homo sapiens
atcaatccagatggcagccagtcagtggtggagcttaacagagcgttccaaaaagaggactctccagctactt

SEQ ID NO: 771629 - DNA, 90 bp, Homo sapiens
gatggactgagacgcagagtgtaccaggggatgctggactgcatgggcgccagcctcccagtgatggacctgactgaactccccaagtgc

SEQ ID NO: 771630 - DNA, 95 bp, Homo sapiens
actacagtatgcacttaatgtccctgctgtcagccagatgaaacagcaaaaatatccaacaaaagtctccttcagttcacaagagataccattag

SEQ ID NO: 771631 - DNA, 80 bp, Homo sapiens
caaacatgctccgccagatcatcggtcaggccaagaagcatccgagcgtgtttggagtagatgacaatcaggattataat

SEQ ID NO: 771632 - DNA, 82 bp, Homo sapiens
gtctgctctgtgtgccatggacgggtgctccggtgggaatgcttggtgaggaccccccagtccatgttcgctgcagcgaccc

SEQ ID NO: 771633 - DNA, 73 bp, Homo sapiens
ggcattgacatttaattttagggtcctttatatagaagggagagtaggtgacggtcctggtcatgtgccacac

SEQ ID NO: 771634 - DNA, 75 bp, Homo sapiens
aaactttaaggctaaaaacaaagcaaaaccagttaccactaatcttaagaaggaagcaagaggctactatgagca

SEQ ID NO: 771635 - DNA, 100 bp, Homo sapiens
cggctggctgtcatctgtggaacgtcttcttgtcacatgggggtgtcttctctttagggatggtgaggttggaaaaaggctcctgtaaccctcctccagg

SEQ ID NO: 771636 - DNA, 51 bp, Homo sapiens
ccaggaggccaggggtgtcgccatgcctgctctgttcaccttgtgtgctgg

SEQ ID NO: 771637 - DNA, 100 bp, Homo sapiens
gcgacgtctacactgagtcggaggcgaaggttttgggtcctgctcctcggtggtgttccttcttagacaacttgaccgaagaattagaagagaatccaga

SEQ ID NO: 771638 - DNA, 100 bp, Homo sapiens
gccgcctcggagcggctgtacgagttgtggctgctctactacgcgcaggaatagccaggccagaagaaggaaggcctgtggtgagtgggacaggaaatga

SEQ ID NO: 771639 - DNA, 96 bp, Homo sapiens
ctgacatggcagtcccgaacacaggatgaacatccgaagacaatgttctccaaagataaggcactggtgaggtggattgatgatgaatcttctggc

SEQ ID NO: 771640 - DNA, 90 bp, Homo sapiens
tgtgggcatgatccataatcggtttcaagggctctgatacttgtgctcaatgtgcccattttcgagatgggccccactgtgtgagcagct

SEQ ID NO: 771641 - DNA, 75 bp, Homo sapiens
aagcaggaggcaagaaaggggcccggaaatccaagaaacccgggatggacgtggccgacgcctacgtgactttcg

SEQ ID NO: 771642 - DNA, 100 bp, Homo sapiens
gaagaggagggcaagaagggcaagaaggctacaagaattagttgatcgagtgctggaacgttttcaggcatctggactaatagtgaaagagtggaatagt

SEQ ID NO: 771643 - DNA, 75 bp, Homo sapiens
cggggcttccctgcggctggagctgaggagtacctgtcatttgcctttgagcattgtcaccgttctagtcagaag

SEQ ID NO: 771644 - DNA, 115 bp, Homo sapiens
cccatcctgccgtccttctccactttcgccagcccgtgccgcgagcgcggcctgcaggagactcggtgaaatacctggagtgctcagctctcacccagagaggcctgaaaaccgt

SEQ ID NO: 771645 - DNA, 90 bp, Homo sapiens
cgagctgattcagcgcatcggcagcggcacctacggcgacgtctacaagaggactactgagcccagccaggctgtatgccattgctgcca

SEQ ID NO: 771646 - DNA, 74 bp, Homo sapiens
atacatcgaggaagttttggcaaggatcaaggcacaaatatgccagctacctttggacatttggcagggggata

SEQ ID NO: 771647 - DNA, 100 bp, Homo sapiens
acagctccgggaccggccgaaaggcgaggaaccggccgaggacgatgatcccgccgggggagtgcacgtacgcgggccggaagcggaggaggcccctgca

SEQ ID NO: 771648 - DNA, 100 bp, Homo sapiens
agacgcggcggcggcggcggaggatgagcctgcagagcgcgcagtacctccggaagcaagaggctactatgagcagactggagttggacctctgcccgtt

SEQ ID NO: 771649 - DNA, 100 bp, Homo sapiens
cacatcccgtcggtggggcccgaggccgaggggcccaggcagagcccggagaaaagccacatgcacaagctccgggtggataaggcagctgctgcagcag

SEQ ID NO: 771650 - DNA, 100 bp, Homo sapiens
ctttggcgaggggacggagccggatcaggagccgccgccgccatatcaggacccactgatctcagcatgaagagacaattggcgactagctcaggatcct

SEQ ID NO: 771651 - DNA, 100 bp, Homo sapiens
atcctgatcaggaaacatatacagattatgtgattccatgctttgatagtgtaaactcagcacgagccattttgcagtggaaatttaatggagccaccat

SEQ ID NO: 771652 - DNA, 100 bp, Homo sapiens
gagacggcggcagcgctggactaggtggcaggtcaaaatgcagatcttcgtgaaaacccttaccggcaagaccatcacccttgaggtggagcccagtgac

SEQ ID NO: 771653 - DNA, 74 bp, Homo sapiens
gtcattaacaaggaacggaaaggagattacttggggaaaactgtccaaggaggagatgttaaagtaacccatct

SEQ ID NO: 771654 - DNA, 100 bp, Homo sapiens
tgtatgaccttcacctcattaacagtagatgatgagctggagatcaaggcctactatgcaggccacgtgctgggggcagccatgttccagattaaagtgg

SEQ ID NO: 771655 - DNA, 82 bp, Homo sapiens
ctgcggcagttgcgcgctgggattgttgcggtgcgctggagccgtggagacctttggcgacttggcctttggcgacatcttc

SEQ ID NO: 771656 - DNA, 100 bp, Homo sapiens
gagatgcctgtaccgtgatgtgacgctggagaacctggcacttatgtcctccctgggtgtgaccatgaagctcatggatgaggtcgccgggatcgtggct

SEQ ID NO: 771657 - DNA, 75 bp, Homo sapiens
ccagatcgctactaccccgcagttcccggacatgatcctctccgcctctcgaggatttccatcaccaaggagtaa

SEQ ID NO: 771658 - DNA, 100 bp, Homo sapiens
tggctggttggtctgtggagtgcctgaagtgaccagctttttgtaaggtgtcatggagaaactccagctgggcccagagattctgcagcgggaaaatcca

SEQ ID NO: 771659 - DNA, 50 bp, Homo sapiens
cctcagaggacaacgaagtgttcgacattggtgaagactgaggaagaaac

SEQ ID NO: 771660 - DNA, 132 bp, Homo sapiens
ctgaacagaagccgggagaaattgctgaagaactcgcaagctcctacgaaagaaagctcatcgagacgcgcgcacgcccacgctggatcctgacacgatgcacgcgcgcctgcgcctgtccgccgatcgcct

SEQ ID NO: 771661 - DNA, 100 bp, Homo sapiens
ttaactacccttgcagatctattccggccacccattgatttgatgcataaaggcagctttgaaacagtttggaatttcagctgggcagcttcgatcccac

SEQ ID NO: 771662 - DNA, 100 bp, Homo sapiens
gctactgcttccagaagcctggaggtctcccacacattctccaactacccgcccggcgtccgctacatctggtttcagcacggcggcgtggacactcatt

SEQ ID NO: 771663 - DNA, 82 bp, Homo sapiens
agaggtctcgcattaaggctctggcagagctccacgcaggagatcggtgaggagctgatcaacggagtcatctactccatct

SEQ ID NO: 771664 - DNA, 100 bp, Homo sapiens
tatcagtatccacagaaggagcaaatacttcttcatgtgattttacaacgagatgctgctctccatagggatgctcatgctgtcagccacacaagtctac

SEQ ID NO: 771665 - DNA, 100 bp, Homo sapiens
aggacatcaatacttcggaattgagatgaacaggaagcggtgcaggaggttcctagagttgttcagaatcctccaaaaccagtcatgaccactagaccca

SEQ ID NO: 771666 - DNA, 89 bp, Homo sapiens
aattggtaataaagcagatctggatcatcaaagacaggtaacagttaacctcttccacatgcagcatctgcaggctgcttcccttgcag

SEQ ID NO: 771667 - DNA, 100 bp, Homo sapiens
atgatgctggcacagggccttctgctgcatttcctgcccagaggcactgctgagaaagatctagaaagtgctaaacttgtacagattttacatagactgc

SEQ ID NO: 771668 - DNA, 89 bp, Homo sapiens
ctgggcctaggtctgcgccctgaaatcttcccaaggctgcagacaccgacggatttgctttgggagccagagtagctgccgccaccaga

SEQ ID NO: 771669 - DNA, 100 bp, Homo sapiens
agtgttaagagaagaaatgaggacatatcagtatcggtgaatctggattgggaaagtcgacattaatcaactcattattcctcacagatttgtattctcc

SEQ ID NO: 771670 - DNA, 102 bp, Homo sapiens
gatagtctccagcgggcctggactgtgggctggtgtgtggaactggtggacccaagtggagagattgtggaactggcgaaaggtgcatgtccctggaaggag

SEQ ID NO: 771671 - DNA, 100 bp, Homo sapiens
cagaagcgcctaggaaggacgcagaggtgggggagcttggaggctacagttcctattttgacgagaaaggcttggttagacaacagctggattcttttga

SEQ ID NO: 771672 - DNA, 60 bp, Homo sapiens
ggatatacagcagcgaggaggggaagagagatctattaatgagatgaagcggttggaaga

SEQ ID NO: 771673 - DNA, 100 bp, Homo sapiens
ggctgtttgtttgctggatcatcgcttggtaaacgaggtttatcaggtagaagatgtgtgtgaagaagaaatgccagaagagtcagatgaatgtgtccgg

SEQ ID NO: 771674 - DNA, 98 bp, Homo sapiens
aggagcagccatggccccagacttgtcgcacggatgcagaaaacttaatggaggaggctgagttactccacaggatccgctgaacataggatgttgcc

SEQ ID NO: 771675 - DNA, 82 bp, Homo sapiens
gatatccttctcaaccttgtgggatgtgaaaactctgttactgaagatgtcatctgggtgattctcagtgtggaggtgggtg

SEQ ID NO: 771676 - DNA, 75 bp, Homo sapiens
cccagggctgcctggtggctgagattcttcccctggtggccatgggacccaggtcaatgtcacctgcatcgtgaa

SEQ ID NO: 771677 - DNA, 100 bp, Homo sapiens
cctgccgcttcaaccaggtctcctgcaaccaggctctgcgctcctcagaccaccggcaggtgaacagcctgatgcagaccgaggagtgcccacctatgct

SEQ ID NO: 771678 - DNA, 102 bp, Homo sapiens
tgaatggatctatagtgattgtcagagcagggaaaatcacctttgcagaaaagctttttaaagatgacatcaggtatctgttgacaatggacaaactatggc

SEQ ID NO: 771679 - DNA, 82 bp, Homo sapiens
agaattgtcagatttcgctttgatgaatcaggtcccgaaagtgctaaaaagagaggagagattgaatttgaagtagtttatg

SEQ ID NO: 771680 - DNA, 80 bp, Homo sapiens
caggacctgggcggaggccgccaagacgctggaccccagcatttttgaaagtttgcagaaagagcgagtagaagctggag

SEQ ID NO: 771681 - DNA, 49 bp, Homo sapiens
cacacttatcacaaacaactctctcagccaagtacccggccatcaaggc

SEQ ID NO: 771682 - DNA, 74 bp, Homo sapiens
ccaaagtgccatgtctttaatgctgcccttccaaaggccaccatcctggatctgtcttgtaataaactgactac

SEQ ID NO: 771683 - DNA, 74 bp, Homo sapiens
ttattcagcgactagtaagcctatgtcatttcatccaccacattacttagtgatgtcttggcattgcccatttt

SEQ ID NO: 771684 - DNA, 98 bp, Homo sapiens
gcctcggccacttggttctgccagatgttcctggggttactgtaaatgggaaggacaggcagagctaaacaaggactttctgaagaccttttcccccg

SEQ ID NO: 771685 - DNA, 98 bp, Homo sapiens
ggattggattcagcatcaaaatacatctactcatattgagagctgtcgacagttacgtcaacaagtaacagattccctggataccctttcagaaattt

SEQ ID NO: 771686 - DNA, 118 bp, Homo sapiens
ctgccttggggtggtctaaacaaccttcccaaagctacactttatttgaatcgagtcaaattgactttatcagctttaatcgatgggaagaacttcagtgcaggaggtcacaaggttg

SEQ ID NO: 771687 - DNA, 82 bp, Homo sapiens
actatgtacatggatttagtggacggcatctttttgaaccaaattatgctgcaaatggttttggccaaattgggcgagggca

SEQ ID NO: 771688 - DNA, 100 bp, Homo sapiens
aaccggaaaagcttaataggcaatgggcagtcaccagcattgcctcgaccacactcacctctctctgctcatgcaggcactgggatgtctactctataaa

SEQ ID NO: 771689 - DNA, 50 bp, Homo sapiens
cgcagctgaaagcgtgaactataaacttctgcactggaggggcctctcct

SEQ ID NO: 771690 - DNA, 50 bp, Homo sapiens
gtcagggagaggaggcggcgagagagattttgcaagaacgaggctcaagg

SEQ ID NO: 771691 - DNA, 49 bp, Homo sapiens
tctgtcccaagcaggagaacattgcagcaaaagctggcaggctgacaga

SEQ ID NO: 771692 - DNA, 105 bp, Homo sapiens
gcccggtgcccgaggaggcagccaagctcgtggcctgcctctgcgtgcaacactctgctccagccaaggtggtgagggcagctgttcctaaacagcgcaaaggca

SEQ ID NO: 771693 - DNA, 51 bp, Homo sapiens
aaagccatcaagaaatttggagctaatgggaatgacagcaagaaatttaaa

SEQ ID NO: 771694 - DNA, 95 bp, Homo sapiens
attggagggtagacctgtgggcacggacgcacgccactttttctctgctgatccagtgtttgatgatggtgatgagcgaacattgagacgtacct

SEQ ID NO: 771695 - DNA, 100 bp, Homo sapiens
gtggagggcctcgccatgtcctgctgcccgacatgggaaagcggaaccaccaaaaggagtgatgatcaacgatctcatgataaatctggatgctagttct

SEQ ID NO: 771696 - DNA, 95 bp, Homo sapiens
tatggtcacttgaaagagcctctacttacatttcatctttttgatgcttttgtcagtgtactggcttccaatcagaagactatacaacctcctag

SEQ ID NO: 771697 - DNA, 83 bp, Homo sapiens
gtcagacgcagccgtagacaccagctccgaaatcaccaccaaggaaccacgtgaatgttgagggggcgacacacaagcaggtg

SEQ ID NO: 771698 - DNA, 100 bp, Homo sapiens
cagcgcggtcgtctgtaccctcccccgggagagcaagccgggcggcctgccccgccggagcagcatcatcaaggtgggcaccatgtccttgaagcttcag

SEQ ID NO: 771699 - DNA, 51 bp, Homo sapiens
ttaaacaagagatttccacagaagacaggggcaagtgtccgagtggtgaat

SEQ ID NO: 771700 - DNA, 82 bp, Homo sapiens
ctgcaagggggaagtagagagataacaaaagctgctcagagtctcaatgaacttgtgtaccactggtataaaaatagacaga

SEQ ID NO: 771701 - DNA, 100 bp, Homo sapiens
agctgcggggcaagatggaggcgctgattttgttttcggctttgtgagaaaccttaccatcaaacacgatggccagcaacgttaccaacaagacagatcc

SEQ ID NO: 771702 - DNA, 74 bp, Homo sapiens
cgacagccttttactgtgaacagtgattcgcctttgccagtctcatctcgtgtctgctttgttaagttccatga

SEQ ID NO: 771703 - DNA, 82 bp, Homo sapiens
agctgaggtgtccgtaaagattccagagaagcctgtgaacaaaggtgagcccatcactttctgtgaggagagttttgtaaag

SEQ ID NO: 771704 - DNA, 74 bp, Homo sapiens
tggcggagggcggcagcccagacgggcgggcagggccgggctccgcagagagaagaagaaggaggttcctgctg

SEQ ID NO: 771705 - DNA, 98 bp, Homo sapiens
ggcagcctgaacggagtgtgcgacggattgggaggtcattgaatctttgggaattattatttataaagcactggactatggtttgaaggagaatgaag

SEQ ID NO: 771706 - DNA, 51 bp, Homo sapiens
agcggcggcggcggcggccctccgtgacctacggcatgatgagctccaatg

SEQ ID NO: 771707 - DNA, 75 bp, Homo sapiens
tgaaggtttacacttgtcaacttcctcttcagtcatcagtgtgtgtttccattgtagaaaacctggtcatggaat

SEQ ID NO: 771708 - DNA, 51 bp, Homo sapiens
gctaagttgctgatcgtggcggccggaaggtggtggtcgtacgctgtgaag

SEQ ID NO: 771709 - DNA, 100 bp, Homo sapiens
agaagatcatcattaaggacggaggcacgcgaaaacagtgttacaccagaagagcagccggcctcctgtaccgatctccaacgcgaccaaacgcagtttc

SEQ ID NO: 771710 - DNA, 75 bp, Homo sapiens
ctcttagcagcgcgcggagaagaacggggagccagggagatgtgcattgagcaggatgggagagtccatctcact

SEQ ID NO: 771711 - DNA, 104 bp, Homo sapiens
ccggcgccgtccgtgcccgcgggacctgacagccgggtcagagtgacatattcgatgccatgttccctgtcactcacatcgctggggagactgttatacagcaa

SEQ ID NO: 771712 - DNA, 75 bp, Homo sapiens
gaagacctattatcagatcaaccaccaaagtgggaaacattgaaatcaagaatgaccagtccatgggtgagatgc

SEQ ID NO: 771713 - DNA, 90 bp, Homo sapiens
ggaaaacccccattcattctggattggtggatctgaagtacaaaatattttccagagcagcccgacggccatggaggctgaagagacgat

SEQ ID NO: 771714 - DNA, 83 bp, Homo sapiens
ccaattcggtggaacgaggacgcggactgcgaaggcagctgcggttggatttctcacgatgtccagtgttatctccatgtctg

SEQ ID NO: 771715 - DNA, 100 bp, Homo sapiens
tgatccgggagagtgagagctccccaggggagttctctgtgtctgtgaagctggaggagattgatggattctttgcgagaaataacgaagagtacctggc

SEQ ID NO: 771716 - DNA, 101 bp, Homo sapiens
ggtgatggcaacggccaacttcggcaagatccagatcgggatttacgtggagatcaagcgcagcgatgaataactgaagtgaagtgatggactccgatttg

SEQ ID NO: 771717 - DNA, 100 bp, Homo sapiens
cgcgagcctcgtggtgtggtgtatggccgtgggcatctcctacattagcgtctacgaccaccaagaaatggctgagcaggagcgctttctactgcatcag

SEQ ID NO: 771718 - DNA, 75 bp, Homo sapiens
ctggacgccgatgccgatgatggctgggcaggccataaaattttgagtagaaaaatccagaaatttgaaaatcag

SEQ ID NO: 771719 - DNA, 97 bp, Homo sapiens
gccaaaccaaatatggaaatgctaatgcctggagatactgtaccaaagtttttgacatgctcacagtagcagctgttttgcaaaaggcatcaaatta

SEQ ID NO: 771720 - DNA, 114 bp, Homo sapiens
gaccgagcctgggaggccggccggtgccagcacctttcggcttctgagacggcggcagcagcggcattcagagctgtaggtaaaacttgcctactgatcagttacacaaccaat

SEQ ID NO: 771721 - DNA, 88 bp, Homo sapiens
aaggtggcctaccaggaggccaggggtgtcgccatggagtggacgcttctcttgtgagccagctggaggtcttacctctttgactgaa

SEQ ID NO: 771722 - DNA, 50 bp, Homo sapiens
gtgcttcctgcttcatagataagaggccattctgcttcagacaaggttca

SEQ ID NO: 771723 - DNA, 100 bp, Homo sapiens
tgttcgaagggggctgcagcggagatccgagagcagggggatggggcagaggacgaggagtggctgtcacaagatgaaggtagaggcacattatacaaat

SEQ ID NO: 771724 - DNA, 100 bp, Homo sapiens
ggcagatatcgaggtggatggaaagcagcgggccaatccgagcctacatccttgcccacaaggatgccatccagctctggaggacgctcatgggacccac

SEQ ID NO: 771725 - DNA, 100 bp, Homo sapiens
ttctctgctgtctccttctcttcctcagggctcccgtgtctgctcgccctccgacgctgctcagcttccttcaaaatgtctactgttcacgaaatcctgt

SEQ ID NO: 771726 - DNA, 100 bp, Homo sapiens
agatgatctgccatgtgttcgagtcggaggataggctgacccgcggctgattgagtccctctcccagatgctgtccatgggcttctctgatgaaggcggc

SEQ ID NO: 771727 - DNA, 100 bp, Homo sapiens
tcaacaaggccacgccctacaactacccaggagaggcaagagaaagctctgggcatcctgacatacctgggccagagtgcagcggaggcacagactcaac

SEQ ID NO: 771728 - DNA, 95 bp, Homo sapiens
ttccttcgtccctgacatcatctctgtgcactgataataaccctgcaggaaaatatgttgtgttcttcttttaccctcttgacttcacctttgtg

SEQ ID NO: 771729 - DNA, 98 bp, Homo sapiens
gcggctacgctgaggctctccgctcaggacagtcattttgtttactcattcagccctgttgcaggtcccaataaactcttcataaggttgacagaagc

SEQ ID NO: 771730 - DNA, 100 bp, Homo sapiens
cactttcgccagcccgtgccgcgagcgcggcctgcaggagatcatggaagggaagtggttgctgtgtatgttactggtgcttggaactgctattgttgag

SEQ ID NO: 771731 - DNA, 90 bp, Homo sapiens
agtttattgtcccatgttttcttcaaacagggtctgactgcgtaccatgatatctccctggacaagtgctatgtcatcgaactcaacacc

SEQ ID NO: 771732 - DNA, 80 bp, Homo sapiens
atgtgatgcctgctagccaaaagggttatctaccttgcctgctcctatgccacagtgtacctgatctacctgaaatttaa

SEQ ID NO: 771733 - DNA, 82 bp, Homo sapiens
ggagaggaagaactagtttcccaaacagatgttaagacattcttggaagccttaccggagaactacgatgacccgcacaaaa

SEQ ID NO: 771734 - DNA, 73 bp, Homo sapiens
ttgtttgaccacaacaagggccggattctcacccaggaaaaatgaggaagctgtgagtaccagtggaaggaac

SEQ ID NO: 771735 - DNA, 90 bp, Homo sapiens
gctatggatgatcgagaggatctggtgtaccaggcgaagctggccgagcaggctgagcgatacgacggtaccagcagatcctgcaccgga

SEQ ID NO: 771736 - DNA, 100 bp, Homo sapiens
ccgcgggacctgacagccgggtcagagttcatggcctcccacgggaacgacgccgcgagagccaggtttgagtccaaagtaccctccttctactaccggc

SEQ ID NO: 771737 - DNA, 98 bp, Homo sapiens
gagccgacctgcagcaaataattgtcagtctaacagaatcctgtcggagttgtagccatgccctaggcaatggcgaactgagcaataaggaatttgtt

SEQ ID NO: 771738 - DNA, 100 bp, Homo sapiens
acgtctactttgagaactcctccagcaacccatacctgatccggagaatcgaggagctcaacaagcttgatcctctcccagaaaaggttttacagcaaag

SEQ ID NO: 771739 - DNA, 100 bp, Homo sapiens
gcccggggagaggcaccatgagcggccactggaagggaacacctgcctctcccagatgcacagctgggctccgctgaaggtgctgcacaatgactccgac

SEQ ID NO: 771740 - DNA, 98 bp, Homo sapiens
ctgcctagacctcctggtagatcagccccacagcctcctgagtatcctggacgcccagacatggctgtcccagggatcttgctctggggaaagccagc

SEQ ID NO: 771741 - DNA, 77 bp, Homo sapiens
tccacacaactccagtgctaactcaacaggagaatggtgttgaacgcgtgtgtcctgagagcctgctgcagtccagg

SEQ ID NO: 771742 - DNA, 127 bp, Homo sapiens
tgatgccatttattgatgaaattttgaacaacattaacactattatttgtgatcttcagcctcaacaggatcttatggttggtgatgaggcaagtgaattacgatcaatgttagaagttaactaccc

SEQ ID NO: 771743 - DNA, 100 bp, Homo sapiens
ggaaaagactcatatcaacattgtcgtcattggacacgtagattcgggctttggtcgatggaccttgcactcaagtgaggagacaggccatgcctttcaa

SEQ ID NO: 771744 - DNA, 100 bp, Homo sapiens
gcatacaccacttagtaaactaatgaaagcctattgtgaacgacagaccatcatggagcagttcaaccctagcctccggaacttcatcgccatggggaag

SEQ ID NO: 771745 - DNA, 75 bp, Homo sapiens
ggaagatggcgaaggtctcagagctttacgatgtcacttgggaagggtccacatatagcctcagttacattagct

SEQ ID NO: 771746 - DNA, 98 bp, Homo sapiens
agtaactgaagaagaacttaagaaacacaacaaaaaagatgattgttggatatgcataagagggattaatgaaaatcaagttccatcctcagacaaga

SEQ ID NO: 771747 - DNA, 82 bp, Homo sapiens
tgggcggtgccggcgccggagacgatgccgttgtaagaatgattgatgttggctgatattggagtgctcattcacatgaagt

SEQ ID NO: 771748 - DNA, 75 bp, Homo sapiens
gagcaaggagaaccagcctgaaaacagccagacgcccaccaagaaggtgctggagaatctggtaaaagcaccatt

SEQ ID NO: 771749 - DNA, 100 bp, Homo sapiens
tgatatgaatgaccctgaagcagtagtatccccaggaggatctcctgatgcagtccagcaaagaactttcacatgtggacctccctgaagattttctaag

SEQ ID NO: 771750 - DNA, 75 bp, Homo sapiens
ctgaatgtgttactccattgctgaggagtgattcgagtgagggttgaaaaggatccagaacttggatttagcata

SEQ ID NO: 771751 - DNA, 75 bp, Homo sapiens
tgggactacaccagatctgcccaggccttcactcatctcaaggtgattctgatggtgggactacccggatctgga

SEQ ID NO: 771752 - DNA, 74 bp, Homo sapiens
gcgtggatagcctgaaggcagccattcaggttttgggtcctgctcctcggtggtgttccttcttagacaacttg

SEQ ID NO: 771753 - DNA, 97 bp, Homo sapiens
cggaatcagatttgaaaatgaaagtagaagctgctcgagaatgtcgcagaaagaagaaagaatatgtgaaatgcctggaaaaccgagttgcagtcct

SEQ ID NO: 771754 - DNA, 96 bp, Homo sapiens
ggcgacttgtgcacacatgtagagacctttgtatgttggccttgccatcaaaccaggaacctcagttgagtatttggcaccatgggctaatcagat

SEQ ID NO: 771755 - DNA, 75 bp, Homo sapiens
ctaccaacgtttggaccagaagtgactgcagcgccaagcggcatccaccaagcatcaagttggagaaaagggaac

SEQ ID NO: 771756 - DNA, 98 bp, Homo sapiens
tacgagagctgctggtggtgttgtcgtggccggagcggcccgcgcctgggctgccggcacttcgcggcaggagaaggcacaatccctgtggaatccag

SEQ ID NO: 771757 - DNA, 75 bp, Homo sapiens
cgggaggaaccgttacgggaactgaagttgcgggttgtctttctactcgggacactcttcctttgggatgtactg

SEQ ID NO: 771758 - DNA, 87 bp, Homo sapiens
agatacatcagtgtgggaagccaagcagatacaatctgtgtctgtgtggagtgttgcaggacgagtggaaatgactgtttccaagtt

SEQ ID NO: 771759 - DNA, 100 bp, Homo sapiens
tgtcgggctggccatggcgaggggtgcacggcggccacctgagtggcgcggcggtgtcaggaactcattatacaatgacaaatggaggcagcattaacag

SEQ ID NO: 771760 - DNA, 117 bp, Homo sapiens
aaagaatgggtcaaccaagaacgtcaaacactccaacgattgagagcatttaaagatgattttctgccgtctcttggcaaaaatggcaaataatgatgctgttctgaagagactgga

SEQ ID NO: 771761 - DNA, 100 bp, Homo sapiens
tgcagaaagagaaacttaaagtgacttgaattcttgttcacagtgggggcccctgaagccactgatggaagccacactaccggggcatcggaccatgaac

SEQ ID NO: 771762 - DNA, 49 bp, Homo sapiens
gtttacctaacacgtctttgcaagcttactgaaacaaatgcaggtatca

SEQ ID NO: 771763 - DNA, 75 bp, Homo sapiens
tcgccttgctcctcgccgcggcggggactgcaggtttacccaaggtccagcctagcccctaggcaccatgtcgga

SEQ ID NO: 771764 - DNA, 100 bp, Homo sapiens
gagtggaagcgcttcctgaagaataactgggtgttgctgtccaccgtggccgcggtggtgctagatcaggagaacctcagtctgacgacattgaagctag

SEQ ID NO: 771765 - DNA, 96 bp, Homo sapiens
tgaaagcttgttacataatgattggactcacaattatcgcctgctttgctgtgatagtgtcagccaaaagggcacagttggtggatctgaaatctg

SEQ ID NO: 771766 - DNA, 82 bp, Homo sapiens
gtccggaaccagacgatgagacagagttgcgaccgcgcggcagggcccttggaagaaaatcctcgctgtgtccaggctgagg

SEQ ID NO: 771767 - DNA, 75 bp, Homo sapiens
acttcttttttgagaaaggaaggaatatatcctgactgattgaggaaatcagtggtgcttcaggatattgtgaat

SEQ ID NO: 771768 - DNA, 82 bp, Homo sapiens
tgccgtctgctcttctgcctcttgatctccgccaccgtcttcaggccagattctgaaggaagatttccattaggtaatttgt

SEQ ID NO: 771769 - DNA, 50 bp, Homo sapiens
gccacctttccctttatttccggagtgggaaaagcaaggatgaacaattt

SEQ ID NO: 771770 - DNA, 100 bp, Homo sapiens
gggaggcagcgcgggatcccagcctcaggcgtgcgcggacggtgtgcggcttgccttgcgccatggactggcagccagacgagcagggcctgcagcaggt

SEQ ID NO: 771771 - DNA, 83 bp, Homo sapiens
gagtccagccaacagcagaagagaaagccagttatccacggactggaagatcaaaagaggatgggcttaggtcacgagcaagg

SEQ ID NO: 771772 - DNA, 112 bp, Homo sapiens
ggcgctcgagggaccatggccgatcctcgcgtgagacagatcaagatcaagaccggcgtggtgaagcgatgccttcaattaagttgcagagttctgatggagagatatttga

SEQ ID NO: 771773 - DNA, 49 bp, Homo sapiens
cgccatcatcctcatcatcatcatagaaagctgacttcatgagaccgag

SEQ ID NO: 771774 - DNA, 103 bp, Homo sapiens
aggctttggctttgtgagttacgaaaaacacgaggatgccaataaggctgtggatgagatgaacggaaaggagctcaatggaaaacaaatttatgttggtcga

SEQ ID NO: 771775 - DNA, 100 bp, Homo sapiens
tcattctattcatgttgctttttgatggccatggcataaggaactctatcccaggaatacagctttgcattagcgactgcatttgcctccagacttgtca

SEQ ID NO: 771776 - DNA, 80 bp, Homo sapiens
tctcaggcggcaccctgtccccgaggaggggaccatgacacagtcaccgacgatgagggcgcacctgctgtcctggagct

SEQ ID NO: 771777 - DNA, 98 bp, Homo sapiens
ccccgacgcgtcaggcctgcctagacggtgctgggagcgcgtctccttgaacgttgtcccgcctgggattgcgaggaggactgagaattttctgaccg

SEQ ID NO: 771778 - DNA, 90 bp, Homo sapiens
tatgcaagcacagatttgcttttacaccaagtaacgtgactcttctgcttcaggcctgccaaaagaaaagattgtgacagatcactggac

SEQ ID NO: 771779 - DNA, 100 bp, Homo sapiens
ggagttgctgcccttccggagtccgccccgtgaggagaatgatatgaggccccaggattcctggcgaggtcctcctccccttttccagcagcaaaggttt

SEQ ID NO: 771780 - DNA, 90 bp, Homo sapiens
caccagcccaaccgtgttgtatgtgagtggaggaaatacgcagtctcttcaagaaaatgaggaggaggagattgggaacctagagcttgc

SEQ ID NO: 771781 - DNA, 100 bp, Homo sapiens
agcaggtgcagagcactgcgctgtcagcgatagcccagtggatggccattccaggaatgggtaccacagaccatgtcatcgtcctggcgtccacgaaccg

SEQ ID NO: 771782 - DNA, 83 bp, Homo sapiens
ggattatggtgtccagctggttgaggaggtgtctgtttcatgtggaatacctgacttcaggtcaagggatggtatttatgctc

SEQ ID NO: 771783 - DNA, 51 bp, Homo sapiens
ctctgttccaaatgctttgctggactgtgtgctgaagaggttcatttgtgt

SEQ ID NO: 771784 - DNA, 75 bp, Homo sapiens
caggccccttgcaatcaactctagccgccggactcccgaccagacaatgcagatcttcgtgaagactctgactgg

SEQ ID NO: 771785 - DNA, 75 bp, Homo sapiens
ttcatatgatattggcaggccatcgatttagtaaagcagggcaggaaaatgtttataggaggccttagctgggac

SEQ ID NO: 771786 - DNA, 90 bp, Homo sapiens
gaaagacccaggagaagccgcccaaagaactggaacatatcctggaggcttagtgaaaccagctctctcttcccatcaaatgagaagtct

SEQ ID NO: 771787 - DNA, 88 bp, Homo sapiens
actgagctctgccgggacatgttctccaaaatggccacttacctgactggggaactgacggtccatgatggcagtgaagaagaagacg

SEQ ID NO: 771788 - DNA, 80 bp, Homo sapiens
ctcgcctacttcctggtgtcgatcgccggcctcctctacgcgctggtacagctcggtacaggtttgcagattccgccagc

SEQ ID NO: 771789 - DNA, 100 bp, Homo sapiens
ttctcattactgccagggctgtgcctacaaaaaagccatgcaggatatacgtactgtgggtcttgtgctgcccatgcttataaacaagtggatccgtcta

SEQ ID NO: 771790 - DNA, 75 bp, Homo sapiens
cgctgacaggggggcctggccgcgcagccgcttgcttggctcaggaacaacagaagagaataaagaaaatgacct

SEQ ID NO: 771791 - DNA, 82 bp, Homo sapiens
tcaaagaggccaagcacattgcggaagaggctgaccgcaaatacgaggaggacagagcgggatgccaccagcttgtccaaag

SEQ ID NO: 771792 - DNA, 75 bp, Homo sapiens
ggagcagcccaagcgccttccctcacggcgccctgcgtccggcagaggaggcgagcatcccgctcaggtgatgag

SEQ ID NO: 771793 - DNA, 98 bp, Homo sapiens
ggagagctgtgtctgaggagccttggaacattcacccagtatttgataggtacaagagttacagcccttatgacatgttggaaagcatcaggaaagag

SEQ ID NO: 771794 - DNA, 100 bp, Homo sapiens
tatctgaagaaaagtagaaggaaaaacagaacgttgcaaactctggaaaaaaacttggtgtgtgcaaatgattctgttatccctcaaatctgtggtcctg

SEQ ID NO: 771795 - DNA, 82 bp, Homo sapiens
gctgcggcagaagggctacgaagaagtgcttcagcgggccaggaagcgcatccaggagggcgaactttctgaccaagtatac

SEQ ID NO: 771796 - DNA, 75 bp, Homo sapiens
ggaaaattcaggcaacgcctcgcgttgaaaaccaccaacgcttcgatccgtccaagtcctccacccacagaacat

SEQ ID NO: 771797 - DNA, 142 bp, Homo sapiens
agcagatatgcctgctaacatggataagcatgccctgaaaaagtatcgtcgagaagcctatcatcggtgctctgtggatgtgtatagttttaaacccccactgcaagttggagcaaaaggccagttggctaaaacagctgaa

SEQ ID NO: 771798 - DNA, 100 bp, Homo sapiens
cccaggactttgacagcttcctcctcactgtctgtgtccagccaaggccacctttgatgccatttctaagacctacagctacctgacccccgacctctgg

SEQ ID NO: 771799 - DNA, 83 bp, Homo sapiens
ccgcctctgtgccactttgcatcccacgccggaggaggcattaacgagaccggacactggccaaaagaagaccctagacaaga

SEQ ID NO: 771800 - DNA, 100 bp, Homo sapiens
ccaccaattatgggagggctggccaacttctgctacagacgactcagtaaaaccacctcagctaattgattatctgcagcagaagaaaacagaaggttat

SEQ ID NO: 771801 - DNA, 97 bp, Homo sapiens
agcaactgcacctcgcccctggacttgaactgccatgtcctctgaagaaggaaagctcttcgtgggagggctcaactttaacaccgacgagcaggca

SEQ ID NO: 771802 - DNA, 101 bp, Homo sapiens
aaggcaggcggcgcggccggcctcttcgccaagcaggtgcagaagaagtttagcagggcccaggagaagctggatctaccatgaaagacttgtgaatccag

SEQ ID NO: 771803 - DNA, 98 bp, Homo sapiens
tgcactcccggccgggtggtgggcgcatatcctgggtagcctctaggaagcgctagacacatgtggaggaactgcaatgtctggtggagaacagaaac

SEQ ID NO: 771804 - DNA, 50 bp, Homo sapiens
ccgccaacatgtacagggtcggagtggctggatctctgctctggtggtgc

SEQ ID NO: 771805 - DNA, 74 bp, Homo sapiens
cgccggccccgcgcgcgcctcgaggccgagtcaagagccgagactgtctgaagctgggcccacctgctgaggga

SEQ ID NO: 771806 - DNA, 100 bp, Homo sapiens
tcggcaccttcggcaaagtgaaggcgatctagggcagccctgcagaggtacctgttctactgtaatcgctatatgaaccacatgcagagcctgcgctttg

SEQ ID NO: 771807 - DNA, 75 bp, Homo sapiens
ctccggcgccgagagtgggcatggcgacttggtctcagccggactcgggaccaaactcttacccaggatctactg

SEQ ID NO: 771808 - DNA, 51 bp, Homo sapiens
cccgggtggcctttaccttgctggagaaggggacccaagtaacagggagga

SEQ ID NO: 771809 - DNA, 100 bp, Homo sapiens
accgatgttcttctacgtgacccagggccaagaggagattgccagctcgggcacctcctacctgaacaggtcaaaatgcagatcttcgtgaaaaccctta

SEQ ID NO: 771810 - DNA, 109 bp, Homo sapiens
tggtcttgctgtctcaggagtggcaaaggtggaagaaaattcttgtctgtatgcaggagctattcttgaagtttgtggatgaaaattgggaaggttccctcaagtccaa

SEQ ID NO: 771811 - DNA, 98 bp, Homo sapiens
tgcttttgatgtctgacaacgtggatcgttgttttgaaacctacttgtcaataccatgctttcctgtaatatttgtggtgaaacagtaacctcagaac

SEQ ID NO: 771812 - DNA, 96 bp, Homo sapiens
ctgggcctttgtcaggaaatctgcaagcccggaagtttcagaaggctccatggtccccttctcgatgcgcatcttgcacgcggagcttcagcagta

SEQ ID NO: 771813 - DNA, 100 bp, Homo sapiens
ttctatttccaaagtatgttgcacccagtcactgcttcaaccacctgtgagaaattagaaaaagccaggaatgagttacaaacagtgtatgaagcattcg

SEQ ID NO: 771814 - DNA, 82 bp, Homo sapiens
cgggatttgcgacgctgtcacaggttccagggtataccccgcgaatgaagcaattctgtggtgttcttggtcacacatttat

SEQ ID NO: 771815 - DNA, 75 bp, Homo sapiens
gttttcgtcagcggatttcaaccaagaatgaagagttccagggtcacccccgagaggacaacaggcatctggaag

SEQ ID NO: 771816 - DNA, 90 bp, Homo sapiens
ccccaatccgcatgagcgtcctttcggttttaaatgcacagagagcaggatacaaggcagccatagttcacaatgttgattctgatgacc

SEQ ID NO: 771817 - DNA, 75 bp, Homo sapiens
gttcattgtttgtcaccacaaaaaggacaggtggaagttgatgggtcgaaactaaatgtgaccagcacgtggaac

SEQ ID NO: 771818 - DNA, 49 bp, Homo sapiens
aaaccccaacaacagctcccttagaaaccacaacaaaggtgcttgccca

SEQ ID NO: 771819 - DNA, 100 bp, Homo sapiens
ctatgtttccaaaccagtcagctgggctgatgaaacggatgacctggaaggagatggccctagcacaaaacacagatcttaaagaacgcttacgcagaat

SEQ ID NO: 771820 - DNA, 75 bp, Homo sapiens
ttcgacttgccaggaaaggctctatgagagcagagcaagatatgtgaattacatcaaaacatcagaggttgtcag

SEQ ID NO: 771821 - DNA, 96 bp, Homo sapiens
ctgaaacctgagttttgattcaccagacaagttggatggcttgaggactggtactaaaaggaaacgtgactgggaggccattgccagcagaatgga

SEQ ID NO: 771822 - DNA, 75 bp, Homo sapiens
ttctgtatgggaaccatgtagtgggtccttctggcactcctctggtggaccgcccccatcggccacacttgccct

SEQ ID NO: 771823 - DNA, 98 bp, Homo sapiens
gtgtgatgacctaaagctttgccattccgcaaagcagagtggtacaggtttgcagattccgccagcagcacagcaagctctacagatgagtggctctt

SEQ ID NO: 771824 - DNA, 76 bp, Homo sapiens
accctgctccagaacctgcatgaggacctgaagcctgacaggagcaatggccaccagcaggtgaagggcatcgctg

SEQ ID NO: 771825 - DNA, 100 bp, Homo sapiens
ggctgtggcgccggcgacggaccagcgacccaagcgccgcggttaaccacgtctcgtccacgacctccctagttgatgcggatgaaattaaaaggctagg

SEQ ID NO: 771826 - DNA, 51 bp, Homo sapiens
gtctctgctcttcagtacaatcctatttggagcaagaggtggtggtggcct

SEQ ID NO: 771827 - DNA, 82 bp, Homo sapiens
gagcgcatgatggcctactgcgaccagatcttccaggacgagacgggcaagaaccggtttttagaacttcagccataaaaat

SEQ ID NO: 771828 - DNA, 74 bp, Homo sapiens
tctcagcagcaacatccccaaacagcggcgtttcacggtggcacatacatggttcagccgtctgtatatctccc

SEQ ID NO: 771829 - DNA, 100 bp, Homo sapiens
cagcaaggcagcctccatggatcccccaagagccacagagcctggcgaggaggatggccgagaccagtccaggttggagacccaggtgtgggaggcgcac

SEQ ID NO: 771830 - DNA, 99 bp, Homo sapiens
gctgtcggcttcaaacagacggtggctgtgaaaaacaatatcgatgtcttctacttcagctgcctcatcccactcaatgtgctttttgtagaagatggc

SEQ ID NO: 771831 - DNA, 90 bp, Homo sapiens
ctcatgttcgagtctggggctgtcgctgtgctctatatttgtcaggatacgaatcaggttctcttcaagtgctgccagggatctgaagag

SEQ ID NO: 771832 - DNA, 83 bp, Homo sapiens
caagccgctggcagccgcggatctcaccgccgctcaggggcagcgaggtcacaggccccacctttgctgatggcgagctcatc

SEQ ID NO: 771833 - DNA, 75 bp, Homo sapiens
ggcgaaggcgggcggcagaggcgatcaggttttgggatttgagattgacgcggtgaactctgtccagttttcaaa

SEQ ID NO: 771834 - DNA, 78 bp, Homo sapiens
tggggctgccgccctggctgcaggacccggagctcatgctggtgaagagatggcgtttgtgaagagtggctggttgct

SEQ ID NO: 771835 - DNA, 100 bp, Homo sapiens
tgaagatctgcaatatctgtcacagcctcctcatccagggcttagcctccaagtgggactacgaaaagaacgagtggaagaagtgagagatgctggcctg

SEQ ID NO: 771836 - DNA, 75 bp, Homo sapiens
cttgctggtgcatgcgtcgtcggcctctgggcagcaggtcaccgaggaggagcccagctccaaccacacggtcat

SEQ ID NO: 771837 - DNA, 100 bp, Homo sapiens
aaggactgaggaacggtgcctggaaaaggatgcctttgtggaactgtacggccccagcatgcggcctctgtttgatttctcctggctgtctctgaagact

SEQ ID NO: 771838 - DNA, 100 bp, Homo sapiens
ccgtgagaaaggatttcagatgcagtggtttgtttacggctgctgatactttggctgtgaggcaaaaaaggagaatttatgatatcaccaatgtcttaga

SEQ ID NO: 771839 - DNA, 123 bp, Homo sapiens
tggcccccagcatgggctcctctgtcaatgacgctttaaagagagataaagatgccatttatgggacttggtggggaaacttaaagatgcttcgaaaagcctggaaagagcaactcagttgta

SEQ ID NO: 771840 - DNA, 80 bp, Homo sapiens
gccgccaccacccactccggacacagatgatgataattccgaagaaggcttccacactattcattcaggaaggcatgaat

SEQ ID NO: 771841 - DNA, 83 bp, Homo sapiens
ccctgcaccatgagctggggcaccgagctctggagctgttgcgcagccattggtacctgtattggggaaacatagcatacaag

SEQ ID NO: 771842 - DNA, 100 bp, Homo sapiens
ccaccattctactctgtttctgtgagtttgactattttagatgcctcatattgggaaaatgaggtacgttagtgttcgcgattttaaaggcaaagtgcta

SEQ ID NO: 771843 - DNA, 83 bp, Homo sapiens
ggccctgacggaggggaggaaacaatgcagatcttcgtgaagactctgactggtaagaccatcaccctcgaggttgagcccag

SEQ ID NO: 771844 - DNA, 74 bp, Homo sapiens
aagacctcaccttgggggagatcgaggtcatgattgcaggccggaaggtggtggtcgtacgctgtgaaggcatc

SEQ ID NO: 771845 - DNA, 116 bp, Homo sapiens
gcccgtgcctgtcttcagatcttcacagcacagttcctgggaaggtggagccaccagcctctccttgcaacatggccaacgccctggccagcgccacttgcgagcgctgcaagggc

SEQ ID NO: 771846 - DNA, 100 bp, Homo sapiens
ttgtttggatatcctgaaagatcaatggtctgaatttcctgctgctgttcacaaagatgctttttatctttaactttttgttttccccacttccgacccc

SEQ ID NO: 771847 - DNA, 82 bp, Homo sapiens
cctgcagcgggagctggacggcgagcgcgagcggcgcgagaaagagggtgtgaagacagagaatgaccacatcaacctgaag

SEQ ID NO: 771848 - DNA, 76 bp, Homo sapiens
cttgaatttcaaccccagtaacccctactgtgcagataaagactatttcctgattgtgattcagaatccaaccgaa

SEQ ID NO: 771849 - DNA, 100 bp, Homo sapiens
accgggctcggggagccggtctatggactttccgaagacgaggaagtgactttggtccagagacttctccagtcctgcaccttgaccacagtgctgactc

SEQ ID NO: 771850 - DNA, 86 bp, Homo sapiens
ggctgtgggacccgtgagcaagcagcgacgccagcggcggagaaccgacgaaagggaagccctatggggcggatgacttcctgcct

SEQ ID NO: 771851 - DNA, 50 bp, Homo sapiens
cggctacatcgatatcatcctgaagaaggaatcagagatcattgatttct

SEQ ID NO: 771852 - DNA, 100 bp, Homo sapiens
tgccagcgggaccaggatggctattactggatcactggcaggattgatgacatgctcaatgtatctggttcccctcttccaagacgggtgccaagtgatg

SEQ ID NO: 771853 - DNA, 75 bp, Homo sapiens
gtgtttccaggaagttcagagagaacagggaatacagtgagtaacctgatcatgattatacctccaatgttcggt

SEQ ID NO: 771854 - DNA, 82 bp, Homo sapiens
gggtgatattactggtcctgggttttaaaatcaaagatgggaaaatcggagaaaattgcccttccccatggccagcttgttc

SEQ ID NO: 771855 - DNA, 75 bp, Homo sapiens
cagtggtcgcttcttctccttgccaagaagtatgatgcgtttttggcctcagagtctctgatcaagcagattcca

SEQ ID NO: 771856 - DNA, 75 bp, Homo sapiens
gagtcgaaagtgaaattttcctttggccaacgtgacagtgccgcgtatgatgctgtccttgacagaaatgtggcc

SEQ ID NO: 771857 - DNA, 75 bp, Homo sapiens
ttcaagattatttgcaacagctcacgggagcaagaacggattttttatcaagcagaaatgcatcgaacaacgaga

SEQ ID NO: 771858 - DNA, 131 bp, Homo sapiens
ctggacgctgcacagcggaatctatatagggatgtgatgttagagaactacagaaacctgatcttccttgatgatgtctttctacctaaagatattgacctagacagtgtggatatggatgagacagagag

SEQ ID NO: 771859 - DNA, 75 bp, Homo sapiens
ggaaactgattggaaactctttgggaaagccactcgaaaagtgcattccactcttcgttcaacttgttttggaga

SEQ ID NO: 771860 - DNA, 74 bp, Homo sapiens
ctcattttagagtatcaagcagaccccaccaacaactgaacgctttggtcaggctgctacaatggaaggaattg

SEQ ID NO: 771861 - DNA, 85 bp, Homo sapiens
ccaggagtctgcactcttcagtctttgcagccatcaagttctctggagaccttcttcgactccctggtgacacaagcaaacatcc

SEQ ID NO: 771862 - DNA, 74 bp, Homo sapiens
actccttcggcagtccacccaccgccgccgcctcccagggcattttccctgaaacatatatccatttgaaagag

SEQ ID NO: 771863 - DNA, 90 bp, Homo sapiens
cgcttctagcaacgccgggccggtgctggagaatctggtaaaagcaccattgtgaagcagatgaggatcctgcatgttaatgggtttaat

SEQ ID NO: 771864 - DNA, 83 bp, Homo sapiens
cgcgcgcgaccgccgaatcgctcctgcagcagagaacatccagtcatggataaaaatgagctggttcagaaggccaaactggc

SEQ ID NO: 771865 - DNA, 101 bp, Homo sapiens
aaggattcatgagtctatataaaggctttttaccatcttggctgagaatgaccccagttattaaagcttttggcatcttgaagcgagcggccgctgaagta

SEQ ID NO: 771866 - DNA, 90 bp, Homo sapiens
ctcctatgatgtcccaccacctccgatggagcccgaccatcctttctacagcaacatcagtaagatggccctgctgtggcaccagtgacc

SEQ ID NO: 771867 - DNA, 100 bp, Homo sapiens
gaacccagtccagggcaagcagctccttccagcacgagatgtcccaagaaggcttcagcacagccctcacaatgacatcagactgcgggttcgggctgaa

SEQ ID NO: 771868 - DNA, 100 bp, Homo sapiens
agacagtaggttgcatgcctccgcctgtgtcttctgcagtgattttaaccaaggcagttggtggaaatgaggtcctctcagggtgcgccatcattgtccg

SEQ ID NO: 771869 - DNA, 83 bp, Homo sapiens
acatcagcagtttattcagcagatgctgcaggctcttgctggagtaaatcctcaggggaaaagagtttctttttacaaacgag

SEQ ID NO: 771870 - DNA, 75 bp, Homo sapiens
tccacgatggcctagcacgtggaattcgcgaagctgccaaagccttagacaatgtttactaaaggacaagtcacc

SEQ ID NO: 771871 - DNA, 98 bp, Homo sapiens
gggagccgtgctctacctctatccgtactttggaagtgttgctgaaatcatcaggaatcatcaacatagtcctttggttcttattgacagtcagaata

SEQ ID NO: 771872 - DNA, 98 bp, Homo sapiens
tcttagtgaggctcagaggtgcttgtaccgtgatgtgatgctagagaacctggctctcatatcctcgctgggagcagacaagatggagacaaattcct

SEQ ID NO: 771873 - DNA, 82 bp, Homo sapiens
tggccaagaagatcatcattaaggacggaggcacggcccagcgcttgagaagtcggaggccaaggccgggccggtgcccaag

SEQ ID NO: 771874 - DNA, 75 bp, Homo sapiens
caggctcaagcaatcctaccatgtcagccttcccagtagctggaactacaggagctctggaagatcatcgcagaa

SEQ ID NO: 771875 - DNA, 82 bp, Homo sapiens
ctgcctcagcctcctgagcagctgggattacagtatttagcatttacgtgtggcttaatcagaggtggcttatcaaacttgg

SEQ ID NO: 771876 - DNA, 82 bp, Homo sapiens
atttctcctattgaggagtcaaccagccaacagggaagagtgtcgcacccaggagaaagttaatgcaacaggaccacagttc

SEQ ID NO: 771877 - DNA, 101 bp, Homo sapiens
acacctgaggttcagattaagaaatctgccccaaagtcttagaactgttgaagcttcttgtcatgacggggatgaaacaattgaaactattgaggctgctg

SEQ ID NO: 771878 - DNA, 50 bp, Homo sapiens
ccggctccttagcacctctccaggtgctggagaatctggtaaaagcacca

SEQ ID NO: 771879 - DNA, 83 bp, Homo sapiens
gttcacgcacgggatccagagcgccgcgcacttcgtcatgttcttcgcgccctgcacatacccccggcctcatgagtacctgt

SEQ ID NO: 771880 - DNA, 74 bp, Homo sapiens
gctgcagcagggctgtgtgagctcagcatcatcggctggttcgtgcgaagcttcaagtacttttacgggctccg

SEQ ID NO: 771881 - DNA, 74 bp, Homo sapiens
ttgtttgtcccaggactcctctatctcctccaggcaatggatcacttggagtcctttattgctgaatgtgatcg

SEQ ID NO: 771882 - DNA, 74 bp, Homo sapiens
gtgtggcgctgattggatttccctctgtgggtaagcccacgacccttcctcagggcaccatcaacatgaaccag

SEQ ID NO: 771883 - DNA, 75 bp, Homo sapiens
gcagattgccaacattgaccgtattacaaacactgtgacttctgccgtgttcaccgtgggagacaacgtggtttc

SEQ ID NO: 771884 - DNA, 75 bp, Homo sapiens
tgccgctcctaagcctgcacagccgcggcggcagcagcagtgagaggcaccgggagcctggccgctgcagtggag

SEQ ID NO: 771885 - DNA, 100 bp, Homo sapiens
gatcaccagtttgctgaggtctagggacaataaggatttttacctcctataactccaccagaaaagttttttctttcccagctgatgctggcacccccac

SEQ ID NO: 771886 - DNA, 90 bp, Homo sapiens
ccaggaaggaggaggaataatatttatggagcatatattatggaacacaggtgtgtttgaccatcgaatgaagtgctggcagaaatggga

SEQ ID NO: 771887 - DNA, 73 bp, Homo sapiens
catgattaaccctgctaattcagatacaagatggacagagacgtatgtgcgttggtctcctaagggcacctac

SEQ ID NO: 771888 - DNA, 82 bp, Homo sapiens
ctgcactgaaaggaaatgacggattttgtttttcgttggaatatacgttgcacatttatggcgattctgagtgtgagggcag

SEQ ID NO: 771889 - DNA, 87 bp, Homo sapiens
ctgaggcatctgagtcaacaacggatgaaaatgaagacgacattcagtttgtcagtgtagaacgtcatgacatgaataccttaagcc

SEQ ID NO: 771890 - DNA, 97 bp, Homo sapiens
tgtgctcctgcttaaagaaatcagtccttcctttccgacttagtcctcgggaagaagtttcagactacaaggtcccgatcacacagcaagaatccaa

SEQ ID NO: 771891 - DNA, 87 bp, Homo sapiens
aacctacccagcaaagaagcatagcttttagctctaattgtgggttgtctcttcatgaagaaccagcggaactcaaaactgctgttc

SEQ ID NO: 771892 - DNA, 89 bp, Homo sapiens
aggacatcattgatggatttgccatgaccagctttgtcacttttgaagcgctggaggagtggagtcaacatatcaatggagcaagtcac

SEQ ID NO: 771893 - DNA, 75 bp, Homo sapiens
taccttgagcagatctccactctcatcaacaccaccgacagatggcaatttttcacagcaaaagtctttgctaaa

SEQ ID NO: 771894 - DNA, 99 bp, Homo sapiens
attgccggcaagagggagttaaggacattccaggcagaggcaaggtgaaagaactcttttcttctttgggagtcgaatgtaatgtcttggaacttgatc

SEQ ID NO: 771895 - DNA, 88 bp, Homo sapiens
gccaatggccgtcctgaacctgttatcacctggagacaccttacaccaactgtttcaaaactctgcttcagcaagatgtgaaaaaaag

SEQ ID NO: 771896 - DNA, 100 bp, Homo sapiens
cggcggcggaggatgagcctgcagagcgcgcagtacctccggtttctaagcatgaattgaggaacagaagaagcagagcagatgatcggagcagcatttg

SEQ ID NO: 771897 - DNA, 98 bp, Homo sapiens
caaattccgaccctactgagccgtgagagccgcagtggatggctggaggtgcagggccaggaggaacatgaggtagctacagcaagctgggtagcagg

SEQ ID NO: 771898 - DNA, 50 bp, Homo sapiens
taggcggccatggtccaaccttgaaggaggagattgtatttcgttactac

SEQ ID NO: 771899 - DNA, 96 bp, Homo sapiens
tgcagcctagcttggagtcctggcctggaaagcttgaatatgaaaagtcagggaaaatggcgaacgactcccctgcaaaaagtctggtggacatcg

SEQ ID NO: 771900 - DNA, 83 bp, Homo sapiens
gctcgcgctactctctctttctggcctggaggctatccagcgttacgggcaggacttgagtggcttcggacagggcttctcag

SEQ ID NO: 771901 - DNA, 82 bp, Homo sapiens
cccgaccccgggccacctgggcccccgggttccgccggcactctcgccaccaccgcgtggcactctcgagtggaccctgagg

SEQ ID NO: 771902 - DNA, 87 bp, Homo sapiens
tgcagatcggtgacacagttcacatcctggagatgtacgaggatcactttgggaagcagtgacatccaacctgtatcaagtcttcta

SEQ ID NO: 771903 - DNA, 100 bp, Homo sapiens
gggccttgaaaagcagaagacaatccaaaacaaacgctattcctctcacatttaatgtgtgccgaccatttccttcagtgctggacaggctgctgtgaag

SEQ ID NO: 771904 - DNA, 100 bp, Homo sapiens
ggaagagctcggggatctggctcaggcccacatacagcaacttagcgaagctgccggtgaagatgatttcaacactacacttgcacaatgtctttgaaac

SEQ ID NO: 771905 - DNA, 74 bp, Homo sapiens
gcccgccgacccgcgccctgctccctctcagcacctgggcggacggtttctgctttgggacaaccatacatcta

SEQ ID NO: 771906 - DNA, 99 bp, Homo sapiens
gcgaggagtatctgcggcagcatgacaagatgcgtctgttactagagtggagagtctaccttcgtctcacatgtgccacaaaggatggcatggcccggg

SEQ ID NO: 771907 - DNA, 97 bp, Homo sapiens
tacctctaagtcgaaaggatgcattttttcaggtgaccaagaatatggcccaggtgaccaaagccctggacaaggccctgagcaccatggacctgca

SEQ ID NO: 771908 - DNA, 100 bp, Homo sapiens
agctaaatatcagttggatcccactgcttccatttctatctaccaaatctattcaaagcgatctgctgaggatatttataaaatactgacatcttacaaa

SEQ ID NO: 771909 - DNA, 100 bp, Homo sapiens
ggacgtatgaatggatttattgaccagattgatggaatagttcattttgaaaattgctaagaagcctcgaacgccaacctctggtccagtaatcacgaag

SEQ ID NO: 771910 - DNA, 74 bp, Homo sapiens
gaaagtgaacgtcaaattcgatatctgaatcaccagcttgtaataataaaagaaagcagatgagcgtcccactt

SEQ ID NO: 771911 - DNA, 100 bp, Homo sapiens
acatccctggatatgcccgttcagtttacagttcattttttgcttggtttggaaaaatttcattagagctgttccatttcctccaagtcaccggcttaca

SEQ ID NO: 771912 - DNA, 98 bp, Homo sapiens
agattttactgctgaagattatgaaaagctgagatctgtatctgtggacctgaatgttgatccctcgcttcagattgacatacctgatgcgctcagtg

SEQ ID NO: 771913 - DNA, 82 bp, Homo sapiens
ccccggagcaggccaagttcggggccaggacgtcgggaggacctgcttctaagtgccagatgatggaggagcgtgccaacct

SEQ ID NO: 771914 - DNA, 51 bp, Homo sapiens
caatgcccacagaaaatattgttctgtggaagcaaatcattgaacgcaatg

SEQ ID NO: 771915 - DNA, 82 bp, Homo sapiens
cctgagcagagctctccgggttccccggctcgcggggcccggcgaagggcagccacaatggtgcgcatgaatgtcctggcag

SEQ ID NO: 771916 - DNA, 75 bp, Homo sapiens
tccagatcttgctgaaggctggctgcgaccttgatgtccaggatgatgtgagaagccatttacttgtgaaatctg

SEQ ID NO: 771917 - DNA, 100 bp, Homo sapiens
ccagcaccaacaggatccaagataatttcttgagaggagataactcccgtaaagttcagcaccagcagcagaggaaacccaggaaaaaaaccaagcctcc

SEQ ID NO: 771918 - DNA, 82 bp, Homo sapiens
cccggctgccggtcgacgaccgccccgcgtcatgcggctcctcggctggtgatagggccagatttgagtgtgtgaatttttg

SEQ ID NO: 771919 - DNA, 89 bp, Homo sapiens
tcgtcctctgcgcttttcagctggagcaggccgggctctcgccatgggtcactgtcgcctctgccacgggaagttttcctcgagaagcc

SEQ ID NO: 771920 - DNA, 100 bp, Homo sapiens
gcctccccagccatgtggaactatacttctcaccactgcatgaatggacatttgaaagtgccatagccaaacacttgcaagcatggagacctcatcaatg

SEQ ID NO: 771921 - DNA, 101 bp, Homo sapiens
ttggagctggagacggcctgggtgctggcgaagcggaggccggagactatgagaagatgtttggcacgaaatgccatggctgtgacttcaagatcgacgct

SEQ ID NO: 771922 - DNA, 75 bp, Homo sapiens
tgcttgctgctttttctaactatttcaagatgatatttattcaccaaacaagctatcatggtgaacttacttcag

SEQ ID NO: 771923 - DNA, 98 bp, Homo sapiens
tgaaaaggaaaaggagagtattgccagagcaagagctggatctcgtctttctgaaacttttgagaagaactttgaaagagaaacccataaaataagtg

SEQ ID NO: 771924 - DNA, 134 bp, Homo sapiens
ctcagagaaagcagagggtgagatggatgagtccagcattctaagacgaagagggctccaggtgaagtggatcctaaagagaggatagcacgccaacgaaaattattacagaagaaacttggccttaatatggg

SEQ ID NO: 771925 - DNA, 100 bp, Homo sapiens
acgtgattgagcgccaccctgtggacatcagcgccatccccgagcagcggtggaagctggcctgccttgctctgccaggaaccatgagtgaggcccgcag

SEQ ID NO: 771926 - DNA, 75 bp, Homo sapiens
ctgcccagcaagttcagtgactttttacttgatccatacaagtctgtgagttctccacttcagtctcttcagcag

SEQ ID NO: 771927 - DNA, 90 bp, Homo sapiens
caacaaggcgctgctgaccacctacgggctctgacgcccgctctgcggcttcggtgtttgaacaggccacagtccaggagcgcttacatt

SEQ ID NO: 771928 - DNA, 89 bp, Homo sapiens
gaatttgcaaaggaagtaaaagaaagaaatattttgttatatgggcttctcatatcttacccacagatccgtgattctaactgcaacta

SEQ ID NO: 771929 - DNA, 49 bp, Homo sapiens
agcagctgcaaacccccgaaaaagcactgtgctgtggcctctctgcatc

SEQ ID NO: 771930 - DNA, 100 bp, Homo sapiens
atgtccggctgcagcagcaagtcccatcggaggacctccctgccctgtataccgagggaacaggtgtcagctgtgatgcatgtttaaaaggaaattttcg

SEQ ID NO: 771931 - DNA, 76 bp, Homo sapiens
ctacctgccgtccaggctgtgtatcaaaagcctccacctcagatatatgacaagcagttggatgaaagagaacaca

SEQ ID NO: 771932 - DNA, 75 bp, Homo sapiens
cctgcccgacggctctcctctgactgcagcgtcactcaggtgggaaggatacgagcaagataaagcagcgaggga

SEQ ID NO: 771933 - DNA, 98 bp, Homo sapiens
ggcgacctgggggagccgcccccgacacggcccacggcgtgcccctgtgctgtgccaccctgcagtggctccttgctgagaatgctgctgtggacgtc

SEQ ID NO: 771934 - DNA, 100 bp, Homo sapiens
ggaagatggcgctggccggatggaaatcctaatgacagtctccaaattcgcctccatctgtaccatggtatgttaagctactgcgacagatacagcgaag

SEQ ID NO: 771935 - DNA, 87 bp, Homo sapiens
acagctctgccggggaggaggaggaggaggaagaggaggagaagtgttctagaacagatcagacattttgtaatgatgcctgaaata

SEQ ID NO: 771936 - DNA, 98 bp, Homo sapiens
ttttcaatcccatagtggactttctatcttcatttatagacttgagatggcagagttccctctggagccaatgctatgcaaaatgctcatcatgtctg

SEQ ID NO: 771937 - DNA, 100 bp, Homo sapiens
tggaacccgggttacagcagtgagggggccacggctcaagaatcagcatgattcttcagaggctcttcaggttctcctctgtcattcggtcagccgtctc

SEQ ID NO: 771938 - DNA, 104 bp, Homo sapiens
gtgcagatagtcgtgcagctgggagacataagtcccatgaggatcccagagttgtggcagctgatattgatgatgttaagaagttcaaaccgggttacctggaa

SEQ ID NO: 771939 - DNA, 90 bp, Homo sapiens
cgcacctctgtttgggggtcctcaggtttactcctggcttgggggcattaggaagcactggaggctcttcgggaactaatggatctaacg

SEQ ID NO: 771940 - DNA, 100 bp, Homo sapiens
caggaatctgactgcggcgtgggagtggaaggaaagggagaaaactggttgtcctggatgtttgaaaagttggtcgttgtcatggtgtgttacttcatcc

SEQ ID NO: 771941 - DNA, 101 bp, Homo sapiens
aaaggagccaggaattcccagtttgacaccacaggctgagctccctgaaccaggatgtgatggagctgcttgaagaagatctcacatgccctatttgttgt

SEQ ID NO: 771942 - DNA, 50 bp, Homo sapiens
tcctcacccgcgcctgcgacctcggatgcagcaccgaggcttcctcctcc

SEQ ID NO: 771943 - DNA, 75 bp, Homo sapiens
acgagctagagttgccatttcgctgggatttttgggtggtgcaaaggttgttcgctcagcagctacaagtggagc

SEQ ID NO: 771944 - DNA, 100 bp, Homo sapiens
aaaccggtagcgcttgcagcatggtagaacaagtcagccagttggctgtgttcatagaggcagcattagactatcacagacagtccacagagattctgca

SEQ ID NO: 771945 - DNA, 100 bp, Homo sapiens
ccccgtgtcctgcaggtattgggagatccacagctaagacaccgggacctcctggaagccaaaaatgctgttacaacttctaaatgggaattatttgacc

SEQ ID NO: 771946 - DNA, 76 bp, Homo sapiens
ctctaattcaccgcaggatttccggagtgtttctcaggagctatcagaaactatcctcaccatggtagccaattgc

SEQ ID NO: 771947 - DNA, 75 bp, Homo sapiens
gggcggcggcgcgcggacccaggcgcggatggcgaggccagcaggattttttatcaagcagaaatgcatcgaaca

SEQ ID NO: 771948 - DNA, 98 bp, Homo sapiens
acgagagagtcccaagtacgtccacggtcagccttgcggagatgcagaaactaccagaggccgttcagctaattgagaaggccagcatgatgtatcta

SEQ ID NO: 771949 - DNA, 83 bp, Homo sapiens
ggctgagtgaaggccgggggctgccccctccccccagatgaagtgcgtcttggtggccactgagggcgcagaggtcctcttct

SEQ ID NO: 771950 - DNA, 100 bp, Homo sapiens
gggaaaggaaaagactcatatcaacattgtcgtcattggacacgtagattcgggctcatgtagcctcactggagggcattgccccggaagatcaagtcgt

SEQ ID NO: 771951 - DNA, 75 bp, Homo sapiens
tatcgtggaaataaaacagctgttttgcagattggactacaaggtgtgatgaatgcagactctgctaccattttg

SEQ ID NO: 771952 - DNA, 98 bp, Homo sapiens
attctgccgaagagaacaagacgtgtgaagactcaggcgaacagttgtctccaaacgtggtgttgccgtcagtggtcccaccaagaggaggggaatgg

SEQ ID NO: 771953 - DNA, 51 bp, Homo sapiens
aagaaatgtcatgagattgagagacctgtgaacttatgaatcaaggcatct

SEQ ID NO: 771954 - DNA, 101 bp, Homo sapiens
gccttttccgttgccggtgccggcctagcgtcctggaattacttcaatcaatgccaccgtgggccttaattgcaatagccatagtcgcagtccttttagtc

SEQ ID NO: 771955 - DNA, 100 bp, Homo sapiens
ggctgagtgggattccaccgagaagatcggggacctcttcgtggcctcgcctctgctgcgagaagttctggagaagcagccagtgctaagccagaccgag

SEQ ID NO: 771956 - DNA, 75 bp, Homo sapiens
tttcgggatctcggtgctgcagacggcgagacctcctgcacagttgagccccatatgggggttggcaggcagcag

SEQ ID NO: 771957 - DNA, 138 bp, Homo sapiens
agaggtcaataatgaaagtggagagtcacagaggggaacagatttcagtgtcctccttagctctgcagctctactgagatgaagaaagaaaaagaatacctgctcagctccagagacacgtaaagggacagagattgg

SEQ ID NO: 771958 - DNA, 82 bp, Homo sapiens
cttggactgagtcctgcaggacacaggaccaagaatcgccttcagccctgtctggtgcatccttggcagaaagtgaggagga

SEQ ID NO: 771959 - DNA, 83 bp, Homo sapiens
tactacatggacgtctggggcaaagggaccacggtcaccgtctcctcaggcccagctgagagccagcctggaggttacccagc

SEQ ID NO: 771960 - DNA, 146 bp, Homo sapiens
aagtgtatatcaagccacaatttccatcaaaaagtgattaagcagagaatggagaagaaggttgattccaggtcgctattaaagcatgaagactttctgaaacctgccctagagctgggatattgtttgtgggcaatattttttat

SEQ ID NO: 771961 - DNA, 75 bp, Homo sapiens
aggccaaactacaattcccgagagatgccggtggccgtgggtccctacggacagtcccagccaagctgcttcgac

SEQ ID NO: 771962 - DNA, 100 bp, Homo sapiens
tgtgacctggcgttcccctgagtgctcggaaaatggccttgtctccggtcgttcccgttcaggagcaggtcatcatcagatttgaaatatttaaagtgga

SEQ ID NO: 771963 - DNA, 82 bp, Homo sapiens
gggctctgggagtggctgccaggatcaccacgatgaatgacacggtaactatctggaccaggaagttcatgaccaatcgacc

SEQ ID NO: 771964 - DNA, 89 bp, Homo sapiens
catgctgatttaatttcggaatacattcgaggccctgtgctaagttaggtggatattccatctattataaccaagaaactattaaaagc

SEQ ID NO: 771965 - DNA, 89 bp, Homo sapiens
cgcccggcagccttcgacgcgatgttccgccggagcttgaatcgtttttgatacgggaacaacacctccagagagtggtatttttggat

SEQ ID NO: 771966 - DNA, 82 bp, Homo sapiens
cggcttctacggcaacgccctgctgcccggcaactgcacccaccccccaaagacacacgtgacccaccaccccatctctgac

SEQ ID NO: 771967 - DNA, 51 bp, Homo sapiens
caatatctctgggctttcacagaccttgaagctgatgatgttaagggcagt

SEQ ID NO: 771968 - DNA, 90 bp, Homo sapiens
catgtggccttacacgcccccatcaagcgatatctgaagtggctctgatgcctttgccacactcctcgcatctctgggacatcccttccg

SEQ ID NO: 771969 - DNA, 88 bp, Homo sapiens
tttaattttagggtcctttatatagaagggagagtaggtgtggagcagaggatcatgtggaagcagtgaaaaagctccagaactccac

SEQ ID NO: 771970 - DNA, 100 bp, Homo sapiens
ctttggagaaccgtggaaaatgaacccaggagatggagcattttatggccctaaatttccaacatggctagatccatcagaaactgaagccgtggagaac

SEQ ID NO: 771971 - DNA, 96 bp, Homo sapiens
gccacccgatgaatggagtcgccttctgcctggtcgggatcccgccccgcccggagccccggcccccacaggtggacatcgagcagctggatcccc

SEQ ID NO: 771972 - DNA, 99 bp, Homo sapiens
aagcgagtacagggggttgcagtacacagcctttgaagtaaattttatggatgatgtaggtcagactctattaaactgggcctctgcttttggaactca

SEQ ID NO: 771973 - DNA, 51 bp, Homo sapiens
gaaagagtgcccaattccaaatgtacaggatgcttatagaattttatgagt

SEQ ID NO: 771974 - DNA, 50 bp, Homo sapiens
accaggggcagagggaccactctgacagtacgagctcaactggaggcagt

SEQ ID NO: 771975 - DNA, 100 bp, Homo sapiens
gtattttcagcgagggtactgtatttatggagaccgctgcagttaccgtgatgctgaatcagcgctgcagcagggcaggacgctggctgtgcacaccaca

SEQ ID NO: 771976 - DNA, 97 bp, Homo sapiens
tcgacatgttaaaacgggtcagttggcagccatcaaagttatggatgtcactgaggtatctctcctctttgtcacaacctctttgccctgtatgacg

SEQ ID NO: 771977 - DNA, 98 bp, Homo sapiens
tcgacctgctgctggagacctggatctcgcgccacaaggagatggatattgactgggtacagacagagaagcacgtgtttgagcaggcatccagcaac

SEQ ID NO: 771978 - DNA, 75 bp, Homo sapiens
cctatctccctaccaggagtttctagcactgaaggcagaggtggaggagacactgaagcgactgcagagccagaa

SEQ ID NO: 771979 - DNA, 90 bp, Homo sapiens
gctctggctgtgcgcgctggcgctgagcctgcagccggccctgccggttggatttggtctagggagtcccagaaagaagtagaaaaagag

SEQ ID NO: 771980 - DNA, 80 bp, Homo sapiens
ccgggccacgggggcagtatcgacagtgggcctatgccccctgagaggccaagaccagcttcaagtctccatggtaccag

SEQ ID NO: 771981 - DNA, 100 bp, Homo sapiens
cctaagtggattgcagttgggagactttctcattaagctacaagagactgtgaaaaggaagttggaaggagctcgatcaccacttaatggagaccagcag

SEQ ID NO: 771982 - DNA, 100 bp, Homo sapiens
tgatcgcactatgactctggaagaagtccgcggccaggacacagttccggaaagcacagccaggttcagcttgttggtttagatgaggagagttcagagt

SEQ ID NO: 771983 - DNA, 100 bp, Homo sapiens
cccagggagggagtccgcagcctgaggggagctctttgctcaggccccggtggatcagtttcctggcacagctgtggagagtgtgacggattccagcagg

SEQ ID NO: 771984 - DNA, 78 bp, Homo sapiens
gacgaggtctgagcgaccatggaccggccggggttcgtggcagcgctggtggtttctgagtcccttcaacatgatcct

SEQ ID NO: 771985 - DNA, 119 bp, Homo sapiens
tgcaaactgtgggatgaagcttcaacttgtgcacaaaagtgttgtgcatttaatgataaatttctgaataaattggcagaagaacgcagacagaagaaggaaacttaagatgtgcaagg

SEQ ID NO: 771986 - DNA, 125 bp, Homo sapiens
tggtgtttgaatattgtgaccacacagttctccatgagttggacagataccaaagaggttattccaatggaaacagctggagaacttatatttccgtgagaaaaaatttgctgttgaagttcatg

SEQ ID NO: 771987 - DNA, 90 bp, Homo sapiens
ctctgctccacactgccaaccggccagaggacgagtgtgaaccaggaagacagcgcttccagcaacccgtttgcactccccaactctgtc

SEQ ID NO: 771988 - DNA, 82 bp, Homo sapiens
cctggtgtcgccatgggccgccgccccgcccgttgtgagagccacgagccaaggtgggcacttgatgtcggatctcttcaac

SEQ ID NO: 771989 - DNA, 75 bp, Homo sapiens
acagaatcaggggaggcatgcttcaggcagcttcggtcacctctctgtccaacctggcatgcatgcacatggtcc

SEQ ID NO: 771990 - DNA, 100 bp, Homo sapiens
ggaggagcggctgctgctgctgctgctgctgctggtggcccctttgcagataacgaaggaggcccaacttcattcaataaggagcctgacggatttatcc

SEQ ID NO: 771991 - DNA, 75 bp, Homo sapiens
atgacaccttgcattccctatttaggtaaaacttccttttcctgtagatcaaatcacagatcttccaaggaacga

SEQ ID NO: 771992 - DNA, 96 bp, Homo sapiens
cgcccggcctcccgcccgccgcgctccagatgaagtgtgagcactgcacgcgcaaggtgaatgagtggcaggatgactggccgacctttttcgccc

SEQ ID NO: 771993 - DNA, 114 bp, Homo sapiens
ccctcggcctcgcggcgacggcggcggtggcggcttggacgactcggagagccgttgatattcactgatggactccaaagaatcattaactcctggtagagaagaaaaccccag

SEQ ID NO: 771994 - DNA, 51 bp, Homo sapiens
agcctcccgagtggctgggattacaggaagtgacctcacaatgactcaagc

SEQ ID NO: 771995 - DNA, 82 bp, Homo sapiens
cgcggctccaggagtcctgtgactcagtaatttctatgcagcccccgacccagagccgagctccacttctgctccggctgcc

SEQ ID NO: 771996 - DNA, 75 bp, Homo sapiens
ctgctgctggggctgggctcgccagtcttggggacagtgtcagctaatgctacagccctttgactatgatccgaa

SEQ ID NO: 771997 - DNA, 75 bp, Homo sapiens
cttcactcctcttcacttcttcagcctccccatggccacccatggaccagtcggcattcacttcctcccttctgc

SEQ ID NO: 771998 - DNA, 74 bp, Homo sapiens
tgatatcacagaggaaactctgcattctcgcttcctggaggcttaccactcttctctcatggatcctgatacca

SEQ ID NO: 771999 - DNA, 96 bp, Homo sapiens
acgacctggacaggacggagcgcaggcaggagaccagtatgatgtctgtgccatttgcctggatgaatatgaggatggggacaagctgcgggtact

SEQ ID NO: 772000 - DNA, 82 bp, Homo sapiens
cccagatccatttacactttacaggtgcaggttcgcagccctgtcaaccagctccgagccggcagcgaaacctgaagtggac

SEQ ID NO: 772001 - DNA, 100 bp, Homo sapiens
aaaaattacagcacatctcagtgaatttgcaagtggaggagatgttaaagtaacccatcttgcaggacgacattgaagattggtcttctgttgatctaag

SEQ ID NO: 772002 - DNA, 75 bp, Homo sapiens
ttttacagctgaagaatgggaaaaaattgatggtgatataaaggtgctgtacttctttgcagtatacaaggacta

SEQ ID NO: 772003 - DNA, 82 bp, Homo sapiens
gtcctgaccaagaggaccagactttgttaatgaagcaaaatgatgcttcaacacccaggccaggtctctgcctcggaagtga

SEQ ID NO: 772004 - DNA, 75 bp, Homo sapiens
cgtcaggcctgcctagacggagtgggacttaattcagtgcacaaatgagatgaatgtgaacatcccacagttggc

SEQ ID NO: 772005 - DNA, 80 bp, Homo sapiens
aactctttccagcttgtgtctgcccaagaagatgaaaggattgttcttgttgacaacaaatgtaagtgtgcccggattac

SEQ ID NO: 772006 - DNA, 100 bp, Homo sapiens
tcattctcatgaagaagcaccatgagcagcccagctcaacattggcaatgtgctccctgtgggcaccatgcctgagggtacaatcgtgtgctgcctggag

SEQ ID NO: 772007 - DNA, 98 bp, Homo sapiens
cggggagcggcggagaccgcctctgctcccgcctggggaccttcgcctctgcatttgtccagtaactctggctgtgccggatactgcttgggtaaaac

SEQ ID NO: 772008 - DNA, 80 bp, Homo sapiens
aggaaaatgcgcgtcccgggcgcgggtagttccagggtctccctccactgctgtagtaacccgggtccggggcctcggtg

SEQ ID NO: 772009 - DNA, 74 bp, Homo sapiens
aggaactgggatttcaacctgaaagtggaggctgcgaaaataggaaaaagagcctgtggatttctcagtcaaat

SEQ ID NO: 772010 - DNA, 100 bp, Homo sapiens
gtttggttctcccggcagcagcccgacgcaaaccaaggatctggggatcttcgcactatcccaaggcggcggcggcggcgcccgggagccggagccttcg

SEQ ID NO: 772011 - DNA, 99 bp, Homo sapiens
cactccactgcctttaaccctcagcctcagagtcagatgcagggcgtcgattagcaaggtaaaagtaacagaaccatggctcagtttccaacacctttt

SEQ ID NO: 772012 - DNA, 75 bp, Homo sapiens
agaagacgaggatgatgcggaaattaaccccaaggttgggggccgtcccgctcctaaggcaggaagatggtggcc

SEQ ID NO: 772013 - DNA, 88 bp, Homo sapiens
gagcgctgggttggacctttacctgtggaggcaacactggccaagaagaggaaaggagaatggtgttgaacgcgtgtgtcctgagagc

SEQ ID NO: 772014 - DNA, 82 bp, Homo sapiens
ggataagctggagtctattcctggattcaatgtcatccagagcccagagcagggaaatgtttcaacgtgcgcaagcgttgcg

SEQ ID NO: 772015 - DNA, 101 bp, Homo sapiens
cgtcgctagaactcagttgtgcgttgcggccagtcgccactgctatctcacattcttgaaggtggcattgaagagcactaagatcggaagatgagtgagct

SEQ ID NO: 772016 - DNA, 82 bp, Homo sapiens
ctgatttaggggcaatcgatctgagcgggctttggacaccatgaactttgatgtgattaagggaaagccaatccgcatcatg

SEQ ID NO: 772017 - DNA, 82 bp, Homo sapiens
gtacggagcctgcagagggtcccacggtggaagcgagagaggagggctggaggcaaagctggaaaggacagtgggaaggcca

SEQ ID NO: 772018 - DNA, 74 bp, Homo sapiens
aggtgactcacaaacttcttggaaagagaccctgtgtgaatagtatgatcggttgggcttcctcctgaatctgg

SEQ ID NO: 772019 - DNA, 98 bp, Homo sapiens
cccctggggagattggacaagtatgctgcaagtgagaacatatttaacaggagcgcctgccaacggtaccgctgtccggcatgtacaataaatctgga

SEQ ID NO: 772020 - DNA, 73 bp, Homo sapiens
cctgagcaatttgctggctcaatcctttatcctattgaaacctagtccagcctctgatgaagcaggagagaaa

SEQ ID NO: 772021 - DNA, 75 bp, Homo sapiens
gacgggctgggcgtggcccggccgcactatggctattacctggctggtgtttgcttgttctggagtgatcttctg

SEQ ID NO: 772022 - DNA, 123 bp, Homo sapiens
tccctctggatgtggaattctccgtccctttccagggagggaacaaagcccacagcaccggttggagcaaaacgtcccactcactggaggcacctgaggacgacgggggctggtcaagtgcag

SEQ ID NO: 772023 - DNA, 101 bp, Homo sapiens
attcctcggagctttcgtcacctgtccttctacattttcgatagagacgttttccggagggattccatcatagacacgtgactgatacacctgcctcccat

SEQ ID NO: 772024 - DNA, 98 bp, Homo sapiens
tgggcatcccgaggcgctgtttccaggactgggtcgatcagaacggcctcccgggactctctgtcacccagcagaggcaccttccactagcaacagtc

SEQ ID NO: 772025 - DNA, 100 bp, Homo sapiens
gggagcgaccctggggaccgactctggggaccctcgccgaagaggtactactgagcgagtgtgcttgatccagggaacggttgaagcactgaatgcagtt

SEQ ID NO: 772026 - DNA, 50 bp, Homo sapiens
gtttcttctgatttctgccattgggaattcaaagaagctttttcactatt

SEQ ID NO: 772027 - DNA, 100 bp, Homo sapiens
ctctttgccgtacccaccggagcctggcgcagcctccctctattaccagacatgcaagaaagcacttcagccaagcagaagggagccagctggacgaggt

SEQ ID NO: 772028 - DNA, 100 bp, Homo sapiens
tgattggcggtgaccggatattcagttgcacatccccacatcaatgcactgccaatgtgcctacaccaactaatgttacaattgaatcctataacatgaa

SEQ ID NO: 772029 - DNA, 73 bp, Homo sapiens
agtgttttaagaaagtggacaaagagaggagtcagggaattcacaactttgaatcaattgaggatgccaccaa

SEQ ID NO: 772030 - DNA, 97 bp, Homo sapiens
gttttcatggattctaatggaatcaggcagttttgtgtccatgtgaacaactttgcagaattaagacaaatctttgaaccaaagaagaaagaattct

SEQ ID NO: 772031 - DNA, 82 bp, Homo sapiens
tagccttcacagagagtccagttgccaagggtcctatcggtggtgctaatagagatatttctattctccagtgccacgggga

SEQ ID NO: 772032 - DNA, 86 bp, Homo sapiens
cctcggtggtcgcggcgacctccggcggcgggaggcccggcctgggcagatgcagaaacagaggcccagagagatgaatagcctgc

SEQ ID NO: 772033 - DNA, 80 bp, Homo sapiens
tcctgtcgtccgttctctcaggctcccgttcagcaagagtgagccatggagctacgtgtggggaacaagtaccgcctggg

SEQ ID NO: 772034 - DNA, 75 bp, Homo sapiens
cagatactctgactccacctttacttttacctacgttggcggccccagaagtttggtgtttgctacacccctgtg

SEQ ID NO: 772035 - DNA, 100 bp, Homo sapiens
gtcatgggaagccagtgaggtagtcaggagatctattgggaaactgattataaccactcgggcaccatcgatgcccacgagatgaggacagccctcagga

SEQ ID NO: 772036 - DNA, 75 bp, Homo sapiens
ctgtagtccacatggagctctcagcataccgtgcaacagaaaaatcatgtcttcttccagagtggggctccgttt

SEQ ID NO: 772037 - DNA, 95 bp, Homo sapiens
ggtggaactgcaggaatggcatttgtgggaacagtgtgttcaaggagccacgcaggcgggattaatgtgtatgccaagtacatggaaaaccatag

SEQ ID NO: 772038 - DNA, 87 bp, Homo sapiens
agggggaaaagcgagcgatcgagcgagcgcgcgcgcgaaaactccgggcagcggccctccaggcactgaagcgtaagaagaggtatg

SEQ ID NO: 772039 - DNA, 100 bp, Homo sapiens
taccacctcagccaccctgaccactatcatcaccatggaaaaagtgacttgagcaggatgttgagtcctatatccatcgctctggacgcacaggtagagc

SEQ ID NO: 772040 - DNA, 50 bp, Homo sapiens
attagcaatttaaagatcctctccaagagatgtggtatggtgtattcctg

SEQ ID NO: 772041 - DNA, 101 bp, Homo sapiens
cggcgctctgagctggtcttctggcggtggatgggtgccagccgggccgccgatgacgccgagcgggagcgcagggaccgagaggagcggctgagacactc

SEQ ID NO: 772042 - DNA, 82 bp, Homo sapiens
agatgctgtggttcggggggtgctcgatcatggaagggaagtggttgctgtgtatgttactggtgcttggaactgctattgt

SEQ ID NO: 772043 - DNA, 74 bp, Homo sapiens
ttgtatgcctcaatttgctggatttaagcactgctgcactttatgagcttcatcgcagtaggaatggcagcccc

SEQ ID NO: 772044 - DNA, 100 bp, Homo sapiens
cttctccctgatgacaagcttaccctcttctgcgagaattggcagagggggtcgatttgggaggaaaggtgtggctataaactttgttactgaagaagac

SEQ ID NO: 772045 - DNA, 100 bp, Homo sapiens
gatttgttaaggattccaagtaactcttatttgatgagcagcaccagcagtaagagggctccgaccacggcaacccagaggctgaagcaggactaccttc

SEQ ID NO: 772046 - DNA, 75 bp, Homo sapiens
cctgttctagcatttccagatgcttttgaagagggagaacagcagattgctcagttacatgggtctggattttaa

SEQ ID NO: 772047 - DNA, 100 bp, Homo sapiens
gcgaagatgataggggggaaacctcaagatataatcttcacttccgggggcactgagggtgtccgcaatgttgccagtgtctgtctgcagattggctacc

SEQ ID NO: 772048 - DNA, 100 bp, Homo sapiens
cttcgggatattgctggagctcggagtctcctgaaacagtttaagtctgtatatgttcctggaaatcatacccaccagataatcttacagggacttaaac

SEQ ID NO: 772049 - DNA, 50 bp, Homo sapiens
tacactcaactaattggcatcatcacatattggctggagttggcgatgac

SEQ ID NO: 772050 - DNA, 100 bp, Homo sapiens
caatggaggaagactggacctactgattcaacttggagatgagcgggtctgtcctcttcacggcgggagacctctgtgagtgaaagccttcagagggaag

SEQ ID NO: 772051 - DNA, 96 bp, Homo sapiens
agacaagacacttttcagaaagacaggccaaagcttacttgaggattgctgtggaagtggtaagaagattgccatcaccttcagaatgattcccca

SEQ ID NO: 772052 - DNA, 85 bp, Homo sapiens
gactcagtccagaatcctcccagggccttgaaagtccatctctgacccaaaacaatccaacatgttggcagataaattgaacatg

SEQ ID NO: 772053 - DNA, 83 bp, Homo sapiens
gccgcggacttctctgcacagcatccctgtgacagggagtgcatccgccccaacccttttccccctcgtctcctgtgagaatt

SEQ ID NO: 772054 - DNA, 100 bp, Homo sapiens
gcagtacggaggcgcagtgggcaccgtgggccgactgaacatcacggtggtacaggtcaaaatgcagatcttcgtgaaaacccttaccggcaagaccatc

SEQ ID NO: 772055 - DNA, 118 bp, Homo sapiens
cgacgacgaagatgatgaagatgatgatgatgaagatgatgaggaggaggaagaagaggaggaggaagaggatggagatgaagatgaggaagctgagtcagctacgggcaagcgggca

SEQ ID NO: 772056 - DNA, 100 bp, Homo sapiens
ggccagggaaccctggtcaccgtctcctcagctgatcttgcatctttaatggataaaacatttgagagaaagttgcctgttagttctttaacaatatcac

SEQ ID NO: 772057 - DNA, 130 bp, Homo sapiens
tgacacgtacacagcaggactgagtgaagaagaacagctcgagagagcattacaagccagcctctgggaccgagtctattgcgtctgcagacatggatttcaaccagctggaggcattcttgactgctca

SEQ ID NO: 772058 - DNA, 82 bp, Homo sapiens
gccagccccgccgccctcgcaacctggcagccgccgccgtggaaggtgttgacttcaaaatcaaaactgtagagctaagagg

SEQ ID NO: 772059 - DNA, 100 bp, Homo sapiens
agagagtccgggagcccgagcttgaggctaaggcagctggataagcacagccaggccacagcccagcagctggtgcagctcctcagcaagcagaaccagc

SEQ ID NO: 772060 - DNA, 100 bp, Homo sapiens
tggagaatgatctgtacatagattttggtggaaagtttcattgtgtatgtagaagaccagaagtggatggagaggctgttgataatcaggtgtatgtggc

SEQ ID NO: 772061 - DNA, 83 bp, Homo sapiens
caaaaatagtgatagctttgataagagaatgaagtttctagattagaagacataatgcagcatttaaaatcaaagaagcggga

SEQ ID NO: 772062 - DNA, 75 bp, Homo sapiens
cactccctgaaatctggagtgaagaacgccgccatccagccaccattccaagcatgcacttaatgaagttgatcc

SEQ ID NO: 772063 - DNA, 75 bp, Homo sapiens
aattcagtctccaggacattgagcgtgtccggagcggtgactggaaggggtacacaggcaagaccatcacggacg

SEQ ID NO: 772064 - DNA, 101 bp, Homo sapiens
gtcggctccggcgggacgggcggttctgcgtacccctctccgaaaaccagtagattcccagacatcgcgaagtgaatctgaaattgtgccaaaagttgcta

SEQ ID NO: 772065 - DNA, 75 bp, Homo sapiens
tgttcaggctcttccaacgccgactgcttcaactccgagcaggtatgacaacgaatttggctacagcaacagggt

SEQ ID NO: 772066 - DNA, 99 bp, Homo sapiens
atttacagtcggaggagtactcggtgaaatcctgtcctgaagactgtaagaaagtgagtgagaaggttggaggagctgaaggaaccaagctagatgatg

SEQ ID NO: 772067 - DNA, 75 bp, Homo sapiens
gtccacctggaaaagagggtcagagggcctatggcatgtctgcgttacctttaaatctgataaaaggcactagaa

SEQ ID NO: 772068 - DNA, 76 bp, Homo sapiens
agaaaggcgagctgacccaggaggagaaggagctactggaagtcatcgggaaagcgacatctcgaatcagcgatgc

SEQ ID NO: 772069 - DNA, 75 bp, Homo sapiens
aatccacaaggattcttttcaatacatcctaaaacaggccaaccaagccctcgagcagttattcccatgtcctgt

SEQ ID NO: 772070 - DNA, 90 bp, Homo sapiens
acgtaccatgtccacaccactccagacttgtccccacagagaccacctatcacacgctggaggagggcgtggtggagtactgcacggctg

SEQ ID NO: 772071 - DNA, 50 bp, Homo sapiens
ctgcaagctgccaggaagactccgctttcttctagtcaagatgagtgata

SEQ ID NO: 772072 - DNA, 98 bp, Homo sapiens
acgctggctcgctccctccctccctccctccgacgctacactgtcacatgaacccaaagtccttcaagagggtctccttcagttggactccatcctct

SEQ ID NO: 772073 - DNA, 100 bp, Homo sapiens
ttcaggccagagttgtgggccgccgtcggcagcaagaacagagagagaggtggacagatctgagagatactgaggtttacccaaggtccagcctagcccc

SEQ ID NO: 772074 - DNA, 75 bp, Homo sapiens
acccactgaagacgtctgcgtgagaatagagaccaccgagttgatattcactgatggactccaaagaatcattaa

SEQ ID NO: 772075 - DNA, 75 bp, Homo sapiens
tcaccctggacagacagtccaagagagtccttttatgacacattccatactgtggctgacatgatgtatttctgc

SEQ ID NO: 772076 - DNA, 100 bp, Homo sapiens
taggtgtacaatatgcaataatagtgacatctttcagaaagagatgttgagaatgggaattcatattcctgaaaaggttagtcagcaacataaaatcaac

SEQ ID NO: 772077 - DNA, 100 bp, Homo sapiens
caccatacatggtacagccagagtaccgaatctatgagatgaacaagagactgcagtctcgcacagagaacccctgaacagtgcccaagtgttgtctctt

SEQ ID NO: 772078 - DNA, 75 bp, Homo sapiens
ttcattttaacgggaacgtgaagcaggccactccttacatcgctgtatggcctcacctactgctattccatcgac

SEQ ID NO: 772079 - DNA, 97 bp, Homo sapiens
tttctttgtcatgtagccaagactggagaaacaatgatgaccagtgtcccagtgaaggaacgagtgaaggtgtctcagaactggagactggggcgct

SEQ ID NO: 772080 - DNA, 100 bp, Homo sapiens
taattttcatactctcttaacattggataataagcttttacaaactgatgtgatcttattcctgataatgttggttatgcgcaaacgtgttgctcttacc

SEQ ID NO: 772081 - DNA, 74 bp, Homo sapiens
cagaacagttaatcctcaatttaagcctgatctaacccctagaaacagaaactaattctgaagcaagcccttat

SEQ ID NO: 772082 - DNA, 100 bp, Homo sapiens
cgtcgtgatccagaagtccagagctgaggactgcctgtttgcaggacaggcgacactaacaggtgaagatctcgggagaccatgactaagaaaagaattg

SEQ ID NO: 772083 - DNA, 101 bp, Homo sapiens
tgtgtccggacaacggctgcggcgacaattttgcgccatgtcagaaccggctggggatgtccgtcagaacccatgcggcagcaaggcctgccgccgcctct

SEQ ID NO: 772084 - DNA, 100 bp, Homo sapiens
cgagagaagctggtcctgctcacgagagaaaaaggagacaactaaactggtaggtggcagcagaggaaggaattcttcagattgatggctactgacttaa

SEQ ID NO: 772085 - DNA, 76 bp, Homo sapiens
aaaacagaatggaaaagagtcttctgtttcaccagtgatcattaaagaatgggcagcttacaaaggaaagtctcct

SEQ ID NO: 772086 - DNA, 50 bp, Homo sapiens
ggaacttctgcccagctctccttggtcctcctggcactggaaaaacatcc

SEQ ID NO: 772087 - DNA, 82 bp, Homo sapiens
ttagctgtgctcgcgctactctctctttctggcctggaggctatccagcggtgtttctgtggcctgggactggttagcacca

SEQ ID NO: 772088 - DNA, 51 bp, Homo sapiens
tgcttggagtgcagaactgaaagaggccatggtaggggaggagtgtgtagg

SEQ ID NO: 772089 - DNA, 87 bp, Homo sapiens
caagtatacagaaaatcggtgaagagaggttttgaattcacgcttatggtagtgggcagcgagtatgacgaggaggaggtggactat

SEQ ID NO: 772090 - DNA, 100 bp, Homo sapiens
cgagggaccatggccgatcctcgcgtgagacagatcaagatcaagaccggcgtggtgaagcggttgacaatggtctccaggatggtctctaccatgctat

SEQ ID NO: 772091 - DNA, 88 bp, Homo sapiens
cctgccgcctcccgggagtgccgtgcgccgcagcccgggcccaggccccggcagcgcctgggacaagatttcaccaaaagaattgtga

SEQ ID NO: 772092 - DNA, 75 bp, Homo sapiens
agggaccctgtgcaggcctgctcctccgtttgcaaggtggaaaaggattattcatacctgaaggagatatgtgat

SEQ ID NO: 772093 - DNA, 100 bp, Homo sapiens
atgagatcgtggacaagatcatgggcaaaggacagatccaggaccaagaatcgccttcagccctgtctggtgcatccttggcagaaagtgaggaggaaaa

SEQ ID NO: 772094 - DNA, 82 bp, Homo sapiens
cttttaaaggcccccaaggctgtgcaacgcggagcgtgagaggaaggagtccaaaactacttacctggaagaccttccacca

SEQ ID NO: 772095 - DNA, 80 bp, Homo sapiens
cgagtgcgaagcgcgcagtcgccgggtgggtctctccccagcgacgatttgggtgatggcaagattattttatcataaac

SEQ ID NO: 772096 - DNA, 50 bp, Homo sapiens
gccggtggagctcacgtttattcaacacccagcagaccgggttatcccag

SEQ ID NO: 772097 - DNA, 100 bp, Homo sapiens
ccagctgttgaccgcttgtgcctggggattccccctggtgagctgcccctgagcctggacctgcccagcccccggcccttcgctttgcctctgggcagcc

SEQ ID NO: 772098 - DNA, 82 bp, Homo sapiens
gtggtcgcgtctcggaaaccggtagcgcttgcagcatgggcttgtcaatgaggcagatcagattcaggttcgacgggcagcc

SEQ ID NO: 772099 - DNA, 98 bp, Homo sapiens
ctcagcagttgtggcacagcatctgacaaacactgtattcgttgacagagctttgatagtcgtaccatatgcagaagaacatacaacctcctcttcag

SEQ ID NO: 772100 - DNA, 75 bp, Homo sapiens
cggagaagcgagtttcagctgcaacagccaactcagtttataaatccagaaacacctggctatgttggatttgca

SEQ ID NO: 772101 - DNA, 90 bp, Homo sapiens
ggtcaggacatggctgattcgatgctgatgcagggatctaggggcctcactgatcaggtgccacacctccctggatgatccaagatgaag

SEQ ID NO: 772102 - DNA, 75 bp, Homo sapiens
aaacctcaaagcatggctaagagtgttcagtagaaatggcaaaacccttgaagatcgtttgaaaattgaagcaaa

SEQ ID NO: 772103 - DNA, 50 bp, Homo sapiens
cctggagctgggccaggccgtggagaacaccaatcagggtcttcaggcct

SEQ ID NO: 772104 - DNA, 75 bp, Homo sapiens
cttggccatcccaaagctattctgggggcaacagaggttcaaaatcaaaggaagcccagaagggaggtcattttt

SEQ ID NO: 772105 - DNA, 80 bp, Homo sapiens
ccggaccggagactttggggcctaactagtgatgagttggaacaattcatggaaaatcaaggtgcatcgagcccaggtat

SEQ ID NO: 772106 - DNA, 100 bp, Homo sapiens
gcaggataactcagggatctctttaaaagtgatccaggaagatggattatctgtggaacaaaagagattgctggatctccagaactgttctctggaggac

SEQ ID NO: 772107 - DNA, 82 bp, Homo sapiens
gctacagcagccgcaggaagcagctcaccttccaccggttgacatcatggacatatgtgagtccatcctggagaggaagcgg

SEQ ID NO: 772108 - DNA, 50 bp, Homo sapiens
ataatgaggctacagacataaatgcagtttcattggggatcatgtccatg

SEQ ID NO: 772109 - DNA, 100 bp, Homo sapiens
ggcgaatcggctgcggtttgctgggaacggagggctgcagcgcccaccctgcgccagagaccagataaaatgccttcaattaagttgcagagttctgatg

SEQ ID NO: 772110 - DNA, 50 bp, Homo sapiens
aaaaaatggttgacctcacccagatgcgcctgcttcctctgcgccagaag

SEQ ID NO: 772111 - DNA, 125 bp, Homo sapiens
gcattccagttaagagcacaacattttcaagaaaattcaagaatgccatcatgtttgggaagaagcggcacacggatgtgcagttctacacagaagtgggagagataaccacggacttggggaaa

SEQ ID NO: 772112 - DNA, 125 bp, Homo sapiens
tgaagtagcaaaggcaagaaggcaacgacgttccatctgtggaaggacctaccaaccagtggtgtgtggttgactctgtttctcgccatgtcttctcacaagactttcaccattaagcgattcct

SEQ ID NO: 772113 - DNA, 100 bp, Homo sapiens
gtgatcaggagagcagtcttctgaagaattgtggctcagttttcttggaaactacttggacagagcagaatgggctgatatagatccggtgccgcagaat

SEQ ID NO: 772114 - DNA, 106 bp, Homo sapiens
cggggactgttggtctcggccctgcggaagatgaatgagaacagccacatcatcctgtgtggtcaaatttctcagtacaacaaagatgtgccttatcctcccccgc

SEQ ID NO: 772115 - DNA, 100 bp, Homo sapiens
cccaggatacctcgttaagcgtgaccaagaatatggcccaggtgaccaaagccctggacaaggccctgagcaccatggacctgcagaaggtctcctcagt

SEQ ID NO: 772116 - DNA, 96 bp, Homo sapiens
acaagctggcaaaggagcggcgagaagagcgggccaagtacctggggggtgaatctctacattaagaacttggatgacactattgatgatgagaaa

SEQ ID NO: 772117 - DNA, 100 bp, Homo sapiens
tagcctggaggctccgggcgcggggaagtcatgctcgcttcacggaggcaatagctagccggctcatgcacaattagttcgagaagttgatgtggagaag

SEQ ID NO: 772118 - DNA, 82 bp, Homo sapiens
tggcaggacgcggtgcagagagcggacttccgcgacgcggggatcgactacaagaccaccaccatcctgctggacggccggc

SEQ ID NO: 772119 - DNA, 82 bp, Homo sapiens
cttcggcagtccacccaccgccgccgcctcccagttatgcaaagggtgacctggacatatcttacatcacatccagaattgc

SEQ ID NO: 772120 - DNA, 75 bp, Homo sapiens
aggcaaatacgaagacgaggcaaagcacccagctttcttcactcttccgatgctcagtgacctccaggagtctgt

SEQ ID NO: 772121 - DNA, 100 bp, Homo sapiens
gtcattgcacccaaaaaagcaaggccttctgagactggatctgatgattgcctccggagccagcgtggtggccatagacaacaagatcgaacaggccatg

SEQ ID NO: 772122 - DNA, 98 bp, Homo sapiens
agcagggagaggagctgtggataacgggaggtgaatttccatgtcaacatagtcctggtccagaggtgtccttctaaagctggtagaggtttcacgag

SEQ ID NO: 772123 - DNA, 75 bp, Homo sapiens
cactatttctacgatgagagcgccgaggcctgcctggagccccagatcaccccttcctactacaccacttctgac

SEQ ID NO: 772124 - DNA, 51 bp, Homo sapiens
aacatggcagacattgacaagacactgcccatctctaagataagaacctgg

SEQ ID NO: 772125 - DNA, 87 bp, Homo sapiens
aaaacctggccctcttcaatttctgacaaaaggtcctggctataagtcaccatggcacagcaagctgccgataagtatctctatgtg

SEQ ID NO: 772126 - DNA, 83 bp, Homo sapiens
ggcccttgttcccccaaatgtctgactctgactctcggactgagaaacgcaagctgacatgggctcattgctccttctccaag

SEQ ID NO: 772127 - DNA, 75 bp, Homo sapiens
tcacattcggaggctggtgtccagggtctcagcgcgggggacgactcagacctggtcctgtagacgggaaggagc

SEQ ID NO: 772128 - DNA, 100 bp, Homo sapiens
aaagcagtcgtaagaagaggtcccaatcccccactctttccgccctaatggaggtctccagtttcgctggacccacaaaccgtggagaccaagaactggc

SEQ ID NO: 772129 - DNA, 80 bp, Homo sapiens
ggaagcccttttcctccaaatcctgggaaagtgcacttgcaggaaagacatggtgaagatttcaatggatatctttgtga

SEQ ID NO: 772130 - DNA, 74 bp, Homo sapiens
gacaaatccaagaaaactttacgactactgtgatgtccctcagtgtgaatctttggaagaactaccagaaacga

SEQ ID NO: 772131 - DNA, 110 bp, Homo sapiens
gcagtttccagaaattcgaaaacaaagagaacagcaagaaagatttcagcgcctggaagtgactgatttattgctcactgctttggaaaatccagtaaaatatgctgagg

SEQ ID NO: 772132 - DNA, 82 bp, Homo sapiens
gaagaagaagaggaggaggacgatgacgaggaggaaaaggcccctgtgacctatgaccactgagcagtttacaggagatcat

SEQ ID NO: 772133 - DNA, 100 bp, Homo sapiens
tttatagctaagactccaggacacccctgaagccgagaaatggtgcgctcccctggggccccagggcccctgactctgaaggaggtggaggagctggagc

SEQ ID NO: 772134 - DNA, 76 bp, Homo sapiens
ctttttatcagcctccagaaggggataatgcacctcaccatgccttctcctatgcctgagtacctgaatgtgcact

SEQ ID NO: 772135 - DNA, 75 bp, Homo sapiens
aagacctcttcagcatgaagccgctaccggctctctgaccagttccacgacatcctcattcgaaagtttgacagg

SEQ ID NO: 772136 - DNA, 100 bp, Homo sapiens
acgccgagctggtgctgctcaccttgggccaggcctggcagggctgccaccagcttgggctccccacggagggcagcaagtgggacttggggaacccggc

SEQ ID NO: 772137 - DNA, 50 bp, Homo sapiens
gaaccaagccagcaagatcaccgtaccaggatcatctatgaccggaaatt

SEQ ID NO: 772138 - DNA, 89 bp, Homo sapiens
cgaggaggagcgggtccgggtgctgcagggtgtccggggtgtggccactgtaagaaaatgaagccggagtttgagaaggcagcagaagc

SEQ ID NO: 772139 - DNA, 110 bp, Homo sapiens
caccaagccagattcgctcttcaagttggagcaaggagaacccccagggatagcagaaggagcagcccacagtcaaatctgtccagtagagacggggtttcgccatgttg

SEQ ID NO: 772140 - DNA, 83 bp, Homo sapiens
ccgaaaacaccctgcaatctttcagacagggcatcattgcagaatacaacaaaatcaatgatgtaaaggaagatgatgacacg

SEQ ID NO: 772141 - DNA, 50 bp, Homo sapiens
cccggagaaaaagttgaagcgttatctatgaagtgcagttggaaagcaag

SEQ ID NO: 772142 - DNA, 83 bp, Homo sapiens
ctggtctcttctcttgaagcagatgcgaagatctgcgagtgaagagggacgagggaaaagaaacaaagccacagacgcaactt

SEQ ID NO: 772143 - DNA, 75 bp, Homo sapiens
gaacatgcaatgagaagactgatcaatctgcaagccctggatgaaaacatggacctcttggaaggtataactggc

SEQ ID NO: 772144 - DNA, 94 bp, Homo sapiens
ccgggctcggcgggggagcgactcatggagctgccgtaagacaatgcagatcttcgtgaagactctgactggtaagaccatcaccctcgaggtt

SEQ ID NO: 772145 - DNA, 75 bp, Homo sapiens
actaccgcctggatcctcagctccagctgcactgctcagacgaggtgcaaacagctgcacagcaagtggcagagg

SEQ ID NO: 772146 - DNA, 82 bp, Homo sapiens
ccgcgtggacccgaaagccgctgggaaaatgccaaagagatggatgagactgttgctgagttcatcaagaggaccatcttga

SEQ ID NO: 772147 - DNA, 100 bp, Homo sapiens
ctccagtcgcgcacaagtgttatctctgtaccgggcgatgctgagagagagcaagcgtttcagcgcctacaattacagctgcagaagaaagatcagcaac

SEQ ID NO: 772148 - DNA, 100 bp, Homo sapiens
gagacacagcgcagcatccctgccctgctgctgggcaacaagctggacatggctcagtacaggtctcattcaggaacgtcgcctgataacactgcaccac

SEQ ID NO: 772149 - DNA, 99 bp, Homo sapiens
caccaccagcgcccgggcgggcctcgcgcgcctcgggcgcggctccgcagtgagcccaccaagaaggaagcgcagcagcagcagcagcagcagcagcag

SEQ ID NO: 772150 - DNA, 95 bp, Homo sapiens
gaaccttcacttgcaagcatgggtgttttcatcatcggctgtcttgaatcctttctacaaggagtgggtcaaaatgcagatcttcgtgaaaaccc

SEQ ID NO: 772151 - DNA, 100 bp, Homo sapiens
ccagctcaaggcctttggctatgtcgagatcccctgtgtggccaagaagctggtgtgcggagatgaaggttttgtagtgcatccctgagcatgagcacag

SEQ ID NO: 772152 - DNA, 82 bp, Homo sapiens
cggaacccaagatggctgcgctgttgctgagatgacagtcatgtccctttccagggacctcaaggacgactttcacagtgac

SEQ ID NO: 772153 - DNA, 75 bp, Homo sapiens
gcaataaaacgcttccatctttatccagaggtggctttttctcaagtatattttccagtctgtttggaactcggg

SEQ ID NO: 772154 - DNA, 50 bp, Homo sapiens
aaaattgtatttaaccaactccaaacaggagcaatttacagcaatgaggg

SEQ ID NO: 772155 - DNA, 99 bp, Homo sapiens
tgggaggtgtatctgagggagactgcaaatgctattgtcagtcagcaaactccacaaaggaatggcaaaactctattcagaagaatgcaggacttgcat

SEQ ID NO: 772156 - DNA, 97 bp, Homo sapiens
agaaggttggggtcgcctcttccgagactttgctaccaggacttgctggcccctctggggagatggttaaatccacaacaagtctgacctcgtcttc

SEQ ID NO: 772157 - DNA, 100 bp, Homo sapiens
gagaaaaaaagcgtggaagttaacttcacggagtcccttcttcgtatggcagctgatgatgtagaagggctgctaaggaagcaaaaaaggctaagcaagc

SEQ ID NO: 772158 - DNA, 82 bp, Homo sapiens
cagctctgccaggcccattcccagctgctgcagtacgtggagcgatacggggcttccgagtggacctgccaatcaagtcggc

SEQ ID NO: 772159 - DNA, 51 bp, Homo sapiens
gaagaggatcaggagctggagagaaactaattctgaagcaagcccttatag

SEQ ID NO: 772160 - DNA, 83 bp, Homo sapiens
ggggatccctgctcttcgctctcttcctggctgcgtccctagagctggaagtcgagtgtgctactcaactcaggagatttgga

SEQ ID NO: 772161 - DNA, 50 bp, Homo sapiens
caggaacgtgacagtcttatgtgtttgaagaacatagctgttgaaactga

SEQ ID NO: 772162 - DNA, 75 bp, Homo sapiens
gtggatcgctgtgatcgtcacttgttgctgcagcaaacgagattgctaaggaaaggaggaagcaagatgtggtta

SEQ ID NO: 772163 - DNA, 73 bp, Homo sapiens
gagaaaatggacgctgacatcaatgtcacaaaagcggatgttgaaaagccttcaaatgtttatctggtgtgac

SEQ ID NO: 772164 - DNA, 100 bp, Homo sapiens
gactccggccgcagtgtcgccgccatcacggacttcctgtgggacaagcgcacgggcctcgccgccagaacgggtgatcgtggcatgatgggacccccag

SEQ ID NO: 772165 - DNA, 73 bp, Homo sapiens
ttccggaggtcgcggagatggaattggagcagagagaaggggaagcgtgacagcaatgacagtgttttttccc

SEQ ID NO: 772166 - DNA, 100 bp, Homo sapiens
cgggcggaggaggaagtaggggtgcacctcagcactatcccaagactgctggcaacaggccagtccctgagacgaataggaccttgtccctggatgaggt

SEQ ID NO: 772167 - DNA, 100 bp, Homo sapiens
acctccttatgctgatatacatccaatgagggtccttttggaataaatcatgggattgagcttcattcagatgtggtggaatatgccaaggaaaaactgg

SEQ ID NO: 772168 - DNA, 100 bp, Homo sapiens
ctgtaccatgatgtgatgctggagaccttgacacttatatcctccctgggacgagattgaggagctgcgggccgagatgctggagatgcgggacgtctat

SEQ ID NO: 772169 - DNA, 80 bp, Homo sapiens
gttttcaggccacaaatgctttcacagttgtctgtgctgtgaatgccctcgcccaccatgtgctcaacaaggacctcaag

SEQ ID NO: 772170 - DNA, 98 bp, Homo sapiens
tcgctgccacggtctgcgtagctccagaggtttaaccataggatagagaaaccagtttgctggcctagacctgaactcttcagataatcagagtggag

SEQ ID NO: 772171 - DNA, 80 bp, Homo sapiens
aaggaagatggcggatctggaggagcagttgtctgatgaagagaaggtgaatgaaaactttgccattgatttgatagcag

SEQ ID NO: 772172 - DNA, 85 bp, Homo sapiens
tgagaaggtagtaatggataagatgtgaaggagaggagagatggagatttggagtgtaggggaagaaatgatttcccttggggat

SEQ ID NO: 772173 - DNA, 74 bp, Homo sapiens
aaaccttcgactatgcagagacatgagatggtagccaacccctcagttaaacacagtgggaatatcacttttga

SEQ ID NO: 772174 - DNA, 100 bp, Homo sapiens
catgtctccatccccgaccgccctcttctgtcttggattggatagctttagtcaaagcagctgctgcagctgcagccaagaacaaaacagggagtaaacc

SEQ ID NO: 772175 - DNA, 131 bp, Homo sapiens
gggacgccaagcacttcctgccgcgggcggcgcgccgcagctgcccaggccggaccgggccgggcgcccgcaggatgcagcccatgagactgttcccattatgctggtaggaaacaaggctgacattcgtg

SEQ ID NO: 772176 - DNA, 100 bp, Homo sapiens
ccagtgagaccctgtgcggcggggagctggtggacaccctccagttcgtctgtggggaccgcggcttctacttcaggtcgggtgtgctgacagccggctg

SEQ ID NO: 772177 - DNA, 100 bp, Homo sapiens
gggaaccagtctttcaaaattttcggagcaacatcccctgtcacctggttgatatctcttgcggattaccctgcagtgccacgctaccatgtgggatgca

SEQ ID NO: 772178 - DNA, 82 bp, Homo sapiens
ggcggaggcgcctcctgtctcaggcaaactgtccttggaagaattcatcagaggtgccaagagcgacccctccatcgtccgc

SEQ ID NO: 772179 - DNA, 75 bp, Homo sapiens
tcccttgctcccatccctgcagcatgaacaaggcaatctataagatggtttcctctgtaatgaaaatgcctgaag

SEQ ID NO: 772180 - DNA, 87 bp, Homo sapiens
tgcggcatcgccggcctcgctatgcttcttaatgaagaggataactcagaatcatcggctatagagcagccacctacttcaaaccca

SEQ ID NO: 772181 - DNA, 82 bp, Homo sapiens
gtgctaccaggaggacagctcggagaaagcccaggatttggggtggaaggcaggcatggtcaaacccatttcactgacagga

SEQ ID NO: 772182 - DNA, 96 bp, Homo sapiens
ctgcgaagtggcccttgattacaaaaagaagaaacacgtattcaagctaagattgccccagtggaaaatgacaatagctacgatgaactgaaaaga

SEQ ID NO: 772183 - DNA, 100 bp, Homo sapiens
ggcaaatccacgctggcgttgcagctaggccagcggctcggcggtgagatcgtcagcgctgactccatgcaggtatgtgacgcattcccagactcttcag

SEQ ID NO: 772184 - DNA, 51 bp, Homo sapiens
tcagtactttccaagagtgtatgtggtctgacccaggacctgaaagctgcc

SEQ ID NO: 772185 - DNA, 82 bp, Homo sapiens
caggaagtggaaagagagcaaggggaaggatcgggagtacacagacatcatccggggtggccgtgactggggagagcacaac

SEQ ID NO: 772186 - DNA, 100 bp, Homo sapiens
aagggcgattcaaacggtcagatgggagcacgtcctcggataccacatccaacagctttgtccgccaggtgcgtgggactcatgaactcaccaatcccgg

SEQ ID NO: 772187 - DNA, 82 bp, Homo sapiens
gagaccgggaatgggctacctacacctgtgtgctgggctttcacgtctacgccggtggctgctggcagcggaatcccccaga

SEQ ID NO: 772188 - DNA, 98 bp, Homo sapiens
ttgttgattagtcttgcagaaggctatagttctcgctgtcatccggtttttcagcttaaaaaacaggatgataatgaagataattcaaatgatgggac

SEQ ID NO: 772189 - DNA, 80 bp, Homo sapiens
ggagaactcctgactgattagcattcacaccagtattggtaaaggttttcaaggtgtcatgaaaagatggggatttaaag

SEQ ID NO: 772190 - DNA, 83 bp, Homo sapiens
gacgatggccgtgtgcaacacggtttgccttcccggattgggcctacaagccagagtcgtcccctggctcaaggcagatccag

SEQ ID NO: 772191 - DNA, 100 bp, Homo sapiens
agaaccctacttgcctaaatgaggaatgtctttcctaccatctaaaatacgaaggtttctggctgggatcactactcttggaatcaaagataaatccaaa

SEQ ID NO: 772192 - DNA, 101 bp, Homo sapiens
tgctcccagccatggtggcctggcgctcggcgttccttgtctgcctcgctttctccttggccaccctggtccagcgaggctgccacctaaaagactttgga

SEQ ID NO: 772193 - DNA, 100 bp, Homo sapiens
gccgcttccccaaccagaaccagactagaaactgctggcagaactacctggtacctggtgctcatgctcatcgtctacatcttcgagtgcgcctcctgca

SEQ ID NO: 772194 - DNA, 88 bp, Homo sapiens
cggatgccctgcagtacctgcagaaggtctctggagacatcttcagcagagctgaagaagcaggtggagagtgccgagctgaagaacc

SEQ ID NO: 772195 - DNA, 100 bp, Homo sapiens
tgtcatgtagccaagactggagaaacaatgctaccacatactgttgattgtgatgaaatgccagttgaagcacctgtcctgcgagcttaggggtgctaca

SEQ ID NO: 772196 - DNA, 82 bp, Homo sapiens
caggctcggagcgcgacacggagactaggtggcaggtgtttcccattaaacactaccaggacaaaatcaggccttacatcca

SEQ ID NO: 772197 - DNA, 75 bp, Homo sapiens
ggaacatgcagcagctttgcgggccctacaagatcagcaaggcttcctgagccgacggctaaaaagctccatcaa

SEQ ID NO: 772198 - DNA, 50 bp, Homo sapiens
agggagataaattcaacccagtggaatgggtaccacagaccatgtcatcg

SEQ ID NO: 772199 - DNA, 90 bp, Homo sapiens
ccccggcctggtcctggccccggagctgttgctggacccctggcaggataaaatttgatgctgggactctccttcttagtacacaccgac

SEQ ID NO: 772200 - DNA, 98 bp, Homo sapiens
ttggactccctggcctccgtaatgttacttagcttacagctgcaccagctggcacacctgggctcatagaaccatggagctggcagtgcccttagcgg

SEQ ID NO: 772201 - DNA, 74 bp, Homo sapiens
tgctgccgccgcatctgctggactactgctggttcaagggcagacggggtttttgaggaggattcgcaaattga

SEQ ID NO: 772202 - DNA, 100 bp, Homo sapiens
ctggaaacagtcagagccaccagccaatgatcttttcaatgctgcgaaagctgccaaaagtgacatgcaggagcttggaccccgattggctgcaatgctg

SEQ ID NO: 772203 - DNA, 74 bp, Homo sapiens
gaaatcctaatgacagtctccaaattcgcctccatctgtaccatgggtgctggaaatgtaaacaagaatagact

SEQ ID NO: 772204 - DNA, 75 bp, Homo sapiens
gcgtgtggcatctccacctcaaggcaatggtacagcagttccatgaaagtcatttgcgtgtggttgactgataga

SEQ ID NO: 772205 - DNA, 98 bp, Homo sapiens
gagggcttcaagaagcgggcggcgtgcctgtgcttccggagcgagcaggaggacgaggatgattatttcagaaactggaatcccaacaagccctttga

SEQ ID NO: 772206 - DNA, 100 bp, Homo sapiens
actcatctgcctttatgatgaatgcaataattctccattgagaagagagaagaacattctcgaatacctagaatggggaccgcagctgaatgcacagcta

SEQ ID NO: 772207 - DNA, 50 bp, Homo sapiens
ggggattttgtcagcttgtcgtcaagacgccctgctggcggacttggagt

SEQ ID NO: 772208 - DNA, 50 bp, Homo sapiens
gcggactcttcttcgccttcgattgtattccctgaatgactataaaccac

SEQ ID NO: 772209 - DNA, 151 bp, Homo sapiens
tggcctccactttagacacactgataatgtgattcagtggttgaatgccatggatgagattggattgcctaaggtggcatttttcaactccgctggaaccagtgcccaggaggagcaaaggatgtgctgccagcccctggctcacccagtg

SEQ ID NO: 772210 - DNA, 100 bp, Homo sapiens
gaggataacaagttttgtgcagattgccagtctaaagccagagactgctgctactttgaaacgtacgatagaggccctgatggacagaggagcaatagtg

SEQ ID NO: 772211 - DNA, 82 bp, Homo sapiens
caccattggagctcatcagactgaccgtgtcttacatcagttcagagagaaataaggatctggcatgtcaacacaaacatag

SEQ ID NO: 772212 - DNA, 78 bp, Homo sapiens
cgagttactcatgagaccagtgcccatgaaggtcagactgagtcttgctggaggtttgttaaatttatttatcttttc

SEQ ID NO: 772213 - DNA, 75 bp, Homo sapiens
cctgtttgaagagattgctactacaacaagcgccagatgagccgcatttaccccaagggaacccgcatggactcc

SEQ ID NO: 772214 - DNA, 80 bp, Homo sapiens
tgaatcacacgccgccatccgggaggcccagggaaggcacattcaggaccccgcgagccagcggctgacgtggaacaagt

SEQ ID NO: 772215 - DNA, 82 bp, Homo sapiens
cagcagcagtatggcttccagtacccccttgccatggcagcaaagtgacctttaaaaagaccaagcggagggtgaagaaaat

SEQ ID NO: 772216 - DNA, 100 bp, Homo sapiens
cgccgccgctcttcagtttgcccgaagcgcggacgcggtttacgttcgtaagaaggcaacaagttcttctcctctacagaaggattttgcaaacaattcg

SEQ ID NO: 772217 - DNA, 90 bp, Homo sapiens
aggagacgctgcagcgcacgggatctggaaacccaggaggattcctctccctcaggaccagagagaggacgacattctagtgttggtccc

SEQ ID NO: 772218 - DNA, 154 bp, Homo sapiens
tctgaccacagcccccagcaggggaggcccacacctgccccagcacctgcaggaccaagtgcagaggctcatgcgtgaccttctgcagaaccccttgctggtgcccgtcaaggtgctgaagggacacgtgctgacccgagatctgggagtgctg

SEQ ID NO: 772219 - DNA, 75 bp, Homo sapiens
caattttggagaattacgattagaagccacagaagaagtttctttggacagccctgaaagggaacctatcctatc

SEQ ID NO: 772220 - DNA, 97 bp, Homo sapiens
cggcaggaatcctcctccggcgataggaactgatggcattatggaacacatcacaaaaatacccaatgaagcagcacacagaggtaccataagacca

SEQ ID NO: 772221 - DNA, 51 bp, Homo sapiens
gagttcaagctctacattcagcaggtccaggtgcaggtacagcagtctccg

SEQ ID NO: 772222 - DNA, 89 bp, Homo sapiens
ggacagccgcccctggtgcacacaccctcgtattctcctgcccttccccaggccagaagctgggcttacagagattctctaaaggcaga

SEQ ID NO: 772223 - DNA, 75 bp, Homo sapiens
tcatggatgttcttcttcgagtatttgtagaaggattgcaggcgagaagaaatctgctcagtggcgcacagtgga

SEQ ID NO: 772224 - DNA, 100 bp, Homo sapiens
cggagatccgagagctctgcttctctgaaaagcgtgtggctttctggacttggagactacacagacttctattcctctcggcagcatgctaccaacgtcg

SEQ ID NO: 772225 - DNA, 102 bp, Homo sapiens
tgggcttcgctgctcagccagctcctgcgaccgccctgcgcttcgtgcaccggggcggtccgttgccaaagccaggtggtagacttgctgctggctcgaggt

SEQ ID NO: 772226 - DNA, 75 bp, Homo sapiens
ctcccaccctctccatcacctgctctgctcttataaggatccgagcctgccagctgcccctgttttcttacatcg

SEQ ID NO: 772227 - DNA, 100 bp, Homo sapiens
aattatgtgaaacctccaaatgtggggccgttgctccagggagaactgcaaatatcttcatccacccccacatttaaaaacgcagttggagataaatgga

SEQ ID NO: 772228 - DNA, 100 bp, Homo sapiens
gctgagccacataccattgctgcattcttggggggtgtgatccctcacatccacaaatctctgattggaaagaagggacagcagaaaactgcttagaggg

SEQ ID NO: 772229 - DNA, 110 bp, Homo sapiens
ggtggtggagtgtagagatatagttggcaacctcactgagttagaatcagaggttgctgatcagctctgtgccaagtatagcaaggaatatggcaagctatgtaggacca

SEQ ID NO: 772230 - DNA, 98 bp, Homo sapiens
gggatcgtgaccgagaccgtgaccgagagcgtgaccgagagcgcgaatatcgtcatcgttagaagagtggttcagatttactttcccggagtagtcac

SEQ ID NO: 772231 - DNA, 99 bp, Homo sapiens
ccctggcagcatggctcagactgcatgacagcgtttctcacctctggaggactcagcattcaaggtgccatcttggaagcagagagcagccctcactag

SEQ ID NO: 772232 - DNA, 88 bp, Homo sapiens
ctgcctggacgaggaaggcgatgactcagatggggaatccctttgcccacgtccagctgaagccgacagtgaccaacgacaggtctgc

SEQ ID NO: 772233 - DNA, 82 bp, Homo sapiens
cgccatgccggcccggcggctgctgctgctgctgacgctgctgctgcccggcctcggggtttgggccccatggtatccctgt

SEQ ID NO: 772234 - DNA, 90 bp, Homo sapiens
gtggaggacgtgagggtgagcccagaagaggtgaccatctacaaccaccctggcatccaggcattatggctcctccacctggtatgagac

SEQ ID NO: 772235 - DNA, 100 bp, Homo sapiens
ttgatgactctcgtgaacatagctttaataggatccgtgattctaactgcaactatgaggcctttatgaacattattaaattgagtgacaatattggaga

SEQ ID NO: 772236 - DNA, 100 bp, Homo sapiens
cctatcgttagagtcttcctgcccaacaaacagaggacagtggtgctgtcatctatatgatctcagtattttaaacatcagcttccagcccatatggtgg

SEQ ID NO: 772237 - DNA, 96 bp, Homo sapiens
gtaccggctgggccggaagatcggcagcggctccttcggagacatctatctcgaatggatgatgaacttgttgttggacatagtgcaagatcagac

SEQ ID NO: 772238 - DNA, 83 bp, Homo sapiens
ggagatatggcgcaactgcggcgccttaaagcttttcaagccaggccaagaagctgtgaagtaccagggtcctcgggacttcc

SEQ ID NO: 772239 - DNA, 50 bp, Homo sapiens
ggccgatgaagtgcagaggtttttttctgtctacatcagcatcagcatct

SEQ ID NO: 772240 - DNA, 98 bp, Homo sapiens
aattgctggaatgacctttacaacttttgatcttggtgggcacgagcaagacttaattcagtgcacaaatgagatgaatgtgaacatcccacagttgg

SEQ ID NO: 772241 - DNA, 88 bp, Homo sapiens
cgcgggaggggcggggccacgctgcgggcccgggccatggccgccgccgatgccgagatgcctgtgaggagccaccaacatttgaagc

SEQ ID NO: 772242 - DNA, 90 bp, Homo sapiens
ggaagagcgagccagcgcccggagcaagcggagctcccccaagagccggaaaggcaagaaaattggatgtatattttgaatatgaagaaa

SEQ ID NO: 772243 - DNA, 90 bp, Homo sapiens
tgcagagtgccgagcaggctggtacggaggagactgcatgcctctagaggacaaaatcccagtccttggcacaaactcaggaaatggaag

SEQ ID NO: 772244 - DNA, 100 bp, Homo sapiens
caaagcgaagctgcggcctcttccagaaactaggagaatattacttacaaaatgcggtaaaaaacttgttgctgcaagtcaagctgccttaggcttataa

SEQ ID NO: 772245 - DNA, 118 bp, Homo sapiens
gatcgaggtcaagaacacgatcacgttctagatcacatactccaagaagacaatggcgtactgctctgttgcccaggttagagtgcagtggcttgatcatagctcactgcagccttga

SEQ ID NO: 772246 - DNA, 74 bp, Homo sapiens
tgggcgaaagggacctgctcaagttcactcatgctacagctagaatgaagcacatcaacctatcatttgcagcg

SEQ ID NO: 772247 - DNA, 100 bp, Homo sapiens
gttcagttacaagagaaactttatgtgcctgtaaaagaatacccagatccaggcccagacatgtccgtccttgtaagttaaaagcttccatgggagcctt

SEQ ID NO: 772248 - DNA, 75 bp, Homo sapiens
cagcgcgcatcttcaagtaaccggcaaggcactgacgtttcttctgctacagcctccaagccccaaacttcctcc

SEQ ID NO: 772249 - DNA, 158 bp, Homo sapiens
ctgagtgacggacggtggaggcccagagcccgggcctgaagggggggacaaacctgggtgcccgcaggagcccggcaggcccttcccagcctggatcagaagaagcgtggtggccacaaagcatgctgcctgctgacgcctcctccaccaccactgtt

SEQ ID NO: 772250 - DNA, 75 bp, Homo sapiens
ctgcgacctggggccctgggtgaagtgctccgccgcccttgcctccagatctgccggaggcgctgggcaatgacc

SEQ ID NO: 772251 - DNA, 90 bp, Homo sapiens
aagccatggagggtcaaagaaactcctggttgagctcaaagttattttacattacttaattcagtgcacaaatgagatgaatgtgaacat

SEQ ID NO: 772252 - DNA, 100 bp, Homo sapiens
aatgtttgaacaaactcgaagaacagctgtggaaagaagttgcaaaacactggctccatttatcttaaagaaattggacagcatatgaagacaggacatc

SEQ ID NO: 772253 - DNA, 100 bp, Homo sapiens
cagcaaccatatcctccctcctgttgccagcagggtggcagcactggaagcatcaggaaccctggctgctctctaccctgtggccttcagcagccacctc

SEQ ID NO: 772254 - DNA, 75 bp, Homo sapiens
ggttttcttcccagcggctacagtggctgacaagattttgaaaaagaaagaataccctctttatataaatcaaac

SEQ ID NO: 772255 - DNA, 83 bp, Homo sapiens
ccgcgatggtgttgttggagagcgagcaggaggaagttaacatccctaataggagggttctggttactggtgccactgggctt

SEQ ID NO: 772256 - DNA, 82 bp, Homo sapiens
gtgcgcgtgagtcgtgagctggcaggacacacagagaccatttgtttgtgactatgaagggtgtggcaaggccttcatcagg

SEQ ID NO: 772257 - DNA, 83 bp, Homo sapiens
gggcttacgcagaaggacctggccacgcgggagatacagatgacccaccaagaattactcagaaccctgtgatcaatgggaat

SEQ ID NO: 772258 - DNA, 75 bp, Homo sapiens
gaactggtcgccatcaagaaagtattgcaggacaagagatttaaggtgctggatagtttactagtccagtatgga

SEQ ID NO: 772259 - DNA, 100 bp, Homo sapiens
aattcttcagctgctcggacagatgaagctccccaaggagctgcaggacatgtattcctctgagaaaccttggacagcagattttggtttaatatctgat

SEQ ID NO: 772260 - DNA, 95 bp, Homo sapiens
gcgggagcagtatgccgatcgggcgcggtactcagccttttaaagcttgaggatggagtctcactctgttacccaggccggagtgcagtggcgca

SEQ ID NO: 772261 - DNA, 82 bp, Homo sapiens
ccaacatggcggaacgcaggagacacaagaagcggatccagataacgaaggaggcccaacttcattcaataaggagcctgac

SEQ ID NO: 772262 - DNA, 99 bp, Homo sapiens
gcaagttaaaggcaagatcgacaccatgaaggtaattggtacgcctcagagaccggcagcgtcaaacaccctggtggtaggaagcccacacacccccag

SEQ ID NO: 772263 - DNA, 90 bp, Homo sapiens
agaattccctcaaagagctctggtccttgctgcactttattatgccggagaagcatcctctggtatcacgattccaaaacccccaaagcc

SEQ ID NO: 772264 - DNA, 100 bp, Homo sapiens
ttgggcattcctcatgccaaaggaaaggacgattactgagagccaatcagattagtttcaactgggacaggcttgctagctggatcaaccttactgagca

SEQ ID NO: 772265 - DNA, 100 bp, Homo sapiens
cctggttgtaaacaagctcggagcgggagtagacagtggccggcagggcagccgggggacagctgtagtgaagggaatatggagccattgatgatgtaga

SEQ ID NO: 772266 - DNA, 75 bp, Homo sapiens
aaaatcgagcagaaagaatgtctttcagtcaaataaagtgcccgtggtgcagccatcccatgcggtccatcctct

SEQ ID NO: 772267 - DNA, 74 bp, Homo sapiens
gggtgaccttcggaggccagatcaccgatgagactgtgccctgtccacggtgcctcctgcatgtcctgctgccc

SEQ ID NO: 772268 - DNA, 74 bp, Homo sapiens
cggagcccggccactgctacagatggcactgatggggaaacagaagttggagaaatacaacagaataaaagtgt

SEQ ID NO: 772269 - DNA, 75 bp, Homo sapiens
gccagcagcactgtggaggccgtcctcgattctgaaggaagatttccattaggtaatttgtttaatcagtgcaag

SEQ ID NO: 772270 - DNA, 100 bp, Homo sapiens
ctctccttgcagctgcttagacgctggatttttttcgggtagtggaaaaccagggagattcttcaagcaatcactatgtcaacagacacaggtgtttccc

SEQ ID NO: 772271 - DNA, 101 bp, Homo sapiens
ctctgcaatgtcaccttgaactctgcacagcaagcccaggctcattatcaggttgtctgcattcaaaagagcattctattaaagctaccttaatttggcgc

SEQ ID NO: 772272 - DNA, 74 bp, Homo sapiens
gaaaggggcagcatgatggtctgagatgactgcaaagcccaggatgagaggttctcactcatcttcaccctggg

SEQ ID NO: 772273 - DNA, 90 bp, Homo sapiens
ccatggcggcccccggcagcgcccggcgacccctgctgctgctactgctgttgctgctgctcggtactccaaagattcaggtttactcac

SEQ ID NO: 772274 - DNA, 100 bp, Homo sapiens
ctctcaccttgctgtgtaatcctgacttctgccagcgcatccagagtcagctgcatgaagctggagggcagacttacagccagctggcccaccccatcca

SEQ ID NO: 772275 - DNA, 100 bp, Homo sapiens
gaaggacaggcagagctaaacaaggctttgatgcggcctggaagaattgatagaatcatctatgtgcctttaccggatgcagcaacaagaagggaaatat

SEQ ID NO: 772276 - DNA, 98 bp, Homo sapiens
ggcgatggagctgttatttttagatacttttaaacacccgagcgctgagcttgctcacttccgacagagaaaaacaaaaggtgacagttcgcattcgg

SEQ ID NO: 772277 - DNA, 100 bp, Homo sapiens
ttctcggcccacgtggacttctgcaccctgttccactaccaccaaatcctggcccggctgcagggacagtggatccagtaggaacatagatgcatccaaa

SEQ ID NO: 772278 - DNA, 101 bp, Homo sapiens
cggcgagtccgcgacggtcgccgcccacggcgagcagcgtcaccctttacaccagaaagctggcgggcactatggggaaaaaacaaaacaagaagaaagtg

SEQ ID NO: 772279 - DNA, 90 bp, Homo sapiens
gtctttatatcctgacactatgaatgctacttggatgcctcttaaggtctggttgatcgatgtcagtcagtcagtagaacctacccaccc

SEQ ID NO: 772280 - DNA, 76 bp, Homo sapiens
tctgattcttatcttggtagagcatctcctcaaggatttctgcaggcacaaatcctgaagagcccgtgggcgtgga

SEQ ID NO: 772281 - DNA, 75 bp, Homo sapiens
attttagatgatgattataatggacaagccaaggttcctttggcttgagtgacgagcgcattagtttgggtcagc

SEQ ID NO: 772282 - DNA, 100 bp, Homo sapiens
cagccgccggagccgcaatgcctaaaggaggtattgactgggctcccaagagcgaccgcattgtcacttgtggggcagaccgcaatgcctatgtctggag

SEQ ID NO: 772283 - DNA, 82 bp, Homo sapiens
gttcgttgtgccagcgactaaaaagagtggagatccttcagggtttggtgagtggaaatctgggaggcacacttgggccgac

SEQ ID NO: 772284 - DNA, 100 bp, Homo sapiens
aagaactcaagaatgttactaacaatctgaaatctctggaggctgcatctgaaaagaatgatgacaacttcttaaatataatctatgaagcctatctctt

SEQ ID NO: 772285 - DNA, 137 bp, Homo sapiens
agacaagtcctaaatgccgactcagtggaacaatcttttgttggattgaaacagctaatcctggccagctcagcgtccctggaagggaagggacaactgaagttcacctcaggacggtggagcccacatcataactg

SEQ ID NO: 772286 - DNA, 74 bp, Homo sapiens
tgcctgccgaagaggaaaatgacagcctgggtgctgatgcagatgcgtttcgacgggctgctgggcttccccgg

SEQ ID NO: 772287 - DNA, 100 bp, Homo sapiens
ctggatttaagcactgctgcactttatgagtatgaagtgtaacagaacagactttaccacctgaaactgctgcttcaagttcagatcaggcaaggaacaa

SEQ ID NO: 772288 - DNA, 78 bp, Homo sapiens
gctacagcctgcgtccagccataacccaggagtaacatcaggcaaatcctgatcctaactgttgtcttggagtatttg

SEQ ID NO: 772289 - DNA, 99 bp, Homo sapiens
aacagatgttttccaaaaacttgtagaaggttgtgaaaaaactactaggatcacgcggcatgtattgagatgacaggtcagagcaggagggctccactc

SEQ ID NO: 772290 - DNA, 82 bp, Homo sapiens
gggactgtggcggcgcggcccgcgcgcagccggccgcttccccgggcgctgcctggacaggcctgcctgcgtgctgggacat

SEQ ID NO: 772291 - DNA, 83 bp, Homo sapiens
gagccccatcgtggattccaagacatccctgctgagagagccaagtggaaattgatgacttgaaaaaaattaccaattcactg

SEQ ID NO: 772292 - DNA, 100 bp, Homo sapiens
ttttccagctcaactacctccaacacctatcactcagtcggtgctatgatataatacctgaaactttactgtaatctgtaagtcagatgctccaacaggg

SEQ ID NO: 772293 - DNA, 96 bp, Homo sapiens
accaggcatcagagatagagtcttccctggcattgcaggagagaatctgaagggatgatggatgcatcaaaaggcacccgacaggaggatccttta

SEQ ID NO: 772294 - DNA, 106 bp, Homo sapiens
ctgagctcagacctgccaatttaccagagataattgataacaccctgtaacagctgagggctatcaacagcaggacgcccatgaattcatgcgctaccttttggac

SEQ ID NO: 772295 - DNA, 83 bp, Homo sapiens
gaaagacttgatggtctggtagaaacaccaacaggatacattgaaagggcacacgtgtttcacgttgacaggtttgcttggga

SEQ ID NO: 772296 - DNA, 50 bp, Homo sapiens
ccttgttgatgccagagccaggtttggagaattaggtggatttgcagcaa

SEQ ID NO: 772297 - DNA, 49 bp, Homo sapiens
ggaaaaggagcttagctgctgatgaagcgccctcagttcagcaagccgc

SEQ ID NO: 772298 - DNA, 75 bp, Homo sapiens
cctttcccggagagtacatccccaccgtgtcttattagtaggtaagaaacagctgctcctccacctccaccccag

SEQ ID NO: 772299 - DNA, 110 bp, Homo sapiens
gaaattgtccatattcagattggccagtgtggcaaccagatcggagccaagaatctcaggactctggatacctttatttttgcttcaggtggcttttaatcagattcaaa

SEQ ID NO: 772300 - DNA, 98 bp, Homo sapiens
cgttggaccaacaagcacaagcagatggcaggaagattagaacattggatattgattgccagtttttaaggtatgtgacaatcagctctctagtgttc

SEQ ID NO: 772301 - DNA, 83 bp, Homo sapiens
ctggtggctccgcggattataacaggtgccagaaccctgtggagcatcatgaactgggaagagtagctgagccccagagcctc

SEQ ID NO: 772302 - DNA, 74 bp, Homo sapiens
catgcctcctgtacagcctgtggaactgaaaatgtttataggaggccttagctgggacactacaaagaaagatc

SEQ ID NO: 772303 - DNA, 82 bp, Homo sapiens
agaccacacactgggaaacatcattaaatcgatgtacagttacccagcacgtgtacctcctcctcctcctattgctcgggct

SEQ ID NO: 772304 - DNA, 98 bp, Homo sapiens
tgaagaagagcaccgacgcagacctggactatggaaatgatgttagacaaaaagcaaattcaagcgattttcttattcgagttaaaaatgggtcataa

SEQ ID NO: 772305 - DNA, 98 bp, Homo sapiens
gtccaattttgctcaacttattgtgagaggatttggagttccatggagtgatgagattttattttcaagataaagctgctggaaactttgcaacaaaa

SEQ ID NO: 772306 - DNA, 113 bp, Homo sapiens
agccccgcagctgcagccgcctgaccacggcgactggacttacgaggagcagtttaagcagacaatgcagatcttcgtgaagactctgactggtaagaccatcaccctcgagg

SEQ ID NO: 772307 - DNA, 83 bp, Homo sapiens
ggaccgccggccgggggacgagctcggagcagcagccagatttttggaagtaccagcacagtgacgcttcctgaaaccttgtt

SEQ ID NO: 772308 - DNA, 74 bp, Homo sapiens
ccgagctggagctgccgcggcgcagccagcctgtggacatctctacagcaatgagtgaacgggcacttgctcag

SEQ ID NO: 772309 - DNA, 90 bp, Homo sapiens
cttgtctttactgggaagctggagagtcacagtctagtagaagaaaggaaacccagcgtttgctggcagaaccagttcctggcatcaaag

SEQ ID NO: 772310 - DNA, 100 bp, Homo sapiens
tggcctgacaaattatgctgcagcatattgtactggcctgctgctggcccgcaggccacccgaaacaatgaaatgtaatacattcataagacaagtgaaa

SEQ ID NO: 772311 - DNA, 83 bp, Homo sapiens
gtcctttccaccccgaaattcgccccgattaaagactgtgttgcattatcaggatctgccactgtgaaggagatgatgagagc

SEQ ID NO: 772312 - DNA, 100 bp, Homo sapiens
tggagcaagaggcagagctgtgggcggtggagtctagacttccccaaggcgtgtacccagatcaaatccagcagggatcaagctttggctgaacgttgtc

SEQ ID NO: 772313 - DNA, 100 bp, Homo sapiens
ggaaggaggaggaggtgcaacagcaaaagttggcagaggagagacggcggcagaggacagaaaaatggttcgtattgttcttacaaagacaaagagagat

SEQ ID NO: 772314 - DNA, 76 bp, Homo sapiens
agtcctaccatgtcagccttcccagtagctgggaccacagagtgtgacaagtttaaccaatgtgggacatgcaatg

SEQ ID NO: 772315 - DNA, 74 bp, Homo sapiens
gtctaattctgctaacctgaaagtaatgcccaagggagtggacatccgccataacaaggaccgaaaggttcggc

SEQ ID NO: 772316 - DNA, 106 bp, Homo sapiens
gggagaccgtaatgagcgtcaaaattatccgaaaccgcctcactgggaacgtcaaggtcgtgggaaataaaaggcagttctacacagactgcagcaacggttgcat

SEQ ID NO: 772317 - DNA, 49 bp, Homo sapiens
cctgaaccctgcccaccatttaaccaatttcaccagtgatcattaaaga

SEQ ID NO: 772318 - DNA, 75 bp, Homo sapiens
cgttttcgcctgcagctgctcaccggcgcatattaaatttcctattgactacccctattcaccacctaccttcag

SEQ ID NO: 772319 - DNA, 100 bp, Homo sapiens
tatatagtgtattagatgatgttattccagaagaaattttaggcaaaatcactttagcaaacatcgatatattgaactcttcttgaattctactcctgga

SEQ ID NO: 772320 - DNA, 75 bp, Homo sapiens
gtttgacataaacagtgtcggaaaacagttgagcgcagaggcacgaaaggaatttcccaagctgaaatccgagtg

SEQ ID NO: 772321 - DNA, 100 bp, Homo sapiens
tatgttcactcgtctgccaccatcccattggatgaccccactttgctctttgccaatgcaggcatgaaccaggaatgagtttgaaaaaatctgcagaaag

SEQ ID NO: 772322 - DNA, 87 bp, Homo sapiens
gatggacaagatggtgcagaagaagaacgcgggcatcattgcagaatacaacaaaatcaatgatgtaaaggaagatgatgacacgga

SEQ ID NO: 772323 - DNA, 82 bp, Homo sapiens
gcagtatctggaccactgtgggaacctcatgagcatgcacaacgtcaagagagattaacaagcggatcacagaggagcaagc

SEQ ID NO: 772324 - DNA, 75 bp, Homo sapiens
cgactgtgcaggaagaaaacgagccagtgatttacaatagagcaagaccgcaaaccaagggccaaaatttaaaga

SEQ ID NO: 772325 - DNA, 82 bp, Homo sapiens
gcaaagccttcttcaagaggaccatccaggcacaagctccgggtggataaggcagctgctgcagcagcggcactacaagcca

SEQ ID NO: 772326 - DNA, 126 bp, Homo sapiens
cgtgctgggggtcatcgacagctgcaaggaggccgtcaccttcaaggccgtcagacaagatgacttcctgaagccacagatcatcacccagccagaaaccaccatggctatggtgggcaaggacat

SEQ ID NO: 772327 - DNA, 98 bp, Homo sapiens
tgtgtttgtcaagcattttcaattgtatttccgttcatttacaagttattttctcttcttctgaaaaagagatcttgggtttcaccatgttggccagg

SEQ ID NO: 772328 - DNA, 108 bp, Homo sapiens
cattctggagtgctgctgaggatgggcttatccgccccaggatgggtgagttcaacgagaagaagacaacatgtggcaccgtttgcctcaagtacctgctgtttacct

SEQ ID NO: 772329 - DNA, 76 bp, Homo sapiens
agtgctcggaaagcatctattgtgaaaaacctaaaggataccttagggcaagttaaagtcttcagagccctgtata

SEQ ID NO: 772330 - DNA, 100 bp, Homo sapiens
ggaaaagatccctggaatatgaagagacacagtatggtagccacacccccaggtttctaagcatgaattgaggaacagaagaagcagagcagatgatcgg

SEQ ID NO: 772331 - DNA, 100 bp, Homo sapiens
ggcccgccatgttcttctccgcggcgctccgggcccgggcggctggcctcaccgcccactgggatgacgtagctttgccaaagacttagaagctaagcag

SEQ ID NO: 772332 - DNA, 74 bp, Homo sapiens
cactggggcagccagcacaatcgggcggaggtggcgctgccccttcagtaagactttgaccccgacgcaggctt

SEQ ID NO: 772333 - DNA, 100 bp, Homo sapiens
ggcccaggagttctgctgctcctgctggtggccacagcttggcatgctgttggagacacagttgcagaagatgaagtggtttgtgagattgaaactgaca

SEQ ID NO: 772334 - DNA, 100 bp, Homo sapiens
ttgaagacacttggctcccttatctgacccccaaagatgatgaattctatcagcaggaagcaaaatgtggattcagcaaacaaattctggaaatactaaa

SEQ ID NO: 772335 - DNA, 100 bp, Homo sapiens
ctgcctggaatagctcaagttcttaaaagttgcgttgtaataaacctgaggcatgcccaagagaatcgtaaatgcaaaaattgcttgccttgacttcagc

SEQ ID NO: 772336 - DNA, 82 bp, Homo sapiens
cgagcgcaaggacagcgcgaggtccgcgcagcccagcgcagccatggcgaactttctgaccaagtatacaactacccagagg

SEQ ID NO: 772337 - DNA, 122 bp, Homo sapiens
cgtgccacctgctgcacccacgaatctgcccacccctcctgtaacccagcctgtttcacttcttggccctgggaggagcggggacactgaggacctctctccaaattggcctctcaactcac

SEQ ID NO: 772338 - DNA, 90 bp, Homo sapiens
tccccagggaatgccacagcatcctccagcacctcagggtatattcagttctcgaggagaaaagatccttatggcagatgctgatggagc

SEQ ID NO: 772339 - DNA, 75 bp, Homo sapiens
caagctctggataaaatgatgctagaaaatctacaggtctccatcatcaccagttccagtagtgaaaaacagaac

SEQ ID NO: 772340 - DNA, 83 bp, Homo sapiens
cttgcagattccacgccatcggctgcctcgagacgatgaacgagaagctgtgcagaagaaaaccttcaccaagtgggtaaact

SEQ ID NO: 772341 - DNA, 89 bp, Homo sapiens
gtcccagctctctctgggcatctggaaagaagcaaaacggacaagtcggtttttaagtggcattatcaactttattcacttcagagaag

SEQ ID NO: 772342 - DNA, 75 bp, Homo sapiens
tgctggagctgttccgggccgcgcagctgccgaacgacgtggtcctacaggtggtattaaagataatcaaacatt

SEQ ID NO: 772343 - DNA, 75 bp, Homo sapiens
ctggagacgtccagcctgacattcacctgacttctgcagaacagaggaacaaggtgctgaaccacttcagcatca

SEQ ID NO: 772344 - DNA, 100 bp, Homo sapiens
tttttgcagacggacaaaaaagaacaggagaagtctgaacacattctgaagggagtggtaatggaagtgaagatgcttcaaaggacagtggagaaggttc

SEQ ID NO: 772345 - DNA, 75 bp, Homo sapiens
agcagcaacatccccaaacagcggcgtttcacggtggcacatacatgtatcaccttttgccatgatagcatttct

SEQ ID NO: 772346 - DNA, 90 bp, Homo sapiens
gatgatgaggagcaagaggaccctgcggactactgcaaaggaggcacaagaagaggtcatgtgaatgcacagcaagaaggtagatctgca

SEQ ID NO: 772347 - DNA, 87 bp, Homo sapiens
aaaaatcgagcagaaagaatgtctttcaggttatcctgaatacatgtctaacaattttccttgcaacgttagctgttgtttttcact

SEQ ID NO: 772348 - DNA, 95 bp, Homo sapiens
agatcctggaggatgtgcggggtgcgccggcagaggatccagtgttcaccatcctggccccggaaggtggggaagctgaggcaggaagcccttta

SEQ ID NO: 772349 - DNA, 75 bp, Homo sapiens
gtcgtatgcggccagcactaagatttcttcagaggccccacagtatcaaatatccgcctggctggattagagtat

SEQ ID NO: 772350 - DNA, 105 bp, Homo sapiens
tgaggcttccccagccacgtggaactattctttcttgtggagaagttattcatgtgaagatccttggaattttggctcttattgatgaaggtgaaacagattgga

SEQ ID NO: 772351 - DNA, 101 bp, Homo sapiens
gtctcactcaatggaagctggatttcctctcctgtaaaatgagggccaattcctgtccccccagcagcatggcatcgtgtgctgaaccctctgagccctct

SEQ ID NO: 772352 - DNA, 100 bp, Homo sapiens
aggggccccgaagaactcccacaatgccacaggaggaggcagcagacaagttggatggcttgaggactggtactaaaaggaaacgtgactgggaggccat

SEQ ID NO: 772353 - DNA, 51 bp, Homo sapiens
ggtggcatcaaccgagttcgggtgttggggatgtcctttgcactgaccctg

SEQ ID NO: 772354 - DNA, 100 bp, Homo sapiens
caccccagttgcaatccaggcaggaagattgctggctcagaggctctatgcaggttccactgtcaaggccacagatggggaagtcacagccgtggaggag

SEQ ID NO: 772355 - DNA, 90 bp, Homo sapiens
caacggtttcgctctttggaaaatacgggattgcacctctgcctccacctcccctactaccacctttggctactaactatcgaactcctt

SEQ ID NO: 772356 - DNA, 118 bp, Homo sapiens
gcctgggccatggaactggcggacgtgggggcggcagccagctcgcaggtgactgtgaagtgctgaccacactcaccccagacactggccgtatcctgtccaagctacatactgtcca

SEQ ID NO: 772357 - DNA, 51 bp, Homo sapiens
gaattactagattttctctcaaactacgagatttggattcctagacttgcc

SEQ ID NO: 772358 - DNA, 75 bp, Homo sapiens
tgcggccgcccggctcttgggaaccaagaacccttaggagaaatcttgagagtggacagcaattgtgaagatcgc

SEQ ID NO: 772359 - DNA, 82 bp, Homo sapiens
gatgaatgtagagagaaagtacttcaaggaagccaccattcttcagagggcaatgaaggcacagaaatggaagtaccagcag

SEQ ID NO: 772360 - DNA, 83 bp, Homo sapiens
ggaggttttcaggaccaaaattgtggaaaagtcactctgctgctgatgcaaggaatcccctgggctcccgtccactccactgc

SEQ ID NO: 772361 - DNA, 100 bp, Homo sapiens
ggagattctgctcacggaactgcagcactagaaagtttgggatttggctcttacatcagtgaagtaaaagaagtcttgcaagagtgtaaaacagtagcat

SEQ ID NO: 772362 - DNA, 125 bp, Homo sapiens
gtcttcgaggagccgcaccaatggcttccgtgctgtcctacgaaagcctggtccacgccgtggccggagccgtggctaatggaggttggcaggatgctactaccccttcatcagtgacctcccct

SEQ ID NO: 772363 - DNA, 100 bp, Homo sapiens
gccgcagtctggccacccgcttccatgcggttcgggtccaagatgatgccggttgccgaggagcccaagtagaagaaatatggagtttagagcctgagaa

SEQ ID NO: 772364 - DNA, 101 bp, Homo sapiens
ggtgcttcaactggtatctatgaggccctagagctccgggacaatgataagactcgctatatggggaaggggggtgaatctctacattaagaacttggatg

SEQ ID NO: 772365 - DNA, 82 bp, Homo sapiens
ttctttgacgtccagaagaccaagtacctgcagatcctgacctctctgatgagatggatcgcaaccatgtccaagggacctg

SEQ ID NO: 772366 - DNA, 87 bp, Homo sapiens
gactttgatgagaacactgctctggatgatgcagaagaggagtcctttaggaagggtgaagttgaacaaattgctatgatgaaacca

SEQ ID NO: 772367 - DNA, 96 bp, Homo sapiens
ttgtctttcacaggctgaaaataaaacagatattacctaccatttacaaaatgtacgagatcaaagcaggaggcagcattgcaaagaagttcagcg

SEQ ID NO: 772368 - DNA, 51 bp, Homo sapiens
tgcacggcagtctgtttatgaggacaaaattcttctaagcagtggacgaga

SEQ ID NO: 772369 - DNA, 95 bp, Homo sapiens
gcctcccgagaagaagttgaggcgctatgcagcgtctcctccctgggccccgagcatcccggcctgacaacgagtcagaggagcatgggaaagcc

SEQ ID NO: 772370 - DNA, 83 bp, Homo sapiens
cgccgaggcaccgaggcactcagaggagaaggatatggccctgaagccacatgagcggaaggagaagtgggagcgtcgtctca

SEQ ID NO: 772371 - DNA, 96 bp, Homo sapiens
ctctagccctggcaaacctaaccacttgcaaccctgctaatgcaaaagggttgtcctggtctgtgcaacagcaatggaagatgtaccctggaccaa

SEQ ID NO: 772372 - DNA, 76 bp, Homo sapiens
gggaccctgagatcgtcaagtctcccagcgaccccaagcaataccggtattgttgcagcatctggcagtgagactg

SEQ ID NO: 772373 - DNA, 75 bp, Homo sapiens
ccgtcaactcctgttctcctcagagcctgtctctgctggatgaaccgaatcctaacagtccagccaatagccagg

SEQ ID NO: 772374 - DNA, 75 bp, Homo sapiens
cggtcctgtttcgacagcgaacatgtcgcggcctgtcaggaatatgatgaagaatgggctaagaaaattcagagt

SEQ ID NO: 772375 - DNA, 114 bp, Homo sapiens
acgacttcgacgccagcctctcgggcatcgggcaggaactgggcgccggcgcttacagcatgaggcaaataatctccccaaagccatcgccgctgctcacacctttctactgaa

SEQ ID NO: 772376 - DNA, 98 bp, Homo sapiens
cgcagcaccagcaccagccgccccgtcgccgccgccgccgccgccgcccggaccccggcgcgctgaatgcagtgtaatgttcaagctcagaaatgcct

SEQ ID NO: 772377 - DNA, 82 bp, Homo sapiens
gacaaccaggcaatgctggatagataccgaattcttatcacaaagagatggtgaattgtctttgagtcggtcacttgtcaat

SEQ ID NO: 772378 - DNA, 100 bp, Homo sapiens
ccctggcacgagagtacagcgtggaggccgaggaaaggatcggcaggccggtgcatgagtttatgctgaaggatgcatcctcattcttggctgagtggca

SEQ ID NO: 772379 - DNA, 75 bp, Homo sapiens
cagtggactcaacttcaaagacgttctcaaggagaaggcagacctgggagatatacgactaaggggtcagacggg

SEQ ID NO: 772380 - DNA, 83 bp, Homo sapiens
gcgccagatggtggaggaatacacttatttatgaaatgtgttttcgcattataacaaggacctgttgacagagcactgcacag

SEQ ID NO: 772381 - DNA, 98 bp, Homo sapiens
cgggccgggatgagggactgtggcggcgcggcccgcgcgcagccggccgacaaatttacatgtattggagaccagaccagaagcccttctgaattaag

SEQ ID NO: 772382 - DNA, 50 bp, Homo sapiens
aaacactgggttgaccctctgcctgatgatgattaccacatgctgagggc

SEQ ID NO: 772383 - DNA, 88 bp, Homo sapiens
cccgcggcgaccaagatcaggaacctgccctgatgcatcaaattgcaatttggaggagaggcagcacaagcagaagcctgggcctggc

SEQ ID NO: 772384 - DNA, 98 bp, Homo sapiens
catcacctgcctcagaacagactgtcacagtggaggaagggcaggcacatcatggacaagtttcatacatttctccgccaattcaccttgactctgag

SEQ ID NO: 772385 - DNA, 75 bp, Homo sapiens
atcatgccatactgcctccatttaatgttagcctgttttaaggcgcatattaaatttcctattgactacccctat

SEQ ID NO: 772386 - DNA, 75 bp, Homo sapiens
gcccgcgggtctacttcctcaaaggacctgaaggagaagaaggagaaggtggaggagaaggcaagccggaaagag

SEQ ID NO: 772387 - DNA, 98 bp, Homo sapiens
gagatgaatcctgcggcagaagccgagttcaacatcctcctggccaccgactcctacaagccccccgaatccaagcccaacttcacccctctcgccat

SEQ ID NO: 772388 - DNA, 83 bp, Homo sapiens
ctggtggtgttgtcgtggccggagcggcccgcgcctgggctgccggcacttcgcggcagcagaaaaatatggctcaggagact

SEQ ID NO: 772389 - DNA, 96 bp, Homo sapiens
aaggcggaaggcggcggaggcggcggtcgccccggggctccggcggcggttgagaagctgatgtctcctcgacttccaactggaaccttgaacccc

SEQ ID NO: 772390 - DNA, 90 bp, Homo sapiens
caagaagatgagcagtttctgggagccgttatgccaaggcttggtgatgcttctgggagacacaggcgtcggcaaaacatgtttcctgat

SEQ ID NO: 772391 - DNA, 75 bp, Homo sapiens
gcctcgctgtccctgcggcttctggggatcttaccaatatatttgagtccttcctgcctcagttattggcctatc

SEQ ID NO: 772392 - DNA, 90 bp, Homo sapiens
gccatgggctgctgcagctccgcctcctccgccgcgcagtctgaacaagtgtcggaggccgagttactcccacagctgagcagagcccca

SEQ ID NO: 772393 - DNA, 113 bp, Homo sapiens
cagccacggcccggggttttcaaggcttaatcgaagagatggttccacaagatgaatggacagggtacaccccacgaggtaaagatgatgaaattccatgccgaagaatgcgg

SEQ ID NO: 772394 - DNA, 75 bp, Homo sapiens
ccgccatgcacaagctgcacttcctgcacagggcccagtcatatatgcacagttagaccactccggcggacatca

SEQ ID NO: 772395 - DNA, 74 bp, Homo sapiens
ttggtgtcatccagccttagcaaaccagagcttctagctccggacattcgacatgaaagaaatgtgattttgca

SEQ ID NO: 772396 - DNA, 75 bp, Homo sapiens
acagtcagcccttcccgccccaaagcagagcccgaacccagccctcaccttctgcgtaaagacccatgaccggct

SEQ ID NO: 772397 - DNA, 100 bp, Homo sapiens
ccagaaactgctaaagaaactcatgtcagccctgcctgatgtggctctgggaattcctgcagagaagagcaggggtggccaggagatagtgagcagctcc

SEQ ID NO: 772398 - DNA, 101 bp, Homo sapiens
cggcgacaaggagccccacgcgggcaagggagcgggagcggtctggcgctcccgccgcagaaatttgcctgtaatggtactgtgattgaacatcctgaata

SEQ ID NO: 772399 - DNA, 83 bp, Homo sapiens
agtggagaaggcccagccaatgaagatgaagacataggaggaacaaccaggaagctatatgagaaaaagcttttgaaactgag

SEQ ID NO: 772400 - DNA, 90 bp, Homo sapiens
gcaatcattcattttgtgccttgcaggaattcctcctgatcagcagagactgatctttgctggcaagcagctggaagatggacgtacttt

SEQ ID NO: 772401 - DNA, 75 bp, Homo sapiens
ctctcctgaccctgaagaactgtggacttcctcgttctgcccatcttcctaacaaggctatggctgataacagca

SEQ ID NO: 772402 - DNA, 74 bp, Homo sapiens
tgctgagcagcttcctgggagggaacatcttaatgaacctgagtgaaatggtaaaggagctggatggtcatgtg

SEQ ID NO: 772403 - DNA, 82 bp, Homo sapiens
acagagagggcctgggagcttgctgcagcttcagggctggtgaattaccatatctccgtcaagtgcagtaaccagttcaagt

SEQ ID NO: 772404 - DNA, 100 bp, Homo sapiens
tggctttcagagagaacagcgtttcagttttggtcatcggaagtggtgccttcagcacaggatgtatcaggacaaactggcttctctcaagaggcagttg

SEQ ID NO: 772405 - DNA, 96 bp, Homo sapiens
cgacggtggcgtttgacgtgcggcccggcggcgtcgtgcattccttctcccataacgtgggcccggggggtggattacggaacaacaacgagaaag

SEQ ID NO: 772406 - DNA, 96 bp, Homo sapiens
tgtgatctgtcgtcagcttggctacaaatctacaactcttgaaaaagaagttcctgtcatcttcatccaccctttaaacactggattattccggat

SEQ ID NO: 772407 - DNA, 75 bp, Homo sapiens
tggaagatttaacgaatggggttgtgatggcccaggttcttcaaaagatgtcctgagggagtctaacaagttagc

SEQ ID NO: 772408 - DNA, 100 bp, Homo sapiens
tacgatagaaaatgtaaaggccaagatccaggataaggaagatgaactgtctcattgtgttgagcctgagccatctcaggtgccaggtggcagttctaga

SEQ ID NO: 772409 - DNA, 50 bp, Homo sapiens
cgaggaggaggaagagtccagtgaaggttaaaagagcagaaccttgtgaa

SEQ ID NO: 772410 - DNA, 100 bp, Homo sapiens
tcttcagaaaactcatgatgatcctggccatgaatgaaaaggatcccaaaatggctgggcgaaaacttgctctaaaaaccattgactgggtagcttttgc

SEQ ID NO: 772411 - DNA, 97 bp, Homo sapiens
gaccttcaatatcaaaaatgactttactgaagaggaggaagcccaggctcctgggtagaactgcacttcagcaataatgggaacgggggcagcgttc

SEQ ID NO: 772412 - DNA, 88 bp, Homo sapiens
gtgaagctgccagtgaagaaagtaacagtgagatagagcagactgcaggcaccacctgtgtgaaccggacatgaaactggtgtggcct

SEQ ID NO: 772413 - DNA, 133 bp, Homo sapiens
ctttggagtatcgttctatttctctagctattgccttattttttctcatggatgttcttcttcgagtatttgtagaaggaatgcctcggctggggtggagcgcctcttgctggggaacaaatgtgacatggag

SEQ ID NO: 772414 - DNA, 82 bp, Homo sapiens
ggtagaccggacttgggtgacgggctccgggctcccgaggtgaagagcatcgggggctgagaccctgatcctgaaaatccag

SEQ ID NO: 772415 - DNA, 82 bp, Homo sapiens
gtccgcaccgggacgatcatcctggggacctggtacatgtttgcccgaccatctgtaagtcacacggctgcaccgccgaagg

SEQ ID NO: 772416 - DNA, 80 bp, Homo sapiens
ggatgattctggaactgggagaagatggctttaaagaatacacttcaacccaagaagatgaaaggattgttcttgttgac

SEQ ID NO: 772417 - DNA, 100 bp, Homo sapiens
atggacaactggatggactttctagcagtccccccaaaaaatgtgcccgttcagctgtggacatactcaagacagagcggctgggacacggctaccacac

SEQ ID NO: 772418 - DNA, 82 bp, Homo sapiens
tccgggccctcgtgtcaccgctctgaagtcaaggagcacggggtcactctggtgcccattgaggagttcagcccggagttcg

SEQ ID NO: 772419 - DNA, 126 bp, Homo sapiens
ttgccctgtgatctgcaggttctgggagacgcacagctaagatgccaggacatcctggaagctgggaaaagattactcttgtctctgctgctcctgggaaagtgatttgtgaaatgaaagtagaag

SEQ ID NO: 772420 - DNA, 100 bp, Homo sapiens
ggccccgacagcacccgccacaccacgctgagcctcctgaagcgggccaaggtgcacatcaaggagctggtgagcaggctgctgcacctgcacttcaagg

SEQ ID NO: 772421 - DNA, 100 bp, Homo sapiens
agccgcctgccccggtgcgcagacagagctattccagcaccagcagaggttagctttatacgtctacgaatatttactgcacgtaggagcacagaaatct

SEQ ID NO: 772422 - DNA, 100 bp, Homo sapiens
cctttaatgccaagcagcccaccgacatggctcgccggcagcagaaggtggccccagccattaaggagaggatgatgaagaagggaagcttgatgctggg

SEQ ID NO: 772423 - DNA, 75 bp, Homo sapiens
tgttgggagtgatggatggacagctgagatctgtatctgtggacctgaatgttgatccctcgcttcagattgaca

SEQ ID NO: 772424 - DNA, 100 bp, Homo sapiens
gttgagctcctgcagccgccgccgctgcagtggtcgtccctgccctccccggccccggggtgcaccccgcaagacccccctcgacaaccaacattcacca

SEQ ID NO: 772425 - DNA, 77 bp, Homo sapiens
gcctcccaaagtgctggtattacagatgccaggatagaagaatttgtttatgagaaactggatagaaaagctccaag

SEQ ID NO: 772426 - DNA, 75 bp, Homo sapiens
gaggctagggaggacctcacttccccggggtgtaataatgttaactgaggattcaggagcagttccagaaaaatc

SEQ ID NO: 772427 - DNA, 89 bp, Homo sapiens
gaacgtcccgctggatctgacccgaggttgtttacattcagagctctatcaataagaggaatacatattacagtgaattcgacaaccgc

SEQ ID NO: 772428 - DNA, 98 bp, Homo sapiens
caccacccccggagcccccctcaacacggaccgcgcccgccgggcacacaagaatggtcactgtgctggagaatctggtaaaagcaccattgtgaagc

SEQ ID NO: 772429 - DNA, 91 bp, Homo sapiens
cgcagggggacggggaccagcagctgtcgccgccgctctcaggaactgtggctgcaccatctgtcttcatcttcccgccatctgatgagca

SEQ ID NO: 772430 - DNA, 100 bp, Homo sapiens
acagtgttctgctttcatggagttcacagaagagtcgaggaggtgtgagcgccactttgaagggcatccaacccgcggctatccatgtggaatcgctttc

SEQ ID NO: 772431 - DNA, 100 bp, Homo sapiens
gaactgtggacgataattcaaaaacactatcccagggagtgcaagcttagagcgtctggccaagaatcagaggaagtggattcaaacatctacttctttg

SEQ ID NO: 772432 - DNA, 95 bp, Homo sapiens
cacaaatgcaacttctggaggatcagctgaacagatcaaattgagaggatccagaatccagatctctggaatagctaccaggcaaagaaaaaaac

SEQ ID NO: 772433 - DNA, 71 bp, Homo sapiens
caacagccacaacgtgtcaaagccggagtcgtcatcggtcctgacggagacagccctcagcgcctttttcc

SEQ ID NO: 772434 - DNA, 88 bp, Homo sapiens
gacaccagcaatgagaggacccgcgtgggcaccctgcaggtggtcagacatgtcatcaactcagctgcccacagcccccatcccgtag

SEQ ID NO: 772435 - DNA, 96 bp, Homo sapiens
tcaagtgacaaacgtacctgtggtccctggatccagtgctactgctacaaataaggctcctggaacagctcatccttatgatagtggccacattgc

SEQ ID NO: 772436 - DNA, 83 bp, Homo sapiens
cattggaccctcctcccaactgtagagaatgtgatcaatgggcaggactacgaagtgatgatgcagattgactgtcaggtgat

SEQ ID NO: 772437 - DNA, 75 bp, Homo sapiens
caagttgacggacaggaggcgaaatgtgcaaatgtttatggcagcctcccgcgacgatgcccctcaacgttagct

SEQ ID NO: 772438 - DNA, 96 bp, Homo sapiens
cagcctcctgcctctgttgctgctcttttccaaaacagcacttccttggcgcctttcctctacaccgttttccagtgtaaggcaaacattggtggg

SEQ ID NO: 772439 - DNA, 83 bp, Homo sapiens
agagggctctgatctgtgcgacagatagcataatggcagaacctgtttctccactgaagcactttgtgctggctaagaaggcg

SEQ ID NO: 772440 - DNA, 74 bp, Homo sapiens
aaaaggagtcaggaatgcctcttaggacatggatttgattgacatactttggaggcaagatatagatcttggag

SEQ ID NO: 772441 - DNA, 75 bp, Homo sapiens
cctttaaagaagatgatggaagaatttgtaccccatagcaagcttaatcctgattatcgagatgcccaaaatgaa

SEQ ID NO: 772442 - DNA, 98 bp, Homo sapiens
gaggggctccgagaggcaaacttttaagattccaggacctctgatggctgatttcatcttcaagactgaacattcttcacgatctgaaaggaaaagaa

SEQ ID NO: 772443 - DNA, 90 bp, Homo sapiens
tccgggctcctggacttcgcctttcccgagccctggaggtggggagaaaagttgttgtggtgctgggacagctgcagacacagacatgac

SEQ ID NO: 772444 - DNA, 74 bp, Homo sapiens
gcagcccccgaaggccctatcaggacatggagtatgaaagacggacttaaagcagcgtcttggccacaggttac

SEQ ID NO: 772445 - DNA, 90 bp, Homo sapiens
ttcagcaatagcaactaatggatttgtaagaggaggaactgaaggctatttacgagcagactcacaagagccctcccactttgattctca

SEQ ID NO: 772446 - DNA, 75 bp, Homo sapiens
gaaaaaaagccagtctcaacgttttacttatacaccaggactaccgaccagactcccggaaatcatgttggtagg

SEQ ID NO: 772447 - DNA, 86 bp, Homo sapiens
agggtatggtccagctgtgccgcaccgaggcgagcaggagcagggaacagcagccattgtttgatgtcctgtgactgagaaaccag

SEQ ID NO: 772448 - DNA, 101 bp, Homo sapiens
gcggtgtcggtgctgctggtggcggcggagaggaaccggtggcatcgtctcccgagcctgctcctgccgccgaggcaaccacacctccaaatcaaggaagg

SEQ ID NO: 772449 - DNA, 101 bp, Homo sapiens
ggcccaggtctccgtgcagcccaacttccagcaggacaaggttcaaaccttgtactactcagctgatcacaagctgcttgatgggaacctactagatggac

SEQ ID NO: 772450 - DNA, 74 bp, Homo sapiens
gggacaccctggaagccaggaaatgggattgtgggactttaccaaatcggtttgtaataacacctagaagacgc

SEQ ID NO: 772451 - DNA, 114 bp, Homo sapiens
gtctcaatatctgtcttcggtggactccttcggcagtccacccaccgccgccgcctcccagggtggcccagttgaaatccttcccttcctctaccttggaagtgcctaccatgc

SEQ ID NO: 772452 - DNA, 119 bp, Homo sapiens
cctgagtagccggtaacaaacgagggttcccgggattggaccgacgcagccatggtgtttgagaagctgcagctgctcaaccctgaaatagaagcagaacaaatattaatgtcgcccaa

SEQ ID NO: 772453 - DNA, 100 bp, Homo sapiens
gaagatggcggccggcgaaaggagctggtgcctgtgcaagttgttgagaactgtcaagtaatccacctctggctaccatccttattcctcctcatgctcg

SEQ ID NO: 772454 - DNA, 100 bp, Homo sapiens
agtggacatttttatggacaatttgatacattctgtcccttgaaaaatgtgggctgtttaataggtcctgacaatgcctggaagaaacgctggtttatcc

SEQ ID NO: 772455 - DNA, 121 bp, Homo sapiens
gcgctgggaaaccggcatgcggtgtactggaacagctccaaccagcatattctaccttgtaaatactgttatttgtatatactgtaaatgatgacatcggtgggcactaaccgagcccggg

SEQ ID NO: 772456 - DNA, 100 bp, Homo sapiens
gggatcctctgctgcatagtttcggtcatctaaaggaggttttaaacagtataacagttatggctgattgtcctcacacaattggtgttgaatttggtac

SEQ ID NO: 772457 - DNA, 82 bp, Homo sapiens
tcccatcagtttctgtatagtgtaaaaggaacatgcttaccctgctgatgaactcatgcctttaacctgtagaggtcgagtt

SEQ ID NO: 772458 - DNA, 82 bp, Homo sapiens
ggaagttaatgtttacggcgaagtctactcaacgtttccaagggagacattacctcatccctcaagattgctcgctgcaaac

SEQ ID NO: 772459 - DNA, 87 bp, Homo sapiens
cggcggaaaaccgaagttggaagtgtctcttagcagcgcgcggagaagaacggggagccagggacccagacagcgtggtcctctgcc

SEQ ID NO: 772460 - DNA, 100 bp, Homo sapiens
gccgctctagcggccgggactctgaactatggcggagaggaaggcaagcctgagattaatcagcagttaagcctagagtctatggaacttgacgagcttg

SEQ ID NO: 772461 - DNA, 75 bp, Homo sapiens
gaggcctccccagccatgtgaaacttccactgcttttaaggccctgcactgaaaatgcaagctcaggcgccggtg

SEQ ID NO: 772462 - DNA, 75 bp, Homo sapiens
catcctgggattttgttgaagccacacaaagaacaaattgcagttgtttgagaggctgacccgcggctgattgag

SEQ ID NO: 772463 - DNA, 50 bp, Homo sapiens
gcagcaccatcggggagacaagcaaataccccagaatcttccatgctccg

SEQ ID NO: 772464 - DNA, 82 bp, Homo sapiens
gtcaagtacactgaaattcatcctgagatgagttatttctcaaactctgaggctgcggagttcacacattgaaatctgtcat

SEQ ID NO: 772465 - DNA, 100 bp, Homo sapiens
cgggagacagattgtggagttcatattaatgctggtcctgagattggtgtggccagtacaaaggccatgaccttgcctcctttcctggagttcggtgtcc

SEQ ID NO: 772466 - DNA, 51 bp, Homo sapiens
aggtccccctcaagtgtctggctcaagaggaaactttagatccaattgatg

SEQ ID NO: 772467 - DNA, 50 bp, Homo sapiens
ccaaagtggatgcctccggggagatgccaattctcggaagcaagaagcag

SEQ ID NO: 772468 - DNA, 74 bp, Homo sapiens
aaagtgtggagaggttccttcaggaggatcaggcatgtcgggccccaggcctgtggtgctgagcgggccttcgg

SEQ ID NO: 772469 - DNA, 100 bp, Homo sapiens
caaagtgggacgcggcacctacggtcacgtctacaaggcgaggcggaaagatggaattcaattcgtcataatctgtccctacacagcaagttcattcgtg

SEQ ID NO: 772470 - DNA, 74 bp, Homo sapiens
cggaggctgaggagaaggaggagcgggccgtggaggcttcgccgcctaggtgcagctgacgagatcatgttgcc

SEQ ID NO: 772471 - DNA, 90 bp, Homo sapiens
gcccggtggaagctcctgcggcagatttattgctaaacatgggtgcatttttggataaacccaaaactgaaaaacataatgctcatggtg

SEQ ID NO: 772472 - DNA, 90 bp, Homo sapiens
gtgatacagtttgcctttctgttggggatagagttcctgctgacttacgcttgtttgaggtcaaagattctaaactgcctgcatataagg

SEQ ID NO: 772473 - DNA, 98 bp, Homo sapiens
tgggatccggctcctccagctaccggcccaaggccatctacctggacatcgatggacgcattcagaagggagccggcggcttgtggacgtgatggatg

SEQ ID NO: 772474 - DNA, 74 bp, Homo sapiens
ttgttaaggattccaagtaactcttatttggtgaactggcacaaaggttaatctcaagatgccgctagtgaaaa

SEQ ID NO: 772475 - DNA, 74 bp, Homo sapiens
tggaattttgccgatttcatgactaaccagtgatcacctgctgttaccagctaccacccataacaagaccacaa

SEQ ID NO: 772476 - DNA, 100 bp, Homo sapiens
cgagagaaacaataggacggaaacgccgaggaacccggctgaggcggcaggctctggctccgctactgcatcgtgtgcttctgtccaagaggcagagaga

SEQ ID NO: 772477 - DNA, 98 bp, Homo sapiens
ggctcaagttttcaaatgtatctgggcatggaggagtgacggcaggaactttctgtgctctgacaacccttatgcaccaactagaaaaagaaaattcc

SEQ ID NO: 772478 - DNA, 100 bp, Homo sapiens
tgaagagggtgaccaccacacctcagagtcaagatctccactgaagttggcatcacaaatgttgatctttccaccgtggataaggatcagagcattgcac

SEQ ID NO: 772479 - DNA, 100 bp, Homo sapiens
tgctttggcccctggtgacatgtacatggtgtaatgacagtttggcagtaatcagtccaaaccagagttcacagtggacctcaagggggcaacaattgag

SEQ ID NO: 772480 - DNA, 100 bp, Homo sapiens
cgcctcccgccgcgccccgccatgccgctctactccgattcaccagaccagagcacttgggcagcagcgccaagatcaagtgcagcggttgccatagcta

SEQ ID NO: 772481 - DNA, 82 bp, Homo sapiens
ggctttgtgtcaagacgtggcacgtgtcagagaatttgacgtgcttatcagattgttgtggaagaactgcacccacaccgaa

SEQ ID NO: 772482 - DNA, 100 bp, Homo sapiens
gcgaccccgacccagacccccacaaagggtacatggtgcagtggccgggagcacgcatccttcggcgtcaggagctagatgccttcctggctcaggcgct

SEQ ID NO: 772483 - DNA, 96 bp, Homo sapiens
cgacacacgggccaaatatcgagagggacgacggcctcgtgctgtgaaggtctatgcttggggctgtggagcttgtctaggttgtggttcttcaga

SEQ ID NO: 772484 - DNA, 75 bp, Homo sapiens
ccagagaaagtcctcgctcgtcaccagcaagcttgcggggtctgaaagctaataacattgactacacagttcatt

SEQ ID NO: 772485 - DNA, 97 bp, Homo sapiens
cactcccatcatcaacttgtgccaccctgacatcgtccgatctgtcatcaatacctcaggccatgactgctccctgcgtctctggagcctggacaac

SEQ ID NO: 772486 - DNA, 100 bp, Homo sapiens
gactgcaggcgatcataaagaaaatcgacttggactcagatggctttctcactgaaaagaaggcaacagtatggaggtgcaagtagatattgagtcaaag

SEQ ID NO: 772487 - DNA, 100 bp, Homo sapiens
taggagggaacgacagccagggccaggttcttgatggccagtctcagcatctcttccaacagaaccagttcacatgagagatcctaataatcaacttcac

SEQ ID NO: 772488 - DNA, 110 bp, Homo sapiens
tccagtaactttgtgagaaagggtacaagggagctcaggagctggtcaatgactggttagacaccaaacttaagcaagaattagcaagtgaggaagaaggtgatgctaaa

SEQ ID NO: 772489 - DNA, 75 bp, Homo sapiens
ggctgggaaggaaaaacagaatcagctgttccctgcgaaagacgaagttatacggaagcgtctcctcattgatgg

SEQ ID NO: 772490 - DNA, 75 bp, Homo sapiens
gtgttgtcgtggccggagcggcccgcgcctgggctgccggcacttcgcggcaggctgttactgaggcggagacac

SEQ ID NO: 772491 - DNA, 50 bp, Homo sapiens
tgcaggaggacgcagacggataggttggaaagaaccatgactgtattcag

SEQ ID NO: 772492 - DNA, 101 bp, Homo sapiens
tgccaccgtggtggacgtggagaagcggaggaacccctccaagcactaccttagaccatgctcagcctccaagcagccttgtcatcgacaaagaatctgaa

SEQ ID NO: 772493 - DNA, 82 bp, Homo sapiens
gagaagagcagagcggagggagccccagacacgagatgccctgtatccaagcccaatatgggacaccagcaccgagtccggg

SEQ ID NO: 772494 - DNA, 100 bp, Homo sapiens
atactggtttcacactccaccaagcatcccattacagatagaagaggttgtacgtggacactataaaggtcagcaaattggcaaagtagtccaggtttac

SEQ ID NO: 772495 - DNA, 114 bp, Homo sapiens
ctcaattacacttcgactctcaaagcaataccaggatagctgttgtttcagagaaaggtgacaatctccaatagacttgtgtcttcaccttgctgcattgtgaccagcacctac

SEQ ID NO: 772496 - DNA, 51 bp, Homo sapiens
gcgacatggacaaagccatcaagaaaaattctgtaggccgttggaaggaag

SEQ ID NO: 772497 - DNA, 75 bp, Homo sapiens
gcaaaagtgaaccactccccaggagccaaaaacctgtatatcatctccgtgaaggggatcaagggacggctgaac

SEQ ID NO: 772498 - DNA, 75 bp, Homo sapiens
gctacttcatcacaaagatgcacatgtagatttcctgaaaagtggtctctaattaacagaagatggcaaagccca

SEQ ID NO: 772499 - DNA, 82 bp, Homo sapiens
cctacttgcctaaatgaggaatgtctttcctaccatctaaaatacgaaggtttctggctggcttgaaatccatggcccaaaa

SEQ ID NO: 772500 - DNA, 100 bp, Homo sapiens
caatcgtgaaaactatattcacaggttccatcaatggtgagcaccagcctgaatgcagaagcgctccagtatctccaagggtaccttcaggcagccagtg

SEQ ID NO: 772501 - DNA, 100 bp, Homo sapiens
ccgcggaaacctggagtggaaggctggccaactcagccaatccgcacatttagctctccaactaccatacaacgtgcttggtttaggtcggagcgcaaat

SEQ ID NO: 772502 - DNA, 103 bp, Homo sapiens
tcaaagttaagtggaaaagcagcggtatttctctgcctcctgtggacaaaaaaagaaaaccatgagctgttttccaagagcttcatctccatggaagtgcctg

SEQ ID NO: 772503 - DNA, 80 bp, Homo sapiens
ctcaggatggacccaagctctgccggacatggtggtgtcccacctttttgggaagctggtgaaactgcgtgctgtaagct

SEQ ID NO: 772504 - DNA, 83 bp, Homo sapiens
cctcaaccttctctcagctccagagaagacaggaccaccttccaaagaaggccgagacgcatccagagctttcgtgaccgggg

SEQ ID NO: 772505 - DNA, 75 bp, Homo sapiens
agctggccactaaacgcccgtggttgccaagaattgtgagaagctggagaataattttgatgacatcaagcacac

SEQ ID NO: 772506 - DNA, 100 bp, Homo sapiens
ggcagccgagcagcctggcaacggcggtggcgcccggagcccgagtgccggtggtggtgtgcacattgagccccggtatagacagttcccccagctgacc

SEQ ID NO: 772507 - DNA, 97 bp, Homo sapiens
caaaaccttcatggtgatccatggctggacgacgccagcccccagcaggacagcatctttttctgagtccagggccgatgaggtggcgcctgcaaag

SEQ ID NO: 772508 - DNA, 75 bp, Homo sapiens
cccgggtgcgggcccggcgccgcaccagcagaacgcatgtgaccagctggctcttggtgtggctgctctctttgg

SEQ ID NO: 772509 - DNA, 74 bp, Homo sapiens
tcccatctcccatgatgtatgctggaccaactgaggttaaagtattgcacaatcagctggtccttttccacaat

SEQ ID NO: 772510 - DNA, 98 bp, Homo sapiens
tatccaggcatcccagctacgaaggatggaatcttcaatcaatcatatttcacaatttccatcaccagaatgggacacggtgactcctgaagccaaag

SEQ ID NO: 772511 - DNA, 75 bp, Homo sapiens
ccagcaccgtgctctccaccacagatatggacatttctggaattacagagccccctctacattgagcacaagaca

SEQ ID NO: 772512 - DNA, 85 bp, Homo sapiens
cagcaccatcgagccagaagcagtatttgtcctggtgctggagaatctggtaaaagcaccattgtgaagcagatgaggatcctgc

SEQ ID NO: 772513 - DNA, 90 bp, Homo sapiens
accaaaggtctcgtacctctcagaggtcgcgtctccttcttcacctcggggtccgagaacctacaccgcgtggagaaggtccactggggc

SEQ ID NO: 772514 - DNA, 75 bp, Homo sapiens
acattggagggggcttccccggaatggagggctccgggcccaagtttgaggaggagctcagtctgaatattcttg

SEQ ID NO: 772515 - DNA, 83 bp, Homo sapiens
cgagaccctggtgatccagcagcgcggggtgcgaatctacgatggcgaggagaagactgtgatagatgccaacattttcccag

SEQ ID NO: 772516 - DNA, 75 bp, Homo sapiens
ccacctgctcaggaaccctcaccttgtttcggactataggtgaaaacttttggcccgtttggaagcggcagccag

SEQ ID NO: 772517 - DNA, 90 bp, Homo sapiens
gataccaaagaaaagaaagagaaaaagcagaaagtagatgaagatgagattcagaagatgcaatatgcaactcttccatggatgtacctg

SEQ ID NO: 772518 - DNA, 99 bp, Homo sapiens
gcagctagtaatttgccttctggattgctaccctgtcatgatcaaggcctcagcaggtggtggtgggaaaggcatgcgcattgcttgggatgatgaaga

SEQ ID NO: 772519 - DNA, 89 bp, Homo sapiens
gtctcggcccgagccttagagccttagacaccggggaggagaccctggtcctgttcctaggttacctgtcctgctgccgattcctggat

SEQ ID NO: 772520 - DNA, 98 bp, Homo sapiens
gctccatatacttcccatgataaacttaagaacactgatatttgcatttaatggggaacaaaagatgaagaaggaaaaggaatatattcactaaggat

SEQ ID NO: 772521 - DNA, 75 bp, Homo sapiens
cgtggtggagctctgcgtgtaactcttcatcttggcttatacctatactgcctgatatgctccgacacatttttc

SEQ ID NO: 772522 - DNA, 87 bp, Homo sapiens
aatgaagaacactttcaagaaccagatgttcctcctgctgatcaagagaagctttttatccagaagttacgtcagtgttgcgtcctc

SEQ ID NO: 772523 - DNA, 75 bp, Homo sapiens
gtgtgcaaggggagtcgtggcgtcgtctgcgaccgctgccttctcggacattatgatctcaaccagctgctggag

SEQ ID NO: 772524 - DNA, 83 bp, Homo sapiens
tggacttggacacgtcccagctctctctgggcatctggaaagaattcaattcgtcataatctgtccctacacagcaagttcat

SEQ ID NO: 772525 - DNA, 51 bp, Homo sapiens
ctttcactgccatcggggacaagaatgaccgaagaagcatgccgaacacgg

SEQ ID NO: 772526 - DNA, 100 bp, Homo sapiens
atcttcttcatgattgacagcttcgaggagacctgtactgtaccctggaggtggattccttcggctattttgtcagcaaagccaaaaccagggtgttccg

SEQ ID NO: 772527 - DNA, 100 bp, Homo sapiens
ggccccagcactcccagctgcgcagggcctgccaggtggcgctcgggttacagctgaagtaaagcacaacatcaccaacactgtggtatgcagagtgcaa

SEQ ID NO: 772528 - DNA, 75 bp, Homo sapiens
aatcccctgtttgagaaaaggcctaagaattttggcattgtgctcttaaagttccgtacagataaaggaagagat

SEQ ID NO: 772529 - DNA, 50 bp, Homo sapiens
gtggatcccgccgggaggtactttgctgcctgtcccaagccagatgattt

SEQ ID NO: 772530 - DNA, 98 bp, Homo sapiens
ttgggcgtcgttgtcaccatcgtctccgccttccagttcggagagcttttgcgagaattgaagcaccctaatgtgattgcattgcagaaggtgttcct

SEQ ID NO: 772531 - DNA, 98 bp, Homo sapiens
tcaacatatctacaatctcggtactacagaggcatggctattgcaccttgggagaagcctttaatcggttagacttctcaagtgcaattcaagatatc

SEQ ID NO: 772532 - DNA, 50 bp, Homo sapiens
aggtgttcgagaacgaccccgagacggtgcagaggccaagaccgttttgc

SEQ ID NO: 772533 - DNA, 73 bp, Homo sapiens
gattccattgaatgggctgaagtggtgatcaatgtgaacaatattctcaaggcttttattgagatggagacaa

SEQ ID NO: 772534 - DNA, 83 bp, Homo sapiens
caaaagaagtaggaaaggctgctttggaaaaacagtgatggtcattgtcctccagagcagtgatggaggaaataccagcccag

SEQ ID NO: 772535 - DNA, 96 bp, Homo sapiens
gagcagtccctctctgtccgggcgctgcaggagatgctggctaacaccgtggagaaatcagaagggagttattgatttaggagtcatgactccatg

SEQ ID NO: 772536 - DNA, 83 bp, Homo sapiens
ctgagcccgtccgtccgccgccaccacccactccggacacaggtacaatgactcttcttgcttttcacctaagttgaataagc

SEQ ID NO: 772537 - DNA, 87 bp, Homo sapiens
gggccgtgaacgaaagcagtgacggaggagcttgtaccaccggtcaaaatgcagatcttcgtgaaaacccttaccggcaagaccatc

SEQ ID NO: 772538 - DNA, 98 bp, Homo sapiens
cggccggcgtccggagcatggcggacccccagagctgtattgcctaagtgtaatcttgaacatgggcggtgctgtgagtgctggtgaagacaatgatg

SEQ ID NO: 772539 - DNA, 90 bp, Homo sapiens
ccggatcaacttcgacaaatagtgactctgacatcattagaagcatgccagaacagactggtgaaaagtaaaccttttcacctacaaaat

SEQ ID NO: 772540 - DNA, 111 bp, Homo sapiens
gaaatatggagaccccgggagcctcttcggcttctcgctggccatgcactggcaactgcagcccgaggacaagcggcttactaaggctcgtacgtctgcatcgattatctt

SEQ ID NO: 772541 - DNA, 96 bp, Homo sapiens
gtgttcccccacgaacttctgctgcctggctttctccggaccccctgtttctggaacagaggagggtcagagaagcaaagaccgaagaggacggcc

SEQ ID NO: 772542 - DNA, 83 bp, Homo sapiens
gttcgttgtgccagcgactaaaaagaggtggatactttaatactgataagccacaccccaggggtgaaattcttattgggggc

SEQ ID NO: 772543 - DNA, 75 bp, Homo sapiens
ggaaggggcacgggcacccccgcggtccccgggaggctagaggtgcatggctgcctcctaatcccatagtccaga

SEQ ID NO: 772544 - DNA, 75 bp, Homo sapiens
ctggtgcacacaccctcgtattctcctgcccttccccagcttcataaacaagcagatatgcaagaagagaaaaac

SEQ ID NO: 772545 - DNA, 100 bp, Homo sapiens
cgggagcagcacttccacagccaagtgcgggagtccacgattctttggatgggaagagaccttgaaaggacctctagtttatcctgcaactccagtcaat

SEQ ID NO: 772546 - DNA, 98 bp, Homo sapiens
tttaaacctcatttgaccttcatgaagttgtcaaaatcaccgtggctccgtaagaatgctgacgttcctcagggagtgattcgagtgcaagctcccca

SEQ ID NO: 772547 - DNA, 96 bp, Homo sapiens
gggcggccgggggctcagagatccaagtgcgcgccctggcgggtccggaccaagcttggatttacactgggcaacgtggttggaatgtatctggct

SEQ ID NO: 772548 - DNA, 100 bp, Homo sapiens
ttcgtactgggcagaacgcgacgggtctgcggcttaggggggacttgatctcatcttcatgccaggccttgggtttgacaaacatggcaaccgactgggg

SEQ ID NO: 772549 - DNA, 75 bp, Homo sapiens
ttgaagaaaaactaagactcacatctacaagcaatgaactgcaactttcatcctttgaaacgtgtgctgaaaaag

SEQ ID NO: 772550 - DNA, 100 bp, Homo sapiens
ggagggcatcttcaaccacaaaggtactactgagcgagtgtgcttgatccagggaacggttgaagcactgaatgcagttcatggattcattgcagaaaaa

SEQ ID NO: 772551 - DNA, 100 bp, Homo sapiens
aaaatgtaaagacagagaaaggcatagacgggagagcgaagaggaactttactcctcctgtcgccagctgaggaggcggcaagaagaactgaacaaccag

SEQ ID NO: 772552 - DNA, 98 bp, Homo sapiens
cagccctgacttctcaaaaagcactgcacagaggaggaggcagcagaaccccatagcccacccacctttgggttcctgttggacatcgatggagtgct

SEQ ID NO: 772553 - DNA, 89 bp, Homo sapiens
gccgatccagcctgcggagcctgtggggcagaaaccaaggtgtatgttggtaacctgggaactggcgctggcaaaggagagttagaaag

SEQ ID NO: 772554 - DNA, 74 bp, Homo sapiens
gccgtgggcaaatgtcgaagtgctggaattaaggcctctgtgctgcagaatcttcgcacagccatgcggagaca

SEQ ID NO: 772555 - DNA, 100 bp, Homo sapiens
tcggccgatgaagtgcagaggtttttttctggcaactccggaggtgccctggaagtcattgcctgacaataactgatgttcccgtcactgtttatgcaac

SEQ ID NO: 772556 - DNA, 74 bp, Homo sapiens
ggggcattgtcaagcatctggaggctcctactccaatgtggccagatgacctgcaaaaccacacattcctgcac

SEQ ID NO: 772557 - DNA, 75 bp, Homo sapiens
aaaggattgtgacatatcgttggacccagaattgagcccttagagatttgtttgattccatggataaaacttctt

SEQ ID NO: 772558 - DNA, 87 bp, Homo sapiens
tagccagctccccagaaatgaacctgcccacggtgtccgcgctcaggatggtggaagagagtgaagagcggctcacggaggagcaga

SEQ ID NO: 772559 - DNA, 90 bp, Homo sapiens
tgctggatgagctgctgaagcccaccgaattaggagtcggagaggatggcaggggccggaggccagcaccaccctccgggcgccgctgga

SEQ ID NO: 772560 - DNA, 90 bp, Homo sapiens
tgctgatcgtcctgctgctgatggtgtgcgatcaagagactgaaatctcatccttctatcatcatatggagtggcaataatgaaaatgag

SEQ ID NO: 772561 - DNA, 101 bp, Homo sapiens
gcgggacgcgggcgccaggaccggccgaacgcagaggctgctctttggcgtaaattgcaatcgattagggatcgtttctcagaatcaagttagaagtgaga

SEQ ID NO: 772562 - DNA, 75 bp, Homo sapiens
atgttcggaatgctgctgttcgctggtgggaaggaatcttgtcgattggcctggctgctgcctactacagcggag

SEQ ID NO: 772563 - DNA, 50 bp, Homo sapiens
tctgcatccacattgcacataaagttggttatcaatactctggctgacca

SEQ ID NO: 772564 - DNA, 100 bp, Homo sapiens
tgagacagagatgacactggaaaagatggtgaatgtgtaccacgtacatcagcattcctgcttcctgtaccttggcagtatccttgtggatgaatatggc

SEQ ID NO: 772565 - DNA, 100 bp, Homo sapiens
ggcggacggcgtggaccacatagacatttacgcggatgtcggcgaagagttcaaccaggtacccttgggcgagactgtacagtacttcccaaaccactgt

SEQ ID NO: 772566 - DNA, 82 bp, Homo sapiens
gatgctgcagacactgaacgaggagccagtggtggtgtttcataagatgtcacccaacgagaccctctttttggaaagtacc

SEQ ID NO: 772567 - DNA, 51 bp, Homo sapiens
ggcccgggccccgagcgcccgaacaggtgtccctggccagtgtccttccac

SEQ ID NO: 772568 - DNA, 100 bp, Homo sapiens
cctgcctctgcctgttcttctggaatgtcttgggggttttgatcctgtcactgtggtctattacaatggctaccatggagacacctctgaaacatttttg

SEQ ID NO: 772569 - DNA, 100 bp, Homo sapiens
gaccgagagcgtgaccgagagcgcgaatatcgtcatcgttagaagtgtgaagcagtatgcagatgttgaaggattctaatgcaagatattttttcttttt

SEQ ID NO: 772570 - DNA, 98 bp, Homo sapiens
cgcggagcggacggattcgattcaacggggttccggaccgcgctgcgctatggagcaggtgtcgctcaagtcttccgaccgccaaggctcggacgagg

SEQ ID NO: 772571 - DNA, 101 bp, Homo sapiens
tgcagagccgcctttccagcatgcaggggctgctcagatcgcccaggaccacaccgcagcgtaactgcaggcctctcagcgaaaaagggggaaagcaaaga

SEQ ID NO: 772572 - DNA, 50 bp, Homo sapiens
caaaatccatagatggaaaagatgattatagatgcccagttcatttttac

SEQ ID NO: 772573 - DNA, 83 bp, Homo sapiens
atgactttggaggaattctcggctggagagcagaagaccgaaaggattttttatcaagcagaaatgcatcgaacaacgagaat

SEQ ID NO: 772574 - DNA, 75 bp, Homo sapiens
cgtcttgcctgtgtcccacttgttcgcggcctatagtgtgtgttttaatagaaaagttgtcactttccaaaatgc

SEQ ID NO: 772575 - DNA, 83 bp, Homo sapiens
tacctaccaatcgtgaaaactatattcacagttccagctattcttcagatgctctggattttgagacggagcacaaattggac

SEQ ID NO: 772576 - DNA, 75 bp, Homo sapiens
aacctttaatgttgagtctaccaaaaagaatgaaccgcttgcttcttatttagaatctaaaggaatgtgcacatc

SEQ ID NO: 772577 - DNA, 100 bp, Homo sapiens
gctacgaaacagcagcggaagtagccggctgataggaagatgtcttcaggaaatgctaaaattgggcaccctgcccccaacttcaaagccacagctgtta

SEQ ID NO: 772578 - DNA, 75 bp, Homo sapiens
cagtgctgttctccaagaggcccagagacatgctgaaacatcgaagatgacattaaagtatcagtaaatgatttt

SEQ ID NO: 772579 - DNA, 100 bp, Homo sapiens
ccaggattcatgctctacatccccatagagagaatttgtgaaaaacgcatgggctgatattgaacgcttcaaagaacaaaagaaccgagacttaaaggag

SEQ ID NO: 772580 - DNA, 82 bp, Homo sapiens
tgaagcggaggcggccgctgctcgaggctgaacgagcgcgaccgcctgatcaagaggctgggccggaagacgcccccgacgc

SEQ ID NO: 772581 - DNA, 90 bp, Homo sapiens
cgccgccgccgccgttttcgcctgcagctgctcaccgctatgagggcactggccggtcactgtccctcaagctaattcagcagctccgtc

SEQ ID NO: 772582 - DNA, 80 bp, Homo sapiens
gaagacgcagaagcaggacgaccctgaaagattcagcctcttcatcctcaaacaggtgctggagaatctggtaaaagcac

SEQ ID NO: 772583 - DNA, 75 bp, Homo sapiens
gcagccatcaaagttatggatgtcactgagaagtctcaggggatccagaactgcagccagtccttgctgggctgt

SEQ ID NO: 772584 - DNA, 76 bp, Homo sapiens
tggattgactatggaaaagttgccaaattggtgtggcggggcaccctggcccgcatgcggtacaaaagaaccaagg

SEQ ID NO: 772585 - DNA, 89 bp, Homo sapiens
ccagagagacgtgaaacatgtgaacactcaagtgaagcaaaagccttccatgattacttgagtcagcagatactggagttatttgaaac

SEQ ID NO: 772586 - DNA, 75 bp, Homo sapiens
gcgtgccctacttcaaggataagggtgacagcaacagctcggcgggctggaagagagaactcgatgccaccgcaa

SEQ ID NO: 772587 - DNA, 86 bp, Homo sapiens
tgggaacacaaccaagcaatcatcaagcacctcctcgttccactggtgaatatgataaagctatccaggcttttaagtcaacaccc

SEQ ID NO: 772588 - DNA, 98 bp, Homo sapiens
acgcccggcgccagcacatcgcagtgtggtacaggtcctgcttgctgctggggctgatccaaaccttggagatgatttcagcagtgtttacaagactg

SEQ ID NO: 772589 - DNA, 139 bp, Homo sapiens
ataaagctgcttttacagaatgttgccaagctgctgataaagctgcctgcctgttgccaaagctacctgcctttctggaagaactttgccatgagaaagaaattttggagaagtacggacattcagactgctgcagcca

SEQ ID NO: 772590 - DNA, 128 bp, Homo sapiens
acttatatttttatcacgttcagtgtgctgggatgaggttacgagtagccatgtgccatatgatttatcggaaggacccagatgatgtggtaccagttggccaaagaagagcctggtgttggtgcatg

SEQ ID NO: 772591 - DNA, 88 bp, Homo sapiens
tctgccagcaccacgacatcatcttcccctttgagtttgacaccacagtcagggaaagcaggcaggatgggagagtcgccgatagaac

SEQ ID NO: 772592 - DNA, 75 bp, Homo sapiens
gccgatccagcctgcggagcctgtggggcaggccgagtacagatgctgccccaggcggtgtgcctgctgcatgcg

SEQ ID NO: 772593 - DNA, 90 bp, Homo sapiens
gttgcgggggggaagtgactgggcggtgccggcgccggagacgatgccgttgaacttagtgatttggcccgtgaccctccagcacaatgt

SEQ ID NO: 772594 - DNA, 75 bp, Homo sapiens
caaaagcttggaaagcaacctttccggagcggttgcagggcacacattactcggtgcagtcggacatctggagca

SEQ ID NO: 772595 - DNA, 50 bp, Homo sapiens
ggacaaatcgccagagatgtgggctggaccaagcccaatgcctttcatgt

SEQ ID NO: 772596 - DNA, 96 bp, Homo sapiens
ctcattcttccatcctcagaaccctacttctgcttcctcctggccgctctgggtgtgacagctggtgcccatcgcttgtggagccacaggtcctac

SEQ ID NO: 772597 - DNA, 100 bp, Homo sapiens
ccagagacagagcactaattagaatgagtccctggaacgccagatgcgtgaaatggaagagaactttgccgttgaagctgctaactaccaagacactatt

SEQ ID NO: 772598 - DNA, 50 bp, Homo sapiens
tcctgcgcctttccactgctctgctggagctctcaaacactgctgtcctg

SEQ ID NO: 772599 - DNA, 99 bp, Homo sapiens
gtacgcccagcacgacgtggcgctcatgctgctggggaacaaggtggctgtggtgaagtcggaagatgtggaagcagggttagcatcccctggtgggca

SEQ ID NO: 772600 - DNA, 88 bp, Homo sapiens
cgaaggagcggccgggagcccgccgcgctggtagcgggtgcgatagcgaactcgctgacctgcgtgcagctgcacaagagagctgaga

SEQ ID NO: 772601 - DNA, 50 bp, Homo sapiens
aaatgacacactggatcctgaactgtccttgaatgggcaagagggcacat

SEQ ID NO: 772602 - DNA, 83 bp, Homo sapiens
cttgaagaagcttagggaagaaaggctcccggaactgtggctgcaccatctgtcttcatcttcccgccatctgatgagcagtt

SEQ ID NO: 772603 - DNA, 96 bp, Homo sapiens
aattctaccaggatggctctcttcgctggtggcaaactgggaggctgccggcgtggaccgcgggaaggcggggctggggctcggcgggaggccacc

SEQ ID NO: 772604 - DNA, 74 bp, Homo sapiens
gtgaacatgccaggagagcaatgcaaaaggcgcagcccagcctcgaaatgcagaacgacgccggcgagttcgtg

SEQ ID NO: 772605 - DNA, 98 bp, Homo sapiens
cgccctggagctgctagagatccggaagcacagccccgaggtgtgcgaagccaccaagtgagccgttctccaaccctttggcccccgatggccacgat

SEQ ID NO: 772606 - DNA, 100 bp, Homo sapiens
caactcttccaggaccaccaaaaataactttggctgggtatgaccgcttgcttcggatcagagcactcagatgggaatatggtagcgtcttgccaaatgc

SEQ ID NO: 772607 - DNA, 100 bp, Homo sapiens
ggaagccttgaggacctactcacagataggaattgaagtctaataaagttcctgtcgttcagcacccgcatcacatgcatccgctgactcccctcatcac

SEQ ID NO: 772608 - DNA, 100 bp, Homo sapiens
actgcatacggcctcaggacatcaaggagcgccgagcagtcatcatcctcaggaagatgttgcgcgaggttctccgctcgtagcagtctgtacattcact

SEQ ID NO: 772609 - DNA, 83 bp, Homo sapiens
tccactggcaaagagtcacctaaagttaggcggcactccagccccagctcggaaagctccaaccatggccatggggctcttcc

SEQ ID NO: 772610 - DNA, 75 bp, Homo sapiens
attccaagtaactcttatttgcgtactgtgaaccgagaggagctgctgaaacaggcggagtctgtgatgcaggac

SEQ ID NO: 772611 - DNA, 101 bp, Homo sapiens
cggagtcagacggcgctatgtacgccctcttcctcctggccagcctcctgggcgcgggtttgaggaactactggccaacctactaaatgaacaacatcaga

SEQ ID NO: 772612 - DNA, 89 bp, Homo sapiens
agtttgagaatccagatctctttgccaaattggcattgaattttgctactcagataaaaggaaactttgagggaaattttgagtcactg

SEQ ID NO: 772613 - DNA, 83 bp, Homo sapiens
cagaagtccacttcagaaggtctgcttggtgacttggatacagaaatttcctgggctaaaactagacgcttgaagcaaagctg

SEQ ID NO: 772614 - DNA, 115 bp, Homo sapiens
gctgtgcacagatgtgcagacgtgggccttggcatggtcagtgcacgcacagcgccagtgtcaacagcatctccaccctggagcctgtgagccggtgccagcgcctgagtgagct

SEQ ID NO: 772615 - DNA, 110 bp, Homo sapiens
aactgtcaggtacctcaaagcggagtcatttaatacttcatgattagaacaaatatgtgaaagttcccaccaaccagtgagaatttcttccttcagacggttttggatct

SEQ ID NO: 772616 - DNA, 154 bp, Homo sapiens
ggtcccgtttccctctgtgcggcggccggcgggaccataagggcttaactcatatatttaacccccctccaaaaaactgaagcgttcccggctgaaggtgaggttctgcaccaacgagtcgcagaagtcccgggcagagctggtggggcagctt

SEQ ID NO: 772617 - DNA, 90 bp, Homo sapiens
gcaccttctgccagctgatcctggaccccatcttcaagacccctttgctgatgcaagtaagggtgatgacctgcttcctgctggcactga

SEQ ID NO: 772618 - DNA, 100 bp, Homo sapiens
aacacatcaagcatttatgcggggctgtcacatggtgactgaagaacttcattccataacgtttgaaacacagatctgcctctatggcctgaccatagat

SEQ ID NO: 772619 - DNA, 88 bp, Homo sapiens
gcgctgagaggggctgcggccggagcgggcggctgagacaaaggcgacgttcaaatctgaacatcaatgatgtactagggaactactc

SEQ ID NO: 772620 - DNA, 101 bp, Homo sapiens
gccctgccggccctctgcgaccccagtcgcctggcgcaccggcttttggtgctgttactgatgtgcttccttggctttgccgattatgtttcgaggggaag

SEQ ID NO: 772621 - DNA, 106 bp, Homo sapiens
ttcaagtgaagttaatctgaggtgaagcaaacagaaaattgtggaggttttgttgggatcgcttacacctgagacgaactacagaacagcacgtaccagaggtgga

SEQ ID NO: 772622 - DNA, 74 bp, Homo sapiens
cccgaaggacttcggcgcgggactcaagtacaactcccggcacgaggcaccactggatcataccagtgacaagt

SEQ ID NO: 772623 - DNA, 82 bp, Homo sapiens
gtacgtcgctacgtcccgtctctagccctggcgctccgccggtcccgttctgcagtttcaccagtgatcattaaagaatggg

SEQ ID NO: 772624 - DNA, 99 bp, Homo sapiens
gcaacttatgcaagaaactgttgaattagacccgtttcctatagatgagaaaccatacaagctgtgatttctacctggacaaggactggtactataccc

SEQ ID NO: 772625 - DNA, 75 bp, Homo sapiens
agagcgaagactgcctatatttaaatatatatgtcccgactgaggatgggaaaccatctttgtatggcagcctga

SEQ ID NO: 772626 - DNA, 88 bp, Homo sapiens
attcagtcccttctccatgaaatggtacacgcagaacatggcaacagatcccctaatttgtggctgaaagatgttctcaaggaagaag

SEQ ID NO: 772627 - DNA, 82 bp, Homo sapiens
atcagcatttccctgtttgcagttcgactgctacaaacgcttctccctgttgaaaagggacagtatggaaattaccagcagt

SEQ ID NO: 772628 - DNA, 100 bp, Homo sapiens
cctgtacacggccgacatgttcacgcacgggatccagagcgccgcgcacttcgtcatgttcttcgcgccctgcaaccatgtccaagggacctgcagttgg

SEQ ID NO: 772629 - DNA, 50 bp, Homo sapiens
cagacccatttccagtcatgagtttttaaagacaattgttgcaaaagaga

SEQ ID NO: 772630 - DNA, 74 bp, Homo sapiens
ctgcagcggcaggtcagggagatggaggcggaattctccacgagttttgagcagcctcgggtttcccaccacct

SEQ ID NO: 772631 - DNA, 98 bp, Homo sapiens
ctgagtgtctaccagaagtgcaaggacaagcaggctgctgctaaactggagttccatagactttctgaagaaaacactttgttgaaaaacgatctggg

SEQ ID NO: 772632 - DNA, 87 bp, Homo sapiens
ttcaagagttttcatggattctaatggaatcaggcagttttgtgtccatgtgaacaactatgtcatctgggtgattctcagtgtgga

SEQ ID NO: 772633 - DNA, 100 bp, Homo sapiens
ggatccacacagctcagaacagttggatcttgctcagtctctgtcagaggaagatcccttggcagtagacccaggcctgccttctgtgaagcaagagcca

SEQ ID NO: 772634 - DNA, 60 bp, Homo sapiens
cggctggagagggaaccatggggactgtgcacgcccggggaggcaaatacatgcaggcgg

SEQ ID NO: 772635 - DNA, 100 bp, Homo sapiens
ctccgtcgctgtcgctgagagcctcacgagtcgaggtcctgcaggtggagctccggcagccgccctgggaccagttactctccacaagaaaattcacaca

SEQ ID NO: 772636 - DNA, 82 bp, Homo sapiens
tcaacttctaccagttcctcggggtgcagcaggggcagggtggacaggaagcagctcagcccagcctgggagaggccaaggg

SEQ ID NO: 772637 - DNA, 100 bp, Homo sapiens
ttcgggacccatggaactggctggactttagtgtgattatcatggcatgaccgcacctcgagcaggagtggggatgccacgtctgcccccagcgcccggc

SEQ ID NO: 772638 - DNA, 85 bp, Homo sapiens
acagtgttgaggaccatcttgcctggagcaagatcctaagtgtgaacgtgaagtccccagccctgctgctgagccagttgctgcc

SEQ ID NO: 772639 - DNA, 100 bp, Homo sapiens
gcaggagagcctgggccccccggcctccctggaccccctgggataggactgcctgggaccccgtcggacctcttccaggatgatctgtaccccgacacag

SEQ ID NO: 772640 - DNA, 83 bp, Homo sapiens
aacaagaccctgcccgtggccttcaaggtgagcatgggtttatgcgtcttaggcattattgtgatggcgagcaccaattctct

SEQ ID NO: 772641 - DNA, 98 bp, Homo sapiens
gaagaccactttagaaactcaattaaatggagttttaacattgaatgcggagaacactaattatgcctatcaagttccaaacttccataaatgtgaaa

SEQ ID NO: 772642 - DNA, 50 bp, Homo sapiens
ccaatccccggcagctctctcaggttgtctgcattcaaaagagcattcta

SEQ ID NO: 772643 - DNA, 82 bp, Homo sapiens
gagacaacaccgagtatgagaagatgtgttcgaaatgcgctttgccaagatgccggacgagcctgaggagccagtggtggcc

SEQ ID NO: 772644 - DNA, 90 bp, Homo sapiens
ccgccgccgccgccgccgccggcgcggaaggacgaggctgaggcgagaaacgagggcagagcggcttgggtaaatccaccttaatcaaca

SEQ ID NO: 772645 - DNA, 50 bp, Homo sapiens
atgaccagtgccaaattaccacactgcgcaagccacccgaggggactgcc

SEQ ID NO: 772646 - DNA, 82 bp, Homo sapiens
taataattcagtttgcatgaagaagaaactgaagaggcctctgaactgcgcagaaattcggaactatccgggcagatttgat

SEQ ID NO: 772647 - DNA, 82 bp, Homo sapiens
cggcgatatgatgatcctgaagtacagaaagacataccggacaggaacatgagcttatcgagagcatgcccctgttggaatg

SEQ ID NO: 772648 - DNA, 100 bp, Homo sapiens
gcccccctcccccgatgtcctcgcatacttggacttcagcgtgtcaaccactgggatattagcgggagtgaagagatgacctgatcagagccatcaagaa

SEQ ID NO: 772649 - DNA, 98 bp, Homo sapiens
atgggaagtttattcctcgaaaaccatttgctgaatatatttacaaacgaataaagcagcgagaccgggctgcatttgatgccagaaggcaaacacaa

SEQ ID NO: 772650 - DNA, 101 bp, Homo sapiens
cgactcctcgggcagcctcaacgagaactcggagggcaccggaggtttgacatctacaggaaggtgcccaaggaccttacgcagccaacgtacaccggggc

SEQ ID NO: 772651 - DNA, 100 bp, Homo sapiens
gaaagatcatttcatggatgatttcttccatcagcaccatcagcaccaggccgcccaggctctccatctggccagtccacagcagcagtcagccatttac

SEQ ID NO: 772652 - DNA, 82 bp, Homo sapiens
aagcagcgcccgtctgcttcgggcctctggaatttagcgctcgcccagctagccgcagcaggtattaatctctggagaagac

SEQ ID NO: 772653 - DNA, 50 bp, Homo sapiens
ccacagggcattccagagctcattgaggttggcatgtatatggactcttg

SEQ ID NO: 772654 - DNA, 97 bp, Homo sapiens
gcccatatgggggttctggagagcggggtgtggggtgtcatggagaaactccagctgggcccagagattctgcagcgggaaaatccaaggcttattt

SEQ ID NO: 772655 - DNA, 129 bp, Homo sapiens
ccggcccggtgcctgggttccaggaggacacgctgcagttggccttcatcgacttgagacaagtcttctccaagatcttcagccacgaggccctggagagttacctgcccaagatccagctggtgatcc

SEQ ID NO: 772656 - DNA, 83 bp, Homo sapiens
ctcgggcaccatgagcgacgtggctattgtgaaggagggttggctgcacaaacgagggaggaggtacaggagaactgtgtgcg

SEQ ID NO: 772657 - DNA, 100 bp, Homo sapiens
aaatccccctctagagtgtcatgttggttgggtaatggattccagagaccgtgggccaggaacatcctctgtcagaaagttcaggagccctggaaaggag

SEQ ID NO: 772658 - DNA, 115 bp, Homo sapiens
aagacccaaatgttattcccaatttgaagttactttcagattcttctggacaatggatcatattagtttcagatagtacttctgagtttttgatggctgaaaacttagtgaaagc

SEQ ID NO: 772659 - DNA, 100 bp, Homo sapiens
cggcagtctctccctgccaggctcttcatccaaggctgggatatgaagaacaacagcctgaggttccaattctttatcatgatgtaacatcccttttgct

SEQ ID NO: 772660 - DNA, 100 bp, Homo sapiens
ccgacttcgtcttcatgtttctcttcgggggcgtccttatgaccgcatatccccccacgtccatgtccaggagcccccctactgtcctggtcatctgtgg

SEQ ID NO: 772661 - DNA, 75 bp, Homo sapiens
aactggctgtgaataatatagctggtattgaagaggactggaaggatcaccagcacatatgcggccagtcagcag

SEQ ID NO: 772662 - DNA, 98 bp, Homo sapiens
cgatgtcgtccagtccgaaagaaaccaccttctccagcaatcaatgaactgagccatgttcaaatccctgttatgttgatgccagatgacttcaaagc

SEQ ID NO: 772663 - DNA, 75 bp, Homo sapiens
ggcgggtgctggccgggcagaccctggaaacccacaatctgccaaagcaacctccacttgccctagcaatgggac

SEQ ID NO: 772664 - DNA, 80 bp, Homo sapiens
gatggcggatgccctgcagtacctgcagaaggtctctggagacatcttcagcagatgggcttaggtcacgagcaaggatt

SEQ ID NO: 772665 - DNA, 86 bp, Homo sapiens
acgaggaagttttctactgtaaagtcaccaacgagatcttccgccactacgaggcgaactttctgaccaagtatacaactacccag

SEQ ID NO: 772666 - DNA, 51 bp, Homo sapiens
gttcttcttcgagtatttgtagaagggtccgtaaaagccctgggctcagcc

SEQ ID NO: 772667 - DNA, 97 bp, Homo sapiens
gcaaatggaaagaaatcccactgggcagagcttgaaataagtgctggagagatttaccagcatgagaattaagaaggagaaggaaaagcccaattct

SEQ ID NO: 772668 - DNA, 90 bp, Homo sapiens
cgctgagtggtttttcggatcatgtctggtggctccgcggattataacagtaacagatcaactcctagcaatcatgatcggatacagcgt

SEQ ID NO: 772669 - DNA, 75 bp, Homo sapiens
ccctgaaaaagtatcgtcgagaagcctatcatcgaattcagaaggagctggcggacatcactttagaccctccac

SEQ ID NO: 772670 - DNA, 101 bp, Homo sapiens
cccgccgagacatccgctccttgcccgagaacatccagtttgatgtttactacaaggttgtagatgagcatgagagtgtggagcagagtcggcgagcgcaa

SEQ ID NO: 772671 - DNA, 98 bp, Homo sapiens
aacaagtaccgccccgacctgcgcatggtcaaaatgcagatcttcgtgaaaacccttaccggcaagaccatcacccttgaggtggagcccagtgacac

SEQ ID NO: 772672 - DNA, 100 bp, Homo sapiens
tgaaccattctacatcccagacaaatggaagtgttatgatgcccttcgaaaaatgatcaactattgaccatatagtttggagaggcttatgcggtacctg

SEQ ID NO: 772673 - DNA, 75 bp, Homo sapiens
cgccccgaaactttcaccgcgagcggaacaaaatccagtctcatagcagaggagaatataatgtttacagcacct

SEQ ID NO: 772674 - DNA, 100 bp, Homo sapiens
cccaatggcagccagtttggattttcactggacttccacaaggacagccatgggaggccaggagtggtggctcacacctgtaatcccagctctgggaggc

SEQ ID NO: 772675 - DNA, 100 bp, Homo sapiens
cgagagatgtggatttccagctttgaacaatccaagaaagaagcccaggcactaaggatggagctatgacattgaagagaggaaggttccaaaacccaag

SEQ ID NO: 772676 - DNA, 82 bp, Homo sapiens
cgtcaatcagagcgtcctgtgcgatgacaacggcaacacgacaagaagtccttggcctctaccgcagcattttcaggcttgc

SEQ ID NO: 772677 - DNA, 50 bp, Homo sapiens
ctgcacaggaagccgtgaaactgaacattaaccaggtggtatttgttgga

SEQ ID NO: 772678 - DNA, 75 bp, Homo sapiens
cgcagtgacgagcggccgaagcagctttgcggaggtgcttcccaaggaccgtagatgcctctctagagcatgagc

SEQ ID NO: 772679 - DNA, 83 bp, Homo sapiens
ctcagttggaagcagccgatccagcctgcggagcctgtggggcaggaggctgaacagtacccagggggagattcgtgtcggtc

SEQ ID NO: 772680 - DNA, 82 bp, Homo sapiens
cagtggccacaagagcgaggagaagcgagaaaagatgaaacggaccctgaagattgttgatcgaatcgacaatgatggggat

SEQ ID NO: 772681 - DNA, 100 bp, Homo sapiens
cttcgctgcgctaaggaatgaaacccttccagctcgatctgctcttcgtctgcttcttcctcttcagtcaagaatactcggtggagcaggcgcagcaggt

SEQ ID NO: 772682 - DNA, 88 bp, Homo sapiens
cggctctagctaggtgagcggctccggccaggtagcaatgaagtgatgaggatactgatctctagaagcctgcttcaggagtagaacc

SEQ ID NO: 772683 - DNA, 74 bp, Homo sapiens
atgtgatgttggagaactacaagaatctcattatactagggtgtacaactatgagcctttgacacagctcaaga

SEQ ID NO: 772684 - DNA, 97 bp, Homo sapiens
aggtctccaagtcccagctcaagcaggggaaatgctgtctgtagctgagcacttcctggagcagcagatgcacccaacagtggtgatcagtgcttac

SEQ ID NO: 772685 - DNA, 83 bp, Homo sapiens
caggactgtggccgtgggggacatcgtctggggtgctgccttcacctgcctggagactgccttccgcctggacgccctgcacc

SEQ ID NO: 772686 - DNA, 80 bp, Homo sapiens
cctgagcctgccccagccagtaccagcgccgtgcagggtttccaggcctgaggtgcccgccctggccccaggagaatgaa

SEQ ID NO: 772687 - DNA, 90 bp, Homo sapiens
gagaattccccttcctagaaggaccaagatggcagcagtgactctgctggctttggcgtatacacagtggtcagcaagtccatctgggca

SEQ ID NO: 772688 - DNA, 100 bp, Homo sapiens
ggcgccagcggaggcggaggagcaggcggtggaggcgaggcagacaatgcagatcttcgtgaagactctgactggtaagaccatcaccctcgaggttgag

SEQ ID NO: 772689 - DNA, 50 bp, Homo sapiens
caaaccccatttggccctcaaacagcttctgaaagtacagagaagcttaa

SEQ ID NO: 772690 - DNA, 90 bp, Homo sapiens
gaaggctgggaaaaaaggcttattatatctgacagagctcatattgaaatttgcctgtaatggtactgtgattgaacatcctgaatacgg

SEQ ID NO: 772691 - DNA, 99 bp, Homo sapiens
ctcaccccccaagcggatactggtcttctcgtcggattgcccatgcacttgttgcagaaacagccaagggaccagttactctccacaagaaaattcaca

SEQ ID NO: 772692 - DNA, 75 bp, Homo sapiens
ttttcaagggagctgataaagaacttcttcccaaaatggctgagatgagtgaactgagtgtggcacagaaaccag

SEQ ID NO: 772693 - DNA, 75 bp, Homo sapiens
gacgagctgaccctgggagacatcgacggacaaccctccatatgataagggagccttcagaatcgaaatcaactt

SEQ ID NO: 772694 - DNA, 74 bp, Homo sapiens
gaaccgaggaacgaagaaacagacattcaacatgattgcatttgaagacacattcagctaacgtattttagcag

SEQ ID NO: 772695 - DNA, 100 bp, Homo sapiens
tcggttttataccaaccgcatctctttccgcatgcttattaatcagcacatttctctgcaggtggatattgttcccagccagggggagatcagcgttgga

SEQ ID NO: 772696 - DNA, 100 bp, Homo sapiens
cccgggaagaactggtgagccaagggatcatgccgcacgctaatgaactgaagacgatccttcgagagctaaagtacagaattggcatccagtcggccaa

SEQ ID NO: 772697 - DNA, 83 bp, Homo sapiens
gactacactgaacattcacctgtttattaagacaatgaaagcacctctgttggaattgaatgatctggcacgggaccctccag

SEQ ID NO: 772698 - DNA, 90 bp, Homo sapiens
atgatgttcgacattaccaagcagtggttctgggccggagaaggggcgacgttcgggcaccccccgaatggacaatctttccttctgtca

SEQ ID NO: 772699 - DNA, 90 bp, Homo sapiens
gaaactctgcattctcgcttcctggaggagttcattcaaaagtgcctgcagtctgagcctgctcgcagaccaacagccagagaacttctg

SEQ ID NO: 772700 - DNA, 101 bp, Homo sapiens
caaagctcgacttctcaatcccaagtggccaaagtgagaaagatcagtctaaagaaaaggagaagaaagtgaaaaaaacaattccttcctgggctaccctt

SEQ ID NO: 772701 - DNA, 149 bp, Homo sapiens
cctctgtacctgtgcccaaatggtgcccgctgtgccacctggtttcaagaccctacccgcttcactggcaccatgctctggccaggctgccgcacctctacaggaactttgccgcggagcagtatgccagtgtgttcgccatctccctg

SEQ ID NO: 772702 - DNA, 100 bp, Homo sapiens
caagggtcactttggacctatcaacagtgttgccttccatcctgatggcaagaggtggtcttcgagggatagcacgaggtggtctgacaggactaacact

SEQ ID NO: 772703 - DNA, 100 bp, Homo sapiens
cagcttgcttgcccggctcgctcacgggtcgttgaggccggtgacatgtctgtgagctgcggaggctgcggcccccagatctgactgcagccatgagcag

SEQ ID NO: 772704 - DNA, 90 bp, Homo sapiens
ggaagccttcgtctcccagattgcaggctgtggaaaatctctgttctcacaaagtctccccaatgctctacaagcaactgcgtcaggcct

SEQ ID NO: 772705 - DNA, 82 bp, Homo sapiens
cttcgtcaccccagaccttgccagagacctggcaaatgacatcatgacactgatgccatggacaatattaccaggcagaacc

SEQ ID NO: 772706 - DNA, 98 bp, Homo sapiens
cctgtctggagcaaggaagaaaacctttgaccatgaagagaaatgagatgatagccaaaccctcagggctgatcccttatccaacatggttctaacct

SEQ ID NO: 772707 - DNA, 82 bp, Homo sapiens
ctgcggggtccggtgtccacgcagattgacgaaggatcagagattggtgtattcgggcagactgcttcccgatcatctgcag

SEQ ID NO: 772708 - DNA, 83 bp, Homo sapiens
gggacccaccgctgccctcagctccgagtccagggcgagaccatggtgaatccgggcagcagctcgcagccgcccccggtgac

SEQ ID NO: 772709 - DNA, 98 bp, Homo sapiens
catttgtaaaggagccggagccccagattctgaggttgggaccaagaaggaactatctattttaaaccaaaaattttccgaagaagtaaaaaccccag

SEQ ID NO: 772710 - DNA, 88 bp, Homo sapiens
aacacagttatgggtcgcaagaagaagaagcagctgaagccgtggtgctgagcagattttgaagcagtgggaagaatattctgtcttg

SEQ ID NO: 772711 - DNA, 100 bp, Homo sapiens
cgtggagttcgaggagtgcgtcaaggactccccgcgcttcaggaccagctttatccagggactctaccattcccacccctttggccccactccacgacaa

SEQ ID NO: 772712 - DNA, 75 bp, Homo sapiens
gcgctccgcgctctggcgctacggtctggccgtcggctgcggcgccatcggattatttttacccaagatacttag

SEQ ID NO: 772713 - DNA, 98 bp, Homo sapiens
gggacccatcgtgctcaaggccggcgagatcgagctcgagctgcagcgggttcagattcagaacaagaaagtggacatctctaaggtctcctccaagt

SEQ ID NO: 772714 - DNA, 100 bp, Homo sapiens
cacctgtcctaggggagtctgtcctgcaagtgtccccacaccctcctctgagacgccatgttcaactcgatgaccccaccaccaatcagtagctatggcg

SEQ ID NO: 772715 - DNA, 51 bp, Homo sapiens
ctatttgatagactaacaaatgaaaagactcgttaaagtcagaacctgctg

SEQ ID NO: 772716 - DNA, 100 bp, Homo sapiens
gcactgaggaggcggcggccgacggtggcggcgggatgcagtgctactatatcggggccacagatgatgcagccaccaaaatcatcaatgaggtatcaaa

SEQ ID NO: 772717 - DNA, 90 bp, Homo sapiens
ccagaccggcccatccgggacacccgccattacagccagtcccaaaggctccagaatctccatcgctggactcggccctggcttccccac

SEQ ID NO: 772718 - DNA, 96 bp, Homo sapiens
aatgtgcggaaaatgccttcaaatcagtgaggactcttgtgaagatatgagttgtggagaggagagtctcagcagctctcctcccagtgatcaaga

SEQ ID NO: 772719 - DNA, 75 bp, Homo sapiens
gaaggttgaagtctgggatgtagtagacaaagacaaagacctgcggaccaagggcttcagcctagagtcgtgccg

SEQ ID NO: 772720 - DNA, 95 bp, Homo sapiens
gcaccaatggcttccgtgctgtcctacgaaagcctggtccacgccgtggccggagccgtgagctaaaaaagtccctgtacgccatcttctcccag

SEQ ID NO: 772721 - DNA, 100 bp, Homo sapiens
gtcagacaaggactctggcttttcagactactgtcagaggatgtaggaatggacatcccctttgaagagggcgtgctgagtcccagtgctgcagacatga

SEQ ID NO: 772722 - DNA, 96 bp, Homo sapiens
gtcgtggcaacgttgctggtgacagcaaaaatgacccaccaatggaagcagctggcttcactgctcaggtgccactgattaatgaacttgaatcag

SEQ ID NO: 772723 - DNA, 101 bp, Homo sapiens
gtacactgcagttgtctccgaggtgaacctccggagccttggcacagctcgcttctaaagttgaagatggggaagtatttgatttcagaggaatgagatta

SEQ ID NO: 772724 - DNA, 88 bp, Homo sapiens
ccctctcccaacatggcggcctcagctccagaacctgggtatcaacccagcaaacattggcttcagtaccctgactatggagtctgac

SEQ ID NO: 772725 - DNA, 101 bp, Homo sapiens
agagctccgatccctgcgcgggctcgagagctcgccccgaacgggggtcttcctcctccgccgttgacaggtgctggagaatctggtaaaagcaccattgt

SEQ ID NO: 772726 - DNA, 98 bp, Homo sapiens
taccgccacctccccgctgggtggggagaggcccttcagctatcatgagaagtttttctctcctacaagaagccataatcccctacatccctactctc

SEQ ID NO: 772727 - DNA, 76 bp, Homo sapiens
cccttccgcagggagagcctggctgaggagcacgaggggctcgtgggtgaggggctgctggaggctcagctgcagg

SEQ ID NO: 772728 - DNA, 88 bp, Homo sapiens
gtgactcactgcagccttccactcctgggctcaagcaatcctactgcctcaggctcccagatggagtttcgctcttgtcgcccaggct

SEQ ID NO: 772729 - DNA, 76 bp, Homo sapiens
ctgcaccagaatgaaggagaaccagaaacatatctattatatcacaggcccccgacagctgctctcgggagccgcc

SEQ ID NO: 772730 - DNA, 75 bp, Homo sapiens
gaggctataaaagcacagttttaagagagttccagggtcacccccgagaggacaacaggcatctggaagtgctct

SEQ ID NO: 772731 - DNA, 89 bp, Homo sapiens
cttggttccccctccctcagcttccgccccaaaagtcaggatggctaaaggtgaccccaagaaaccaaagggcaagatgtccgcttatg

SEQ ID NO: 772732 - DNA, 75 bp, Homo sapiens
attccagactcgtgggggaaaggctgagttgctagaccgcttcctgcagaagaacctgaaagagcaaaatcagga

SEQ ID NO: 772733 - DNA, 49 bp, Homo sapiens
tcgtgcagtattttctgaatcacattccaccttgaagatgttttctaaa

SEQ ID NO: 772734 - DNA, 100 bp, Homo sapiens
ctcctaggggacataaaattagtgattactttgagcccaatcaacacaatacagtgaagctgggagctttccaggctcaggaaaaagaactggtatttga

SEQ ID NO: 772735 - DNA, 97 bp, Homo sapiens
tctgatgcacttgagcaggggtccccaacccctgagccatggagccgcaaggagccacacagcaggagagctcaggccccggggcctccagcggcac

SEQ ID NO: 772736 - DNA, 100 bp, Homo sapiens
ggatgggctgcctccaggtgacagcaatcagctggcctggtttgatactgacctgtaaatcatcctttaggtcgttccaggggtagaggaggcatgaagg

SEQ ID NO: 772737 - DNA, 118 bp, Homo sapiens
ccaagctcatctctgagacccggaggaggttcgaagctgagtatgtgacaggtgctggagaatctggtaaaagcaccattgtgaagcagatgaggatcctgcatgttaatgggtttaa

SEQ ID NO: 772738 - DNA, 75 bp, Homo sapiens
gtgtggcaaccagatcggtgccaagttccagagaggacacgccgagcagattgtccaggatgggtgcgacaccca

SEQ ID NO: 772739 - DNA, 75 bp, Homo sapiens
agccagcagtccaagtagctgagatgaccaagcgagacgtgcctggcttcgccatcgggggcctgagcgggggtg

SEQ ID NO: 772740 - DNA, 118 bp, Homo sapiens
gagagggactctgaaagggccccggccagcgtccctgagacgccaacggcagtcactgccccccattccagctcctggatggcagtggcagcaccatgatgcaaaccaagaccttctc

SEQ ID NO: 772741 - DNA, 89 bp, Homo sapiens
atcttctccaacgggaacctggacccctgggcagggggcggggtggccactaacacggacaccagccgaaatgccggaaatgcggtcct

SEQ ID NO: 772742 - DNA, 50 bp, Homo sapiens
gctacgagaagaagccctactgcaacgcatggcgattttgctgacagctg

SEQ ID NO: 772743 - DNA, 117 bp, Homo sapiens
gaagatattccaggaaatgctctacattatggactggatggatgaaatgaaggtgctagagtgtggagtttgtgaagatgtcttttctttgcaaggagacaaagttccccgtctttt

SEQ ID NO: 772744 - DNA, 97 bp, Homo sapiens
ttatgcattggctggggagacccatctggactaccaaggagaagctatagactacttctactccaccaggaagaatgaagtggagctgggggagctg

SEQ ID NO: 772745 - DNA, 89 bp, Homo sapiens
agcctcggtgcggcggcgagcgcggtcgagatcgccatgcctacccatgaagaaactgaggttcagagaggttaagagactccactgag

SEQ ID NO: 772746 - DNA, 80 bp, Homo sapiens
gtacagcatcaactacctgcactttggggagcctaagtcctgaacccagcgggtgccgcttctccacccgaggcttccac

SEQ ID NO: 772747 - DNA, 96 bp, Homo sapiens
caaggaaaaactggagagcttcatcaaaaatagtgatagctttgataagtgcggccgggtgtgtggcaacattacttcatgatgcagccatgaacc

SEQ ID NO: 772748 - DNA, 50 bp, Homo sapiens
gtggaagggacccaggctgattcagtgagaaagatcagtctaaagaaaag

SEQ ID NO: 772749 - DNA, 120 bp, Homo sapiens
ctataacaagtctctggcagagcaccgaaccccagatgtgctcaagaaatgccagcaggtgcagcctgacttctgagcaggtgaggaagcactacctgagtgggggacccgaggcccacg

SEQ ID NO: 772750 - DNA, 100 bp, Homo sapiens
tccaccagagtcattgcaggaagtggatgagttccacctcattttagagtatcaagcaggtgtcatggagaaactccagctgggcccagagattctgcag

SEQ ID NO: 772751 - DNA, 60 bp, Homo sapiens
cagtaaagaaggaaaaagcagtaaagccagaggaagggtacagctctgccggggggggaa

SEQ ID NO: 772752 - DNA, 83 bp, Homo sapiens
gagaggttttctggccgagtgacaatgcagatcttcgtgaagactctgactggtaagaccatcaccctcgaggttgagcccag

SEQ ID NO: 772753 - DNA, 100 bp, Homo sapiens
cttatcttcatgcctggccaagaggacattgaggtgaccacggacctgtaccaggttctagctgccaagggctaccagctggagtgtcgaggggtggtca

SEQ ID NO: 772754 - DNA, 98 bp, Homo sapiens
gtctggtccacgacctatcctaggcgccatgcagatataatttctacagtagaatttaatcattctggagaattactagcaacaggagataaaggtgg

SEQ ID NO: 772755 - DNA, 100 bp, Homo sapiens
aatcccactgatgaggatcagcccatggattgtgtcacggtggagagaaactcaaaacttcctggagagaaatggaggtgtcatcctggtccccccgggc

SEQ ID NO: 772756 - DNA, 82 bp, Homo sapiens
gacggagctgcagtcggcactgctactgcgaagacagctggcagcggagctggagtttgttcagatcatcatcatcgtggtg

SEQ ID NO: 772757 - DNA, 74 bp, Homo sapiens
gattttttccagtctgatccttttgttggcagtgtgggcccatcgctggatggatctgtcagaacacggctttg

SEQ ID NO: 772758 - DNA, 98 bp, Homo sapiens
gatgcagtgaaagctttgaagaaaaggatttccaaaaactacaatcataaagaaatccaacttaccttgtcaatgactgcaaacagaaaggtggagca

SEQ ID NO: 772759 - DNA, 97 bp, Homo sapiens
tcggcaagaagatcggctgcggcaacttcggggagctccgcctaggtccgcgggagagctgtggggcttggtgagtgtttcgtggcctctcgggttg

SEQ ID NO: 772760 - DNA, 80 bp, Homo sapiens
cgcttgaggacttggaggtcctgtctagaatgtgaaaacctttgcatcttctgatagtctagccaaggtccaagaagtag

SEQ ID NO: 772761 - DNA, 100 bp, Homo sapiens
acctggtctggccagagacctgctggaagggaccattgcaatttagagatgtggccatagaattctctctggaggagtggcattgcctggacactgcaca

SEQ ID NO: 772762 - DNA, 75 bp, Homo sapiens
cccagtttataaaactgtcacttcaagtacagaaaagggcttgattgatatgtgtcacaaagatgtctacacgga

SEQ ID NO: 772763 - DNA, 100 bp, Homo sapiens
ccgccgcccctcaccagacagatcgctgtcaaaaccctaggtcagcccaaggccaaccccactgtcactctgttcccgccctcctctgaggagctccaag

SEQ ID NO: 772764 - DNA, 51 bp, Homo sapiens
ggtgacattgtatcattggtatttctctatgaatcatcatcaagaactctg

SEQ ID NO: 772765 - DNA, 98 bp, Homo sapiens
caagatccagatcgggatttacgtggagatcaagcgcagcgatggcagctgctggaggaggtgaagtggcatcgatgtcatctttgaaaagtttctac

SEQ ID NO: 772766 - DNA, 82 bp, Homo sapiens
cccggcagtgctgcaaccgctacagcagccgcaggaagcagctcaccttccaccggtcccgcaggctcccgatggcgagatt

SEQ ID NO: 772767 - DNA, 51 bp, Homo sapiens
tgctgaccgtgggagccgaccgaggctgcagtttgaaaagtttggatcttg

SEQ ID NO: 772768 - DNA, 99 bp, Homo sapiens
gctggagaacggcgacgcggacgagccctccttcagcgaccccgaggacttcgtggacgacgtgagcgaggaagcgcccgggggctggagaaggccagg

SEQ ID NO: 772769 - DNA, 75 bp, Homo sapiens
ttgcagaggaatctgcccaagcacaattccaggaaggtccgtgtccaacaggagatcgacgacgtgatagggcag

SEQ ID NO: 772770 - DNA, 90 bp, Homo sapiens
ccaatgatcttttcaatgctgcgaaagctgccaaaagtgacatgcagatcccaccaaatattttggttgtgagctgggagcacagaccca

SEQ ID NO: 772771 - DNA, 105 bp, Homo sapiens
aggaaagaaaagaatacattcctgattacctgccacccattgtgtcttctcaagaagtcagcagataagcagagagccctagaagaaaccaaagcctacaccacc

SEQ ID NO: 772772 - DNA, 90 bp, Homo sapiens
ccggattggcgctgaggtggcccgtggggcagtttgaagaaaacaggtctgaaacaaggtcttacccccagctgcttctgaacacagtga

SEQ ID NO: 772773 - DNA, 80 bp, Homo sapiens
cagtacatattcaccttgaagaggaagacggggcggaagaccaagatcatcgagatgcttgccaattctgtaactccttg

SEQ ID NO: 772774 - DNA, 100 bp, Homo sapiens
ttctcttagaagcacaagatatggcagtgagagaccataacgtggaattcaggtccaatttatatataggccctaaaggacagcaaggtggtggagatcg

SEQ ID NO: 772775 - DNA, 100 bp, Homo sapiens
cggactcccctcgccaccgcccgagcccaggaccggagtaggccctatgatacttttaacttgcactcgttggagaactccttaatggatatgataagga

SEQ ID NO: 772776 - DNA, 90 bp, Homo sapiens
agacagaagcagatcaactatgggaagaacacaattgcctacgatcgttatattaaagaagtcccaaggaatgttccatttggctgctgc

SEQ ID NO: 772777 - DNA, 90 bp, Homo sapiens
ttatatgccgctttggataccagatggatgaaagcaaccaatgtgtggtcccccgatggtgttatacattaaatatccaggatggagaag

SEQ ID NO: 772778 - DNA, 75 bp, Homo sapiens
gccatgcaaaggcaggggaggaagccacctcgaggtccatctgaactgtttactgtttgttcatcgattagcaga

SEQ ID NO: 772779 - DNA, 100 bp, Homo sapiens
aacacgattgttgtttcttggactgcagaaattggaagaattacgtgtgaaaatgaacttgtgcaaacccaaccccatgctgataatccatctaatactg

SEQ ID NO: 772780 - DNA, 82 bp, Homo sapiens
gcggagaggtggctccatggacacagacctgctgtgtgtgcttctgcgccccagtgctgctcacggccgtgaactgctacag

SEQ ID NO: 772781 - DNA, 75 bp, Homo sapiens
ctcaacagatctgtctgcctgcaatctacaaggaggtcccaaccacagcttcctcctatgtggacagtgctctga

SEQ ID NO: 772782 - DNA, 100 bp, Homo sapiens
tgaggacgcggcagcccgtggagtcggctgagggaaaagcgaggcaaggcaggcggtgggtaaaggaagaagccccagatatactgtgccttcaagagac

SEQ ID NO: 772783 - DNA, 100 bp, Homo sapiens
gcgtccagctctgccccgacagagacggaggagccggggtccagtgcagtggaagatagatgataagcctgtaaaaattgacaagtgggatggatcagct

SEQ ID NO: 772784 - DNA, 75 bp, Homo sapiens
gtacctttatgaaccagtgtatcccaaggtgataaaagaaaatgtggctgaagttacccgaagttcagcttgcag

SEQ ID NO: 772785 - DNA, 83 bp, Homo sapiens
gcgggaggtgttcgagaacgaccccgagacggggccaaaccagtgctcctgccacctctctggctgccccctagagcctgccc

SEQ ID NO: 772786 - DNA, 100 bp, Homo sapiens
ccccaacacctgagccaggtgaagggccccgtaaattggaaggatgcacaagttccaaggttacgtttcagaatacaaacagaagcttgcacgagtaacc

SEQ ID NO: 772787 - DNA, 100 bp, Homo sapiens
tataaatggcgccgaagcaggacccgaagcctaaattccaggagggacaaagcaggacctcataaggaaatctacccctatgtcatccaggaacttagac

SEQ ID NO: 772788 - DNA, 90 bp, Homo sapiens
tgccagcctacaggaggaaaggccagactcacagaaggtgtggatgaggtcaccattgtcaacattttgaccaaccgcagcaatgcacag

SEQ ID NO: 772789 - DNA, 96 bp, Homo sapiens
ggcgatgcacaggccgaagctgaagaagacgctccagtagatctctactacttcctcttcgcccccaccttgtgctacgagctcaactttccccgc

SEQ ID NO: 772790 - DNA, 100 bp, Homo sapiens
cctcggaagtcggcatctctctccaacctgcattcttgccggtggtggtgtgcacattgagccccggtatagacagttcccccagctgaccagatcccag

SEQ ID NO: 772791 - DNA, 74 bp, Homo sapiens
ttcaagcttaggaccacccaccatgcctatccagccgattacacctcaacaagaaggcaactgacaaacagcct

SEQ ID NO: 772792 - DNA, 75 bp, Homo sapiens
ctcttctaaggatcgctgtcctgacagaagagctgtgaaagttgtgtagatttactgtttgtgagaggagctgga

SEQ ID NO: 772793 - DNA, 75 bp, Homo sapiens
aacttgcagaaatcacattggaccctcctcccaactgtagctgatcgtcgtgtgttgccacccattcatgtcaag

SEQ ID NO: 772794 - DNA, 99 bp, Homo sapiens
gaggaagaatttaagaaattcattagtgataaagatgcctctatagtaggtgaccaagaatatggcccaggtgaccaaagccctggacaaggccctgag

SEQ ID NO: 772795 - DNA, 98 bp, Homo sapiens
gcgtggacaggaagaaacttgaggccatgttacaagcaagccagggctgagcaggaagaagaattcattagtaacactttattcaagaaaattcaggc

SEQ ID NO: 772796 - DNA, 100 bp, Homo sapiens
gactgcatcaacaacatcaatgacttcctgaaaggatgtgcaaccctccaagtggaaatctttctcctggcctgccctccatgtcggggagctatcgtcg

SEQ ID NO: 772797 - DNA, 100 bp, Homo sapiens
gaggaaagcaaaggagtcagggatggctcttcctcaggacctggtggcaaatggggcccttgtcagcatctgtaacaagtatggagagatgcctgtggac

SEQ ID NO: 772798 - DNA, 100 bp, Homo sapiens
ccagactggggaggtgtggtcatattacacagtgtgggagatcaagaattgttacaaatcacccctcaaggaaccagggatgaaatcagtttggattctg

SEQ ID NO: 772799 - DNA, 100 bp, Homo sapiens
gcaccccggctcgcccgggcagccacccccggccctgctgccacagcagggatttgtcttggctgttactatgacacgggaagcaattgatgaatttcgg

SEQ ID NO: 772800 - DNA, 75 bp, Homo sapiens
cacaaacactcagagtggaaaaagtaccatcatttgaaacagagagtcgaatgatcttggatgcctttgcccagc

SEQ ID NO: 772801 - DNA, 74 bp, Homo sapiens
gactacaaacggaacttgccgcgtcgaggactgtcggacatagggcctgattacattccaacagaggaagaaag

SEQ ID NO: 772802 - DNA, 50 bp, Homo sapiens
ctcctgcgtcctccgacttttcatgactggtcgaattgacaaatcttacc

SEQ ID NO: 772803 - DNA, 83 bp, Homo sapiens
gagcggcggcggtggcggcgaaggccgaggcgaatctcactctggtttgagacagaatctcactgtgtcccccaagttggagt

SEQ ID NO: 772804 - DNA, 75 bp, Homo sapiens
tgaaatgagacatgcacataatataggacttcgagtaagaaggtgatttacagccagcctagtgcccgaagtgaa

SEQ ID NO: 772805 - DNA, 73 bp, Homo sapiens
ttatggggtcacatccagttgacaataaatggccctggccaacgtcaacattgggagcctcatctgcaatgta

SEQ ID NO: 772806 - DNA, 74 bp, Homo sapiens
gaagaatcagaatatgaaagcactgatgatgaggaccgacagagtgaaagagtttctagccaaagccaaagaag

SEQ ID NO: 772807 - DNA, 100 bp, Homo sapiens
gtgctttcccgaatctcagaatgccatcggtcgcttggttatcggacagaatggaatcctctccacccctgctgtatcctgcatcattagaaaaatcaaa

SEQ ID NO: 772808 - DNA, 51 bp, Homo sapiens
acgcctcctacgtttacctgtccatgccgttccaacaaaacccagactgtg

SEQ ID NO: 772809 - DNA, 107 bp, Homo sapiens
ccagagactgctgagcccgtccgtccgccgccaccacccactccggacacagacctgcctagagctggaacgttacctccagagcgagccctgctatgtttcagcct

SEQ ID NO: 772810 - DNA, 109 bp, Homo sapiens
ggaccatcctgggtgctggccctgtgctggagttaattggccttggtcctcacagctccaaaaagaaacaggatctcgataagctctatgagctgaagtccaaagctcg

SEQ ID NO: 772811 - DNA, 83 bp, Homo sapiens
gcagcacccctcctcctggcaatgcaggccttccagaaacctttgccaaaggatgagacttcagcactcaagtttgaaataag

SEQ ID NO: 772812 - DNA, 100 bp, Homo sapiens
ataagaacaccaaccaaattgtcgccattaagaaatactatactggcaattgctggagaagattttgcaattgttgcttctgatactcgattgagtgaag

SEQ ID NO: 772813 - DNA, 100 bp, Homo sapiens
agaacatcgtggccaactcgctgctgctgaaagcgcgtcaaggaacctagaaagattgtacaatgaatggtgattctcgtgctgcggtggtgacctcacc

SEQ ID NO: 772814 - DNA, 100 bp, Homo sapiens
ctcagcgaaccccttttgaagttgaggccaagaaaggatcttgtagagaaaatgatgcatcctgttgccagcagtaatccagctttctgtgggcctggca

SEQ ID NO: 772815 - DNA, 100 bp, Homo sapiens
tacactccctttccaaggaaaagatcgaaaagaaacaatgactatgattcttaaggtgataaaagaaaatgtggctgaagttacccgaagttcagcttgc

SEQ ID NO: 772816 - DNA, 75 bp, Homo sapiens
cgacggccctcagtctacctgcctacccgcgagtacccgtctgaacagagtatgagcagccctggtgcccaaagt

SEQ ID NO: 772817 - DNA, 83 bp, Homo sapiens
cgcagaggccatgctgacctacaagcagaagagctctccctgtccagccgcctgcagctgaccctgtaccagtacaagacgtg

SEQ ID NO: 772818 - DNA, 49 bp, Homo sapiens
ccgcctccgcctcccaggatgagctgaggactttctccctcgagggtcg

SEQ ID NO: 772819 - DNA, 100 bp, Homo sapiens
cggggagcgccggagttccttgtggccgacgtgcaccaagacaatgcagatcttcgtgaagactctgactggtaagaccatcaccctcgaggttgagccc

SEQ ID NO: 772820 - DNA, 74 bp, Homo sapiens
ccccgaggtctccgcggcccgaggtctccgcccgcaccatgcggctgggcagatggtcagtaggacagaaggta

SEQ ID NO: 772821 - DNA, 100 bp, Homo sapiens
gaaggtcggcagatcaaaccttataccctcatgagcatggtggccaacctcttgtatgagaaacgcaataggagtgaaacatccacatctgataacacag

SEQ ID NO: 772822 - DNA, 89 bp, Homo sapiens
gacaatgagtacacagcaagacaaggagttacttaaagatccactctacattggactacggcagagaagagtaagaggttctgaatatg

SEQ ID NO: 772823 - DNA, 100 bp, Homo sapiens
gtcaaagagaactatcttgaaacatttatttccagtccaaatttcaccgggagaagtcggcctcttcctgatgggcaaccacaccaccgcccggcgccgt

SEQ ID NO: 772824 - DNA, 75 bp, Homo sapiens
acgagcccgcctccagctccaggccggtccgctgccagttcaaggagcagggacaagttacaggaatgttctcca

SEQ ID NO: 772825 - DNA, 75 bp, Homo sapiens
tgctgccagcattagcctggctcaatatctaatcaatgtcagtgacaaccatgagtggaaaaaactaattatggt

SEQ ID NO: 772826 - DNA, 100 bp, Homo sapiens
ccgcagagagttaacttctgtttacatggaactcagacatctgcaaatcatggactttgtggttggcctctccatcctgctgcggggcacagtccacgag

SEQ ID NO: 772827 - DNA, 84 bp, Homo sapiens
tgtaggaaggaacttggttccccctccctcagcttccgccccaaaagaggaagaatacaagcgattgagtgaagcactagcaga

SEQ ID NO: 772828 - DNA, 83 bp, Homo sapiens
gactctcaaagcaataccaggatagctgttgtttcagagaaagaatagctgcaatctccatggcctctaagataacagacatg

SEQ ID NO: 772829 - DNA, 100 bp, Homo sapiens
gagacacaatgcgggacagcctcagccaggttctccagagataaccttcaacaactagtactgcttcaaattatccagatgtgttaacaaggccttctct

SEQ ID NO: 772830 - DNA, 100 bp, Homo sapiens
gtgaaccactgcacccggcgaggtatgtcttactgaaagaaagaaacatgcttctaaccctagagcaggaggccaagcggcagagattgccaatgccaag

SEQ ID NO: 772831 - DNA, 83 bp, Homo sapiens
tggactcatacaggtcggagaggtcagcaacagggacatcgtggagacggtgctcaacctggcccggattgcatttctacaag

SEQ ID NO: 772832 - DNA, 101 bp, Homo sapiens
ggccgcctgaagcagctgctgtcccgggcctaccccctggactccctggagaagcagatggaaaaggtgttcgaaatccgcaccactgatgacctcactga

SEQ ID NO: 772833 - DNA, 75 bp, Homo sapiens
agatagcaatgatgatgtgaaaacagaagctgtggctaatgccaggcaggctgggcccccaaaggctcctttttc

SEQ ID NO: 772834 - DNA, 74 bp, Homo sapiens
cgaatatgaggccgcgctgaccatctacgatacccactgacttctgacagctctctccatggaaggaggcggcg

SEQ ID NO: 772835 - DNA, 100 bp, Homo sapiens
ccaagacaaattctgtgtcaattcattgaccggatacttacagatgtaaatgttgttgaggagctcaagcttgggaaaatggtgtgcattccttgtatcg

SEQ ID NO: 772836 - DNA, 98 bp, Homo sapiens
ttactatgagtctatatatcctggggaatttaagatgccaaagcagctcattcacatacagcgtctgaatttcctgctgctgttcacaaagatgcttt

SEQ ID NO: 772837 - DNA, 100 bp, Homo sapiens
gcccagtgcagtcggtggtacctgagatggaggagtcgggagcacagctgctgctgggtcccaggctaggaaccagcctgtgaagatgggaggctcaaac

SEQ ID NO: 772838 - DNA, 118 bp, Homo sapiens
gggaggaaggaacgaggcaaggagctaaagcagcgtgcgttcagccctgggatcctgggtttgagcagtttaaaatgtcagaaagattgcatgggaactggatcagactgtacttgga

SEQ ID NO: 772839 - DNA, 83 bp, Homo sapiens
cccgactccggccgtcgccgtcgccgccggggggaggagtgatgctattgctgagattagagccatttgtattgaagaaattg

SEQ ID NO: 772840 - DNA, 100 bp, Homo sapiens
tcaacctgataatgaaggctggataccactacatgcagcagcttcctgtggatatcttgatattgcagagtttgtggaaggaatgcttaacatttgttac

SEQ ID NO: 772841 - DNA, 100 bp, Homo sapiens
cggaaacaccggacacgcctggcagaaatcatcgacgattgtgtggttactggagttggctataatcaatttggggaagtgattgttgatggtgatgttg

SEQ ID NO: 772842 - DNA, 75 bp, Homo sapiens
ggaccgtggcttcggcttcatccgcttgaccagagtgaactccgagcaggaacacttcctcattgtcccttttgg

SEQ ID NO: 772843 - DNA, 83 bp, Homo sapiens
aggtggtggtggccaagtatgcgcccagcggattctacattgcctccggaggtctcggcgcggaagatggccggcggcgtgga

SEQ ID NO: 772844 - DNA, 90 bp, Homo sapiens
gaagatggtagctgtaaacctggccactggaaaacgaagagtctccacagcctattggctcacttggacatgatgctgacttgaggcggc

SEQ ID NO: 772845 - DNA, 100 bp, Homo sapiens
ccagacagagcccatttagcctgggacagtaaaatgtaaacaggaacatcgataagtagtgtaaaaacttgcacaatgaaatccgaagccaaggatggag

SEQ ID NO: 772846 - DNA, 75 bp, Homo sapiens
aatttgctggatttaagcactgctgcactttatgagatgttcctcttacatatcaagcagaaggaagtcggcaag

SEQ ID NO: 772847 - DNA, 82 bp, Homo sapiens
gtttgctcgagggaacgtggtcggaggccgattcgacacagacaagatgtgaagttcatttccaatccgccctccatggtgg

SEQ ID NO: 772848 - DNA, 87 bp, Homo sapiens
cggcacctacggggacgtctataaggtctcagccttagatccaaggacagtccaaggaagtcctaagaccatggagttggtgatctg

SEQ ID NO: 772849 - DNA, 75 bp, Homo sapiens
gagggaacgcagctgaaagcgtgaactgcgaggattaaatccaccacacagggtgaaatctatctccatgacaac

SEQ ID NO: 772850 - DNA, 100 bp, Homo sapiens
gacacacaggatgacttcctcaagctcttcctcggaggcagcattgttaagggaggccctgtgcaagtgctggaggacgaggaactaaagtcccagccag

SEQ ID NO: 772851 - DNA, 100 bp, Homo sapiens
atgatgggcagcaagatggcgtctgctagtagggtcgttcaggctgagagcacagacaaaacaacaactcttagaatataaatcaatggttgatgcaagt

SEQ ID NO: 772852 - DNA, 100 bp, Homo sapiens
ctcatcttcatctatgagactttctccaagctgatcaagctcctgggcaacgtgctggtctgtgtgctggcccatcactttggcaaagaattcaccccac

SEQ ID NO: 772853 - DNA, 83 bp, Homo sapiens
cggaccgtgaccaacttctacatcggagcatcagatccatgctgctgctgactcggagccccacagcttggcacaggctctct

SEQ ID NO: 772854 - DNA, 83 bp, Homo sapiens
ataatgtggaacctggatgaatgtagagagaaagtacttcaagcaattctgtggtgttcttggtcacacatttatggagtttc

SEQ ID NO: 772855 - DNA, 90 bp, Homo sapiens
attggactgggagggcaacgagcacaacaggagctacgaggagttgaatgatgccaatgggtggaatgatgccacctggaccaggaatac

SEQ ID NO: 772856 - DNA, 100 bp, Homo sapiens
gtttgatatcaccaaactggaggatgcctatgtattccctggggatggcgcatcacacaccaaagctctaccgcaatggccagcgcttactggaaaagca

SEQ ID NO: 772857 - DNA, 74 bp, Homo sapiens
cgagaaccgtcagtttgagccagatgttcatagccctgatgaagcaagttactctgctctcctaataaatgcaa

SEQ ID NO: 772858 - DNA, 90 bp, Homo sapiens
gtgatggtgttcgatacttgctcaggcagtatttggcagtcgtattcagagataaacccctggagctatgggatgttaggacttgtaccc

SEQ ID NO: 772859 - DNA, 100 bp, Homo sapiens
cggcgacagcagccaggagtcatgagcgacagcggcgagcagaactacggcgagcgggacactttcttcatgagcaacaaaccccaaagatacaaagaca

SEQ ID NO: 772860 - DNA, 50 bp, Homo sapiens
ggcccggctccttagcacctctccagatttcttcaaacacttcgcagttg

SEQ ID NO: 772861 - DNA, 97 bp, Homo sapiens
ggataatgagtgtgttgcacagacatggtttcgctttttacacatgttaaggaaagaaccggaggctgaagcaggccaaagaagaagctcaggctga

SEQ ID NO: 772862 - DNA, 90 bp, Homo sapiens
tgggcctcccggtccgcaagcagagtgtgaacatggctacgcctcttcattcccgtccatgccgagcccccgactgcagcattcaaagcc

SEQ ID NO: 772863 - DNA, 100 bp, Homo sapiens
aactgtggatgatcatcacctccattttcctaggtgtcattacagtgatcatcataggcttatgtcttgctgcaggccctgggaaaccagcccagtttct

SEQ ID NO: 772864 - DNA, 100 bp, Homo sapiens
aggggaaacttgaacattcgcaggactcacaccacccggcaagaactgctcactacggctccctgccccagaagtcacacggccggacccaagatgaaaa

SEQ ID NO: 772865 - DNA, 100 bp, Homo sapiens
ctggaatccaacaagggcaaatcaatgttggagttccagtaggagagaagtttgctgaggaatgccttcaagcacaaagtgatgaatgactgccttcaag

SEQ ID NO: 772866 - DNA, 96 bp, Homo sapiens
gggaggagctcgcgcctggcctggcgacccggtggactcggcccgcggcggcgcgctcacccgccccgttcagtcaagtctctatttatgaggtgg

SEQ ID NO: 772867 - DNA, 100 bp, Homo sapiens
ccaaatccaacgcacccagagtcaaagccaagactggcattgctcgggtaccacttgctggagctgctggaggccctggggttggtagggcagctggtag

SEQ ID NO: 772868 - DNA, 75 bp, Homo sapiens
ggcgtggcaagccggactaaggaccggggacttcttgattgagatgatgctggagggtcttgaaatctttacagt

SEQ ID NO: 772869 - DNA, 101 bp, Homo sapiens
gaggattggaggtgtcagtgttaaaggaacctctacaacgaaggtgaagccacggaagataagatggctcgttcggaacaccacctggatacggctgcgct

SEQ ID NO: 772870 - DNA, 80 bp, Homo sapiens
agctttttacagtggtgtagagtgcagtgcagctgaaaccaggtcagcccaaggccaaccccactgtcactctgttcccg

SEQ ID NO: 772871 - DNA, 75 bp, Homo sapiens
ggcatggtctggtgctcggtacggcagaagggtatggacctgtctgccaatcaggacgaggagaccgaccaggag

SEQ ID NO: 772872 - DNA, 82 bp, Homo sapiens
ctcccgggtggcttacagacgctgccagcatcgccgccgccaggtaatcattaccaaatgaggaggaaaggacgatgtcatc

SEQ ID NO: 772873 - DNA, 83 bp, Homo sapiens
ctgatcaaacttgccttcctgttctccaagaccagtaagactttgaccccgacgcaggcttcagtgattgccgcggatcagaa

SEQ ID NO: 772874 - DNA, 90 bp, Homo sapiens
cgggtgccgaggagcgggaagagttgctggggtactccaaagattcaggtttactcacgtcatccagcagagaatggaaagtcaaatttc

SEQ ID NO: 772875 - DNA, 100 bp, Homo sapiens
cgcgagcctgtgcaggtttccacctgcggccaccgtttctgcgatacctgcctgcaggagttcctcagctttgtgtccctggtgatgttggaacattaat

SEQ ID NO: 772876 - DNA, 83 bp, Homo sapiens
cacacccttgagcctgagcccgacattattcctgagggggggccctcagcctcttggccttgaacgggctgttcatcttgatt

SEQ ID NO: 772877 - DNA, 100 bp, Homo sapiens
tggactgtctctgtatagtgacaaccaagaagctagagtttttgcaactttttggcttgaccacccaacagcagaaggaggaattggtggcccagaagcg

SEQ ID NO: 772878 - DNA, 89 bp, Homo sapiens
ccgggatgctgtactccttgtctttgcaaacaaacaggtggtacagaagttggtcctgccctttgggcgactgaactacctgcccctgg

SEQ ID NO: 772879 - DNA, 97 bp, Homo sapiens
attcaaatcatctggaggtggtgaagctaatcaaatgattaaactgcaaatatctcatgaagctgctgcctgtatcactggtctccgggcagccatg

SEQ ID NO: 772880 - DNA, 100 bp, Homo sapiens
cgcacagaaaaacacaagaagattcagccctgtcatcttgtgcaaaagggagaaccgaagattacaggaggccagcatgaggttggaacaagagaatgat

SEQ ID NO: 772881 - DNA, 100 bp, Homo sapiens
caggagaagtgggcccagcgttcattcagatccggccagttattgaacaaacctttcctttttctaaagttccagaagccttcctgaaggtggaaagagg

SEQ ID NO: 772882 - DNA, 96 bp, Homo sapiens
agacacctcacttcttacacttggctgcacttgcactattactcagcagcagtaacatggtaacacttaaaatggtactcggggacctccaaagac

SEQ ID NO: 772883 - DNA, 75 bp, Homo sapiens
gagcacgtggcagcgcaggaaacagaactcttaaaacgcctagatgacgtgtccaacgatgtgaggatggcagcc

SEQ ID NO: 772884 - DNA, 97 bp, Homo sapiens
gtcgccgccatcacggacttcctgtgggacaagcgcacgggcctcgccgccagaacggatggtctggtgaagaccaacatggagaagctgaccttct

SEQ ID NO: 772885 - DNA, 75 bp, Homo sapiens
ctggatgaaacgtcaggaatttactacacagaacctttcagctcttggggcattggtgagtctcagtaatgcacg

SEQ ID NO: 772886 - DNA, 98 bp, Homo sapiens
atggcggtgtctacagtgttctcgacttcgtcgctggaattgaatgatctggcacgggaccctccagcacagtgttcagcaggtcctgttggagatga

SEQ ID NO: 772887 - DNA, 83 bp, Homo sapiens
ggaaagaccaatgaccaagacggcttgatttcaggaatattacgtgttttagaaaagaacgcattccctgggatgaaaaaccc

SEQ ID NO: 772888 - DNA, 83 bp, Homo sapiens
cgacaagtccgggagctgggcggccatttaccagaactcccccactggaaaggattctgaaagaaatgaagtcagccctcaga

SEQ ID NO: 772889 - DNA, 73 bp, Homo sapiens
tggcagatagtgtgtaatgatgcctcctgggagactcgtatgagcccagaggacctggtcggcccttgtacca

SEQ ID NO: 772890 - DNA, 74 bp, Homo sapiens
ttgtgccatttcaggcgggctcacggaactatgagctgagtttccaagctttcaccaacaatcaccagtggttt

SEQ ID NO: 772891 - DNA, 83 bp, Homo sapiens
cggtggactccttcggcagtccacccaccgccgccgcctcccaggtcacgacggggcagtgaatgccgtgtgctggagccagg

SEQ ID NO: 772892 - DNA, 75 bp, Homo sapiens
gtcttaagaactcaggacaagcagcagaaatacatgcaacatggtgactgagctggtggagttgagatctataat

SEQ ID NO: 772893 - DNA, 50 bp, Homo sapiens
ttttgggttacaaaaatccagaccagtatgacatgatgggaagaaatcag

SEQ ID NO: 772894 - DNA, 100 bp, Homo sapiens
gcaaaagctgcagcaaagcgggaagatcaaaaatacgcactaagtgtcatgatgaagctgtgccactgcatatgttctactggctgaggaagaagcaaca

SEQ ID NO: 772895 - DNA, 75 bp, Homo sapiens
ctggacggctcgggcgctggaggttgtgggactggaaaatatcttaaagtgaacagccaggtacataccgtgggc

SEQ ID NO: 772896 - DNA, 74 bp, Homo sapiens
ctcaaggactccaggtgccagagccatgtgttcacatgtcatgtggaccagtatttaactgtggaaaccgcggg

SEQ ID NO: 772897 - DNA, 89 bp, Homo sapiens
tgagcctcaagtgcttctgcattacaaccctgcacttgatggaccagctggcaccacccagatcaataaactggcttatttgaatttgc

SEQ ID NO: 772898 - DNA, 100 bp, Homo sapiens
ccctcagccgcccgctggccgggagcggagcccctgtggttccagggtctccctccactgctgtagtaacccgggtccggggcctcggtggtgctcctga

SEQ ID NO: 772899 - DNA, 83 bp, Homo sapiens
gggacggacggtgatggtggtcgccgcggcggcgtgtgcgcccctcaggtgctggagaatctggtaaaagcaccattgtgaag

SEQ ID NO: 772900 - DNA, 75 bp, Homo sapiens
tgaaatcttggctgatacttttaagaaaccagactgtgatgactgggagagcgggctgaatgcaatggagtgtgc

SEQ ID NO: 772901 - DNA, 100 bp, Homo sapiens
ttcaaccatctggggaaaaggcaaaaatcccatctaccgcaactctcagttcgagagtaaagccacaaaaagtacagggccgccctgaagaaggagaaac

SEQ ID NO: 772902 - DNA, 97 bp, Homo sapiens
gaagtctggacatcaatgcctttaggatcgtgacgtctgcatccacagatctccaggattacacttactattttgtcccggctccctggctgtctgt

SEQ ID NO: 772903 - DNA, 82 bp, Homo sapiens
aaggctctccttgcagctgcttagacgctggatttttttcgggtagtggaaaaccagggctgaaatctctttaatgatggag

SEQ ID NO: 772904 - DNA, 74 bp, Homo sapiens
ttttgcctgaatacatgatttaaacaagagatttccacagaaggtcttgcgatcagtggaccgctggtcagcag

SEQ ID NO: 772905 - DNA, 96 bp, Homo sapiens
gtttgggagttgagtgatattgaccatgatggaatgcttgacagagatgagtttgcagttcccgtgatgctgatgagcgagagaagtggatccatg

SEQ ID NO: 772906 - DNA, 100 bp, Homo sapiens
gcaattggaccaagagaacaatgggaaccagtctttcaaaatataacaacgaacttgatgcaagtgataggtttgccaaggtcagacctctcatcatccg

SEQ ID NO: 772907 - DNA, 75 bp, Homo sapiens
gctcagcaccgccaggcctggatgggccccatctgccagctggccttcccggtacagcaatcatttgaaactcca

SEQ ID NO: 772908 - DNA, 100 bp, Homo sapiens
atcattgatgaccacagagctgggaaaattgttgtgaacctcacaggcaggctaaacaagaaacgagaggtgaataccgttttggcagatgtcatcaagc

SEQ ID NO: 772909 - DNA, 101 bp, Homo sapiens
cgagaccgcggccgggaccgagggagtacgaccccagcaaagcgacctttgtgaaggtggtgccaacccccaacaatggctccacggagctcgtggccctg

SEQ ID NO: 772910 - DNA, 75 bp, Homo sapiens
ccgatgtctgggattactgcacggggtcgcgccgtggcggagcaggtgctatacttggtagatcagaaactcagg

SEQ ID NO: 772911 - DNA, 100 bp, Homo sapiens
gtcttgaagagtttcaacttatgagagaaaaggtggacaagtcctattttcaagagaagatgacttttaacagttttgaaggatctaaaacttgtgtacc

SEQ ID NO: 772912 - DNA, 87 bp, Homo sapiens
cggatgtgaggcgatccgctggcgctagtctgaccctccgccaggcaaaaggaagctgttcatagtttcaagttgagtcgaaaccat

SEQ ID NO: 772913 - DNA, 100 bp, Homo sapiens
gctatgtacgccctcttcctcctggccagcctcctgggcgcggatacgtaggtaacctttccagagatgtgacagaagtccttatacttcagttgttcag

SEQ ID NO: 772914 - DNA, 75 bp, Homo sapiens
accaggacagtaaagaagggtgacaaggactcagacttacgcctagtggtaggagacagcttgaaagcagagaag

SEQ ID NO: 772915 - DNA, 82 bp, Homo sapiens
tggttgttgctgtagtggcggagaggatcgtggtactgctatggcggaggaggactgagcttatctgactccagagctttca

SEQ ID NO: 772916 - DNA, 51 bp, Homo sapiens
cataaacaacttggaagtatattacagagacgggaaaagattgagcggcga

SEQ ID NO: 772917 - DNA, 90 bp, Homo sapiens
cagcctccaaaagtgctggcattacagccaatggagatcttcgtggatgatgagacgaagttgacgctgcatgggttgcagcagtactac

SEQ ID NO: 772918 - DNA, 76 bp, Homo sapiens
ctctgctgtttaaaaagtatccctgtgggaactgctcgcagaaagaagaaggtggttcatagaacagccacagcag

SEQ ID NO: 772919 - DNA, 50 bp, Homo sapiens
cagccactttcattagagatggctacaaactgcttttcaggaagccttgg

SEQ ID NO: 772920 - DNA, 96 bp, Homo sapiens
aacaggagctggagcagctcaaagaggcactactgcagtcttcagttaagcaacaagtagaagctattgaaaaacagtacatttctgcaattgaga

SEQ ID NO: 772921 - DNA, 100 bp, Homo sapiens
aaaaaagcagcataagaagccctttgatgcaatgaataacattgtggcaaatttgctcctcaacctaacgagtgaattgaatgcaggaattataaaaaca

SEQ ID NO: 772922 - DNA, 75 bp, Homo sapiens
taatgagctgctagtggagctggatttgatggtcctcgaagatttgaggatttagggtcaaggtgtgaaggaccg

SEQ ID NO: 772923 - DNA, 100 bp, Homo sapiens
gccaaggaaggcttcgagaagattagcaaaggtgctaatccagtggaaatcaggagaggtaacagtgatgatgtcaaatgcttttgctgtgatggtggac

SEQ ID NO: 772924 - DNA, 98 bp, Homo sapiens
ggcgcaatgatgagaggatgtggtggtctactctgatgtcaatcttgagggctagctcatggggcattcagaatgggaccacaaacgagggccaagag

SEQ ID NO: 772925 - DNA, 75 bp, Homo sapiens
gcggccagtggtgtcttcctggcttcacagttgactgcaggcattcagctttctctggcatcatctggcgtgaat

SEQ ID NO: 772926 - DNA, 100 bp, Homo sapiens
taccggacggccgacaaaggctggcagattacaggctgtgccagccctggaaaaacagttacaattgttgttcgtggttctaacaaactggtgattgaag

SEQ ID NO: 772927 - DNA, 82 bp, Homo sapiens
caggccgcgcgaccctcgagtctcaggtgagaagccctaccactgcaactgggacggctgcggctggaagtttgcgcgctca

SEQ ID NO: 772928 - DNA, 100 bp, Homo sapiens
aaagattctttgtagcagacactgcaaatgaagctctcgaggctgctaagagactaatgatgaaaatgccaggaaagatttaaagacattaccagccttt

SEQ ID NO: 772929 - DNA, 82 bp, Homo sapiens
cttaaacccttacctggggagacagtgtgatccctcacatccacaaatctctgattggaaagaagggacagcagaaaactgc

SEQ ID NO: 772930 - DNA, 75 bp, Homo sapiens
gaatcggggagcgtccggagctagctggatcctctaggcagctggatgctgacaaatatgagaatgatccagaat

SEQ ID NO: 772931 - DNA, 125 bp, Homo sapiens
atgtgagtgaccatgcagcaaaagaaggagggtcctctcagtgattaagatggattaattgcctctgaaggagccataagtcccgatttcttcaatgattaccaccttcaaaatggagatgttgt

SEQ ID NO: 772932 - DNA, 50 bp, Homo sapiens
gtttacagtcagcgtggaccatcggaaagttcaggagccctggaaaggag

SEQ ID NO: 772933 - DNA, 124 bp, Homo sapiens
gaaatctggaaccgggatggcgacgtctacactgagtcggaggcgaagtactgtaagattgatgttaaaggcatggtgttcaccccacttcatcagcgtacataagttatctcttcttttggac

SEQ ID NO: 772934 - DNA, 90 bp, Homo sapiens
caatgaatggtcatatttctaatcatcccagtagttttggaatgtacccatctcagatgaagtatggatcctggcgggagccagtcaacc

SEQ ID NO: 772935 - DNA, 74 bp, Homo sapiens
tggccgtggaggcagaggtggcatgggtgctaaggaaattcctgaagatgtagatatggaagaagaaaaagaaa

SEQ ID NO: 772936 - DNA, 96 bp, Homo sapiens
ttcctcaacttcacgctggcgcgagccccgtcctccttcgccgccgcgcacaaccgcacgtgcaggcattgaatccagctctccagaggtgaaagg

SEQ ID NO: 772937 - DNA, 130 bp, Homo sapiens
ctccggggacactttgcgttcgggctgggagcgtgctttccacgacggtgacacgcttccctggattgggcacgtctgagaatggtggatgtggtggagaaagaagatgtgaatgaagccatcaggctaa

SEQ ID NO: 772938 - DNA, 100 bp, Homo sapiens
tttctccagatgccaacattgacctcacaaccgagcaaattgaagagacgttaaaatacttccataaaagcttcgatgatgaagaatcagtggatggaaa

SEQ ID NO: 772939 - DNA, 100 bp, Homo sapiens
ccgaggctgaaggaagatggcggacggcgtggaccacatagacatttacgcggatgtcggcgaagagttcaaccagaaatcaagatgactaccagctggt

SEQ ID NO: 772940 - DNA, 82 bp, Homo sapiens
gggggcgcagggaaggagggcgtccgagtcaacaaccgcttcgagctggtactggctgtgatcgaacttctcaaccctcaga

SEQ ID NO: 772941 - DNA, 50 bp, Homo sapiens
gctcaacgtgtgcaactgggcggtcatggcagaaccacctttacgaggac

SEQ ID NO: 772942 - DNA, 136 bp, Homo sapiens
ccggggcgatttacagatgcaggatcggaaagaatcccggccagacgtgcgaacagctccagctgggcatgttaaaactgtataaccaacagaaccatttaaaaggaagaaaaacatcacccaagttccgtgtctg

SEQ ID NO: 772943 - DNA, 50 bp, Homo sapiens
cacctcagtttaggcagttgtgtcatgtgtgcaaagatccaccttacaaa

SEQ ID NO: 772944 - DNA, 74 bp, Homo sapiens
ggctgcggtcgaagaaggggacgccgacaaggtgtcgtgaaaactacccctaaaagccaaaatgggaaaggaaa

SEQ ID NO: 772945 - DNA, 88 bp, Homo sapiens
gaaagctacaatgaagtatatgcagaggaggtcccacaggctcctgccctggactaccgagatattgatgatgctcaaatacttcccc

SEQ ID NO: 772946 - DNA, 100 bp, Homo sapiens
cagcttaaagccagccacccccacggcaacatgtaccccagcaacaagaagaaaaaggtgtggagagaggagaaagctgagatctgtatctgtggacctg

SEQ ID NO: 772947 - DNA, 98 bp, Homo sapiens
ttactggacctcacctctacagcatctatcctcatggatcaactgataagttgccttatgtcaccatgggagtatgctgctgctgttccgctttgcgt

SEQ ID NO: 772948 - DNA, 88 bp, Homo sapiens
agtattatctccaagccgagcactccctgccagcgctcatccagatcagggatgtcaagaaagcagagttgcatctgtctacagaaag

SEQ ID NO: 772949 - DNA, 100 bp, Homo sapiens
ggtggttatggaggatatgactacactggttacaacaactactatggatatggtgattatagcagtatatgaatgacctaaaggtacaaataaagacgga

SEQ ID NO: 772950 - DNA, 100 bp, Homo sapiens
cttttgatgacccaccttcagctaaagcagctattgactggtttgatgggaaagattttcaagggagcaaacttaaagtctcccttgctcggaagaagcc

SEQ ID NO: 772951 - DNA, 75 bp, Homo sapiens
ccgcctgggggcaggcgggctagaggagcaggtattctttaggtgatgctagaaggcctcttcatgaaacagcag

SEQ ID NO: 772952 - DNA, 80 bp, Homo sapiens
cgccgccgcgccggggcggaccgagggggtccttgaaaggtttaccaagattcaaaacacgaagctgaccatgaagcggg

SEQ ID NO: 772953 - DNA, 99 bp, Homo sapiens
ctgctgacagagaggatccacctccgaaacccctcggcggcgttcttctgtgtggcccgcctgcaggatgtacagttacccagcacgtgtacctcctcc

SEQ ID NO: 772954 - DNA, 106 bp, Homo sapiens
attaaatgacagttcacataagaagttcttcgatgtatctaaacttggcaccaagtatggagtgggaatagctttgcgaaaaatgggcgcaatggccaagccagat

SEQ ID NO: 772955 - DNA, 100 bp, Homo sapiens
cgcggcgcggtcggtcggcgcctgttctcgggctgtttggcggaccacttccagcacctgctgaacgactcggagcggacgctgcaggccaccttccccg

SEQ ID NO: 772956 - DNA, 98 bp, Homo sapiens
aggccgaggccgggaggccgtgcccggaggtatgggctacgtgagttcgtggtgattgcccctgctgcacacagtgacgctgttctcagcgaatctaa

SEQ ID NO: 772957 - DNA, 50 bp, Homo sapiens
gcctcctgagtagctggcattacagatcagtgtgcgtgtgaccaccatgg

SEQ ID NO: 772958 - DNA, 100 bp, Homo sapiens
cagctgattacctcagcagatgaaatacatgaaggagacctagtggaagtggttctttcagcatcgccctgagcaactggtggtttgtggcccacctgac

SEQ ID NO: 772959 - DNA, 51 bp, Homo sapiens
tcacaaacaagaggtccctggatctacaggctggagtgcggtggtgtgatc

SEQ ID NO: 772960 - DNA, 82 bp, Homo sapiens
ccgatgtctgcgggaataggacctatggcgtggtggcccagtactaccggcccctgcatgggtgagcccctccagactccga

SEQ ID NO: 772961 - DNA, 100 bp, Homo sapiens
agaagagagcgcagcgactacgaccgttcccgcgagagagatgaaagacgtcgaggggacgattggaatgacagtggtcccaggctgcacccatggcaga

SEQ ID NO: 772962 - DNA, 98 bp, Homo sapiens
tacagctgggctctgcctgctgacctggggaggccattggctctatggaaaacactggtgccatgcctctgcaactcctcctgttgctgatcctactg

SEQ ID NO: 772963 - DNA, 101 bp, Homo sapiens
ggcgcccgagtgccggcttctcccctacgcgctacacaagtggagctccttttcctccacctaccttcccgagtgctggagaatctggtaaaagcaccatt

SEQ ID NO: 772964 - DNA, 74 bp, Homo sapiens
ggacgggaccctgcacctataacaaatcgggctccagggagtgtgaggtgtatgtggaatttgatgatcttgaa

SEQ ID NO: 772965 - DNA, 75 bp, Homo sapiens
tgaagagagcgacctggagcggggatacacgaacattctagtatgccagtagaaaaaaatatcactttagaaagg

SEQ ID NO: 772966 - DNA, 75 bp, Homo sapiens
tggcaatgtggcagccctgcctggaattgttcatgacaaccctccatatgataagggagccttcagaatcgaaat

SEQ ID NO: 772967 - DNA, 75 bp, Homo sapiens
tagcattctgcttcttcaacaaatgctgcaggtgacctaaagaattaatgaccattcagaaataaagcaaaaagc

SEQ ID NO: 772968 - DNA, 90 bp, Homo sapiens
acagctggacaagaagattatgacagattacgccccctatcctatccgcaaacaaccatcatcaaagaggggatgctgaccaaacagaac

SEQ ID NO: 772969 - DNA, 74 bp, Homo sapiens
taaaattctgcttgttaagaacaagtttggctctgtctattgaagacaatgaagtatatttgcctaatgatgaa

SEQ ID NO: 772970 - DNA, 100 bp, Homo sapiens
caggaagcagagtggctatggtgggcaaactaagccgattttccggaaaaagggacaaactctgcctgggcgagtccttttcctgcgttatgtcgttcag

SEQ ID NO: 772971 - DNA, 90 bp, Homo sapiens
tatggtgtcattacatgtgaaggctgcaagtgtcaaatcaacagtgccttgacatctttccacactgctttggaacttgcagtagaccag

SEQ ID NO: 772972 - DNA, 75 bp, Homo sapiens
atttggctcacccattccccctgcaagcctccagcgtcgcggtacctcaggatgagtggggagggtaccccaccg

SEQ ID NO: 772973 - DNA, 90 bp, Homo sapiens
ccagctgtcaaagccatcatatatcagtatatggaagagggaattcggcaccggttgagaggtagtgccaatgctgtgaggatccgagcc

SEQ ID NO: 772974 - DNA, 99 bp, Homo sapiens
agagaacaaaaaacaccacagtactatcgtctatcattggatgaagtggctccggagattgaacagagtatctgtcaggcaagagctgctgtgatggtt

SEQ ID NO: 772975 - DNA, 75 bp, Homo sapiens
cgcttcgccaagggggtgcagtacaacatttgtttcgacgccggaccgcgtaagagacgatgatgttgggcacgg

SEQ ID NO: 772976 - DNA, 83 bp, Homo sapiens
ggttctacctgggagaatccaccgccatccgccaccatgcctggagcattggtaagcgtcacactgccaaagtgagagctgct

SEQ ID NO: 772977 - DNA, 90 bp, Homo sapiens
gaatatggccgtgatcgtgcccaaagaggagggcgtcatcagcgtctccgaggacaggtggacactcactgacctgtcacaaggttgccc

SEQ ID NO: 772978 - DNA, 83 bp, Homo sapiens
ggacttcactgctctgctgtctcctgcaagaactggctcaagaaatttgcctcgaaaaccaaatagggccagatttgagtgtg

SEQ ID NO: 772979 - DNA, 83 bp, Homo sapiens
gctgagtgtccgcttctcagcaacctcgatgaagattggtgctgaagacatggacggcttccaggcagacacggaggaggagg

SEQ ID NO: 772980 - DNA, 80 bp, Homo sapiens
cagctacgggcaagcgggcagctgaagatgatgaggatctcgaggacctggaagaagcagaggagccagacatggaggaa

SEQ ID NO: 772981 - DNA, 100 bp, Homo sapiens
agttccagcaacagaagttggacctgctttggcagaagttggttgacaaggctccactcagacagacccaacatgagtgaagtttcctgcaagaaacggg

SEQ ID NO: 772982 - DNA, 51 bp, Homo sapiens
gagaaagtgaacagtaggtttgtactttggacatcagacagtgcaggagaa

SEQ ID NO: 772983 - DNA, 82 bp, Homo sapiens
tctacctttgtactttgaaggttttttattaatcaagcggtcaggataccggattgtatgcaggcccagaggtagatatatg

SEQ ID NO: 772984 - DNA, 100 bp, Homo sapiens
ggagcctccgctgccagcgacatgttcaaggctttgtgccttgggcaaagggcagcttactcctggaagaggactgactcaaggaccccagaaccccaag

SEQ ID NO: 772985 - DNA, 97 bp, Homo sapiens
ctgccacacggcctgcactctgcgctttgagctactgggctgtgagctgaacggtcctcagaatggttggaatgaccctccagctttgaacagagta

SEQ ID NO: 772986 - DNA, 90 bp, Homo sapiens
gcggagaaaaggctgacatgcccgtcctatatgacagaatctccctggggtgccctccccaggcagcaatgccaggatgcctgtgtccac

SEQ ID NO: 772987 - DNA, 100 bp, Homo sapiens
cagacaccaggggcggcgaggggcgagctctccccggttagaacaattaatcctctctgacactggaatttcttctctacattttccggatgctggaatt

SEQ ID NO: 772988 - DNA, 82 bp, Homo sapiens
tcgcttgcagttcagcgaccacgtggagcggaaggagtggatgcaggccctgcagcaggccatggctgagcagcgtgcccgg

SEQ ID NO: 772989 - DNA, 98 bp, Homo sapiens
tgccccagaatttcgacgccttggtttggctgctaaacttatggagttactagaggagatttcagaaaggaaaaaagggttgctcattttgggtatca

SEQ ID NO: 772990 - DNA, 101 bp, Homo sapiens
ctctgacatggatattggaaagcgaaagaaggccatgtggaagtgttacatcaccttttgcttggaaagatttactaagaagtcaaatagtgggttcctta

SEQ ID NO: 772991 - DNA, 100 bp, Homo sapiens
gtatgcctcgtttgttgggaacctactgatgaaccttggcatgttttccacaaatcctgcgtggatccctggcttagtgaacattgtacctgtcctatgt

SEQ ID NO: 772992 - DNA, 89 bp, Homo sapiens
cactccggattcctgagttccaggaaaaccttcccagagaaagggtggtaaattcactccagcagcaacctcaggctgcatccccttca

SEQ ID NO: 772993 - DNA, 85 bp, Homo sapiens
ttcctcctagcccggtggtttggaaccagtggctttgggactgtaagaggatggacaaagattatgtttgagaccttcaacaccc

SEQ ID NO: 772994 - DNA, 50 bp, Homo sapiens
gctaaagcagcgtgcgttcagccctgggtgaagatagtgatccggggaga

SEQ ID NO: 772995 - DNA, 75 bp, Homo sapiens
gggacctactggatgatgatgataatgaagatcggggggatgaccaggttggcgctgcagctctgggattcattc

SEQ ID NO: 772996 - DNA, 96 bp, Homo sapiens
gatggaccccgaggggcagcagcaaatgtgaatgagctgaaagccagtggtggcgaaatcaaaattcataaaatggagcaaaaggagaatgtgccc

SEQ ID NO: 772997 - DNA, 96 bp, Homo sapiens
ctaaactgtgtggggcgcggatgggatccagctgttagtcgggtaggcatagcttcggaaccaaaaagaagcttcccagagccggggccaggagcc

SEQ ID NO: 772998 - DNA, 82 bp, Homo sapiens
caaccatctggatattgctccttcatttcagaagttgattgcaaagatgcactggaaatgatctgtaacttagaatctgagg

SEQ ID NO: 772999 - DNA, 83 bp, Homo sapiens
ccccattcctatctcgtacacttcttggcagtcatggacaagagctattgatagaagggaaactgaacagccaagactcctat

SEQ ID NO: 773000 - DNA, 82 bp, Homo sapiens
ggaggtcagaggggaggaggactctggagctgacagcgcgcacttcacccgcagttgtccagttacaacacagggatcacaa

SEQ ID NO: 773001 - DNA, 97 bp, Homo sapiens
tgggacctaccctgactacgggagttgggaggacccgggacaccgcacagccgggaaatgactgactggcacagtggagaaaccgcctcgaaaacgg

SEQ ID NO: 773002 - DNA, 100 bp, Homo sapiens
ttcttcatggtgtccattttatttagcaaggaggactggaatgaaattgaccccattaaaaagaaagaccttcatcacagcaatggagaagagaaagcac

SEQ ID NO: 773003 - DNA, 50 bp, Homo sapiens
gaaaactcgtacaagtgcagcaagcttccaactgaatatgagaggaacgg

SEQ ID NO: 773004 - DNA, 90 bp, Homo sapiens
ctccttgcctgattgtttgcaggttgtcagagaagtacagctatttgtcgtagatgtccagacaagccagatcaccaagatccccattct

SEQ ID NO: 773005 - DNA, 50 bp, Homo sapiens
tgttgggaagttcttcacttgaagattggtggaacgagaatgcctacacg

SEQ ID NO: 773006 - DNA, 90 bp, Homo sapiens
aaatgtatagcaagctctggttgttttatggagtatcttgagaatcaagtgattaaggaaaatgtttataggaggccttagctgggacac

SEQ ID NO: 773007 - DNA, 88 bp, Homo sapiens
aacagtttctgtgtcccacttcatctttaataaggttaaacccatccagagtaatggctgcggccttacccaggaccctgggggagtt

SEQ ID NO: 773008 - DNA, 100 bp, Homo sapiens
tggggcctcggcgagtacggccggctgggacatggggataatacgacacagctaaagcccaaaatgaggttgacggatatattcagacgttacgacacgg

SEQ ID NO: 773009 - DNA, 100 bp, Homo sapiens
ctcagttcgcctctgtgaacatcaccaccaaccaggcaggtgttttttgaaaactaatcagaagaggaatgcttatctcccaagaaaattgaaaccatct

SEQ ID NO: 773010 - DNA, 75 bp, Homo sapiens
gctgaactgggtgctttatatagggtactgagcagtacagtgaatacacaggctatgctgagacatatcgttggt

SEQ ID NO: 773011 - DNA, 97 bp, Homo sapiens
tcgtccacgtaatccaagagaggctaaaggaagaacaacagatggatcccttcaggccttcatgccccgaggactagcagacaaacaaggacctgag

SEQ ID NO: 773012 - DNA, 83 bp, Homo sapiens
agctggacggcgagcgcgagcggcgcgagaaagatgcagcagtctcggccctggctgctctatgcagtgaatattacatgaag

SEQ ID NO: 773013 - DNA, 87 bp, Homo sapiens
tgctgccgccccttgggctaaaaggagagcttgtttcatatccatatcccactgtattcctgctaatctgctaatgcagtaaattgg

SEQ ID NO: 773014 - DNA, 101 bp, Homo sapiens
accctcccttgaaaccggcactgggacttctcgatctctggaggcacctgttgcaagtgacaggagatcaaaacgtggagtacaaggggaccgtctggcac

SEQ ID NO: 773015 - DNA, 100 bp, Homo sapiens
tctcgaccccttctgcccggcgcttcggcccgggccgctcaggtgcagaatacatttgacatcgccaccaagaaagcttatctggacatatttctgccca

SEQ ID NO: 773016 - DNA, 99 bp, Homo sapiens
gtactttgttacaggatctgccgaaggcaatataaagacaggatcttcctgtgtcacccaggctgaagtgcagtggtgagatcatagctcactgcagcc

SEQ ID NO: 773017 - DNA, 51 bp, Homo sapiens
cgtcgtgcacgcgggccagaggcgtcgactcctttacatctagcagcgggc

SEQ ID NO: 773018 - DNA, 82 bp, Homo sapiens
ccgcgtcccgctcgctgggagagaggtacctctccttttccctctccctttccctaaggtcatgatgatgggcagcgcccga

SEQ ID NO: 773019 - DNA, 100 bp, Homo sapiens
atagctggaaacagtcagagccaccagccaatgatcttttcaatgctgcgaaagctgccaaaagtgacatgcagtttctcaagtcaaagaaggccctgtc

SEQ ID NO: 773020 - DNA, 100 bp, Homo sapiens
cggagacggaaatgtccgaaggccgcagtacttgaccctgtattttgggagtcgaacggaaatggctttactcctttatacatggctgcccaagagaatc

SEQ ID NO: 773021 - DNA, 75 bp, Homo sapiens
gggaaacacaaagccggctacgcgctgcgaggatttttcaagccacattcaattgataggatgaaaaaatttaag

SEQ ID NO: 773022 - DNA, 101 bp, Homo sapiens
gccgtgggggtcgtgggccggagcgcctccttcgcaggcttcagcagtgcacagagccggaggatcgcatatttggagttcttacaacatggcagacattg

SEQ ID NO: 773023 - DNA, 82 bp, Homo sapiens
ggatgattcacactggcgagaagccattacagatttctggtaggtcctactttaggacaagatgtggtaccgttgaagcgtc

SEQ ID NO: 773024 - DNA, 126 bp, Homo sapiens
ctgttgactaccagaaagtggttcgtgaagctgttaaacacattggatatgatgattcttccaaagcaaaccagtccagctacgggggcccagccagccagcagctgagtgggggttacggaggcg

SEQ ID NO: 773025 - DNA, 82 bp, Homo sapiens
cgcgcacttccaggtgcacagcgcgggagccgtcacggtgctcaaggtgagcgagtgctgtgctttcatgggcctcttcttt

SEQ ID NO: 773026 - DNA, 100 bp, Homo sapiens
cttcggagcggccggtactgttgaaagcgacaagtggaggcgccgctctagcggccgggactctgaactatggcgctggagcagttcaagaaggacaacg

SEQ ID NO: 773027 - DNA, 98 bp, Homo sapiens
acagtttctgtcccatgacaaggaccagctgactaaggagctgcagcagcatgtaaagtcagtgacagccccatagacctgtcggccatggagcctaa

SEQ ID NO: 773028 - DNA, 95 bp, Homo sapiens
ctgccttattacgccgtctccaagatgtagctaatgaccgtggttcccactgaggcttctccagggaaagtgaccgaggcagtgaaagaggccat

SEQ ID NO: 773029 - DNA, 116 bp, Homo sapiens
cgcacgtgtgatgacctaaagctttgccattccgcaaagcagagtggttactactggattgaccctaaccaaggatgcactatggatgctatcaaagtatactgtgatttctctac

SEQ ID NO: 773030 - DNA, 100 bp, Homo sapiens
tcctggagcagttgtatgtgtagaaagtgaaatcagaggagatgtaactatcggcatcttattatagaaaactttatccctctggaagaaaaaagtaaaa

SEQ ID NO: 773031 - DNA, 100 bp, Homo sapiens
gcgtgaggccgcggagcgccagctcaatgaaaaaaaggtagcagcactgcctaaacaagaggttatacaagaagaggaagagataatccatgaagataat

SEQ ID NO: 773032 - DNA, 75 bp, Homo sapiens
agatgaattcctgaaccagaggtacccagaaccaattcaggcattggaaaccctaattgttgatctcgtgagctg

SEQ ID NO: 773033 - DNA, 74 bp, Homo sapiens
cgtcccctgcaccatgagctggggcaccgagctctggaacccagcgggtgccgcttctccacccgaggcttcca

SEQ ID NO: 773034 - DNA, 90 bp, Homo sapiens
gccatgctcacctgcacttacttggtcacggatgataccatcggggaccttaagaagctgattgcagcccaaactggtacccgttggaac

SEQ ID NO: 773035 - DNA, 95 bp, Homo sapiens
tattgacctgattgatagagaacagaattggcagagggggtcgatttgggaggaaaggtgtggctataaactttgttactgaagaagacaagagg

SEQ ID NO: 773036 - DNA, 100 bp, Homo sapiens
tgctaaactgtgtggggcgcggatgggatccagctgttagtcgggctgatcccaaagaactaatcaagatggtcaccaggcatgtgactcgacatgagca

SEQ ID NO: 773037 - DNA, 100 bp, Homo sapiens
cgtgtacatggccgccgtcctggaatacctgacagggtggcaattttaagcccagccagaaaggttttgcaggaggaaccaaatctttcatggacttcgg

SEQ ID NO: 773038 - DNA, 75 bp, Homo sapiens
gcaggaaatgaccccaacgccaccgagagggcgcctggaatgatgggagtcccagcttctggagacggggttcct

SEQ ID NO: 773039 - DNA, 51 bp, Homo sapiens
cacgccgccgcttgtgctgcagccatggatcttcaccaaggttgtgctgga

SEQ ID NO: 773040 - DNA, 100 bp, Homo sapiens
gcgcagcgccccgcagggcgatggacggccgaaccccgcgcccgcaggacgccccagccaggagcagtatagcatcaagttctagaggaattgggagcca

SEQ ID NO: 773041 - DNA, 100 bp, Homo sapiens
atttaaccctacaccacatttgactgagcagatcgccaaactgaggcagcaactacaacgcagtaaacagagtagtcgtcacagtaaggagaaagatcgc

SEQ ID NO: 773042 - DNA, 100 bp, Homo sapiens
tgctagagctccagggccggcttcaggaggcccaagacaccacagaagccctccgagcccaggtgccaaattccccatcaagtggacggctccagaagct

SEQ ID NO: 773043 - DNA, 51 bp, Homo sapiens
gactctccggccctgtgcagtgaatcccagtcagaagttccagcctgccac

SEQ ID NO: 773044 - DNA, 122 bp, Homo sapiens
gctgtaccacagttgcccagctctgatgcttttgctgctgtggctcagctgtttcagacaactcaaggccaacaggctgaagggtatgtgattggcagctgtattaaacacattccaatcgc

SEQ ID NO: 773045 - DNA, 98 bp, Homo sapiens
gtcgacctcctataaccacccggtcctgggaatgtacgacgccaaagatgacttccctcttaggaaaacagggcatggcacaggcacacaggaccccc

SEQ ID NO: 773046 - DNA, 80 bp, Homo sapiens
cagaccctggagcctcagttggaagcagccgatccagcctgcggagcctgtggggcagacgaactggctgtctgccctaa

SEQ ID NO: 773047 - DNA, 83 bp, Homo sapiens
gcggccccgacatggaggatgacgacagcgtcctcagcacccccaagccgaagctgcgagatgccctgtatccaagcccaata

SEQ ID NO: 773048 - DNA, 101 bp, Homo sapiens
ccattgaattctccaacaatggaggccagtggctggtctcagttacagaatgtctgaaggggacagtgtgggagaatccgtccatgggaaaccttcggtgg

SEQ ID NO: 773049 - DNA, 75 bp, Homo sapiens
ctcccgaaggaagattatttcaagtggaatatgccattgaggctatcaagcatgattccacctttccactgatag

SEQ ID NO: 773050 - DNA, 75 bp, Homo sapiens
ctgccggtgctcgggccgggggatacgagtgtgtaacggaataggtattggtgaatttaaagactcactctccat

SEQ ID NO: 773051 - DNA, 90 bp, Homo sapiens
atctcgaggaatttcagcagctctatgtgaagtttgcagctcaccttgtgaagatgaaatatccaagaatctgtattctagatggtggca

SEQ ID NO: 773052 - DNA, 98 bp, Homo sapiens
atccagctgcgggagcagctgccccgctacctcatgggggagacgcagctgtgcaccacaagattgcagtgcttttgtccacaaaggctgccgagaaa

SEQ ID NO: 773053 - DNA, 82 bp, Homo sapiens
gccgatccagcctgcggagcctgtggggcaggtacgacagtgccagcccacagggccatcctggtggcccgttgtgaagtga

SEQ ID NO: 773054 - DNA, 50 bp, Homo sapiens
cagccacgcatctgaccttgttgagcttggggcttccttggtcgcaccca

SEQ ID NO: 773055 - DNA, 100 bp, Homo sapiens
cggaggcgtcgcgggagcctttggggcaccacagagatgcggatctttaatctcatgaagtacgacagctacagccgcttcttaaagtctgacttgtttt

SEQ ID NO: 773056 - DNA, 78 bp, Homo sapiens
ctcctggctgccgccgtcagctgtgccgtcgcgcagcacgcgccgccgagagaaattttatgaggctaaactacagca

SEQ ID NO: 773057 - DNA, 98 bp, Homo sapiens
gttccccggcccacagtgggggtgtgcaaacccgagagaactgggagcatctttccttgaagaagtacattattgacattgtggttgaaagtacagct

SEQ ID NO: 773058 - DNA, 82 bp, Homo sapiens
caggcccagaaggccaagaacccccaggagcagaagtccttcttcgccaaatacactgattcttgctattccaaatcctctt

SEQ ID NO: 773059 - DNA, 82 bp, Homo sapiens
caggatggaggcgtggaaggccttggtggagatggacccaggtccaaccgtgactgccagatcgaccagcaccaccggaacc

SEQ ID NO: 773060 - DNA, 100 bp, Homo sapiens
ggatgtgatgcctgctagccaaaaggtgattcgcctttgccagtctcatctcgtgtctgctttgttaagttccatgatccagactcagcagttgtggcac

SEQ ID NO: 773061 - DNA, 100 bp, Homo sapiens
gagcaactgaagattcatacgcagctggcagatattatcatagttgctgcagaatgttggctcaattaagaaacatcagggagataaattcaacccagtg

SEQ ID NO: 773062 - DNA, 101 bp, Homo sapiens
aagccgttcagctttaccttctttgcagactttggttggtggaggctgtggcaatggaacaggcttgagaaacagattgcaaatagaagagtcttccaaac

SEQ ID NO: 773063 - DNA, 76 bp, Homo sapiens
aggagagtgggggagacaccaggtccgcgccaggcgtctcggggaccagcatgttttggaaatttgatcttcactc

SEQ ID NO: 773064 - DNA, 87 bp, Homo sapiens
actattacccccagtatctgcaagccaaggtggagattttcattttacctttatgtatttacctacggagtcagattcctgaaaaag

SEQ ID NO: 773065 - DNA, 80 bp, Homo sapiens
cctgcgcaaggccgtgcagaagagaggtggagaagagcgagtacttgagaaagaagaggaagaagatgatgatgaagatg

SEQ ID NO: 773066 - DNA, 97 bp, Homo sapiens
aacatgatagttgatctggataatgtggtcaaaaagattcaattagcagagcctcacagacaatggccaaatgtgtcaaagctgtcacagagggtgc

SEQ ID NO: 773067 - DNA, 100 bp, Homo sapiens
aagatgcggatccgggcctttccggtccggtttatcactaaaatatggcatcctaatattagttccgtcacaggggctatttgtttggatatcctgaaag

SEQ ID NO: 773068 - DNA, 100 bp, Homo sapiens
cgcggctgggcaagaagctgatcgagcccctcaccaatctcatccacaggtgtccctacctgcaccggacgacgggggacacagaacgcaagtaccacct

SEQ ID NO: 773069 - DNA, 99 bp, Homo sapiens
cacaagatgaacaatgagaagcaggcagaagattgcatcacacgaaagtgagtgagaaggttggaggagctgaaggaaccaagctagatgatgacttca

SEQ ID NO: 773070 - DNA, 75 bp, Homo sapiens
atagctctgggaaatttgacaatgcactgtttgggttggtaccattgggtcaggccccaagggtcggaatctctg

SEQ ID NO: 773071 - DNA, 90 bp, Homo sapiens
cgtctggccaagaatcagaggaagtggatacttggcatatcgaaattttatgattgacacgtatcgtctaaacccccaagagtatttaac

SEQ ID NO: 773072 - DNA, 82 bp, Homo sapiens
gaaggtggaggggaccggcagctgggaggtttttagaacttcagccataaaaatgggcagaattttccttgatcatatcggt

SEQ ID NO: 773073 - DNA, 90 bp, Homo sapiens
gtgaagaagcaggtgcttatgatggacctaggactgctggtcacgagaagagaatgccttctagatgcaaaatcacctccaaaccagacc

SEQ ID NO: 773074 - DNA, 100 bp, Homo sapiens
ttttggtctgagatttatggattcagcacaagtagcagccacggaaaggtatgatatatttgatccaagacagtccattccagtccgggaatctacagtg

SEQ ID NO: 773075 - DNA, 97 bp, Homo sapiens
tggagtggtggatgggatctaccgcctctcaggggtctcctccaacatccagaagcttcgagtggagactgctgcacggactctggaaccatgaaca

SEQ ID NO: 773076 - DNA, 90 bp, Homo sapiens
agcgtctctccgccactgcgcacattttgcagcctgcaccggccaacgatggaagaactggagcaaggcctgttgatgcagccatgggcg

SEQ ID NO: 773077 - DNA, 97 bp, Homo sapiens
cgaggctcatgcgtcccgtgagggcggttcctcgagcctgggggcgctcagaaaaatggctacaaacttcctagcacatgagaagatctggttcgac

SEQ ID NO: 773078 - DNA, 75 bp, Homo sapiens
gcgttagtcaccagctgctcctccgtcttctcaggagaccagctggtccaacgatttaaatgtggatgaatttga

SEQ ID NO: 773079 - DNA, 100 bp, Homo sapiens
gctgcctgccgggcgggctccggtggccggtacatgtcccagagcaagcacacggaggcccgggagctcatgtactcgggagccctgctcttcttcagcc

SEQ ID NO: 773080 - DNA, 75 bp, Homo sapiens
ctcaacatctctcagagacgaaaggcaccaagtatagatgagaaagtagatcttcattttattgcattagttcat

SEQ ID NO: 773081 - DNA, 100 bp, Homo sapiens
ggtttgatactgacctgtaaatcatcctttaggagtcgatagcagcagttggtgacgagatggcactcagaaacggcgttgacgtaatttaggacgtgga

SEQ ID NO: 773082 - DNA, 101 bp, Homo sapiens
agaggcataaagggtcaccgtggcttctctggcctccagggtccccctggccctcctggccctcctgggattaatggtagtcctggtggtaaaggcgaaat

SEQ ID NO: 773083 - DNA, 100 bp, Homo sapiens
agagggaagagattcagccagcacactcctcgcgagcaagttgttgacctcctgtactggagagacattaagaagactggagtggtgtttggtgccagcc

SEQ ID NO: 773084 - DNA, 82 bp, Homo sapiens
ttcggacccgccggcgacatggccagctccggagagtttctccttggaccaagatgactgatggaaaactctccacctctac

SEQ ID NO: 773085 - DNA, 74 bp, Homo sapiens
tgctggattagaattacttagcagtgattcgcctttgccagtctcatctcgtgtctgctttgttaagttccatg

SEQ ID NO: 773086 - DNA, 96 bp, Homo sapiens
gtgggaagccaagcagatacaagagtcctaagcagacttaaagccaagaaaataagaagaggaaagagagaggggctgccttaaccagctgtggtg

SEQ ID NO: 773087 - DNA, 85 bp, Homo sapiens
gcaaatgaagagtccagaaaagaagcgaaggaagtcaaatactcagacaatgcagatcttcgtgaagactctgactggtaagacc

SEQ ID NO: 773088 - DNA, 83 bp, Homo sapiens
gaggcaacggtggctcctcgaggtccacggtcccggtacataccgagcatcaaatattaaggcacccggagaacagacagtac

SEQ ID NO: 773089 - DNA, 74 bp, Homo sapiens
attttgacaacctgtatcccaagcagcggtcatgcaagacaagataatctgccttccgaaaagagtgcagcctg

SEQ ID NO: 773090 - DNA, 109 bp, Homo sapiens
gccgagccgggatctcaggtcctcgggggcggcggccacgccaaggacggcatcctgaggttagcattacacttctcccagtggagcccatgacttctgatcaggacgc

SEQ ID NO: 773091 - DNA, 98 bp, Homo sapiens
ctgctttctctcgatgaggataacatccctccagaagatggtttgatgtgtgaataattacattgactgagaaagaaacccagaagaggaagaagagg

SEQ ID NO: 773092 - DNA, 100 bp, Homo sapiens
gggcttgccctggtcttgctcggccgatgaagtgcagaggtttttttctgggatacctttcgtccctgcatttaaaggctttcacttatattaatctgga

SEQ ID NO: 773093 - DNA, 74 bp, Homo sapiens
ggaacctaccatggtatgacactgaaatctgtaacggctaaaataaatgaagctgtagaatgcttactgtccct

SEQ ID NO: 773094 - DNA, 100 bp, Homo sapiens
ttgcttaattcacataagattcctagaagccaccgaatccaatcatgggagttagggagatttcggagtgcgattgagctggacaccccctctatgactg

SEQ ID NO: 773095 - DNA, 100 bp, Homo sapiens
caaagctcagctacacagggcgtgatgaccggcactttgtacccatgggcctctacatcgtcaggacagtgaatgaagaacttcttcttgaagcttttgc

SEQ ID NO: 773096 - DNA, 75 bp, Homo sapiens
caacgttttgagccacaactgtcacaactccagttgactatattgtggagtatgactatgatgctgtacatgatg

SEQ ID NO: 773097 - DNA, 50 bp, Homo sapiens
gttccccttctactacatgctgaaggctcctggaacagctcatccttatg

SEQ ID NO: 773098 - DNA, 100 bp, Homo sapiens
gtcgactctttcgctccattccacaatgtcaactgtccccgcggcttcctgtacttcaacagacaggggaaaatcgttgcccagggtaaactgctcttgc

SEQ ID NO: 773099 - DNA, 83 bp, Homo sapiens
ctgcctccggggacaagaaactagagcaaataaccgttttgaaattatctattccagaggggagcttcaccacttcattgacg

SEQ ID NO: 773100 - DNA, 100 bp, Homo sapiens
ctgctttaaccatcgaaaatgagtacaagttgtgcaaagtgaggaagattactgtgggagtgaagggaatccctcacctggtgactcatgatgctcgaac

SEQ ID NO: 773101 - DNA, 50 bp, Homo sapiens
cccgagagacaccgctctacaaaggtaatagcctgcagctggtgttttga

SEQ ID NO: 773102 - DNA, 88 bp, Homo sapiens
atttgttaaggattccaagtaactcttatttggtgtctgctttttcaacgtgggagaaggagttgcacaagatagtttttgatccccg

SEQ ID NO: 773103 - DNA, 74 bp, Homo sapiens
tggctattgtggatgtaaaagccatgttcaaggaacagcagcagtattggtatcgacagcacttgcttagtttg

SEQ ID NO: 773104 - DNA, 83 bp, Homo sapiens
ctcgagccaagaagcgtctcatcatgaccaaatcattggaaaacattttgactttggctgggataaactcaagccatggaggg

SEQ ID NO: 773105 - DNA, 82 bp, Homo sapiens
atcatttgcatttcgttagctttctggattatatcaatgactgcaagcacctattatggtcctcagaatggttggaatgacc

SEQ ID NO: 773106 - DNA, 83 bp, Homo sapiens
ggagatggggaccgccctggacatcaagattaaaagagcgaataaagtttatcacgccgggacaatgcagatcttcgtgaaga

SEQ ID NO: 773107 - DNA, 83 bp, Homo sapiens
aggagaacatcctggaccccaggctgctgatcgccttccagaacaggtgcaatgattctggactgagacgcgcttgggcagag

SEQ ID NO: 773108 - DNA, 88 bp, Homo sapiens
ttctatcaaagtttgcaaggttcatttatgttcatggttatcctgaatacatgtctaacaattttccttgcaacgttagctgttgttt

SEQ ID NO: 773109 - DNA, 82 bp, Homo sapiens
gatgttgtcaaggtggcctaccaggaggccaggggtgtcgccatggtgggctctaccatcatgcccatgtccccagatggac

SEQ ID NO: 773110 - DNA, 50 bp, Homo sapiens
caaaaacttaaattgtggaatgactgaaactgttgaggagcccatggagg

SEQ ID NO: 773111 - DNA, 82 bp, Homo sapiens
gctgcagggcggtaaggatttcaacatgcctctgacaatctctagtcaaacttccttgataacatgcttttgcgaagtgcag

SEQ ID NO: 773112 - DNA, 82 bp, Homo sapiens
tgaagaaagagctggtgcatgatgacgaggcatgtcgggccccaggcctgtggtgctgagcgggccttcgggagctgggaag

SEQ ID NO: 773113 - DNA, 100 bp, Homo sapiens
catggatatctctactcgctccaaagaaacgctccagaggacaagtgctgtttgataaagtgtgtgaacacttgaacttgctagagaaagactactttgg

SEQ ID NO: 773114 - DNA, 75 bp, Homo sapiens
gaaaatacaaatcacacgcataatggatgaaaggaaccgacagatgtgtgagatgccagtaaacacaccagaaag

SEQ ID NO: 773115 - DNA, 50 bp, Homo sapiens
tacagtgtgaaaagttgtgctatttggttaccttttcgacaaaatgattc

SEQ ID NO: 773116 - DNA, 98 bp, Homo sapiens
ctcatccacaccaagaatcagccacagacggaacaagcatgcaggagaaagctttgcagaattcagatctgcaggaactgatgatggtttcaccgatt

SEQ ID NO: 773117 - DNA, 100 bp, Homo sapiens
ctccgctacttcactcgcactatccttgatgctagtgtcttgggacaaggtgcgcattcctggtgtgctgcagcgattgggagtgacatactttgtggtt

SEQ ID NO: 773118 - DNA, 83 bp, Homo sapiens
agtattcagtgaaacatctactctgggaccaaagaccttccataggtggatgacaatattccacttagggtaatgctgcttct

SEQ ID NO: 773119 - DNA, 78 bp, Homo sapiens
agagagcgactcttcatccatcagtagtcatagctctgcctcagagtgaagtcaccctgctgagaaatgaagtggcac

SEQ ID NO: 773120 - DNA, 51 bp, Homo sapiens
gagccacaatgcatcgctggaagtagccaatatagccagtaccaacgtatg

SEQ ID NO: 773121 - DNA, 90 bp, Homo sapiens
atcgccgggaacccttgccgctgctgtcctgcgaccccaagcagatgcctgaggaaacccagacccaagaccaaccgatggaggaggagg

SEQ ID NO: 773122 - DNA, 77 bp, Homo sapiens
gcaaacttgacactcaccctgaccggtcgacaaagatgctgaattagtggcccaatggaactattgtactctaagtc

SEQ ID NO: 773123 - DNA, 100 bp, Homo sapiens
aggaggaagagcgagcccggacggcgcctctcgaacgagtgtgggcgcgaggcaggttacccttaagttacaggagtcccagctgcctgggccagaccag

SEQ ID NO: 773124 - DNA, 50 bp, Homo sapiens
cttctggtcagagatacttcttaaaagtcaagggtccagagaaggaggag

SEQ ID NO: 773125 - DNA, 82 bp, Homo sapiens
ctgctgttatcatcatggctgtagaggtccccttcccctgagcccatctacaatagcgaggggaagcggcttaacacccgag

SEQ ID NO: 773126 - DNA, 100 bp, Homo sapiens
tccatgaagataacattccccagctggaagacgtttctcagttcctgcagactattcctgcaccaactgacctgaagttcactcaggtcacacccacaag

SEQ ID NO: 773127 - DNA, 95 bp, Homo sapiens
ggagaatgtgctaccttaccatcaaagaaatggctaccatctctgaggatgtgataattgtcacaagcagtgccggtggtggtgtgcacattgag

SEQ ID NO: 773128 - DNA, 87 bp, Homo sapiens
cagttattggcaggctgccatgacaaccaggcaatgctggatagataccgaattcttatcacaaagatgttcttaatagttgctcct

SEQ ID NO: 773129 - DNA, 78 bp, Homo sapiens
cgacctgaaactctacgaggataaccagacagagaacacaaagttatacctcaatttacttgaaatggaatatagtgg

SEQ ID NO: 773130 - DNA, 101 bp, Homo sapiens
ccttagctgtgctcgcgctactctctctttctggcctggaggctatccagcgtacacagataagctgtttctctccaagttctttctcctggcgtcaggct

SEQ ID NO: 773131 - DNA, 80 bp, Homo sapiens
atggcatcatttttgccctcaaaagaaatggcagatattgtactccaagatacttggattacgaagatttggagcgcaag

SEQ ID NO: 773132 - DNA, 75 bp, Homo sapiens
atcatcctgaccaaccgcctgcagtaatggcatagaggagcctttggaagaatcctctcatgaacctgaacctga

SEQ ID NO: 773133 - DNA, 75 bp, Homo sapiens
tttgtgtcaaaaagaaataactcagctgaagcatcagttaagggaagaaagtcggaggctggctttggctgcgaa

SEQ ID NO: 773134 - DNA, 75 bp, Homo sapiens
ctactacgcctacgccatccagctgtgcataggttttggaaggaaggatgttgtagaacacttactacagatggg

SEQ ID NO: 773135 - DNA, 100 bp, Homo sapiens
aagaccaatgttcatataaatggtggcagaaataccagaagacaatgtatttcaaaggcattgaagcagggaaggttccctattttcctcatgcagatac

SEQ ID NO: 773136 - DNA, 77 bp, Homo sapiens
gcgatggcgcggagcccgggacgcgcgtacgccctgctgcttctcctgtgtcaaatcaacagtgccttgacatcttt

SEQ ID NO: 773137 - DNA, 75 bp, Homo sapiens
ggtgctgattcggcgcgatttgaggagctgctgctgcagcttaattggcttagtgtcgacttcaataattggaaa

SEQ ID NO: 773138 - DNA, 98 bp, Homo sapiens
gccaagctgctgcggacactgagctcacccacagagcccgtgaagagccatgtgatgccaagaggctcaggaactggcatttacagcaatgctgcacc

SEQ ID NO: 773139 - DNA, 82 bp, Homo sapiens
cggggacagccagccctcgctggaccagaccatggccgcggccttcgggttgtgagtcccggcccagcccctccacccccct

SEQ ID NO: 773140 - DNA, 101 bp, Homo sapiens
gcgccgaggcggccacccgagacgcggcgcgcacgctccggcctgcggtcgcgtggggcaggcagtggcgctgcgggccaaggccttcggcttcaacgtgc

SEQ ID NO: 773141 - DNA, 83 bp, Homo sapiens
ggacacacccaggaaaagactcaggacggacaagcacagtcttcggaaggcaagataacccctgtgacagaaggctactgttg

SEQ ID NO: 773142 - DNA, 110 bp, Homo sapiens
tcgaggctctccctgcacagcatcgcgcagaacaaagggatcagaaaaatggctacaaacttcctagcacatgagaagatctggttcgacaagttcaaatatgacgacgc

SEQ ID NO: 773143 - DNA, 88 bp, Homo sapiens
cctttgctccagtatgtgcaggacatgggccaagaagacatgttgcttccccttgcatgattgagaggatccagaatccagatctctg

SEQ ID NO: 773144 - DNA, 101 bp, Homo sapiens
ggacatcttactggtccatgctactgagactgacaggaaaggtccctaggcctggcctatcggaggcgctttccctgctcctgttcgccgttgttctgtct

SEQ ID NO: 773145 - DNA, 50 bp, Homo sapiens
atcctttcttccagctgccacacagaagattcttctaaggagcctaaatt

SEQ ID NO: 773146 - DNA, 75 bp, Homo sapiens
aggcctgcccacagacggtggtgcctcaaaacacctacccagaattggtagggtgcccccctttttcacagagaa

SEQ ID NO: 773147 - DNA, 82 bp, Homo sapiens
tgcactttactacaaagatggacttctctgtacagatcagcttgaacgggtctttttacgacttggccatgctgaaacagat

SEQ ID NO: 773148 - DNA, 75 bp, Homo sapiens
aagaagtggagcgtgtcctgaaggagttccaccaggccgggaagcccatcgggatctggtgaagaatcatctgat

SEQ ID NO: 773149 - DNA, 100 bp, Homo sapiens
atcttcgagttcaaagagaccctcggaacggattgaggaatgatttgaaagcagccttggataagattgatcagcagtacctcaatgaaatcgtcggcgg

SEQ ID NO: 773150 - DNA, 99 bp, Homo sapiens
gtccaaaggcctggcccggcggctcagccccatcatgctggatctgactgcagccatgagcagcaatgagtgcttcaagtgtggacgatctggccactg

SEQ ID NO: 773151 - DNA, 89 bp, Homo sapiens
gtgatgcctgctagccaaaaggtgtacacttgactgtgaagtggctgtgagagtgggtggagagttcttctttgaccctcagcctgcgg

SEQ ID NO: 773152 - DNA, 101 bp, Homo sapiens
ctcagatacactctctgatttggggatctctagcctacaggatggcttggccttgcacataagctactgtgtgaagacattcacaggacacagagaatggg

SEQ ID NO: 773153 - DNA, 100 bp, Homo sapiens
tgcgacctgatcagcatccccaagaaaaccacagacacggccagtgtggttttagagggccataccgatttcattaatggtttggtgtttgatcccaaag

SEQ ID NO: 773154 - DNA, 90 bp, Homo sapiens
gacaacattgatgagacatacggtgtgaatgtgcagtttgagtctgatgaggaggaaagtgactattttaccccacagggagaattccgt

SEQ ID NO: 773155 - DNA, 100 bp, Homo sapiens
tgattttccagataattatgaaaagtttatggagactaaaaaaggtgtcagctgtgatgcatgtttaaaaggaaattttcgaggtcgcagatataagtgt

SEQ ID NO: 773156 - DNA, 75 bp, Homo sapiens
tgaggaggtgctggcacctctgaggctagcagtgcgccagcagtgccggtggcagatatcaaagccgtggtgacg

SEQ ID NO: 773157 - DNA, 100 bp, Homo sapiens
acagtcggcctatgactcgaagatgtccggtctgtgctacgacagcaaaatgttccaggtgcatcaggtgctctgcatccccagctggatggcaaaattc

SEQ ID NO: 773158 - DNA, 100 bp, Homo sapiens
cctgcaagcggcctcacagtcatggatctggaagctgagggcacgtgtttgcggttcagccctttgatgaccgcagcagatctcaggaaacaggctcgac

SEQ ID NO: 773159 - DNA, 98 bp, Homo sapiens
cgcatcgaggacttcatccagtttgctacggtctacggggcagagcaggttgcacactgggccacagaggatccagcaaggatgaagaaatggagcag

SEQ ID NO: 773160 - DNA, 100 bp, Homo sapiens
ttcttcagcctatgtagacagccacaaatgggaagcaagagaaaaagaacattactgtcttggtgaagcatatatgcgtttaagcaaactccccgaagca

SEQ ID NO: 773161 - DNA, 82 bp, Homo sapiens
cgtcatggctggctacgaatacgtgagcccggagcagctggctggctttgataagtacaagaaggactccatgaaagatgac

SEQ ID NO: 773162 - DNA, 100 bp, Homo sapiens
ccctgcttgacctgtgtgatccgagctggagaatgctggaggagaccttaaggatggccaccaccactatgaaggagctgttgtcattctggatgctggt

SEQ ID NO: 773163 - DNA, 100 bp, Homo sapiens
tccggaacgccaaatacttggtcgtctacacaggcgcgggaatcagcacgccggagcggttgcagggcacacattactcggtgcagtcggacatctggag

SEQ ID NO: 773164 - DNA, 51 bp, Homo sapiens
ctgaaactcatctgtacctcacttagaaagagcaacttttagtgaatttgc

SEQ ID NO: 773165 - DNA, 74 bp, Homo sapiens
tttattatgcaggtggtctgtgaagccacacagtgtccagatacgaggaacctggagctggttgaaaaaggctt

SEQ ID NO: 773166 - DNA, 75 bp, Homo sapiens
ccccggacaggacccccttgagcttgtccctcagctgccaccatgagcggagctggatgtggtggctaacacctg

SEQ ID NO: 773167 - DNA, 100 bp, Homo sapiens
gccgcagcggcgcagctgatagcaggaacagagctccatgaacctgcctccagacaaggcccggctcctgcggcagtatgacaatgagaagaaatgggat

SEQ ID NO: 773168 - DNA, 82 bp, Homo sapiens
ccgcccgggaactgctgacgcttgatgagaaggacccacggcgtctgttcgaagttacgccccatggtgtccatcctgccag

SEQ ID NO: 773169 - DNA, 75 bp, Homo sapiens
gccgtggttgccaggagagctgcgccggcgagaagcggccgagccagcagcagacatgtcatgctgcccaaggac

SEQ ID NO: 773170 - DNA, 83 bp, Homo sapiens
ccaacacgtctctgttcgtcaggaacgtggccgacgacaccaggtgtttcccattaaacactaccaggacaaaatcaggcctt

SEQ ID NO: 773171 - DNA, 74 bp, Homo sapiens
cagaactttctaatttagccaaggaagaatcctgccgcctttgacttcctgctgcagcgggttgagaagacctt

SEQ ID NO: 773172 - DNA, 96 bp, Homo sapiens
gaagacctactggagcagtcgcagtgagtttaaaaagaaattatgatgtgatgaccccaatggttgatatacttatgaaactttttcgaaatatgg

SEQ ID NO: 773173 - DNA, 100 bp, Homo sapiens
ctcatccccgggagtgttgagtgtgatgaatgcagactctgctaccattttggctgtttggatcctcctttgaaaaagtctcctaaacagacaggctacg

SEQ ID NO: 773174 - DNA, 50 bp, Homo sapiens
ccctggagcagcatcgaggcccgggaggattgtggctgcacggctcaacg

SEQ ID NO: 773175 - DNA, 74 bp, Homo sapiens
acctgttgccaaagttacacatagtacaggaacaagcacatcatgattgacttggggactggcaacaacaacaa

SEQ ID NO: 773176 - DNA, 100 bp, Homo sapiens
attacctgacgatcacagggccttcgcaccccttcctgtcaggggccgaggtttttcgttggaatatacgttgcacatttatggcgattctgagtgtgag

SEQ ID NO: 773177 - DNA, 75 bp, Homo sapiens
gaaactttggcgacaatgttggcctgtctgcaagcttgtgcaggaataatccagaatggctactctgatctatgt

SEQ ID NO: 773178 - DNA, 75 bp, Homo sapiens
gtgcagggcctgattgaggactgccagctggcgctgcaggtgaccaagaatatggcccaggtgaccaaagccctg

SEQ ID NO: 773179 - DNA, 90 bp, Homo sapiens
gtgatgatggagctcagccctccacctccacaggtggcccatggcgccctcagtgatggtgccattgatgctgtggagacacagaaggac

SEQ ID NO: 773180 - DNA, 108 bp, Homo sapiens
agccatggccgacatcaagacgggcatcttcgccaagaacgtccagaagcgactcaaccgcgcgcaggaaaaggatttaagaggggtgcagatcccggaatgcctgaa

SEQ ID NO: 773181 - DNA, 100 bp, Homo sapiens
ccctggccagaagcggcccctgtggctgtgtaagatctgcagtgagcaaagagaggtggaaccgtcccaaaatgtcccttgctcagaagaaggatcgggt

SEQ ID NO: 773182 - DNA, 75 bp, Homo sapiens
ctggagatgagcacgccctttacctgcgtttcctggatgctcttaaaggagtatggatgtgtccaacagccaaaa

SEQ ID NO: 773183 - DNA, 76 bp, Homo sapiens
ctgaagatcctggtgtcgccatgggccgccgccccgcccgttgataagaccatcatcatgtggaaactgaccaggg

SEQ ID NO: 773184 - DNA, 100 bp, Homo sapiens
tgctgctggtctcctggacctaccaggacagagcccaagccacccagctcctggagggcctggtgcaggagctgcagaagaaggcggagcaccaggtggg

SEQ ID NO: 773185 - DNA, 75 bp, Homo sapiens
cctttggcacgtcctgctccgtggtgctctatgaccccctggtcaaaatgcagatcttcgtgaaaacccttaccg

SEQ ID NO: 773186 - DNA, 100 bp, Homo sapiens
gcaagtaatggcagtttaatctcctcagagggcctttctggttctctagttcaggaaccttttcagctggctactgagaagagagccaaagagcggcagg

SEQ ID NO: 773187 - DNA, 100 bp, Homo sapiens
tgcctgatcatgcagacatctccaactgtgggaactctttccagcttgtgtctggttgctccgactgtgtgttccaggagtggtggctctgaggtgtgac

SEQ ID NO: 773188 - DNA, 78 bp, Homo sapiens
ctgtatcctgtgggatgagacggatgttgtactaatggtcacttgatgtgcgctggctgttttatccacctactagca

SEQ ID NO: 773189 - DNA, 98 bp, Homo sapiens
cgacagctgcggttggcgggcaccataggccgaagcacccgggtacgcatagctgctaaattcatcactcatgcacccccaggggaatttaatgaagt

SEQ ID NO: 773190 - DNA, 74 bp, Homo sapiens
cggcgtgtcaggtggttgcggagctgcagaccttgggacctgtgagcgctgcatccaattaaccatgggaaggg

SEQ ID NO: 773191 - DNA, 90 bp, Homo sapiens
gggattttgtcagcttgtcgtcaagggaccaggggaagagacatgcgagggcctcatcatgccccagtagctcagacctgagcaggctgc

SEQ ID NO: 773192 - DNA, 50 bp, Homo sapiens
aaactatattaaaaggaactggagaattatacaggtatccccgtttttac

SEQ ID NO: 773193 - DNA, 75 bp, Homo sapiens
catgtgaacacgaacactctaattgcctcctgatagcacacagaaaggaaattcggcgccttcatcagtatgtga

SEQ ID NO: 773194 - DNA, 75 bp, Homo sapiens
cctcggttggatgcgaaggagctgcagcatccagcaattaccagctctggctgggtcgccacaacttgtttgacg

SEQ ID NO: 773195 - DNA, 75 bp, Homo sapiens
ctgctaagcagtgcctggaggagatatctgagtattgttacaatcacatttgacgtaccaggaaatgcaaaggaa

SEQ ID NO: 773196 - DNA, 100 bp, Homo sapiens
ggacagcagattttggtttaatatctgattgggacaacattcagacccatttccagtcatgagtgtacacttaaagcgttctgggaatatgaatcccttc

SEQ ID NO: 773197 - DNA, 50 bp, Homo sapiens
ggagattctgctcacggaactgcagctgcagaagaaagatcagcaactgg

SEQ ID NO: 773198 - DNA, 100 bp, Homo sapiens
acagctacatatttgttattggggagaaaatcttcagagatcccaccaaatattttggttgtgagctgggagcacagacccagtttgatgttaagaatga

SEQ ID NO: 773199 - DNA, 82 bp, Homo sapiens
cctttttcagaaatgcgcagagcaaacatctttcaaagattcatgatgttgctatcaaaagttgagaaattgtcagaagaaa

SEQ ID NO: 773200 - DNA, 100 bp, Homo sapiens
cggcggcggcgcctcaggcacctcggcccggagctctgaggaacatgaatacagtgatgaagctcctcaggaagatgagggctttatgggcatgtcccct

SEQ ID NO: 773201 - DNA, 98 bp, Homo sapiens
ctccagccccatgggccggacatctactgggtcagcttcatcctcggcggcggtggccgctagctccaaggaagggcagagcggcttgggtaaatcca

SEQ ID NO: 773202 - DNA, 90 bp, Homo sapiens
gcggtgggacagtgcggctactcttgatcctctccggctgcttggtctacggcacagatgaagatgacgccaacagactcggggagaagg

SEQ ID NO: 773203 - DNA, 98 bp, Homo sapiens
agtgtatgaccacaaacagccatcaaggaatagccaggccagaagaaggaaggcctgtggtgagtgggacaggaaatgacatcaccaccccaccgaac

SEQ ID NO: 773204 - DNA, 50 bp, Homo sapiens
agttggtgagtgtccggccccaggtactccaaagattcaggtttactcac

SEQ ID NO: 773205 - DNA, 50 bp, Homo sapiens
tggtgatggactcatccccacagatatgaagcaacagcatgtcatagaaa

SEQ ID NO: 773206 - DNA, 118 bp, Homo sapiens
gaataggaacagctccggtctacagctcccagcgtgagcgacgcagaagacgggtgatttctgcatttccatctgagggctgttgataatcaggtgtatgtggccacagcctctcctg

SEQ ID NO: 773207 - DNA, 82 bp, Homo sapiens
caagcacgggaagaagcagctggacccgctcaccatctacggcatccggtgtgagaagccctaccactgcaactgggacggc

SEQ ID NO: 773208 - DNA, 82 bp, Homo sapiens
gtgctgaggcggaacaggccgggcaccaaggcgcagtggaaatcctgactgctcgtcagaagaaagcagaagaactaaagag

SEQ ID NO: 773209 - DNA, 105 bp, Homo sapiens
ggcgattcttttacctggcaggtaactttggaaggtcgtgctggagctctatgtgtctccaaaaaaagttggtgatgacattgccaaggcaacgggtgactggaa

SEQ ID NO: 773210 - DNA, 101 bp, Homo sapiens
cggcgcgtcatgtacaccatcaccaaggggcccagcaagctggtcgcgcagcgccgcacagcaaccatgtccaagggacctgcagttggtattgatcttgg

SEQ ID NO: 773211 - DNA, 77 bp, Homo sapiens
gaatactgaaaattgtcactggatttaatggtgatgtcttggcattgcccattttcaagcaggaagattccagcctt

SEQ ID NO: 773212 - DNA, 51 bp, Homo sapiens
ggttgttgttggcgactgtgcttcaagcgggcaagaatatcacggcatggg

SEQ ID NO: 773213 - DNA, 90 bp, Homo sapiens
tttttacatttctttcagaacaagggacactcaaactaccagagtgccggtggtggtgtgcacattgagccccggtatagacagttcccc

SEQ ID NO: 773214 - DNA, 100 bp, Homo sapiens
ctcgagctgaggaggccggctgcagccccaagacagagcgctactcctggcagtgcgtcaatcagagcgtcctgtgcggaaaaccaattctgtgtcctcg

SEQ ID NO: 773215 - DNA, 50 bp, Homo sapiens
tctatgggtcagacagaattcaatcccaggacccaccggctcagaagggc

SEQ ID NO: 773216 - DNA, 100 bp, Homo sapiens
acctggtgcagcagatcacaccagggagatgttactggatctttgatgagtggagcatccacagaggaaggaaaactgataaatttcaaacggaagagag

SEQ ID NO: 773217 - DNA, 82 bp, Homo sapiens
cggacggcgacgacgggggaatgtggcgctggatccggcagcagctgttggaatgccaagatgccttggaaacagcagcccg

SEQ ID NO: 773218 - DNA, 100 bp, Homo sapiens
ctgagcctgttggaggaactggcccggaaacaggaggacactagacgcttgaagcaaagctgccatcccagaagacgacatgctctcagcaacccccctg

SEQ ID NO: 773219 - DNA, 90 bp, Homo sapiens
cctgtatctgctgctgctgctcataagcctgaaccccaacctgctggccgtggtgacagagagcacagacgcgcaccatgagcgcacctt

SEQ ID NO: 773220 - DNA, 50 bp, Homo sapiens
ttctccttcacagtaaagtggctgcaagcaaggatttggcacagacatcc

SEQ ID NO: 773221 - DNA, 90 bp, Homo sapiens
tcttcctgagcaagaaattaaaacactggaagaagatgaagaggaactttttaaaatccaagaccgaggataggtgtggccattggcgac

SEQ ID NO: 773222 - DNA, 82 bp, Homo sapiens
tggactttgtttttcctgggaactgcaggcgccatgtcagaaccggctggggatgtccgtcagaacccatgcggcagcaagg

SEQ ID NO: 773223 - DNA, 99 bp, Homo sapiens
tccccggcccctctgagcaccagcacctgctccaccgggggacggctacgtgcaggcggacgcccggggccccccggaccacgaggagcacctgtatgt

SEQ ID NO: 773224 - DNA, 100 bp, Homo sapiens
ggagtgccctcgctgcacccaggaaggccgcaccagcaaggagagcctgtcccgcctcctgtccacctgtggcctcgtccagtctgtagagttgcaggag

SEQ ID NO: 773225 - DNA, 101 bp, Homo sapiens
ggctgcgctgcggcccgcgggccccgggcccgagcctgctagtgcgccacggctcgggctcgcgatgcctctacacaagtatcccgtgtggctctggaagc

SEQ ID NO: 773226 - DNA, 75 bp, Homo sapiens
gaacccgcctgcgatggggcgagaaaggtcccactgcagccctccaagcagccacataaagaagatccctaatag

SEQ ID NO: 773227 - DNA, 100 bp, Homo sapiens
gctgctgctcaaagctgctgccgccccttgggctaaaagtgccggtggtggtgtgcacattgagccccggtatagacagttcccccagctgaccagatcc

SEQ ID NO: 773228 - DNA, 75 bp, Homo sapiens
ctccgggaaaactacactggccagttatgcaaagggtgacctggacatatcttacatcacatccagaattgcagg

SEQ ID NO: 773229 - DNA, 129 bp, Homo sapiens
aaataagctatatactttggttacctatgtacctgttaccactttcaaaatgtggcaaaggagcagagaactttgacaagttcttcacacgaggacagcccgtcttaacaccacctgatcagctggtta

SEQ ID NO: 773230 - DNA, 100 bp, Homo sapiens
cggagcaacgttcgcgtcatcacggacgagaactggagagaactgctggaaggagactggatgatagaattctatgaaacccacgtagtcgaacaccgtg

SEQ ID NO: 773231 - DNA, 97 bp, Homo sapiens
ctatcctcggtgctgtggtgcagagctagttcctctccagctcagccgcaacactctgctccagccaaggtggtgagggcagctgttcctaaacagc

SEQ ID NO: 773232 - DNA, 90 bp, Homo sapiens
ggaaaagaggagtcagacacggggcaggctgagttcctcttgctcacagagctctgtaaagaggtggggctggtgtccgagcacttctcg

SEQ ID NO: 773233 - DNA, 75 bp, Homo sapiens
ggggtctggaacactgtgagccgctcacagtgtctaagatccctgcatgtcactgagtccaccatgctttacaga

SEQ ID NO: 773234 - DNA, 75 bp, Homo sapiens
ctgcttaacaagcagagagctcacctaccacaaacagccaggtacctgactttgtcggcatcatctgtactcgtc

SEQ ID NO: 773235 - DNA, 99 bp, Homo sapiens
gcccgagtgccggcttctcccctacgcgctacacaagtggagctccttttcctccacctaccttcccgaagactgggtcttgctatgctgccgaggttg

SEQ ID NO: 773236 - DNA, 75 bp, Homo sapiens
gggccgcgtgaaggccttcgatagcttcttggacacttaatgattgttggcaagaaatgtgctgctgatctgggc

SEQ ID NO: 773237 - DNA, 75 bp, Homo sapiens
cattggccacctacagaaacaaaatgtcaacaaattgatgggttgatgaaaaaaccgtaggagaacctggttggc

SEQ ID NO: 773238 - DNA, 75 bp, Homo sapiens
gaagcggttggcaccactgaagtgaccgaatgagcactagaaagtttgggatttggctcttacatcagtgaagta

SEQ ID NO: 773239 - DNA, 75 bp, Homo sapiens
cgctgcccagaagaagggaaggcgcgagtgaggaaaggaggtactgtagaaactgccagaggcatgcagcattgg

SEQ ID NO: 773240 - DNA, 90 bp, Homo sapiens
tgcttcaaaagctgttgaaattgttacttcaacttctgctgatgatatcatcaagttgaatcgaaaggaagggaagaagcagaattttcc

SEQ ID NO: 773241 - DNA, 98 bp, Homo sapiens
tctctgtccgggggcctggctaaggaaaccctattacctccaggtgtaattgaaaagtgatcctctcttcagagatgtcaaaaacaaacaaatccaag

SEQ ID NO: 773242 - DNA, 97 bp, Homo sapiens
ctctgtggttatctttacaatacttgggacttgatgggtttgtggagaggatcaagcatgcctgtcaactgcgttatacgcagagcaatgggcgcag

SEQ ID NO: 773243 - DNA, 100 bp, Homo sapiens
ctggactgcatcaggccgcgtctcctcagggtggatgaagacctgatcattgaagttcaccagttatttttctcaagaatgtgaataacaatgggatttg

SEQ ID NO: 773244 - DNA, 90 bp, Homo sapiens
gggactgctgcaacctacggggtgtacttgggaacgaggggtgaagcggcccaggtgaggctgcaagctttcttcctggtggcagatgac

SEQ ID NO: 773245 - DNA, 90 bp, Homo sapiens
ctgaaatcaagtccggatgaagatgaccgcacctcgagcaggagtggggatgccacgtctgcccccagcgcccggccctctgtccaccac

SEQ ID NO: 773246 - DNA, 88 bp, Homo sapiens
agagaatttgaccttctaagatcaagccaggtcagagcagcccaccatgggatggggagggggtggaggctgcaccccgcgcccaccc

SEQ ID NO: 773247 - DNA, 100 bp, Homo sapiens
tggaataatgggtactctttcctcgtggaatttgaagattctacagataaatcagaggattctgcagattgggaaaaagaactgcagcaggaacttcaag

SEQ ID NO: 773248 - DNA, 76 bp, Homo sapiens
caatgagatcgtggacaagatcatgggcaaaggacagatccagtgttctacgcagaaatagaagagctgaaactgg

SEQ ID NO: 773249 - DNA, 100 bp, Homo sapiens
agcagcaaggtcacctcaggatccatgagctgccccgttcagaccatggatcctgaggtgaccttgctgctgcagtgccctggcgggggcctgccccagg

SEQ ID NO: 773250 - DNA, 74 bp, Homo sapiens
aggctgttctacaggggcaaacagtgcacgtgccggaaggacatggtcaagatctccatggacgtgttcgtgcg

SEQ ID NO: 773251 - DNA, 100 bp, Homo sapiens
cagctcctccaggacctgccactatgatgccggatggaactttgggattgaacagagaatgtcagtatccaataggatgccagtggaattccctgacgat

SEQ ID NO: 773252 - DNA, 83 bp, Homo sapiens
cgcctgtgggcacagacaaggagctcagtgacctcctggacttcagcatggaacctggccactgctccttggtccttggcatt

SEQ ID NO: 773253 - DNA, 95 bp, Homo sapiens
gtgaagagtctggagtttatctggagtgaggtggccggttcttggtgggatctgagcaggttggaaaagagactgttcaaaccactgaggatcag

SEQ ID NO: 773254 - DNA, 100 bp, Homo sapiens
ttacaagcagcaagtgcgcggttggggccactgcgaggccgttttagctggtgaccttgttgcagatgtgggttgtccccttatatttcacgataaaatt

SEQ ID NO: 773255 - DNA, 83 bp, Homo sapiens
tacaaacataggatgttttggcgagagatgtattcagtggaggaagctgacagagtctcgctctgtcaccctggctggagtgc

SEQ ID NO: 773256 - DNA, 100 bp, Homo sapiens
gctgccgtgaataggcagcctaaagggttctcatgtatcagccatcttctgtaagggtgcccagtgtgacttcggttgatcctgctgctattccgccttc

SEQ ID NO: 773257 - DNA, 76 bp, Homo sapiens
aaacccaaacctgtaaaaccagtgacgttttccacaggcatcaaaatgcttgtactcccagagtacctcatccacg

SEQ ID NO: 773258 - DNA, 75 bp, Homo sapiens
aactcctatggcaaactgccctcctggtctggaatacttagttcagatgcagagccgaaatatctgatagttgtg

SEQ ID NO: 773259 - DNA, 137 bp, Homo sapiens
tcatccataatgtcaggaattattcgaaactcagggcaaaatcaccacccctctccacaggaatacagataaccagttcaggatgtccatcctggaacgactggagcagatggagaggaggatggccgagatgacgg

SEQ ID NO: 773260 - DNA, 135 bp, Homo sapiens
aggcatctccctgtaattctggaccgctgctcctgccgctccccgaactcactccgctgcgaaaatacaacaagcagcagctcagccgcatctaccccaagggcacccgcgtggactcctccaactacatgcccc

SEQ ID NO: 773261 - DNA, 99 bp, Homo sapiens
ttgatgtcaacactgtcgctaatgaagtatacaagtataattttcctcacacacagttacttgccaagacgattgaaatctttccagttggaagactct

SEQ ID NO: 773262 - DNA, 82 bp, Homo sapiens
ctgggtatcatgcagaccctgggcgtggaccggcagaggacggtggaggaccaggcggtccagcgaaggagtcgactccagc

SEQ ID NO: 773263 - DNA, 58 bp, Homo sapiens
ctcgtgctcaccggtttctcccacatcgacctgtgagaaagatcagtctaaagaaaag

SEQ ID NO: 773264 - DNA, 101 bp, Homo sapiens
gaatgtggagcttgggatcaggaaatacaaacctggtcgatgtgatgatattttgaaatggaagcctcccagtctgaattctgtggattttcgtctaaaaa

SEQ ID NO: 773265 - DNA, 100 bp, Homo sapiens
gactacacgtacaccagcaaggcgctgatcaccaagcagaatgtccagcgggtcctggaggctgctaacctcttccagcacttttccagccattaactcc

SEQ ID NO: 773266 - DNA, 95 bp, Homo sapiens
ctgagggccgtgcggtgttggtgcactggttcctggatgcctatgctgagcacaagttacagttctgggcagtgacagctgaaaatgagccttct

SEQ ID NO: 773267 - DNA, 85 bp, Homo sapiens
gtgccacgcacacctcctccccgcagccccaacccatctccagagagaccaaggttcgaagtcaacaataccattcttcacccag

SEQ ID NO: 773268 - DNA, 96 bp, Homo sapiens
gggagacggcgagacgcgcagcgccggcgcccgggagacccaggaggagcccgcaggccgccatggcatcagatgaaggcaaactttttgttggag

SEQ ID NO: 773269 - DNA, 100 bp, Homo sapiens
atgcagcaaagattacaccaagatctgtgctgaccacaggaattggatctactagtgcagcatgtccagctgtcccatgagtttgagtcactggtgcgcc

SEQ ID NO: 773270 - DNA, 100 bp, Homo sapiens
ctgatcttccagctcccctcacccaacgtcgtgctcagtagatgaaggcgtttctgagggcttgcctacacttcaaagcacgtctagcactaatgctcct

SEQ ID NO: 773271 - DNA, 50 bp, Homo sapiens
taggccatctgaataactttactaagaaactccccaacttttaaatcatt

SEQ ID NO: 773272 - DNA, 50 bp, Homo sapiens
cagtcagtctggtactaacaatgcagatgtacttgaaggatataatggaa

SEQ ID NO: 773273 - DNA, 75 bp, Homo sapiens
ggcaggaggtttttgatgataaagcaaagcccatgcagaatgccaccaagtatggcaacatgacagaggaccatg

SEQ ID NO: 773274 - DNA, 102 bp, Homo sapiens
tcagggccagtccaacactgataagattgaatgccaagcagaaaattacctaaatgcactctttcgaaagaaagatcctaattatctcatggctaatgaacg

SEQ ID NO: 773275 - DNA, 100 bp, Homo sapiens
ctgctttggccctggagttcccatgccctggtgtcttctaccagttcttagacttaattcagtgcacaaatgagatgaatgtgaacatcccacagttggc

SEQ ID NO: 773276 - DNA, 75 bp, Homo sapiens
tgaaatctggagtgaagaacgccgccatccagccaccattccaaggcatttgatctaacagagcaaagatacgta

SEQ ID NO: 773277 - DNA, 98 bp, Homo sapiens
caatatcctggtattgctgtggagacggtgacagattctagccgctactttgtaatccggatccaggatggtactgctggatacacagtatcgtcgct

SEQ ID NO: 773278 - DNA, 90 bp, Homo sapiens
ggcgggagccctcgcgacgcgcccggcccggagcccccagcgcagcggccgcggtatctcattcagttgctaaacttatattagttaatt

SEQ ID NO: 773279 - DNA, 83 bp, Homo sapiens
gttcagaagaggtttggctttccagagggcagtgtagaggttgaaatcacaaagattagacacctttttagataggtgttctt

SEQ ID NO: 773280 - DNA, 88 bp, Homo sapiens
agagccaaggaataaacatgcaatgaacccaaaaggaaattgccccaatgatggccaagacaattaaagctttcaagaacagattctc

SEQ ID NO: 773281 - DNA, 100 bp, Homo sapiens
gagaagaggattggaggtgtcagtgttaaaggaacctctacaacgaaggtgaagccacggaagataaggttcctcaagccaggacctacgcacctgttgt

SEQ ID NO: 773282 - DNA, 100 bp, Homo sapiens
aaaccatgcaacgtctgacaaatttaagacttcaaaacatgaaaagtgatacttttcaagaggaaaacagttcctcctgaggatttcagagaagagctgg

SEQ ID NO: 773283 - DNA, 110 bp, Homo sapiens
agcacaccaaggaggcgctgctggctcacagcttcctggcccggcggccagggggcactcaaggctcgcccgaagtaaccagaccacaacactgaacttggagcaccaag

SEQ ID NO: 773284 - DNA, 75 bp, Homo sapiens
ctgaagaagcagttctacaaggcgagccaggtgttcatgaagtctgtgaagctggagtgggtgcaagacaacatc

SEQ ID NO: 773285 - DNA, 82 bp, Homo sapiens
cggcgcccgctggccgggctggctgcggccgccctgggccgggccccaccggacgcgtctgcttctgcgctttgcctgggag

SEQ ID NO: 773286 - DNA, 100 bp, Homo sapiens
ggcaattttggagaattacgattaggagtcagtggatcggtggggaaaatgctgcttaccctgggccctgggctgtagaaagaagacaccaaaggcaaag

SEQ ID NO: 773287 - DNA, 75 bp, Homo sapiens
tgctgaatagactgcacctggctatcccaaccaggagggacgataagagcactgcagtttcctcctgaaggctgg

SEQ ID NO: 773288 - DNA, 99 bp, Homo sapiens
cagagttcaaggaggccttccagctgtttgaccgaacagtcagggagtctgctccaagcagacactggtggtcccgctccactacaacgagtcctacag

SEQ ID NO: 773289 - DNA, 73 bp, Homo sapiens
gctttttatggctgtgagacacgttaaaatttcagggagacaaggacggcagcaaggtgacaacagtggtggc

SEQ ID NO: 773290 - DNA, 75 bp, Homo sapiens
ctcctgtttgtcttctgctttggcccaggtcggcttgggaaaccaaaaattacacagagtttaatggcatctgtg

SEQ ID NO: 773291 - DNA, 75 bp, Homo sapiens
gattgatggacttactagcggattccagggaagttatacgtaatgatcaacttgagttggtggaaccaagtggct

SEQ ID NO: 773292 - DNA, 101 bp, Homo sapiens
caaagtgctgggattacagatgtatgggtgagagtaactgtgcttggaatagaaaagccctgctgcatcgagacacaatgctggcagctgcggcagtgtac

SEQ ID NO: 773293 - DNA, 87 bp, Homo sapiens
ccagcatgacaggatggaagtacaagtgtcagcacctatcctcggtgtctggatgcccagcctaaccaagtcagcttcccatctttg

SEQ ID NO: 773294 - DNA, 83 bp, Homo sapiens
gctctgccctcttggccgaagtgcccgctgccgggcgcgggcctcagacaatgcagatcttcgtgaagactctgactggtaag

SEQ ID NO: 773295 - DNA, 75 bp, Homo sapiens
agatattagccaatatggaattgccaggttcttcactgaataggccttaaactctggtgttgagtactactggga

SEQ ID NO: 773296 - DNA, 101 bp, Homo sapiens
ggccaagtcaattctggacagctgggtatggggcaagcaaccagatggttccaatccctatacattgaagctttgcttttctacatcatcccatttataag

SEQ ID NO: 773297 - DNA, 90 bp, Homo sapiens
gttctgtatgaattgatgactggacagttaccttattcaaacatcaacaacagggaccagggtcaacatatttcactggcacctattcac

SEQ ID NO: 773298 - DNA, 80 bp, Homo sapiens
ccgagggcgtcgcggactctccccgcgatgatgccggaatactcccccagttgcaagaggcgcaggaccgtggaagactt

SEQ ID NO: 773299 - DNA, 102 bp, Homo sapiens
aacagtaaagatggaaaaccagttattgaatatcaagaggaggagttgttggcaagcacgaggagcggcaggacgagcatggctacatctcccggtgcttca

SEQ ID NO: 773300 - DNA, 75 bp, Homo sapiens
gaacgaggcaaggagctaaagcagcgtgcgttcagccctgggtggtatcctgaggtgcggcaccactgtcccaac

SEQ ID NO: 773301 - DNA, 96 bp, Homo sapiens
gtgccgtgaacctcgttttgagattaaggtccttccatagtgacgccccccaaggacatctggaatgtcactggtgcccaggtgtacttgagctgt

SEQ ID NO: 773302 - DNA, 100 bp, Homo sapiens
gcagcagccgccgccagagaggcccgcccaccagttcgcccgtccccctgccccgttcacaatgtagatttcgggcagacaacttgaacaagctgaagaa

SEQ ID NO: 773303 - DNA, 100 bp, Homo sapiens
cgcgagtgaggaaaggaggtactgtaggtatggcgactacccgaagctccctgaccgctcacagcatgagagagatccatggtatagctgggaccagccg

SEQ ID NO: 773304 - DNA, 100 bp, Homo sapiens
aactccagcgagatccgggccgtgaacgaaagcagtgacggaggagcttgtaccaccggtaggaatgaattgatagccagatacatcaaactcaggacag

SEQ ID NO: 773305 - DNA, 75 bp, Homo sapiens
tcaacatctccttcgcagccgcgcaaaaaaagaccagaggagcgagagcagcaagaaccacacccagcagcaatg

SEQ ID NO: 773306 - DNA, 73 bp, Homo sapiens
gagaggtcgattctattttcaaatagagctgcagcaaggatgaaacaggtcagtttaggggctggtgcaaagg

SEQ ID NO: 773307 - DNA, 75 bp, Homo sapiens
gtgcgaagaagctgcagccgcacctggccaagggctgcaggccaacttcaccatccgggaagatgccaaccccag

SEQ ID NO: 773308 - DNA, 98 bp, Homo sapiens
caaataagctatatactttggttacctatgtacctgttaccactttcaaaaatccttatgtgaagattcatctgatgcagaatggtaagaggctgaag

SEQ ID NO: 773309 - DNA, 82 bp, Homo sapiens
gggaagtcgcctctgtgctcgtgagtgcatggggtataagctcctgacccctgaggattaccagcgatttctagacctgggc

SEQ ID NO: 773310 - DNA, 73 bp, Homo sapiens
gcctttcacattcgggaagcgtcgggattaggtgaaaattagcctgaggcctgctcagtcgttcctaatgaat

SEQ ID NO: 773311 - DNA, 73 bp, Homo sapiens
ggtgttggaggaccctccctgcttcaggtgagaccaaggaccaggtagctaactcagcctttgtggaacgtct

SEQ ID NO: 773312 - DNA, 50 bp, Homo sapiens
tggggatggacgagtggactttgaaggagtggaaacaaaatgtcagtcag

SEQ ID NO: 773313 - DNA, 98 bp, Homo sapiens
cgggagttcaagaagaacactccagaggtgtaatctagctcctgtggtggagtttgctgcagatgtgggaactaaatcagattttattaccatgaatc

SEQ ID NO: 773314 - DNA, 82 bp, Homo sapiens
cgcggctcttcccgcccgccttccgccgtctcttcgagttcttcgtgctgctcaagtgtggacgaatgtggaacctcgctct

SEQ ID NO: 773315 - DNA, 83 bp, Homo sapiens
gggcgaaggacacccgcaggaactcggcagaggagaaattcagacggctcccgagggctgaagtgcaatgttgtgatctcggc

SEQ ID NO: 773316 - DNA, 82 bp, Homo sapiens
accactcattcacttctagacgacaaaatgcaaaaaaggaggccaaagactttctgttaaacgtttaatgaaagaagcggca

SEQ ID NO: 773317 - DNA, 75 bp, Homo sapiens
gaactagagtcccaggtcaacctggtgcagttctacctcaagaaataagccaagtaaatcaacatcataaatctg

SEQ ID NO: 773318 - DNA, 75 bp, Homo sapiens
ctgggccggagcagccgcgggcgcccgaggggccgagcgagttaaatccagatgtgaatgttttccaacggaaat

SEQ ID NO: 773319 - DNA, 102 bp, Homo sapiens
tgggagaatatttaatggaaaatcgcttggttaaaacctgacacttttaacaggtctcccaacatttgattcgtcctctgatgggcatgagtctggcattac

SEQ ID NO: 773320 - DNA, 100 bp, Homo sapiens
cgaagatgaacagggttcctggggcatcgacgatctccatatttcattgcaaggctctatcaaagaaagcaagagatggaaaattgttgcctgaagaata

SEQ ID NO: 773321 - DNA, 97 bp, Homo sapiens
cagcatcatcaagagactgggcgcagctgcccttgtgcccgaggcccaggacagccaggtcaccagcaccaagaatgcagagcaaagcggcagtccc

SEQ ID NO: 773322 - DNA, 75 bp, Homo sapiens
caagtgttggcggatggaagggaggagactcctgaccctcagaatggggtcgctgtgatgaaattcaagaacccc

SEQ ID NO: 773323 - DNA, 51 bp, Homo sapiens
aagaagagggcacgatctgtagaacgggatggaaatttctccttttctctg

SEQ ID NO: 773324 - DNA, 50 bp, Homo sapiens
agcccggagaaaagccacatgcctgccaggagtgaagaaagctttgggca

SEQ ID NO: 773325 - DNA, 97 bp, Homo sapiens
ccagcaccacctgaggatccagaaaccgccccagcgatggaagaggatcaggagctggagagggtacatccccagttacttagacaaggacgagctc

SEQ ID NO: 773326 - DNA, 88 bp, Homo sapiens
aaagaggatacctctgcgatcccgggtcatctccagatgctagggttatgggaccctgatgcttggtgtgacctgagtaaatttgacc

SEQ ID NO: 773327 - DNA, 131 bp, Homo sapiens
gagggtcctgacgcaggcttccaaccccgtcgtctgcacgcagcccaaatccccatccgggacagtgtgcacctcaactcaggtaccagacagtgatgagcagtttgttcctgatttccattcagaaaacc

SEQ ID NO: 773328 - DNA, 90 bp, Homo sapiens
gattcagctaaacgtgggtttcttactaaggacgagctgatcaagtatatgactgaagaagttacatggacacagaacagtatgaagaag

SEQ ID NO: 773329 - DNA, 83 bp, Homo sapiens
cagcccccgaggcccgcagcctccgcggatccgggcccgctcggcccctcccatgagaccatttgtttgtgactatgaagggt

SEQ ID NO: 773330 - DNA, 80 bp, Homo sapiens
gtttcttctgtttgatactgaaaagcagacctgcctagagctggaacgttacctccagagcgagccctgctatgtttcag

SEQ ID NO: 773331 - DNA, 75 bp, Homo sapiens
tatgttaatgtgattggtctggctgatgattcagttcggtctctaaaggaaattttacggttctggctcacaaag

SEQ ID NO: 773332 - DNA, 82 bp, Homo sapiens
aggaaggtgaccatgtttctcagacacattcatttttacaccccagacgagctcatctgcgcctttgtttagaacgcttaaa

SEQ ID NO: 773333 - DNA, 75 bp, Homo sapiens
cggaagccctgagggcagctgttcccactggctctgctgaccttgtgccttggttttagctgacgctgtctcacg

SEQ ID NO: 773334 - DNA, 75 bp, Homo sapiens
gcagagtttctacaaatgctagaagctatcaaagcccttgaagtcagatatgaggccccaggattcctggcgagg

SEQ ID NO: 773335 - DNA, 82 bp, Homo sapiens
cctaagcctgcacagccgcggcggcagcagcagtgagagaacactctgctccagccaaggtggtgagggcagctgttcctaa

SEQ ID NO: 773336 - DNA, 83 bp, Homo sapiens
taatcggtggccgccagacacccgcggcgaaggcggctcgggctcgggctccggaactgtggctgcaccatctgtcttcatct

SEQ ID NO: 773337 - DNA, 74 bp, Homo sapiens
ttggggccatgccaaggactatgtggagattggccatctgcaagcttcccttctccgtggagagcaggaagaca

SEQ ID NO: 773338 - DNA, 75 bp, Homo sapiens
tcgatctcagagctcagacacagagcagcagtcccctacaagccacccgaaacaatgaaatgtaatacattcata

SEQ ID NO: 773339 - DNA, 100 bp, Homo sapiens
gggagtttctcctcccatgagctcagttgttgtggaaaaacatcatccagtcacagtgcaaggaaagactgccctggctgtggcctccaggagcaaccat

SEQ ID NO: 773340 - DNA, 100 bp, Homo sapiens
cacagcagcctcccaaggagtctgcaagttgcatttgaagacatgctggagaacccactgaacagcacccagtggatgaatgatccagaaacggggcctg

SEQ ID NO: 773341 - DNA, 82 bp, Homo sapiens
gccttctaattcaggcaatttgcaaaagtggatcaatcttcctgtcctacaactgacaaaggatcccctaaagacccctgga

SEQ ID NO: 773342 - DNA, 83 bp, Homo sapiens
tagcagtcctgtcatgcggaagtagcagtccggtcctagggactagcaggtgtttcccattaaacactaccaggacaaaatca

SEQ ID NO: 773343 - DNA, 75 bp, Homo sapiens
agccaatcggaccaaaaattcactcactttgcaatggaaggcaggaccagatgctgtgttggggaggacaatctg

SEQ ID NO: 773344 - DNA, 100 bp, Homo sapiens
cttcatgctgggctcgctgctgcggacgttcaagcaggtctcccaccatccgggacatggcgatccgctgcattgcccagatggtgaactcccaggcggc

SEQ ID NO: 773345 - DNA, 100 bp, Homo sapiens
agtctccagggaaagcacagcctgcatgtgtcattacagcaagcagaagacttcatcctcccagacactacagagattacaccaccaccttcactgtcag

SEQ ID NO: 773346 - DNA, 125 bp, Homo sapiens
cggaggcatcggaggcggctgcgagagtggcagaggagctggcggagagcggcctgcgggcgatcgggccgaggtgcccacggtctgcagatgatgagcgaaagcatcctgtcctctgccttttc

SEQ ID NO: 773347 - DNA, 98 bp, Homo sapiens
ttgtaaattacagagaacctaagtctgtttgcaaagcacctgaactgggagagagaaacccctcctcgttttgcccagcatggcacgtttgagtacga

SEQ ID NO: 773348 - DNA, 75 bp, Homo sapiens
atctaaaaagccctcagtaccagagacagaagcagatggattcgtccttttagatggagtttcgctcctgttgcc

SEQ ID NO: 773349 - DNA, 100 bp, Homo sapiens
gtcattcctgcctttgagcggactcccttttaagcaaaacaagctatcgatcagggaagatctccagttataatagataacactaatatacaagcttggg

SEQ ID NO: 773350 - DNA, 98 bp, Homo sapiens
cggatgtgaggcgatccgctggcgctagtctgaccctccgccaggcaaaaggaagccctggaaaaaactcgaacagaattatttgacctgaaaaccaa

SEQ ID NO: 773351 - DNA, 75 bp, Homo sapiens
ccgagggaagtttaacaccagtgatgtgtcagccatcgaaaagttcagcagctggacatggagaaccaacgctca

SEQ ID NO: 773352 - DNA, 137 bp, Homo sapiens
ccctcccccctccggcgcggaccccgcgtgcgccttgctcgcccgcagccccgagaccgcaggcgtccgacctccgatcatgaacgggcccctgcacccgcggcccctggtggcattgctggatggccgggactgca

SEQ ID NO: 773353 - DNA, 74 bp, Homo sapiens
gcgcgcctgaagtcggcgtgggcgtttgaggaagctgggtccgcgggagagctgtggggcttggtgagtgtttc

SEQ ID NO: 773354 - DNA, 100 bp, Homo sapiens
tgtcggcttcaaagagaaaaggcaacatcctgtcacaggccatgctctggcaaaaactaggccaaccttgtctatccagcatcctccatctgcagcaatc

SEQ ID NO: 773355 - DNA, 75 bp, Homo sapiens
cagaaattccagatatccaaatgtactgggaacagcttttgatcctttcttaggaggaaaaaacttcgatgaaaa

SEQ ID NO: 773356 - DNA, 83 bp, Homo sapiens
ggcagatccttcagcaaaagctgtccttacaggtatctctcctaaatgtgtgatcaaggaattaccaccaacagagaacagta

SEQ ID NO: 773357 - DNA, 80 bp, Homo sapiens
cacaccaatactgttgcagattgaaggccaatgatgaggccaatcagagtgatacaagtgtctccttgtcagaacccaag

SEQ ID NO: 773358 - DNA, 50 bp, Homo sapiens
gaaagccaaacgaggagaggaattatgctaatactggagaccgtggacag

SEQ ID NO: 773359 - DNA, 50 bp, Homo sapiens
aacagatctttgactgggtagagggaattgacataggggatagcttaact

SEQ ID NO: 773360 - DNA, 48 bp, Homo sapiens
tcagcgattcacatgtagctttcaggatggagtctcgccctgtcaccc

SEQ ID NO: 773361 - DNA, 96 bp, Homo sapiens
atgggactggaggacgagcaaaagatgcttaccgaatccggagatcctgaggagagtgtgacatgttggcgagccaagtttatggaggcctttttt

SEQ ID NO: 773362 - DNA, 100 bp, Homo sapiens
agcaaagaaggcatctattgaaataagaccaaccagcaggaagattctaaaccgtattcaagaaaggaaatggaggcacgacttgcagcgttgcagggca

SEQ ID NO: 773363 - DNA, 75 bp, Homo sapiens
agctcagggctcccactgattgtacattatggaaactcgaactatctaccagtttcattacaagaattggccaga

SEQ ID NO: 773364 - DNA, 100 bp, Homo sapiens
ccaggaggaggttttcaggaccaaaattgtggaaaagtcactctgattctgaaggaagatttccattaggtaatttgtttaatcagtgcaagcgaaatta

SEQ ID NO: 773365 - DNA, 100 bp, Homo sapiens
tgctaatgctcgacgagaagtcaagaactatcttcataaacaagcagatatgcaagaagagaaaaaccgaatcgaaagagtccttggcgctactcttttg

SEQ ID NO: 773366 - DNA, 100 bp, Homo sapiens
catttgtttgtgaaactgccacttcaacggagtttaagagagctgtgaaagtagcaacaggacaagaactctcaaacaatattttggacactgtctttaa

SEQ ID NO: 773367 - DNA, 100 bp, Homo sapiens
cagtactaagaaaagcaagagaaaaggtacagatgattttgactttgctggctcatttcaaggctaactatatgtcagaaagcatcagcttttctcgatg

SEQ ID NO: 773368 - DNA, 50 bp, Homo sapiens
ctctgttccaaatgctttgctgtgagcaagaagaacccatcaggtgattg

SEQ ID NO: 773369 - DNA, 50 bp, Homo sapiens
tggtggaggctccgcactagatctagtcacggagctgctggacgtctcca

SEQ ID NO: 773370 - DNA, 50 bp, Homo sapiens
gttgccggaagttgagcggcgatcaagatcatctggataaagaaatagaa

SEQ ID NO: 773371 - DNA, 100 bp, Homo sapiens
cagggcgcagcagtactttgagaaaatggacgctgacatcaatgtcacaaaagcggatgttgaaaagattgctgctaaaattgattcaattcctcacttg

SEQ ID NO: 773372 - DNA, 100 bp, Homo sapiens
gatccttcggcctggtggatgtctttttctgaaggagccagtagagacagctgtagaatgtccagaggaggtttatgaccctcgatctctatatgaaagg

SEQ ID NO: 773373 - DNA, 100 bp, Homo sapiens
ccggggtttaagggccaggaaaggaagcattcagggaatttaggtgtagccagaagaaaatcagacccatcctcatgccaacaaactacccttgaaggat

SEQ ID NO: 773374 - DNA, 83 bp, Homo sapiens
ccgcccccagatcggccagtccgagcgtgccggacacagccagtttggtgccctggttgtcagatgttggaaagcagtaggac

SEQ ID NO: 773375 - DNA, 100 bp, Homo sapiens
aaagatgcccattttccaccaccaagcaagcagttgacggactggacaaagcttctatagcaaactcagatggccccacagcaggttcccaaacacctcc

SEQ ID NO: 773376 - DNA, 100 bp, Homo sapiens
cttcgaaggagggctctcctgtctgccaccatcctgggttgacaattctacacaaggagggagagataccaatgtactggtatatattaaaagaagattg

SEQ ID NO: 773377 - DNA, 105 bp, Homo sapiens
tagcaccccgagaaccgtcagtttgagccagatgtattggtaaaggttttcaaggtgtcatgaaaagatggggatttaaaggccagcctgctacgcatggtcaaa

SEQ ID NO: 773378 - DNA, 110 bp, Homo sapiens
ctctcagccactccctagcactcacagggagaggagcggaagaccttctggtgtgggctgggcagcaattcacttgaaggagaaacagccccggtgtggagaggcggcca

SEQ ID NO: 773379 - DNA, 93 bp, Homo sapiens
cagcgatgctatgcaaaaggcgctgatactggaaggcttgaacaccccgccaccggcacggccaggccagcatggtggaccacttacttccag

SEQ ID NO: 773380 - DNA, 97 bp, Homo sapiens
tcctacagttactctagaattattagatggtcattagtaattatcagcactttagatgggagaattgctgccttggatcctgaaaatcatggtaaaa

SEQ ID NO: 773381 - DNA, 90 bp, Homo sapiens
cttctctgttcgacatggcccaattcgagcggctagaatcttgcctgctccacagtttgcggaatggccaaagactatgacgggtcttcc

SEQ ID NO: 773382 - DNA, 100 bp, Homo sapiens
ctgccctggcgctgacaagggtccagcctccgatgttgaagaagaggatgaacttgaatctggagaccaagaggatgaggatgatgaaagtgaagatcct

SEQ ID NO: 773383 - DNA, 108 bp, Homo sapiens
tcctgtagagcagaaattgtattttgcacgaacatgcagttattgaagattaggatcaaggatagacaaggaaagatttgaagcactcttcaccatctatgatgacca

SEQ ID NO: 773384 - DNA, 89 bp, Homo sapiens
tactgcgagcagttttaccgcgacctccggaggccggcgtgacaggctctgtcactaaaatagtccaaggtttacactcgcacaccaac

SEQ ID NO: 773385 - DNA, 101 bp, Homo sapiens
gcgtgctggagctcttcgacccacccaaggtgtgcaactgaggaacatggctcaagaaactaatcacagccaagtgcctatgctttgttccactggctgtg

SEQ ID NO: 773386 - DNA, 90 bp, Homo sapiens
gttcttccaaagtcgcccaggcaccttctccatgcattgcaagctcaccagcgactggaaccagcaactctgtcagggattgtaggattt

SEQ ID NO: 773387 - DNA, 90 bp, Homo sapiens
ccagacaaatggaagtgttatgatgcccttcgaaaaatgatcaactattgaccatataggcagactgccagattcacttacagccccagc

SEQ ID NO: 773388 - DNA, 100 bp, Homo sapiens
gtgattgcccatacattgttcagttttatggtgcactcttcagagagaataactgaagtgaagtgatggactccgatttggagagtagtaagacgtgaaa

SEQ ID NO: 773389 - DNA, 49 bp, Homo sapiens
aaaagaaactgacaaaaacatttctgagactcaagtgggtgagttcctg

SEQ ID NO: 773390 - DNA, 100 bp, Homo sapiens
gcccagtaccagttcagcaagtgtctctactgtcagaccacacacagataacgaatccagaaaactctggagagcccttcagagcatacacaccacgtct

SEQ ID NO: 773391 - DNA, 73 bp, Homo sapiens
ggtgcagcttcaagcttaggaccacccaccatgcctatccagcatcaagctgtccagtcccgtgaaacgccca

SEQ ID NO: 773392 - DNA, 78 bp, Homo sapiens
gctgtgcttatagctacgtattatgttgaaggagtgcatcaacaggccatcgaggagggcacgctggaggagatcgaa

SEQ ID NO: 773393 - DNA, 101 bp, Homo sapiens
gccgctccgaggcctcgcgaccgccgagcctgcagcctgccccgcggccaacatgagcttcttgttgtattgggagagttgctgctacatctttaggaaat

SEQ ID NO: 773394 - DNA, 83 bp, Homo sapiens
gaagctctgaggcccggggcttccggaggtcgcggagatggaattggagcagagagaaggacccgggaaaaggagaagatgaa

SEQ ID NO: 773395 - DNA, 89 bp, Homo sapiens
gatccccaacggggaggccaacgtgaagaacgagcagctgatgcagctgtacagtgcgcgccagcggcggcggctgaaccggggcctgc

SEQ ID NO: 773396 - DNA, 100 bp, Homo sapiens
cctgttcctgcacctataacagtgccacctccacagggcaagtgtccagagaatggctgggatgaaagtacacttgaactctttttacatgaacttgcaa

SEQ ID NO: 773397 - DNA, 96 bp, Homo sapiens
ccttcgagagctaccgcgccagacaggtccccagtctatgtgaggatctcctgtcttctgttgaccagccactgaaaattgccagagacaaggtgg

SEQ ID NO: 773398 - DNA, 106 bp, Homo sapiens
tggcatccagaggctccagggacacagcccagccctgcctgatgtggctctgggaattcctgcagagaagagcaggggtggccaggagatagtgagcagctcccag

SEQ ID NO: 773399 - DNA, 90 bp, Homo sapiens
ggagtacccagaacatcttcccctggaagtgttagaagctgggattaaatctggacgctatatccagcacaagctccgggtggataaggc

SEQ ID NO: 773400 - DNA, 51 bp, Homo sapiens
ctgatgtcaatcttgagggctagggagcccatggccaagacagatgagggg

SEQ ID NO: 773401 - DNA, 75 bp, Homo sapiens
tggaattccactgagtggtaatggatgatgcagttcaaataactaagagaatggactctctctgattttgtttgg

SEQ ID NO: 773402 - DNA, 82 bp, Homo sapiens
gtgggcctggagcagctgcggcggctcggggtgctctactggaagattctcattcagattgtggatgcctcgtcagtcatca

SEQ ID NO: 773403 - DNA, 75 bp, Homo sapiens
ctagcaagaagatgctcctgctgctgctgctgctgctggtcccactctaatagctgaaacctttggacttcaaga

SEQ ID NO: 773404 - DNA, 75 bp, Homo sapiens
ctctgcttttggggacctgaccatcaagtctctggcggacattgaggaggagggagaggcgcacctccttctcca

SEQ ID NO: 773405 - DNA, 75 bp, Homo sapiens
caagtggccaggctgtgaagcagtgtgcgaagatttccaatcatttctaaatgctcatcatcactgtaggggacc

SEQ ID NO: 773406 - DNA, 98 bp, Homo sapiens
tcggattaaggaataatttatgaagctccgttgactaccgtggagagatcataatttggggttcaagattccagggtctcctatggacagaagtgcgg

SEQ ID NO: 773407 - DNA, 74 bp, Homo sapiens
cgacgacgacgaggaagaggaggtttctgagtgagatggaagattttcgaggtatagcagaagaatcatttcca

SEQ ID NO: 773408 - DNA, 98 bp, Homo sapiens
gaagcccctgcccccttatccaccacaaaatcctgggcttccccgacagctgcaaattcctccctggagatgctcctgaaggtcaaaccggaggagag

SEQ ID NO: 773409 - DNA, 82 bp, Homo sapiens
gccgctctagcggccgggactctgaactatggcgcgcgagcccagcattgacctgctgcaggccttcgtggagcactggaag

SEQ ID NO: 773410 - DNA, 118 bp, Homo sapiens
gtactcggggggcggctctgcgctggccgggggcgcgggcggcggcgccggcaggaaggtgtccctggccagtgtccttccacctgtccacaagcatggggaacatcttcgccaacct

SEQ ID NO: 773411 - DNA, 51 bp, Homo sapiens
catcagtgacagcaagtccattcagaagtgcctttcctgaagactatcttc

SEQ ID NO: 773412 - DNA, 90 bp, Homo sapiens
caagatggcggccaatgtgggatcgatgtttcaatattggaagcgctttgatttacagcagctgcagaaaagcaaactcaagttcctgcc

SEQ ID NO: 773413 - DNA, 149 bp, Homo sapiens
tgcacaacaaatttctcctgtacctatgggaagcctgtcacttttgactgtgcagtgaaaccatctgttacctgtgttgaaatggtgttcacactggccctgaatcaagggaacaccagttttcacatgctggcagaagcaatggccgg

SEQ ID NO: 773414 - DNA, 100 bp, Homo sapiens
gcgtcatgtctggagctgcagaggaggtggccactggagcagagttttacatggacggatggcaaattaaacagcagtaacttggtaattctgtctggcc

SEQ ID NO: 773415 - DNA, 100 bp, Homo sapiens
tgaaagagagtgctcaattcagagaagaaatcagaaggtggtggaggaagcaccaaggacggcatcagaattaatgtaactacactgaaagatgatgggg

SEQ ID NO: 773416 - DNA, 75 bp, Homo sapiens
cagcagcgcgggagagcggactcccctcgccaccgcccgagcccagcttataggctttatactgtggtgcctcgc

SEQ ID NO: 773417 - DNA, 51 bp, Homo sapiens
ggagactcctgaccctcagaatggggaattttatattacacggcattctaa

SEQ ID NO: 773418 - DNA, 82 bp, Homo sapiens
ggaagatcgcaccgcggacgcccgctgagcttggcgcacgggccgaccagaaggagatccggttggcagctaaaccgcgctg

SEQ ID NO: 773419 - DNA, 100 bp, Homo sapiens
tacctggatctcatcaaaaaggacaccagcaagctgttcaatgaggagtgacagcctcatcaagggtaagaaatgagcctagtcaccaagaactccaccc

SEQ ID NO: 773420 - DNA, 74 bp, Homo sapiens
ctccatgttggccatcagtggtcacctagacagcgacgatgatagggttgagtaaggagccaaataccttgcgg

SEQ ID NO: 773421 - DNA, 90 bp, Homo sapiens
cagcctctgcccagaaggaacgtgccggaaatggccagtgatgaactgagggagttgaggaatgccatgacccaggaggccatccgtgag

SEQ ID NO: 773422 - DNA, 98 bp, Homo sapiens
ttggagccaactagaggcagggtcatccttgcccttgtcctcccctttcatccctatgtggaaaacggagcactcactgtgggcctcgtgcgacagtg

SEQ ID NO: 773423 - DNA, 90 bp, Homo sapiens
cacttttgaagggaatttctgcccagatagtgtctgcagctttgggacagaaataacccagagccctggaacaaactgggtcccaatgat

SEQ ID NO: 773424 - DNA, 100 bp, Homo sapiens
tcagttcaagtgacaaacgtacctgtggtccctggatccagtgctactgctacaaataagaaaaggcgacggcggattgacagaagtatgattggagagc

SEQ ID NO: 773425 - DNA, 100 bp, Homo sapiens
ccctgaaccccaaggccaaccgcgagaagatgacccagagagcgtgggccagcccgaggaggcaagcccggaggagcagccagaggaggcgagtgctgag

SEQ ID NO: 773426 - DNA, 75 bp, Homo sapiens
aagatttttacctcattacttcaagggcgtgctcagtatctacaaagacccagttcctacaacagcagccagtac

SEQ ID NO: 773427 - DNA, 100 bp, Homo sapiens
gtggtttccttattggagcaagggaaagaaccctggctggggaaaagggaagtgaaaagagatctgttttcaggtgaaatgacaatggatgctctgttgg

SEQ ID NO: 773428 - DNA, 100 bp, Homo sapiens
aagacgaaaagtgggaaataacttgcaacgtctgttagagatggttgctacacatgttgggtctgtagagacacttggcatttcacctgaagaaaaattt

SEQ ID NO: 773429 - DNA, 88 bp, Homo sapiens
tcatggaatcccttgcatggctctcacttgaaatccatggcccaaaatgactctaccagtggagactctcttctgtgaagaagacgac

SEQ ID NO: 773430 - DNA, 100 bp, Homo sapiens
catggacgcctctgaggagccgctgccgccggtgatctacaccatggagaacaagcccatcgtcacctatcaatgtaaccactgtgcgggaatatctgcc

SEQ ID NO: 773431 - DNA, 90 bp, Homo sapiens
tactgccgcttcagttctcccggtgtggccacgagtcgggctgacaaacgggctcatcataatgcactggaacgaaaacgtagggaccac

SEQ ID NO: 773432 - DNA, 82 bp, Homo sapiens
ttcggcagtccacccaccgccgccgcctcccaggtctgtgcagacttttgcagacaaatcaaaacaagaagctctgaagaat

SEQ ID NO: 773433 - DNA, 75 bp, Homo sapiens
agaggatctgcaagtacccgctcctccttaaggttacaaaagtggatgaaaccagagggatcgcacatgtttatt

SEQ ID NO: 773434 - DNA, 90 bp, Homo sapiens
catggactcatcttcatggaaacgtctgctaagactgcttccaatgtagaagagcaattctgtggtgttcttggtcacacatttatggag

SEQ ID NO: 773435 - DNA, 75 bp, Homo sapiens
ggatggggtattcttgaaccaggtcatgctccaaattatcgtcagtgaagcaggagcatcaatctacagtgtcag

SEQ ID NO: 773436 - DNA, 75 bp, Homo sapiens
gccctgactgagctgctggctaagatcaccaacacagacgtggacaaggagtagatgaacctctttcagaaactg

SEQ ID NO: 773437 - DNA, 75 bp, Homo sapiens
agttctccaggggagccgactggattccaaaaggatgaagcctgctgggagcgtgaatgacatggccctggatgc

SEQ ID NO: 773438 - DNA, 50 bp, Homo sapiens
gaggaagaggcccaacggggtgaggcattagatgaatttgcaaccaagct

SEQ ID NO: 773439 - DNA, 50 bp, Homo sapiens
tgaggactgccagctggcgctgcaggctggtgcagacatctccatgattg

SEQ ID NO: 773440 - DNA, 83 bp, Homo sapiens
cgatgatcgtgtgtcggatgaggagaaggcatcctgacatcgaggcccaggagagaggagtccggtgtctacttgagaaacag

SEQ ID NO: 773441 - DNA, 75 bp, Homo sapiens
ctggtgtgtatcctaaatatggaaggaagtgatggtggcctgcgttttggagaaatggaacgagattgtcagatt

SEQ ID NO: 773442 - DNA, 74 bp, Homo sapiens
tgctcacccgccgcggtggcatctgcaatctttatggggaatttgctgacccatttaaacttgcagagtgcaaa

SEQ ID NO: 773443 - DNA, 83 bp, Homo sapiens
gatacgcacaagccaaaacctttgggattgtggtatctgaacgggaactatttggttctgttggtgtcattggtggtcattct

SEQ ID NO: 773444 - DNA, 100 bp, Homo sapiens
ctgaatactccttccttcctccccacccattcctttaaatccggagggggaaaaaatcccaaggtctgcaaaggtttggtgcacctcgatttggaggaag

SEQ ID NO: 773445 - DNA, 80 bp, Homo sapiens
aaagaagacttgtgaatctgatacccttgaggctcttctactgacagcctctgaaagtggtggacttgctttgtgaagag

SEQ ID NO: 773446 - DNA, 90 bp, Homo sapiens
agcacacaaactccctgacagaatactgccaagatcttcccagacccgtcagattttgaccgctgctgcaaactgaaggaccgtctgccc

SEQ ID NO: 773447 - DNA, 90 bp, Homo sapiens
cctctccttttccctctccctttccctaagcaaagggttaccttccagttcaacatttaccttggaagaggggaccatctacttgaccgc

SEQ ID NO: 773448 - DNA, 74 bp, Homo sapiens
gcctcctgtgatgggccttcgcactcccaggtgtggacactgccagcggctgcagccgacttggaatgacctgg

SEQ ID NO: 773449 - DNA, 99 bp, Homo sapiens
acactatttatatcaacaacctcaatgagaagatcaagaaggatggagctcttgtccctggcaaagcgaaagcgcagtgactctgaggagaaggagccg

SEQ ID NO: 773450 - DNA, 100 bp, Homo sapiens
caagtctccgaacagagccacacgactcccgctggctcaatgttccagaaacgccgctggactgcgaggtctccctgtggtcgtcctggggactgtgcgg

SEQ ID NO: 773451 - DNA, 100 bp, Homo sapiens
ctttatgtctagcaagcacatctttgcactctttaatacagagcaaagatgacacccccaaccatggttgtgaagatgctagcgacacatcgctgttggg

SEQ ID NO: 773452 - DNA, 50 bp, Homo sapiens
agaagagggcagcagagtcacagctgcagacaaatttacatgtattggag

SEQ ID NO: 773453 - DNA, 100 bp, Homo sapiens
aaccgacgagaggacctcagctccaagataacgaaggaggcccaacttcattcaataaggagcctgacggatttatcccagacggtagaacaaaaggaag

SEQ ID NO: 773454 - DNA, 90 bp, Homo sapiens
catcttctacaaacccatttcagaccaatgccagaggagcaacagcgagggcggcactgctcacaggacggctacccatccgcaatggct

SEQ ID NO: 773455 - DNA, 80 bp, Homo sapiens
gtctctctgctgcggcgcggggaccgctgtgctctcggcaacgccctgctgcggcggctggtccgcattggggtgctgga

SEQ ID NO: 773456 - DNA, 97 bp, Homo sapiens
aaaaaggaagattggactatgctaagacaaatcttcctattttcaagctgaaagaatctactgttagaagaagatacagtgactttgaatggctgcg

SEQ ID NO: 773457 - DNA, 100 bp, Homo sapiens
cgggatctcaggtcctcgggggcggcggccacgccaaggacgggagtgaaagctggacattgaagaagccaaaatctgtttccaagaaactaaagagtgt

SEQ ID NO: 773458 - DNA, 75 bp, Homo sapiens
aagctgcccctgtgcgacagcctcatgatctgggagagattaaacagattctagaaaatgaacttcagatacctg

SEQ ID NO: 773459 - DNA, 98 bp, Homo sapiens
ttgagtcgggaaatggccgctgtgtggttgcaacggagataaattcccggaaccgcgattcggcgtgtcagtggtattggaaggaactggccctgggc

SEQ ID NO: 773460 - DNA, 95 bp, Homo sapiens
cctaagagacccaggggaagacccaaaggcagcaaaaacaagagtccctctaaagcagctcaaaagaccaagatcactccatggatgaaatgaca

SEQ ID NO: 773461 - DNA, 100 bp, Homo sapiens
aggagacggcggccttcgaggaggtcatgaaggacctgagcctgacgcgggccgcgcggcacagccatgacagtgcagatcctgctgaagctggaccgcc

SEQ ID NO: 773462 - DNA, 83 bp, Homo sapiens
tacatggataaaaataatgtgaggcgacaagcaacaacaatcatagctgctgaataccactagaaacatacctgtaaccagag

SEQ ID NO: 773463 - DNA, 83 bp, Homo sapiens
cgtgcacatccaggctggtcagtgtggcaaccagatcggtgccaaggtgagaagccctaccactgcaactgggacggctgcgg

SEQ ID NO: 773464 - DNA, 100 bp, Homo sapiens
gtgcatggcgaagtccccggagaactctaccctggaggagattctggggcagtatcaacggagtctccgggccttggtggaggaccagatgatgcaaaag

SEQ ID NO: 773465 - DNA, 90 bp, Homo sapiens
aggccgtgcccgccgtggcgccgcagacctccatccttaattgtgtaagtgactgcattggaactggatgtccagtgtgttacaccccgg

SEQ ID NO: 773466 - DNA, 96 bp, Homo sapiens
gagaaacccactgaagacgtctgcgtgagaatagagaccaccgaggtgagaagccctaccactgcaactgggacggctgcggctggaagtttgcgc

SEQ ID NO: 773467 - DNA, 50 bp, Homo sapiens
tcaccatgcaaactcccccacagcagaccaggtgataggtttgatcgaga

SEQ ID NO: 773468 - DNA, 75 bp, Homo sapiens
cttgtacagagatgtgatgttggagaactatagcaatctggttttcttgggtcccgatcacacagcaagaatcca

SEQ ID NO: 773469 - DNA, 83 bp, Homo sapiens
ctgggcgctccggtggcggcggagatcatggaagggaagtggttgctgtgtatgttactggtgcttggaactgctattgttga

SEQ ID NO: 773470 - DNA, 95 bp, Homo sapiens
aggaccctaacgacaggcgcctccggcccatttacggcagaagctcctcctggggtagagacagatcttattgatgttggattcacagatgatgt

SEQ ID NO: 773471 - DNA, 90 bp, Homo sapiens
caaacatttcagtaatgcagagtcctcttgttggagttacatctactcctggaacaggaactcttggtgtaataacagaagctacaataa

SEQ ID NO: 773472 - DNA, 83 bp, Homo sapiens
cgaggctctccctgcacagcatcgcgcagaacaaagggatcaggagccttcacgtaaatgggtccagtcatgcctcccagtaa

SEQ ID NO: 773473 - DNA, 90 bp, Homo sapiens
cacgactgcctgggacctggccaagggctccacacaccaagaccaagctgtcgcctggttgggcccggaaatgggacgtcgcgctttctc

SEQ ID NO: 773474 - DNA, 50 bp, Homo sapiens
gctttctgctgccgcccgcaagcagagattgcaggaggagatgcttcaga

SEQ ID NO: 773475 - DNA, 82 bp, Homo sapiens
tcggggacattattgcgcgtggaacggctgcttttggaaggagcaggccgggctctcgccatgggtcactgtcgcctctgcc

SEQ ID NO: 773476 - DNA, 83 bp, Homo sapiens
accgtttccttcatatgcatgagctgcaggaatgaatatgtttcgacagcaacaaaagattcttcaacaatctagaattgttc

SEQ ID NO: 773477 - DNA, 101 bp, Homo sapiens
caaaaagtgattaagcagagaatggagaagaaggttgattccagtgttctggacttggtgcctctttctgttatatgctttcctatttagttgggagacca

SEQ ID NO: 773478 - DNA, 75 bp, Homo sapiens
attgaggcctgtacctggaaaaccaccaggagttgaccctttgggtggacgtctgatttatgaagctccccatcc

SEQ ID NO: 773479 - DNA, 75 bp, Homo sapiens
cattgaacgggaaatcggcgccatccttcagaatgcaggattggcagccaccatttgcatgtgatgttgataaac

SEQ ID NO: 773480 - DNA, 83 bp, Homo sapiens
ccgagccaggccggagctgaggagaacgactgggttcgcctgcccagcaaatgcgaagaagatggcagtgaacgtatactcaa

SEQ ID NO: 773481 - DNA, 100 bp, Homo sapiens
ctcaggtggaagtgaatccctttggtgaaactccagaaggacaaggaaagatgaatgggagggctgattttcgagagccgaatgcagaggttccaagacc

SEQ ID NO: 773482 - DNA, 86 bp, Homo sapiens
ggaaactgggctgggtagagatcaacagcagttcaagctcatggtgataaacaagacaaagtcaagcagaaagcgtttgtggagcc

SEQ ID NO: 773483 - DNA, 97 bp, Homo sapiens
ggtggtgaggcaggctcgcctcctccagctgttgttgctgctggtccaaattaactgtgctacagatgacacacaacaagcttcttcaagaacataa

SEQ ID NO: 773484 - DNA, 82 bp, Homo sapiens
agaccttcgttgccctctgtgccacaggtcccaggtgtgacaccttcagcaggtctcagggaagatggcagccctaggggac

SEQ ID NO: 773485 - DNA, 74 bp, Homo sapiens
acacgtagaaagtgcaagcaaagttttcatggagtgataatgaaaggagcagcagccgcattaatatcccagag

SEQ ID NO: 773486 - DNA, 87 bp, Homo sapiens
agagcatttgtatgttatggtgaatgccaaatttgaagtcggaattgagatgggcgattggcaggaagtctgggatgagaacacggg

SEQ ID NO: 773487 - DNA, 98 bp, Homo sapiens
actatggcagcagcgtggcctccgccaccgtgcacatccgaatgggagtccatagaggccactgtattctattgaagaacatgtctaacagtaacact

SEQ ID NO: 773488 - DNA, 50 bp, Homo sapiens
tagacactcacatgttaacattatcaggaactgttgccgttattacatca

SEQ ID NO: 773489 - DNA, 74 bp, Homo sapiens
acttaagtcagcccacgggatttttagcccagcccatgaagacatagggcctgattacattccaacagaggaag

SEQ ID NO: 773490 - DNA, 76 bp, Homo sapiens
ctgaaaggaacaggccgaactgctgtatgggctctatgtctttggtggacttgggaaagaggttgctagaagcagc

SEQ ID NO: 773491 - DNA, 80 bp, Homo sapiens
aagaagaaatcacctagtacatttgcctgaaggtgccttatgcccgctcagaggcccacctcacagagctgctggaggag

SEQ ID NO: 773492 - DNA, 99 bp, Homo sapiens
actatttctaaagttctcctctccatctgctcacttcttacagattgcaaccctggacaaacagaggatgtgcagatgctcctgcgctttggggcagat

SEQ ID NO: 773493 - DNA, 101 bp, Homo sapiens
gtccaacaatgtgccgggttccgatttcagcatcggggcagacaccgccctgaacactatcaccgacgagcttctggaagaggtgaagaaggaattgcaga

SEQ ID NO: 773494 - DNA, 98 bp, Homo sapiens
ggtgacacatccccctgtgggactgaagaggactccagcccagcttcgcccatgcacgagcgggaaagaccacagcaagattctttcattcgtctcct

SEQ ID NO: 773495 - DNA, 101 bp, Homo sapiens
ggcttctggaactgaaccagatgagagccttcaaaagcagtgcaactggctcagtattcacagggaaagctgtgaggaatgagtgagatgatatttcgaag

SEQ ID NO: 773496 - DNA, 100 bp, Homo sapiens
attcgccaaaatgacgaacacaaagggaaagaggagaggcacccgatatatgttctctaggccttttagaaaacatgtatcctagaaggaaaacatcacc

SEQ ID NO: 773497 - DNA, 98 bp, Homo sapiens
gctctctgggccaatatggcagcgcccagcaacaagacagagctggcctggagtccgcggctggccgcgtgagtagagcagctggctgctgccaaggc

SEQ ID NO: 773498 - DNA, 82 bp, Homo sapiens
gtgctgatggaggtggaggtggaggcgaaagccaacggcgaggactgcctcaaccagatcaatgtccgagttaccaccatgg

SEQ ID NO: 773499 - DNA, 97 bp, Homo sapiens
aatttttctgtaaacacttctaagggcaatacagccaaaaatggtggcttgcttctggactcggagatcatgcagcagaagcagaaaaaggcaaacg

SEQ ID NO: 773500 - DNA, 75 bp, Homo sapiens
cgggaggctgctgtacgacatgggcataaggaaatggtggcaggcacttcctcctaacaagaaggaagtagttaa

SEQ ID NO: 773501 - DNA, 75 bp, Homo sapiens
ggacaagtacttcgacgaacactacgagtaccggtggaagatgcaatgctgatgtttgataaaactaccaacagg

SEQ ID NO: 773502 - DNA, 90 bp, Homo sapiens
cacagtggcttctgctcaccaacagatgaagacagatgcaccaacgagggttacattccgaaaagcaaatgggagatggacacatctgag

SEQ ID NO: 773503 - DNA, 75 bp, Homo sapiens
aggggcttcttccagagccaaggaggaagggttgtccgggaagaaggtagataatgactataatgcccttcgaga

SEQ ID NO: 773504 - DNA, 90 bp, Homo sapiens
caaagacaaatccagtaggaagaatgtgctggagattgatgactacagcatggttcgatttttaccttacgatcagtcagatgaagaaag

SEQ ID NO: 773505 - DNA, 51 bp, Homo sapiens
tggctccctgcagtaccctttaacgtaatctatgccagcaattatgacaat

SEQ ID NO: 773506 - DNA, 75 bp, Homo sapiens
ccgcaagtcccccccggagaaaaagttgaagcgttatacagagctttttgtacatgccttcaaggatcaacttgt

SEQ ID NO: 773507 - DNA, 100 bp, Homo sapiens
cgggcctcgctgaaggccaagctcctccgcagcccccaaatacatcaagatgtttgtactggatgaagctgacgaaatgttaagccgtggattcaaggac

SEQ ID NO: 773508 - DNA, 90 bp, Homo sapiens
cgtttcttgagacatcagtataacgctcaactcagcagacgcacacagcagatccaagaggagctggcacgaaggcagttccagtctcag

SEQ ID NO: 773509 - DNA, 74 bp, Homo sapiens
aaacaattcttcgacatactctccagcttcaagtaaagagaaatgtgtatgaccttacaagtatccccgttcgc

SEQ ID NO: 773510 - DNA, 90 bp, Homo sapiens
gaaaggactgttcttgaggtattcagggcaataaatgtgttcgtaagtgccaaccgactaattcatcaaaccaacttaatacttcagacc

SEQ ID NO: 773511 - DNA, 100 bp, Homo sapiens
tagccactttgcattgactggaaacaatggcatttacagaaagagtcaacagcagtggcaacagcatctctgcgccggatgtcatctaacagattccctg

SEQ ID NO: 773512 - DNA, 101 bp, Homo sapiens
ccgggatttgggtcgcagttcttgtttgtggatcgctgtgatcgtcacttgtcagagcaccataacatggtgtgggaagtgaagacaaatcagatgcctaa

SEQ ID NO: 773513 - DNA, 90 bp, Homo sapiens
ctgccccggcgcaccgactggaccgggaaggagcatcccaggacctaccagaatctggtttttcgttggaatatacgttgcacatttatg

SEQ ID NO: 773514 - DNA, 102 bp, Homo sapiens
ccatcatcacccaggcgcggagggaagacgccctggtgctcaccaagcaaggccctgagcctgtgcaattatttcgagagtcaaaatgtggatttccgaggc

SEQ ID NO: 773515 - DNA, 98 bp, Homo sapiens
gcctgcgaacagtggcagcgcgacctggccagctgccgcgactgggaggagcgccggaacgccgaggcccaggccgagacgcatccagagctttcgtg

SEQ ID NO: 773516 - DNA, 100 bp, Homo sapiens
ggctgcggttctctctcgaccccttctgcccggcgcttcggcccgggccgctcaggtgcagggtgaatcatttgatgtaaaagacttgactccataatct

SEQ ID NO: 773517 - DNA, 58 bp, Homo sapiens
cccagttaagctgcgctccgggagaaaatgctgaagtgaagtttaaagattttcttct

SEQ ID NO: 773518 - DNA, 82 bp, Homo sapiens
gaacgaggaggaaggagagaaaatggcgtccacggatatgatgcttcctggtgtgtttagtggttggtgccattccaatttt

SEQ ID NO: 773519 - DNA, 100 bp, Homo sapiens
atgaacaagaagagaatgtggtcaaaatacagacgggtctcacggccaaggaactggaggccctggatgaggtcttcaccaaagtgtacaaagccaaata

SEQ ID NO: 773520 - DNA, 75 bp, Homo sapiens
gctgagggaaaagcgaggcaaggcaggcggccccagtggaccacctgcatttgccgcccacccctccgagcagtc

SEQ ID NO: 773521 - DNA, 75 bp, Homo sapiens
cggcgaactggaacccactcggggactctgccttttaccgatgttaactcattccagcaaactacaaagtggatt

SEQ ID NO: 773522 - DNA, 100 bp, Homo sapiens
aagtcctcgctggactgctcagggtgccagacctcatcgatgtcactgattttatcagtcatttgttcatgcagctgggaactgtggggatatatgattt

SEQ ID NO: 773523 - DNA, 101 bp, Homo sapiens
gttggccattggcatctgcaacctgctcctttacttcgccttctacatcatcatgaagctcgccctcccctacctgcggaagagtcaagggaatgtcatca

SEQ ID NO: 773524 - DNA, 90 bp, Homo sapiens
cccccgccctctctgtttctccccaaaataaccattctccagatccagggcgatgccagtccctccactccagaggagaacgaaaccacg

SEQ ID NO: 773525 - DNA, 100 bp, Homo sapiens
gagcctgtgggaagtctccatggtgaagtataggctgaggctacctgtgaacagtacgcagtgaatgtttctttctctaatacacagaattctaggaagg

SEQ ID NO: 773526 - DNA, 53 bp, Homo sapiens
ggattccaagtaactcttatttgtgctctggaactgaacccgcagtatcttcc

SEQ ID NO: 773527 - DNA, 50 bp, Homo sapiens
gagcggctcatgaagaacccggagcagtcgaactgtcccggcgccacccc

SEQ ID NO: 773528 - DNA, 75 bp, Homo sapiens
tactttccatttgccttcctgggtaggcgaaaaccaagagtacatcggcctcgttctcctatattggaagaaaaa

SEQ ID NO: 773529 - DNA, 105 bp, Homo sapiens
tttcccgcctgagcgcaactagcggcgggtcgtgggcacctccaggtcagcccaaggccaaccccactgtcactctgttcccgccctcctctgaggagctccaag

SEQ ID NO: 773530 - DNA, 83 bp, Homo sapiens
cttcggccttgcccgcatctatagtttccagatggctctaacctcagtggagggaaaacccctgatcctaaaatgaatgctag

SEQ ID NO: 773531 - DNA, 98 bp, Homo sapiens
gaattcctgtgccgaagaggcctgcagtgggagagcaggtaagactttgaccccgacgcaggcttcagtgattgccgcggatcagaagcctgagcact

SEQ ID NO: 773532 - DNA, 108 bp, Homo sapiens
ctcttttaggggattctgcaccaacactgcacttaaataagggcacacctagtcagagttggactcttcatcgacactgtgaccacaccactgcactccagcctgagc

SEQ ID NO: 773533 - DNA, 82 bp, Homo sapiens
gcgcccggattggggatgagtatgcggaggacagctctgatgaggaggtccctggtgctgaaccgcctgcgtccagttgcca

SEQ ID NO: 773534 - DNA, 100 bp, Homo sapiens
agaggcaccgggatcgtgaccgagaccgtgaccgagagcgtgaccgagagcgcgaatatcgtcatcgttagaagaattgctggaatccacaaataccaaa

SEQ ID NO: 773535 - DNA, 100 bp, Homo sapiens
ccccatctctccctctccaggaagtccatgtaagcaaagaaaccatcgggaagatttcagctgccagcaaaagaagtggttacctggaaggaaaggagct

SEQ ID NO: 773536 - DNA, 100 bp, Homo sapiens
cagcaagcgtggcggcaagatcatcgtgggcgacgccacagagaaagtgtcttctgggactctcctactcattgcttgcctgtgcattgtggccaatggt

SEQ ID NO: 773537 - DNA, 97 bp, Homo sapiens
gccattcggtttttggttgggacgcagtctcttaaatatgataatcagatgagaactggactgatgaccaactgcttggttttaaaccatgcaatga

SEQ ID NO: 773538 - DNA, 100 bp, Homo sapiens
ctggacatcaaggctatctcgctatcgatgaggtgaaggtgttaggacatccatgtaccctggactttgtctcacaagatgaaatgttgacgcccctggg

SEQ ID NO: 773539 - DNA, 74 bp, Homo sapiens
ccactgcgtgaggctagcactcatccgcttccgggtcaaggcccacccttcctccattctgagcacataaaaac

SEQ ID NO: 773540 - DNA, 80 bp, Homo sapiens
cccaggccacagtaccctattcacgctctgtgcttgtgccaaggtgtctttcctgaagactatcttcccgtctcaaaatg

SEQ ID NO: 773541 - DNA, 50 bp, Homo sapiens
ctgggatcccggccaccagcaattgtccgatcacaaaatttgtccaggat

SEQ ID NO: 773542 - DNA, 100 bp, Homo sapiens
cgcgaatatcgtcatcgttagaagatctttcagcaaagagtgcctctgttccagacgaacttggtgcctgtggacattctagaacatcaagctatgcaag

SEQ ID NO: 773543 - DNA, 75 bp, Homo sapiens
gctgtgccaaatccttctgtgaaaacttcctcaaagctggcggtttgaggtggataatattaatgcagctgtgat

SEQ ID NO: 773544 - DNA, 75 bp, Homo sapiens
ttctccctgcctggacccctactattgcaacaaggtaaagagaaatgtgtatgaccttacaagtatccccgttcg

SEQ ID NO: 773545 - DNA, 100 bp, Homo sapiens
gccgctgaccaccctcaacacggatatcagcatcctgtccttgcaggagacggtggctcagggagtaaaggaaggccagttgagcaaacagaagtgttcc

SEQ ID NO: 773546 - DNA, 100 bp, Homo sapiens
cggctaccctggacagcgcatcgccgcccgcccgggtcgccgcgccacagccgctgcggatcatgtcttagagtttgaaagagtctatcttgataatctc

SEQ ID NO: 773547 - DNA, 83 bp, Homo sapiens
tgtggaggagcagcagtagtcggagggtgcagccagagagatgacacgggggaaattcctcaatattctagagaagcccaaga

SEQ ID NO: 773548 - DNA, 98 bp, Homo sapiens
gtcacctggaaaacacgtggcatgatcacacaacagacagtctgttctctggggaggcagtaaggggccgtggagctggcctcggcctcggcatcggg

SEQ ID NO: 773549 - DNA, 80 bp, Homo sapiens
gacacctggaccaaagttgacatccccagtccacctccgaggcgctgtgctcaccagacgcaaacatgcagatctttgtg

SEQ ID NO: 773550 - DNA, 75 bp, Homo sapiens
tgagccggatagacctattggatatggagcctttggtgttgtctggacccagatgatgtggtaccagttggccaa

SEQ ID NO: 773551 - DNA, 90 bp, Homo sapiens
gcaggcgcggtggttccccagcagaaccactctgcatcggagtcagtggatcggtggggaaaatgctgcttaccctgggccctgggctgt

SEQ ID NO: 773552 - DNA, 75 bp, Homo sapiens
taacaagggataaagtggagcggaccagatgatgtgcttctgcatcgcactcatgatgagattgtcctcctgcat

SEQ ID NO: 773553 - DNA, 96 bp, Homo sapiens
ccgccgagccacagccacgatgatcgcgggctcccttctcctggttatgtgggtatgcaatttatgtcgaaagcaacaagaaatcttaaccaaatc

SEQ ID NO: 773554 - DNA, 74 bp, Homo sapiens
gcgcagaaagcaggcgaacccgcggcgcaataacgaggactaccccaatggcacctggctgggcgacgagaaca

SEQ ID NO: 773555 - DNA, 100 bp, Homo sapiens
gatctcccacccgctagcagtggcgattcaggttgcctaagtactcttgccagttcattgagatgtgtctgatggtgacagctgatcacgggccagccgt

SEQ ID NO: 773556 - DNA, 100 bp, Homo sapiens
cctttgggtttagcacgatgagctcaatcggcactggggtgtaattacttcaagcctccaggatggcaatccagttccgttcgctcttccccttggcatt

SEQ ID NO: 773557 - DNA, 100 bp, Homo sapiens
ttgttccaacgttagtgtggacgatgctcttgcaggatgcctttccttttgggtcttagacagggcgtctctggccgagcctctttttgtggaaaacgac

SEQ ID NO: 773558 - DNA, 80 bp, Homo sapiens
agaggtggaagtccaagtcaaacgcagaaggactgcctcactgagcaaccaagaagtcatcctttttgaacttccatgac

SEQ ID NO: 773559 - DNA, 88 bp, Homo sapiens
agtgctggaggacttcgtggatggagaccacgtcatcctgcaccgacagtaaatggttcacggccgacatcatgtccataggggtgaa

SEQ ID NO: 773560 - DNA, 100 bp, Homo sapiens
tgcaagtgctttggattttaaaaaacacattgaagttcttcattacttactccaactctggccagagatggcagatcctgaggtagttgtgagtagctgc

SEQ ID NO: 773561 - DNA, 100 bp, Homo sapiens
gactttttgaatttcaagaacagtaaagttggaacacagcagagggtgtgtaataaaatacaggtggtggacataatgcgagttaacgtggacaaggttc

SEQ ID NO: 773562 - DNA, 75 bp, Homo sapiens
gcgagagtgaacgattcaacccgggggagctcagggtgaccatcgggatgaggaggaagagacccacatgaagaa

SEQ ID NO: 773563 - DNA, 90 bp, Homo sapiens
cgcagggaggatgtcgggacaccccggaagctgggaaatggtcgtccttggtggaaggaaccatgaactggcatctccccctcttcctct

SEQ ID NO: 773564 - DNA, 100 bp, Homo sapiens
agcggccgccgccgctgccgcttccaccacaggtggcatccctgagtcctgatgcctgactggatggaggcccaccagcttctgttcccatgaggtagaa

SEQ ID NO: 773565 - DNA, 50 bp, Homo sapiens
aaggtctctggagacatcttcagcaggcgaggcggctttgcacaaggtgg

SEQ ID NO: 773566 - DNA, 51 bp, Homo sapiens
attgaaaaaatggttgacctcacccaggcactgcaggaaaggaaaaggaaa

SEQ ID NO: 773567 - DNA, 83 bp, Homo sapiens
gggaggctctgcgcgtgccgcagctgacggggaaactgaggcacggagcggactgctttccagacacctccggcccacacagc

SEQ ID NO: 773568 - DNA, 90 bp, Homo sapiens
actcccagatgcatccgtgtcagtcggattgtttgtgctgaacgaactgtcctcttgcttcagaagccccttttgagtgtggtctctggt

SEQ ID NO: 773569 - DNA, 96 bp, Homo sapiens
atcaggagtgaagtcccagggatattctgtgctgaagatattgatgctgatggacagggattttgtcaaggaggattcagcattgattttactaaa

SEQ ID NO: 773570 - DNA, 90 bp, Homo sapiens
catggtgatataaaagcagcaaatctacttttgggttacaaaaatccagaccagagctggactggccattatggaggaggagctgcagca

SEQ ID NO: 773571 - DNA, 99 bp, Homo sapiens
agcccggccactgcggatccctgaaaccaagtgctggagaatctggtaaaagcaccattgtgaagcagatgaggatcctgcatgttaatgggtttaatg

SEQ ID NO: 773572 - DNA, 75 bp, Homo sapiens
caccagtccattattatagagcgaatgcattcaggacctgaagaagtattttgacagttgcaatggtgacctcga

SEQ ID NO: 773573 - DNA, 100 bp, Homo sapiens
ggtgctggcgagccgcagtgaggccaacgccgtgttcgacatcctggccgtgctgcagacagcacccaagaaaacctcatttggctcgctgaaggatgaa

SEQ ID NO: 773574 - DNA, 100 bp, Homo sapiens
tcccttgcagctgctccggcctgtgtaccaggaggataccatccccgaagcggggatctgatgagcttctttcttctggcatcattaacggaccttttac

SEQ ID NO: 773575 - DNA, 90 bp, Homo sapiens
ctcccacgtagctgggattacagatgaacaagagaactgggcaacccatgatccacatctacctggacaaggaaacaggaaagcccaaag

SEQ ID NO: 773576 - DNA, 100 bp, Homo sapiens
aattatacaccctacaagtacaacctgaagaatttcatggttatcaactcagtggcctttgaccatgcatttttacagagtcaagaggatcctatgaatt

SEQ ID NO: 773577 - DNA, 75 bp, Homo sapiens
caagaagacaaactgtatggtggagaaagaagtgggaaggatctgcgcggttcagcttcttaggactctgcactt

SEQ ID NO: 773578 - DNA, 83 bp, Homo sapiens
ccgaggcaccgaggcactcagaggaggatgagacctgcacgcagtggctcacagcagcacgatttgtgacagcccgaggcgga

SEQ ID NO: 773579 - DNA, 87 bp, Homo sapiens
ctcagaaccttggatagaagttaaaaaaagacatcagccagccccagtgaaattgagggcactcagaatggtccagcgtttgacata

SEQ ID NO: 773580 - DNA, 74 bp, Homo sapiens
cagccgcaacccctgctgcctgtgctggtgctgctgctgtagctgctcctgccaggaggaagaagaggaggatg

SEQ ID NO: 773581 - DNA, 100 bp, Homo sapiens
ggaaaaacagaatcagctgttccctgcgaaagaaaaggatgcgcctccacttagcaaggctgggcaggatgtggttctgcatctgcccacagacggggtg

SEQ ID NO: 773582 - DNA, 75 bp, Homo sapiens
ccccatcactgcttccctcagccataacagtttccttacgccgccccacctccccaagaacccgtgaagactctg

SEQ ID NO: 773583 - DNA, 82 bp, Homo sapiens
gtcggcttcaaagagaaaaggcaacatcctgtcacaggccatgctctggcaaaaacctgtttgcagacaaggtcccaaagac

SEQ ID NO: 773584 - DNA, 96 bp, Homo sapiens
gctgcttcgggacgcgctctctgcggctctgtgagcgcccctgagcgccggcagcggccgcggtgggttcttcagatgctggcatcaccatctaca

SEQ ID NO: 773585 - DNA, 73 bp, Homo sapiens
cctctgagctgttcctcccagctacgagctgccccagggcaagtgtccagagaatggctgggatgaaagtaca

SEQ ID NO: 773586 - DNA, 90 bp, Homo sapiens
atggcagatttgaaaattcacccttgtagagtcattcctgcctttgagcggactcccttttaagccctacctgaacccatccttccatcc

SEQ ID NO: 773587 - DNA, 98 bp, Homo sapiens
gaccatcggcgtggtccacctcgtcctgcgcaggcttctccaagagcagcaccagctctctagcagaattccagaaacgccgctggactgcgaggtct

SEQ ID NO: 773588 - DNA, 74 bp, Homo sapiens
agcgtggtgtggggcgtcttccgcaacgaggaccagttgacaggcgctgccctcgatgtggtcatgaaggaatg

SEQ ID NO: 773589 - DNA, 90 bp, Homo sapiens
tttggcagatggagaacctgatcgaacttcgttgcagaatgaagaagagtctggagaacctgaacaggctgcaggtgatgctcctccacc

SEQ ID NO: 773590 - DNA, 74 bp, Homo sapiens
cggcagactggtgacttcacttttgagtgcaactgccttccagaaagatgtgtcatggcaatgctgagaaggag

SEQ ID NO: 773591 - DNA, 100 bp, Homo sapiens
ctccttgtgcggcgctaggccccccgtcccggtcatggccatgctcagggtccagcccgaggcccaagccaaggattttgtgtggatgagggctcggcta

SEQ ID NO: 773592 - DNA, 100 bp, Homo sapiens
ggctggaggggctgctgctgggaacacctggagtctccgcgggcaggagaataaaggcagccccgttgatgactgaaaatgacaaagcatccacctaaca

SEQ ID NO: 773593 - DNA, 82 bp, Homo sapiens
ctggaggccattgaccccctgaatctgggcaacatctgcgtggcaactgtctgtaaggtttactcctggcttgggggcatta

SEQ ID NO: 773594 - DNA, 83 bp, Homo sapiens
cccccggcaccgcgcctgctgccgggttgcgctccgtgcacctcttgcgggaactgtggctgcaccatctgtcttcatcttcc

SEQ ID NO: 773595 - DNA, 96 bp, Homo sapiens
gcctaagctgcccctgtgcgacagcctcatgatctggcctacaacacagcagtcccctcaggatgagcaggaaaagctcttggatgaagccataca

SEQ ID NO: 773596 - DNA, 49 bp, Homo sapiens
gcacaagggcagtcaccatgaaagtggccataaaatgcagtaaaaacaa

SEQ ID NO: 773597 - DNA, 90 bp, Homo sapiens
cttagctgctcacatatggatactttcacagttcaggagcatctttccttgaagaagtacattattgacattgtggttgaaagtacagct

SEQ ID NO: 773598 - DNA, 88 bp, Homo sapiens
cggaagtgaattcggattgtttgctgtgcacaagggtctggatccctgaccctgatgaggtatggcgctcagctgagttaaccaagga

SEQ ID NO: 773599 - DNA, 100 bp, Homo sapiens
ggtgctccggggaggtcacctgacgaggaggatctatcttgggatcccatggctttctttactgggctctggggccccttcacctgtgtaagcagagtgc

SEQ ID NO: 773600 - DNA, 75 bp, Homo sapiens
ttgtatctgtgcaagaggatgctgggaaatctcctgctcgaaataggcattttgttcccaacatcacctttggtc

SEQ ID NO: 773601 - DNA, 100 bp, Homo sapiens
atgaacctgtacgccacctgggaggtggaccggagctcgtccagctgcgtgcctaggggaatttcagagtgcctgccccggttgacatgcatgatcagag

SEQ ID NO: 773602 - DNA, 95 bp, Homo sapiens
atctcccgccttagtggggcccaggctgacttacacattgaggatggagactccatccgcttcgggcgcttcagactcctaaaggggaactcccc

SEQ ID NO: 773603 - DNA, 100 bp, Homo sapiens
taagaaagtggtgaatcccctgtttgagaaaaggcctaagaattttggcattgaaatgagccgtcagactgctacagcattacctaccggtacctcgaag

SEQ ID NO: 773604 - DNA, 100 bp, Homo sapiens
gtagatattaaaccagacaagtgtcctaggagagtgaacagaaactacgcccgccgacagaaacatctgcaaagatacagtctgactcagtgggttgaca

SEQ ID NO: 773605 - DNA, 75 bp, Homo sapiens
gaggaggaggaggattcagggaataggagctggggagcccttctgcgccacagcagctgctgaaatgggttgcgg

SEQ ID NO: 773606 - DNA, 101 bp, Homo sapiens
gcacgagccaggaactgcgcagcctcttcgagcgccgcggacgcgtcatcgagtgtgacgtggtgaaagaagctggcagggcggagatgctggaccacgcc

SEQ ID NO: 773607 - DNA, 100 bp, Homo sapiens
gagcgtatgtgccacgccgcccaggagacccctctgctgcaccacttcatgccccagtgaccttgattcaccaacatccagcctgcgtcgcagcccatca

SEQ ID NO: 773608 - DNA, 100 bp, Homo sapiens
ccactccagaagtagcatggaaatggagggcatcttcaaccacaaaggcctccggtgtggctgtctctgatggtgtcatcaaggtgttcaacgacatgaa

SEQ ID NO: 773609 - DNA, 106 bp, Homo sapiens
cagttcatgacaatgactttgagccctaccttactggacagtcaaatcaggatgaagagactcggcacagccttgagtgcatccaggccaatcagatctttcccag

SEQ ID NO: 773610 - DNA, 101 bp, Homo sapiens
tcattcacaaccccctgaaagcgagtccccggcgtgcagtggagcctcgctgggggaaatgacagcttggaccatgggcgcccgcggtctggacaagcgag

SEQ ID NO: 773611 - DNA, 75 bp, Homo sapiens
ggagacactggcattggaacttcctgttctgatagcgtggaagggggccagtctttcttcagcaggaaggattcc

SEQ ID NO: 773612 - DNA, 75 bp, Homo sapiens
cacagatagtcgatttattccctatactgaggagttcagtgaaaaactagagcagaaggtgatttactacctctg

SEQ ID NO: 773613 - DNA, 101 bp, Homo sapiens
cgccagccgcaccatgccgctcctaagcctgcacagccgcggcggcagcagcagtgagaggctgttactgaggcggagacacgggtgatgattggctttct

SEQ ID NO: 773614 - DNA, 100 bp, Homo sapiens
ttgacactgccatatcactctgtcagacttttaagcttcccttaacgccagtctttgaagggcttgccttcaatctcttccagttgcgcctcttctcctt

SEQ ID NO: 773615 - DNA, 74 bp, Homo sapiens
cggaagcgctggagcttgagaggtcacaaggcacttaaagcattgttgaggtcattggtaggtcttcaggaaga

SEQ ID NO: 773616 - DNA, 145 bp, Homo sapiens
gtcgcgagctgctgatacagaagagatggatattgaaatggacagtggagatgaagcctaagaatatgatcagggactgctgagatgtcctctattcttgaagagcgtattcttggagctgatacctctgttgatcttgaagaaa

SEQ ID NO: 773617 - DNA, 90 bp, Homo sapiens
cctcggggagaagagaccccaagagtgttgagcagcccatcgtgcttaaagaagggtacatgtcccagagcaagcacacggaggcccggg

SEQ ID NO: 773618 - DNA, 75 bp, Homo sapiens
aggaagtaaccaaacaagaagacctcatgagagaggtgtgagatcaaccatgagttccgttgcagttttgaccca

SEQ ID NO: 773619 - DNA, 100 bp, Homo sapiens
aatgaccagtggctgagcaccgtctcccagtacgaccgggacaagtactggaaccgctttcgagacgcgtgcaatggaattgagttttgccctggtaaat

SEQ ID NO: 773620 - DNA, 101 bp, Homo sapiens
cgccgccactgccgcagccaggagatggttcgggcctagcggagccgggactggaggttccctggttgtgaaaatacatgagataaatcatgaaggccact

SEQ ID NO: 773621 - DNA, 100 bp, Homo sapiens
caggagatggtgtccgcctccgaatgggaacgtgatgttctcttcccggggtacacccatttgcagagggcccagcccatccgctggagccactggattc

SEQ ID NO: 773622 - DNA, 48 bp, Homo sapiens
ccagagggagctcatcacccgcaattaagttggaatatgcaaggttgg

SEQ ID NO: 773623 - DNA, 100 bp, Homo sapiens
cccggatgagtacgataccgaagcgggctgtgtgccccttctccacccagagttggcccgccacaataaactgttgcagcagatgctcaaaccaggatcg

SEQ ID NO: 773624 - DNA, 83 bp, Homo sapiens
cagcaacccatacctgatccggagaatcgaggagctcaacaaggcggacctacgtgggcgccatgcccgggaagatcatccag

SEQ ID NO: 773625 - DNA, 100 bp, Homo sapiens
cgcgaggcgagcgcgggagcctgggcggcgagccgggtgtgagctgcctgaaaatgcactcggatgccgccgctgtcagaataatcaagctgggaaggtg

SEQ ID NO: 773626 - DNA, 75 bp, Homo sapiens
tgtataaagatgtcatgatggagaattatggaaacctggtctcactgggactatggcaaggagtctcaggccaag

SEQ ID NO: 773627 - DNA, 100 bp, Homo sapiens
ccatcgagcggaatgcagagcggaccgccaccgccgggaggctgctgtacgacattgcgaaaatccaaagcagctgatgagaagagacgctccttggcta

SEQ ID NO: 773628 - DNA, 76 bp, Homo sapiens
aaatgctgttttggccatctataccatctatagccttttgtctgtgggaaaagcaggagacgcttcgatttttctg

SEQ ID NO: 773629 - DNA, 108 bp, Homo sapiens
ggagggttctgctgcttcgaaagctggtaaggcctgagctagttcttctggagctcaacttcttgccaaccacagggaccaagctgaccaaacagcagctaattctgg

SEQ ID NO: 773630 - DNA, 80 bp, Homo sapiens
cgggtttgccgccagaacacagcagaaaaatatggctcaggagactaaccagaccccggggcccatgctgtgtagcacag

SEQ ID NO: 773631 - DNA, 100 bp, Homo sapiens
tacctgtctggagcaaggaaaagagccctggaatatgaagagacatgagatggtagctaaacatttaggcctaccccaattatttactgggcaaaggaag

SEQ ID NO: 773632 - DNA, 101 bp, Homo sapiens
cgcgcagggtcgcgatgctgcccggtttggcactgctcctgctggccgcctggacggctcgggcgctggagtctgcctctgtgttccctggacaactccat

SEQ ID NO: 773633 - DNA, 50 bp, Homo sapiens
cagatatcctgtctcagatgaagaggtttttggattcaaagcataaaaac

SEQ ID NO: 773634 - DNA, 74 bp, Homo sapiens
gcagtggtcgcttcttctccttgtcgggtggtttcatggacatgtttgggatgatgaatgacatgattggaaac

SEQ ID NO: 773635 - DNA, 98 bp, Homo sapiens
ctcgtggctgcgtcaccgccgcccccccagacaagatggacaccgcggaggaagctggcctgctgctgtgggtctgcaggctgctctctctgctgtga

SEQ ID NO: 773636 - DNA, 75 bp, Homo sapiens
ctgccgtcatcaccatcaccttcaatccgctctactggaatgtggacgtggtgggtcctctggtgcgaaattccg

SEQ ID NO: 773637 - DNA, 98 bp, Homo sapiens
tcagagaacccctccgtctatgtgcctgggttcaacgtgaaccacctggacatagccccgcgctacgccagcatcctcatgggcatctccaacggcgt

SEQ ID NO: 773638 - DNA, 98 bp, Homo sapiens
cacttgaagaaaagggtgaaggaggcgaattttcagttgatagacctcggaatatacagaactggatgacagtaacttcgattggacttgtccaaata

SEQ ID NO: 773639 - DNA, 75 bp, Homo sapiens
aggattccaagtaactcttatttggaaagcaaaggctatgacttcgaatctgaaacagacacagagacaattgcc

SEQ ID NO: 773640 - DNA, 100 bp, Homo sapiens
gaggccaacaacccattccaggctgtgcaggaagagggaatctggaaaaattgcaatcaaaacatcatttctctaagaaaattttgggtaaccgaagttc

SEQ ID NO: 773641 - DNA, 83 bp, Homo sapiens
ctgagcccgtccgtccgccgccaccacccactccggacacaggtccggcctctttggcctacccccgttggctccgctgcccc

SEQ ID NO: 773642 - DNA, 90 bp, Homo sapiens
tgctgagaaatcactgatgggaagtgagacttgttaaacttgaaagtttcccccaggctcttaagaaaggctgcacgggtgaaaacgagg

SEQ ID NO: 773643 - DNA, 88 bp, Homo sapiens
gttgatgcaaatgggaagatatatcttccttatctacatgaatggaaacacgcattaagaagaaatgcactcaccatgagcaccaact

SEQ ID NO: 773644 - DNA, 100 bp, Homo sapiens
gactagcggcggcgggagcggcgccgagaggccgtgcgggacgcgggcgccaggaccggccgaacgcagaggggtcatgtctgcgtacgccatgtgtgtc

SEQ ID NO: 773645 - DNA, 100 bp, Homo sapiens
ccccattcaagttcaagttcacaattggcgcccctgagcctctgagctccttgaagtccatggcggaacgggcagccatcagctctggcattgaggaccc

SEQ ID NO: 773646 - DNA, 100 bp, Homo sapiens
cctgcctaattaccttcaaacctgcttgttctaaagacgaaggggaactccctagtgctacaggctgtttcaggaagccaattaattttgtacacataat

SEQ ID NO: 773647 - DNA, 82 bp, Homo sapiens
ttcaacccgcaccttgtgttccggaagttccaggcctctccatattgctgtggtgcagggtaacctgccagctgtgcaccgg

SEQ ID NO: 773648 - DNA, 101 bp, Homo sapiens
gacactttgggcatcgaatatggtgataaggagagaaagggagtttggccgctggaaagtaaataaccttgcagttgagagaagaaatttccttggctctc

SEQ ID NO: 773649 - DNA, 100 bp, Homo sapiens
gctagttcctctccagctcagccgcgaatcattaaccaatggcaacaggaatccaaggataaagtgatttccctcctgttaactcatctgcctttgctga

SEQ ID NO: 773650 - DNA, 73 bp, Homo sapiens
tcgcgccggctatggccgtgccctggggctgagccctcagctgggaggctgtggcgtgctgggtgtcggcatc

SEQ ID NO: 773651 - DNA, 90 bp, Homo sapiens
gccggaggtggcaattcaccgaattcgaatcaccctaacaagccgcaacgtaaaatccttggaaaaggaagctggtagttatgaaatgac

SEQ ID NO: 773652 - DNA, 137 bp, Homo sapiens
tgcaaattcgtgaagaatcagcatcatgtttggcagctgagtattggagccaggagcctgccatgagggggaagtccagccaagcagacgacctgggaaggagggcaccgggtcccagcactggcttactggcctgg

SEQ ID NO: 773653 - DNA, 100 bp, Homo sapiens
ttgaagggcttcacttccttaggaatggaagaagaaagaattgaaaccgcacagcagcctcgtcacgtgttcaatatgctaaagaagtatgtccgcgcag

SEQ ID NO: 773654 - DNA, 75 bp, Homo sapiens
gtcgtgctcaccctgcctccttcccgccgccccctgggtgccctgcaggagtcattaaatcaaaacttcatgctg

SEQ ID NO: 773655 - DNA, 100 bp, Homo sapiens
ctggaaattcctgacgttcattgatctggtcgtttatacgcaatgcagactggaatgaagatcgatagtaaaactcctgaatgtcgcaaatttttatcaa

SEQ ID NO: 773656 - DNA, 100 bp, Homo sapiens
ccccggaggagcacccagtgctgctgaccgaggcccccctgaaccccaaggccaacagagagaagatgactcaggtctgtacaacccaccctacagtgct

SEQ ID NO: 773657 - DNA, 95 bp, Homo sapiens
tagtaaccctgccaaatacatcagcttgtaggagacagaggacttggcagatgaacttgctcttgttgatgtcatcgaagacaaattgaagggag

SEQ ID NO: 773658 - DNA, 75 bp, Homo sapiens
gtcccttatggctcagaggagtacttgcagctgagatctaaggacaaggagactggctttcacagaggtttgggt

SEQ ID NO: 773659 - DNA, 97 bp, Homo sapiens
gaaccatggaccaggccctcaagtccctgatggcctcagaggaggaggacgagaagctcactgtgacccaggacctccctgtgaatgatggaaaacc

SEQ ID NO: 773660 - DNA, 100 bp, Homo sapiens
gaggagccgaggaagcagccagcaggtactaggttttgacaagcttgcatcatgcgtgagtataagctagtcgttcttggctcaggaggcgttggaaagt

SEQ ID NO: 773661 - DNA, 71 bp, Homo sapiens
cgcatcctatggctcaaagaaagatgattatgctctatcaaagaaagcaagagatggaaaattgttgcctg

SEQ ID NO: 773662 - DNA, 100 bp, Homo sapiens
catcttcctagagaagcgtttgcacaaggtgctgaaggtcgccatcctggctgagaagtacgcggtggactacacctggtatgtggataccatcttgaac

SEQ ID NO: 773663 - DNA, 82 bp, Homo sapiens
ccggtctatggactttccgaagacgaggttttaaaatcaaagatgggaaaatcggagaaaattgcccttccccatggccagc

SEQ ID NO: 773664 - DNA, 101 bp, Homo sapiens
ccagaacagcgccggcgcctcctccgaaacttctataccctggtcacctccacgcacttcccaccagaggccagtaatagtagccatgagtctcgtattgg

SEQ ID NO: 773665 - DNA, 100 bp, Homo sapiens
tccagcttgcctggttcctccagctggatccttccttaggactgatggagaagatcaaagagttgctgcctgactggacgactgggtttggattcagaag

SEQ ID NO: 773666 - DNA, 75 bp, Homo sapiens
atatcacagaggaaactctgcattctcgcttcctggaggtggtcgagatatccagtctgacggagcacttgctga

SEQ ID NO: 773667 - DNA, 75 bp, Homo sapiens
gagccagacccggagccggagcaggaggccccagcaggttcaggagaagtggcacctggtggaggacctgtcgcg

SEQ ID NO: 773668 - DNA, 101 bp, Homo sapiens
aagtgttctggtcctggtcgccacacctttttcgatgttaactcattccagcaaactacaaagtggattgatgatgtcagaacagaaagaggaagtgatgt

SEQ ID NO: 773669 - DNA, 98 bp, Homo sapiens
ccgcagtggcgtcctggagccctcctcagatagtcgtgcaagcactgcagtgttcccattattcgattctttggcagttggtgaaaattactgatggc

SEQ ID NO: 773670 - DNA, 100 bp, Homo sapiens
atgtgaataaaactgaccatagccagagaacagccctccatcttgcagcccagaaggttctaagctggtctatgtccatcaccttcttggagaaggagcc

SEQ ID NO: 773671 - DNA, 99 bp, Homo sapiens
atctcagtcctccagtgtttggatattcagagcaaaggcacaacaccacttgctccaccacctaaacctgttcgaagaagattaaaatcagaagatgaa

SEQ ID NO: 773672 - DNA, 100 bp, Homo sapiens
gcagaaaaggagcacagagagttcagagcaaaaactaacagggatcttgaaattaaagatcaggtatgtaaccactgaagtacacacacatgacatggag

SEQ ID NO: 773673 - DNA, 98 bp, Homo sapiens
aacagtgactttgaggaatcaggatcacctgctgttaccagctaccacccataacaagaccacaagaccaaaaatgtcaattgtgttaccagcaataa

SEQ ID NO: 773674 - DNA, 95 bp, Homo sapiens
tacgagctgtttctcatctttatactcttccagccaggcccagacatgtccgtccttgtaagttaaaagcttccatgggagccttccttcctaat

SEQ ID NO: 773675 - DNA, 100 bp, Homo sapiens
gttgcagaacagggccatctaccaccgcttttcggagactgggaagcccaactgcgaagaataatgaagctcattgctggaggtggcttgtctatcactg

SEQ ID NO: 773676 - DNA, 75 bp, Homo sapiens
tggcagctgcagagccagatgatccacaggatgctgtagtagcaaatcaggcagttatttggcagaaaagcagag

SEQ ID NO: 773677 - DNA, 100 bp, Homo sapiens
tcctgctgaagctcactcagattccctcattgatacctttcctgagtgtagtacggaaggcatttcagtagaaccatggaggagctggttcatgaccttg

SEQ ID NO: 773678 - DNA, 100 bp, Homo sapiens
agctcagaaccattagacacatcagtggagtccatgctacctgattgcccccgggtctcagcagtaaaccaagaggagttcattgctattatgactggtg

SEQ ID NO: 773679 - DNA, 96 bp, Homo sapiens
gaagctggtggaaaatgcagttagaacctgtcacctctcaggtgtcatggagaaactccagctgggcccagagattctgcagcgggaaaatccaag

SEQ ID NO: 773680 - DNA, 75 bp, Homo sapiens
cggtttggcactgctcctgctggccgcctggacggctcgggcgctggagctttaccgatttgttacaactcaagc

SEQ ID NO: 773681 - DNA, 100 bp, Homo sapiens
ccgagcgctactcgcaggaggtcttcgtctcggaagggtgctgacctggaccgggagaagaaggctgccgagtgcaaggtggacagcatcgggagcggcc

SEQ ID NO: 773682 - DNA, 82 bp, Homo sapiens
gattctggaccttcagctactatcagagcttctttgacgtggacacctcacaggctgaccccgcactacatctacccaccag

SEQ ID NO: 773683 - DNA, 96 bp, Homo sapiens
aaggagcccaacgggagtgcccacagcagtgggtccacgtcggagaagcccgaggagcaggatgcccaggcccctgtcctcctcccccaggagctc

SEQ ID NO: 773684 - DNA, 90 bp, Homo sapiens
tccctacgatgagaactggttctacacgcgagctgctcaagactgcagtgcagatgacgacaacttccttgtgcccatagcggtgggagc

SEQ ID NO: 773685 - DNA, 115 bp, Homo sapiens
tgtgggccctgaaaaacggagacttggatgaggtgaaagactatgtggccaagatcccttcccactggaggcatgtgatgagaggaaatcaccgaaaacgtggctgcttcaagga

SEQ ID NO: 773686 - DNA, 100 bp, Homo sapiens
gcggccccctggagggggcagtcccgggagaacctgcggcggccggagcggaagccattaatttgctagaaccaatgacaaacgaccccgtgaactacgt

SEQ ID NO: 773687 - DNA, 100 bp, Homo sapiens
atccatggaatggagacattaaagggggaaacgaagaagctagactcagatcaggtggatgggaagagagtcccaagggatgcagggcatcctctgtacc

SEQ ID NO: 773688 - DNA, 74 bp, Homo sapiens
tcgatgcccgattctttggacaacatgacaggttcttgattattacagacctctttctgaaaagcccggaattg

SEQ ID NO: 773689 - DNA, 76 bp, Homo sapiens
gttacaagaaggagccttccgggtgcccggtgtgtggcaaggttcgagaaatggctgctactaccttaagcggtct

SEQ ID NO: 773690 - DNA, 90 bp, Homo sapiens
agcccccacagctactccaacccaaacaacaaccaagccagtttaatgggtgaagttgaacaaattgctatgatgaaaccaaaaggccag

SEQ ID NO: 773691 - DNA, 100 bp, Homo sapiens
tacaccggaaaaaaacacttgtaccagccctctataaagttattcaagattcaaataatgaggtaacaaatgctgttttaaagctgattgaaaaggaaag

SEQ ID NO: 773692 - DNA, 75 bp, Homo sapiens
ttgttaaggattccaagtaactcttatttggttggcgtgcagtggtgtgatctcagctcattgcaacctctgcct

SEQ ID NO: 773693 - DNA, 83 bp, Homo sapiens
gccatttcgcctttatcgtggtggagtccaccctggctgtgtgcacgtgccggaaggacatggtcaagatctccatggacgtg

SEQ ID NO: 773694 - DNA, 96 bp, Homo sapiens
cgaatttaattcggcataaacttaaagagtgaatggagtgccatagaaaaagaaatgggtgatggactgcagagtgctggtcatcatatggatgtg

SEQ ID NO: 773695 - DNA, 75 bp, Homo sapiens
cgaggcgcttctgcatctgtgggccgaggcaaagaacagagcagttcaccatttgcattatatagaacgatatga

SEQ ID NO: 773696 - DNA, 100 bp, Homo sapiens
cgaaggacttcggcgcgggactcaagtacaactcccggcacgaggctactgcagcactggggtgtcagttgttggtccgacccagaacgcttcagttctg

SEQ ID NO: 773697 - DNA, 74 bp, Homo sapiens
tgctggaggttccttcactgtgcgtgctgaccatggatgaagctggaggcagattcgtcgctttctctggagaa

SEQ ID NO: 773698 - DNA, 75 bp, Homo sapiens
acgccccccttcacacacagtaaggatctttaccttatatagtaaatctctgcccctcgacctggcctgtcgtat

SEQ ID NO: 773699 - DNA, 100 bp, Homo sapiens
tacactgtgatacgactgactacctgcttttttaaaggctgcagaaaacttcactcttttggttaagaacaacatctggtatcccaaatttaatttcagc

SEQ ID NO: 773700 - DNA, 100 bp, Homo sapiens
cttgaaagagaagctcttcctgtgaggccggattcagaagccagccagagcccacaatacagcttcgagtcattacctcagaagatttgtttaatctgtg

SEQ ID NO: 773701 - DNA, 100 bp, Homo sapiens
cagttatgggctctgtcgccgtggcacttttcaggattagaagaggctgtgtatagaaacatacaagcttgcaaggagcttgcccaaaccactcgtacag

SEQ ID NO: 773702 - DNA, 100 bp, Homo sapiens
cgggagctggacgcgggaggaggcggcggcggcgtaatctatgccagcaattatgacaatgttagcagaccatgcagctcgtcagctgcttgatttcagc

SEQ ID NO: 773703 - DNA, 95 bp, Homo sapiens
ctgcctttgagcggactcccttttaagcctgagaaaaatgacagtgagccaggcagccagaggataaaacctgttttcattgaagatgctaattt

SEQ ID NO: 773704 - DNA, 75 bp, Homo sapiens
tgccgtccttctccactttcgccagcccgtgccgcgagcgcggcctgcaggagctgtttgcagacaaggtcccaa

SEQ ID NO: 773705 - DNA, 90 bp, Homo sapiens
cttgggactcctctctcaagagaagctgcaagagcaacatctttcctcaccccaaggtttggaatttcagctgggcagcttcgatcccac

SEQ ID NO: 773706 - DNA, 95 bp, Homo sapiens
cagaagcggcctgaccaaggcgcttgcctcacggacgctcgcgcctcaggtgctgatagtctgcagcacaggtttagctgggattatgctgctca

SEQ ID NO: 773707 - DNA, 83 bp, Homo sapiens
tattccaccgccttccagttgtaatgtacccagacagaaactaatctggattcactccctctggttgatacccactcaaaaag

SEQ ID NO: 773708 - DNA, 99 bp, Homo sapiens
cgcgctgctggctgccctgctggccgcgccgggagcggcgctggccccaaggcgctgccctgcgcaggtctttcccagggaactccgatgaagtgttcc

SEQ ID NO: 773709 - DNA, 118 bp, Homo sapiens
cagagattcgggttctgccgcttatcttcaggagcgaagagctgcttctgtatcttaaggttctggctccttggcagcaatggctgtatttgaagataagtttaggccagacatggag

SEQ ID NO: 773710 - DNA, 90 bp, Homo sapiens
cctgcacacaaggtcgtcctggctgcctgcagcgactacttcaggggcccatgaagaggttgactacactgaaaagctcaagttcagcga

SEQ ID NO: 773711 - DNA, 99 bp, Homo sapiens
atgtgggctgccatccagagctgggacataaactctcggagaaacatcaattacaggtcgtctgcatcaacaacataaatttccagagaaaatctgttg

SEQ ID NO: 773712 - DNA, 100 bp, Homo sapiens
atctgtggagcctcctggcatacccctttggtttgacatcactgtattcaagtcaaacaacgttgaaatggattgggtgttgaagcatactggtccaaat

SEQ ID NO: 773713 - DNA, 100 bp, Homo sapiens
ggagatggcggctcagaagataaacgaggggctggaacacctcgccaaagcagagaaatagagaaccaggtgcatcagcgcattgcggagctgaggaaag

SEQ ID NO: 773714 - DNA, 80 bp, Homo sapiens
gttgaattccactatgcaaggtatcagatgtagaaggtggtgatggactgcagctcagaaaggaacatactctcaaaata

SEQ ID NO: 773715 - DNA, 80 bp, Homo sapiens
cgaaagcggagagatgctgggcgtggcggccgggatgacccacagatcttagcaaagcaatgtctcaagatggtgcttct

SEQ ID NO: 773716 - DNA, 99 bp, Homo sapiens
gaagaagagcagagcagagcggaagacagtggccaagaacaaggaccagggcacctatgaggattatgtcgaaggacttcgggtgtttgacaaggaagg

SEQ ID NO: 773717 - DNA, 101 bp, Homo sapiens
ccttgaagaggaagacggggcggaagaccaagatcatcgagatgatggactagaggcttttaccagatttcttaaaactgaattcagtgaagaaaatattg

SEQ ID NO: 773718 - DNA, 98 bp, Homo sapiens
tgtggataacgggaggtgaatttccatgtcaacatagtcctgctccaggacacgcgcgccccgagcctgggaggcatgctgaagccaggcggccggca

SEQ ID NO: 773719 - DNA, 80 bp, Homo sapiens
tttgcttggaaaaacgtgtgggtacgaccttgctggagctctcaaacactgctgtcctgcaccagatgcggcgggaccag

SEQ ID NO: 773720 - DNA, 98 bp, Homo sapiens
tgggctcagctcacattctgggaggccagccaggacacgggtttctggtggaccgggatggacaagtgtaccagggctccttccatgacaacaagagg

SEQ ID NO: 773721 - DNA, 75 bp, Homo sapiens
aagtatgaagaaagccatggtggagtatgagatgtcagtattgaatatggtggtgaggcgtgaccctggcaacac

SEQ ID NO: 773722 - DNA, 50 bp, Homo sapiens
cggacatttagccgctcatcttcgctcgcaaaggatctccttcatccctc

SEQ ID NO: 773723 - DNA, 100 bp, Homo sapiens
gtgttagacatcgagatcaatgaacctttagatgaatttacaggaagaagatttcttagttgtctcttcaactggaatatcaacttcatcaaaatgatcc

SEQ ID NO: 773724 - DNA, 100 bp, Homo sapiens
atcgcgctcatcacgtacctcatggagcacaaacgcatcaatgggcccttcctcatcatcgtgcctctctcgggactcctctccaggtttctctaaggag

SEQ ID NO: 773725 - DNA, 48 bp, Homo sapiens
ctgtggaactccaggctatgtcgccttatttagtgtctctgacaaaac

SEQ ID NO: 773726 - DNA, 100 bp, Homo sapiens
ctcaccggcctcacactagtatcgcatgtccactatccagaacctccaatctttcggtgctggagaatctggtaaaagcaccattgtgaagcagatgagg

SEQ ID NO: 773727 - DNA, 75 bp, Homo sapiens
cctgaggatccagaaaccgccccagcgatggaagaggatcaggagctggagagcacttttgggagtgtggaagtc

SEQ ID NO: 773728 - DNA, 76 bp, Homo sapiens
ctggctgtcctgaaatattataaggctcattaacctcattgaaacaccataaagatgacatttcaattgtcaaaac

SEQ ID NO: 773729 - DNA, 100 bp, Homo sapiens
tactggtcccatagcagaaagctggtgttacacacagggtatatttacttctggcacatgggaagagaaatcagatgaaatttcctttgctgacttcaag

SEQ ID NO: 773730 - DNA, 98 bp, Homo sapiens
atgaagagatggtggattctcactgagttttgactagcggaagaaaagctgcccaaactccaaaatgatggtagagaattgaccaagaaaaataaaga

SEQ ID NO: 773731 - DNA, 90 bp, Homo sapiens
cggaggctggaggagccgccgagcggagacccgggagcaggagctgggcctaggtctgcgccctgggagttctgggaaatcgttcattca

SEQ ID NO: 773732 - DNA, 82 bp, Homo sapiens
gggcaccatggaggtgaatgcagcaaattgtggctactaatttgccccctgaagatcaagatggctctggggatgactctga

SEQ ID NO: 773733 - DNA, 100 bp, Homo sapiens
caggtcttcaagctgggcttggccaagtccatccaccacgctcgcgtgctgatccgccagcgccatatcaggcagaaccaccccagtgcacctccctggc

SEQ ID NO: 773734 - DNA, 100 bp, Homo sapiens
ctggtctctttcctgtggccagcccagcttcggaaccaaaaagaagcttcccagagccggggccaggagccccaagcgccctctagcagcaaacacagaa

SEQ ID NO: 773735 - DNA, 100 bp, Homo sapiens
cgggaattcagtactctgtaacacccagctaccaggatcaagtcttccataccagggaccaggccaaaaccagactgccactgcccctacttgggcccca

SEQ ID NO: 773736 - DNA, 50 bp, Homo sapiens
ccgtccccgctgctgtgcattggtgatgatgatgatgacaacgacagaac

SEQ ID NO: 773737 - DNA, 83 bp, Homo sapiens
gtacagaagaaaacctttaccaaatggataaatgctcgattttcaaaggtgttggagagcacaatggctgaacaagtccttcc

SEQ ID NO: 773738 - DNA, 76 bp, Homo sapiens
tctgcggaagtgcagctgcctcagttcttagcgcagaatgttggctaccagggtatttagcctagttggcaagcga

SEQ ID NO: 773739 - DNA, 83 bp, Homo sapiens
ggggaggccacagccacggacgccgaggccagagaagctgccgcggcgagtcctttgcacatgttggcaacacacgcatccgc

SEQ ID NO: 773740 - DNA, 75 bp, Homo sapiens
cgggacccggttccccggcccacagtgggggtgtgcaaacccgagagaactggcttcagctttagctgcagctgc

SEQ ID NO: 773741 - DNA, 51 bp, Homo sapiens
aagtcaattaccatcctttaccagggatattggtgctggaaaaggcaaata

SEQ ID NO: 773742 - DNA, 100 bp, Homo sapiens
gccatccgggaggcccagggaagttggttaccacagagaagcgcttcctcaaagacagtttgtacaatgaaggaatcctaattgtatgggacccatctgt

SEQ ID NO: 773743 - DNA, 74 bp, Homo sapiens
tatcctcggaagagcgctcccaggagaaacaagtacaactccaaaaggagacattggagaagaaccaagctggg

SEQ ID NO: 773744 - DNA, 50 bp, Homo sapiens
caggagacacaggtgtggaaacagaaaattccttgacatactccaagaat

SEQ ID NO: 773745 - DNA, 113 bp, Homo sapiens
ctcggatacgatagaaaatgtaaaggccaagatccaggataaggaagatgtctctgcccacccacgcaacccagactatgaagagtccggtgaaagcagcagtagtggaggct

SEQ ID NO: 773746 - DNA, 75 bp, Homo sapiens
gttttgatggatatatcttccttgacagcaaaggaatgggatggtctagtaaggataacctttgttaggaaaaac

SEQ ID NO: 773747 - DNA, 97 bp, Homo sapiens
gcaggacaagtggcaggctgtgctgcaggactgcatccggcactgcaacaatgtaacaaatgtggcaattattttggatctatcacctgtcatcata

SEQ ID NO: 773748 - DNA, 101 bp, Homo sapiens
ctaccgctggtgggcagaagtgcagcagaccccgaagctgtattcatcaccaaagaaaaaacttacaccaatgcagaaatcggttagtccattagtttggt

SEQ ID NO: 773749 - DNA, 75 bp, Homo sapiens
gtgacatctgggccggaccagctggtgctgcgcggcgcaggtcagcccaaggccaaccccactgtcactctgttc

SEQ ID NO: 773750 - DNA, 75 bp, Homo sapiens
gtatcggggcctttatttctcgtcggcggcgccctgcaccgcgcctcgcaaaattcctggtcgggtggcttccag

SEQ ID NO: 773751 - DNA, 75 bp, Homo sapiens
aggtgtggctcattgaggtcaacggtgcccctgcatgtgctcagagtttgaccactttctggccaccaagttctc

SEQ ID NO: 773752 - DNA, 100 bp, Homo sapiens
atcaaagataaatccaaatactgcatatcagaaacaacaggagttgatccctgaattttattatctccctgagatgtttgtcaacttcaataattataat

SEQ ID NO: 773753 - DNA, 83 bp, Homo sapiens
ccgtgtcccgaggaagtgcaagacccggtcattagtaattatcagcactttagatgggagaattgctgccttggatcctgaaa

SEQ ID NO: 773754 - DNA, 89 bp, Homo sapiens
cgtggacgcggcgagaaagcacggggtgaaactgaccacagtgctcaccacccaccaccactgaaacacagtggagcgaatgtatcgag

SEQ ID NO: 773755 - DNA, 83 bp, Homo sapiens
agaaccaaccctgccagcacctggaccttggacattcagacttcagaatgcggaaggcagacagattgctgccaacatgaggg

SEQ ID NO: 773756 - DNA, 90 bp, Homo sapiens
gaaaagagaaatggagcaaaaacattccaccattcaacaaaaggggaaaatggctttgttggcctcaaatagatgctttattagatacaa

SEQ ID NO: 773757 - DNA, 75 bp, Homo sapiens
agcctggtcaatttgtacctgcaggcctcctacacctacctctctctggacatggatttgattgacatactttgg

SEQ ID NO: 773758 - DNA, 90 bp, Homo sapiens
ctaagactcccggataccctgaagtcgggaaatgggaccatggctaaacctcctggatcattagccagaagcagcagcctgtgccgttca

SEQ ID NO: 773759 - DNA, 75 bp, Homo sapiens
ctgtagtgggcagagtaacatgcagatgactgtgttacagaattatatccagatcgagagacagaagattctgaa

SEQ ID NO: 773760 - DNA, 100 bp, Homo sapiens
tttgaatgcatcagaaccatgcacgatcgcctgataggcttgccagaggggcgtgctcgcaatcacaatcgaccgcaacaaatccctgtcctggctggag

SEQ ID NO: 773761 - DNA, 75 bp, Homo sapiens
aacctcccagagccctccgtgattgttggaatgttgagataagtcgaagagtgactctggaaaaactccctcctg

SEQ ID NO: 773762 - DNA, 75 bp, Homo sapiens
atgcctcaccaagtcacatgacaagcaatgagattgtggggaacctgggtgaaggcacctttggcaaggtggtgg

SEQ ID NO: 773763 - DNA, 82 bp, Homo sapiens
ccagaaaagaagcgaaggaagtcaaatactcagtttttcagaagaagtgaagtcaagatgaagaaccatttgcttttctggg

SEQ ID NO: 773764 - DNA, 100 bp, Homo sapiens
cagagttttgaaaatgaaactgatgagacgacaactattactttctatgaagacaaaaattttcaaggccgtcgctatgactgtgattgcgactgtgcag

SEQ ID NO: 773765 - DNA, 98 bp, Homo sapiens
tgggtcctcgacctgcagggagcagaggggacagaggcaccaaggacctccaagacagcaattaccagctctggctgggtcgccacaacttgtttgac

SEQ ID NO: 773766 - DNA, 75 bp, Homo sapiens
cagtcagtgcttttgagattgacaagatgtacacccccttgttcttcgccagagactccctggaggaaaagcgga

SEQ ID NO: 773767 - DNA, 82 bp, Homo sapiens
tctggctgtgcgcgctggcgctgagcctgcagccggccctgccgggaaatgatggcgggaacacagcaaaggagaccatgtc

SEQ ID NO: 773768 - DNA, 96 bp, Homo sapiens
ggagaaggaaattgtcccgaatccctgcaggaaagcggcgttatgacaggaagcagagtggctatggtgggcaaactaagccgattttccggaaaa

SEQ ID NO: 773769 - DNA, 50 bp, Homo sapiens
gggcagttgcagtgttggagctaaactgccgggccgcaagtacagccctg

SEQ ID NO: 773770 - DNA, 75 bp, Homo sapiens
cacaattactgatgggagcaagttgactaccaccagtggagtccaggatgaggttgtaaagctctctgaaatagt

SEQ ID NO: 773771 - DNA, 100 bp, Homo sapiens
agaaatgatcagtagcaccagtgtttatgacaagttggatggcttgaggactggtactaaaaggaaacgtgactgggaggccattgccagcagaatggag

SEQ ID NO: 773772 - DNA, 83 bp, Homo sapiens
ccactggaatctactgtgaacaagtccacagcctctgacatgcgatttgaagacacgttttatggagcagacattatccaagg

SEQ ID NO: 773773 - DNA, 100 bp, Homo sapiens
taggaatgcatgggatgcttatggaatgtgcgagaacacgggtgattgcatactcggaacatcgttaccgtatctttggggaaaccatcgatattgcagt

SEQ ID NO: 773774 - DNA, 75 bp, Homo sapiens
aacgaattaggtggtctgactaccagtggctctgcagaggttcaaaccttgtactactcagctgatcacaagctg

SEQ ID NO: 773775 - DNA, 80 bp, Homo sapiens
cagaccaggatggagataaaggaactcaaagaatttggacctcggaatatacagaactggatgacagtaacttcgattgg

SEQ ID NO: 773776 - DNA, 110 bp, Homo sapiens
caatgctgctgtgtgggaagaagatttgtaaagaaaactcttaggtgagcccgtggtagcagcagaagcaggcattatgggataacgattgtgtaaagaaacagcttctt

SEQ ID NO: 773777 - DNA, 98 bp, Homo sapiens
tagagtcattcctgcctttgagcggactcccttttaaggctgtgggtgagcgtggaggatgctcagatgcacaccgtcaccatctggctcacagtgcg

SEQ ID NO: 773778 - DNA, 100 bp, Homo sapiens
ggcaaaatggcggaccgcttctcccgcttcaacgaagaccgagactttcagacccctctgtgcccctggatccaatctcagtgtctaactcatcatccca

SEQ ID NO: 773779 - DNA, 100 bp, Homo sapiens
cctcagtctgacgacattgaagctagccgaatttccttccgcagaggtcacatcctgccaaccccacctgcgtgactcctcacggcaccgttctccacca

SEQ ID NO: 773780 - DNA, 99 bp, Homo sapiens
ccagaaacaaactcttcttttcaaccaaatggtatccatgtccatgggtgttttgaatgctgtatcaaatgcctggggggcattccctatgcctctctg

SEQ ID NO: 773781 - DNA, 128 bp, Homo sapiens
tcaagctgctgcaccgcggcgccgacatcaattacgccaatgtggacggactcactgccctgcaccagtttgcctgagaatacagatcaacccacagaacaaagcggatttccaaggcatctccccag

SEQ ID NO: 773782 - DNA, 100 bp, Homo sapiens
ctccacttggcccgtccatagagccaggacactcatgaggaccatgatacttccactgagaatacagacgagtccaaccatgaccctcagtttgagccaa

SEQ ID NO: 773783 - DNA, 75 bp, Homo sapiens
aggcggaagcaggaagaattgttacgcaaacaggaggagacatcacagctttcccagatcgggaggaaaaatatg

SEQ ID NO: 773784 - DNA, 90 bp, Homo sapiens
cggcgagcccttgggccgcgtctcctttgaggtaatgagagatccaaacaccaagcgctccaggggctttgggtttgtcacatatgccac

SEQ ID NO: 773785 - DNA, 100 bp, Homo sapiens
tgtgccacacaggtagccctggacggcattcagtgttttgtccacctggaaggccgctgtggtggaaggatgtttgactgcagagatgtggcattcactg

SEQ ID NO: 773786 - DNA, 101 bp, Homo sapiens
ggatagacggggacaatgaggaggagacggagcacgccaaaggacaatgcagatcttcgtgaagactctgactggtaagaccatcaccctcgaggttgagc

SEQ ID NO: 773787 - DNA, 100 bp, Homo sapiens
cttggctcccttgtatatttttctcaggaggcgtcacggtggggaacataggacgacagttagctatggaaagtaatggaccagtgaaggtgtggggaag

SEQ ID NO: 773788 - DNA, 75 bp, Homo sapiens
agcctgtccagtgctagttggcaacaaatggggtgaccaagaatatggcccaggtgaccaaagccctggacaagg

SEQ ID NO: 773789 - DNA, 100 bp, Homo sapiens
acgattccgctctgcggcgggtgtccctaaactagcagtttagggtgtcaggtcccttcaccgatgttgtcaccaccaacctaaagcttggcaacccgac

SEQ ID NO: 773790 - DNA, 82 bp, Homo sapiens
caatggaatcctgcatattggacatgccaaagccatcaatttcaactttggctatgccaagtgtactatgaggggctgcagg

SEQ ID NO: 773791 - DNA, 82 bp, Homo sapiens
ccgtggcttctatagcgtcgaaacgttcctcctgctgctggcacttaaggaactgtggctgcaccatctgtcttcatcttcc

SEQ ID NO: 773792 - DNA, 97 bp, Homo sapiens
gctgcacagacataccatggctgctgctcttcatcctcttctgcattgggatggatggtgatgggaatctttgcaaattgtatcttctgtttgaaag

SEQ ID NO: 773793 - DNA, 50 bp, Homo sapiens
gttgacttcaactatgctactaaagacataaatatttcttcaacccaccc

SEQ ID NO: 773794 - DNA, 97 bp, Homo sapiens
ggcggggtcagcattgcatcctggaatgcgctggacgtgttgactgttgaactctacccctcagacaagaggctggagtgcagtggtgcaatctcgg

SEQ ID NO: 773795 - DNA, 74 bp, Homo sapiens
caagacttcaaaacccattttcttggacacaactcagatgggaagttcatcgcccgggcacagcggatagagta

SEQ ID NO: 773796 - DNA, 82 bp, Homo sapiens
tcgtgatccagaagtccagagctgagaaggactgcctgtttgcagtgtactaatggtcacttgatgtgcgctggctgtttta

SEQ ID NO: 773797 - DNA, 100 bp, Homo sapiens
agtcttcccgcgtccgccgattcctcctccttggtcgccgcgtccttggctggcgtatgcgctggctccctccctccgaggctacttctcagggctggaa

SEQ ID NO: 773798 - DNA, 73 bp, Homo sapiens
cagcaggcggggaagatgaaaggggaccctccattttccatatccaggaaaatgtgatgcgccacaggtatca

SEQ ID NO: 773799 - DNA, 100 bp, Homo sapiens
gccgggcggccgggcgcggcgagcccagggtttggaaatcccttgtctccaggttgctgggattgacttcttgctcaattgaaacactcattcaatggag

SEQ ID NO: 773800 - DNA, 90 bp, Homo sapiens
gtaattgaaacatcttttgctgcaggttatgattggaacagtatgagttctgctacaaggtggtgcaggagtatattgatgcattctcag

SEQ ID NO: 773801 - DNA, 100 bp, Homo sapiens
cgcagccggagccggtgccgcagctgcgatggccgtggccgtggggagaccgtctactaatagggatgccaaaggaaaaatatgatcctccagatcctcg

SEQ ID NO: 773802 - DNA, 100 bp, Homo sapiens
cctcgacctgcggctctatgacacggagatggcagttgaattcctgcatgaactgaatgttccatttttcaaagttggatctggagacactaataatttt

SEQ ID NO: 773803 - DNA, 101 bp, Homo sapiens
aaaaagtgattaagcagagaatggagaagaaggttgattccagcttggtgatccagctatttttcctgccgtaattgtggaacatgttcctggtgctgata

SEQ ID NO: 773804 - DNA, 96 bp, Homo sapiens
catttcctgtaattgaaaccaaaatgtcatttatagatccttaccagcacattatagtggtatggtcaggaaaaagactacaatgtactagtcatg

SEQ ID NO: 773805 - DNA, 75 bp, Homo sapiens
gcgacgtggctattgtgaaggagggttggctgcacaaacgagatggcccactgcgtgaccttggttcagctgtcc

SEQ ID NO: 773806 - DNA, 95 bp, Homo sapiens
gttcgtgtcgctgctgcaggaggccaaggacggcgttctggatctcaaagcggtttggcatagaaatggtaccccttgttcaaaatgaacaagaa

SEQ ID NO: 773807 - DNA, 75 bp, Homo sapiens
gccaactccaatgggcctttccagcccgtggtccttctccatattcgagggtcaaagactctaaatggaggatct

SEQ ID NO: 773808 - DNA, 101 bp, Homo sapiens
agggagggtcaaagtcatcactggacccaactcatcagggaagagcatatacctcaaacagcttctccaaacaggctggtgtacagggagcaacaccggag

SEQ ID NO: 773809 - DNA, 100 bp, Homo sapiens
gcaagtagaaaaggagttgttgagagtagcactaaattctgtccaacgtttaataaatcaatggaggaacagggtaaatgaactgaaaagtctaaatata

SEQ ID NO: 773810 - DNA, 75 bp, Homo sapiens
gagggccggttgccgggcgcgggcgagaaagccatcatcgtctacagactgccgtggacctggaaatgcagcaag

SEQ ID NO: 773811 - DNA, 75 bp, Homo sapiens
gaactggcacagaccaaactccagctggtggaggccgagtgtaagatacagctctacgtctcctccgagagccgc

SEQ ID NO: 773812 - DNA, 98 bp, Homo sapiens
tccatcatagtcaactgcgtggaagagaagatttcagagacaactgtctgaaccctgccaccccttccctcctcagccaggagttcctggagataatc

SEQ ID NO: 773813 - DNA, 75 bp, Homo sapiens
gtggaggtggccgtggaggcagaggtggcatgggagaagaagaagttggatgggataccgagattaaggatgatg

SEQ ID NO: 773814 - DNA, 90 bp, Homo sapiens
ggtcacttcatgcctgtcctgggatttggcacctatgcgcctgcagagccggcgcgacctggagattgagcgaccaatgccgggaaccca

SEQ ID NO: 773815 - DNA, 100 bp, Homo sapiens
tgaaacagagaaagataggcggccatggtccaaccttgaaggtgaaagaaaatggcccgaaccaagcagactgctcgtaagtccaccggtgggaaagccc

SEQ ID NO: 773816 - DNA, 100 bp, Homo sapiens
agaagattatgacagattacgccccctatcctatccgcaaacaatgtggtggtacagtgggagctattctgacatgtccactggaagttgtaaaaacacg

SEQ ID NO: 773817 - DNA, 98 bp, Homo sapiens
cgaaggagatcagcaggacgctgcgcacaacatgggcaaccacctgccgctcctgcctgccgggtcccaatgataagaagtcagaactgctgccagct

SEQ ID NO: 773818 - DNA, 75 bp, Homo sapiens
tcaacgatacctattttctagtgctgagatcctgagacaatggtgtggtggacacaggcctattcatcaacatgg

SEQ ID NO: 773819 - DNA, 100 bp, Homo sapiens
gcaacatggcactgggcaagttccgggccgcgctgcgagactacgagacgtggaatgcagtagccctctgggcctgggatattgtggttgataactgtgc

SEQ ID NO: 773820 - DNA, 98 bp, Homo sapiens
ggccctggcagcgcgccacagcccgcgaagccaacgagtgcgtgggacgctgtgcagagctgcaagtccgtatcactgaggctgtggccacagccact

SEQ ID NO: 773821 - DNA, 75 bp, Homo sapiens
ctgggttttccttgttgctattataaaaggatttttagactctgaggagcagttggagctaatccacattatgga

SEQ ID NO: 773822 - DNA, 87 bp, Homo sapiens
ggtctgccatgccccagggagctcccagcaaaacctgtgataagtcctcttgaacttcggatggaagaattaaggcatcattttagg

SEQ ID NO: 773823 - DNA, 95 bp, Homo sapiens
agttcatgaggaactttcagaagggccaggtgacccgagacggcttcaagctttggaaacatgatgagcaaggagaagcgagaggctgtcagtaa

SEQ ID NO: 773824 - DNA, 50 bp, Homo sapiens
cctggctcagcaagactctcgagcccatatgcctgtgaggagccaccaac

SEQ ID NO: 773825 - DNA, 51 bp, Homo sapiens
gcaaagtgatcaatttcctaaaaggccccgcagggtggagcccgtctgctc

SEQ ID NO: 773826 - DNA, 100 bp, Homo sapiens
cgtggaacggctgcttttggaagggagtaagccctgaaccaattcatcttaagattttttcacccaacgttgtcaatttgacacttgtggatttgccagg

SEQ ID NO: 773827 - DNA, 98 bp, Homo sapiens
taagttggagcagggagaggagctgtggataacgggaggtgaatttccatgtcaacatagtcctggctcctggaatcccagctgcagtcacagaagag

SEQ ID NO: 773828 - DNA, 82 bp, Homo sapiens
tcacccagcatgttgcaaggtctcctgccagtcagtctcctcctctctgttgcagcccaccttgggacaccttgactccaag

SEQ ID NO: 773829 - DNA, 90 bp, Homo sapiens
aaccagagcagtacctcgtgtatactacgctatccctctgcctgtgagtttctggatattgtagagctgctgctccagtctggtgctgac

SEQ ID NO: 773830 - DNA, 98 bp, Homo sapiens
aagaaaaggaatgaagcatatggtgattctgctaaccctggtggcaattctagcttgcaagtagaagtctcaggcaacagattaaaccagcagtgact

SEQ ID NO: 773831 - DNA, 113 bp, Homo sapiens
ccggatgaaggagctggaggccgagctggccatggccttcagccgcgcccaccgcatcggccagaacaagaaggtgatgatctaccgcttcgtgactcgggcctcggtggagg

SEQ ID NO: 773832 - DNA, 98 bp, Homo sapiens
ttcagttgatattcaccctgacgggaccaagttcgcaactggaggacaaggacagaagtcggtcctaggccccccaggctctgaccttctttcccagg

SEQ ID NO: 773833 - DNA, 78 bp, Homo sapiens
agaaatcaaaataaaggaaacacatttcatatactgcaggaccgtcctccttctaatatttggaagaaaatagatcaa

SEQ ID NO: 773834 - DNA, 99 bp, Homo sapiens
ttgcaagttcttctacagccccagttatgtggacgagctgttaaaccaggtgagcctgaatttaaatacattgggaatatgcatgggaatgaggctgtt

SEQ ID NO: 773835 - DNA, 87 bp, Homo sapiens
taaggagccctgccgaggagctgaaggccttcagagtccttggggtgattgacaagggaggaaataatgctggccatacagttgttg

SEQ ID NO: 773836 - DNA, 100 bp, Homo sapiens
aacatgatgggcccactgacacagcagatgaatcacctttcgttgggcacaacaggaacgaatgccacccagaggatgtttgaaattgactatagccggg

SEQ ID NO: 773837 - DNA, 100 bp, Homo sapiens
tataatagcagccacttgcatgggccttacttctataacagcaattcacagaagctgtgagtccttcagtgctacccccttcagctttgccactggacct

SEQ ID NO: 773838 - DNA, 100 bp, Homo sapiens
aataccacaggatggagactacgagtttgctctgggcatcaccagcggccccagggaaaaagaaagaaatgggaaacagcatgaaatccacccctgcgcc

SEQ ID NO: 773839 - DNA, 100 bp, Homo sapiens
agtgtacaccaaatgtgaaggtgatgaggttgaagatctctatgagcttttgaaacttgttaagatttgggccaggcttagtcatctattggtatggatt

SEQ ID NO: 773840 - DNA, 90 bp, Homo sapiens
gcccgcccgcccgacggagacgaggaaagaatgttttggaatctgatgccttttaccaccagagacttctccattcggtccctagccgac

SEQ ID NO: 773841 - DNA, 90 bp, Homo sapiens
atcgtcgagaagcctatcatcgaaaaatccagttacactcttaaaggaattgtcagtgataaagtctcgatatcaaactttgtatgcccg

SEQ ID NO: 773842 - DNA, 89 bp, Homo sapiens
cgcagagcaccgggcagatccagtgcaaagtctttgactccttgctgaatctgagcaggggacttgatctcatcttcatgccaggcctt

SEQ ID NO: 773843 - DNA, 97 bp, Homo sapiens
ctgcttgggttgcggagccttctgcaggggaccagcaagcccaaagagccggccagctattcgtacatcagtgatcacactgttatttcccaaacga

SEQ ID NO: 773844 - DNA, 90 bp, Homo sapiens
ctcagctgacaacagctgtcgtctctgggactgtgaaacaggaagagagaagggcacagttacctaagtatcaacgtaatcttcctcggc

SEQ ID NO: 773845 - DNA, 129 bp, Homo sapiens
gagggagaaggacatcatcatcaagagggagatggtgtcccaatacttgtacacctccaaggcttctctgctggatgaaccgaatcctaacagtccagccaatagccaggcagcacagctttatcagga

SEQ ID NO: 773846 - DNA, 75 bp, Homo sapiens
ccagtacaccttggccagcactggatttccatggagctgtcatgagggccttggatgacatggaccatgaaggca

SEQ ID NO: 773847 - DNA, 100 bp, Homo sapiens
ctaaaagatgacagacttggacaacatgtcccaacattacatcccagcattgcggcctcatttgctgtcaagcttttcaaagcatggatggcagaaaaag

SEQ ID NO: 773848 - DNA, 83 bp, Homo sapiens
ccgggacccggtgtctgctcctgtcgccttcgcctcctaatccctagccactatggctgatcagctgaccgaagaacagattg

SEQ ID NO: 773849 - DNA, 128 bp, Homo sapiens
ggaaaagaagcttatccaacgccaaccaaagatttgcatcagccatctcttagtccagcaagtcctcatagccaggggctgctgaaattctttactatttcgccctgagacaagctcacaaatacaag

SEQ ID NO: 773850 - DNA, 75 bp, Homo sapiens
tccttggaaggaaagaaaatcaaagattctacagctgcaagcagcgacttgtttaagtatcactgcaatgctgac

SEQ ID NO: 773851 - DNA, 100 bp, Homo sapiens
ggatgaaaacctttgtgatgatccacttccacttaatgaatgatgtgctggtggacggacagccatgtgaccgcgaggctgtggcggcctgccaggtggg

SEQ ID NO: 773852 - DNA, 90 bp, Homo sapiens
acatcaagatatgatcagagatcttcttcgtttatctacaagttcatacagtcaggttgttttctgcatggaccgtgccctagaatttgc

SEQ ID NO: 773853 - DNA, 100 bp, Homo sapiens
cggcgacagtggcggcggcgccatggcagggcttgcagtgcaccgtccaggtgaggttagagctggggcatcgcgcccaactgcgcaagaagcccaccac

SEQ ID NO: 773854 - DNA, 75 bp, Homo sapiens
cgtcggcagctgctgctccgagctgctacaggagctgagagaccctaccctcactttccgtctgcttggctcccc

SEQ ID NO: 773855 - DNA, 83 bp, Homo sapiens
ctttggaaaagatggctatgaccttgtgaaggccataaagaatgctgatgggagaaccattttcctaattttcaaattgttga

SEQ ID NO: 773856 - DNA, 98 bp, Homo sapiens
tatgatgaactggaggctgagtacgacagcctcaaacaggagctggagcagctcaaagaggattgacatctttaagtatgtgatctacggcatcgcag

SEQ ID NO: 773857 - DNA, 109 bp, Homo sapiens
agccacagagagaaccaccagcattgccaccaccaccaccaccaccacagagtctgtggaagaggtggttcgagaatcagcatgattcttcagaggctcttcaggttct

SEQ ID NO: 773858 - DNA, 98 bp, Homo sapiens
gtgtatctggcacggtctcggattcaggaaattgacaatggcccttcagctatgctaggtctataatgggaagtgtcacagttcggtatttctgttat

SEQ ID NO: 773859 - DNA, 99 bp, Homo sapiens
gtgagctgcggaggctgcggcccccagcattccatattggaagaagagatttctacacatgaaaaaaatgcctttgtttagtaaatcacacaaaaatcc

SEQ ID NO: 773860 - DNA, 97 bp, Homo sapiens
ttatctatattttttgactgctctgctcctctatgctggacatcaaatttccagatgagtaacgaaagaggctttgaaaatgtagaactgggagtca

SEQ ID NO: 773861 - DNA, 100 bp, Homo sapiens
ctcctcccctagcttcactcaatgttagtaagactctgtttgctggctacacggacaacctggtgcgagtgtggcaggtgaccattggcacacgctagaa

SEQ ID NO: 773862 - DNA, 51 bp, Homo sapiens
atggagaacaagcagtggcgggagaaactgcttatcaataacagctgtagc

SEQ ID NO: 773863 - DNA, 51 bp, Homo sapiens
ggaagaacctcatcgctgcgacgaaaacaacttgagttggtggaaccaagt

SEQ ID NO: 773864 - DNA, 90 bp, Homo sapiens
atatctgaagcggctcccagtccctgaaagcattaccgggttcgctaggctcacaggttgcttttaactttgacagaggaagaattttcc

SEQ ID NO: 773865 - DNA, 98 bp, Homo sapiens
agcagttcaaccgcatgaagcagctggctaaccagaccgtgggcagtgttcggctaatgaatgagttcactaatatgccagtacctccaaaaccccga

SEQ ID NO: 773866 - DNA, 75 bp, Homo sapiens
ggccgcgcccgcggaaccagaccaggtgtggggtgcacactgaaaatgccacgctccttcctggtgaagagcaag

SEQ ID NO: 773867 - DNA, 100 bp, Homo sapiens
actaaatgtggcaattgtaaggccatcgattgttggtgccagttggaaagaaccttttccagtgaatcaggtctaggaaaatcgactctcataaacagcc

SEQ ID NO: 773868 - DNA, 100 bp, Homo sapiens
catgcgcccggccttggcggtgggcctggtgttcgcaggctgctgcagtaacgtgatcttcctagagctcctggcccgggttttggccaaattgggcgag

SEQ ID NO: 773869 - DNA, 100 bp, Homo sapiens
gcacttcgcattttggcattgacatttaattttagggtcctttatatagaagggagagtagatcccaagcaggtctgttccagcctctgattgtgtatcg

SEQ ID NO: 773870 - DNA, 75 bp, Homo sapiens
cgccatgaaagtggtgaagaaagagctggtgcatgatgacgagatctcacattcttgaaggtggcattgaagagc

SEQ ID NO: 773871 - DNA, 100 bp, Homo sapiens
ttctgcgaggccatggccaacgccgggaagaccgtaattgtggctgcactggatgggaccttccagaggaagccccaactggaccctaggcaaaagtgag

SEQ ID NO: 773872 - DNA, 83 bp, Homo sapiens
ctaacatgtcagcgttattgtaatgcaagaaaatcaggaaaatgtttccaacctggtgattgaggacacagagctgaaacagg

SEQ ID NO: 773873 - DNA, 75 bp, Homo sapiens
tggaggcagcggtgcacgtgcaggcgcattggagtgactgtctggcatcaccaagatgacactccacgccacccg

SEQ ID NO: 773874 - DNA, 90 bp, Homo sapiens
ctcggtctgggcttctctgaggcggcgagagatggtcaggtctggagctcgaccgggccagggcagcagaagaagcctttgtaaatgaca

SEQ ID NO: 773875 - DNA, 106 bp, Homo sapiens
catgctgctgccgttaatggagataagggtgctctacagaggctcatcgtaggtaacttgggtttttactcctgtaacaactgaaataacaagtcttgatacagag

SEQ ID NO: 773876 - DNA, 100 bp, Homo sapiens
cagcagcagaggaagaaacaagagagctacagtcgttagcggtaacagttgacaaatgggaacctttgttgaacaacttggggcatgtctgcagaaaact

SEQ ID NO: 773877 - DNA, 80 bp, Homo sapiens
cctgaagaccccagcctgacagatctccccttcctctgacctcctgtattgaatgccgggacattctgcttcctgtcatc

SEQ ID NO: 773878 - DNA, 75 bp, Homo sapiens
gatttgttaaggattccaagtaactcttatttggaaaatgttggggcttttcaggaagcataataagattcctag

SEQ ID NO: 773879 - DNA, 110 bp, Homo sapiens
gctccagcagctgggccaggagaaccctcagcttttacagattgagtttgtgacgggcaccaaaaaaggcaccacgaccaacgccacgtccaccaccactaccactgcca

SEQ ID NO: 773880 - DNA, 50 bp, Homo sapiens
cgaggctataactacgatgaagtatgactatgaatatgatgaaaatggtg

SEQ ID NO: 773881 - DNA, 74 bp, Homo sapiens
ggagaaactggacagcacagacttcaccggcaccatcaaacacacgtttaggaggcaaaacgtcagagaggagc

SEQ ID NO: 773882 - DNA, 46 bp, Homo sapiens
tgataattgggcctccaagattcttcctgtccaagatccggtccca

SEQ ID NO: 773883 - DNA, 74 bp, Homo sapiens
agagctgatcccgagcagcgtcatgtacccctatctctataaaaatggactccaaagagctaactttgtaccat

SEQ ID NO: 773884 - DNA, 83 bp, Homo sapiens
aaagcttttggacattcctggggcctccaggcccaaggtcagcatcccactgtcagccatcattgaggtccgcaccaccatgc

SEQ ID NO: 773885 - DNA, 90 bp, Homo sapiens
cagggagtgcatcaaaggtgtgaacacagatgaagctactaaacttatacataaagagggcccagaccaccaacagcaacagcagctcct

SEQ ID NO: 773886 - DNA, 110 bp, Homo sapiens
gcagtgcttgctgctttttctaactatttcaagatgatatttattcaccaaacaagagccagctctcccaggcgctgaacggactgtcagacagggccaaagaagccaag

SEQ ID NO: 773887 - DNA, 82 bp, Homo sapiens
ttttgcatctggtgtgcaatgtgaagagtccttcaaaaatgccagaaatcaacgccaagggaaatgatcttcattggttagc

SEQ ID NO: 773888 - DNA, 76 bp, Homo sapiens
ccagtacgagttgaatcattgttcaaataagggtgttagaacaccaaccttacagctctctgcgatgcaagaagga

SEQ ID NO: 773889 - DNA, 74 bp, Homo sapiens
agatactgaatgtaaaccctgcaggcagaagtcaattcatctggaaagactatctctgagtcagacttaaacca

SEQ ID NO: 773890 - DNA, 90 bp, Homo sapiens
atctctcctggcaaagactggacaagctgcagggaagaaggagaaagggccaacccctgaagaagcaatacagaaactgaaggagacaga

SEQ ID NO: 773891 - DNA, 95 bp, Homo sapiens
aaactgaacaagcccttcctgtttgacaccaagcctctcattgttcattaagtgggcagaccaacatccacctcagcaaaaacttcttcctgacg

SEQ ID NO: 773892 - DNA, 100 bp, Homo sapiens
ctggctgcacgctcggatatgggggtgggcgtcttcacccccaccattgaggcccgcacagcccagtccaactcctttctacgaaaccgttcaagttctg

SEQ ID NO: 773893 - DNA, 51 bp, Homo sapiens
cgggaaatccccattcccagcacagatgacatcatggattcatcccttacc

SEQ ID NO: 773894 - DNA, 83 bp, Homo sapiens
aggaagagtccggttctgggacagctggagacagtggtggtgactgatttattgctaaacatgggtgcatttttggataaacc

SEQ ID NO: 773895 - DNA, 100 bp, Homo sapiens
tccttatagttgcaatgagaaagacattgtagacttctttgcaggatgttgagaaagaactggagatgcagatcagcatgaggcaggagatggaattggc

SEQ ID NO: 773896 - DNA, 75 bp, Homo sapiens
caaactcctaggagggcttgctgtgcggaggccagaagaatgtttgaaggtgagatggcaagtttaactgccatc

SEQ ID NO: 773897 - DNA, 100 bp, Homo sapiens
gaagcatgggaaggaggccgagccgggatctcaggtcctcgggggcggcggccacgccaaggacggggacaggccttcagtatttggcatcacctttaca

SEQ ID NO: 773898 - DNA, 82 bp, Homo sapiens
gatcatgcatccaacgtcaagtacaccatgcacaaggtcttccagtttctgaacctagagttgcatgctgagaatttgaaaa

SEQ ID NO: 773899 - DNA, 100 bp, Homo sapiens
acgagcgggccctggctcaggaacagggacagcacctcatcccctggatgggggaccacaagatcctcatcgacagatggtagcatcgacaaggctccct

SEQ ID NO: 773900 - DNA, 98 bp, Homo sapiens
gctccgagcccggcgggaccatgttcaccagcaccggctccagtgggctctgtatgagaaagtgccagtcatcttggttgggaacaaagtggacctgg

SEQ ID NO: 773901 - DNA, 50 bp, Homo sapiens
gaaatgtccggcaagatcgagaaagcagcaatcatcctcttccagtggta

SEQ ID NO: 773902 - DNA, 100 bp, Homo sapiens
gcacgtgaggttgggccttggccgcctgagcccttgagttggtcacttgaaccttgggaatattgagctcctggtacagtttgttcagaatacgtccatc

SEQ ID NO: 773903 - DNA, 100 bp, Homo sapiens
agcaagtgcagatagatggccttgacactgccttaggaaaaccacgagaggtgtttcgacttcctacagatttgacagcatgtgacaaccgtctttgtgc

SEQ ID NO: 773904 - DNA, 101 bp, Homo sapiens
gacagtttggaccaagtggagattatcatggccatggaagacgaatttgcccaccttgggacaccttgactccaagcccagcagtaagtccaacatgattc

SEQ ID NO: 773905 - DNA, 100 bp, Homo sapiens
gccctctttgcaacatttcaggaaaacagagaaagaagtgataggagggctctgtagggcaccagctgagagacagaatttttggaagaacttaggaaag

SEQ ID NO: 773906 - DNA, 80 bp, Homo sapiens
atttgcatttcgttagctttctggattatatcaatgactgcaagcacctattatggtgccgtgagcgatgtggagatgca

SEQ ID NO: 773907 - DNA, 100 bp, Homo sapiens
ggaggcctggggaccatgggctccaggatcaagtgtaaagtggatatctcggcactccctctgaagcaagccaactgcctggagctgccactggacagct

SEQ ID NO: 773908 - DNA, 135 bp, Homo sapiens
agttgctgtacgagagcaagctctataagattcttcaaggtggggttggcatcccccacatacgggccaaaagagaaacattggctactttgacaaccttaaagcggactccaggaatatcaccaacagcatgac

SEQ ID NO: 773909 - DNA, 90 bp, Homo sapiens
ggaacccccatgggtgccgttaatcccctcctctcccaagctgagagcagccacacaggtcccctgcctgtgcccttcaccaatggggag

SEQ ID NO: 773910 - DNA, 82 bp, Homo sapiens
tttgaccatcttggtgagaaacattaagacctactaccagagtaatcaagtcagaggattatatgacttttatctgcctaga

SEQ ID NO: 773911 - DNA, 100 bp, Homo sapiens
ctgtgggggtgtcctggtgcacccccagtgggtgctcacagctgcccattgcctaaagaagttggatggcaagcatgtggtgtttggcaaagtgaaagaa

SEQ ID NO: 773912 - DNA, 74 bp, Homo sapiens
ctgcctgcgatgctcaccagtgcggtggataagattgtggaccagctgcagcagttaatgcaggtgtatgactt

SEQ ID NO: 773913 - DNA, 101 bp, Homo sapiens
agagggattcgtggtgaaggtccggggcttgccctggtcttgctcggccgatgaagtgcagaggtttttttctgaggtggtgggacacacgcaggggccac

SEQ ID NO: 773914 - DNA, 100 bp, Homo sapiens
agagctaaagatggctgaatttctagatgaccaggaaactcgactgtgtgacaactgaattagacctttacgagaagcacagttttgtcttcagtttcct

SEQ ID NO: 773915 - DNA, 51 bp, Homo sapiens
atgagtatgcgctgtatagaccactgcaggcctactgaacttgacgcactg

SEQ ID NO: 773916 - DNA, 97 bp, Homo sapiens
cctgcatcctgcgttcccctccatccttctggatctggccaacaccaccggcacagtgacggcttcagagggtagcaatgaagtgatgaggatactg

SEQ ID NO: 773917 - DNA, 75 bp, Homo sapiens
cggaagaaaagttcaatctggaaacatcaatgctgccaagggatgccaaggcctgcgtagtacacggcagtgatc

SEQ ID NO: 773918 - DNA, 100 bp, Homo sapiens
gctccccccgccctgttcgagctgtgcgggcgggcggtgagcgcccatatgggggttctggagagcggggtgtggggagcacctcaactatgtgactgag

SEQ ID NO: 773919 - DNA, 80 bp, Homo sapiens
ttcgcagtggtcgcttcttctccttgacttggagtccaggtgtgagaaatttctacaaaaagacatttttgaaatcgggg

SEQ ID NO: 773920 - DNA, 100 bp, Homo sapiens
gtcagtgcagatgtattaccgacagcaggaggactgtgccatctgggaggcccagaaggtgctggacaggggttatcaatactctggctgaccatcatca

SEQ ID NO: 773921 - DNA, 101 bp, Homo sapiens
aggaagatccacatcaacattccacagctgctgaagaaaagactagcccgagtcaggctgcgggcctctcgggtgcttcttgtcggcttgaaaggacttgg

SEQ ID NO: 773922 - DNA, 51 bp, Homo sapiens
tttatccttcgaaggaagcctgtggagcttagcagtgtctgcaaaaacgaa

SEQ ID NO: 773923 - DNA, 74 bp, Homo sapiens
aagagtgcttatcccagctaagctccaggagctaaagttgcagacaagatccagctcatcaataatatgctgga

SEQ ID NO: 773924 - DNA, 98 bp, Homo sapiens
tcagtgttttaatgcatcagtttgatgatgccgtcagtatcactgtgatcactgtgtccactactatgatcttcgtaacactaaacagccaatcatgg

SEQ ID NO: 773925 - DNA, 100 bp, Homo sapiens
gctggaccagctcatgggcacggctcgggacgatcgccacatcacagaatcgtatctatctcacagctgacaaccttgtgctgaacctacaggatgaaag

SEQ ID NO: 773926 - DNA, 110 bp, Homo sapiens
tgagagccgagcccgcgctgaccggggcccgggccggatgggcgctgcgggccggggcgcggaccgcggagcggccaactttcagccccccaaacggcctttcaaacgga

SEQ ID NO: 773927 - DNA, 100 bp, Homo sapiens
catgaatgagacattatctaaacagagagaagagattgacacactaaagatgtccagtaagatgtggacgagtgcctggaaccaaacgtctgcgcaaatg

SEQ ID NO: 773928 - DNA, 98 bp, Homo sapiens
caacgaccctgacctggtcatggcgtccagctccggcctggcgtgaggaccccccaatccgcgtgagggggctagagagctgaaggagagccagtttc

SEQ ID NO: 773929 - DNA, 51 bp, Homo sapiens
agcgcggcgagatctacgtgccaggtatcttctgtatgacgtcaacccccc

SEQ ID NO: 773930 - DNA, 95 bp, Homo sapiens
ccacacttcgcggcttcttcatgctttttcttctcaccatttctggccaaaactacaaacaagacttcgcagccctgggcgctgcctatggcaca

SEQ ID NO: 773931 - DNA, 75 bp, Homo sapiens
tcatctggaattttgccgatttcatgactaaccagttatgccgagattttgctgtcctggaggaccacaccctgg

SEQ ID NO: 773932 - DNA, 50 bp, Homo sapiens
cagacggcgagacctcctgcacagatgcttctgatgagcagaattcacag

SEQ ID NO: 773933 - DNA, 100 bp, Homo sapiens
ggagcggccacctggttcctgcgtgctacggccctgtgggcctgggagctgcctctgaggaacacgccgcaggtctggccctcggcgatgtccccaaccg

SEQ ID NO: 773934 - DNA, 51 bp, Homo sapiens
caataccactgcagatggcaaggtagatgacaaggtgaatttccattttat

SEQ ID NO: 773935 - DNA, 100 bp, Homo sapiens
ggcggaggcgacggtggcggctctcggagccggcgcgaatccggcccccgcagcgggacccgggggcataaggaaatggtggcaggcacttcctcctaac

SEQ ID NO: 773936 - DNA, 100 bp, Homo sapiens
ctgggcacagcaaatgctgaggactcagaccagtctctgcaagaatgggcttccccaaggatttattgacattgctacttgagtgtgaacagttacctgg

SEQ ID NO: 773937 - DNA, 75 bp, Homo sapiens
gaagttataaggttccccatggatgatcatgacgcagtcctgaggtttaatggggcacccacagccaacttccaa

SEQ ID NO: 773938 - DNA, 75 bp, Homo sapiens
ttgaaaaacagtattccaaagaactcggagatgcctggaatacagtaagaccatagcacagtggcggaagtcagg

SEQ ID NO: 773939 - DNA, 91 bp, Homo sapiens
attccttttcgaccttcaatccagttccaaggactccacgggttgatattcactgatggactccaaagaatcattaactcctggtagagaa

SEQ ID NO: 773940 - DNA, 50 bp, Homo sapiens
tcagcaagtacaactttgagaacaagaatgaggaaaatggggagcaggag

SEQ ID NO: 773941 - DNA, 75 bp, Homo sapiens
ggcttaagatgatgtttgagaaaggtgaaccaactcaaactaaggaaattttacggttctggctcacaaagggtg

SEQ ID NO: 773942 - DNA, 100 bp, Homo sapiens
ggggtggattatatacattcaaaaaaattaattcatagagatcttaagggtactatttttctgcctggaaataaagtttctgagcatccctgcaatgaag

SEQ ID NO: 773943 - DNA, 100 bp, Homo sapiens
tgctgctgttcttcgtaggcggagtcgccgagtcggtgtccagtgtcaggtgcagctggtggagtctgggggaggcgtggtccagcctgggaggtccctg

SEQ ID NO: 773944 - DNA, 75 bp, Homo sapiens
agtgcccaacagacattttgctgctgctacaaatgagttattctccccacctcagaagtaccagcttttggtgta

SEQ ID NO: 773945 - DNA, 138 bp, Homo sapiens
cccccagccgcagacaaaagacctcggggccggcctcgcaaggcgcttcccctttccagagagccagaaagaagtgctggagaatctggtaaaagcaccattgtgaagcagatgaggatcctgcatgttaatgggttt

SEQ ID NO: 773946 - DNA, 98 bp, Homo sapiens
acgccatgcactggggcacagactccagaggaacagctgccccctgggttcccttccatcgacatggggcctcagctgaaggtggtggagaaggcacg

SEQ ID NO: 773947 - DNA, 101 bp, Homo sapiens
ttctctgctttaacgtacttttaaaagtttgctgctttgtggtgcacaagcggtgccatgaatttgtcacattctcctgccctggcgctgacaagggtcca

SEQ ID NO: 773948 - DNA, 98 bp, Homo sapiens
cagattgagccgagttgtcgccccgctgggagaagtgaccctcctgcgcctggtgagcgtcctgaccaccctggagcgtaggttcaacctgcagagcg

SEQ ID NO: 773949 - DNA, 100 bp, Homo sapiens
tgtattatgggaagactcagttcaagtttggctgccatgcttatcgggatactgcacatgaggagtagaagaccaccaggctgcctaagaaggaatgaac

SEQ ID NO: 773950 - DNA, 100 bp, Homo sapiens
cggtgattgaggacaagaccatcgagctcatgaaacatgatcaggggcaagtcttgttggatgtcgtcttcaagcatctagatttgactgagcaggacta

SEQ ID NO: 773951 - DNA, 100 bp, Homo sapiens
agctccctcgcaattccagccttctgtagactgggctggcttagatgaagatgaagatgcacatgtctgggaggataattgggatgatgacaatgtagag

SEQ ID NO: 773952 - DNA, 60 bp, Homo sapiens
gccccgatggctctgtgcaacggagactccaagatctgaaatagctcaactcagtcaaga

SEQ ID NO: 773953 - DNA, 100 bp, Homo sapiens
ctcagcagcacatagcacctatcggagtggagttctgtcctccctgccttttattgctgctgcaagctgtacaattttaggaggtcagctggcagatttc

SEQ ID NO: 773954 - DNA, 100 bp, Homo sapiens
gggaaaattaagcagatgctccagtttgagaaacctggatctgcgatctgtttgtgaaacgggtatgcaggagattagaagccagtgggcatgagcgtgg

SEQ ID NO: 773955 - DNA, 100 bp, Homo sapiens
gcggagtagagcggagcctggcgggcgtgggaacccaggccccgccgaggcggccagccccgacaatgggcaacgcgcaggagcggccgtcagagactat

SEQ ID NO: 773956 - DNA, 75 bp, Homo sapiens
ttacctgccacccattgtgtcttctcaagaaggtgtcagctgtgatgcatgtttaaaaggaaattttcgaggtcg

SEQ ID NO: 773957 - DNA, 83 bp, Homo sapiens
ctactactacgtggtgcttggaaagaataagaaagccttgagttttgtgaaaaaccggagaagagaaactaaaaggacagtag

SEQ ID NO: 773958 - DNA, 100 bp, Homo sapiens
ctgcccataatcatggacacagccccaggatgtgcagggagttgctctgaaacctaccgcatgccagtgatggagtacaaaatgaatgaaggtgtttcat

SEQ ID NO: 773959 - DNA, 83 bp, Homo sapiens
ttcttagttgatgatttagttgattctctgaagaatgaactctggaagcccagccagggacaatgcaccttcacagagattct

SEQ ID NO: 773960 - DNA, 89 bp, Homo sapiens
cgggcgcgcgcaccatgggggagaaacccgggaccagatttcaaaagaacaaggccttgaagttctaccagaacatgatccaatacgtg

SEQ ID NO: 773961 - DNA, 96 bp, Homo sapiens
acagtggcttctgctcaccaacagatgaagacagatgcaccaacgaggggagctcatattgatgtacgtaacaagaaggggaacactccattgtgg

SEQ ID NO: 773962 - DNA, 51 bp, Homo sapiens
acggactcatcaagattggctctggggagctgttccggtggaatgtttcgg

SEQ ID NO: 773963 - DNA, 100 bp, Homo sapiens
ccgcaggcgggcctcgcgggtccgggagcgcggcggagacgatgcctgagatcagagtcacgcccttgggcactatgtcgtccgaggcccagagatgacc

SEQ ID NO: 773964 - DNA, 130 bp, Homo sapiens
aaagaagtagccttagtaataaccctcttttccagtataagtatttggctcttaatatgcattatgtagaggacagaaaaatggttcgtattgttcttacaaagacaaagagagatgcagcaaattgttg

SEQ ID NO: 773965 - DNA, 75 bp, Homo sapiens
gctccatcccccttgtctttgtgcttgcctgcgtccccagactcagaggatttccagcaggagagctccagaagc

SEQ ID NO: 773966 - DNA, 75 bp, Homo sapiens
gacagaatcaccagcactggctgaaggcctactctgtgtatgatgaagacattgggtactgtcaagggcagtctt

SEQ ID NO: 773967 - DNA, 101 bp, Homo sapiens
tgcagcatttgccaaggagacatccctcttagtcacaatatggagcttccgtttctgccaagcctgaactacccctcttttacactcctattgatctggtg

SEQ ID NO: 773968 - DNA, 82 bp, Homo sapiens
gaaaatccgaagtgccgcggaaagtggaggggtgaatgtgatgctgaggaagattgctgtggctgcagcgtccaagccagca

SEQ ID NO: 773969 - DNA, 76 bp, Homo sapiens
ccggcggctctttggcgcggattagggggtctcggcgagtgtgaagcctcagtttaggtcatctggtggttcagaa

SEQ ID NO: 773970 - DNA, 75 bp, Homo sapiens
agagcaaggagaaggatcgccaggtgctggaggacttcccaacgattagtgatgatgaaccaggttatgaccttg

SEQ ID NO: 773971 - DNA, 100 bp, Homo sapiens
ggattgctatttaccagaggaagagaaagtctgtgattgctgtgagcttcatagcagcgttccttttcctgctggttgtgcgtcttgtaaatgaagtgaa

SEQ ID NO: 773972 - DNA, 75 bp, Homo sapiens
cgtggaacggctgcttttggaagggtatttgaagtataccatacaactgttttgaaaatccagcgtggacaatgg

SEQ ID NO: 773973 - DNA, 100 bp, Homo sapiens
tgaatccagcctctaaggtgatagctctgaaaggacatggatttgattgacatactttggaggcaagatatagatcttggagtaagtcgagaagtatttg

SEQ ID NO: 773974 - DNA, 100 bp, Homo sapiens
tgatgaaaagtggaaggaagcaattttacaagaaaagccatacttgttttctctggggtatgattctaatatggatatcaatgcttacaattgtgaagag

SEQ ID NO: 773975 - DNA, 100 bp, Homo sapiens
ttgttcctttggccacatatatgcgaatctataagaaaggtgatattgtagacatcaagatctttgtggagttcacctctgtgtttgactgccagaaagc

SEQ ID NO: 773976 - DNA, 83 bp, Homo sapiens
cgggagtgatgtctgtggggccgccggcggcccggcttcagccccttggatctcccttcgtggagacgacaccggggtcctcc

SEQ ID NO: 773977 - DNA, 98 bp, Homo sapiens
cttggacacgtcccagctctctctgggcatctggaaagctggaaaggcagctcatcatgcagagtgaaatgagggaaagacaaatggccatgcagatt

SEQ ID NO: 773978 - DNA, 82 bp, Homo sapiens
tgaagatgtcggccttctgagccgactgcggtggtcaagagatttgcctgaggttgactgtacatacaaatattgagcattt

SEQ ID NO: 773979 - DNA, 75 bp, Homo sapiens
ggcccggactcggacgcgtggtaggggcctcatccacatgctcacccacttggccgaggctctgcaccaggcccg

SEQ ID NO: 773980 - DNA, 101 bp, Homo sapiens
cagcacggcacagcacgctcgacttcatgctcggcgccaaaggtaacctgtgtatggtgactggaggtgctaacctaggaagaattggtgtgatcaccaac

SEQ ID NO: 773981 - DNA, 100 bp, Homo sapiens
caaggaggaggcagagtggcagacgagaatggcctgtgggtgtccaagaattttgggggaaaatgggaagaaatccacaaagcagtatgtttggccaaat

SEQ ID NO: 773982 - DNA, 75 bp, Homo sapiens
ggcttcaaaggctgtcgcaaggaggaaggtactggtcttcttggacattaatctttgaatacttgctgactgcta

SEQ ID NO: 773983 - DNA, 90 bp, Homo sapiens
cactcaaaagcaagatatactactaactttgaaatggaataaggtggcagtccatgtgtcctctgcgccagttccggaaactccctgagg

SEQ ID NO: 773984 - DNA, 82 bp, Homo sapiens
cggccgtggaggaggtcggctcagccgggcagtttgaggagctgctgcgcctcaaagccaacaattctgtggtgttcttggt

SEQ ID NO: 773985 - DNA, 100 bp, Homo sapiens
tctgggagaatatttaatggaaaatcgcttggttaaaacctgacacttttaacaggcctttggacaagcacacacaaaccacaagaaggtggctgctgac

SEQ ID NO: 773986 - DNA, 95 bp, Homo sapiens
ctggagcgttgcgagcgcgaatggcacgagctggagggagaatttcaagaactgcagggagaagaaatgggtgaccgttggtgacacatccctac

SEQ ID NO: 773987 - DNA, 90 bp, Homo sapiens
aagcgggccacgcacctcgtcaccaaggccaagggtctcggattgcgagctggctgccgagtttttcggttgaagtgatgcacaccacca

SEQ ID NO: 773988 - DNA, 75 bp, Homo sapiens
gaacaaaacagatccttggagaaggctgagaggattatggaggctattgagttgtaccgagaagaaactgcaaaa

SEQ ID NO: 773989 - DNA, 90 bp, Homo sapiens
agggtcgaggcggcgcggcctgagatcattgctgaaggtgccaatgggccaacaactccagaagctgacaagatcttcctggagagaaac

SEQ ID NO: 773990 - DNA, 51 bp, Homo sapiens
cgggcggccacgttcccgctgcagggtgaatttggaagtgaaaagaaaact

SEQ ID NO: 773991 - DNA, 83 bp, Homo sapiens
caacctcctgtatctggagctgggagacaagcccgcgcccaacaccttctatgtaggtcaccgacgatgagggcgcacctgct

SEQ ID NO: 773992 - DNA, 101 bp, Homo sapiens
aagctgcctgaatttgcctgtatactctcgttctgcgacttataaaggaccagacaaatcaaattagtggttttggaatcttcctcttcagtgaatacatc

SEQ ID NO: 773993 - DNA, 74 bp, Homo sapiens
acagaagaaatgccactgttggaggtgaacctgccgctgctcaccctgagccagcccctgctgttgggcatcgc

SEQ ID NO: 773994 - DNA, 99 bp, Homo sapiens
cgtttccttcaagagttttcatggattctaatggaatcaggcagttttgtgtccatgtgaacaactagacttccagtgtcctactattgaagcctgcac

SEQ ID NO: 773995 - DNA, 75 bp, Homo sapiens
ggttgagcggcggcgaacatgcgcttttgacacattggagggcttgtcaatgaggcagatcagattcaggttcga

SEQ ID NO: 773996 - DNA, 82 bp, Homo sapiens
gctcgtccggttaccttcaggtcctggtacctgggataaaagttgcagcgtcccaccatccaccagacagaccacctgaccc

SEQ ID NO: 773997 - DNA, 51 bp, Homo sapiens
tgcccaaagaacaagtgagggggccatgttattaaagagggtgtacgggag

SEQ ID NO: 773998 - DNA, 75 bp, Homo sapiens
cctgcagaggggtccatacggcgttgttctgggtggggaacgccaagcacaacgtgcatgtcatgaacatctcca

SEQ ID NO: 773999 - DNA, 96 bp, Homo sapiens
agatgatcgccgggtgtcgatccttttccctccagtcaggtttctggcatttgaagtcaaagagtattcagcgttggatgaattacaaaaggaatt

SEQ ID NO: 774000 - DNA, 100 bp, Homo sapiens
agccctgtggccacctctgctgctgtgtggtgcgaggctgtgagcagatgagcacctctgaggagttggatgaaatgccagtgccggattctgaaagtgt

SEQ ID NO: 774001 - DNA, 74 bp, Homo sapiens
ggcgttgatatcggtggtaacgacggcctcagcaggcggggaagatgaaaggttattcaagcggagaaatgttg

SEQ ID NO: 774002 - DNA, 83 bp, Homo sapiens
cacagctacagcgagggcctcggccatccaagggtctcccagtttggtgccctggttgtcagatgttggaaagcagtaggacg

SEQ ID NO: 774003 - DNA, 50 bp, Homo sapiens
gtctctggagacatcttcagcagttgaggagctcaagcttgggaaaatgg

SEQ ID NO: 774004 - DNA, 101 bp, Homo sapiens
tggactgtgctctcaaactttactttgcctcatttgaggagtgggaacaggcttcggcgaacacaaagcttttcggagactgggaagcccaactgcgaaga

SEQ ID NO: 774005 - DNA, 100 bp, Homo sapiens
acttgctcgggcaaaagttgtgcattggcccgatcaagcctgacttctagccaagtgtactaatggtcacttgatgtgcgctggctgttttatccaccta

SEQ ID NO: 774006 - DNA, 50 bp, Homo sapiens
tgtgggagaaggcccagcgagaagctcttcgtgggcggtcttgactggag

SEQ ID NO: 774007 - DNA, 51 bp, Homo sapiens
ttactggtgttccagccctaagcttggtgatccagctatttttcctgccgt

SEQ ID NO: 774008 - DNA, 75 bp, Homo sapiens
ctcgaggctgctaagagactaactgctgcagaagaatattttgcctgctggaacctgctgtatctactcaagagt

SEQ ID NO: 774009 - DNA, 90 bp, Homo sapiens
gccaatgggaatcacctggttcaagtatccggagttactcgtggcttcctataacaacaatgaagatgcccctcatgagcctgatggtgt

SEQ ID NO: 774010 - DNA, 100 bp, Homo sapiens
tggcgagctgaggtggaggcaggctgcggcagacggcgacagtggcggcggcgccatggcagggcttgcaggattatcctgatgcccttatcaccaacta

SEQ ID NO: 774011 - DNA, 98 bp, Homo sapiens
atcttgcacttcttctgagtgagaaaatggtgtgaatggaacattaacttcaaatgtagcagactctccccggaataaaaaagagaaatcttcataat

SEQ ID NO: 774012 - DNA, 74 bp, Homo sapiens
cagtacctgcgtatccgcactgtccagcccaagcctgactatggatggccaggccatgttatgggatctcaacg

SEQ ID NO: 774013 - DNA, 100 bp, Homo sapiens
tcgaaggatggaagaagagacgaagagacagctggatgaaaccattaaaaatctcaagtgacgactttgggaaactctggttatccttcgcaaatgatgt

SEQ ID NO: 774014 - DNA, 75 bp, Homo sapiens
cggcagcatgtcggtggcggggctgaagaagcagttctacaaggcgagccaggatagatcactgcgaccagagga

SEQ ID NO: 774015 - DNA, 95 bp, Homo sapiens
caaatcggaagtgaattcggattgtttgctgatggctctgagtaaatcaatgcatgcaagaaatagatacaaggacaaacctcctgactttgcat

SEQ ID NO: 774016 - DNA, 76 bp, Homo sapiens
ctttacttttacctacgttggcggccccagaagtgttttagagcactttgctgcaagggaccaccacctgcacgac

SEQ ID NO: 774017 - DNA, 100 bp, Homo sapiens
ccctctgcccccccttccccacgcaaccccagatccatttacactttacacagggtttccaggcctgaggtgcccgccctggccccaggagaatgaacca

SEQ ID NO: 774018 - DNA, 50 bp, Homo sapiens
gttccaatgctgggattggctgcttttcgacttcaaacaagtgtgaagag

SEQ ID NO: 774019 - DNA, 82 bp, Homo sapiens
ttgattacccgttaagtcccccaaagatgagatttacctgtgagatgtttcatcccaacacaaaatgatgcttcaacaccca

SEQ ID NO: 774020 - DNA, 100 bp, Homo sapiens
cgggcccctgagccatgcccatcgcagccgccccgaaggagccagttgcctgacctggtaccccagctggggacactctaccagttaatggaaagcagag

SEQ ID NO: 774021 - DNA, 75 bp, Homo sapiens
gcatgaagaagaggacctggatgatgatgtcatcctgacagaaaaaaagcttgtggtgaaggggggcaaaaaaaa

SEQ ID NO: 774022 - DNA, 90 bp, Homo sapiens
gaactggccaagatcaagcaaaaatgcccactttatgaagccaacggacaagctaaatggtgtcaacctccaacaacaaagatggacaag

SEQ ID NO: 774023 - DNA, 88 bp, Homo sapiens
tccagttccgcacgcgctgggattcggagcttcagcgggaaggaggcatgtcagagcgggagcgacaggtgatgaagaagctgaagga

SEQ ID NO: 774024 - DNA, 96 bp, Homo sapiens
gggctggacagacagtgacgattatagcacaatatcaacctgaaggacactcatgaggaccatgatacttccactgagaatacagacgagtccaac

SEQ ID NO: 774025 - DNA, 75 bp, Homo sapiens
cactccagatagaaaggtcattatctgttcattctggtaccacaggtgactctgacatcattagaagcatgccag

SEQ ID NO: 774026 - DNA, 98 bp, Homo sapiens
cacgttttccgcgccacagaccccagccaggtgaaaagccatacaagtgtacctgggaaggctgcgactggaggttcgcgcgatcggatgagctgacc

SEQ ID NO: 774027 - DNA, 82 bp, Homo sapiens
tgaaggtcatttaaccaacctcagctttacaaaccctgaatttataactgaggatttgtcttggctgttactatgacacggg

SEQ ID NO: 774028 - DNA, 75 bp, Homo sapiens
caagtcattttctgatcaaagaaggtgctagaacagacttaagaaacattgagaagaagctggccttcgacatgg

SEQ ID NO: 774029 - DNA, 75 bp, Homo sapiens
cagaaaggaaccgggttgtcttgggccgggcagggcggattactcttgtctctgctgctcctgggaaagtgattt

SEQ ID NO: 774030 - DNA, 110 bp, Homo sapiens
gtgtctagtgctgcagggatctcggcatgaggccccttctcccaggaggggaggcacggagtgcatccgccccaacccttttccccctcgtctcctgtgagaattccccg

SEQ ID NO: 774031 - DNA, 75 bp, Homo sapiens
actcgctctccgagggcgacgcataccccaacggcctgcagtatgactatgaatatgatgaaaatggtgacagag

SEQ ID NO: 774032 - DNA, 100 bp, Homo sapiens
caaacacaccttgaaccagattgatgaagtaaaggtgtggcctcagagaggaggggaaggaactggttacttcgtggacttctctgtgcggaactgcccc

SEQ ID NO: 774033 - DNA, 82 bp, Homo sapiens
tcttctctggttccgagatgggaaaaagaagcagctgacacaggatgatgatactgatgcggttgagattgctatcgacaac

SEQ ID NO: 774034 - DNA, 83 bp, Homo sapiens
gtcgagtatctggtgaagtggaaaggatggcccccaaagtgacttaagagattaaaattaatttggttgctgttggttctgaa

SEQ ID NO: 774035 - DNA, 100 bp, Homo sapiens
gtttgttactggaacctgccgattgccagtaggaggatttgctgatctcatggaggtggaggagacactgaagcgactgcagagccagaagggagtgcag

SEQ ID NO: 774036 - DNA, 97 bp, Homo sapiens
gatgaatttttagtgaaaaatgatccctgccgaggaatgtctgatcacagatacggggatggtggctctactttccagagcacaacaggacactgtg

SEQ ID NO: 774037 - DNA, 100 bp, Homo sapiens
gctgctgcaacacgagcagtgtcaagtgccagccctcccgcgtccaccaccgcagcgtcaagatccgagcaccagccggcgcttcagccccccctccagc

SEQ ID NO: 774038 - DNA, 71 bp, Homo sapiens
aggaagaagcatttgcattggagcctattgatataactgatcattccatcggaaagaggtcgaaaatgtac

SEQ ID NO: 774039 - DNA, 80 bp, Homo sapiens
gtctgcgagccaggattcccggttttaaaatcaaagatgggaaaatcggagaaaattgcccttccccatggccagcttgt

SEQ ID NO: 774040 - DNA, 73 bp, Homo sapiens
gtggctggcgattcgtgttcgtgagggccttttctggaaaaccaattctgtgtcctcggaggaccacagccca

SEQ ID NO: 774041 - DNA, 50 bp, Homo sapiens
gaacccacaaaatgacttgcaggttgggggccgtcccgctcctaaggcag

SEQ ID NO: 774042 - DNA, 82 bp, Homo sapiens
agcacatcagccacgctgggcgtcagggtctgcggcatgcagaaagtttcctacactactgaggtttaggggcactgtgaag

SEQ ID NO: 774043 - DNA, 76 bp, Homo sapiens
agatggaaacttggatctgaggaatggagaactccagaaatgatcagcttgaacgggtctttttacgacttggcca

SEQ ID NO: 774044 - DNA, 100 bp, Homo sapiens
agtgaacagcctcagggcgagtatggggttactattgcctttctgcgcttgatcaccacccttgtcaagagcctgggcctggtggacaggaacaacgaac

SEQ ID NO: 774045 - DNA, 96 bp, Homo sapiens
acgccaaccaaagatttgcatcagccatctcttagtccagcaagtcctcatagccagggtaaaacatggctaaaagcttacggagtaagtggaaaa

SEQ ID NO: 774046 - DNA, 75 bp, Homo sapiens
ccgcgggggagccccgggagccgcacgaactccatccggcacaacctgtcactgcatagtcgattcatgcgggtc

SEQ ID NO: 774047 - DNA, 107 bp, Homo sapiens
ttcagcagttggcacacatggttaaggaacaggaggaaaccattcagagggtctgggggtggtggcatctcccctaaaggaagtggtccctctgtggcaagtgatga

SEQ ID NO: 774048 - DNA, 100 bp, Homo sapiens
gccgcgcctcctccgggaccctccccttggaccgagccgatcgccgcggggcagttcgggccggctgtcctggcgcgtcggcgtggcacaagcctaatgg

SEQ ID NO: 774049 - DNA, 100 bp, Homo sapiens
gagaagtgtatatcaagccacaatttccatcaaaaagtgattaagcagagaatggagaagaaggttgattccagaactggcttgcagatccaaatggtgg

SEQ ID NO: 774050 - DNA, 96 bp, Homo sapiens
agccgccaggcagttttacagggctctgttaacattattagaggaagtaacacaaggggatatgagtgcagcagacacatttctgtccgatctgcc

SEQ ID NO: 774051 - DNA, 90 bp, Homo sapiens
ccctggatgatggtgaatacaaccccactgatgataggccttccaggccactttggagttgtctaccacggagaatacatagaccaggcc

SEQ ID NO: 774052 - DNA, 100 bp, Homo sapiens
gcgaccaccccggacggcccctgtccccgctggcgggcttccctgtcgccgttcgctgcgctgccggaatcttcagctacttggagcaacagccattgag

SEQ ID NO: 774053 - DNA, 100 bp, Homo sapiens
ctccactatatagtttcataaaggaaggaaaattgaattatgaaggacttcccataggaaaggctgctgagcttcgtgcttatctgaaatctaaaggagc

SEQ ID NO: 774054 - DNA, 83 bp, Homo sapiens
cacctgcagaagcgtgtcgttctgcaccagcgccttgatcgagtacttgaggctgctctttggcgtaaattgcaatcgattag

SEQ ID NO: 774055 - DNA, 135 bp, Homo sapiens
gaaggcaatgatttataccatgaaatgattgaatctggtgttatcaacttaaaagatgccacctctaagcgtaactggcggaaacccagaggcattgacaacagggttcgtagaagattcaagggccagatcttg

SEQ ID NO: 774056 - DNA, 74 bp, Homo sapiens
ggcggccccagtgccgcccccgggcgcacctggaatggccaaatatcaaggtgaagttcaaagtttgaaactgg

SEQ ID NO: 774057 - DNA, 100 bp, Homo sapiens
gaaaccagctgcgctgtcctaaatgtggcgacttgtgcacacatgtagagacctttgtatgctctccgtgtgaaatggtcccatctcagactgccctggg

SEQ ID NO: 774058 - DNA, 100 bp, Homo sapiens
gttatggctgcggtccagaacccggccctcaccgccctcaccacccctatccagacggctgcccttcaagtaccactgaagaaatcaggggagaaacccc

SEQ ID NO: 774059 - DNA, 151 bp, Homo sapiens
gaaaaaccgttatggggatgtaccctgcctggaccaaactagagtgaagctaacaaagcgaagtggccatactcagctggagcagagtgaagccaagtgtgaggaggccttgaagacgcagaaggtgctcacagcggacctggagagcatg

SEQ ID NO: 774060 - DNA, 82 bp, Homo sapiens
atggagcatggcatcatccagcatgatcatcaatgctgtggtactgttgattttattgagtgccctggctgatccggatcag

SEQ ID NO: 774061 - DNA, 100 bp, Homo sapiens
ctcatatgtctcaggcttccatgcagcctgccttaccggactttgaagaatatcctgaacatagaacgaactttttcttactacttcaggctgtcaattc

SEQ ID NO: 774062 - DNA, 100 bp, Homo sapiens
aaaaagtagcccactttattcacagagtgcgagctgttaatgctcagtggggccccaggggaggtgggctctgtgctcttctccctgttctggtccgtcc

SEQ ID NO: 774063 - DNA, 83 bp, Homo sapiens
cctgggtgctcgagaccatagggaagtactgggctgccgagaaagtcacagaggaagcggctgctgagattactaggaagctg

SEQ ID NO: 774064 - DNA, 83 bp, Homo sapiens
cccacgagcgaggcaactgggccacccacgtctatgtaccatgttctagtaaataccgcttgctgtgttttgatgttggtggc

SEQ ID NO: 774065 - DNA, 50 bp, Homo sapiens
gcaacatggtgcggtcggggaataagggagaagatgtcaaccggacacta

SEQ ID NO: 774066 - DNA, 83 bp, Homo sapiens
tgaagtcctcccaactaggcagagaaatcggctcgcgggattgatgtgcaacaagtgtctttggttataaattatgatctacc

SEQ ID NO: 774067 - DNA, 75 bp, Homo sapiens
atcggttctatcctgtgctctaccccaaggcctccggtgtggctgtctctgatggtgtcatcaaggtgttcaacg

SEQ ID NO: 774068 - DNA, 75 bp, Homo sapiens
ggaaggttctgaatatagagtcaaaattcacttcaaagagtttccagatgtcttggaatgcactgtatctcatgc

SEQ ID NO: 774069 - DNA, 100 bp, Homo sapiens
gcgacgctatggcgcactggagtaccctgttcctggcagcagcggaggaggagaaagagatggacctcccggactcggcctcgagggtcttctgcggccg

SEQ ID NO: 774070 - DNA, 90 bp, Homo sapiens
gaggaaaattacccggtatcgttagaggggaccctcacaatgatcccaatgctcagggggatgccttcaagactctcttcgtggcgagag

SEQ ID NO: 774071 - DNA, 101 bp, Homo sapiens
tgcagtccgtatgctgagaacctggagcaggaatgcggggaagctgactactgtcagaggatgtaggaatggacatcccctttgaagagggcgtgctgagt

SEQ ID NO: 774072 - DNA, 100 bp, Homo sapiens
ctacagaaacaaaatgtcaacaaattgatggtgtggtttattgacaatcatttacaatgccgaagagtgctgtagtgagccagcacagtgggtaacacag

SEQ ID NO: 774073 - DNA, 100 bp, Homo sapiens
ctgcctgggggagttcgtgcgcaagaccctggcaacctggctgcggagacgcggcggatggcttcggaaccaaaaagaagcttcccagagccggggccag

SEQ ID NO: 774074 - DNA, 98 bp, Homo sapiens
gggaaacacaaagccggctacgcgctgcgaggtgaatctggattgggaaagtcgacattaatcaactcattattcctcacagatttgtattctccaga

SEQ ID NO: 774075 - DNA, 80 bp, Homo sapiens
gagctgagaccgggcggccacagtccgcagggatgaacctcgagttgctggggcattttccctgaaacatatatccattt

SEQ ID NO: 774076 - DNA, 100 bp, Homo sapiens
gactgtggctttgagcatccgtcagaagctacgcaggatgcaggctctggagagagaacaggatgccctgtggcagggtctggagctgctacagcatggc

SEQ ID NO: 774077 - DNA, 96 bp, Homo sapiens
tcaacacactgttcaaaatcatgcgagtggggacagcttcttcctagcaacgaaggttttgggaacagtaaaatggttcaatgtaaggaacggata

SEQ ID NO: 774078 - DNA, 101 bp, Homo sapiens
ttgtgacatatcgttggacccagaattgaggccaggagtggtggctcacacctgtaatcccagctctgggaggccaaggccagtggattgcttgagcccag

SEQ ID NO: 774079 - DNA, 76 bp, Homo sapiens
taaggtgaaaacaatttcagtggatggaaataaggctaaacttgcaatatggagtgtgaacatggctacgcctctt

SEQ ID NO: 774080 - DNA, 98 bp, Homo sapiens
cagagagatgggcagcctgtctcttctcccagaaaccagcctggacaccaagtctgtgtcagaaggccacctcaagaggaacatcgtggtgaagaccg

SEQ ID NO: 774081 - DNA, 100 bp, Homo sapiens
cgggcggcggaggcagcggggccgggatggaggacgttaactctaacgtgaacgcggaccaggagcttcagtatcagacacagcacagcagccatctgaa

SEQ ID NO: 774082 - DNA, 100 bp, Homo sapiens
agagagatgcttaaaaatcaccagttactttaatgagcccaagggaaaggcagctgcagtccacaggacccgagcagaatccggggacatcagaactgac

SEQ ID NO: 774083 - DNA, 75 bp, Homo sapiens
gcgcgatggagcagcgaaaacgtggttgtagagttccgtgactcccagatcagtgtgcgtgtgaccaccatggat

SEQ ID NO: 774084 - DNA, 74 bp, Homo sapiens
gaggagccgatactgagcttcttcctatttgccatggatccgtgattctaactgcaactatgaggcctttatga

SEQ ID NO: 774085 - DNA, 51 bp, Homo sapiens
ccgagcaggctgagcgatacgacgcaaagtgaaaaggagagcttgttgaag

SEQ ID NO: 774086 - DNA, 98 bp, Homo sapiens
ggaaaggctctcagtgaaaaagggagaagagaagtttacctttattgagaaatgtaacaaccctcgttctgtcacattattgatcaaaggaccaaata

SEQ ID NO: 774087 - DNA, 82 bp, Homo sapiens
gctgactacctgctgtacaccctcaacaaacaccagcgctttgggagtgtggccatctggggccgtgtggtatttgccactc

SEQ ID NO: 774088 - DNA, 83 bp, Homo sapiens
gcccatgaactacaaccccggttgccgctttctcctctcctaaccgttaagtgcgctaaggagcagctgatgagccagatccg

SEQ ID NO: 774089 - DNA, 83 bp, Homo sapiens
tgtgaagctcaccgagacggcgatccgggcgctcgagacttaccagagccacaagattttgcaagaacgaggctcaaggatgt

SEQ ID NO: 774090 - DNA, 121 bp, Homo sapiens
aggagaggaagacccagtacagctggacgtttgccgtccactctgagtcaacgttggtgaggactgtccagtattcgatggcctgtttgagttctgtcagttgtctactggtggttctgtg

SEQ ID NO: 774091 - DNA, 83 bp, Homo sapiens
ggccgcgttgggcggttcagactcagggtggagtacaaaccaccaggaacccgtaaacttcataacattcttggagtggaaac

SEQ ID NO: 774092 - DNA, 100 bp, Homo sapiens
caaggggaaaactcctgaggagattcgcaagaccttcaatatcaaaaatgactttactgaagaggaggaagcccaggaggaagagcaagcaggccctgag

SEQ ID NO: 774093 - DNA, 83 bp, Homo sapiens
ctttggatcagacttttgtgttgcagttcgggtatcgagaaccttccctgcgaacttcagaggaacttccagctgatgcgaga

SEQ ID NO: 774094 - DNA, 74 bp, Homo sapiens
caagaacaaaggccgcgacttggagggtcgagctgtgcagttttagcgggtacaagatctaccccggacacggg

SEQ ID NO: 774095 - DNA, 105 bp, Homo sapiens
gtctccgttgggtccggccgctctgcgggactctgaggaaaagctcgcaccagggggatatgagactttctactcggaatatcctgagtgttgcgtggatgtaaa

SEQ ID NO: 774096 - DNA, 90 bp, Homo sapiens
ctgctgctgctgcccggacgtggaagcagcaagaggcgcttggtcaagacacactgacgaaactggcagacctttcacttcgtatccaac

SEQ ID NO: 774097 - DNA, 75 bp, Homo sapiens
taaagagacatgagatggtagccaaacccccaggtgttggggatgtcctttgcactgaccctgaactgccagatt

SEQ ID NO: 774098 - DNA, 100 bp, Homo sapiens
tcttaccagccagccccaccaagtgctggccagtgagcccatcccgttctctgatttgcagcagatggtgaccctctttcagatgtgggttgttcccctc

SEQ ID NO: 774099 - DNA, 78 bp, Homo sapiens
ggaaatgtgtcatcgaaagccagattttgcaagaacgaggctcaaggatgtgagggacacagtattgacagctgaaga

SEQ ID NO: 774100 - DNA, 97 bp, Homo sapiens
ggagcccccagcgcagcggccgcggatgcagactcatctgagcgtatcattgctcccatgcgctggggcttggtcccttcttggttcaaagaaagtg

SEQ ID NO: 774101 - DNA, 98 bp, Homo sapiens
cttttgagctacagtgacaagaaagatcacctaactgtggaagaactggctcagtttttgaaggtggagcaaaagacatcaaaatttacaagctcttc

SEQ ID NO: 774102 - DNA, 98 bp, Homo sapiens
agtgcaagaagaaattcccacctgtcaaagaggactatttgcactctttggggaaggctcgaacagctcaagtccaaaaagatgcacggattggagaa

SEQ ID NO: 774103 - DNA, 100 bp, Homo sapiens
ggccgtcggtgctgctgctcctgcagctgccttttctgccatcaggtggcatttttcaactccgctggaaccagtgcccaggaggagcaaaggatgtgct

SEQ ID NO: 774104 - DNA, 82 bp, Homo sapiens
gggtggcttacagacgctgccagcatcgccgccgccagcaatcagccatgactgcctttgcactgtccatgctctcagccca

SEQ ID NO: 774105 - DNA, 74 bp, Homo sapiens
tttttttgtggagtggtttgaatatcgtaagcgcacgtttaaacatctcaaggaattaagtagactggctggac

SEQ ID NO: 774106 - DNA, 83 bp, Homo sapiens
cttaatacagcaagaaagaccatcaagtttaccaataaacaggggtcacatgacgacagaagccaagagggctgcaaagatgg

SEQ ID NO: 774107 - DNA, 100 bp, Homo sapiens
gtgggattcagatccatcagggaccaaaacctgcattgataccaaggaaggcatcctgcagtattgccaagaaaatgtgacagtgatgataacatgggtg

SEQ ID NO: 774108 - DNA, 100 bp, Homo sapiens
cttgctgaagagactttccgttacatgacctcgaagcggaggatccctgtgtcccagccgggcatggccgacccccaccagcttttcgatgacacaagtt

SEQ ID NO: 774109 - DNA, 100 bp, Homo sapiens
gtcacctatcactgtaatcaagacgcgctatgaggtcttccactttcgccttggtgcctgtcttcgcccacctgagcatcctccagagcctcgtgccagc

SEQ ID NO: 774110 - DNA, 100 bp, Homo sapiens
ggtgattgcatcaaatattggccttcccatcagtacaacacattgtaaaccggttgttatgacaatggaaaacactatcagataaatcaacagtgggagc

SEQ ID NO: 774111 - DNA, 100 bp, Homo sapiens
ataaaaagagatgtggggggattctcgacctgctaacagaactggaccttttcgcttcccaactttttggtcgcctagtgatactccattgtataatctg

SEQ ID NO: 774112 - DNA, 75 bp, Homo sapiens
ggtaaacactgatccagaacggtatccatcacgaattgaaaaaattgactatgaggagggcaagatgttggtcca

SEQ ID NO: 774113 - DNA, 100 bp, Homo sapiens
cagactacaggctgatggcggaggcttcgagtgacccgggtgccgaggagcgggaagagttgctgggagtcagaacaaagccaggcagtgcaaggactcg

SEQ ID NO: 774114 - DNA, 83 bp, Homo sapiens
gtggacttggacacgtcccagctctctctgggcatctggaaagttgtcactcagcccagtccatcagtttctcagcccagtac

SEQ ID NO: 774115 - DNA, 98 bp, Homo sapiens
ttccaacatgccatgggaggagtacctgcctgggcagagactactaagcggaaaacatcttcagatggtcaagtcatcagcccacaaagtagcagtag

SEQ ID NO: 774116 - DNA, 100 bp, Homo sapiens
tttacagaaagagtcaacagcagtggcaacaggaagacgtattttagcagatgaagcactcaagctgggcattctagataaagttgtaaactcagacccg

SEQ ID NO: 774117 - DNA, 80 bp, Homo sapiens
tcggggcctccgcagcgacaacatggaggccgtgaagaccttcaatagcgagacctgcgtaaattcaggacctataaagg

SEQ ID NO: 774118 - DNA, 100 bp, Homo sapiens
tggggccctcttgataaaaagagatgtggggggattctcgacctgctaacagaactggaccttttcgattttaccaaatgttgcaagaactctggagttc

SEQ ID NO: 774119 - DNA, 80 bp, Homo sapiens
ccaggttatggattcctttcagaaaacaaagaatttgccagatgtttggaagatgataagatcagatgggcgtctagatg

SEQ ID NO: 774120 - DNA, 74 bp, Homo sapiens
agatgaattaccaagaggcagcaatctacctccagtgggctcgggatgagtttgaaggcctcttcaagcagcca

SEQ ID NO: 774121 - DNA, 73 bp, Homo sapiens
gcgcctggccgcgaacccggaccctaagaaggaagccagcagacctgcagaacttggctcccgggacccaccc

SEQ ID NO: 774122 - DNA, 100 bp, Homo sapiens
cagaaacacaggctagactggaagctttactagaagctgcagaatcctcactatggatgggctcattgaggacattaagcatcggcggtattatgagaag

SEQ ID NO: 774123 - DNA, 100 bp, Homo sapiens
gatgatgagaaataaggacaaaagccaagaggaggacagttcgctacacagcaatgcatcgaggaagaatttttaactttgaccatagagcataggaagg

SEQ ID NO: 774124 - DNA, 100 bp, Homo sapiens
ctgaccggggctgtgaaccctggcgaccactgcttctccgtgggcagcattggcgaccagcgcttcacgaatgagatgctggaggaaggacatgagtatg

SEQ ID NO: 774125 - DNA, 83 bp, Homo sapiens
atacaagaatgtgaaatttgttctcaagcacaaagactctgacctgtttttgttggacacccgtgtagtatgggcctcagaag

SEQ ID NO: 774126 - DNA, 51 bp, Homo sapiens
ggagaactagtcctcgactcacggacccttcaaagttgtacaagaaagcag

SEQ ID NO: 774127 - DNA, 100 bp, Homo sapiens
ctgccgtgccacctgctgcacccacgaatctgcccacccctcctgtaacccagcctgtttcacttcttggccttggagtaccttttcaagttcattgtac

SEQ ID NO: 774128 - DNA, 100 bp, Homo sapiens
ggaggatatttggaatagcctctcttcagtgttcacagagatgcaaccagagaggagtggatgattcggaaggtgaaggtggaggacgaagatcaggagg

SEQ ID NO: 774129 - DNA, 109 bp, Homo sapiens
cgagctgagtggttgtgtggtcgcgtctcggaaaccggtagcgcttgcagcatgatgatttgtcattaattcggaagaacagaatggctctctttcaacaattgacatg

SEQ ID NO: 774130 - DNA, 83 bp, Homo sapiens
tgagtgccttctgtgtgggccgaatgctgtagctgctgggataggtaaatattccggattggattgttgaccttcgccatgag

SEQ ID NO: 774131 - DNA, 82 bp, Homo sapiens
ctgccgtacgtggccctcgatgtgctctgcgtgttgctggatcatccaattatgatgggttttgaaccccttgtgaaccaga

SEQ ID NO: 774132 - DNA, 100 bp, Homo sapiens
gaatgctgtcactcagcactggcagggtgagcccatcactttctgtgaggagagttttgtaaagcaccgctcaagcgtgatgaaacagttcctggaaact

SEQ ID NO: 774133 - DNA, 87 bp, Homo sapiens
catccgcctgtgggacacctaccaggtgaatgaaaactttgccattgatttgatagcagagcagcccgtgagcgaggtggagactcg

SEQ ID NO: 774134 - DNA, 98 bp, Homo sapiens
agtggcacctgcgcgaagctggccaaagcctgcccagacggctcacctgtgcgggatggaacaaaaggagctgtaaaattgacaagcttggcatgtgg

SEQ ID NO: 774135 - DNA, 50 bp, Homo sapiens
aatgattatgccaacgctgtccttcagagtgaagtcaccctgctgagaaa

SEQ ID NO: 774136 - DNA, 90 bp, Homo sapiens
gaagatttcataaacaaagcaggaaagctgcagtcccagcttcgttctgaatgcagtgatggggaatggtctgcttctttgcctcatcga

SEQ ID NO: 774137 - DNA, 75 bp, Homo sapiens
tcaactgagagagatgcttaaaaatcaccagttactttaatgagtctcggcgcggaagatggccggcggcgtgga

SEQ ID NO: 774138 - DNA, 90 bp, Homo sapiens
cgccagccccagcttggcgtcctgagaaatggttcagcagactgtacaggatctttttggcagagccccaagtaaagctgtcaatcctga

SEQ ID NO: 774139 - DNA, 100 bp, Homo sapiens
ggggttttactctaaagggtggcctggagcacggagaaccattaatcatctctaagtgctctatgcccaggtctctgtggctgggctgctccagcctggc

SEQ ID NO: 774140 - DNA, 74 bp, Homo sapiens
gaaacgcaagtccatgtacacgcgagattataagaagcttgggttcattgtgctgttacactaccaaactgtca

SEQ ID NO: 774141 - DNA, 75 bp, Homo sapiens
tctgcagccacagaccctgagaaaatggggccaattgctcctgcccagctgcaggacaagttcgagcatcttaaa

SEQ ID NO: 774142 - DNA, 100 bp, Homo sapiens
cggcgccgggaagcctcagctcgcctgaagctggagaatgctggaggagaccttaaggatggccaccaccactatgaaggagctgttgtcattctggatg

SEQ ID NO: 774143 - DNA, 95 bp, Homo sapiens
gtggatgaaggtggggtggcgtggcaagccggactaaggaccggggacttcttgattgaggacttcttaattactcaaatgactggaaaagagct

SEQ ID NO: 774144 - DNA, 75 bp, Homo sapiens
gggcaaggggctcagctcgcagcgcatccccgcgcacagggtgagaactctgtctcagtcgacgggaagtgcagt

SEQ ID NO: 774145 - DNA, 100 bp, Homo sapiens
ggggctgactgtcgctctgcctttgacaggagaggctgcttcttgtagaggtgtggacactgccagcggctgcagccgacttggaatgacctgggagaca

SEQ ID NO: 774146 - DNA, 100 bp, Homo sapiens
ccgaactggccagactcctggagatcgacccgtacttgaagccctacgccgtggacttccagcgcagatccataaatggactaggacaaatcttagaaac

SEQ ID NO: 774147 - DNA, 50 bp, Homo sapiens
gaggttatgaggcttaataaagaaggtcacgagaagagaatgccttctag

SEQ ID NO: 774148 - DNA, 100 bp, Homo sapiens
ctacgacgtccctcaaaccttgcttctaggagataaaaaggtatgaaaatgaaagtcttcagaatggaaggaagtcaactgaatttccaagaaaaatacg

SEQ ID NO: 774149 - DNA, 97 bp, Homo sapiens
tatttgatgaggtggatctgacagatgccagcgtagctgaatccagtaccaaaaacgtcaacaacagttttacggtggctattatcatggaaaacta

SEQ ID NO: 774150 - DNA, 74 bp, Homo sapiens
ccttaagtgaaagaagtggaaacacccctaactctcccagccatatacaacttccaaggcagcggagcccccca

SEQ ID NO: 774151 - DNA, 100 bp, Homo sapiens
cgctcaccaggagccccttgccaggagtgttcaagatgctctctctggaccgatcccactgacagagcgggatgccaccagcttgtccaaagggaagttc

SEQ ID NO: 774152 - DNA, 76 bp, Homo sapiens
gatccagcctgcggagcctgtggggcagtgtgggcgaaatgctgaaaacttcgaccgatttttcacccgccatcca

SEQ ID NO: 774153 - DNA, 98 bp, Homo sapiens
tgtgatttacctgggtgagacagcttgagccccatcgtggattccaagacatccctgctgagagagccaagattttcgacaatgaagccaaagacgtg

SEQ ID NO: 774154 - DNA, 100 bp, Homo sapiens
cgagagcgtgccaggcgtgtactgcctatgtgtgctatctctcgtggaagaggaagaccaacacatgaaattgtcccttggaggcagcgaaatgggcctc

SEQ ID NO: 774155 - DNA, 100 bp, Homo sapiens
caggaggtgcaggcgagggtgcagagcctggagagcatgccccggccccctgagcaggtgtggatgaggtcaccattgtcaacattttgaccaaccgcag

SEQ ID NO: 774156 - DNA, 83 bp, Homo sapiens
cagcatccggggacagctgagctggcatcagaagacctacgccttcagcttggatttacactgggcaacgtggttggaatgta

SEQ ID NO: 774157 - DNA, 75 bp, Homo sapiens
ctgtgacgaaggtgctaccatcgtgagagtaagtccggttccagttgttggcaaaggagaggaagaggaagagga

SEQ ID NO: 774158 - DNA, 100 bp, Homo sapiens
ccttcaccatggacctgcgcagcgatgaccagggtgcaggagaacccggggaggaggcccaggctctgctggagggcttcgagggtgagatggacatgag

SEQ ID NO: 774159 - DNA, 100 bp, Homo sapiens
caccacctaacgctggccgacaacagcctggcgtccgccacggttcgagaacttgtcttggacaattgcaaatcaaatgatggaaaaattgagggcttaa

SEQ ID NO: 774160 - DNA, 83 bp, Homo sapiens
cagtggaagcttttaagcctatactttctaccagaagcttgaagggtttggttaaggggccacctacagatgctcctgcagtg

SEQ ID NO: 774161 - DNA, 50 bp, Homo sapiens
gtccaggcacgcgaggcccctcagaatgagatgctggaggaaggacatga

SEQ ID NO: 774162 - DNA, 88 bp, Homo sapiens
gcaggcggaactcagccagcccttgacagagaatgtgatcaatgggcaggactacgaagtgatgatgcagattgactgtcaggtgatg

SEQ ID NO: 774163 - DNA, 99 bp, Homo sapiens
acttgtatgccccaaaagatgactacaaacataggatgttttggcgagagatgtattcagtggaggaagctggttgaagaagaggatgaacttgaatct

SEQ ID NO: 774164 - DNA, 83 bp, Homo sapiens
caaattcgcctccatctgtaccatggtctcggcgcggaagatggccggcggcgtggacggccccatcgggatcccgttccccg

SEQ ID NO: 774165 - DNA, 100 bp, Homo sapiens
aaagcagtgatcagagtgaatgtatttcgagaacacaggcagactattcagggccttctctcagaactgttacataattgtgatggacaactgaaagggg

SEQ ID NO: 774166 - DNA, 100 bp, Homo sapiens
gtgggactgcctcgactggcagcgcgggaaacgtcaaactcgaggccaaccaactcaaacttgaagacatgaaatccccaaggagaaccactttgtgcct

SEQ ID NO: 774167 - DNA, 83 bp, Homo sapiens
ccggcttcggagcgggagtgttcgttgtgccagcgactaaaaagagatcctgataacttaagtgactctctcttttccggtga

SEQ ID NO: 774168 - DNA, 99 bp, Homo sapiens
tggaagacagttacgcttcgtcctccacctctccctccaacgcctttggcacaaaccaagaagattatgcaagttacattatgaacggtatcatcaaat

SEQ ID NO: 774169 - DNA, 100 bp, Homo sapiens
cattccattcgatggggatctcttatccatggaatcagagggtgcattcaaaattatggtgacaagctgaacatggagctgagtgagaaatacaagctgg

SEQ ID NO: 774170 - DNA, 115 bp, Homo sapiens
cgggaccacagaggtgctgagtgctgcccgattctggatcccactctgcttagctcagctcctcggtgggtggtacttctacgttcaggcctacaaatctctgagacacaggtca

SEQ ID NO: 774171 - DNA, 83 bp, Homo sapiens
gtggcggcggcgcaagggtgagggcggccccagaaccccagatttgggaatggatgatgaaggagatgatgacccagttcctc

SEQ ID NO: 774172 - DNA, 75 bp, Homo sapiens
agactctcctctctcatccgcacgcacaatatcgggcagaaagataatcacggagtgaagtgcaaccagtggtct

SEQ ID NO: 774173 - DNA, 100 bp, Homo sapiens
gaggccgggaggccgtgcccggaggtagcatcacgcagattgccatctcagaagagagcatggaagaggcagggctggaatggaactcagctctcaccgc

SEQ ID NO: 774174 - DNA, 75 bp, Homo sapiens
gcaggtgcggttgcggcgagccagattggtttttcagcagcagatgctgtaacaggactgaaattggtagaagag

SEQ ID NO: 774175 - DNA, 82 bp, Homo sapiens
aatcgcctcccgagaagaagttgaggcgctatccgaggtgctcggtggagtcatggcagtgccctttgtggaagactgggac

SEQ ID NO: 774176 - DNA, 90 bp, Homo sapiens
cggcgctctcctggctcccttctgccccagctccgtctcggcggcggcggggacggggttgctaccaaatccatcagaccacgctactgc

SEQ ID NO: 774177 - DNA, 100 bp, Homo sapiens
cgcaggcctgggaagccagccaggctttctgctcagcctaccacgctaccctccccctgctaagccacacccaggtggtgttcccactgatgaagagcag

SEQ ID NO: 774178 - DNA, 130 bp, Homo sapiens
gatcatggcggatggcccccggtgcaagaggcgcaaacaagccaatcccaggaggaaaaacgggcgccctgcgtccggcagaggaggcgagcatcccgctcaggtgatgaggaacccctcgcgcacccag

SEQ ID NO: 774179 - DNA, 98 bp, Homo sapiens
aggcggcggagccggtatgggcccgcctgaccctgggcgccgcgccgcacgagcaccagcctagagccaggcatttctcattgcaattgtggtaccag

SEQ ID NO: 774180 - DNA, 101 bp, Homo sapiens
cggggacggccggttctacatgaaggaggccatccagctcatcgctcgcatcgctgccgccaacggggcagcctggcatcctcgctacaacctcattgttg

SEQ ID NO: 774181 - DNA, 90 bp, Homo sapiens
accgggtggaccattacttaggcaagcaggtggtggaggtggatacagcagtcggagaacatctggcagagacaaatacggaccacctgt

SEQ ID NO: 774182 - DNA, 133 bp, Homo sapiens
cctccccaagagcatcctaaacgaccagtgctgggactggagtgcccacagtcagaagttattctggtacaagttaacccaggagaagcatttacaataagaagagaagatggacagtttcagtgcattacag

SEQ ID NO: 774183 - DNA, 83 bp, Homo sapiens
gcagtttctcacgacgggccgagcctgccactgttttaaaatcaaagatgggaaaatcggagaaaattgcccttccccatggc

SEQ ID NO: 774184 - DNA, 82 bp, Homo sapiens
ttgagagcttcaggggaaatggcttcagcgcagtatattactgcagccacataaagaagatccctaatagtcatttctcaac

SEQ ID NO: 774185 - DNA, 82 bp, Homo sapiens
gcacccggaagctcccggcgtctgcaccccggcagcgcgaggaaatgcccaaaggtacaccaggggttggaaaaaccacact

SEQ ID NO: 774186 - DNA, 92 bp, Homo sapiens
cataccagctgaagagcgacaagccgctggcagccgcggatctcaccgccgctcagggcaccatgactcctgtgaggatgcagcactccctg

SEQ ID NO: 774187 - DNA, 100 bp, Homo sapiens
ggccggcagtttccgtgggtctgtgaagaggtcggcggcccctgcgggcgccagtcagcggagactcccaagccctccatctccagcagcaacttaaacc

SEQ ID NO: 774188 - DNA, 75 bp, Homo sapiens
tgtcagctctttccccgtcagcatcccagccgtgctcacggccaccagcccctcgggttccaagatgcagctact

SEQ ID NO: 774189 - DNA, 75 bp, Homo sapiens
agccgcgcagccctcggagcacggagtaaaagtccctcgcaatttccgactgttggaagaactcgaagaaggcca

SEQ ID NO: 774190 - DNA, 83 bp, Homo sapiens
agcctcagttggaagcagccgatccagcctgcggagcctgtggggcagatacgtaggtaacctttccagagatgtgacagaag

SEQ ID NO: 774191 - DNA, 95 bp, Homo sapiens
tccccagcccgggccgtccatcctcgcattgctgttgaatggcttcattgaggaccctgagaggaagtatcactttgagtgcagcagcgaggagc

SEQ ID NO: 774192 - DNA, 100 bp, Homo sapiens
cttcaactggtatctatgaggccctagagctccgggacaatgataagactcgctatatggggaaggaccatgctcgacagctgaccaaggccatgatgcg

SEQ ID NO: 774193 - DNA, 100 bp, Homo sapiens
ggaccaccgggcgccacgccgcgaacgtggcagtatgatcacctcacggctacctatcttctgcttctagccaagaaggctcggggaaaaccagttcgtt

SEQ ID NO: 774194 - DNA, 100 bp, Homo sapiens
cgtcacatgtcattataccttcacccagcatttcatccctcgtcgaaaggattggattggcatctttagagctccttctcctgaaaaagccgaggaggag

SEQ ID NO: 774195 - DNA, 75 bp, Homo sapiens
gcgcgggcgcgcaggccgcggggagcacctggtttcatcgcaaaccagaaaaggttagaaatcatcaacgaagat

SEQ ID NO: 774196 - DNA, 98 bp, Homo sapiens
ttgaggatctttgctcttccatccgcctttgatcgtcttcctcttcagccatccaggtgaaaggtgtagcagtcactcggcctacacccacagcatcg

SEQ ID NO: 774197 - DNA, 100 bp, Homo sapiens
aggcgacatggggcacccggtgtaccgcggcgagaagccccagctgcactacgcggtgatctgcaactctttcaccatctgtaatgcggagatgcaggaa

SEQ ID NO: 774198 - DNA, 75 bp, Homo sapiens
agggggcggtgtccgcagagcagaaactatgttccaacttcctgtcaacaatcttggcagtttaagaaaagcccg

SEQ ID NO: 774199 - DNA, 74 bp, Homo sapiens
aacttcgttgcttgcttgcctgtgcgcgcgtgcgcggacatggcctcaaacgctctgatccagtatatacggcc

SEQ ID NO: 774200 - DNA, 145 bp, Homo sapiens
caagtatccgctgcggtgttctggtgctagagtggagaggctggcaaagaagaaggcacacgcatggcaacagcattattgagaaaagcccttacagaagagtgtggccgtaggtcagctattcacagtagtgaatcatcttgca

SEQ ID NO: 774201 - DNA, 83 bp, Homo sapiens
gaagagccggcggctgcccgggcatggagcaaagacagtgactgtgctgagaacatgtatattgacatgatgctctggagaca

SEQ ID NO: 774202 - DNA, 75 bp, Homo sapiens
gtgaaccctgaagtcggtgtctgctgcgttcacggcaggattcggttagagtggttaagaaagtagctcaataca

SEQ ID NO: 774203 - DNA, 101 bp, Homo sapiens
aaaccccggagtcttcctgatccatggacccgatgaacatagacacagctgtcaccactgactaaagaagagaaaactgcggcagagcaattcaaatttca

SEQ ID NO: 774204 - DNA, 101 bp, Homo sapiens
gatgccacctcccacctcagggcccccttcagccatgactcctccctacccgcagtttgaggacattggctccctggattatcaagagtttgtagttgaca

SEQ ID NO: 774205 - DNA, 90 bp, Homo sapiens
ctgagccgcacctaccgcacggaaaattgcctaagaattatgacccaaaagttaccccagatccagaaagatggctgccaatgcgagaac

SEQ ID NO: 774206 - DNA, 100 bp, Homo sapiens
atgaagaggatgatgatgaagagatgggtcatcagttaaggaagttgaaacctaccaccggacacgtgctttaagatctttgagaaaagatgcacagaat

SEQ ID NO: 774207 - DNA, 50 bp, Homo sapiens
ccaaaatgaacacagtcactggggtaacggagacggccgaccccggggca

SEQ ID NO: 774208 - DNA, 89 bp, Homo sapiens
tgacactaaggaaatgctgaagcttttgcaaaccagtccagctacgggggcccagccagccagcagctgagtgggggttacggaggcgg

SEQ ID NO: 774209 - DNA, 74 bp, Homo sapiens
tccatcaatgacatgatgagcagcatgtcagaccagaccgtccgggtgaagatgccttcaattaagttgcagag

SEQ ID NO: 774210 - DNA, 98 bp, Homo sapiens
tggcagctgctgttgaccttggcactggcaggatcaagtgatgctttttctggaagtgaggtgtgcaaagatccaccttacaaagtagaagaatctgg

SEQ ID NO: 774211 - DNA, 85 bp, Homo sapiens
attaccatggcgaggagtctctgtccgggggcctggctaaggaaaccctattacctccagaccatggtgaatccgggcagcagct

SEQ ID NO: 774212 - DNA, 83 bp, Homo sapiens
atgataacgaaccacaaatacctggctatattgtcgatgattcagtcagaggtaatagcctgcagctggtgttttgagaagcc

SEQ ID NO: 774213 - DNA, 78 bp, Homo sapiens
caacctgtccggggatcccagggagggagtgcatccgccccaacccttttccccctcgtctcctgtgagaattccccg

SEQ ID NO: 774214 - DNA, 82 bp, Homo sapiens
ggcacggcaacggacacggcggcacctgcatgacaacgtacagctcatcacgtcaaacgatcaaggagcaaaggcgggctgg

SEQ ID NO: 774215 - DNA, 127 bp, Homo sapiens
cttccagaatcactgagctgtaacaaagcactctgtgctagtgatgtgagcaaatgcctcattcagagtaaagacaagattgcatcctacagcaaaactccaaaaattgaacgaagtgatgtgagca

SEQ ID NO: 774216 - DNA, 100 bp, Homo sapiens
cacactatggtgcttcagccaagtgaaaggcactatcgagattggaaccacagaagtagccggatcgagctgggagatgtgacaccacacaatattaaac

SEQ ID NO: 774217 - DNA, 74 bp, Homo sapiens
gctgcggtggcggcgtttggatgattgtctctcggcggcggagtcgagatgccctgtatccaagcccaatatgg

SEQ ID NO: 774218 - DNA, 100 bp, Homo sapiens
agcagccggccaaccgcagccaggagaaggagttcgtgcaggcgtacgaggatgtgctggagcggtacaaaggctccaggttatggagatgttaggttgt

SEQ ID NO: 774219 - DNA, 99 bp, Homo sapiens
accttccacactgccacctgattaaaggaattggtgctggagaatctggtaaaagcaccattgtgaagcagatgaggatcctgcatgttaatgggttta

SEQ ID NO: 774220 - DNA, 88 bp, Homo sapiens
tgtgtgaagaacatcaagcaggcagaatttggacgccgggagattgagattgcagagcaagactctgaagaagaagctatggagacta

SEQ ID NO: 774221 - DNA, 75 bp, Homo sapiens
tccaggcctgacagctctgcggctcgggccctgaggtggagccagggcgtgtgatgggagcacggggcctgagct

SEQ ID NO: 774222 - DNA, 98 bp, Homo sapiens
ctgcagtatgtggccctgcgcaacatcaatctcatcgtgcagaaaagcttgtgagaagaatgagttgatgacatgctccataccagtggctagatgga

SEQ ID NO: 774223 - DNA, 101 bp, Homo sapiens
gaaaaacagtgctcggaaagcatctattgtgaaaaacctaaaggataccttagaaatcttcttcctattactcatgtgtgtatagaagaaggagaaaagcc

SEQ ID NO: 774224 - DNA, 75 bp, Homo sapiens
ctgagctgcgaggaaaatggcggcgggaggatctaaaatgtccactgaggcacaaagagttgatgacagtccaag

SEQ ID NO: 774225 - DNA, 75 bp, Homo sapiens
gccgccgagccggacgtgtccgcgaagatggcgggccgggtacaaggtgacctgccaaagctcagagctggccaa

SEQ ID NO: 774226 - DNA, 75 bp, Homo sapiens
ttcacacaccctgatttcgaaccgagcactgaagggcaagattcttgccaagagaattaatgtgcgtattgagca

SEQ ID NO: 774227 - DNA, 82 bp, Homo sapiens
atttccagaggatttacactaaaatatatcgctatcgtctcctatgagcaacgccagaattataaggatgacttcaatgcag

SEQ ID NO: 774228 - DNA, 75 bp, Homo sapiens
ctactgtactggctattggaaggaggagattctgaagataaggagggtggtgacttcacacgccataatggcact

SEQ ID NO: 774229 - DNA, 83 bp, Homo sapiens
tggagatatggcgcaactgcggcgcgtgtgaacccacatccctgcccccagggccacctgcaggacgccgacacctacccctc

SEQ ID NO: 774230 - DNA, 82 bp, Homo sapiens
aacgggtcgcccgcgattctcagggattgatcgcctcttcaggtgcaatgattctggactgagacgcgcttgggcagaggct

SEQ ID NO: 774231 - DNA, 75 bp, Homo sapiens
ccaaggactcgctccggatggccatcatggtgcagagggagacgtggtgggcggtccttcctgtgacacgaccct

SEQ ID NO: 774232 - DNA, 100 bp, Homo sapiens
cggaggccggcccccgagagccgccgacatgaagaaagacgtgcggatcctgctggtgggagaacggcagcaaggcgaaccccatccctactcactggag

SEQ ID NO: 774233 - DNA, 82 bp, Homo sapiens
acagcacgccagtgagggagatggagaccaatcacccacccagtgtgcgctacctgaacgacctggagcgtattgcacagag

SEQ ID NO: 774234 - DNA, 100 bp, Homo sapiens
gtagcagcagcagcagccgcggtggcagtgcaaaaggctggcagtacaggctgtgagaagacatttatcacagtgagtgccctgttttcccataaccgag

SEQ ID NO: 774235 - DNA, 75 bp, Homo sapiens
aaatgaaccatttgtctttagtcttggcaaaggtgggccatgcacagacacagctcatgtctcattaatcacacc

SEQ ID NO: 774236 - DNA, 73 bp, Homo sapiens
ggagactgcgggcccgtagctgggctctgcgaggtggtcttcaagctgacagagaagctgacggaacagaagg

SEQ ID NO: 774237 - DNA, 51 bp, Homo sapiens
acgagctgtgcgaggtgatcggaaatgctcaacaggaaccttggattatat

SEQ ID NO: 774238 - DNA, 100 bp, Homo sapiens
tggaagaaaagaaaaagaaaaaagacgacaagaaaaagaaggaagctgctcaaaagaagaaccttctgaggaaaggaggccatacagaaattgaacctca

SEQ ID NO: 774239 - DNA, 100 bp, Homo sapiens
gtacctgatgccctttctcctcaaccagtgtggatcccttctctattacctcaccttggcatcgacaggtcaggatttaagtttacctcaaaaatggaag

SEQ ID NO: 774240 - DNA, 95 bp, Homo sapiens
ggcggcaccgggaggccgggccgagcgaacaatcaaccatgacgaccgaatctggatcagactcggaatccaagccggaccaggaggccgagccc

SEQ ID NO: 774241 - DNA, 100 bp, Homo sapiens
gatcagaatgctttcaaggagtttttgggcacatgatggcagttgtagaaccagaatgtgaacaaagttctgccaccacctattactggtacagggaagc

SEQ ID NO: 774242 - DNA, 75 bp, Homo sapiens
gctcgggggccaactctgaggagtccactgcagcagaacggccggtttgtgggcgatgctgaccttgaaagacag

SEQ ID NO: 774243 - DNA, 74 bp, Homo sapiens
atacattcctgattacctgccacccattgtgtcttctcaagaaggtcctaggcctacttacaagcctccagtct

SEQ ID NO: 774244 - DNA, 76 bp, Homo sapiens
gcggccccggctccggcccccgcaggagcagctgtcagttccccaaaacgtgtcactcctacctgggcaagtaatt

SEQ ID NO: 774245 - DNA, 90 bp, Homo sapiens
cttttggataaagtcaatggtttacagttacagctgaatgaggtgtggtgaaactggtcatgtagccatcaactgcagcaagacaagtga

SEQ ID NO: 774246 - DNA, 90 bp, Homo sapiens
gccaaatgtgtttgcatgctggattcatgatgttgctatcaaaagttgagaaattgtcagaagaaatcatggagataatgcaaaatttaa

SEQ ID NO: 774247 - DNA, 82 bp, Homo sapiens
caataagagcagaggatggaacacttcagtgcattcaagctgtgcggtcagagaagaaacgccttaggaagccaagcaagtg

SEQ ID NO: 774248 - DNA, 50 bp, Homo sapiens
gccccccttcacacacagtaagtttgtgaatagcacaatggaagaagctg

SEQ ID NO: 774249 - DNA, 83 bp, Homo sapiens
ttctaccggaggcgggacatctccagcaccctcatcgccctggccgacaagcacgcaagtacatgtcccagagcaagcacacg

SEQ ID NO: 774250 - DNA, 82 bp, Homo sapiens
cccgaggaccaggggatgcgaaggcacttgcacctcctgcgccgccgccccccatccaaggatatgccttcaagcctccacc

SEQ ID NO: 774251 - DNA, 50 bp, Homo sapiens
gggacggagagaacacgagcccatcagatgcacacttgactgaaggagga

SEQ ID NO: 774252 - DNA, 100 bp, Homo sapiens
caccacgcggcctacgtgaacaacctgaacgtcaccgaggagaagtaccaggaggcgttggccaagggatgacccgaggtatggaatgtgtcctctcaag

SEQ ID NO: 774253 - DNA, 100 bp, Homo sapiens
tgataggcaggttaccatcactggatctgctgccagcattagcctggctcaatatctaatcaatgtcaggtcagcttcccagacgtggaaaaggctgaat

SEQ ID NO: 774254 - DNA, 82 bp, Homo sapiens
cacggacgcacgccactttttctctgctgatccaggttggtcaaagaaaaagtgatgtatgaaaaagaggcaaaacaacaag

SEQ ID NO: 774255 - DNA, 90 bp, Homo sapiens
ccccggagcccctttagccatgtggatacctacggagcacgagaaatacggcgtggatctaattatcatggacctgcgacagtttcttat

SEQ ID NO: 774256 - DNA, 74 bp, Homo sapiens
gaaacatcagtcagaatataccagtacaggagggctagtcgttggatttatcctaaccattgcaaatttcagct

SEQ ID NO: 774257 - DNA, 100 bp, Homo sapiens
ggtgttccgataagtccaaatcctgccaatatttgtgtggcctgtttgcgaagtaaagtggacatcagccaagctcggcttattccaggggtgtgtttcg

SEQ ID NO: 774258 - DNA, 75 bp, Homo sapiens
agtgtctctactgtcagaccacacacagaaacatgaacgattggatgcccatcgccaaggagtatgatccactca

SEQ ID NO: 774259 - DNA, 101 bp, Homo sapiens
tggctcagtacatattcaccttgaagaggaagacggggcggaagaccaagatcatcgagatggactctgtctactagtgacgatgtcgaagacagggaaaa

SEQ ID NO: 774260 - DNA, 82 bp, Homo sapiens
gtttctgctcctaaccaaccccgacaaaagagttgtaaagatgtggcacctgtggagaagactattaagttgcttcccagta

SEQ ID NO: 774261 - DNA, 74 bp, Homo sapiens
aggtgcccaccatcgagtccctgatagatggggaataaacggtggaattccttagaagcaccggattcagtttt

SEQ ID NO: 774262 - DNA, 98 bp, Homo sapiens
cctgcccgcccaggcgtcggccacgagagagcgggagcctcgctggtccccatttcagggggggccctcagcctcttggccttgaacgggctgttcat

SEQ ID NO: 774263 - DNA, 100 bp, Homo sapiens
ggattgactgctgctggggctgggctcgccagtcttggggacagtgtcagcatgggcaccagttgcgtcttgaagtgccatcagctgtaaccaaagttcc

SEQ ID NO: 774264 - DNA, 75 bp, Homo sapiens
tggtaacttcctaggagggaagtggatcccaaagcctggtgtgtccgtttctctggtgaatccccagccatccaa

SEQ ID NO: 774265 - DNA, 82 bp, Homo sapiens
aaaaaaccattatccagaatcccacagaccagcagaagcaactgcggcatagcaacctggtgcagctcctgggcgtgatcgt

SEQ ID NO: 774266 - DNA, 80 bp, Homo sapiens
ggagtttcgttctggctctagcagagttttgattaccactgacctgctgttgaacaggtagttaagcccccccaaaacaa

SEQ ID NO: 774267 - DNA, 75 bp, Homo sapiens
gttgcctgctcccggagggagacgcgctgccgaggagaacccagcggatgccttcaattaagttgcagagttctg

SEQ ID NO: 774268 - DNA, 96 bp, Homo sapiens
ggcgccgctcccaagatgtcgcagacggccatgtccgaaacctacgctatttgtcgtagatgtccagacaagccagatcaccaagatccccattct

SEQ ID NO: 774269 - DNA, 98 bp, Homo sapiens
ggaagcctctgcgccgccggcaccatgagtactatactggcaattgctggagaagattttgcaattgttgcttctgatactcgattgagtgaagggtt

SEQ ID NO: 774270 - DNA, 50 bp, Homo sapiens
gttacaaatgaacaaggatctcccagttccaagatgagatgggattctcc

SEQ ID NO: 774271 - DNA, 87 bp, Homo sapiens
cccacgcggccctgctgaaagtggcgcaaatgtggggtgccgaggctcaggcagcatgacgacggagacctttgtgaaggatatcaa

SEQ ID NO: 774272 - DNA, 75 bp, Homo sapiens
tcccgggaggggggagcggcgttggaggccaccgtttccaggtccactggctattctgaggtgatagttgtcgtt

SEQ ID NO: 774273 - DNA, 87 bp, Homo sapiens
cagacagtacgggctcccttcgccaaactcttcattttctctgtggtcattgggactcccacacttaaacaaagaaaggaaattctg

SEQ ID NO: 774274 - DNA, 100 bp, Homo sapiens
ggggagggtggttaccgctgaggagctgcagtctctgtcaagactatgaaagtgatgacgactcttatgaagtgttggatttaactgagtatgcaagaag

SEQ ID NO: 774275 - DNA, 50 bp, Homo sapiens
atcgagaccatcctggctaacacggaaagaagattctatatgatatactt

SEQ ID NO: 774276 - DNA, 90 bp, Homo sapiens
tgcgagtaggtgagatcatccagggagatggcctataatgagagcctacaacatgtcagattggttatacaagtgttcagttcagaaact

SEQ ID NO: 774277 - DNA, 98 bp, Homo sapiens
ggggtttcctgttcctccttctgcgcggctgcagctcgggacttcggcctgacccagcccccatggcttcagaagagtagtattattgattccacaga

SEQ ID NO: 774278 - DNA, 100 bp, Homo sapiens
cgggccggaacctcaagaaggaggtcagccgggtgctgtgcaagcggtgcgccttgccttacacccagacaaaactctcgttgcaactggccaagtcggg

SEQ ID NO: 774279 - DNA, 83 bp, Homo sapiens
cgtgcggagaagaagctgcggccgcacctggccaagccttggtcatctataatttcctgagcctgtgctatgagtacctagga

SEQ ID NO: 774280 - DNA, 90 bp, Homo sapiens
aagatggcggatctggaggagcagttgtctgatgaagagaaggtttgcctgcaatgagatttcattctctacatttaaaggacatccttt

SEQ ID NO: 774281 - DNA, 101 bp, Homo sapiens
ggagaactaaatgggagaagaggaatgttccctgacaatttcgttaagtgctacacacgcagggccctgtcgatggcagcctttacgcgaaggtgaggaag

SEQ ID NO: 774282 - DNA, 100 bp, Homo sapiens
ctccaacctgctcatcaacaccacctgcgaccttaagacttcacagagaatgcagttgtcttgacttcaggtctgtctgttctgttggcaagtaaatgca

SEQ ID NO: 774283 - DNA, 74 bp, Homo sapiens
gccgggcggagagaactcagcgaggattctgagaactcccccactggaaaggattctgaaagaaatgaagtcag

SEQ ID NO: 774284 - DNA, 80 bp, Homo sapiens
cgtggccttagctgtgctcgcgctactctctctttctggcctggaggctatccagcgacggggaggtttactgcatcgac

SEQ ID NO: 774285 - DNA, 90 bp, Homo sapiens
caaaagaactagcagattttgtaagggaacggtgaaagaacttgtcctggacaacagtcggtcgaatgaaggcaaactcgaaggcctcac

SEQ ID NO: 774286 - DNA, 75 bp, Homo sapiens
taagacgagtaggcgaagcaaggactgcaagaggcgcagatgttccagagattcctggagatcttactcttaaga

SEQ ID NO: 774287 - DNA, 83 bp, Homo sapiens
gcagcggtacagcgcccgactgctgcaggccggctacgagcccgagaggttcctgcacttggccatcatccatgaagaaaagg

SEQ ID NO: 774288 - DNA, 100 bp, Homo sapiens
ctcagcctttgaaaaaatgtctgtcacatatgatgattccgttggagtagaagtgtccagcgacagcttctgggaggctatgtggaggagatatagagcc

SEQ ID NO: 774289 - DNA, 50 bp, Homo sapiens
gctgcctcgccgcgtctcgccacgatcaggatcctcatgaccagccaaag

SEQ ID NO: 774290 - DNA, 83 bp, Homo sapiens
ggttgtcgcccatgatctgatccggaagatgtcacctggaaccctactctggaaactgtcagtcccagggcactggggagggc

SEQ ID NO: 774291 - DNA, 83 bp, Homo sapiens
ggcacttagctgctgacaaacaacctgctccgtggagcgcctgaaacaccagtctttggggaatctaagggaggaaattatca

SEQ ID NO: 774292 - DNA, 60 bp, Homo sapiens
cggcaggttcgaggcgattcgagtggtggttctggcggggctgttcgtgatggtgttgat

SEQ ID NO: 774293 - DNA, 97 bp, Homo sapiens
gcattccctccaacccttcccaccgtatccagtgtgcagcaggctacgagcaaagtgaacacaacgtgtgccaagattcaagtcaatctgaaagtcc

SEQ ID NO: 774294 - DNA, 101 bp, Homo sapiens
gcctttgaaaaaatgtctgtcacatatgatgattccgttggagtagaagtgtccagcgacagcttctgggagggaggttcccctgaaggatgctaaggaat

SEQ ID NO: 774295 - DNA, 75 bp, Homo sapiens
atggagaacatgcaacagtacgttttgctggtgttgtccctcccgtggcaggacttttttcaggagatattgcac

SEQ ID NO: 774296 - DNA, 82 bp, Homo sapiens
ttctgtctcgaaccttcaccactaacattgtggatttcttaaagaagaagcatgattttgtagaccttattataaagcacat

SEQ ID NO: 774297 - DNA, 51 bp, Homo sapiens
acagggcacaccaaactccatctgactcggtgaaatacctggagtgctcag

SEQ ID NO: 774298 - DNA, 87 bp, Homo sapiens
ctgtgttctggacaaagatcagcccagattgccttcctgcagggagaaaggaagggccaagaaaatttgaagaaggatcttgtgagg

SEQ ID NO: 774299 - DNA, 50 bp, Homo sapiens
gccgccgcttgtgctgcagccatgagtcaccatcctggtaaatagagggt

SEQ ID NO: 774300 - DNA, 100 bp, Homo sapiens
gcctcggccgaccagggacctgcccgcctgcggctgctccgggagctgacatggacccaaatcctcgggccgccctggagcgccagcagctccgccttcg

SEQ ID NO: 774301 - DNA, 100 bp, Homo sapiens
caatgaaaagttctatggtgtcactgtcttcaaagccctcaaggctgtgaatttttcaaggaatataaagatcgggattacatggcagaagggctcatat

SEQ ID NO: 774302 - DNA, 82 bp, Homo sapiens
cgcacccgggcacacaaaaaacgggtcgcccgcgattctcagggattgatcgcctcttcagcacttgcacctcctgcgccgc

SEQ ID NO: 774303 - DNA, 90 bp, Homo sapiens
caccaggaaagatgttgaagtgactaaggggagacttcagcacaaatgatagaagaaaatttgaactgccttggccatttaagcactatt

SEQ ID NO: 774304 - DNA, 101 bp, Homo sapiens
ccactcccaagaagaataagcacaagagaaagaaggttaagctggctgtcctgaaatattataaggtggtcgtgtgatggtaacagatgctgacaggtcaa

SEQ ID NO: 774305 - DNA, 98 bp, Homo sapiens
cagaacacagcagggcggaggaaagtgcagctgctctgttaaaagcgaaaatgaaacaattgcctgcggcaacagttcgactcctttcaagttctcag

SEQ ID NO: 774306 - DNA, 83 bp, Homo sapiens
cctggaacaacgtcaagtacggaggctactcacagtcgaactacaactccccggggtccggccagaactacagtggccctccc

SEQ ID NO: 774307 - DNA, 82 bp, Homo sapiens
gtaccggcagatcctcaggggcaagtacagttactctggggaggtgatgtgtccaatctagatcccaacttctcatttgaag

SEQ ID NO: 774308 - DNA, 75 bp, Homo sapiens
caagacatttcctgctcggaaccttgtttactaattgtatggcctcacaagtcttggtctacccaccatatgttt

SEQ ID NO: 774309 - DNA, 100 bp, Homo sapiens
ttggtccgcgcgttgctgcgttgtgaggggtgtcagctcagatggtggtgagtgccattgtggacaccttgaagacagcgtttcctcgctctgaacccca

SEQ ID NO: 774310 - DNA, 74 bp, Homo sapiens
gttacagagggccgagaaggacaggatcagctatttgcatgcaaagaacatcatccatagagacatgaaatcca

SEQ ID NO: 774311 - DNA, 98 bp, Homo sapiens
cttcaggagcctaaagcgtggggtcccctcttgctgttggctgcacatcaggaaggctgtgatgggaatgaaggtgaaaacttggagatttcacttca

SEQ ID NO: 774312 - DNA, 80 bp, Homo sapiens
cggggatgtggacgaaggggccgacctcctagcgccatcatgaccgggtcctataacaacttcttcaggatgtttgatag

SEQ ID NO: 774313 - DNA, 95 bp, Homo sapiens
ctcaccagccctcgcctcccgagtcactgcagccaacccttcagcaaggtggtctttgggaagaagcttcctgcctttgccaccatccccatcca

SEQ ID NO: 774314 - DNA, 75 bp, Homo sapiens
gctgctttgccttcagcctctcccaggactgggagctccctgcgaagagagaggaaagaccacagcaagattctt

SEQ ID NO: 774315 - DNA, 99 bp, Homo sapiens
tggcgtctccccgactccacctgagggactggctcctggggattactacagcatcccatttcccacacccactactccgctgactgggagggatggtag

SEQ ID NO: 774316 - DNA, 145 bp, Homo sapiens
cggcctctagctcgagcagcaggagcagcccgcaccggacaacttgcgagccatggggctggcggatgcgtcgggagctcgtccgcatggtgctgaatggctgaggaccttcccagtctccccagagtccgtgcctttccctgtg

SEQ ID NO: 774317 - DNA, 108 bp, Homo sapiens
tgcgatggacagaataactgtcaagacaacagtgatgaggaaagctgtgaaagttctcaaggaaatgggtcctgatgaatatgaagagatggaagaagaggaggagga

SEQ ID NO: 774318 - DNA, 50 bp, Homo sapiens
ccggcgggaaggaaaaccgcgcagagaggccaggtcagagcagcccacca

SEQ ID NO: 774319 - DNA, 90 bp, Homo sapiens
cttccccggccggtccctcgcctcccggccgagctgacggtacatgtcccagagcaagcacacggaggcccgggagctcatgtactcggg

SEQ ID NO: 774320 - DNA, 100 bp, Homo sapiens
aatgttcaagtttaccaaaagagaggcaccgctggaacactaatgagaaggacagaataacgggctcccagattcacaagccccaccaagaggatcaccc

SEQ ID NO: 774321 - DNA, 76 bp, Homo sapiens
gtccacatggcatgggagaaagaggaatgggcctggcctgtgggcagctaagaaacctttccagcttggacctacg

SEQ ID NO: 774322 - DNA, 75 bp, Homo sapiens
cttcttactggcagggccacctgcgtctgtggagaccctggggcccagacgccctcctgcaaaacggcccaacta

SEQ ID NO: 774323 - DNA, 100 bp, Homo sapiens
gaaagaattttctccttttggatcaattaccagtgctaagatttataagattggccagggctaccttatcaaggacggcaagctgatcaagaacaatgcc

SEQ ID NO: 774324 - DNA, 82 bp, Homo sapiens
gacaaagagcccctcatcgagctcttcgtcaagagctgcgggtggaagtggagcagccccatcaccagctgccccgggaagg

SEQ ID NO: 774325 - DNA, 75 bp, Homo sapiens
tgatgatatccttctcaaccttgtgggatgtgaaaactctgttactgaaggtgtgactgaagaaatatcaaatgt

SEQ ID NO: 774326 - DNA, 100 bp, Homo sapiens
cccgggttcacctaatagtgcaagatgtggacgagtgtgcaacagattcccaccagtgcaaccccacccagatctgcatcaatactgaaggcgggtacac

SEQ ID NO: 774327 - DNA, 50 bp, Homo sapiens
gctgaccctgggagacatcgacgcttcgagagctgtgcccaggagtgaac

SEQ ID NO: 774328 - DNA, 100 bp, Homo sapiens
acgaagccagctgttggagcggcccctccccagagggtcctgtacccctcacagctgctacaggagctgagagaccctaccctcactttccgtctgcttg

SEQ ID NO: 774329 - DNA, 100 bp, Homo sapiens
ggagaccataacccccgacagcgccatggcccagattctgccaattcgttttcaggagcatctccagatctttaatctcatgaagtacgacagctacagc

SEQ ID NO: 774330 - DNA, 74 bp, Homo sapiens
cggagtacgtcgttcccgctgcgctaggggaagcgggcagagatctcggctcaccaaattccacaacctgaagg

SEQ ID NO: 774331 - DNA, 95 bp, Homo sapiens
acctcctgcaaaagtggaagcgaagccgaaaaaggcagcagcgaaggggaaaaaagttgttccatgtagacatgactggcatcagactggaggtg

SEQ ID NO: 774332 - DNA, 75 bp, Homo sapiens
caaggaggtgctgaagagcgaggagtctgaagatgatgagaaactgaaaaagaggaaggagcgatttgggattgt

SEQ ID NO: 774333 - DNA, 75 bp, Homo sapiens
cgccgagctggcttcgagaggaacaccaagttcatcgccccctggttccatggagatctattgggaaactgatta

SEQ ID NO: 774334 - DNA, 98 bp, Homo sapiens
gagcaggaaacaagtgatgctgaccaacgctgcgatgactggggactagacaccatgaggcaaatccaagtgtttgaagatgagccagctcgcatcaa

SEQ ID NO: 774335 - DNA, 74 bp, Homo sapiens
gaagccacgtgcagacatctacaaccttcgatctcctgacgatctgaggacccagaagaagatgccaggttaaa

SEQ ID NO: 774336 - DNA, 100 bp, Homo sapiens
gtccagccgctcaccctggacagaggaataagacgagttggaagaagacctgatcaacaacttcagggtgaagggaaaataattgatagaagaccagaaa

SEQ ID NO: 774337 - DNA, 100 bp, Homo sapiens
ctgctggacaaatattttggaaatgttctccaaaatacttatcattcaggttgaataaaccagttctacagactgcttcttccatgcatttcccaatgat

SEQ ID NO: 774338 - DNA, 100 bp, Homo sapiens
gagcgcccggattggggatgagtatgcggaggacagctctgatgaggaggcacaggtaacagcatcatggtcatgaaaatgaatggatccctccatcaag

SEQ ID NO: 774339 - DNA, 76 bp, Homo sapiens
tgcttttgctacgacctcattttctgctggaactggagtccatagaggccactgtattctattgaagaacatgtct

SEQ ID NO: 774340 - DNA, 99 bp, Homo sapiens
aaaagatgatgagaaataaggacaaaagccaagaggaggacagttcgctacacagcaatgcatcgagggtaagatgatcatgcaggataaactggagaa

SEQ ID NO: 774341 - DNA, 98 bp, Homo sapiens
attggaacttcctgttctgatagcgtggaagccacttggagccagtgactatttggaactatcaaagaattttgatacaatatttttacgaaacattc

SEQ ID NO: 774342 - DNA, 100 bp, Homo sapiens
ggtggtctgtgaagccacacagtgtccagatacgaggggggcaatggcggcttcctgtgttctactgcacactgggcagaagatgcctctgattggtctg

SEQ ID NO: 774343 - DNA, 82 bp, Homo sapiens
ccccaccgccgccccctccggcgtgttcatgcccccgggatccagagacaatggccccgatgggatggagcccgaaggcgtc

SEQ ID NO: 774344 - DNA, 82 bp, Homo sapiens
cgcggggatcgcccccgagcgctgcgtcctgcggacttcccaagtaagaagcggaagaggagccgctggaaccaagacacaa

SEQ ID NO: 774345 - DNA, 75 bp, Homo sapiens
gagataaattcccggaaccgcgattcggcgtgtcaggagccttcacgtaaatgggtccagtcatgcctcccagta

SEQ ID NO: 774346 - DNA, 74 bp, Homo sapiens
ccggagacgggcgaggagcacggcagcagccaggctaacatttccaatgatcactggccatctttggttcaaga

SEQ ID NO: 774347 - DNA, 139 bp, Homo sapiens
ccccttagctcctgaagcgattaaccagcaacagtgagaaacaatgagagagagagagagtagagggactactggcattcagtgatgtggtcatagaattctctccagaggagtgggcatgcctggaccctgcccagcg

SEQ ID NO: 774348 - DNA, 100 bp, Homo sapiens
tgcaacttttttcgaaagctgggtttcccgggagatcccaggcggtgacagagtggagccatggctagaggggttcggtccgagcccggtgggaggctcc

SEQ ID NO: 774349 - DNA, 83 bp, Homo sapiens
cagagctcccgggtcgtctttcgtgtggccgcgagcaaaatgatgcttcaacacccaggccaggtctctgcctcggaagtgag

SEQ ID NO: 774350 - DNA, 80 bp, Homo sapiens
aaagttccagaaagattttgagtcagtcttcactgtttccaatggaagatggattcttggatgatggccgtggggatcag

SEQ ID NO: 774351 - DNA, 51 bp, Homo sapiens
gttgggtttgttcattatctgaggaaaattgcctaagaattatgacccaaa

SEQ ID NO: 774352 - DNA, 97 bp, Homo sapiens
agcctccttcccgacgtcctcaagaaagtcctgtgccggcagctgtggccaacagcaacagagagagtccagatgaaatcatgcaccaggacatcgt

SEQ ID NO: 774353 - DNA, 100 bp, Homo sapiens
aatgacatctacctccatcaggaccccagatgtctgacagccctgtgtgacaccaagataagtaacgtgtttcagtcacctccagtaacacgggcgtgcc

SEQ ID NO: 774354 - DNA, 50 bp, Homo sapiens
tctcgcagaggatgtgttagactcagaaaatggtggagtcaatgaagaaa

SEQ ID NO: 774355 - DNA, 75 bp, Homo sapiens
cgacatggtcatgagcttcgtcaacctcggcaaaagtcaacaactctagcttaattggagtaggctatactcaga

SEQ ID NO: 774356 - DNA, 82 bp, Homo sapiens
gagactcatacgcaacctcaatggttttaaaatcaaagatgggaaaatcggagaaaattgcccttccccatggccagcttgt

SEQ ID NO: 774357 - DNA, 100 bp, Homo sapiens
ggggagctgcgacgcgcaagggctgcggagccgcgggccggcgagcgcgtcgccaccatgggactttgaacatgtcggggatcgccctcagcagactcgc

SEQ ID NO: 774358 - DNA, 88 bp, Homo sapiens
cagaaggacaaaaactctttgagtttcggagaggagtaaagagaggctgacccgcggctgattgagtccctctcccagatgctgtcca

SEQ ID NO: 774359 - DNA, 83 bp, Homo sapiens
gaattcaagagaaagtacggcaagtccctgtactattatatccagggctctctaaatacgtacagattctgcgataatgtgtg

SEQ ID NO: 774360 - DNA, 49 bp, Homo sapiens
tttccctggacctcaagaaaactagagtttgcagaaaaaacttcagcat

SEQ ID NO: 774361 - DNA, 80 bp, Homo sapiens
gaggttccgtcagtgtctgatgtcagatttatctcatgctgtgcagggattcagaatgtgttgctggacttcaagatagg

SEQ ID NO: 774362 - DNA, 91 bp, Homo sapiens
ctgctcttttcgatccgggacggccggtcaggctcgccgccgagctggtgagaagccctaccactgcaactgggacggctgcggctggaag

SEQ ID NO: 774363 - DNA, 89 bp, Homo sapiens
cccagacggacacctttttcaagttgaatatgcccaggaagcggtgaagaaaggatccaccgcggtacggggctgatgttgacgtcaac

SEQ ID NO: 774364 - DNA, 75 bp, Homo sapiens
ttacaaaggaactgtccacactgctgaaaaatctggttgatgaaaagcccagaaccttgatgacagattgtctgg

SEQ ID NO: 774365 - DNA, 100 bp, Homo sapiens
cctggacccagctgagcgggcggtcattcgcatcgcaggaattggtggagagaaggcgcaccatgatggaagatttccggaagtaccggaaaatggccca

SEQ ID NO: 774366 - DNA, 51 bp, Homo sapiens
acacccacggctgtggctgtgtgaggttgattcttcaccacactgaaacca

SEQ ID NO: 774367 - DNA, 100 bp, Homo sapiens
aaatcttcagggaatggccaagtgacaaagggtgtgaacggcatgtctgtggatgagaagcctgactcccccatgtatgtgtatgagtccacagtccact

SEQ ID NO: 774368 - DNA, 75 bp, Homo sapiens
ttgggtttagcacgatgagctcaatcggcactggggtgatgaaggggataacttctatgtgattgatcaaggaga

SEQ ID NO: 774369 - DNA, 100 bp, Homo sapiens
tcgtcataattctagaattcacgtgagaccctcgcgtgccaaatgtggtagtgttaaagatggctccttggcggcatgtgcattttctcctaatggaagc

SEQ ID NO: 774370 - DNA, 87 bp, Homo sapiens
gtgtttattggcaattctgaagaaactatggaggttaaaactcttggaaaactggaacggtggtcgtcggttttctgagggtacttc

SEQ ID NO: 774371 - DNA, 100 bp, Homo sapiens
atcatttcacagctgattcctgggagcacatccatttcattggcaaggcctcccagtagcattggatgcaggaaaaaatacattgacggtgaaaaacaag

SEQ ID NO: 774372 - DNA, 74 bp, Homo sapiens
gatggctataatgggtatggaggaggacctggaggagctgaagtgggaatcagtacatcgagaatccacgcccg

SEQ ID NO: 774373 - DNA, 100 bp, Homo sapiens
gcaagaagactgatggagcaggcttgcaatattaaagtggccttgggggacttgcaggtctgagtagcttgggtttgaatactaccaacttctctgaact

SEQ ID NO: 774374 - DNA, 98 bp, Homo sapiens
ggcaagagcaggagcccggcaccccccgccgacaaggagggtttggaaacgatgtgcagcacttcaaggtgctccgagatggagccgggaagtacttc

SEQ ID NO: 774375 - DNA, 100 bp, Homo sapiens
tttgtggtcaccaaccagaccacctggacagacgggtggacttcccgctggatcgaatccaaacacaagtcagattttggcaaattcgttctcagttccg

SEQ ID NO: 774376 - DNA, 90 bp, Homo sapiens
gcagtttaaacatgaacagcaccaagctctcagctgacacctacgaagatctgaaggccagcttggagaacagcctgagggaggtggagg

SEQ ID NO: 774377 - DNA, 96 bp, Homo sapiens
gtcaaggcacttttatatatccagatggatccagatatgaagagacagggtctcttgagaggccgaggcaggcggatcacttgaggtcagaagttc

SEQ ID NO: 774378 - DNA, 116 bp, Homo sapiens
ctcttcatgggccatgcccggtgaccacttttggaccaaaggcctgtgtgctgcagaacccccagaccatcatgctgacccagctggatgttgacagccacctggcccagtgcttg

SEQ ID NO: 774379 - DNA, 100 bp, Homo sapiens
gtgatattgaccatgatggaatgcttgacagagatgagtttgcagttggtcagagtattattccaatgcttactggagaagtgattcctgtaatggaact

SEQ ID NO: 774380 - DNA, 100 bp, Homo sapiens
ccagttagttacttcctgtctagagttgtagcttccacctgggccctgttggctggtggcggcttttctacgtggacttaccggcaaggctacgatgtca

SEQ ID NO: 774381 - DNA, 51 bp, Homo sapiens
ttcctatctagcctgtattcccagttcacctggtgcctggacgcctgcatc

SEQ ID NO: 774382 - DNA, 100 bp, Homo sapiens
gaagaagtagacatggcgagcgactccccggctcgaagcctggatgaaatagatctctcggctctgaggcctcccagtgcaacgtcagcttaaagaagca

SEQ ID NO: 774383 - DNA, 75 bp, Homo sapiens
ccgacagcgagaagctcaacctggactcgatcatcgggcgcctgctggaaggtgatggcccgctccctctcccca

SEQ ID NO: 774384 - DNA, 100 bp, Homo sapiens
tctcctcaccctgctgtgactccaccacagcacccttacccttctgaagaacagaaaaagcagttggcacaagacacgggactcaccatccttcaagtga

SEQ ID NO: 774385 - DNA, 129 bp, Homo sapiens
ctacaggtgcttgccactatgcccaactaacatttggaattttcgtatacgtggattctagaggggtgacagcgaaacacggcaccgaaagcgaaggaagctcctgctcctcctaaagccgaagccaaa

SEQ ID NO: 774386 - DNA, 50 bp, Homo sapiens
gtgacagtctgcatgtgcagttttcaggattatcctgatgcccttatcac

SEQ ID NO: 774387 - DNA, 75 bp, Homo sapiens
agcatgttggacgatatctaatattacagctggaaatagggcacagatccaggaaaatcctgccttgcttcgttg

SEQ ID NO: 774388 - DNA, 75 bp, Homo sapiens
ctgggagccccctccgagttacacctccagagccaaaagtaaactcagcctcctcccaagctccctgtgggtcct

SEQ ID NO: 774389 - DNA, 100 bp, Homo sapiens
attctccatggacttggtattcagccttcttaggagttgactttggctactactggttccatcgtatggctcatgatgtattgctgtccttgaatattag

SEQ ID NO: 774390 - DNA, 50 bp, Homo sapiens
gattcgcagtggtcgcttcttctccttggcggcttcaatgatccatccta

SEQ ID NO: 774391 - DNA, 74 bp, Homo sapiens
aattctccaacaatggaggccagtggctggtctcagagctacttcctcagccgagcccagagcctgtgtggccc

SEQ ID NO: 774392 - DNA, 75 bp, Homo sapiens
gcaggaatgcttactgttgcgtggttcgttattaacagctatgctaagaaggaatctgatcttaatggcgcccag

SEQ ID NO: 774393 - DNA, 75 bp, Homo sapiens
ccggcccacagtgggggtgtgcaaacccgagagaactggagctgcgcctggatcccgccacagtgaggagacctg

SEQ ID NO: 774394 - DNA, 101 bp, Homo sapiens
tccaatcaagtgcccttggacaaagcctgaaaccagtgcacctatgatatgtgttttagaaatagccgttaaactttggtttgaatgaagaatgtctctca

SEQ ID NO: 774395 - DNA, 50 bp, Homo sapiens
tccaaagaatcctgaaccagagagtggaaacaaaatgtcagtcagtgtgc

SEQ ID NO: 774396 - DNA, 88 bp, Homo sapiens
tgcagctccaggaagcgagatgtcgaagccgccacccaaaccagtcaaaccagggtgatacaattctggagactggagaagtaattcc

SEQ ID NO: 774397 - DNA, 75 bp, Homo sapiens
atacttcagtcaccaacgtgccaaatatggaccttcgggagaaaaactgggaagcaatggaagcattggcatcaa

SEQ ID NO: 774398 - DNA, 100 bp, Homo sapiens
gagaactacaggaacctgctttctctcgatgaggataacatccctccagaagatggacctcttggcatgggaagcactaccaccagtaccacccttcgga

SEQ ID NO: 774399 - DNA, 51 bp, Homo sapiens
ccccgttcctggagattctgattgagggtggttctcttcccaaagtggaag

SEQ ID NO: 774400 - DNA, 100 bp, Homo sapiens
taaattatgatctacctaccaatcgtgaaaactatattcacagaaacgttcagtgcctgtagccactgtagaactggaagaaaagaggttcagaactctg

SEQ ID NO: 774401 - DNA, 78 bp, Homo sapiens
tcaccgtgtgggagcgggagctgcggaaaggtctcttgatggtcgtctccaggtatcccatcgaaaaggattgccaca

SEQ ID NO: 774402 - DNA, 95 bp, Homo sapiens
tgtgccctagcaccccgagaaccgtcagtttgagccagatgggcagagcggcttgggtaaatccaccttaatcaacaccctcttcaaatccaaaa

SEQ ID NO: 774403 - DNA, 98 bp, Homo sapiens
gatgtgctctactgtcacctgtatggataccagcagccccggaccccccgattcaccaacgagccctattttctggatatgccgcagaaggatccgtg

SEQ ID NO: 774404 - DNA, 89 bp, Homo sapiens
atcatgggaatttccaaggggattcaaacttcaacagaatgtggcaaccaggagtttggatcataatacaagagaagcacagggcaaag

SEQ ID NO: 774405 - DNA, 75 bp, Homo sapiens
agatgcttaaaaatcaccagttactttaatgaatgatgttgaatttgaagtatcatcggaccgacggactgggaa

SEQ ID NO: 774406 - DNA, 90 bp, Homo sapiens
aagctttcagactacgtggggaagaatgaaaaaaccaaaattatcgccaagattcagcaactaaatgaatctacctttgatactcaaatc

SEQ ID NO: 774407 - DNA, 100 bp, Homo sapiens
gcgctcgtctggcggagctggttggggaatggcggtcaatgtgtattctacctcgataacccaagagactatgagcagacatgacatcattgcatgggtt

SEQ ID NO: 774408 - DNA, 90 bp, Homo sapiens
agcagctcaagcacctggagtccttggaatatccccggctcggctgtgctggtgtttgacatccatgtgatcgacttccacaacccttcg

SEQ ID NO: 774409 - DNA, 83 bp, Homo sapiens
cagagacagaagcagatggattcgtccttttagtcatcagtgagttctgcctcagtcagctcccaagtgaggacgcagtcacc

SEQ ID NO: 774410 - DNA, 75 bp, Homo sapiens
ctcggcgggctgtggggcctccgcgccgcggccgttagtcatgtcggagccaacacagatctatagatttcttcg

SEQ ID NO: 774411 - DNA, 83 bp, Homo sapiens
ctccttctccagcatgggctcgcctgtcaacgcgcaggttgataaggattttattcctggactcatgtacatccgagacaatg

SEQ ID NO: 774412 - DNA, 74 bp, Homo sapiens
ggcagaggtggaggcgctttgaaagcctcttctgaaacagtctccctggagcaaccatcagagcagtggctggg

SEQ ID NO: 774413 - DNA, 75 bp, Homo sapiens
ggaatccaacaagggcaaatcaatgttggagttccagctgctacaggagctgagagaccctaccctcactttccg

SEQ ID NO: 774414 - DNA, 100 bp, Homo sapiens
gcggtgcctgagcccgtgcctgtcttcagatcttcacagcacagttcctgggaaggtggagccaccagcctctccctgcagtctctggtcccagcccacc

SEQ ID NO: 774415 - DNA, 74 bp, Homo sapiens
tttgtgcaggacaccgacatggaacagggactcactgggggtttgcctgcaatgagatttcattctctacattt

SEQ ID NO: 774416 - DNA, 102 bp, Homo sapiens
cgcaggatctcacagctgcagtctaatagtaacacagagtcttcccatgcacaagatgattaatacagatcttagcagaatcttgaaaagcccagagatcca

SEQ ID NO: 774417 - DNA, 100 bp, Homo sapiens
tttgacttggaagcaatgtttgaacaaactcgaagaacagctgtggaaagaagttgcaaaacactgggtttttcttcccccagtccctcagctgctgctg

SEQ ID NO: 774418 - DNA, 87 bp, Homo sapiens
cgtggcgtcgtctgcgaccgctgccttctcggtattctaccttgtaaatactgttatttgtatatactgtaaatgatgacatcggtg

SEQ ID NO: 774419 - DNA, 100 bp, Homo sapiens
aaaacattctttactgaggagctccagctgagtattagagattcgggaactggagcctctcctctgtcacagtgacaatccatctcagctcatctggaca

SEQ ID NO: 774420 - DNA, 75 bp, Homo sapiens
cggcattttgaggcggtcctcctagcggcctggtgaatccgccatactacatcccgctggttgagctggtccccc

SEQ ID NO: 774421 - DNA, 80 bp, Homo sapiens
acctccccatcctgcagcagcccacggagaagctgcccctgagcctggacctgcccagcccccggcccttcgctttgcct

SEQ ID NO: 774422 - DNA, 82 bp, Homo sapiens
cacacctgctggactactgctgaaggccttacgaccggatatgggctataatacattagccaactttcgaatagaaaagaaa

SEQ ID NO: 774423 - DNA, 87 bp, Homo sapiens
cgccgcgcccgcgctcccaggctccggcacccaccctggagccatggtccacgccttcctcattcacaccttgagggccccgaatac

SEQ ID NO: 774424 - DNA, 100 bp, Homo sapiens
ggcggcgctggaagggatgtcgtctcagcagtgctcgggcgcaggacatggcaaccacagagagagcagcccttttctttcccccttggaggcttccaga

SEQ ID NO: 774425 - DNA, 100 bp, Homo sapiens
ggatgagctcccggatgagaaaagggcagacacctacatcccaggaggctgaaccgtctgagcccagaagtgctgaggtgacgaggaagcccaaggctgc

SEQ ID NO: 774426 - DNA, 96 bp, Homo sapiens
ggcatcttggtggagaaggctcagctgcaagctttcttcctggtggcagatgacatcatggattcatcccttacccgccggggacagatctgctgg

SEQ ID NO: 774427 - DNA, 99 bp, Homo sapiens
ttattgatggatttccaagagatgttgcccaggctctatcttttgaggaccaaagttttccgtctgatgaaggttggccatttgcaaagtatcttggag

SEQ ID NO: 774428 - DNA, 127 bp, Homo sapiens
agcagatggagaatagaccctctgtccaggcagcattaaaacttaagcagctgtgtcagcgtgttatgatgccgtcccgtaccaacctggctactggaatccccagtagtaaagtgaaatattcaag

SEQ ID NO: 774429 - DNA, 100 bp, Homo sapiens
acctcgtggacaagtttgcagatcgggagcgcaaggtcgccctcaaggccatgatcaaaacgtcctgctccgcttcgcagtggaatggaacggatttaga

SEQ ID NO: 774430 - DNA, 98 bp, Homo sapiens
ttacgacgggttggggatggcgtgcagcgcaaccacgagacggccttccaagactggccaatcacaggcaggaagatgaaggttctgtgggctgcgtt

SEQ ID NO: 774431 - DNA, 75 bp, Homo sapiens
aaagcctcctaccttgattgcatcagggccattgcgttctcaaaagtctatggtcctgtgttcaccgtgtatttt

SEQ ID NO: 774432 - DNA, 97 bp, Homo sapiens
acgcagtagaaaaggtggcgtggctggcgattcgtgttcgtgagggccttttctgattgttctctggggccggactgagaaatgcctgaaggagacg

SEQ ID NO: 774433 - DNA, 82 bp, Homo sapiens
catgtgagagtgaagacagtatttgccagctcattgccagagagatgacacgggggaaattcctcaatattctagagaagcc

SEQ ID NO: 774434 - DNA, 50 bp, Homo sapiens
cgacaggcggcgcgggcggcgccaattccactgatcctgtgaaggctgcc

SEQ ID NO: 774435 - DNA, 100 bp, Homo sapiens
tgtgccctagcaccccgagaaccgtcagtttgagccagatggtggatccataaagaacccagccaacccgcagagggaggggaggggctgagctgtgagg

SEQ ID NO: 774436 - DNA, 75 bp, Homo sapiens
ggccagacctgcagttgctctacactttcagctgagatctgtatctgtggacctgaatgttgatccctcgcttca

SEQ ID NO: 774437 - DNA, 95 bp, Homo sapiens
acaccttgctgctggggaagaaggtggtccttgtaccctacacctcggagcatgtgcccaggttgcctgcggacacgctgggcctctgtcctgat

SEQ ID NO: 774438 - DNA, 98 bp, Homo sapiens
tagccctcactggagttcctatagtacagtggccaaaaagggataagtggactcaccctgaattctttcttgcacgagatccaagaattctcccttgg

SEQ ID NO: 774439 - DNA, 97 bp, Homo sapiens
tggccctgtatcaggagcacagatttggagcaagaggtggtggtggccttcccccgaagaaatttggtaatcctggggagcgtttgcgtaaaaaaaa

SEQ ID NO: 774440 - DNA, 82 bp, Homo sapiens
agctgctgccgccccttgggctaaaagatgatgataattccgaagaaggcttccacactattcattcaggaaggcatgaata

SEQ ID NO: 774441 - DNA, 100 bp, Homo sapiens
ctcagccttgtcctcagggaagctggggctggtgcaactttcagaagtggtcccagggtgatgacccaggaaaggtgagtgagaaggtgtcggcacacac

SEQ ID NO: 774442 - DNA, 124 bp, Homo sapiens
cggagactgcccaggtgtggtcaccatgttcctctccgcggtcttctgggatatcattttcaatgcccaatacccagaactgcctcccgattttatctttggagaagatgctgaattcctgcca

SEQ ID NO: 774443 - DNA, 98 bp, Homo sapiens
agttgggtggtgctgagcctgtaaaacgctgtggaaagtctgcactctttcaactggcagagaataactgaagtgaagtgatggactccgatttggag

SEQ ID NO: 774444 - DNA, 100 bp, Homo sapiens
gcctacttcgtgcgtgagcgagcttaactatgcagacatgttaaagagagtggagcccctacgcaatgagctgcagaagctggaagatgacgccaaggac

SEQ ID NO: 774445 - DNA, 98 bp, Homo sapiens
tcaacacccgccgagcacaggctgacctggcctatcagcttcagaggtgctcagcacagtggactttgtcgcccctgatgatcgagttgtcttccgca

SEQ ID NO: 774446 - DNA, 100 bp, Homo sapiens
agctgagtggttgtgtggtcgcgtctcggaaaccggtagcgcttgcagcatgacatgcaagaaagcacttcagccaagcagaagggagccagctggacga

SEQ ID NO: 774447 - DNA, 100 bp, Homo sapiens
ccgaaggaaaaggaggaattcgccgtgcccgagaatagctccgtccagcagcttatgttcctgaggaagaattgaaggcagcagaaatagatgaagagca

SEQ ID NO: 774448 - DNA, 83 bp, Homo sapiens
ccaggctgtactgctccccaagaagactgagagtcaccacaaggccaagggtgcgtcagcaatttcctgctcctcttggttgg

SEQ ID NO: 774449 - DNA, 83 bp, Homo sapiens
cccgaagtgccttgcgcctcaaggttacggaggcagtgacgactcagtggcttttgaggatgtgtctgtgagcttcagccagg

SEQ ID NO: 774450 - DNA, 83 bp, Homo sapiens
ctccgggaccggccgaaaggcgaggaaccggattatatctgtccaagatgcgagtctggttttatcgaggagcttccggaaga

SEQ ID NO: 774451 - DNA, 133 bp, Homo sapiens
ggactcaatgttctcgatgccaatctctgcttgaaaggagaagacttggattctcaggaatgaatctgaagtctgctgcagtaaaacacagaaggctttaaaatgttttcttgcataaaattcaaaactttta

SEQ ID NO: 774452 - DNA, 100 bp, Homo sapiens
aattcctgagaattgggaacatgctaaatacaaatggtatcttaaggcaaatactgtggtctggggttgcaaatgaaccattcaattgaatcaaaaggca

SEQ ID NO: 774453 - DNA, 99 bp, Homo sapiens
cgaagttggaagtgtctcttagcagcgcgcggagaagaacggggagccagggagtgcatccgccccaacccttttccccctcgtctcctgtgagaattc

SEQ ID NO: 774454 - DNA, 80 bp, Homo sapiens
cttcgggatttgcgacgctgtcacaggttccagggtataccccgcgaatgaagggaagatcagttttcctgccatccagg

SEQ ID NO: 774455 - DNA, 100 bp, Homo sapiens
gtctgctcactggagatgacacgtgcgtggggtgttggtttggcctgtcactgctcctcatcctcctgagccgtggtgaagacctacagagttcagaccc

SEQ ID NO: 774456 - DNA, 100 bp, Homo sapiens
aatctttttggctgttagatgctcttgttggaagaatactaccagatactctctaagtggtggaggaacttcatcccactgaaattcctttggcatttgg

SEQ ID NO: 774457 - DNA, 97 bp, Homo sapiens
gtctgatgaaggcaagatgtatgggtcttgttttgccacccaggctggagtgcagtaatataatcttggctcaccgcagcctcaacctcctgggctc

SEQ ID NO: 774458 - DNA, 82 bp, Homo sapiens
tggggaggccattggctctatggaaaacactgggaaccctactctggaaactgtcagtcccagggcactggggagggctgag

SEQ ID NO: 774459 - DNA, 51 bp, Homo sapiens
aagcaaagagaggaaatgctcgagaatattgtcctctctggaggttcaacc

SEQ ID NO: 774460 - DNA, 100 bp, Homo sapiens
gagtcggactcagactccaggtgaagcagccagcagaggtcagagagagacagctcacgttccggcctacaacacagcagtcccctcaggatgagcagga

SEQ ID NO: 774461 - DNA, 74 bp, Homo sapiens
cccaatacaactggcaaacaactttttgaccaggtttgaagatgccgcatttggattggatgaattccaaattc

SEQ ID NO: 774462 - DNA, 82 bp, Homo sapiens
agggagagcctggggacgacttttacatcatcacggagcgcccgggggctggagaaggccaggcagcagctgcaggaggagc

SEQ ID NO: 774463 - DNA, 98 bp, Homo sapiens
gaggaggaagtgttcagtcaagaatgggattctgaccatctcacatgccacagcaacatcagatgctgacctgaaagaacatatggttggaatcatat

SEQ ID NO: 774464 - DNA, 100 bp, Homo sapiens
tcctgtcccgctggccctctgtctgcctgtgtccctgaccatggctccctgcagtaccctttaacgacgaagttatacggaagcgtctcctcattgatgg

SEQ ID NO: 774465 - DNA, 100 bp, Homo sapiens
gatgggaccatctgtcagttccagaccaaattccccccagagctggacagccggggttcatcatttacaacccaacagcctcaggcttataaccttttcc

SEQ ID NO: 774466 - DNA, 75 bp, Homo sapiens
cccgagagatggctccaaatatggcagagtgggaccagaaggttcgggatgagtatcggcaggactacgatgctg

SEQ ID NO: 774467 - DNA, 100 bp, Homo sapiens
gcaaaggctgctctgaagcgcacgacctccgactactttctccttcaagttgatcatggccttgccaggttggtgacagtatattgtgagcatggtcata

SEQ ID NO: 774468 - DNA, 90 bp, Homo sapiens
ctccactccccagctgtgaaagggacaaccctccatatgataagggagccttcagaatcgaaatcaactttccagcagagtacccattca

SEQ ID NO: 774469 - DNA, 90 bp, Homo sapiens
catgagctggggcaccgagctctgggtactccaaagattcaggtttactcacgtcatccagcagagaatggaaagtcaaatttcctgaat

SEQ ID NO: 774470 - DNA, 100 bp, Homo sapiens
gtgggttcaccttccagacccagcagctccaggcttcctgaacatgaaattaatagggcagatgaagcacttttccagccattaactccaggctctcgag

SEQ ID NO: 774471 - DNA, 127 bp, Homo sapiens
aaccccaggcccttccagcggtggccacacgtcacacagtggggacaacagcagtgagcaaggtaacatttgtcgatcacccattgcagaagcagttttcaggaaacttgtaaccgatcaaaacatc

SEQ ID NO: 774472 - DNA, 75 bp, Homo sapiens
ggaggtggtgaaaagacaagatgtcctttatgactctgatgccagtatggactggagatgatgggagccagttgg

SEQ ID NO: 774473 - DNA, 80 bp, Homo sapiens
ccctctcttccaaatcctgtagccataaatgtctggctaatggcatttacaggaggtgatgggcagaatctgtttacgaa

SEQ ID NO: 774474 - DNA, 100 bp, Homo sapiens
aatggcttccagaggccgacgatctactatgtgatgtcagggcctgcgtgcttcgccgacacgaggtgaccatctgcaattacgaagcatctgccaaccc

SEQ ID NO: 774475 - DNA, 75 bp, Homo sapiens
tcctgggaggagtggctaccactgtctgccaacccaatgaatttatcattcaccaggagactaaagtccatcaaa

SEQ ID NO: 774476 - DNA, 74 bp, Homo sapiens
tgagtctgtacggacatttgtacatgagagggggaagaggtggtaccagagacgccatgtgaaatcctctacca

SEQ ID NO: 774477 - DNA, 76 bp, Homo sapiens
gatgagttgagtggagatgcttctgtggaagatgatgcttttatcaagggtgtgaaagctgttttggccgaaagtt

SEQ ID NO: 774478 - DNA, 99 bp, Homo sapiens
tctcgctcggctgcgggaaatcgggctgaagcgactgagtccgcgatggagatggcccactgcgtgaccttggttcagctgtccatttcctgtgaccat

SEQ ID NO: 774479 - DNA, 100 bp, Homo sapiens
gcaaactgtcagaaaagagtagcctgggctgtctggaaatctgagatgatatcatcaagttgaatcgaaaggaagggaagaagcagaattttccaagact

SEQ ID NO: 774480 - DNA, 100 bp, Homo sapiens
agaaaatcaccgactttgaagggcaaccacctacaccacgtgataaactttcctgctgggtatataaagacagtttgcctgagaatacagatcaacccac

SEQ ID NO: 774481 - DNA, 100 bp, Homo sapiens
ctgaacctgtttctgctcagattgaggaaacaatggaagagcatgcagcagattggaataaatatgatgaccgattgatgaaagcagcagaaagggggga

SEQ ID NO: 774482 - DNA, 96 bp, Homo sapiens
ggagaaggccgccgggcccgggcatggtggtctggggcaacgcggaagaccacccgttagccgagcagctccccagcctgagaaactgcagaagaa

SEQ ID NO: 774483 - DNA, 100 bp, Homo sapiens
cccgaagcggcggcggccgaggacggggacagcgacgacgcggaggcagagaagggaacgcccggcccagccccggagaccaaattttgaggaaggtgga

SEQ ID NO: 774484 - DNA, 49 bp, Homo sapiens
aaggcggagatcgcccgccgagaatcccctactttgaaactagtgctgc

SEQ ID NO: 774485 - DNA, 51 bp, Homo sapiens
gtggaaagaagttgcaaaacactggggacttcactgtgactttgcttgcct

SEQ ID NO: 774486 - DNA, 100 bp, Homo sapiens
cgcccgcatcctacagcccagacgagttaggtatcattggaacatttcaagatcatcaaatcaaattccacagggattggtgaccaaccagaaggctcag

SEQ ID NO: 774487 - DNA, 100 bp, Homo sapiens
tggatgatgacccagaacaagaggttactttgcatcagcagactgcaaactttttcttaaagagccagataggaaatagtccaatcctgaagtgggccat

SEQ ID NO: 774488 - DNA, 100 bp, Homo sapiens
tgagatgattgccaaacccccagagctccttaataagcatttatagtcagtttttggcagcaatagaatcactaaaggcattctgggatgttatggatga

SEQ ID NO: 774489 - DNA, 90 bp, Homo sapiens
accaaaaatgtagaagttctccatcttgggaaagtctggttactgaatcaaatggatggatttgatactctgcatagagttaaaatgatc

SEQ ID NO: 774490 - DNA, 82 bp, Homo sapiens
cccggtggtgctgcacagcttcacgcagctagaccccgacctgccgcgcccggaggtttggtgcacctcgatttggaggaag

SEQ ID NO: 774491 - DNA, 96 bp, Homo sapiens
cctaaacattcttctcaaaatagtaattcaggtcagaatggcggcagtggagcatcgtcattcttcaggattgccctactggccctacctcacagc

SEQ ID NO: 774492 - DNA, 97 bp, Homo sapiens
gagtgccaggagggagagatcctggccacaggcagtacggcatggtgctcggtctctccaggtgacactggatgggatgtcttcagcctcgattatc

SEQ ID NO: 774493 - DNA, 101 bp, Homo sapiens
gaagctggccaaagcctgcccagacggctcacctgtgcgggatggaacaaaaggcttgtctgagacgacaggaatatagaagagacccaaatgagaagaaa

SEQ ID NO: 774494 - DNA, 75 bp, Homo sapiens
cattcgggtggagctgagccggagacagagagaagaagaaggaggttcctgctgtgccagaaacccttaagaaaa

SEQ ID NO: 774495 - DNA, 100 bp, Homo sapiens
gaagagcttctcctcatcaactggggatgattacagttcttcctaaaaaaggttcggcaggaattattggaggaatatgaacaagttaaaagtattgtca

SEQ ID NO: 774496 - DNA, 74 bp, Homo sapiens
ctggagcaagaccgctgacaagatcgagggcttctatgacgtccggttgtttgccttcgtgcgcttcaccaccg

SEQ ID NO: 774497 - DNA, 100 bp, Homo sapiens
tcagtcctttgctccttccccagaccaagaagttggaactctctatgagttatgatggttaacggtgatcacaggataggtatttttgccaagagagcca

SEQ ID NO: 774498 - DNA, 100 bp, Homo sapiens
cgtgcatacggctgccggcatggcacattacaacttcaagaaaattacggtggtgccgtccgccaagtctgcatgaagaaatcagtgatttttatgaata

SEQ ID NO: 774499 - DNA, 50 bp, Homo sapiens
aattcgcctccatctgtaccatgagtggagactgctgcacggactctgga

SEQ ID NO: 774500 - DNA, 100 bp, Homo sapiens
aacaagccgtacccaaagtctcgcttctgccgaggtgtccctggtgttctgttcctgctcctacgatgccaccacacactttgagacaacctgcaacgac

SEQ ID NO: 774501 - DNA, 100 bp, Homo sapiens
agcgtaaacaagcagagattgaatgcaagtctgaagttgacaagcagcagcatagaccctggtctgagtatcaagcagttgggtggtttgtatattaatt

SEQ ID NO: 774502 - DNA, 75 bp, Homo sapiens
caacgtcaaggagctggaagtgctgctgatgtgcaacaaggctccttcacctaccaaacgcaaagaccgctcaga

SEQ ID NO: 774503 - DNA, 95 bp, Homo sapiens
ttttataagacaaaagaaatagcaagaactgaggagcaccaggagacgcaactcatcggcactctggccacggtggcgcagtagctggcaagaag

SEQ ID NO: 774504 - DNA, 100 bp, Homo sapiens
cggagtttgacgaagaggtggtttttgaggtttcttcaggagaagcattaccaaaaacgctgtgtacaagtgtaaaaacgggggcaactgtgtgatggat

SEQ ID NO: 774505 - DNA, 89 bp, Homo sapiens
tgataacaacgattgctgtgaaagtcaacccggagcgtgaggacagtgagactcgaacaatattctctaagccgctttcatcatgggag

SEQ ID NO: 774506 - DNA, 88 bp, Homo sapiens
cgccgagggcgggggagagcgcgccgctgctcccggaccgggccgcgcacgccgcctcaggcctcacactccccgacttgcccgagca

SEQ ID NO: 774507 - DNA, 74 bp, Homo sapiens
gaagaaggctgctattgaaagagagtatgcacagacatatctgaagagatggattaagaatgctttggattaag

SEQ ID NO: 774508 - DNA, 87 bp, Homo sapiens
ggaacccactgaggcacccggacctcgtcaggccgctgcagatgaccattccaggatctgtctggctccattgatgacctccccacg

SEQ ID NO: 774509 - DNA, 75 bp, Homo sapiens
ggctgcatcacgggaggagctattggtttcagagaggtgcccacgagtgtattcggggagaagcttcgagaacaa

SEQ ID NO: 774510 - DNA, 90 bp, Homo sapiens
ctgaatcctgaattttccttgatggtcaaaagattaagagttgtctctgtgggaagtttgtcctccgtccattgcgaccatgccgcagat

SEQ ID NO: 774511 - DNA, 100 bp, Homo sapiens
tgccctttgaggccttcctggccaggagtgtacaccttaaacaatgagaagcagtggataaataaggctgttggagataaacttcctgaatgtgaagcag

SEQ ID NO: 774512 - DNA, 50 bp, Homo sapiens
aattacactgtgatacgactgactaaaacttggaatataacgtggagcct

SEQ ID NO: 774513 - DNA, 90 bp, Homo sapiens
ccagggcctgatcccctacccctgcgagccagggccgcctacgcccccactgcttcccacagtcttctctcctacttccatgaagacgcg

SEQ ID NO: 774514 - DNA, 98 bp, Homo sapiens
agcctcagttggaagcagccgatccagcctgcggagcctgtggggcaggatcttaaatgtatttcggcattgggttgaacatcatttttatgactttg

SEQ ID NO: 774515 - DNA, 80 bp, Homo sapiens
aagatggcgtgcttgttggagaccccaatccgcatgagcgtcctttcgggccgttgctccagggagaactgcaaatatct

SEQ ID NO: 774516 - DNA, 138 bp, Homo sapiens
gacgaattctatgaccaggcctctccggacaagaggactgaagcagatggcaactctgatcccaactctgatcacagggatgacctgcgcgtcctgtgtccacaacatagagtccaaactcacgaggacaaatggcat

SEQ ID NO: 774517 - DNA, 100 bp, Homo sapiens
taagatggggttatgtcgctatgaagtttgcacaggaactgtggaaggtgcatcagtgaagaaatggaccaatgtgtataatcatggaatctccttgcta

SEQ ID NO: 774518 - DNA, 83 bp, Homo sapiens
cgatgtttcaatattggaagcgctttgatttacagcagctgcagggctgggttacgacccctacaaccctgagctgcccaagc

SEQ ID NO: 774519 - DNA, 101 bp, Homo sapiens
gagaccgggacaataacatccaattcactgtgggagaggaggagagtggaattcgtgacctgataccaggttctgtcattgatgccacaatgttcaatcct

SEQ ID NO: 774520 - DNA, 99 bp, Homo sapiens
ccaagatttatcttcagcctaccccctgaaatcattcacaatccaaatttcacagtcagagacaaccgagatatgaagatcaatgatgcagactgatgg

SEQ ID NO: 774521 - DNA, 83 bp, Homo sapiens
cgagcactaatatttaagaaagaagatgttaactttcagaatatgatgctgtggctgagaaagctggtaaagtagaagctgag

SEQ ID NO: 774522 - DNA, 96 bp, Homo sapiens
gacagaaatgaccaacagataactgaggacaatggacctgcctgggcatagacttccttaaggtcacttgactggtggataacagacaagtgcaat

SEQ ID NO: 774523 - DNA, 100 bp, Homo sapiens
tcttcccaccaccttaaaccactgacaatggcgatgaccactcagaaggaggcctggtggagaaccacgtggacagcaccatgaacatgttgggcggggg

SEQ ID NO: 774524 - DNA, 100 bp, Homo sapiens
ctggtgtgcgtggccaatgcgacttaccactgcaaaaaggaacttgcatcagcactgaagtcagccttatctggccacctggagacggtgattttgggcc

SEQ ID NO: 774525 - DNA, 75 bp, Homo sapiens
cgaggccgagagccgacccaacgatctgaactcctcagcaatggctgccatccggaagaaactggtgattgttgg

SEQ ID NO: 774526 - DNA, 88 bp, Homo sapiens
ctattagagattgtgaagaagaatttcgatctccgccctggggtcattgtcagcagcagccgctcttctaaaacattcaaaccaaaga

SEQ ID NO: 774527 - DNA, 83 bp, Homo sapiens
tgtcttcggtggactccttcggcagtccacccaccgccgccgcctcccaggtgatggctgtggacacctagtgacttatcagg

SEQ ID NO: 774528 - DNA, 82 bp, Homo sapiens
aaaaagctgccctgagacggtgtcccgccgaaagaggcaaatttctggagatgtgcaatgatctcttagctagagtggagcc

SEQ ID NO: 774529 - DNA, 100 bp, Homo sapiens
tttcattgccctcacaaatggagcccagaccagatgtgcctaggctcggaagcacgttcagtctggatacctccatggccttttcagatattaatggcaa

SEQ ID NO: 774530 - DNA, 100 bp, Homo sapiens
ctgctaataaagttgcagcgaggagaagcgcagcgacggcgtcgggagagcgcgcctagccggctcgcgagattttcttactggagtgcaatgtgagaga

SEQ ID NO: 774531 - DNA, 75 bp, Homo sapiens
caaaactgtcccgggtgggaagaggaacagcctatgtgggcttccacggagggtggagagattcaaccagttagc

SEQ ID NO: 774532 - DNA, 100 bp, Homo sapiens
ctgacagcagtggaggcagaagttcggcaccttatttctctgctgagtgtccagatcctccaaagacagatctgattttcagctgaactctcatctctca

SEQ ID NO: 774533 - DNA, 100 bp, Homo sapiens
cctgagtatcctggacgcccagacatggctgtcccagatgaacaggaagcggtgcaggaggttcctagagttgttcagaatcctccaaaaccagtcatga

SEQ ID NO: 774534 - DNA, 90 bp, Homo sapiens
gtgagtagtcacatcacctccagccctctgcattcacgtagcattgctgcgggtggagggtccggggaggagcaactctatgctgacttt

SEQ ID NO: 774535 - DNA, 100 bp, Homo sapiens
caaggaacacctgggcaacagaatattggtcaagttgctgaccttgaaattctactgagctacccaagcgcctcagccttgacagctcctcctccctcga

SEQ ID NO: 774536 - DNA, 75 bp, Homo sapiens
gaggtctcatctttgaactactgccggagcttctgccaggtaagaatgattgatgttggctgatattggagtgct

SEQ ID NO: 774537 - DNA, 75 bp, Homo sapiens
gtgggcatcggtctctttgccctagcccacgccgccttttccgctgcgcagcgagatgatcgaaatattgaagag

SEQ ID NO: 774538 - DNA, 100 bp, Homo sapiens
cgacggtggtggtgactgagcggagcccggtgacaggatgatatggaatatatgaacgctgtcgagaattggtggaagcaggttatgatgtacggcaacc

SEQ ID NO: 774539 - DNA, 98 bp, Homo sapiens
ttttgatgtggatgatgccaaagttttattagaatccttgcagcctttcctggaagcctgtagcaactctttattttttcgtacttgctctgtgctgc

SEQ ID NO: 774540 - DNA, 75 bp, Homo sapiens
aaggcctcccatatcttatcagatttctgagttctgattcagctgctctgttaaaagcgaaaatgaaacaattgc

SEQ ID NO: 774541 - DNA, 100 bp, Homo sapiens
ctgagctagctgtgttccaccgggatgtccacatgctcctggtggatctggagctgctgctgggcatagccaaggcattggttcctgtcaccattgaagt

SEQ ID NO: 774542 - DNA, 90 bp, Homo sapiens
cccccatgccgccagaggcccccaaccagatttgtgacccagaaggaaatctctgacctcagctgtggctcttggtgctggccagaagcc

SEQ ID NO: 774543 - DNA, 98 bp, Homo sapiens
gagtggcagcagctgcctcaagaggagcaggtgaagctcgtgtgtggagtgccacggtacaatcagacgacagatggacagtgtgacaaaagtgtcag

SEQ ID NO: 774544 - DNA, 100 bp, Homo sapiens
ttgcttgggatcctttatcctggtcatcttctatttccaaatgtggacgaatgtggaacctcgctctgtggctgtgttcccttggcactccttagtcccc

SEQ ID NO: 774545 - DNA, 100 bp, Homo sapiens
tggaacagaaggaggtccattcctgttggtgacaacaccgtggccctgttctgggatgagcaaggtgtaaaggtcagttcaaagatcctagaactcgccc

SEQ ID NO: 774546 - DNA, 101 bp, Homo sapiens
tgccgagcgcggcggggcctccgcggtctgctcatggcgcacagccagcggctgctcttccgaatcgggagttggtaaaatattaaagaagatcaacaagg

SEQ ID NO: 774547 - DNA, 49 bp, Homo sapiens
acatgaatatgcagctcctgctgagcatcttgacagcagtagcaatgag

SEQ ID NO: 774548 - DNA, 100 bp, Homo sapiens
gatgattccgttggagtagaagtgtccagcgacagcttctgggagtctgacactggaggagcctttaaaggttttaaaggtttggtggtaccttctggag

SEQ ID NO: 774549 - DNA, 96 bp, Homo sapiens
ggataagtttcccattgaaggtggccagaaggaccccaagcaaaggatcatccccttcctcccaggaggaggaagccaagaatctggtgagcgaag

SEQ ID NO: 774550 - DNA, 82 bp, Homo sapiens
tgtgaacttcattgactgtctagtgagcctacaacacagcagtcccctcaggatgagcaggaaaagctcttggatgaagcca

SEQ ID NO: 774551 - DNA, 90 bp, Homo sapiens
gcaagatgtttgacgaggacagcatcctgggcgagctcaacgggcccctgcgggagtggagacctttggcgacttggcctttggcgacat

SEQ ID NO: 774552 - DNA, 101 bp, Homo sapiens
cgcgtggcggcgggaactgttggccgcgcggcctcgggaacggcccaggtccccgcccgcaggtcccgggcaggtaccttaacatggggaatcttcttaaa

SEQ ID NO: 774553 - DNA, 50 bp, Homo sapiens
attgctgagcaaacagttgccaagctcaagactgcagtgcagatgacgac

SEQ ID NO: 774554 - DNA, 50 bp, Homo sapiens
gcgagcccttgggccgcgtctcctttgagccacctcgtacatctcatcct

SEQ ID NO: 774555 - DNA, 97 bp, Homo sapiens
ccaagaggaggacagttcgctacacagcaatgcatcgaggtttgatatcgacagctgcacttactacttcagctgggactcccgggctgcctgcgcc

SEQ ID NO: 774556 - DNA, 100 bp, Homo sapiens
gtaaaactctgctgctttccccagctccaacctctctggtcttcaacaacactatcatcagttcaggacctcaaggggctcggctatgagaaggggaagc

SEQ ID NO: 774557 - DNA, 100 bp, Homo sapiens
gagcacgattggatttgccgaagattaggaagaatccactgatagaaatcatttccatcaataccggaaatttaaaagcctgttgattcaagaactttct

SEQ ID NO: 774558 - DNA, 95 bp, Homo sapiens
cggagtttgagccccggaggcagagcggctgccatgaggcggccttagcaacatgctgttccagtgctccctacctgacaccacagccacccttg

SEQ ID NO: 774559 - DNA, 82 bp, Homo sapiens
cagagttttgattaccactgacctgctgattaaccggatggactatgtggagatcaacatcgaccacaagttccacaggcac

SEQ ID NO: 774560 - DNA, 100 bp, Homo sapiens
ggcggggaggcgcggagcgcgcgtgtggtccttgcgccgctgacttctccactggttcctgggcaccgaaagacagagtcttgctctgtcacccaggctg

SEQ ID NO: 774561 - DNA, 97 bp, Homo sapiens
aactggagagcttcatcaaaaatagtgatagctttgataagtcatattgaacattccagatacctatcattactcgatgctgttgataacagcaaga

SEQ ID NO: 774562 - DNA, 49 bp, Homo sapiens
gacggcaccacctccaaatactttgaaagttactgtggcccatgtccta

SEQ ID NO: 774563 - DNA, 100 bp, Homo sapiens
gtcttcctgcccaacaaacagaggacagtggtctctaattaacagaagatggcaaagcccagccacagcagctatgtccttcagcagctaaacaaccaaa

SEQ ID NO: 774564 - DNA, 98 bp, Homo sapiens
agagggtctggagggctgagcagtcaactcaaatgcaagtccaagaggaggaggaggcggaggtccaagcggaaaggaagccagttgagggaagttct

SEQ ID NO: 774565 - DNA, 101 bp, Homo sapiens
agttacgcctggaatatgaaggcttccccgtcccggctgtatcgcatccattgaatactgtgaccgaggacatgtacaccaacgggtctcctgccccaggt

SEQ ID NO: 774566 - DNA, 100 bp, Homo sapiens
agaaatggcattggagagcccggacatctgctttatatttctctcagaccattcccatcagtgagcattacagttttccaagagataacttcaccaagat

SEQ ID NO: 774567 - DNA, 100 bp, Homo sapiens
ctggcgtcttcagaatctcccaccaaggctgtacctctggaggagttctaggtttggatttggtcatctcaagaagacccaacatgagtgaagtttcctg

SEQ ID NO: 774568 - DNA, 100 bp, Homo sapiens
ggagattttgatgtggatgatgccaaagttttattaggcatgtaatgaatttactacacatgtgatgaaccttctccgagaacagagtagaacacgtccc

SEQ ID NO: 774569 - DNA, 98 bp, Homo sapiens
aagaagctggagccttttcaaaaggagctatataaggaagtgctactggaaaacctcaggaacctagaatttctggagtgtgaacatggctacgcctc

SEQ ID NO: 774570 - DNA, 100 bp, Homo sapiens
gtgcgcccgccaggtgagcgcgctccctggcaccgttggcccccggagggtcgggcccagttgcggcgagcggaatgttggctcaattaagaaacatcag

SEQ ID NO: 774571 - DNA, 90 bp, Homo sapiens
aagaagcatactgggaaaagtcccattgtgaacaataatgacgatgaggacctgacaccagagcagaaggcagagcgtgagaaggagcgg

SEQ ID NO: 774572 - DNA, 75 bp, Homo sapiens
ctggagtttgatgaggagcgagcccagtagtttatgccaacgtgacttcattcatacagatgaaccaaggatcgg

SEQ ID NO: 774573 - DNA, 88 bp, Homo sapiens
ctctgggctggaggctccggggtccacgaatgaccggcttttcctggttaaaggaactgtggctgcaccatctgtcttcatcttcccg

SEQ ID NO: 774574 - DNA, 96 bp, Homo sapiens
ccaatccagaccccaagaggattcttggaccttgagtaagaaagaattcaggacaagacaagcgctctgagcctcagcaatgtggcaggcgtgttc

SEQ ID NO: 774575 - DNA, 100 bp, Homo sapiens
aataccactattccaaccaagaagagccagagaatggatcttggagaatgtctgaaagtccatgacctggctttaagagcggattatgaaattgcatcca

SEQ ID NO: 774576 - DNA, 50 bp, Homo sapiens
acccctttgaattaattatggctccctggcctcccacgactacatcctga

SEQ ID NO: 774577 - DNA, 80 bp, Homo sapiens
caggccctcgttgcccagatgactggagactgatgcatgagggggctacggaggcgcaggagcggtggtgatggtctggg

SEQ ID NO: 774578 - DNA, 103 bp, Homo sapiens
gagatgacacgtgcgtggggtgttggcatcatcggctggttcgtgcgaagcttcaagtacttttacgggctccgcttcgaggtgcgggacccgcgcaggctgc

SEQ ID NO: 774579 - DNA, 100 bp, Homo sapiens
atgcagagagagtggagctttgcgcggacacaccctctgctcacctcactgtaccgcaggcttctcaataggtttggcatggacaagatctatgaaggcc

SEQ ID NO: 774580 - DNA, 50 bp, Homo sapiens
cccggtttgacgcacacggcaccaaactagccagtcttggtgctctgtgt

SEQ ID NO: 774581 - DNA, 87 bp, Homo sapiens
tggatctgaagtacaaaatattttccagggacaagaatccttcaagaaacaggaaaaaactcctaaaacaccaaaaggacctagttc

SEQ ID NO: 774582 - DNA, 100 bp, Homo sapiens
cagctttttgtgctgccagcaagaaatgatcagtagcaccagtgtttatgggtcctacgatgatacaccaaccacttgtgctaccatctgtcaaaacttt

SEQ ID NO: 774583 - DNA, 75 bp, Homo sapiens
gttcggctgcgcgagcggagggaggcggctcaaaagccaaaagtctctgagaacgactttgaagatctgttgtcc

SEQ ID NO: 774584 - DNA, 75 bp, Homo sapiens
ctaccttatgagctcggttttcttatgcttataagagtggaacaggtggaagaaagtgataacgagtggtctgtt

SEQ ID NO: 774585 - DNA, 80 bp, Homo sapiens
gttcgtcatggggctgtttggaaagacccaggagaagccgcccaaagaactgagagaaaaggaacagttccgtaagctct

SEQ ID NO: 774586 - DNA, 90 bp, Homo sapiens
ggggggactcaggagtctaccaatgtgttataaagcatccgtgtacaagatttgcagagaaatgtatgacgatggagtgggtttaccctt

SEQ ID NO: 774587 - DNA, 90 bp, Homo sapiens
taggaatctatgatgctgatggtgatggagattttgatgtggatgatgccaaagttttattagctgactgagttgaataccttcttcttg

SEQ ID NO: 774588 - DNA, 90 bp, Homo sapiens
gcccctcagggccacggctttagcggtgtcttttgcggttgcagtgtaggattttggaagtcctccctccatcacatcaaaatggttttg

SEQ ID NO: 774589 - DNA, 100 bp, Homo sapiens
caaagggcggctcgcgcccgggccgccacgctctcgggctctgcctcgacccaacatgagtgaagtttcctgcaagaaacgggacgactatttggaatgg

SEQ ID NO: 774590 - DNA, 101 bp, Homo sapiens
ggcctgcgggtcacagtctccctgaaggagctgcagaggtgaaaggtgtagcagtcactcggcctacacccacagcatcgaccttgtgaacccagcgacct

SEQ ID NO: 774591 - DNA, 100 bp, Homo sapiens
ctcacatttccaagtacattctcaggtggagacctgtttggcaaatacgtgtagacctacatttattaaatcatgatggaaatattattgatgctgccag

SEQ ID NO: 774592 - DNA, 75 bp, Homo sapiens
cttgcaggcgaaattcgccgtggcaccagtgcttccacagcgcggcacctgtacctccggggtggcgctggggtt

SEQ ID NO: 774593 - DNA, 100 bp, Homo sapiens
tctgagctcagacctgccaatttaccagagataattgataacaccctgtaacagctgagtggacggcctgttcatcatcgggtggatgtacctgcctccc

SEQ ID NO: 774594 - DNA, 83 bp, Homo sapiens
ggcgacgcagcccgcggcagaaggtctcctccgggctggggctgagcaagccctcggagtgaccgtgggtgacagcggctcca

SEQ ID NO: 774595 - DNA, 95 bp, Homo sapiens
caccgtggctacactctggaccccaatggcaaaacctgcagccgcatccgtgtcattctggaccttactcccaactaccggggtgagaactcgtg

SEQ ID NO: 774596 - DNA, 75 bp, Homo sapiens
ggacttcatccaggcctacgaggaggtgcgcgagaagtacaaagggcgccctgcgtccggcagaggaggcgagca

SEQ ID NO: 774597 - DNA, 74 bp, Homo sapiens
ggaaatcgtgcacatccaggctggtcagtgtggcaaccagatcggtgccaagttgtgctgaaagacattatgac

SEQ ID NO: 774598 - DNA, 82 bp, Homo sapiens
tctgctctgcctccggggacaagaaactagagcaaataaccgttttgaaattaatccagactccaaaatgatgcaaatcaac

SEQ ID NO: 774599 - DNA, 105 bp, Homo sapiens
cagaaaatgcacggaactcattagcgatctttaccaacagggacgcttatgtcaactgggcagtgaattttgtgaattggaagtttttgctaaagtactgagagc

SEQ ID NO: 774600 - DNA, 101 bp, Homo sapiens
tttcttctatttcttgtggatattatggctaataacacaacaagtttagggagtccatggccagaaaacttttggggttcaaaccttgtactactcagctg

SEQ ID NO: 774601 - DNA, 75 bp, Homo sapiens
gcttgacagctgcaaggagttactgaaggtgtatgcaacagcgttattgcaacaggctaacgaaaacagacaaaa

SEQ ID NO: 774602 - DNA, 121 bp, Homo sapiens
atgttccacgttcccaaggttgtgagtgcttatggccacattcctgcatcagctcagccatcgcggtgctggagaatctggtaaaagcaccattgtgaagcagatgaggatcctgcatgtt

SEQ ID NO: 774603 - DNA, 100 bp, Homo sapiens
gagcgggccctgcgcgcctgatgggtcgaggcggacgcgcggctgcgtcagatccgagcagttggcagactaaaaagagagcggtctatgagtgaaaatg

SEQ ID NO: 774604 - DNA, 96 bp, Homo sapiens
atgaggagaccttcatcaacaacctcaagaagcgctttgaccacagtgaaatatacatacagtttatgtaacttgatggaagaaaatggaattact

SEQ ID NO: 774605 - DNA, 113 bp, Homo sapiens
agaaagtggggtttcgtggagttgaagaaaagaaatcattagaaattctcctaaaagatgaccgtctggggagccttttcataagctgctggcccaaggccttatcaaggggc

SEQ ID NO: 774606 - DNA, 49 bp, Homo sapiens
gttttccggagggattccatcatagctcagagtcaagatctccactgaa

SEQ ID NO: 774607 - DNA, 83 bp, Homo sapiens
ctcgtggacaagtttgcagatcgggagcgcaaggtcgccctcaaggccatgatcaaaacatatttagcttcctgtggtatact

SEQ ID NO: 774608 - DNA, 101 bp, Homo sapiens
agaactgatgttgaaaatgatgtctactctggaggcagattccattttacaggcattaacaaatacatctcctacatgtttcccggtcctctggcgaggat

SEQ ID NO: 774609 - DNA, 100 bp, Homo sapiens
cgagaaggtgtgcatggatctgccaaattttatatttcagatttgtggaaggtgaatgaaaactttgccattgatttgatagcagagcagcccgtgagcg

SEQ ID NO: 774610 - DNA, 100 bp, Homo sapiens
cttttgtcaattccagaatacaaagtcccttaatatggactttgaaaatcaagataaggagaaagacagtaatagttcttctgggtctttcaatggcaac

SEQ ID NO: 774611 - DNA, 100 bp, Homo sapiens
aatttttgttctgtatggagcaccactgatagacatttgatgaatacagaaatatcagccaaaaggacattgtggacagcataaaaggagaattatctgg

SEQ ID NO: 774612 - DNA, 50 bp, Homo sapiens
ctctgggtttgcgctagcagcgtaaggtatctcagatgaagacatcatca

SEQ ID NO: 774613 - DNA, 75 bp, Homo sapiens
gagtcgggcagccgctccaatggacagtcattttgtttactcattcagccctgttgcaggtcccaataaactctt

SEQ ID NO: 774614 - DNA, 126 bp, Homo sapiens
cgggggcccgtactgcacatcgtggtggtcggatttcaccacaagaagggctgccagggtaactaaggaagtggatgctacatctaaagaggccaaatccttcttcaagcagaatgagaaagaaaa

SEQ ID NO: 774615 - DNA, 83 bp, Homo sapiens
ctggaaagtgaaatttcaaccacagcagatgactgcagttcagaggtcaaaatgcagatcttcgtgaaaacccttaccggcaa

SEQ ID NO: 774616 - DNA, 96 bp, Homo sapiens
aaaatagtcaatagtgctcagactggtagcttcaaacagctcacagttaaggactccctggaggaaaagcggaagcggcagcggtctgaacgcctg

SEQ ID NO: 774617 - DNA, 99 bp, Homo sapiens
caccctgttctcccactctgttccctcctcaggaagtccttttattaccaggagacacaatgaggcatatacatggacaaatcccacctgctgtgtgca

SEQ ID NO: 774618 - DNA, 75 bp, Homo sapiens
gccagatccgctgatctagtgcttctcgaaaaaaaccttcaggcggcccatggacgcatcttctctccagactgc

SEQ ID NO: 774619 - DNA, 100 bp, Homo sapiens
cggagcggtccgcgagccaccgaggcccagaaaggcctaaagaatgtatttgacgaagcaatattggctgccctggagcctccagaaccgaagaagagcc

SEQ ID NO: 774620 - DNA, 83 bp, Homo sapiens
cgcagccaccccgcgggatacgcctcagcgcgagttgcatgctgagaatttgaaaaatgaagatgatgtagacactggactat

SEQ ID NO: 774621 - DNA, 75 bp, Homo sapiens
acgactacttcacacgccagtacggggatgagtccactctggccttccagcaggcagcaattccatttccgtgag

SEQ ID NO: 774622 - DNA, 50 bp, Homo sapiens
ctggagcacaaggagctcggggagagtgcctgagattgtgagggagaccc

SEQ ID NO: 774623 - DNA, 100 bp, Homo sapiens
gctgctgtggtcagtgcaggtggatcaccagctctttgccctggagaaactggatgtcaccgctaagtcctatcagccatggaaacaccattgctctctt

SEQ ID NO: 774624 - DNA, 88 bp, Homo sapiens
cgtttgttcaggaaccaccagtgacagaatcatcacgaagtatgtatatgagctcctggaaaaggattgtaatttgaaaaaagtatct

SEQ ID NO: 774625 - DNA, 90 bp, Homo sapiens
cagctgcgatggccgtggccgtggggagaccgtctatttgggatgatgaaattgttgcagacttttacgtagctgttccagaaataatgc

SEQ ID NO: 774626 - DNA, 88 bp, Homo sapiens
gctcgggacttcggcctgacccagcccccatggcttcagaagagccaagctctactccaggaagtgaaaatgtgctgcctcgagagcc

SEQ ID NO: 774627 - DNA, 85 bp, Homo sapiens
ccgagagcgtgaccgagagcgcgaatatcgtcatcgttagaagaatcgaagctgtaaaactacaaatggagcccaagatgcagtc

SEQ ID NO: 774628 - DNA, 119 bp, Homo sapiens
caggaaccccgctggcagatgaccaggaccagtctctggtgcctgacaaggagggagtgaaggagctcgtggatagggtgattgtgttgttacagtgctgcttgctgaagaggacaaag

SEQ ID NO: 774629 - DNA, 101 bp, Homo sapiens
cactgggcagccctgtgtcttcatcaagatgaaccgggtgactcgaaaagccctgtttcctggtgactctgagattgaccagctctttcgtatctttcgta

SEQ ID NO: 774630 - DNA, 75 bp, Homo sapiens
aatatcatgaacaggaagaaattttcaaacttagactaggacatctcaaaaagatcacagattctgctggccata

SEQ ID NO: 774631 - DNA, 90 bp, Homo sapiens
gtgaaagcccccaacaccacgacaatccagtttcctgctaatttgcagcttcctccagcgatctgaaggtgaagagaagacattaacagg

SEQ ID NO: 774632 - DNA, 85 bp, Homo sapiens
caagtgtggacaggctatctgctgctgcagacctgattgtaagagcaggatcaaggtgaaaaggagaaccccatgcgggaacttc

SEQ ID NO: 774633 - DNA, 98 bp, Homo sapiens
cctgcatgtactgggggattcgcagggaggatgtcgggacaccccggaagctgggaaatgttcacagatgccctgacttatgttcacagacatgagcc

SEQ ID NO: 774634 - DNA, 95 bp, Homo sapiens
ggaccgcgtctgccactgcaactgtggccggcccaaaacatgctgaagaaggtggaaggcttggaggatctgagcaatctcaccaccttgcatct

SEQ ID NO: 774635 - DNA, 98 bp, Homo sapiens
actccctcttcagtgcctactatgttgcatttctccccctgtgttttgtgaaggtgacttaagagattaaaattaatttggttgctgttggttctgaa

SEQ ID NO: 774636 - DNA, 103 bp, Homo sapiens
agaaaacaaggtgtctgcaggaccaacctctcctctggatgctctagagcaggacaggctgctttggtttgtgacctccaggcaggacggccatcctctccag

SEQ ID NO: 774637 - DNA, 100 bp, Homo sapiens
agagatgtggggggattctcgacctgctaacagaactggaccttttcgtccttgtcaccacccccgccgtgggaacggcctgacagtcactcgtcaaagg

SEQ ID NO: 774638 - DNA, 83 bp, Homo sapiens
cttcagaagaccgaagcgttcgtatctggaagtctgcgctcctcagaccaccggcaggtgaacagcctgatgcagaccgagga

SEQ ID NO: 774639 - DNA, 100 bp, Homo sapiens
atagacacgtacctgaacgccgccttggacctcctgggaggcgaggacggtctctgccagtataaatgcagtgacgtgcgacttcatgatagcatatcag

SEQ ID NO: 774640 - DNA, 120 bp, Homo sapiens
gtaatttattttctctctcaaatgccaggccccggaggatcagaatcaagtcctatagcagggagtgcatccgccccaacccttttccccctcgtctcctgtgagaattccccgtcggat

SEQ ID NO: 774641 - DNA, 88 bp, Homo sapiens
gcatcagtgcccttgtggcgaatggggctcacgtcgaggcactgcgtggacctgccagacacaggactctgcaaggagagcatcccgc

SEQ ID NO: 774642 - DNA, 90 bp, Homo sapiens
gatgacgaagatgattacagtttaaggaaacttggatttaactggccagaagcaggtattcaaagcagagaacaatccctgggtgacccc

SEQ ID NO: 774643 - DNA, 98 bp, Homo sapiens
ggagctggagacctacaggggcctttgttcggtctcaagctgttccgtaatctcacaccaagatgcgaaccacccctgagccagctggtgtccgactc

SEQ ID NO: 774644 - DNA, 75 bp, Homo sapiens
tgtgcagacagaaatttcaccaagccgcaggtattggtgatgtgacctgttcacgcaggggaaacttgaacattc

SEQ ID NO: 774645 - DNA, 75 bp, Homo sapiens
gatgtggaggggaatagactccatctatccatatgagcagccaacagagcagtcagcagagcagccacgatgatg

SEQ ID NO: 774646 - DNA, 75 bp, Homo sapiens
cgatggctctgccacgctgagcggcatccagcttgccaccagggcttcgagctgggcacgctggccggccccgcc

SEQ ID NO: 774647 - DNA, 121 bp, Homo sapiens
tacctcaatattcttccttgccaggtgcctgtctggaaggccagatacacaaaactggcgatggaatatgagaggagccctctggaaagaaaaggacagaccctgtgctttcatgaaagtg

SEQ ID NO: 774648 - DNA, 75 bp, Homo sapiens
ggcgacggcatttaacaaggcggtgtggtttactccatgcagttgtcaggagcccgtgctttgaagaagaggagc

SEQ ID NO: 774649 - DNA, 74 bp, Homo sapiens
atccagtgttcaccatcctggccccggaaggtattatgactctgtccccctttgatcaaatgaagactgcctcc

SEQ ID NO: 774650 - DNA, 138 bp, Homo sapiens
cgagacggtccccagagagccaccggaggagcagctcacctgagagacggagccccggctcgcccgtgtgcagagaggatgtactgagtaaagatgctggggaatgtgcaatatgccttgaagaattgcagcagggag

SEQ ID NO: 774651 - DNA, 97 bp, Homo sapiens
cggaactggtcgaatgaggcacctaaaaattgtataccgcagattcaggttgatgagccaaccctttcctggtcacgtccatccactagagccagtg

SEQ ID NO: 774652 - DNA, 132 bp, Homo sapiens
cgaaagaagataattacaagcggacacgggaatatatccgaagcctgaagatggttccaagtattccctatctagctctactgagatgaagaaagaaaaagaatacctgctcagctccagagacacgtaaag

SEQ ID NO: 774653 - DNA, 90 bp, Homo sapiens
cagcttctagtgttgctttggatcttgtggaaagtcagactattgacctgaaaagtggttctggaaaagtgtaccaaggccctgcaaaag

SEQ ID NO: 774654 - DNA, 101 bp, Homo sapiens
aaagaagacagccatcatttgaaagatagttttgaggcagctgtgccatcaaatagccacattgtttcggaacctggaaagaatgtcacactcacttgtca

SEQ ID NO: 774655 - DNA, 96 bp, Homo sapiens
tgcgtgcacagcgccttgttccagcagggcctgatccagatgttaaggacatgttcacttccagatctctcaaagctgttcagaacccttatggat

SEQ ID NO: 774656 - DNA, 83 bp, Homo sapiens
ggcgtacttggtctggcttgggttggagcaccttcagatgccgacaaaaggatcaaggtggcgaagcccgtggtggagatgga

SEQ ID NO: 774657 - DNA, 75 bp, Homo sapiens
ggccctacgcgcggcttgcgcagaggaggttcagatgagcccctgctgacttgagagagacagagagaccacgcc

SEQ ID NO: 774658 - DNA, 103 bp, Homo sapiens
tcccgggaagcccctcagctgtgaggagaaggaaaaggttcctggtagagttacacagttgtgccgccagtatagcgacatgcctcctttgacgttagagggc

SEQ ID NO: 774659 - DNA, 90 bp, Homo sapiens
cccaaactggaaagaagatgctaattaaagtgaaggcaattaagttggaatatgcaaggttggttaagttggcccaagaagacaccccac

SEQ ID NO: 774660 - DNA, 99 bp, Homo sapiens
accaccgaagccacgctccggatggaaaacgtggacgtgaaggaggaatggcaggacgaagatcttcccaggcctccggtgtggctgtctctgatggtg

SEQ ID NO: 774661 - DNA, 100 bp, Homo sapiens
ttcgccttctgccgtgattgtcagtttcctgaggcctccccagccacgctttctgtacagcctgcagaactggctctctttacctatgaaggcaacagca

SEQ ID NO: 774662 - DNA, 76 bp, Homo sapiens
gtgaagattggcaatccagtgccctataatgaaggctctgctgccatgaaggtgaagattaagtgctggaacggcg

SEQ ID NO: 774663 - DNA, 83 bp, Homo sapiens
gccgaagtgcccgctgccgggcgcgggcctcaggaagaggatcacctagcccgggtagaagaggcaatcacccgtatgcttgt

SEQ ID NO: 774664 - DNA, 100 bp, Homo sapiens
gagaccgtgaagattccaagttcaggagaactcgaccgggtgataaaagaaaatgtggctgaagttacccgaagttcagcttgcagtgtaattcagaaga

SEQ ID NO: 774665 - DNA, 96 bp, Homo sapiens
cggcggctcgccgcgcccacccgctccgcgccgagggctggaggatgcgttccctggggtccgggggaggacgaggaagaaacgaacgtgatagtt

SEQ ID NO: 774666 - DNA, 51 bp, Homo sapiens
ttttattactggcagcatgtatatcttttgccgacgcccccaacccatccc

SEQ ID NO: 774667 - DNA, 82 bp, Homo sapiens
tctcccaggccacaagacatttcctgctcggaaccttgtttactaatttttttcagaagaagtgaagtcaagatgaagaacc

SEQ ID NO: 774668 - DNA, 116 bp, Homo sapiens
ccggcccacagtgggggtgtgcaaacccgagagaactggaggcgtagaggctccggtgttttttgtgccaattgcctgaccacaaagacctctctctggcgaaagaatgcaaatgg

SEQ ID NO: 774669 - DNA, 100 bp, Homo sapiens
ttctgatagcaactttaatgtggtatgtcccgccagaacaagccaaagtcgtggcatcagttcatgcatctatttcagggtcctctgccagtagcacaag

SEQ ID NO: 774670 - DNA, 83 bp, Homo sapiens
ctcttctaccgggcgccccacgggccgaagccggttaaaaatctgtaagagcctgattttagaattcaccagctcctcagaag

SEQ ID NO: 774671 - DNA, 83 bp, Homo sapiens
cgactgtttgatgacgtcccgcagcttcctgcctgacacagctcacttcaagaagtgcacaatgtcagaacgtggaattaagt

SEQ ID NO: 774672 - DNA, 78 bp, Homo sapiens
acatcgtgaaggttgaagtctgggatgtagtagacaaagcgctgataaagcagtttgtgtccgacgtggcctgggggg

SEQ ID NO: 774673 - DNA, 155 bp, Homo sapiens
agccgaaacaccggtaggagcggggaggtgggtactacacaaccgtctccagccttggtctgagtggactgtcctgcagcccgacggccatggaggctgaagagacgatggaatgccttcaggagttccctgaacatcataaaatgatcctcgac

SEQ ID NO: 774674 - DNA, 80 bp, Homo sapiens
tcgcccacactgaccccgggggagcggcagcaggtgtggacactgccagcggctgcagccgacttggaatgacctgggag

SEQ ID NO: 774675 - DNA, 100 bp, Homo sapiens
aagccacagaagaaatgtcaagaatatgaaatgagtctggaaaactgggccaaagcagtgaaacgctccatgaattgatgcctttgaagatgagaaaccc

SEQ ID NO: 774676 - DNA, 83 bp, Homo sapiens
ctgtctcgactgcactttgagaaggtgtgttccagagaacaagccttcagacatttgctatattgacgctgagctgtcagggg

SEQ ID NO: 774677 - DNA, 90 bp, Homo sapiens
gcagttccagtccgttgctttactttttgcttcaccgacatagtcattatgccgaagagaaagtagccggatcgagctgggagatgtgac

SEQ ID NO: 774678 - DNA, 90 bp, Homo sapiens
ggcactgctttccactcggctcctgtcgtccgttctctcaggctcccgttcagctggagaatgctggaggagaccttaaggatggccacc

SEQ ID NO: 774679 - DNA, 75 bp, Homo sapiens
atgggatctttccggatcaatccagatggcagccagtcagtggtggaggtagcactggctgtatccttgaacttg

SEQ ID NO: 774680 - DNA, 100 bp, Homo sapiens
aaaatactcagtttcctgcttactgcttcattatggattatacagtctgctcccagttttcgagaggagtctatgctatttttggattttatgacaagaa

SEQ ID NO: 774681 - DNA, 100 bp, Homo sapiens
ccaggctggccccgagcggaactggagaaagctgaggctcgccctcccctacctgcggaagagtcaagggaatgtcatcaacatctccagcctggtgggg

SEQ ID NO: 774682 - DNA, 51 bp, Homo sapiens
cgcatgtcccacatgaaatcaataaggttagggaaagtttctcctgaagat

SEQ ID NO: 774683 - DNA, 91 bp, Homo sapiens
gccatttggctgaagtgtggtgtggctctggtcaaaggtcgtgataaacatatcaataatttgaaaaagaaatgccagaaggaatcagagc

SEQ ID NO: 774684 - DNA, 82 bp, Homo sapiens
ggatgtcgctgctggttcgggcagagtccgacgatcctgataacttaagtgactctctcttttccggtgatgaagaaaatgc

SEQ ID NO: 774685 - DNA, 74 bp, Homo sapiens
tcttagcctgcgccgcgaggtctgcggcctcgttgggccatatggtgctcttcccagtctggttcctgtacagt

SEQ ID NO: 774686 - DNA, 90 bp, Homo sapiens
tcttctaaaggagcaattctccaatacttacagtaatctcatattaacagtttgcaggtcgaagtaagaaggaaaccaaatattctctta

SEQ ID NO: 774687 - DNA, 83 bp, Homo sapiens
acttctcagctttaccatccctggaggagacctggcagcagcaattctgtggtgttcttggtcacacatttatggagtttctg

SEQ ID NO: 774688 - DNA, 74 bp, Homo sapiens
ctgtgatggcatctttcatctaacacacttaattcagtgcacaaatgagatgaatgtgaacatcccacagttgg

SEQ ID NO: 774689 - DNA, 100 bp, Homo sapiens
gtgctcgattttatactcaattggatgctgctcaaatgagaaatgatgtcatagaggaagaccttgcaaaggcaatccacctcgaagatccaagtctgca

SEQ ID NO: 774690 - DNA, 97 bp, Homo sapiens
ctcagcctcctgaatagctgggattacaggatggaagtggggatggaggtggcatcggcctcatttgaaccacatggactaagaggggctatgggag

SEQ ID NO: 774691 - DNA, 100 bp, Homo sapiens
ccatcctggtattttttggagcttccatcctggttcttccaaagtgcccggacccaaaacaggaaattgttctctggggccggactgagaaatgcctgaa

SEQ ID NO: 774692 - DNA, 83 bp, Homo sapiens
gggacgacgagtacgactacctattcaaagatgtcgtgatctcaacagcttgtcacccaacagaaaacatcatcgcctctgct

SEQ ID NO: 774693 - DNA, 83 bp, Homo sapiens
gagcaacaggaaatgaacacattgcaggctcgattccttttgtccaaagtgaacccatctcagacacacaataacctgtatgc

SEQ ID NO: 774694 - DNA, 75 bp, Homo sapiens
tccgggaggacccactcttcatcatcagggtgtccgcaatgttgccagtgtctgtctgcagattggctacccaac

SEQ ID NO: 774695 - DNA, 82 bp, Homo sapiens
ccatctaattggctttggtctagacgttggacctctcgaacaaccagctgagcgagatccctgcagagcttgcggactgccc

SEQ ID NO: 774696 - DNA, 82 bp, Homo sapiens
cctgcagagcgatccccgggcccagatatggacgcagcagagccggactctccagaaagagcaacagtaatggagtacatga

SEQ ID NO: 774697 - DNA, 50 bp, Homo sapiens
caagcagcacgtgctcatccacactcagctggtgtgcaatggtgtgatct

SEQ ID NO: 774698 - DNA, 100 bp, Homo sapiens
ccggccctgagcgcactctggagggattctggcatcagggaggctttcagccggagaagcgagtttcagctggcattcccatcaagagcaccatggacaa

SEQ ID NO: 774699 - DNA, 100 bp, Homo sapiens
ggcccgcttcctggaatggcaagcgcagcaacaacagagagcacgtggagtggccagacgctaaggactggagcttgcaggacacggacgccttcgtgct

SEQ ID NO: 774700 - DNA, 100 bp, Homo sapiens
cagataccattgatgaaggaaatgctaaagcgattccaaggtgcccagtcccctggaaggcagtgaaggggacggagacactgactgaggcgatgggagc

SEQ ID NO: 774701 - DNA, 82 bp, Homo sapiens
cacctggacgaagagcaggccagcccggacctctggagtgcccccagcccagagcccgcccccaaatacatcaagatgtttg

SEQ ID NO: 774702 - DNA, 75 bp, Homo sapiens
tttgatgcgacctcaggaaggagatgagagacgtgactcaacaacctcagctgagcctggcagcacacacacccc

SEQ ID NO: 774703 - DNA, 51 bp, Homo sapiens
ggacttccagcctccgaaatggtcacgagaagagaatgccttctagatgca

SEQ ID NO: 774704 - DNA, 76 bp, Homo sapiens
gggatggagtgcctccaaaggttgctgaggctgaccggttccctgatgtgttacctgcttctgctactgatccaaa

SEQ ID NO: 774705 - DNA, 100 bp, Homo sapiens
cgaaaggaagcaagcagttcagaagagccaaggaataaacatgcaatgaacccaaaaggggatcgcccggagcccacacccgtcctccgctctgcatttc

SEQ ID NO: 774706 - DNA, 90 bp, Homo sapiens
cgagttggtcggtcccggggtcacccgctacgggaagcaggcctcgccacaggatatgctgcaggctgctagtcattatcgccaaaatag

SEQ ID NO: 774707 - DNA, 74 bp, Homo sapiens
ctcgtggaggggatggatttccataagttttactttgagaatcgccaaacgtaccaagaaagtcgggatcgtcg

SEQ ID NO: 774708 - DNA, 83 bp, Homo sapiens
gatgacaacactttaaaagtttggtcagcagtcacaggcaaagaactacttccagtagcaatacaatggtagctcccacagat

SEQ ID NO: 774709 - DNA, 98 bp, Homo sapiens
tggaaaaccagttattgaatatcaagaggaggagttgttgttaagtgggcagaccaacatccacctcagcaaaaacttcttcctgacgaatcgcgcca

SEQ ID NO: 774710 - DNA, 83 bp, Homo sapiens
cttcagcaagctctctccaacggttacttcctcagaatgttggcctcctgtatgttggaggttatgaaagaccctttgcacaa

SEQ ID NO: 774711 - DNA, 101 bp, Homo sapiens
ctgaacaggccaaagccagactacagctggttcttgaagctgctgtgataaatgctgctcattctttctacaatggaacaacaaccctaccaatatcagat

SEQ ID NO: 774712 - DNA, 50 bp, Homo sapiens
gaaaggattggattggcatctttagagctagcatcccattctctgtggtt

SEQ ID NO: 774713 - DNA, 96 bp, Homo sapiens
gggatctacatcatccagttggttggcatccctggcctgggggacaggtggagccccctgagctgcccgctgatctgcagcactggatctcctaca

SEQ ID NO: 774714 - DNA, 75 bp, Homo sapiens
cggtgctgcgagggcagaacctggggccatccaggagagcctcctcaccagcacagaaggcctgtgccccagcgc

SEQ ID NO: 774715 - DNA, 100 bp, Homo sapiens
ctaccctggaggagattctggggcagtatcaacggagtctccgggtgaagctgtggtctaccaatctagacaactcagtggcaagcattgaggcaaaggc

SEQ ID NO: 774716 - DNA, 98 bp, Homo sapiens
gcctggggactctgcctcgtgccgctgagcctggcgcagatcggtaggcgaaaaccaagagtacatcggcctcgttctcctatattggaagaaaaaga

SEQ ID NO: 774717 - DNA, 83 bp, Homo sapiens
agaaccccaggactgcgcccccgggagcgggcgcccagagatgctatctgtgagcagcagttgataatgtgcataaaatctgg

SEQ ID NO: 774718 - DNA, 83 bp, Homo sapiens
cgagaacacgctggcggccattcggcagtgccagattggcctcactttttggactggatcaggcagctgctggccatggaaat

SEQ ID NO: 774719 - DNA, 82 bp, Homo sapiens
cctggctccagatgggaccgactttgacaacccagtgcaccggtctcgggtgcggccgggtgtgtggcaacattacttcatg

SEQ ID NO: 774720 - DNA, 100 bp, Homo sapiens
ctggaaaaaatgacatccagcgacaaggactttagaaattccgggtagatatgcctggctcaggcagtgcattcatccccaccatcaacgccatcacgac

SEQ ID NO: 774721 - DNA, 51 bp, Homo sapiens
tcaacatgagaaatgatctgtaccagatgacttggaagactccatgatcgg

SEQ ID NO: 774722 - DNA, 100 bp, Homo sapiens
agcagctccgggctcgagagcccgcgcccatgccagtgcccatgcggggccgccgccagtgacgccggagaggaggaagttaagtcttcagagcctactg

SEQ ID NO: 774723 - DNA, 100 bp, Homo sapiens
agggagccggaagagctgatgcccggttctaatagaagactgtatcccggtactgaagaggtacgccaaagaagggagagaatttgattatgtgattaat

SEQ ID NO: 774724 - DNA, 112 bp, Homo sapiens
attcacccttgtagagtcattcctgcctttgagcggactcccttttaagtattttaataagcggaaaacctactttgctcacgatgcccttcagcagtgcacagttggggat

SEQ ID NO: 774725 - DNA, 80 bp, Homo sapiens
acatccatatcataagtggaattttggagatattcaaagaattcttccatctctatgacaacaagcccattttagctttc

SEQ ID NO: 774726 - DNA, 98 bp, Homo sapiens
aaaaactcaacactggctaattatttatactgtgctctggtgctactgattgctcaagagaaggaaagaaacatatttgaccagcgtgccatagagaa

SEQ ID NO: 774727 - DNA, 50 bp, Homo sapiens
atcggacgctgcacaagatcaaggtaacattgtataacactgatcaggat

SEQ ID NO: 774728 - DNA, 98 bp, Homo sapiens
gtcaatggcaccgacacattgtggggagaaacagagacacccgccatttcacccagtaagcgggcccggcctgcggaggtgggcggcatgcagctccg

SEQ ID NO: 774729 - DNA, 95 bp, Homo sapiens
aggtccagccaatgcattcagaagccaaaatggaagatgagaatgtgcctactgctcctgatcctccaagtcaacatttacgtgggcatgggaca

SEQ ID NO: 774730 - DNA, 83 bp, Homo sapiens
agagcgccttgggacagggggatttggaaatgtcatccgatggcacaatcagaaagttggagtgactggtccccctgatccac

SEQ ID NO: 774731 - DNA, 96 bp, Homo sapiens
agagattgaagcctacaaccatgcaaagagcagtatgtgtttatccacgatgcgatcctggaagcctgtctttgtggggacacctctgtgcctgct

SEQ ID NO: 774732 - DNA, 100 bp, Homo sapiens
gtagaactttatttacatgttaggaaattttaacatgagcttttcaagaaatggaattgaaaagtccagaggaagagcctcacgattttgatgaatgtcg

SEQ ID NO: 774733 - DNA, 90 bp, Homo sapiens
caaggctgtgctggatggagtgaagctattgaaaccaatttcagggaaattgagggcccagtgggaaatgggcattgttcaagcagaaga

SEQ ID NO: 774734 - DNA, 100 bp, Homo sapiens
tggtgagcgtggggaatctggaagaggctggggagtctgtgtccttccagctgcagatacggaggtcccctgcctgtgcccttcaccaatggggagatac

SEQ ID NO: 774735 - DNA, 74 bp, Homo sapiens
agcacgtcttcttccaagtggtggagttcaagaaattgaaccagactgcttttcaggaagccttggacgctgca

SEQ ID NO: 774736 - DNA, 50 bp, Homo sapiens
cgggaggcagttgcagctttcagagggaacaccctgaagaacatagagaa

SEQ ID NO: 774737 - DNA, 101 bp, Homo sapiens
tctctggcaccttccaccagtggagagagggcaccaccaaaagtgaggtcttctacccaggcgcttcctcccatcaacacagtcggcggagacaaggttgg

SEQ ID NO: 774738 - DNA, 82 bp, Homo sapiens
cggggatgtggacgaaggggccgacctcctaggagctgcagaggctggagacagagttgggccaacccgctgagcgctggaa

SEQ ID NO: 774739 - DNA, 82 bp, Homo sapiens
ccaagactgcagaacccagctattactggtccgggtaaaccagacttgaatacaacattgccaattagacaaacagcatcaa

SEQ ID NO: 774740 - DNA, 75 bp, Homo sapiens
ttttctcagctgcctgctaacatagctgtttgcagttctaaggcacttgcagttacattcaccacatttgtaacg

SEQ ID NO: 774741 - DNA, 75 bp, Homo sapiens
gaaaatcataacaagcggttctctaccctgtaaagcatcaacaaagagagcattgtggatgtagaaggtgttgtg

SEQ ID NO: 774742 - DNA, 50 bp, Homo sapiens
cgcatgagtggcaggcccttcagccagggctccttggtaatgaccagtct

SEQ ID NO: 774743 - DNA, 82 bp, Homo sapiens
agcagatgaaggaggatggcgcctgtctcttccgggctgtaggccgccatggcatcagatgaaggcaaactttttgttggag

SEQ ID NO: 774744 - DNA, 101 bp, Homo sapiens
cattcaccagcttgtgcgcctctccaacctgcacgtgcagcagcaagagcagcggcagtgcctgcggcgactccagcagctcattcttggaatcccagaac

SEQ ID NO: 774745 - DNA, 98 bp, Homo sapiens
gatgatccagttggaccttttggacaggaaagtgtaacatcagttacagaaatgtgacagtgatgataacatgggtgccaaaaatacttcaataggag

SEQ ID NO: 774746 - DNA, 87 bp, Homo sapiens
ctgtgggacacaatgcccccaagtattctaccttgtaaatactgttatttgtatatactgtaaatgatgacatcggtgggcactaac

SEQ ID NO: 774747 - DNA, 76 bp, Homo sapiens
cctcaagcacacccaatggacagcatgcctcaccaagtcacatgacaagcagtcagatgatgatgatgcggagagt

SEQ ID NO: 774748 - DNA, 82 bp, Homo sapiens
gggagatcccaggcggtgacagagtggagccatggctagagcgctgataaagcagtttgtgtccgacgtggcctggggggag

SEQ ID NO: 774749 - DNA, 100 bp, Homo sapiens
gacacgtctggagcaggagatcgccacctaccgcagcctgctcgagggccaggacgccaagaaagaccacagcaagattctttcattcgtctcctcctag

SEQ ID NO: 774750 - DNA, 90 bp, Homo sapiens
tacacttcgatggacctgttgaaaaaaatctgggaggttgaacttattaatgtcttcgatgccaagaacatgatggctgcctgtgacccc

SEQ ID NO: 774751 - DNA, 100 bp, Homo sapiens
ccggggttttcaaggcttaatcgaagagatgaggcgacaggaagaagggtattacagccgcctggaagccgagaggcgcagacagcacgacgaggcggcg

SEQ ID NO: 774752 - DNA, 101 bp, Homo sapiens
tggcaacggccaacttcggcaagatccagatcgggatttacgtggagatcaagcgcagcgatgtttggcaatgaggagcagcagctggcgtgggccaagcg

SEQ ID NO: 774753 - DNA, 100 bp, Homo sapiens
gtctcggagtgggagacgtggagtgcagttaagtgggcagaccaacatccacctcagcaaaaacttcttcctgacgaatcgcgccagggagcgctcagac

SEQ ID NO: 774754 - DNA, 100 bp, Homo sapiens
tccggggctttttcggctttcctggacctcggagagtgttctgccagttctggataatccactgtccaagaaggttcgaggcctcattgatagcttacgg

SEQ ID NO: 774755 - DNA, 74 bp, Homo sapiens
aagaagctgaggatgaagaagatggtagtgggcagcagtcagtgacaggtgtaacctctgtggatgacagcaac

SEQ ID NO: 774756 - DNA, 74 bp, Homo sapiens
cagatgcctgatacattcaattcatggtttcttataaccctactccacgtctgcatcactgtcctggtaactgg

SEQ ID NO: 774757 - DNA, 75 bp, Homo sapiens
tagagaatgagatagccgtcctgagaaaaacttgggaatcagtgaaacgtacaaccaggaaagagcagactgcgg

SEQ ID NO: 774758 - DNA, 50 bp, Homo sapiens
gcgggcgcccgaggggccgagcgaggatgaccagtgtcccagtgaaggaa

SEQ ID NO: 774759 - DNA, 82 bp, Homo sapiens
gaggctgtcctctggtgagaaggtggtgaggcttcccgtcatattccagatgcttcaggactgccccaaggcccgcagggag

SEQ ID NO: 774760 - DNA, 130 bp, Homo sapiens
ggaaacctctctgaaatctgacacctgctctcccggcaaggaaacttcgcaggctgctgtgcctgagctgaagcttctctgtggggcagacgtcttgaagaccttccagacccccaacctctggaaggat

SEQ ID NO: 774761 - DNA, 51 bp, Homo sapiens
cttcagttctgcacacgtgcgtcaaaggtgactgaatgtctgaccaccgtg

SEQ ID NO: 774762 - DNA, 88 bp, Homo sapiens
cgctgtacgccgagcacccaggcgactgcctcatcttcaaggccctggccactgcagtcatcccccagtggcagaaggatgaattgcg

SEQ ID NO: 774763 - DNA, 85 bp, Homo sapiens
gggtgtggctgctccacccttaaccaatacttcggctactcgggagccttcaagagcatcagatccatgctgctgctgactcgga

SEQ ID NO: 774764 - DNA, 100 bp, Homo sapiens
ccgccgccgccgccgccatcatgagggaaatcgtgcacttgcaggccgggcagtgcggcaaccaaatcggcgccaagttttgggaggttatcagtgacga

SEQ ID NO: 774765 - DNA, 75 bp, Homo sapiens
gaatgagctggagagactgaaagagctcagggagccaatggtactctggagaacccagccctggacacaagtctg

SEQ ID NO: 774766 - DNA, 98 bp, Homo sapiens
agtccagaaagcggcttatcgaacagagccgggagttcaagaagaacactccagaggaatttagataatgggctgtgtgcaatgtaaggataaagaag

SEQ ID NO: 774767 - DNA, 87 bp, Homo sapiens
aagttgttcattgtttgtcaccacaaaaaggacagtctgtagatggacggcagatccgagtagaccaggcaggcaagtcgtcagaca

SEQ ID NO: 774768 - DNA, 100 bp, Homo sapiens
aggaatacactgggttccaagttgctttgctgaataagactcagattgatggacaacttttcttaattaagcaccttttgatacttcgtgaacaaattgc

SEQ ID NO: 774769 - DNA, 98 bp, Homo sapiens
ttgaaggctgcagtgagccctgtttttgccaccacactccagcttggggtctccctctgatgccgagccgaagctggacggtactgctgccatcttgg

SEQ ID NO: 774770 - DNA, 76 bp, Homo sapiens
ccggaacaccctggaagccgagaaatggtgtgatgaatgcagactctgctaccattttggctgtttggatcctcct

SEQ ID NO: 774771 - DNA, 88 bp, Homo sapiens
gatgagaacaatttgacagctcatgtagaggctggcataacaggacaagagttggaaagacagagtcctcgaatgccaccttgctgac

SEQ ID NO: 774772 - DNA, 100 bp, Homo sapiens
gattcatgttctgccagatgaggtcgagcactgccagatagctgatcagcttccttgggttttgctgatgacacaagagagctttgcctgaagatggaaa

SEQ ID NO: 774773 - DNA, 100 bp, Homo sapiens
cagtgactaccatgacgaaaacatgtactacagccagtcttctatgtttccacatcggtcagaaaaagatgatccctccccgcggcggcgatggcccgag

SEQ ID NO: 774774 - DNA, 98 bp, Homo sapiens
gggaaagttcatgttgctgaaagctgtttggaagaaacaggtggcctgggagtagatattgtcctagatgctggagctagcatatttggcagcttatt

SEQ ID NO: 774775 - DNA, 75 bp, Homo sapiens
gcggcggccacgccaaggacgggccaaatttgagtttcatcatggtgactatgaaaaacagtttctgcatgtact

SEQ ID NO: 774776 - DNA, 75 bp, Homo sapiens
ctgtgaactggccaacggccatgtcccctttaaggatatgcctgccacccagctctttgctgaagagcaagcaga

SEQ ID NO: 774777 - DNA, 50 bp, Homo sapiens
tgcatgaaggacagcctcttctcaatgatggagtggatgttgaagatgat

SEQ ID NO: 774778 - DNA, 100 bp, Homo sapiens
acacagcaatatctctgggctttcacaggtgacggccctgctcgggaggccctccagtctctgagccagcggcttcgggtgcaggagcaggagatggaac

SEQ ID NO: 774779 - DNA, 75 bp, Homo sapiens
gccgagggcaggacgaacttcaccaggacgtggcccagtggaacatcgggagcctccggaccatcctggacatgg

SEQ ID NO: 774780 - DNA, 80 bp, Homo sapiens
ccatgttcgcccagcagatgcagcttatgctccaaaacgctcaaatgtcatcacttcaaaagctggcaggctgacagagg

SEQ ID NO: 774781 - DNA, 50 bp, Homo sapiens
cgaacatcttctggacctttgtccaggtcggattgtttgtgctgaacgaa

SEQ ID NO: 774782 - DNA, 80 bp, Homo sapiens
aggatatcgacgtcgtgatccagaagtccagagctgaggactgcctgtttgcagatagcagactccttgaaagcagggtc

SEQ ID NO: 774783 - DNA, 100 bp, Homo sapiens
ctgtaaataattaagaagaccaagtagcatccaagatgattctgctgcagagagctttaatggcaatgagactctggggcacagttcaattgcttcaggg

SEQ ID NO: 774784 - DNA, 100 bp, Homo sapiens
tccagagctgtgcctcccagcaccacagtccttctgcagtccctcgtccagccacccccaggtcccacaataggccgtctgcaagctgaggagcatggag

SEQ ID NO: 774785 - DNA, 77 bp, Homo sapiens
atggcagaggcacccccagggacattagcaagatggcaggattttcataatatatgtagtatgagttccacatcttg

SEQ ID NO: 774786 - DNA, 100 bp, Homo sapiens
ctgggcctgctactcctggggcacctaacagtggacacttatgatgacaggattggacattgagaaggaccagattattgagatggcctgtctgataact

SEQ ID NO: 774787 - DNA, 74 bp, Homo sapiens
agcagcggcgggggcccgaggggcctccccatggccacccatggaccagtcggcattcacttcctcccttctgc

SEQ ID NO: 774788 - DNA, 75 bp, Homo sapiens
acatcctggaggatcaggtggagcctgatggcctgacctctcgggacacacccagccctgtggacccagacaccg

SEQ ID NO: 774789 - DNA, 90 bp, Homo sapiens
tgctaagcttgtgggaatgtctgtcctcctagccaaagaaagttgaagcttcttgtcatgacggggatgaaacaattgaaactattgagg

SEQ ID NO: 774790 - DNA, 99 bp, Homo sapiens
tgaacaacttctgagcctgcactttaagaaggcgctcttgttttgaatacgtagtctgtcctgttctttcaaaaaacctgtcaagtaaccggctcacca

SEQ ID NO: 774791 - DNA, 100 bp, Homo sapiens
aactcccattcacaaggcagctcgctctgggagcctagaatgcatcagtgcccttgtggcgaatggggctcacgtcgaactgctgagaaggaagaatttg

SEQ ID NO: 774792 - DNA, 98 bp, Homo sapiens
ttcttcttgcctgtggcataaacccggaaaaaagcatccttttccaacaatctcaggtcggatccgcacaagacggcaaagctctgggagtgccacca

SEQ ID NO: 774793 - DNA, 80 bp, Homo sapiens
tgctgggatggcgcgggccgggccggcgtggctgctgctggcaatctggtaccatgcggagaccatcaagaatgtgcgca

SEQ ID NO: 774794 - DNA, 100 bp, Homo sapiens
gtctccttccgcagacgggctatgtgcacccagatgagttcttccagtcccctgaggtgatggcaggtactccaaagattcaggtttactcacgtcatcc

SEQ ID NO: 774795 - DNA, 100 bp, Homo sapiens
ccggcctagcgtcctggaattacttcaatcaagttcgtttaccaagcaaaagttgggggtcgctggttcccagccgtctgcgcacacagcaagaagcaag

SEQ ID NO: 774796 - DNA, 75 bp, Homo sapiens
ttacattctctcggccagcgcctccgcggctaagtcctatcagccatggaaacaccattgctctcttcttccggt

SEQ ID NO: 774797 - DNA, 75 bp, Homo sapiens
gcaaggctaaagaaattaatgacaataatggatagtatgaatgatcaagaatttacatagtacatgacgaagtta

SEQ ID NO: 774798 - DNA, 51 bp, Homo sapiens
caaagaaatccccgtgactgtctataacattaataaaggtttctgaagcac

SEQ ID NO: 774799 - DNA, 100 bp, Homo sapiens
ggaggaggccatggtggtggccgtaattccgcggcccgagccgatgctcagaggattattgaacatggggaaggaagaggcctcacttgaggaagtgtta

SEQ ID NO: 774800 - DNA, 100 bp, Homo sapiens
agaattatgcacctgacagcatctattacctttgccttggaatacaggagttgcaggacgaggagcggaggcggcagcagcagttagaagagatgcgcaa

SEQ ID NO: 774801 - DNA, 100 bp, Homo sapiens
ctcacctgtgcgggatggaacaaaaggtcatggcaaaaccccaaaagatgccgcgtcagttcgagccacgcatccaataccagcagcctgtgggatttat

SEQ ID NO: 774802 - DNA, 100 bp, Homo sapiens
gggtggaaaagtgttcgccgagggtgaatcatttgatgtaaaagacttgactccataatctgcatctgtcctaatgctgtcatctggagtagagactcag

SEQ ID NO: 774803 - DNA, 75 bp, Homo sapiens
cgacaagcctgtctgcttcgtagggaggctggaaaaggcaacagctgaagctaataatcttgctgcagtagcagg

SEQ ID NO: 774804 - DNA, 76 bp, Homo sapiens
ccatgaacaatctcacccaattactctgctcagggatttcttgtggctctcctccgcctatcctaaatggccggat

SEQ ID NO: 774805 - DNA, 98 bp, Homo sapiens
agacacaggcataggactagaagcaggagtaggacaaggagtaggagtcggtttcacagacatattttcagagtcgaaggagggccttgatattcact

SEQ ID NO: 774806 - DNA, 75 bp, Homo sapiens
gggcaagcggaaggtgatgcccaagatggaccagttatgcagaaggggttaaaagataactttgctgatgtccag

SEQ ID NO: 774807 - DNA, 74 bp, Homo sapiens
cactgctacaggactctactatggagtggtactgactgtcctcacccacacccctgcccctcgagtgagactgg

SEQ ID NO: 774808 - DNA, 74 bp, Homo sapiens
gctgttgctgccgccatacgcgctctccctgtttagcattgatatgaaccatggacaagtatattctgctgcca

SEQ ID NO: 774809 - DNA, 75 bp, Homo sapiens
ggccgctcacaacatgcacagcctggcgacggctgcgatgccgtgcgcgaaattcggaagtatgatgatgtgacg

SEQ ID NO: 774810 - DNA, 82 bp, Homo sapiens
ctccgcgtcgcagcccccgccgtagccgcctccgagcccgccgccacatcctctgaggtcaaaatgcagatcttcgtgaaaa

SEQ ID NO: 774811 - DNA, 51 bp, Homo sapiens
attccaagtaactcttatttgtacttacagatcatcagtatttggagagga

SEQ ID NO: 774812 - DNA, 100 bp, Homo sapiens
cattgtttgtcaccacaaaaaggacagagaagagaatttatcaccggcgatgttgaaccaacagatgcggaatcggaatggcacagtgaaaatgaagagg

SEQ ID NO: 774813 - DNA, 80 bp, Homo sapiens
ctgtttcgagccacgcgcccatcgggctggagtgcagtggcgagatctcgactcactgcaggctccgactccccagttca

SEQ ID NO: 774814 - DNA, 74 bp, Homo sapiens
ctctcactggcacagcgaggttttgctcagcccttgtctcgggaccgcaggagcgagaacccgagcagcgccat

SEQ ID NO: 774815 - DNA, 75 bp, Homo sapiens
gcagttcagacccttctctcccctccactttctcccgggtgttggagcgggccggagagaagtagagtgggctgc

SEQ ID NO: 774816 - DNA, 50 bp, Homo sapiens
ccggagccggcgccgcgggccgaggtggaaaacgaagctcattcccaacg

SEQ ID NO: 774817 - DNA, 100 bp, Homo sapiens
cgggaccccagcgcgggcggcggcggctgggcgggagccccagagataaatttccgctgtaagccgtccttccgtgaatcaggctccaggaatgtccgcg

SEQ ID NO: 774818 - DNA, 100 bp, Homo sapiens
cagagatcttttctttgctctttggattccggatctcttcatgaaacgagtggagactaatcaggactgtattttgagcctgaaccaatttcttccacgc

SEQ ID NO: 774819 - DNA, 100 bp, Homo sapiens
caaaagaagcagctcaggaggctgttaaactggaaaatttctaccttgaaccgtatctgaaagaggttattcgggaaagaaaagaaagagaagaatgggc

SEQ ID NO: 774820 - DNA, 100 bp, Homo sapiens
gagaggaagcgatgatcaattacgaaaactttttgaaggttggtgaaaaggctggagcaaagtgcaagaaggatttgatgccctggatccctttattccc

SEQ ID NO: 774821 - DNA, 99 bp, Homo sapiens
agaagagcatgagagagcccagagggtccctttctagagataggagaagagagagatcgctgtctcgggagagaaatcacaagccgtcccgatccttct

SEQ ID NO: 774822 - DNA, 74 bp, Homo sapiens
ctgagcaatactgtacgtagccagggaccgagtggggtcaatcttctggtgctgcctctccaggtctcttccag

SEQ ID NO: 774823 - DNA, 101 bp, Homo sapiens
tgcttttcggactcctgatggcatgcctgtaaagaacttgcagttgaaggagtataacacaggaactgcaagcacatgttgaccagataactgaaatggca

SEQ ID NO: 774824 - DNA, 83 bp, Homo sapiens
caagaatcgccgcgggggaccgcccttcgccttcgttgagttcgaggacccgcggtcaaaatgcagatcttcgtgaaaaccct

SEQ ID NO: 774825 - DNA, 81 bp, Homo sapiens
tcgattttaccttggataccctgctttggttttctggatatgccgcagaaggatccgtgccagaagcaagcctgtgagata

SEQ ID NO: 774826 - DNA, 100 bp, Homo sapiens
tgtattggtttgatgctcctacctggaacaggcctggggcaggtgctggagtttatgtacacggccaagctgagcctgagccctgagaacgtggatgatg

SEQ ID NO: 774827 - DNA, 98 bp, Homo sapiens
gaggatccacagtaaaggacatttccagggacttgtttacactgggcatgtaaacgaaaccatggtcaggtggtctcttacctgttaaaatcaggagc

SEQ ID NO: 774828 - DNA, 75 bp, Homo sapiens
ctcaagcccaggctttggtcaccagtgagctggagaagttccagctgaggatgaattggagcctgccaggaaaaa

SEQ ID NO: 774829 - DNA, 100 bp, Homo sapiens
caggcgacaggtgtcgcttgaaaagactgggcttgtccttgctggtgcatgcgtcgtcggcctctgggcagcagaaccactcacgaattcttgtttggtg

SEQ ID NO: 774830 - DNA, 75 bp, Homo sapiens
gccggcttcagtgcctgccttggggaacagatggagtcggataactgttcaggaggagatgatgactggacccat

SEQ ID NO: 774831 - DNA, 59 bp, Homo sapiens
ggacaacctcagaggacaacgaagtgttcgagctccctctttgcccactagcagggcat

SEQ ID NO: 774832 - DNA, 74 bp, Homo sapiens
gttcctccatgataaaggaatcatctataggaattgtggtgcttggaataaacagagcttatggcaaaaattca

SEQ ID NO: 774833 - DNA, 100 bp, Homo sapiens
ctggcggacaggcgacagcgacctgcggcagatttggaatccagatatgacactaaaaagttatttcaaggaaaggatatttatgaaatgaacttatctc

SEQ ID NO: 774834 - DNA, 100 bp, Homo sapiens
cgcagcctcctggcccggcagtgcctggcagagtttctgggtgtgtttgtactcatggcatagaatgtcaagctaaccaggcgtccgctacttcagaaga

SEQ ID NO: 774835 - DNA, 83 bp, Homo sapiens
acaaagtgaccaagaacgtgagcaagcccaggcacagccgacgccgcggggtagcccctgaagaagatgaaaggaaaaagagg

SEQ ID NO: 774836 - DNA, 96 bp, Homo sapiens
tgcaaaccatgcaacgtctgacaaatttaagacttcaaaacatgaaaagtgatacttttcaagagtgcaaattgggaatcgtgaaattcatagaag

SEQ ID NO: 774837 - DNA, 96 bp, Homo sapiens
gccccacctatgacccctataagcgcccctgggtggctccagctatggctaccgtggccgagactgccgggccaacctttatttgctgcccaccgg

SEQ ID NO: 774838 - DNA, 98 bp, Homo sapiens
aacacagcagttgcaccctgttttgcaaaaaccatcagtgtttgggaatgattctgatgatgatgatgagacacgagacgacttcctgggccaggtgg

SEQ ID NO: 774839 - DNA, 74 bp, Homo sapiens
accttggagagaggagaacgaacatcttctggacctttgtccagtagtcgtgaaaggtgccaaattggcagagg

SEQ ID NO: 774840 - DNA, 82 bp, Homo sapiens
gttctttatcctgctggggctgcgacagaagaagcccaccatctccgtgaaggaaggcttctcacggcattcagcagcagcg

SEQ ID NO: 774841 - DNA, 75 bp, Homo sapiens
ttaatggagccaaatttaataaagagtgtgaacatggctacgcctcttcattcccgtccatgccgagcccccgac

SEQ ID NO: 774842 - DNA, 100 bp, Homo sapiens
agcgtggttctcccacgtgggcccctttaacgagggaggtcagataggcctcatagacctgctgagctgcatggggctgaggccagatggcatcgtcggc

SEQ ID NO: 774843 - DNA, 100 bp, Homo sapiens
tgcaatttgaagatacatgagacagcagccaaacccccaggttgttttggaaaccgaaataacaaataagtccgctttgaaactttatgaaaatcttggt

SEQ ID NO: 774844 - DNA, 80 bp, Homo sapiens
tgcagtgggtggacgagatcagtttgtaaggtcctcagtttgcagaagacccctcccagttgccttcaactcagttacct

SEQ ID NO: 774845 - DNA, 50 bp, Homo sapiens
gaatgaagctgcagaccctcgcactggatctaccatgaaagacttgtgaa

SEQ ID NO: 774846 - DNA, 100 bp, Homo sapiens
cattgaagtgcttggagtgcagaactgaaagaggcaagggccagccaagccagaagtcctgtcgattcaatggcctggaaaacgatcaagccgccgagtc

SEQ ID NO: 774847 - DNA, 75 bp, Homo sapiens
tggaaacaactgggcatatggggctttgttcgcgggggtcacagctctcatggctgcagctagcgtgaccccccc

SEQ ID NO: 774848 - DNA, 100 bp, Homo sapiens
tcaaggacacggtctacaccgacttcgacggtatgctccagaatcactgacagagagcaagttttctgtggcctcagatgtttggagctttggagtggtt

SEQ ID NO: 774849 - DNA, 84 bp, Homo sapiens
atcaacattgatctcctatttttggcttcaagattttgtgccaaccaggatcaatgcttacattgaagaagaagtccaaagacg

SEQ ID NO: 774850 - DNA, 98 bp, Homo sapiens
cggatttgcaccccgtggggtggtgcacacagaacaacaaggtgttgatgccgccggacgggattaatgaaaatcaagttccatcctcagacaagagg

SEQ ID NO: 774851 - DNA, 74 bp, Homo sapiens
gataatttccccagagcgtcttgatccttttgcagatggttccagcaacagatagaaatgctttaagttcactc

SEQ ID NO: 774852 - DNA, 82 bp, Homo sapiens
catggagcaacaggatcagagcatgaaggaagggatgatatcatcaagttgaatcgaaaggaagggaagaagcagaattttc

SEQ ID NO: 774853 - DNA, 101 bp, Homo sapiens
caacttttttggaaaagctgctatgatctgcgggccaggcatcgacatccgcaacgactatcagcagctgaagcgcctggagaactgcacggtgatcgagg

SEQ ID NO: 774854 - DNA, 89 bp, Homo sapiens
ccgcgtccgccgattcctcctccttggtcgccgcgtccttggctggcgtgcggtggtagtgcctcaaggtggcggacagctgtgggtct

SEQ ID NO: 774855 - DNA, 98 bp, Homo sapiens
tggacatgagccccctgaggccccagaactatcttttcgatacacaatcatcatcttactagttctctgtgttgctcgctaaccagtcccccagttca

SEQ ID NO: 774856 - DNA, 115 bp, Homo sapiens
tgaagaagcaggaggctaagaaagtggtgaatcccctgtttgagaaaaggcctaagaattttggcattggcttcatccctccacccctcatcttcggggctggcatcgactccac

SEQ ID NO: 774857 - DNA, 100 bp, Homo sapiens
atcgtggcacccaagagaaggttttttctaggaggaggaagtgatccattgtgtaagtcacatcgatcagacaacaacatggcaggaccccaggaaggcc

SEQ ID NO: 774858 - DNA, 90 bp, Homo sapiens
cagatccgtgttgtacttctgatgcacagccacatgcatttctcctcagtggaccagcttcaccagctttccagagtgttgaatcttcca

SEQ ID NO: 774859 - DNA, 100 bp, Homo sapiens
acctggagagaggccgcgtcctgggcagagcatgcttttcacttccactgcatctctcgctggctcaaaacacgacaggtgtgtccattggacaacagag

SEQ ID NO: 774860 - DNA, 90 bp, Homo sapiens
cctggcagatgccggctatggcgaacaggaactggatgccaactctgcccttatggaattggacaaagatgccatcccgcccactttcta

SEQ ID NO: 774861 - DNA, 100 bp, Homo sapiens
cccggacaggaggcagtgccgcttcggccgaaggcccgagcgcccgaggcgtctgggatggtgtgggaccggaatcctcactatggatgggctcattgag

SEQ ID NO: 774862 - DNA, 80 bp, Homo sapiens
tgctgagaagcactatgctcctttcctcttgaaaccaaaagccaagccctggtacctgacagtgtaaagaaggagctcct

SEQ ID NO: 774863 - DNA, 74 bp, Homo sapiens
cgatctccgccctggggtcattgtcaggtgtctcttttgacaagacttcagctacctggcttgctctgtccaga

SEQ ID NO: 774864 - DNA, 75 bp, Homo sapiens
ctccggtggcccaggtgcctacctccctcaagcctgggaagtgtagaaaaactacaagtcctgttaaattgcatg

SEQ ID NO: 774865 - DNA, 74 bp, Homo sapiens
tgggaccgggacctgctgctggacccggcctgggagaagcagcagcgcaaggttgggcccgaaggcatcctgca

SEQ ID NO: 774866 - DNA, 75 bp, Homo sapiens
aagcagctggcttcactgctcaggtgctgataggagatgtggaagatgccatctgccttcatgccttctactatg

SEQ ID NO: 774867 - DNA, 99 bp, Homo sapiens
tcagcctgcacggatggtcttgaaacacaaatggtttttgcctgtggccgtgggttctacaagtcttcctctcaagatcttcagtgctctcgttgtcca

SEQ ID NO: 774868 - DNA, 90 bp, Homo sapiens
ttttaaactcattctactggagcaaatgcatcgagagtaaacatgaggttacgatcctgggaggacttaatgaatttgtagtgaagtttt

SEQ ID NO: 774869 - DNA, 75 bp, Homo sapiens
cgggtcactggccagcaccccgaggtgagaagccctaccactgcaactgggacggctgcggctggaagtttgcgc

SEQ ID NO: 774870 - DNA, 100 bp, Homo sapiens
cgtctacactgtacatgctttttattacaagactacggagcataggaggaaaattcatcatctgattgactggggcgactttggggtagaggcagtgtct

SEQ ID NO: 774871 - DNA, 75 bp, Homo sapiens
gagggagtgatgtcttccagactcggtgctgtacccgcctgtgccccctaccaccggagccagagaatggtggct

SEQ ID NO: 774872 - DNA, 96 bp, Homo sapiens
tttagaacagtgtgaagaaattgaagccctcagcatggctttttacagcagcccggaaattctgaggaaaccagcctggacaccaagtctgtgtca

SEQ ID NO: 774873 - DNA, 97 bp, Homo sapiens
ctggatcttcgaacttttgacacggctttggaaacgacgtcatgtgttagccatcactggtgcaagctatatttaacggagatcctgatgaagttcg

SEQ ID NO: 774874 - DNA, 90 bp, Homo sapiens
cggctcggagtccgctggccacccagctgagaggagaggcgcccccggggacggtggggacccaaactgtatgcattgttccagatgcgc

SEQ ID NO: 774875 - DNA, 74 bp, Homo sapiens
cagcaccacagtccttctgcagtccctcgtccagccacccccaggtgaaaggtgtagcagtcactcggcctaca

SEQ ID NO: 774876 - DNA, 83 bp, Homo sapiens
ctggctcggagcagcagcctctgaggttcgatacaagaggctgttttcctagcgtggcttgctgcctttggtaagaacatgtc

SEQ ID NO: 774877 - DNA, 100 bp, Homo sapiens
tggaattctaatttgaaccatgtttggattgaagccgcctctgtattacttaccaggcagcagaacaaggacggccccctgagcacaccagcaagtttta

SEQ ID NO: 774878 - DNA, 74 bp, Homo sapiens
ttggctggcgcaaaggctgccctggatgggactcctgttcacacaaaagatgttggacaatttctacaattttg

SEQ ID NO: 774879 - DNA, 101 bp, Homo sapiens
ggagtccatgctacctgattgcccccgggtctcagcagtatttgattttcatcaagcagctgatggtatccaggaacaacagagacaagaacaagcaggaa

SEQ ID NO: 774880 - DNA, 101 bp, Homo sapiens
cccaatctcaatccggaggccagtagcaccaggatatgtctttttttcagttatgggacaaaaatattatatcaaaacactgaagctttgcaatctaaatt

SEQ ID NO: 774881 - DNA, 82 bp, Homo sapiens
cacctcctgctctgggaccggaggagacatcggcctctgcaggcttgccgaagaagggagggagtgcatccgccccaaccct

SEQ ID NO: 774882 - DNA, 100 bp, Homo sapiens
tctcatctcgctcggctgcgggaaatcgggctgaagcgactgagtccgcgatggagattgaaaatattgaacttcccatggatacaaaaacaaatgaaag

SEQ ID NO: 774883 - DNA, 90 bp, Homo sapiens
ctgctgctctctcatttgctggccatcggattgggctcccctcccacccggtcactccgtccagcaagcacgcagacagcaagcccgcgc

SEQ ID NO: 774884 - DNA, 87 bp, Homo sapiens
caaagcccccacgcccagccaggagcaccgccgaggactccagcacaccgaggggagtgcatccgccccaacccttttccccctcgt

SEQ ID NO: 774885 - DNA, 133 bp, Homo sapiens
tgaaagcgtgctccacaaatatttacagtcggaggagtactcggtgaaatcctgtcctgaagactgtaaggttgcccgaagctcagcagagagtcggaggctgctttttaaacctgatgccacagatgaaaac

SEQ ID NO: 774886 - DNA, 100 bp, Homo sapiens
ccgctgagagtgggggtggctgggagcagcgcagcctccggaggaggaggcggaggccgaggtcctgaacgtgcacttcggcggagagcgcattgcctat

SEQ ID NO: 774887 - DNA, 71 bp, Homo sapiens
taccctgttcccaaccgagcaagttttattgctctgcaggtctccaccctggcaggaagctcttgccaccg

SEQ ID NO: 774888 - DNA, 50 bp, Homo sapiens
cggcgctgctcccgggggcgacgggttcgccatcggtggtgtgaactcat

SEQ ID NO: 774889 - DNA, 97 bp, Homo sapiens
aggttacctctttaagaatctttgtttggctgttactactttatttcatgcaagatggaacccctctgagttggtgggtaggaagaaccaatgaaac

SEQ ID NO: 774890 - DNA, 76 bp, Homo sapiens
cgctcatctccatcgtgaccaaggagaagggtctactttgaggatgaggacagggcagaactataccgggtgcctg

SEQ ID NO: 774891 - DNA, 50 bp, Homo sapiens
gccatggacgcgtccctggagaaggtcctggctataagtcaccatggcac

SEQ ID NO: 774892 - DNA, 76 bp, Homo sapiens
cgcgcctcaaccggctgtacggaatccaaggatcaccccttctgtgtcattctctgaggaaaacaagttcttctca

SEQ ID NO: 774893 - DNA, 74 bp, Homo sapiens
ttcacctgcacatcttgttttccctaacatcaagaatggtactccaaagattcaggtttactcacgtcatccag

SEQ ID NO: 774894 - DNA, 101 bp, Homo sapiens
cttcgacgacttcatccagggctgcatcgtcctgcaggctgccttcgaccagcgcatgaagacatggcagcgctggcaggatgcccaagccacactgcaga

SEQ ID NO: 774895 - DNA, 98 bp, Homo sapiens
ctacgcgtacgtggtggagctctgcgtgtcccgtgatgctgatgagcgagagaagtggatccatgccttagaagaaacaattcttcgacatactctcc

SEQ ID NO: 774896 - DNA, 74 bp, Homo sapiens
gcattgcctcccctgggtgctcttcatcttgggagtctctgagaacaagccagccagaggagaagaaggatgtt

SEQ ID NO: 774897 - DNA, 50 bp, Homo sapiens
tggacactggctccaaggaaaaagggtggagagattcaaccagttagcgt

SEQ ID NO: 774898 - DNA, 100 bp, Homo sapiens
gaattcgccgtgcccgagaatagctccgtccagcagggaggaaataatgctggccatacagttgttgtggattctgtggaatatgattttcatctcttac

SEQ ID NO: 774899 - DNA, 75 bp, Homo sapiens
agctccaggacctacccattgaagagtcataccctaatgatcccagcaagataatgtcctgtcttctaagatgtg

SEQ ID NO: 774900 - DNA, 116 bp, Homo sapiens
caagttaccattctggacatggctggacaaaattctggagttggtacatgaccacctgaaggatctctggaatgatggacttccatggagtcactgattcatcactttaagttgta

SEQ ID NO: 774901 - DNA, 75 bp, Homo sapiens
ggtcgatgaagaggatgatgtttttggtgaagatttatcatagaatccccgactcagacccatcttctagcaaaa

SEQ ID NO: 774902 - DNA, 72 bp, Homo sapiens
ggcatctgtgatctggcatcggacacagtgtcgtgtgggagccaatgggagatgggaagaaaatcatttcct

SEQ ID NO: 774903 - DNA, 90 bp, Homo sapiens
gccagcgcagaagggacgtgagcccagccgaggtaccgctgaagaggaatcaattttgctctaacactccaagaaaggctgtgtttgcgg

SEQ ID NO: 774904 - DNA, 100 bp, Homo sapiens
cttcaatactacctttatttccaccatagggaaaggtggcccagacagcgtgtatgtcagcttgcaagcatttagccacatccttgatgcaacttttgtt

SEQ ID NO: 774905 - DNA, 100 bp, Homo sapiens
ttggtctgtgaaggaagtggcatcatatcagccattacagcgaaaactcttcactgcagtgacaaccaaagccaagcaactgaaggattcagtgacctgc

SEQ ID NO: 774906 - DNA, 101 bp, Homo sapiens
cccagatgttggactcccagctcccacaggcatgatgttgcagcccccctgagcccccattcacaggaggtctcctgctacattgactataacatctccat

SEQ ID NO: 774907 - DNA, 100 bp, Homo sapiens
aaggttgatttcatcagactaaaaagttacaggcgttacagtgtttctgccacctctgtacaaaagacaattttacttgtgtgacagatgggctctgctt

SEQ ID NO: 774908 - DNA, 83 bp, Homo sapiens
ggaaaactggatgctgcagacactgaacgaggagccagtggtaacagttgacaaatgggaacctttgttgaacaacttggggc

SEQ ID NO: 774909 - DNA, 51 bp, Homo sapiens
gtgcttaaggaagagtgatgaagcagaaaaatatggctcaggagactaacc

SEQ ID NO: 774910 - DNA, 100 bp, Homo sapiens
gtggatcgagtgaacgctgctgatgggagataccatgtcctgtttctcggaacagaatgtttgatgtgggaggtcagagatctgagcggaagaagtggat

SEQ ID NO: 774911 - DNA, 100 bp, Homo sapiens
ccaaagcctcttagtaaactccttggatcattggacgaggaattgagtgatctacagcgcgatccacctgctcactgttcagctggacctgtgggagatg

SEQ ID NO: 774912 - DNA, 100 bp, Homo sapiens
tgagccatgcccatcgcagccgccccgaaggagccagcatctgacagatacgtctcatggtgtaagaaataagtgcctgcagttacttggcaatcttggc

SEQ ID NO: 774913 - DNA, 100 bp, Homo sapiens
tgactctactgctgggacttacagggaggtggggaagacagggctccagctaccacaggacgggctctgggtatagccgttccagtcagggacagccgtg

SEQ ID NO: 774914 - DNA, 83 bp, Homo sapiens
aggaggacctggtggactcgctctccgagggcgacgcataccccaacggcctgcagcccaccttgggacaccttgactccaag

SEQ ID NO: 774915 - DNA, 73 bp, Homo sapiens
gagacctcagttcccggcggctcttgcggggcacaggcaccacctgtgccgtgcccggcgctactgccacgac

SEQ ID NO: 774916 - DNA, 75 bp, Homo sapiens
cctgctgcaaaaatggaacaagttccagcacaagtggaatcagtgtctgtccctgaagggtcattaaatcagcta

SEQ ID NO: 774917 - DNA, 100 bp, Homo sapiens
aggtacagtcctccagggtatacttcgtggcctgcaccatcgcatatatttccagccaccttctttctatgtctctgctcaggacctgcctcatattgag

SEQ ID NO: 774918 - DNA, 100 bp, Homo sapiens
ccggactgggaagatggacgcagcgcgttccttcacctcgggcagaataactttgcagaagcccacaggttcttcacagagatcttaaggatggatccaa

SEQ ID NO: 774919 - DNA, 75 bp, Homo sapiens
cgttgctttactttttgcttcaccgacatagtcattatgccgaagagaaagtccaatatcagatggaaatgatgc

SEQ ID NO: 774920 - DNA, 114 bp, Homo sapiens
cgcccgccccgaccctgcccctcccgcccgcaactccgccgcccaccatggcttccgaggagctgtacgaggtatgtgaggagcagcgctgtgaggaggaagtcttccccctgg

SEQ ID NO: 774921 - DNA, 88 bp, Homo sapiens
ggaacgcccggcccagcccctcatcagcagtgaggactctgaaggatccactgacgttgatgagcccttagaagtcttcatctcagca

SEQ ID NO: 774922 - DNA, 90 bp, Homo sapiens
actggtcactacatttccccctttcatgatattcctctgaaggtgaactctaaagaggtattgttgcagcatctggcagtgagactgagg

SEQ ID NO: 774923 - DNA, 75 bp, Homo sapiens
ctggtgtccgcctggaggatgcttctcatcattgccaccactcatccaatggagatcttcgtggatgatgagacg

SEQ ID NO: 774924 - DNA, 100 bp, Homo sapiens
gccgtgtataggttgtcaaaattcacaaggcaaggtgactttgaaaggcactcttaaaagacccattttacatgggcttgtaccagaaacgagatcgcac

SEQ ID NO: 774925 - DNA, 100 bp, Homo sapiens
cgtcctcctgaggaagcgggagtggaccatcgggcggagacgaggcagcaattccatttccgtgagggcgtttctagatgaagatgacatgagcttggaa

SEQ ID NO: 774926 - DNA, 83 bp, Homo sapiens
ggaaactggatgcagcaaggaaataggatttaaccgctctctgcctcccaggttttatggcaattggatatattccgacgaag

SEQ ID NO: 774927 - DNA, 76 bp, Homo sapiens
cgtcgggatatcgggtggcggctcgggacggaggacgcgctagtgttttaaatgcacagagagcaggatacaaggc

SEQ ID NO: 774928 - DNA, 74 bp, Homo sapiens
cttgccttgagtcagtgcgccgctctccagcccgcttgaacggctcttttccacaatggcccccctgaccagcg

SEQ ID NO: 774929 - DNA, 100 bp, Homo sapiens
ggaaaatggcctttcctatgaatgtaggacgctgctcttcaaagcgatccacaatctgttagaaaggtgaatgaaaactttgccattgatttgatagcag

SEQ ID NO: 774930 - DNA, 83 bp, Homo sapiens
catagacactgtgaagcacctgtgtggcgactggttccccatcgagtcaaaaggctgagtttcaaattctggataatgtagac

SEQ ID NO: 774931 - DNA, 100 bp, Homo sapiens
ttccacagccaagtgcgggagtccacgtgaatggataccacgcatcagggaccccagcgcaccctccagagactgcccacatgagtgtccgaaaatccac

SEQ ID NO: 774932 - DNA, 100 bp, Homo sapiens
gaccttcctctgaaggcaaagtgacctgtgggacgtccagatcggtgacatcgtcacagtgggcgagtgccggcctctgagcaagacagtgcgcttcaac

SEQ ID NO: 774933 - DNA, 85 bp, Homo sapiens
ttgggacccaccgctgccctcagctccgagtccagggcgaggtcgcgtggggcaggcagtggcgctgcgggccaaggccttcggc

SEQ ID NO: 774934 - DNA, 100 bp, Homo sapiens
ggagaccggcctgaggaagtcctgtgggacggccaccctggagaacgaaagtttcctacactactgaggtttaggggcactgtgaagcaaaagccacgcc

SEQ ID NO: 774935 - DNA, 90 bp, Homo sapiens
tctggcggggtccgcagtttcagcagagccgctgcagccatggccccaatcaaggatgccatagaagtttgcaagaagtttatggagcgc

SEQ ID NO: 774936 - DNA, 75 bp, Homo sapiens
ggaagtggagatcggcagagacaccttctggcccgatctgctggaggttctgagtgacatagacgagatgtcccg

SEQ ID NO: 774937 - DNA, 84 bp, Homo sapiens
gctggagagaacagttcattgaagctatcactgtcagtgctgtgatgcggctgactaagcctactttattcaccaatatcccag

SEQ ID NO: 774938 - DNA, 74 bp, Homo sapiens
tgcacacgacgtggatcccatcgagctggctggcggggacctggcaggtctactggaggccctgtctgacatgg

SEQ ID NO: 774939 - DNA, 73 bp, Homo sapiens
gcaagaggcagcctgggggccacagctgcttcagacatacctcctcgatgggttaatattgttttcttccttc

SEQ ID NO: 774940 - DNA, 88 bp, Homo sapiens
aaaatcgactcctatgatgtaataataagggctgttgataatcaggtgtatgtggccacagcctctcctgcccgggatgacaaagcct

SEQ ID NO: 774941 - DNA, 100 bp, Homo sapiens
gaccaaagcgcctgaggaccggcaacatggtgcggtcggggaataagatcacagattctgctggccatattctctactccaaagaggatgcaaccaaggg

SEQ ID NO: 774942 - DNA, 82 bp, Homo sapiens
gcggctactacaaccagagcgaggacggtgttggagagcacaatggctgaacaagtccttcctcaggctttgtatttgagca

SEQ ID NO: 774943 - DNA, 89 bp, Homo sapiens
ccgaagatgaacagggttcctggggcatcgacgatctccatatttcattgcaagttttcggctttgtgagaaaccttaccatcaaacac

SEQ ID NO: 774944 - DNA, 100 bp, Homo sapiens
cagacctcagcttccccattatttcgaggaaggaagatctcatagatcagaacatactggagcctgtaacccgtgcacagagggtgtggattacaccaac

SEQ ID NO: 774945 - DNA, 101 bp, Homo sapiens
cattcagctcggccagtgggggctttggatccacagctacctcaagtcatactccctgtcacaaactccagctgaactaacttggaggaggatcttccctg

SEQ ID NO: 774946 - DNA, 75 bp, Homo sapiens
ttgaagcaagggaccttgttatagaagccttaaagacatatctgaagagatggattaagaatgctttggattaag

SEQ ID NO: 774947 - DNA, 100 bp, Homo sapiens
cgcgtggctggaagacatggccactccagtcggtgttgagcacggcgagcagtctcaggcctttagtgatgatggtataaatgaccaaggattgtacaga

SEQ ID NO: 774948 - DNA, 90 bp, Homo sapiens
tccagttcccgagtgcagtgggacatgcctccaccccaactttccgccagtgactccagagggacgccccagcatgagaccagatgtaag

SEQ ID NO: 774949 - DNA, 75 bp, Homo sapiens
cctggggcctgtgcatcctcctgacccacagacttctgagaagttccagaaaataaatcagatggtatgtaacag

SEQ ID NO: 774950 - DNA, 98 bp, Homo sapiens
gcgagctgggaccagcgtctcggaggcgccgcaggcctcgatgagtgttaaatcgccatttaatgtgatgtcaagaaataatttggaagcacctcctt

SEQ ID NO: 774951 - DNA, 83 bp, Homo sapiens
cagctcgcagcgcatccccgcgcacagactcggtgaaatacctggagtgctcagctctcacccagagaggcctgaaaaccgtg

SEQ ID NO: 774952 - DNA, 146 bp, Homo sapiens
ggggaacatgtctgagtcggagctcggcaggaagtgggaccggtgtctggcggatgcggtcgtgaagatagaaacttgaagggtcaaagtgcaaagggcagcttttgatttttggggcaaccaactgggacttgattggtcgaaaa

SEQ ID NO: 774953 - DNA, 74 bp, Homo sapiens
cccctcgtcgcagtttccagcccgacgagcttgttttgtcccggactcggaacttgctactaccagcaccatgc

SEQ ID NO: 774954 - DNA, 100 bp, Homo sapiens
cttgatcagaagggtgatcagcaccgcgaaagccccaggggccattggaccctacagtgccaactacctcaggaaccgggagtgaaactactggggttgc

SEQ ID NO: 774955 - DNA, 100 bp, Homo sapiens
cttattgttttattagggcaatttgtctcaataaaagcccaggaagaagacgaggatggaagaggagcaggacttggatggtgagaaggggccatcatcg

SEQ ID NO: 774956 - DNA, 83 bp, Homo sapiens
ggaagacccctggctctataagctgaattatggcagcccagtcaagctgtgagccgtgagctttgaggcggtgggatgtgtca

SEQ ID NO: 774957 - DNA, 75 bp, Homo sapiens
gaaatcttagaatcacccaagaaggcaaagtcgcgtttaataacgcctgatggaattgggactgtttcagtggaa

SEQ ID NO: 774958 - DNA, 100 bp, Homo sapiens
gagaagagccatggaaacaggaggaagaattcccaagccaaagctttccaggtggaagaacacaatggtcacatctttaaagccacccaatatagcatcc

SEQ ID NO: 774959 - DNA, 90 bp, Homo sapiens
gtacagtgggatggctggagcctctcttggccaggatcaaacatgacaggagatctctttgctgccactttcctcattaagaatggggcc

SEQ ID NO: 774960 - DNA, 101 bp, Homo sapiens
cgtccctctacgcgttttggttcccggttggtgcttcctgttcgcagctgcggcagtgacttaacaaacaacagttgcagttactgaaagaacggttccag

SEQ ID NO: 774961 - DNA, 74 bp, Homo sapiens
gcagtggtcgcttcttctccttggcattcactcatacggcacaatatgatgaagcaatttcagattatttcagg

SEQ ID NO: 774962 - DNA, 75 bp, Homo sapiens
gtgattagcttcgcagtctggaaagctttaggagttcacagttctctggcatctctatcccctatgaggcaccac

SEQ ID NO: 774963 - DNA, 100 bp, Homo sapiens
atcccaaccatcagaaatccagcatgaggcccagattgccttcctgcagggagaaaggaagggccaagaaaatttgaagaaggatcttgtgaggaggatc

SEQ ID NO: 774964 - DNA, 83 bp, Homo sapiens
acggccacggcgctggtcaccggggtctgcctggaacccagcgggtgccgcttctccacccgaggcttccacctccaacgagc

SEQ ID NO: 774965 - DNA, 75 bp, Homo sapiens
tgatgccagttaattactttgaatatcttgaagttctaactggtatcccagctgaagtaccacacattagagaaa

SEQ ID NO: 774966 - DNA, 82 bp, Homo sapiens
tcgtggcagagaaaaccagctgagacagggcgccacttactaggggacggcaaaacagaacagaaaggcggagataaaaaga

SEQ ID NO: 774967 - DNA, 75 bp, Homo sapiens
gcagcagctgctttgattgacttggatctttatataggatttaatggttggttacttgaatttccactagaggag

SEQ ID NO: 774968 - DNA, 100 bp, Homo sapiens
gatgaacttgccgatagtcttccttgtgcagaaggagagtttatcttccttcggcttaatgttcttcgtgagtggctggatctctgctctggtggtgccg

SEQ ID NO: 774969 - DNA, 75 bp, Homo sapiens
cacatcagatacatcctactcagatatggctgctggatcagagaactgtggctgcaccatctgtcttcatcttcc

SEQ ID NO: 774970 - DNA, 75 bp, Homo sapiens
acatcctggaagctgggaaatgtaaaacgatgtttgcagaaatggaaatcattggtcagtttaacctgggattta

SEQ ID NO: 774971 - DNA, 75 bp, Homo sapiens
ttcatatggacagatggacttcaaatgctgtttgtattccagagactagatgacagatttgaagatctggaagag

SEQ ID NO: 774972 - DNA, 51 bp, Homo sapiens
gcactctatgaagcaatacgggatgtgaacatgtcaaaccttttaagccag

SEQ ID NO: 774973 - DNA, 118 bp, Homo sapiens
cggccgcccagacgctgcccgcgggcccggccacggcggagccaaggggaacgcccttttgcttgtgactggcagggctgcgacaagaagttcgcccgctccgacgagctggcccgcc

SEQ ID NO: 774974 - DNA, 100 bp, Homo sapiens
ggaagactgaggtttgctcgaaagcccttctgtgttatagaatccaattctcagttttgaactacctatgaatttggcaaactggtttcctccaccaaga

SEQ ID NO: 774975 - DNA, 85 bp, Homo sapiens
gagaatgtgcaggtgttgacgatgggcaatgcatgtcggtgcctcaggccatggagtggctaattgaacacgcagaagacccgac

SEQ ID NO: 774976 - DNA, 100 bp, Homo sapiens
acattctttgaattggattatcccaaactagcattggatatgtggaggaaattgatggttgaaccacttcaggccatccttatccgaatgctgctccgag

SEQ ID NO: 774977 - DNA, 82 bp, Homo sapiens
gctcctggtcaccagctgactgcagagatgaagatctccttcaacgacaaaagcctgcagaccacatttgagtacccttccg

SEQ ID NO: 774978 - DNA, 100 bp, Homo sapiens
ctatccgatgtacccggccacaacatccctggtgaacgtcgtgcccaaactcaatgccacagggagggatctgctgcagactgtgtccctgacaatggga

SEQ ID NO: 774979 - DNA, 100 bp, Homo sapiens
gaattggtgacaaaatcagaggcatactttataggtgagggagattctgggccgctgcacctgccctgaccagtttcccatgatcaaggtctcagagggg

SEQ ID NO: 774980 - DNA, 82 bp, Homo sapiens
cgctggcagccgcggatctcaccgccgctcagggacggggaggtttactgcatcgacgcgcggttctacgggaacgtcagcc

SEQ ID NO: 774981 - DNA, 73 bp, Homo sapiens
ccaaggccaggggagacctgggtgccttcagcagagatgtatcccccatatctcccgttccctccgccctatg

SEQ ID NO: 774982 - DNA, 50 bp, Homo sapiens
cagtttccatatgtaatgcaagggctggaggctctcaggtcatttttacc

SEQ ID NO: 774983 - DNA, 100 bp, Homo sapiens
cgtgaagattccaagttcaggagaactcgaccggtggtaaataaagatgtcctggacgtttacattgagcatcggctaatgatggagcagcggagtcggg

SEQ ID NO: 774984 - DNA, 76 bp, Homo sapiens
cgggagctgtgcgcgcagccgggccaggtggtcgccccaggggagttgaccacatttggccatttcccagaagggc

SEQ ID NO: 774985 - DNA, 82 bp, Homo sapiens
ggaagagattcagccagcacactcctcgcgagcaaggctccaaccaggaatggagacgccattggatgttttgtccagggca

SEQ ID NO: 774986 - DNA, 100 bp, Homo sapiens
cgagaggctgggccaactccagcacgggctgcgggacaggttttagctaaagaagatactgaggcagctattcaatcaatattatacaaagaaaattctg

SEQ ID NO: 774987 - DNA, 74 bp, Homo sapiens
agagctcatcagaaatgtgaccctttgtggacatctccaccatggcaagctggtgagtgacacacggagagtgt

SEQ ID NO: 774988 - DNA, 100 bp, Homo sapiens
gtttttctgcatctgtatccagctcctgaacaagacatggaaggaaatgagggcaacttctgaagacttcaacaagagcgcatcagcgaggaggtggggc

SEQ ID NO: 774989 - DNA, 101 bp, Homo sapiens
cgcggtcggccgccaccaggtcaccctggaagagtcgctggccgaaggctgttgaagctcaaatccgaagttttggacagactccttctcaactactcata

SEQ ID NO: 774990 - DNA, 50 bp, Homo sapiens
atctgcccctgtcaaatcattccagtactatactggcaattgctggagaa

SEQ ID NO: 774991 - DNA, 100 bp, Homo sapiens
tctagtggcggaagccttcgtctcccagattgcaggaagtgctctctggcgtggtggtcatatcgagtaaggattcagtccaacaccagggagtgtcttt

SEQ ID NO: 774992 - DNA, 75 bp, Homo sapiens
tgtctctggattcaagtcccaggagtcctgaccagagagcaggcaagtcagctaacctctccgagcctgagcttc

SEQ ID NO: 774993 - DNA, 100 bp, Homo sapiens
acattagaaggccgctagtaaaaatggtttataaaggccatcgcaactccaggacaatgcttgacaaaagtaagctgaagccaggaacaagagttgcttt

SEQ ID NO: 774994 - DNA, 75 bp, Homo sapiens
gaaagatatggaattatttcgtgatatccaagaacaagcactgcagattgtaaaccatggctgtgtggatacaag

SEQ ID NO: 774995 - DNA, 114 bp, Homo sapiens
gcgggaagagcgggcgcacgcgctcaagaccaaggaaaagctggcacagaccgccacggtttggcaatgaggagcagcagctggcgtgggccaagcgggagagcgagaaggcgg

SEQ ID NO: 774996 - DNA, 85 bp, Homo sapiens
ataatgaacctcatgaaagcagaaccaactcggatattgttgagcgtggacatatatcaggaagctacataacatcaaagaaggg

SEQ ID NO: 774997 - DNA, 100 bp, Homo sapiens
gctgcattttcagaagattgtgattcagcctctactaaagttgtcatccgtggagcaggaaaccagggcagctgtgcggagggtagtggcagccatgaac

SEQ ID NO: 774998 - DNA, 75 bp, Homo sapiens
atcagcgccatccccgagcagcggtggaagctgatgccatggacaatattaccaggcagaaccaattctacgata

SEQ ID NO: 774999 - DNA, 83 bp, Homo sapiens
cacataacggggttcgggtgtctcgtgtgtgaacatcacagacctgcctagagctggaacgttacctccagagcgagccctgc

SEQ ID NO: 775000 - DNA, 57 bp, Homo sapiens
tatagactacttctactccaccaggaaggttattccaggatctttggagacccgagg

SEQ ID NO: 775001 - DNA, 100 bp, Homo sapiens
caggttccctacacggtctcctgggtcaagacttttatcggacgttttcgccgcatcatggactcctcacagaatgcttacaacgaagacacttcagccc

SEQ ID NO: 775002 - DNA, 83 bp, Homo sapiens
gctctgggatcccggccaccagcaattgtccgatcaatgtccgagttaccaccatggatgcagagctggagtttgcaatccag

SEQ ID NO: 775003 - DNA, 80 bp, Homo sapiens
gtctcagccgccaaagaccccgtccgacaatgcagatcttcgtgaagactctgactggtaagaccatcaccctcgaggtt

SEQ ID NO: 775004 - DNA, 83 bp, Homo sapiens
agaagctgagagtaaactgaaacaagtatatatcccaacctagtgatgctgggaggttcctggttacagacactggaggctag

SEQ ID NO: 775005 - DNA, 99 bp, Homo sapiens
cctggctcaccctttgggtctttgggacgtcctttttgcccttcctcctctgtgcggtgctgctcagtgcagttcagtacggcaagaagaagctgaaat

SEQ ID NO: 775006 - DNA, 100 bp, Homo sapiens
aagaatacaccttggcccgaggctgaagccattgctccacaggttggcaatggatttcttacaatctccagctacaacctgcttagcttgctactcagta

SEQ ID NO: 775007 - DNA, 95 bp, Homo sapiens
caaaatgtcaacaaattgatggtcatctcaactcgaactccacctccaccttcaccgttgccatttccaacacaagctatccttcctccagcccc

SEQ ID NO: 775008 - DNA, 100 bp, Homo sapiens
ttcttggtgaagtcggccagcctgagcaagcggaggacctacgccggcctggcaaacggggattcagcgtccgatcctttggaacagggactcacgtgaa

SEQ ID NO: 775009 - DNA, 48 bp, Homo sapiens
ggaggaaccaggaaaggccgtctccagagaaggggtctcactatgttg

SEQ ID NO: 775010 - DNA, 90 bp, Homo sapiens
cggagcgaagtgaagggtggcccaggtggggccaggctgactgaagggacatcacccagaagggctatgaaaagaaaaggtccaaactcc

SEQ ID NO: 775011 - DNA, 76 bp, Homo sapiens
cctccggccttgtgtgtccgactcggcagcagtggaatttagataatgggctgtgtgcaatgtaaggataaagaag

SEQ ID NO: 775012 - DNA, 101 bp, Homo sapiens
gggtactgtcgcggaggcttgtcattctgacccggggattcctcacagcgtctggcaggaaatctgaaatagagtactatgctatgttggctaaaactggt

SEQ ID NO: 775013 - DNA, 100 bp, Homo sapiens
gcaaagaagaggcctgcaaagctgtacaagagatcatgcagggttatgtattaagctctattgaaggccgagtggcagttgagtatttggacccaagccc

SEQ ID NO: 775014 - DNA, 100 bp, Homo sapiens
atgagctcccaaagccatccagttgttgacctcctgtactggagagacattaagaagactggagtggtgtttggtgccagcctattcctgctgctttcat

SEQ ID NO: 775015 - DNA, 100 bp, Homo sapiens
ttgaaagcgacaagtggaggcgccgctctagcggccgggactctgaactatggcgttactgtaaaatggggaaaggagaaatttgaaggtgtagaattga

SEQ ID NO: 775016 - DNA, 83 bp, Homo sapiens
gcaacactcgcttggttggggagatcggcgcttggccgaaatgaagctgttgtcatttctggaaggaaactggcccagcagat

SEQ ID NO: 775017 - DNA, 80 bp, Homo sapiens
agaccatggagaccctcacggagctgggcgacgagctgaccctgggagacatcgacgactgaaccggccgctgacactct

SEQ ID NO: 775018 - DNA, 75 bp, Homo sapiens
cccagacgtgcaacaaagtgcgatggtgcccaaatgtgagtctgcaaaagctgccagaacagtggctatggagtg

SEQ ID NO: 775019 - DNA, 110 bp, Homo sapiens
cagccaacagttttgctgtaacaaacgccttgccgcgtatgatgctgtccttgacagaaatgtggccattaagaagctcagcagaccctttcagaaccaaacacatgcca

SEQ ID NO: 775020 - DNA, 75 bp, Homo sapiens
gctgcagcggcagcggctccgccgggcgtcctggcagcaggtgtcgtgaaaactacccctaaaagccaaaatggg

SEQ ID NO: 775021 - DNA, 74 bp, Homo sapiens
ggatttgttaaggattccaagtaactcttatttgtccacagatcctggtccctacaaataagcctgctcatgtg

SEQ ID NO: 775022 - DNA, 50 bp, Homo sapiens
cgggggagccccgggagccgcacggcctaaaggggagtggccccagtggc

SEQ ID NO: 775023 - DNA, 74 bp, Homo sapiens
cgatacagcaccaaacaggaggcggccaaggcccaaactgcactgcacatctttgaaaagtccagccgcatttc

SEQ ID NO: 775024 - DNA, 100 bp, Homo sapiens
gtcctcagtccccattccatcacatcctgcccaagtgcaagctggccagggacctcaaggaagcttatgacaggaaagtggagaatgaggacatgaataa

SEQ ID NO: 775025 - DNA, 74 bp, Homo sapiens
gtaaacaaccctgaagagaacagccaggcctgaattatatccagatcgagagacagaagattctgaaagggttc

SEQ ID NO: 775026 - DNA, 82 bp, Homo sapiens
gttctctcaggctcccgttcaggttttaaaatcaaagatgggaaaatcggagaaaattgcccttccccatggccagcttgtt

SEQ ID NO: 775027 - DNA, 75 bp, Homo sapiens
aggaggaggacgagaagcagcggctgcagaatgaggttatcagtgagctgaatggaaaaaacattgaagacgtca

SEQ ID NO: 775028 - DNA, 80 bp, Homo sapiens
cggatgttcatgggcagcaccatcgagccagaagcagtatttgtcctgaaatttaaaagcctgttgattcaagaactttc

SEQ ID NO: 775029 - DNA, 99 bp, Homo sapiens
tcggctgttttagtgctttttatttttccccaattcagcagagaatattttcaaggggggaacttgctactaccagcaccatgccctaccaatatccag

SEQ ID NO: 775030 - DNA, 97 bp, Homo sapiens
ctgctgctgggcgatacactatcaaagttctctttgcatctcaggacagagcgggatgccaccagcttgtccaaagggaagttccaggagctcctgg

SEQ ID NO: 775031 - DNA, 82 bp, Homo sapiens
ccagaccctggagcctcagttggaagcagccgatccagcctgcggagcctgtggggcagcatttgcaagtgaggaagcagca

SEQ ID NO: 775032 - DNA, 100 bp, Homo sapiens
tcagccgcatcaaacagagtgaactttctgccaagatgcggtctcctactccctccctccagtactgcgagaactgtgacacccacttccaagattccaa

SEQ ID NO: 775033 - DNA, 98 bp, Homo sapiens
gttggaccttccggagcttctcagaagacagagggttttcttttgaggtagtgtcgcctgcctctggtgggaccctattcagcggttactcttctcag

SEQ ID NO: 775034 - DNA, 98 bp, Homo sapiens
gaaccgggaccgccagcgcaggagattgtaaaccatggctgtgtggatacaagctcagcagctccaaggagaagcccttcatcagatgcaagcgttat

SEQ ID NO: 775035 - DNA, 100 bp, Homo sapiens
agaagaatgaacattgtattgagaacaatatagatttgcagtgggtaaacctcacaagtgcaactactgtggacgaagctacaagcagcgcagttcactg

SEQ ID NO: 775036 - DNA, 76 bp, Homo sapiens
gaccccatcctcgtgctggaggaacaggttaatttcacctaccagtttttgaaaaagaagttctatatatttagcc

SEQ ID NO: 775037 - DNA, 98 bp, Homo sapiens
cctatgttacgtggatgtttgtaacgaaattgaacttagctcattaagggaagctttgtctttcgtgtcattaattgatggatattatagattaactg

SEQ ID NO: 775038 - DNA, 100 bp, Homo sapiens
gctcttcctcctcctcccgcgacgctgacatagcccagagatacaggataagcaaatacccaaccctcaaattgtttcgtaatgggatgatgatgaagag

SEQ ID NO: 775039 - DNA, 98 bp, Homo sapiens
acttctccaagctctgtctgggttctgctgtcaatggtgttgtccagcaagaaacctattggaattcgagacttaattaatgaagctttgcatcgaga

SEQ ID NO: 775040 - DNA, 98 bp, Homo sapiens
caagatgcagaagtcagcaagagtgacataggagaagtgattcttgtgggtggcatgactaggatgcccaagggggattttggcactcaaaaagaagc

SEQ ID NO: 775041 - DNA, 101 bp, Homo sapiens
tgggcctcctgactctgggagccgtgctgagcgctgcagccaccgtgagggaggcccagggcctcatggcagggtttggggattctcagcagttgcggctg

SEQ ID NO: 775042 - DNA, 122 bp, Homo sapiens
ggctgcagcgggcactgcggcgccgaggcgcggcggcaggacgggaaccacgcgagctgcagccagacgcccagcggcagcaggatgagtgcggaggcaagcgcccggcctctgcgggtggg

SEQ ID NO: 775043 - DNA, 100 bp, Homo sapiens
ataaagatgaagtgcttaattcaaggtcacacaatgtcggggatggacctccagatttccttactgactatcaagatctccacttagggaagtgggaatc

SEQ ID NO: 775044 - DNA, 96 bp, Homo sapiens
tgggccaaagcagtgaaacgctccatgaattggcctctcggatgaaggtggacccaagtcagaaggagcgccaaaggccaaatcaaaaccccggaa

SEQ ID NO: 775045 - DNA, 100 bp, Homo sapiens
aaggattccaagtaactcttatttggttcttgatagtccacaatgggtgaaccacagcaagtgagtgcacttccaccacctccaatgcaatatatcaagg

SEQ ID NO: 775046 - DNA, 51 bp, Homo sapiens
catcaacaagcccaactgcatcatgcttgtctcaggttaacctctgtgagg

SEQ ID NO: 775047 - DNA, 82 bp, Homo sapiens
gggaaccggctccggagcgagaacgcgcgactttctgcagggcgactgcaccaaagcgaaacagaagctgaactggaagccc

SEQ ID NO: 775048 - DNA, 100 bp, Homo sapiens
acaataagaagaaattacatttatgaagatgcttatgacaaactttctccagaaaatggattactacagcatcccatttcccacacccactactccgctg

SEQ ID NO: 775049 - DNA, 98 bp, Homo sapiens
ttctacacatcacactgcgtcagcgccagctgccggcacgaatacccgctaagctggatgaaagttttgcaggtaatttggaactctgggaaacatct

SEQ ID NO: 775050 - DNA, 75 bp, Homo sapiens
aacagccttcatacaagcaaaatgaagactttgactagggtccaaccaggctgtgggtgagcgtggaggatgctc

SEQ ID NO: 775051 - DNA, 90 bp, Homo sapiens
ctcgccccttgcaacaaaggcagactgagcgccagagaggacgtttccaactcaaaacgtaaaattcatcctgatcagaaaaatattaat

SEQ ID NO: 775052 - DNA, 141 bp, Homo sapiens
cgactgcgtcccgtgtgaggatggaggggacgacatctacgaggacatcatcaaggtggaggtgcagcagcccatggaaagaccacagcaagattctttcattcgtctcctcctagcctgggggaccaggctcgaactgac

SEQ ID NO: 775053 - DNA, 88 bp, Homo sapiens
tcattcgggaggacaaaaaaggcctgctgcgaaacagctaacgaaaggagctttatctcgaatacctgatgcatgcaaaacagcagct

SEQ ID NO: 775054 - DNA, 75 bp, Homo sapiens
aaggattggagcacagaggctcagaagcaagtccagggtgatgtgagcagagcccaggaatgccttatgtggatc

SEQ ID NO: 775055 - DNA, 49 bp, Homo sapiens
tgtggatgaatttgcttttctggaagatgttacaatccagaacagtgag

SEQ ID NO: 775056 - DNA, 83 bp, Homo sapiens
cgtggaggtggccgtggaggcagaggtggcatgggaatgagtccctggaacgccagatgcgtgaaatggaagagaactttgcc

SEQ ID NO: 775057 - DNA, 73 bp, Homo sapiens
ttgtagctgcatatgcccattttgctgtgtgttacaggcttctctacagtttagcctttaatgccaggtttct

SEQ ID NO: 775058 - DNA, 80 bp, Homo sapiens
cgcggcagggtcccgcatggcggcgcacaggaagcacgaagaatcctgcaaaaatgtctctctatccatctctcgaagac

SEQ ID NO: 775059 - DNA, 100 bp, Homo sapiens
caggtattgggagatccacagctaagactccaggaccctctggaagcctagaaatgaatccggacaatcagatagttcaaaccagcaaggagatgcggac

SEQ ID NO: 775060 - DNA, 100 bp, Homo sapiens
ttcaataaggaacggggacacttacaaattgctgcttgtccaaatcaggatccactgcaaggaacaacagcatgtttgtgtcattagtgaaactggaaaa

SEQ ID NO: 775061 - DNA, 100 bp, Homo sapiens
tgctgtgtatggacagaaggaactgaaggacttcctccccagcctttgggcttctatccgcagagaggtaaggaaacaagtgggagaagatgccaggata

SEQ ID NO: 775062 - DNA, 97 bp, Homo sapiens
taaaggcaacagcaggactacgcttactgccagaacacaaagccaaggctctgctctttgagggtgcagtactagccgctgtgtcaagtcacaaatt

SEQ ID NO: 775063 - DNA, 87 bp, Homo sapiens
gatcactactcttggaatcaaagataaatccaaatactgcatatcagaaacaacaggcaacagcattattgagaaaagcccttacag

SEQ ID NO: 775064 - DNA, 90 bp, Homo sapiens
gcggagcccgacgcgggcgaggccacggggctgttaccctttgctgtggtagggagtacagatgaagtgaaagttggaaaaaggatggtc

SEQ ID NO: 775065 - DNA, 126 bp, Homo sapiens
caagcctctcagcttcggagaatggagtcttccatcaatcatatctcacagactggtcgaattgacaaatcttaccctacagtatgtggccacacaggaccagtgctggacatagactggtgccca

SEQ ID NO: 775066 - DNA, 82 bp, Homo sapiens
aatgctgcacatcccttaatagtcatctacatagatctttggtttcatggccaccttcctctgcatggcaagcatatggctg

SEQ ID NO: 775067 - DNA, 75 bp, Homo sapiens
tattccggccacccattgatttgatgcataaaggcagctttgaaacagttaatggcacagatgcagattatgaat

SEQ ID NO: 775068 - DNA, 119 bp, Homo sapiens
aaaagagaaacctgggtgaactttcacggacaacctcagaggacaacgaagtgttcgggttgcttttgtaatgaagaagcacttaaatactcatctactaggcaagcatggagttggca

SEQ ID NO: 775069 - DNA, 100 bp, Homo sapiens
aacaaaatctgtccagtcaaagtgattttcttcaagagccgttacaggagattacctggggcaattgatgttatcggtcagactataactatcagccgag

SEQ ID NO: 775070 - DNA, 100 bp, Homo sapiens
gagctaaatgggggcctctccagggagtgctctgttcacggctccatcgctgttagtgatgatggagtcaatgtagaagaagatgggaaaacaaagaaaa

SEQ ID NO: 775071 - DNA, 100 bp, Homo sapiens
ggccacagtcctgggaagtcagatgggattgaaaggtggaattgagactggatctatcacagaaatgtttggagaattccgaactgggaagacccagatc

SEQ ID NO: 775072 - DNA, 51 bp, Homo sapiens
ggccgggctgccccgcaggatcatcaagatgtgaactatgaagactttact

SEQ ID NO: 775073 - DNA, 75 bp, Homo sapiens
cgcgaaatgatgggatagcgttgcaaatccttaaaagagtcttaacgtgacaaggtgcagtcgctgtgctacctt

SEQ ID NO: 775074 - DNA, 100 bp, Homo sapiens
atcaccgaggggaaagtgagcttgacagatgtggacgagtgctcactagcagaaaaaacctgtgtgaggaaaaacgaaaactgctacaatactccaggga

SEQ ID NO: 775075 - DNA, 75 bp, Homo sapiens
cctgcatggattgggagatactggggtcatcgagcagctcggtgggaagcagctggtcatgaaccacatgcatca

SEQ ID NO: 775076 - DNA, 82 bp, Homo sapiens
gtcagataaaaccagtgaagatatatgtctacaactgctgcacaggttctggaacctctggcggtctcagattgagcagaaa

SEQ ID NO: 775077 - DNA, 75 bp, Homo sapiens
caccagatgggcacagatggctacatgccccgggaattggcatctatgtcacgttgctccttgagggcaggacag

SEQ ID NO: 775078 - DNA, 74 bp, Homo sapiens
cctgtgcgcgcgtgcgcggacatggcctcaaacggagctctttgttcaatgcctagccacctattcctacagac

SEQ ID NO: 775079 - DNA, 83 bp, Homo sapiens
aggaaggggagcccgggacccccgggggcgcagacaatgcagatcttcgtgaagactctgactggtaagaccatcaccctcga

SEQ ID NO: 775080 - DNA, 100 bp, Homo sapiens
tcctgattcccagtcaacagatcaagccgcctcctgccaaggaaacagtaacttaattcagtgcacaaatgagatgaatgtgaacatcccacagttggca

SEQ ID NO: 775081 - DNA, 100 bp, Homo sapiens
cgggggcccccagcccgcctctgtgccactttgcatcccacgccggaggaggcattaacgagaccgggtaaggagtgatgcttccccctctgtgaatgtg

SEQ ID NO: 775082 - DNA, 82 bp, Homo sapiens
tggcgcggagcgggcgcggggccgcgggtgcggaaagcgctagattccctataaggagcccctgctggtgcaccagaactac

SEQ ID NO: 775083 - DNA, 80 bp, Homo sapiens
gcagccaccctcgctccctctgctcttcctcccttcgctcgcaccatgcgattgaacaggagaagcaagcaggcgaatcg

SEQ ID NO: 775084 - DNA, 74 bp, Homo sapiens
caagacccgacacaaggcagcttcccacagcaggttggacagttcacagatgcggcattccaaaagaactcact

SEQ ID NO: 775085 - DNA, 100 bp, Homo sapiens
attccgttggagtagaagtgtccagcgacagcttctgggagctctgcttatgataatgtcaacaaagttcgagtagctatcaagaaaatcagcccctttg

SEQ ID NO: 775086 - DNA, 98 bp, Homo sapiens
atccgccacatgaagagccggctggccgcgctgcagaactctgtgggcagggtgggcccagatgcccttccaggtgcatatggaactggtgtggccag

SEQ ID NO: 775087 - DNA, 98 bp, Homo sapiens
ttaaactcttggcatttggctttgcctttctggacacagaagtatttgtgacagaaagaatcttcaagagggagacatagggaaaaggaagacataaa

SEQ ID NO: 775088 - DNA, 100 bp, Homo sapiens
cgattactgcgagaacaactacatacagatgaagaggaagatgatgatgtagtggctcctaaaccacctattgaacctgaagaagagaaaactttaaaga

SEQ ID NO: 775089 - DNA, 100 bp, Homo sapiens
agaagatattggccgacaaggaagtgaagaaggcgcatcactcccagctgcgcaaagcttgcgaggtggcgttaggtgcagtagacattgttgcaatcat

SEQ ID NO: 775090 - DNA, 100 bp, Homo sapiens
acgctctatagccaaggaaggcttcgagaagattagcaaaggtgctaatccagtggaaatcaggagaggatgactgctcaggctgtagaggaagataaga

SEQ ID NO: 775091 - DNA, 75 bp, Homo sapiens
gtgacaaccggtatattgcaaataccgtagaggctaaagtaaataatgccagcctgattggactgggttatactc

SEQ ID NO: 775092 - DNA, 74 bp, Homo sapiens
gcggcacagagagggcctgggagcttgctgcagcttcagaagctgacgggtcgcctcatgctggccgtgggagg

SEQ ID NO: 775093 - DNA, 100 bp, Homo sapiens
cagattacatttacccgatcgtagacgacccttacatgatggtgtcaaccagggtccctggcagacagagtaagggagaaagcccactggctgggctgct

SEQ ID NO: 775094 - DNA, 83 bp, Homo sapiens
ggcagccaagctcatggcctgccactgcgtgcgataaagataaagtttctctaaccaagaccccaaaactggagcgtggcgat

SEQ ID NO: 775095 - DNA, 100 bp, Homo sapiens
aacctggctggcctcaagtacagggtcatcaagggcagaagagaagaagcggaagcgagagagggagcactgtgacacggagggagaggctgacgacttt

SEQ ID NO: 775096 - DNA, 100 bp, Homo sapiens
ttataccttcacccagcatttcatccctcgtcgaaaggattggattggcatctttagagagttttttgagaaccctgcttttcgtcccgatgggctgaaa

SEQ ID NO: 775097 - DNA, 74 bp, Homo sapiens
tgggctcaggagatagttctaggagttgtgaaacttcaagtcaagatcttggggcacagatggagccaggttct

SEQ ID NO: 775098 - DNA, 90 bp, Homo sapiens
cgatgatcgtgtgtcggatgaggagaaggaagttcacaaatgggtgctaccatagtagatgctttggataccctttatatcatgggactt

SEQ ID NO: 775099 - DNA, 95 bp, Homo sapiens
cagtcgacacccatcattgaggttgaaggccccctcctttcagacacacacgtcacatttaagggtctctcattcatcacttttatctgctatgt

SEQ ID NO: 775100 - DNA, 90 bp, Homo sapiens
gtggattatgaaatttttgggaaggtgcaaggggtgtttttccgtaagcatactcaggatcatccagcagctcgtcaacggcatcatcac

SEQ ID NO: 775101 - DNA, 100 bp, Homo sapiens
atgtgacgttttaccagaagatagaattcttagagaagagcttcagaaacagagactggtaaagaacaagcacctttggagatgagtatgcatccagcgg

SEQ ID NO: 775102 - DNA, 101 bp, Homo sapiens
gtgggcccagtcctcggtgcggcgcggccaggctatttttatgattcccacaaatccaccaccaacattcagaaagccagaactttggtccgatgatttca

SEQ ID NO: 775103 - DNA, 75 bp, Homo sapiens
tctgactctcggactgagaaacgcaaggggcatggtctagtggcccagtcaggacgcggaaacactccctggagg

SEQ ID NO: 775104 - DNA, 100 bp, Homo sapiens
ctcacagcctgagaaaagcaagaaggaactgaaaagggaagcccggaatttgctcaaatctcatcttaaccttggactattagaagacacattagtgcag

SEQ ID NO: 775105 - DNA, 83 bp, Homo sapiens
ccggtgggcccgggaggtagagaaaacaatgcagatcttcgtgaagactctgactggtaagaccatcaccctcgaggttgagc

SEQ ID NO: 775106 - DNA, 100 bp, Homo sapiens
tggtggagggggccctcaacgctgcccgggtagcttcccgacttatcgacatgagcaggcaccaaggggttgaggtgactggccagtatgagagggagaa

SEQ ID NO: 775107 - DNA, 90 bp, Homo sapiens
gctggaacagccagaattggacccgaaaccatgcctcactgtcctaggcaagatgagtaacgaaagaggctttgaaaatgtagaactggg

SEQ ID NO: 775108 - DNA, 96 bp, Homo sapiens
tcgctccgtggccttagctgtgctcgcgctactctctctttctggcctggaggctatccagcgcatgtcgggccccaggcctgtggtgctgagcgg

SEQ ID NO: 775109 - DNA, 80 bp, Homo sapiens
tgcagaaccagatccgggagcacgtcatctccatcgaggacaatgcagatcttcgtgaagactctgactggtaagaccat

SEQ ID NO: 775110 - DNA, 75 bp, Homo sapiens
acttcacggtgtgccaccctacagtactgccctgacccttacatccagcgttttcggctttgtgagaaaccttac

SEQ ID NO: 775111 - DNA, 90 bp, Homo sapiens
cccctccctcatacaactggacacgcagaacagccctgtggcccccacagcccagcccaaagccccaccctcaagaactccccagtcggg

SEQ ID NO: 775112 - DNA, 50 bp, Homo sapiens
aagaatcatactgtcaaagacaggttatcaatactctggctgaccatcat

SEQ ID NO: 775113 - DNA, 100 bp, Homo sapiens
ctgctggaagacgaggagcgcgtcgtgcgcctgggggtgcgcgcctgcgacctgcccgcctgggctgaccccgcactacatctacccaccagccatcgtg

SEQ ID NO: 775114 - DNA, 101 bp, Homo sapiens
gaagattaagatttaatgtaaaagcagctagagcttcttggacacttaatgattgttggcaagaaatgtgctgctgatctgggcctgaataagggttatcg

SEQ ID NO: 775115 - DNA, 100 bp, Homo sapiens
gcagctatgaacctggagcgagtgtccaatgaggagaaattgaacctgtgccggaagtactacctgggctggcgcccatgcggctctacacgctctccaa

SEQ ID NO: 775116 - DNA, 100 bp, Homo sapiens
gccagagtctccagaattcgtcagggtcagatcatatgaatcccaaatggttatccgtccccacaagtcatttgatgagcgggtattcccctacatctca

SEQ ID NO: 775117 - DNA, 50 bp, Homo sapiens
acagcaagaaagaccatcaagtttaccagaaaaccagtagattcccagac

SEQ ID NO: 775118 - DNA, 75 bp, Homo sapiens
aagagcagtaagggactgagctgctggaacacatgattctgtgcagatttgcagaccagacagctgtccagctcc

SEQ ID NO: 775119 - DNA, 73 bp, Homo sapiens
tattcgcctaaaagaaggtctggatatatctcatcttcaaggacaagaatctggaggtgaactggatattgta

SEQ ID NO: 775120 - DNA, 75 bp, Homo sapiens
gctccgaccggctgaggcggcgcggcagcggagggacggcagtctcgcgcgagtcattcaggagagcaggaaaga

SEQ ID NO: 775121 - DNA, 100 bp, Homo sapiens
aaagcaagggccaggtcaaggaggaagacacggcttacctggatggggtgtcgttgcccgacttcgagctgctcagtgaccctgaggatgaacacttgtg

SEQ ID NO: 775122 - DNA, 82 bp, Homo sapiens
gcagcagctggaggaggatcgcactgctcatcttggccatcactatacacaacgttccagtgctgattcctaaagaaaagcc

SEQ ID NO: 775123 - DNA, 50 bp, Homo sapiens
aaagtatcccacatgacgagtggtaagaatcccgaggatgtggttcgaag

SEQ ID NO: 775124 - DNA, 50 bp, Homo sapiens
caggtgaagcggcaggaggtcatcagcgaaccagtggctctgaatatcag

SEQ ID NO: 775125 - DNA, 98 bp, Homo sapiens
aacatattgctgcaatcaggaccattgcaataaaatagaacttccaactactgtgtcgacttcttccactacaaaatctccagcgtccagtgcctcag

SEQ ID NO: 775126 - DNA, 98 bp, Homo sapiens
gtggtggatgtcaactctgctggggagagaagcagggctgtgggacagatgatgtctaccatgttctacccactggtcacctttgtcctcctcctcat

SEQ ID NO: 775127 - DNA, 101 bp, Homo sapiens
tgaagatggagagaaaattgtggtccagggagagcctggggacgacttttacatcatcacggaggggactcgggcaagggtgccgaagatagacaagaggc

SEQ ID NO: 775128 - DNA, 97 bp, Homo sapiens
catcaagaaatgaagaacgagattcagacacaggtcaggatggctaactggttggctccccacatggtgccctacgtctatatcacaccttaaagaa

SEQ ID NO: 775129 - DNA, 78 bp, Homo sapiens
gcagatgctgggctagaaaaactccatcttagaaacattgaatgaggaggataaagcaaagattgctaaaagcaagaa

SEQ ID NO: 775130 - DNA, 90 bp, Homo sapiens
atctacaggaacttggtagtagtcaatcagcaggggtgttgatgatgccttctatacattagttcgagaaattcgaaaacataaagaaaa

SEQ ID NO: 775131 - DNA, 74 bp, Homo sapiens
atggcggcagccgaggccgcgaactgcatcatggagggcacaaatagtttacatttcatggaggcaagtcctgg

SEQ ID NO: 775132 - DNA, 98 bp, Homo sapiens
gtttttcaagttgaatatgctatgaaggctgtggaaaatagtagggacgtccagatcggtgacatcgtcacagtgggcgagtgccggcctctgagcaa

SEQ ID NO: 775133 - DNA, 96 bp, Homo sapiens
gcacttcgcttccatgactacaaagcagccagtatgcattgtcaggagctgatggccacaggtggagccgccaccaaaatgcagattttcgtgaaa

SEQ ID NO: 775134 - DNA, 75 bp, Homo sapiens
gaagatggtgataaagtatataagctattccttgagcgagagcgggcagcccagctagcagaaagtaaaacagat

SEQ ID NO: 775135 - DNA, 90 bp, Homo sapiens
ccgcaacagccccttcgtcccaaatcaaagccatcggccagacagagttgaatgcaagcaatccagaagaagtgttacagctggcagcgc

SEQ ID NO: 775136 - DNA, 87 bp, Homo sapiens
ggactcagagaccaataaaaataaactgcttgaacatcctttgactggttagccaggaatgtatcctgtcaggtataatgtcagtga

SEQ ID NO: 775137 - DNA, 51 bp, Homo sapiens
aagatggatgtgggtggcttatccgtgctgggcctaaaggagataacattt

SEQ ID NO: 775138 - DNA, 75 bp, Homo sapiens
gacccaggagcccaggaaatgaggtcagtactcctgcatttgtaccaacgaaaactcacgtgctgcttcatcgaa

SEQ ID NO: 775139 - DNA, 88 bp, Homo sapiens
ggaaaaggcgctccgtcatggggatccagacgatcttcgcaaatactgtggacaatgcccgcatcgttctgcagattgacaatgcccg

SEQ ID NO: 775140 - DNA, 75 bp, Homo sapiens
taaccatggaggcagtgatgcagggccaagaccagcttcaagtctccatggtaccagaaaacaacaacctcacag

SEQ ID NO: 775141 - DNA, 97 bp, Homo sapiens
tgattactcacagtttcaggaatctgatgatgcagaatccacgccagtacaagatcccagactggttcttgaacagacagaaggatgtaaaggatgg

SEQ ID NO: 775142 - DNA, 89 bp, Homo sapiens
caactggtgccggagggacaaaaagcaatgcaagagtcgctttgttacacctttcaagtgtctcgttccacttacttacatgatcattt

SEQ ID NO: 775143 - DNA, 100 bp, Homo sapiens
tcagaagaacgcttcgcccgttggtgctatgctgacttcaaaatttctgaggagtgcatcgcacagtggaagcaaaccaacttcatgaccaagctgggct

SEQ ID NO: 775144 - DNA, 74 bp, Homo sapiens
ccggggcctggtccgggcggtgcaggttaatccctatatcctgaagaagaacatgatcctcatgacaaatcatt

SEQ ID NO: 775145 - DNA, 50 bp, Homo sapiens
aatgagagatgagctacatgtccgaggtgtgggggatggaagaatgggat

SEQ ID NO: 775146 - DNA, 96 bp, Homo sapiens
cagtgaccgagtgttccatgaaagcattctcctggccattgcccttctggaaggaggcaacaccaccatccagacccaacatgagtgaagtttcct

SEQ ID NO: 775147 - DNA, 100 bp, Homo sapiens
ctcggcgatggtaggcgtccctggagcggccgccttccagcgtccctatcactgttcagtccatcgtcattcagtctctaaataaaacgctcacccgacg

SEQ ID NO: 775148 - DNA, 100 bp, Homo sapiens
taagattcaacaaactatttttgaatgaagatgcttttctgaagctcagcagcagctatgcaacaccagacaggaagtgaatgaattaaggaagctgctg

SEQ ID NO: 775149 - DNA, 108 bp, Homo sapiens
ggagacttggaacgcacagaggaacgagctgagctggcagagtccacgttatctacgcagcagaataccctttcatcatcaacatcttctgggcgcacttcgacatcc

SEQ ID NO: 775150 - DNA, 75 bp, Homo sapiens
atggagcccagatccgaatccagaaaaagattgcctcaatctggataaaaacctgatcaaatatgatttgcaaaa

SEQ ID NO: 775151 - DNA, 90 bp, Homo sapiens
agatggacaagagaaagctcgggcgacggccatcttcatccggtccgagcctccgtactgggtgcaatgaaagctccacgcaggccttac

SEQ ID NO: 775152 - DNA, 57 bp, Homo sapiens
cacacaactcgggcctccccagcgacagtcccttatttcgcgtgagtctttggcgtc

SEQ ID NO: 775153 - DNA, 100 bp, Homo sapiens
cgggctcatccaaggatgagattttgccagagaaaggacgagcagcaagtcagggagcttaagaacaggccgcccgcctgaagaaactacaagagcaaga

SEQ ID NO: 775154 - DNA, 50 bp, Homo sapiens
gaacagttctctatggactccggtccctcgtctgagctggctcactcgcc

SEQ ID NO: 775155 - DNA, 97 bp, Homo sapiens
gggccgccggggccgccatggagcccgactcggtgattgaggacaagaccatcgagctcatgtttgtcccatgaggagcacccccatagccatcctc

SEQ ID NO: 775156 - DNA, 100 bp, Homo sapiens
gcacctcccgcgccgcacggtggacgagggatttgctgcagacgctgacggaggaggagctgcacacgctggaacggaacctctgcatttcccaagacgt

SEQ ID NO: 775157 - DNA, 100 bp, Homo sapiens
caccactcccagatatattcttagacaggtgggttgcctatgaaaaagaacattttaaaggccagcagtttctgcttgaagaaggagactttgaagacag

SEQ ID NO: 775158 - DNA, 101 bp, Homo sapiens
gcatggggtctgcccaggcatgtccatgccaggtgcccagggctgcttccacgacgtgggtcccctgccagatttgtgtcaagtctctatttatgaggtgg

SEQ ID NO: 775159 - DNA, 75 bp, Homo sapiens
gatttgagccaccaatgctggatttccatgaacagcattgtgtccagatctggcaccctgacttatgaagcagtt

SEQ ID NO: 775160 - DNA, 50 bp, Homo sapiens
gcccggccgcgcccgcggaaccagaccagcttcaaggttactgacttttt

SEQ ID NO: 775161 - DNA, 98 bp, Homo sapiens
aggctcgaatgggttcatctagcatgccagggggcagtacgcccgtcagcagcgccaatatgatgtcaggtctgacggtaactgctgtaaaagactca

SEQ ID NO: 775162 - DNA, 100 bp, Homo sapiens
acgtcactaccactgtctctgctcacagtgccaagtatctgacgaagcaagtggaacttctacggcagatgaacgaacaacatgcaaaggtttatgaaca

SEQ ID NO: 775163 - DNA, 83 bp, Homo sapiens
ctgtacaacgtgctggagagaccccgcggctgggcgttcatctaccacgctttcgtgacacattcagctaacgtattttagca

SEQ ID NO: 775164 - DNA, 82 bp, Homo sapiens
gaactactatattcagtggctaaatggctccctgattcatgaaaatttcccaggaacgagaaaaatttgctgatgaaggcag

SEQ ID NO: 775165 - DNA, 83 bp, Homo sapiens
catcgacgccgcctggcaggccctgcgcaccaggttgaaatcacaaagattagacacctttttagataggtgttcttcagcac

SEQ ID NO: 775166 - DNA, 74 bp, Homo sapiens
catggccgggatcatcaagaaacaaatcttgaagcacctctccagctggagctctcaaacactgctgtcctgca

SEQ ID NO: 775167 - DNA, 116 bp, Homo sapiens
cttgcaggagcagccccggaaggccctggtggacatcctctccgagacaaggcgaccagccagctcctgttggagacagattgggagtccattttgcagatctgcgacctgatccg

SEQ ID NO: 775168 - DNA, 100 bp, Homo sapiens
gacaccacaggctgagctccctgaaccagatcgtcagtatttaaacagatcacatcatgcgtgagtacaagctagtggtccttggttcaggaggcgttgg

SEQ ID NO: 775169 - DNA, 82 bp, Homo sapiens
cctgtgcttcctgtacagctgcggaaccgttgcgaggggcggtgttgaagaatgtgtgggcgaacatcctgtcacttaccta

SEQ ID NO: 775170 - DNA, 48 bp, Homo sapiens
acagacaacagcctggtggcagcgttaagtgggcagaccaacatccac

SEQ ID NO: 775171 - DNA, 100 bp, Homo sapiens
cggagcttgagatacgccgctctgaatcttgccgccctgcactgccgcttcggtcactagtggacccaagtggagagattgtggaactggcgaaaggtgc

SEQ ID NO: 775172 - DNA, 85 bp, Homo sapiens
tacacagatgctttggttcatgatcctctgtccctcaagctgttaacagatgtcataggaaagagacggggttttgccatgttgc

SEQ ID NO: 775173 - DNA, 100 bp, Homo sapiens
cttggaacggaacccccagagctacctgtacctggtgaaggtcggtgagctggtaaaggttacgaagattaatgtgagtggtcagtgggaaggggagtgt

SEQ ID NO: 775174 - DNA, 101 bp, Homo sapiens
attttgttaagaagcacctcatgcaagcgagggacctgggactgctcacagccaggccatcatctgtgcgatctctgcggtggacgaggtggactacaaga

SEQ ID NO: 775175 - DNA, 99 bp, Homo sapiens
ctgtgcagtggcacctgcgcgaagctggccaaagcctgcccagacggctcacctgtgcgggatggaacaaaagtgcatcatcgaggagtcgggagagca

SEQ ID NO: 775176 - DNA, 117 bp, Homo sapiens
ggaggcagacagtggggaggaagaatgccggtcacagcccaggaggatgaactggacctcacagacaaacacagagaagccatgtttgcacttccagctgagaaaaaatggcaaata

SEQ ID NO: 775177 - DNA, 51 bp, Homo sapiens
tggagaacatggatctatggaggtgacaatctccaatagacttgtgtcttc

SEQ ID NO: 775178 - DNA, 87 bp, Homo sapiens
ttcagccaaagaaacaagccgtggaataggtgtatcaagtaatggtgcaaagcctgaagaaaacatttaaagttgatgatatgttat

SEQ ID NO: 775179 - DNA, 100 bp, Homo sapiens
tcggaccagccatttcggtgtagaagtggcagcacggcagatatattcgactttatgggagaaaatttagcaaagaagatcatgttctttttattaagtt

SEQ ID NO: 775180 - DNA, 82 bp, Homo sapiens
gtcacgccgggagctggtacacagcctcaggggccagtgtcattcaaagatgtggctgtggatttcacccaggaggagtggc

SEQ ID NO: 775181 - DNA, 97 bp, Homo sapiens
agtttagaccacagacataaacagaaagtcttacatgacacaatggatctgaatcatctcttgaaagacaaaactgtgtggagttttatcctatatt

SEQ ID NO: 775182 - DNA, 100 bp, Homo sapiens
acgtcaggcccgatggctcggcttccccagcttagaccatgctcagcctccaagcagccttgtcatcgacaaagaatctgaagtttacaagatgcttcag

SEQ ID NO: 775183 - DNA, 100 bp, Homo sapiens
gtggcatacccactgtacatcttatatgaaaatggagagactttcctgacatacatcagtctgttacacagcccctcacaaatactatattggatttcgg

SEQ ID NO: 775184 - DNA, 100 bp, Homo sapiens
gggaggaaggaacgaggcaaggagctaaagcagcgtgcgttcagccctggggttggacgtgataagtatgagcctgcagctgtttcagaacaaggtgata

SEQ ID NO: 775185 - DNA, 83 bp, Homo sapiens
cgtcaacctgttccaccttctccagtctggtagcaaaaaggggtgtctcaggttgaattgaccaaagcaatggtgatggagaa

SEQ ID NO: 775186 - DNA, 101 bp, Homo sapiens
caatatgagaatgccaacatgtggttcaagaaccttgacaagctcatccggctggtaaatgcgcaggtcaccttccgcaaccctgtcattgagaggattcc

SEQ ID NO: 775187 - DNA, 75 bp, Homo sapiens
ttgagggctccccagccatgcttcctgtacagcctgcaaaactgccgccctacagaagctgaaggcagaggagta

SEQ ID NO: 775188 - DNA, 96 bp, Homo sapiens
ttgaacagaactatgcgaaacaattgaggtgtgatgaatgcagactctgctaccattttggctgtttggatcctcctttgaaaaagtctcctaaac

SEQ ID NO: 775189 - DNA, 96 bp, Homo sapiens
ctcttccccacctgcccggtgcccgaggaggcagccaagctcgtagcctgccactccgtgcgcctgctgggaacgggacttctaaaaggaactatg

SEQ ID NO: 775190 - DNA, 88 bp, Homo sapiens
tgcattggcccgatcaagcctgacttctagccaaggcatctcgtccccggtgaagaagacagagatggacaagtcaccattcaacagc

SEQ ID NO: 775191 - DNA, 90 bp, Homo sapiens
atgactacctgaaccgcatcttttcctcttctgaacatgcacccccagcagccaccagcagcttcttggacacttaatgattgttggcaa

SEQ ID NO: 775192 - DNA, 82 bp, Homo sapiens
ggccaccccctgttcctgcagaacacagtgttggctgcaccaattctagaagtaagctctccaagttcagactccattcttg

SEQ ID NO: 775193 - DNA, 100 bp, Homo sapiens
tctctgacttgatcctgtgtccagagcagcgcgtggggaacaggcagctggagccgcgtttaaggcctgggatgaagatctccttcaacgacaaaagcct

SEQ ID NO: 775194 - DNA, 83 bp, Homo sapiens
cggacagcggctgcagcgggggcgccggctgggagacaatgcagatcttcgtgaagactctgactggtaagaccatcaccctc

SEQ ID NO: 775195 - DNA, 83 bp, Homo sapiens
aatgcatccaagagaatccctcaacatgctggaagtggccatgcgcaagctggtgcgctcagtgactgtggttgaggacgacg

SEQ ID NO: 775196 - DNA, 88 bp, Homo sapiens
gcctccttgatcaccaggataatattctctcattgattaatgtcaatggtgaccaagaatatggcccaggtgaccaaagccctggaca

SEQ ID NO: 775197 - DNA, 74 bp, Homo sapiens
ggccacctatctgctcctgggctacaagagctccgagggaagacaaaggcgctttggctaagctggtggaagct

SEQ ID NO: 775198 - DNA, 96 bp, Homo sapiens
ttttggtagaagatgtggtacacactcagttaattaatctgattggatttgaggctcctcccctccagggacaggctgcagctccagcgagtggca

SEQ ID NO: 775199 - DNA, 100 bp, Homo sapiens
gtccaaccccgaacggggggagattctgctcacggaactgcaggacttgcaggtaccaagcataacaggaatgaagaaaattctagggcttttccagcct

SEQ ID NO: 775200 - DNA, 75 bp, Homo sapiens
gtgtggggagttggcaacgcgacacagagccagggtgaggtggctttgaccccgggttgcccggccagcacgacc

SEQ ID NO: 775201 - DNA, 74 bp, Homo sapiens
ggcaggtgtcttcctcgagaggcaggcaggggatcccggacttcttttagaactcatcaaattgaagctgttcc

SEQ ID NO: 775202 - DNA, 75 bp, Homo sapiens
aataaggagcgactcttacatgatgaacaaagtactgatgacaggagtttaatctgattgataggcgtgagctgg

SEQ ID NO: 775203 - DNA, 75 bp, Homo sapiens
attttagggtcctttatatagaagggagagtagttgcaggaagaggcagaggaagaggaagaggaagaggacgtg

SEQ ID NO: 775204 - DNA, 74 bp, Homo sapiens
cctggctctataagctgaattatggcagcccagtcaaggttttcattgctcagtcccgatcatctggaagtcac

SEQ ID NO: 775205 - DNA, 100 bp, Homo sapiens
tatccgtttgttcaggaaccaccagtgacagacagaaccttctaagtctcagacacgtaaacccaagtgtggcaaaggaactcattgctctcgaaatgca

SEQ ID NO: 775206 - DNA, 90 bp, Homo sapiens
gaaagatcctgttccaggctattctgttccagcagcagaacacaggaggggttggttcccgtcgtcgtacacgaagttgctggaagaaaa

SEQ ID NO: 775207 - DNA, 76 bp, Homo sapiens
ccgtgagtcgcctggggaggccacaggacacaggggattcgggttcgtaactttcgagaatagtgctgatgcagac

SEQ ID NO: 775208 - DNA, 127 bp, Homo sapiens
cgagttacctcatgggatggcaggaaatggggagaactggagggggacacctatgaccgggtctggttcagtaaccgccgcgcccgttggcgtaagcaggcaggagccaaccagctggcggcgttca

SEQ ID NO: 775209 - DNA, 50 bp, Homo sapiens
aaacattgttcaccaacaacgggatcttaagattgaaagtgatgttcaag

SEQ ID NO: 775210 - DNA, 100 bp, Homo sapiens
agccctcaccagtccccaatgtagaagaggtgacacttcccaaaacaggttacttcttgctgcagattctgcgcaggatcggagctgtgggccaggctgt

SEQ ID NO: 775211 - DNA, 117 bp, Homo sapiens
gtccgggacgcggagcccggagctggggcgacgaggcgattgcgggggcctgggctaggtcagcccaaggccaaccccactgtcactctgttcccgccctcctctgaggagctccaa

SEQ ID NO: 775212 - DNA, 95 bp, Homo sapiens
gaagattgctcctggagcagttgtatgtgtagaaagtgaaatcagaggagatgtaactatcggtgacagtatgttgactgctgtctctgtggcca

SEQ ID NO: 775213 - DNA, 100 bp, Homo sapiens
ctcctctgatgtcctggtttatgttaccagcaatgacactacgattacagtagaatgcacattccttgactatataatgggaggatgtcagctgaatttt

SEQ ID NO: 775214 - DNA, 75 bp, Homo sapiens
ccgggtcgcacggcttggcccccggccaccgcttcggcctaggttggaagtactccatgacacacactcggagaa

SEQ ID NO: 775215 - DNA, 117 bp, Homo sapiens
ttaaggaaggaagcagagcgccaggcattagcgcagctcgagaaggccaaggtttttcgttggaatatacgttgcacatttatggcgattctgagtgtgagggcagacttctgccag

SEQ ID NO: 775216 - DNA, 100 bp, Homo sapiens
cttaggtctgttagaggaagacgacgagtttgaagagttccctgccgaaggtggatccataaagaacccagccaacccgcagagggaggggaggggctga

SEQ ID NO: 775217 - DNA, 90 bp, Homo sapiens
ctgaaagcaaccaggaggcagtaaattcttcagctgctcggacagatgaagctccccaaggagctgcagacgtgccaccttgcttagcgc

SEQ ID NO: 775218 - DNA, 90 bp, Homo sapiens
cctcctctcccacttcttgccccagaaagccccagacggaaagagctacttgctgattccaagatgagatgggattctccaacatggaag

SEQ ID NO: 775219 - DNA, 104 bp, Homo sapiens
tctaactatgtggaaaggaaaaacagtgctcggaaagcatctattgtgaaaaacctaaaggataccttagtgatgctattgctgagattagagccatttgtatt

SEQ ID NO: 775220 - DNA, 50 bp, Homo sapiens
tcacttaatcatatccgagctggcatgcatatcattctgtttcaactccc

SEQ ID NO: 775221 - DNA, 82 bp, Homo sapiens
cctcttctacggaggaaggaacgggcacagcagggactgctgagatgtcctctattcttgaagagcgtattcttggagctga

SEQ ID NO: 775222 - DNA, 100 bp, Homo sapiens
taggcccagaagaacaattagggtgacgtgtgcattgagtaaacactccgacctgagcatgcgcacactgagcacgcccagcccagccctgatatgtcca

SEQ ID NO: 775223 - DNA, 90 bp, Homo sapiens
tcagttgtgcgttgcggccagtcgccactgctggcacgaccaggagttgacgcactgctgcacacaccccacccagcggctcgtggtgac

SEQ ID NO: 775224 - DNA, 98 bp, Homo sapiens
tccgggccgcaggcagtcccgcggcagcaggatcacagctttcccatggtttggcatggacattgggggaactctagtaaagctctcgtactttgaac

SEQ ID NO: 775225 - DNA, 50 bp, Homo sapiens
ggggaaactgaggcacggagcgggtggatctaggatccggcttccaacat

SEQ ID NO: 775226 - DNA, 98 bp, Homo sapiens
tactgtcacagcaactcctttgcaagatgccccgatcagcccggaggaagaggagcgccgccgagtaaggcgcgagcggaacaagctggctgcggcca

SEQ ID NO: 775227 - DNA, 98 bp, Homo sapiens
tgacatcagctcccaagggctctgtgctgcaggaagcaaaactgtaggattcctcatgtccataacatgttggatgaggctctgcagctcacccccac

SEQ ID NO: 775228 - DNA, 50 bp, Homo sapiens
cgtccgagtcaacaaccgcttcgagctgggtcacggagactcaccagttg

SEQ ID NO: 775229 - DNA, 74 bp, Homo sapiens
atgatgtcttggcagatgttgttgaagataaagacaaggcctctgatgattgtcactcagaagatcacaacctt

SEQ ID NO: 775230 - DNA, 90 bp, Homo sapiens
aagaccccttggggaaaatggaatctgaaccctcagcagttttataccatgttccaccgagacaacacttggactcagttcatatcagca

SEQ ID NO: 775231 - DNA, 83 bp, Homo sapiens
cggacctcaagctctgggggatcgaccgggacagctaccggcgcatccttatgatggagaaggaggagacaacccgggagctg

SEQ ID NO: 775232 - DNA, 99 bp, Homo sapiens
ggaacagaaaaccaaacaccacatgttgtctcttagaagtgggagctgaacggtgaccaagaatatggcccaggtgaccaaagccctggacaaggccct

SEQ ID NO: 775233 - DNA, 88 bp, Homo sapiens
cagggttcctggggcatcgacgatctccatatttcattgcaagattcatcacttctccagcagtttttatagtgacatgaatggtgtc

SEQ ID NO: 775234 - DNA, 75 bp, Homo sapiens
ggaaaatgccaacgccgtgtctgaagggtgtgctgatctgcaaaccctggacacaatgcagccaattgagaggaa

SEQ ID NO: 775235 - DNA, 146 bp, Homo sapiens
aagcccttctaccagaagagggaggtgaccaaggaggagtacaaggacatcctgcgcaaggccgtgcagaagaaaaatggctacaaacttcctagcacatgagaagatctggttcgacaagttcaaatatgacgacgcagaaagga

SEQ ID NO: 775236 - DNA, 88 bp, Homo sapiens
cgcagaggaggagcgcagcccggcctcggatcccaaaatggctgggcgaaaacttgctctaaaaaccattgactgggtagcttttgca

SEQ ID NO: 775237 - DNA, 100 bp, Homo sapiens
cgagtttcctgatcacaaaaagatcacgttagaacctggcccattagatgaaacccagatcgctactatattaagagaaatactgaaaggactcgattat

SEQ ID NO: 775238 - DNA, 100 bp, Homo sapiens
caacagcgaggctttcagttctttggaattccattcttttccttattcttctgatgtggatccagagtattgggaaagggtcgttgtggtgcatagaccc

SEQ ID NO: 775239 - DNA, 75 bp, Homo sapiens
cccgtcccagtgccgggagcgcatcaagtgggtgtataacattctcgacaagaaggctgaagcggaccggattgt

SEQ ID NO: 775240 - DNA, 82 bp, Homo sapiens
gtttccatctcttcagagatgaaccagtgctgagcttgcaagacctctgctgccgggcggtcgtgtcctgcacgccggtgca

SEQ ID NO: 775241 - DNA, 105 bp, Homo sapiens
ggtatttagcctagttggcaagcgagcaatttccacctctgtgtgtgtacgagctcatgcgagcttgacatgatttccacaagggtgatggacattaagcttcgg

SEQ ID NO: 775242 - DNA, 82 bp, Homo sapiens
ttcctctcgctgtcctggtacgcggcactcagcggccagaaagggtggtgaaggaggagatctttgatgacaatgccaagct

SEQ ID NO: 775243 - DNA, 75 bp, Homo sapiens
atcattagtatcggacacagaaactgaccaaagacttgaccactcaaagtccagctccccagaacactgctcgac

SEQ ID NO: 775244 - DNA, 114 bp, Homo sapiens
acagtgcctgccacccagactcagaccaccaccagaaccatcacctcggagacccagacaatcacagctaatcttccagtaccaacaattgcagcaatagatggactcgcttta

SEQ ID NO: 775245 - DNA, 107 bp, Homo sapiens
gtcaggacaattccatttggggaccagagatggacggtcactcagcctatggagaaggacagaataacgggctcccagattcacaagccccaccaagaggatcaccc

SEQ ID NO: 775246 - DNA, 83 bp, Homo sapiens
agcgccgagccatggcgcaccaaacgggcatccacgttgttgacctcctgtactggagagacattaagaagactggagtggtg

SEQ ID NO: 775247 - DNA, 83 bp, Homo sapiens
tgacgatcctgacctggtacgagcccggaacattcttcacaagaaagacttcccaagtaagaagcggaagaggagccgctgga

SEQ ID NO: 775248 - DNA, 95 bp, Homo sapiens
gaggcattttggggcagaatacagagatatggaatcaggctgctacctgcccagcaaccctgaggccattgtgctggacatcgactacaagtctg

SEQ ID NO: 775249 - DNA, 101 bp, Homo sapiens
tttggtgttcttgctaagattgtgaattacatgaagatttatcatagaatccccgactcagacccatcttctagcaaaacaaggcagatcatctccaccat

SEQ ID NO: 775250 - DNA, 83 bp, Homo sapiens
cagaccctggagcctcagttggaagcagccgatccagcctgcggagcctgtggggcaggatttctctctgatcaaacggacag

SEQ ID NO: 775251 - DNA, 100 bp, Homo sapiens
ccagccgacatgtctctagtggcggaagccttcgtctcccagattgcaggtgtggatgaggtcaccattgtcaacattttgaccaaccgcagcaatgcac

SEQ ID NO: 775252 - DNA, 82 bp, Homo sapiens
cagggacacctggttccagctgcagcacgtggacgctgactcggaagtgcaggttttaaaatcaaagatgggaaaatcggag

SEQ ID NO: 775253 - DNA, 90 bp, Homo sapiens
cgcgcgacgagcaggtggcggcggctgcagggtcatcacactgaaacggtgttcaaccgggttttgccagggcctattgcaccagagagc

SEQ ID NO: 775254 - DNA, 74 bp, Homo sapiens
agcggcgcggcggtcggagaagtggcctaaaacttcggcgttggcatgaagcgtgccagctctctgaatgtcct

SEQ ID NO: 775255 - DNA, 100 bp, Homo sapiens
gcgaagggtctagttccggacactaggtcacccctatcagaaccggacgccccccaagaagaagaagccgcgcacgtccttcacacgcctgcagatctgc

SEQ ID NO: 775256 - DNA, 113 bp, Homo sapiens
gcccgccttccgccgtctcttcgagttcttcgtgctgctcaagcaaattgtggctactaatttgccccctgaagatcaagatggctctggggatgactctgacaacttctccg

SEQ ID NO: 775257 - DNA, 100 bp, Homo sapiens
cacatctgaaactcatctgtacctcacttagaaagagaagcaaatgctggcacaaggataccctgcttacacgacatcgtgcgcctggctggggtactca

SEQ ID NO: 775258 - DNA, 80 bp, Homo sapiens
gaaaaagcaaatgcaaaaaataaaggaacagtttctccaacaaaaggaaggaagagggaatggtttaaaatagaagacgc

SEQ ID NO: 775259 - DNA, 51 bp, Homo sapiens
tttggtctctaaaagtaaagggctaaggcagctggataagcacagccaggc

SEQ ID NO: 775260 - DNA, 100 bp, Homo sapiens
gcagccctggcggacgcaggagcgatggcagcgaccgatatagctcgccaggtggtgttcctgggccttggggagctgcttctgtcctgcaactgggcag

SEQ ID NO: 775261 - DNA, 127 bp, Homo sapiens
cgactgcagacccatggacaagagcgcaggcagtggccacaagagcgaggagaagcgagaaaagatgaaacggaccctccaatgttttcagttgcaccaagcttagccaccaatgcatcagcagccg

SEQ ID NO: 775262 - DNA, 50 bp, Homo sapiens
ggagtgattgcccggcagagcgcggtacctgtctattgcactaagactgg

SEQ ID NO: 775263 - DNA, 74 bp, Homo sapiens
cgaggagagacagaagaagctggaggccggcaaagccaaggaagaaaggcgaaggttgaaaaatgcaataatta

SEQ ID NO: 775264 - DNA, 83 bp, Homo sapiens
cggcctttcacgagtcttcaagccttcaggtgaggcggaaccaaccctcctggccatgggaggggccgtggtggacgagggcc

SEQ ID NO: 775265 - DNA, 74 bp, Homo sapiens
cgaagctaagagcccccttcagtcgcagcctcactctaggctgcccggcagctctgacagactcagaggacgag

SEQ ID NO: 775266 - DNA, 100 bp, Homo sapiens
tagatgaagatgagattcagaagatgcagttctcaagactcagaagttagtgaagagcaaaagagagaaaaaatccttgaactaaagaagaaggagaaac

SEQ ID NO: 775267 - DNA, 100 bp, Homo sapiens
gatgaagagtatcaggaatttgaagagatgctggaacatgcagagtctgcacaaactgacttccttttggtagtactgcgtgatgttgttcaggcttatc

SEQ ID NO: 775268 - DNA, 74 bp, Homo sapiens
gctaatggtggagccaaaatgctattgccctgtcttcatcaacatttaatcaaatgcctaccgcaggaatggga

SEQ ID NO: 775269 - DNA, 100 bp, Homo sapiens
tgactctttgacatggagagaatttcactatattcagtatggaggggctcccggagggcctgcgtttcccggacaaactcaggatccgctgtatggttac

SEQ ID NO: 775270 - DNA, 100 bp, Homo sapiens
ggcggccgtggaaggcgacccggcggctgtggaggccacgctcagctcgccaggcggcgcagggagagattaaacagattctagaaaatgaacttcagat

SEQ ID NO: 775271 - DNA, 82 bp, Homo sapiens
gcggtcagcactgtggtcctccaggccttcggacaggtcaaggctgagctggcccggaagaagcgcgaggagcggcggcggg

SEQ ID NO: 775272 - DNA, 97 bp, Homo sapiens
gttcctctacaccgacaagatcaaatacccacggaaagggtgattctgggggtccacttgtctgtaatggtgtgcttcaaggtatcacatcatgggg

SEQ ID NO: 775273 - DNA, 100 bp, Homo sapiens
gcgccagcgagctgctattgaggggcagacgtgaaacaaagagtcctcttcgtggaaaagaaaaaaatacgctccctttaaacggtggattgaaaatgac

SEQ ID NO: 775274 - DNA, 82 bp, Homo sapiens
gacttgaaaaaaactttgctgccaatactctgggtacagaaccctggtatttctatttaattaatggatttctgaatttcaa

SEQ ID NO: 775275 - DNA, 83 bp, Homo sapiens
ctgaactgcagaattttgggagtagcactgccagtgaaagatgtagaagataaacctgaacaacaaaccagaacaagagagac

SEQ ID NO: 775276 - DNA, 100 bp, Homo sapiens
gctgacgctcgtggggctgcagtactcgggcaagaccaccttcgtcaatgtcatcgcgattttaccaaatgttgcaagaactctggagttcttatggtag

SEQ ID NO: 775277 - DNA, 100 bp, Homo sapiens
ggattccaagtaactcttatttggtcagaagagatcaattctacagaaatttccagtggttctgttgaggctttatggaattcagcatgtcaaaattcac

SEQ ID NO: 775278 - DNA, 88 bp, Homo sapiens
caggaagcgggcctggcgttgatccccgataagcctgccactcagtgtatttcagacggcaagttgatgcggatgaaattaaaaggct

SEQ ID NO: 775279 - DNA, 75 bp, Homo sapiens
tcgtgcctgctatcgccgagttctacaacacggaaaaaccatatggcatagttgaaaagaagtccagaatattcc

SEQ ID NO: 775280 - DNA, 75 bp, Homo sapiens
gacccggacattccaggccacagtcctgggaagtcagatgggattgaaaggatattaccttccaaatgatgatgg

SEQ ID NO: 775281 - DNA, 95 bp, Homo sapiens
gcccccaggtggaccatggcggtgagattccaggtggaacacctgcagcaggagactgctgctctgaaaaagcaaatgcaaaaaataaaggaaca

SEQ ID NO: 775282 - DNA, 100 bp, Homo sapiens
acagttattagaaagtgatggaagtgatagccatatgtttttggaaaaaggtctaacttcaaacttgtggctgttaattcaaaactctatgccatcggag

SEQ ID NO: 775283 - DNA, 75 bp, Homo sapiens
cagtgcagggcatcatcaatttcgagcagaaggcgttggagaccagggccagccctggccacaccccaggctgtg

SEQ ID NO: 775284 - DNA, 100 bp, Homo sapiens
cacggccagatctgccctccagttttgcactgattgcaaaaataaagtcctccgagcatacaatatccttattggtgaacttgactgcagcaaagaaaag

SEQ ID NO: 775285 - DNA, 98 bp, Homo sapiens
tgaagatgttcctgctccttctacatctgcagataaagtggagagagagaagaagaaggaggttcctgctgtgccagaaacccttaagaaaaagcgaa

SEQ ID NO: 775286 - DNA, 75 bp, Homo sapiens
gagaagggccccaccctgggcagtatagagacgtcggacttcacgcaaacggggattcagcgtccgatcctttgg

SEQ ID NO: 775287 - DNA, 82 bp, Homo sapiens
ggaacgtgggcaggagcacgtcaagacggccctggagaaccagaagaaggcgaggaaggccttggcccctccaccagaggaa

SEQ ID NO: 775288 - DNA, 75 bp, Homo sapiens
tgtgtggccaagaagctggtgtgcggagatgaagataacaacgaacttgatgcaagtgataggtttgccaaggtc

SEQ ID NO: 775289 - DNA, 74 bp, Homo sapiens
ggattggaaccagttccgatacagcacaatgattcaactttcacgtatcaaaccaccctgggtggttaaaggtc

SEQ ID NO: 775290 - DNA, 100 bp, Homo sapiens
ctcggagatctcctgccacatccaggtcaaaatgcagatcttcgtgaaaacccttaccggcaagaccatcacccttgaggtggagcccagtgacaccatc

SEQ ID NO: 775291 - DNA, 82 bp, Homo sapiens
cccgcgccgacggctgctcaaacatcagggaatactcccccagttgcaagaggcgcaggaccgtggaagacttcaacaaatt

SEQ ID NO: 775292 - DNA, 97 bp, Homo sapiens
aggcgctgcagcggtacctgaagacccgggagaagaattaactcctgaggagagagcccaaaagattgccaaagccatgcgcaaacagtcttctgaa

SEQ ID NO: 775293 - DNA, 50 bp, Homo sapiens
ggagacgccgccgctgcctcccgcatgaaggatttgggggcagagcactt

SEQ ID NO: 775294 - DNA, 100 bp, Homo sapiens
tttgtcctggaaggaaaaagatctaaagtcacccggcggccaaaggccagtgactaccaacgtttggaccagaagaaaatgtttcgatgaaagatcctcc

SEQ ID NO: 775295 - DNA, 50 bp, Homo sapiens
cgtgcccgttctgggccggctcctcgagttcgaaccaacgtggcctcaac

SEQ ID NO: 775296 - DNA, 98 bp, Homo sapiens
ggagaccactggaaatggagcagcagcaggcctatcgtccaggttgcagtccatgagctgggaaaggaggcagtgctcttgggagaaacagcagaggc

SEQ ID NO: 775297 - DNA, 101 bp, Homo sapiens
gctggggctctggctggcgttgctgcgctccgtggccggggagcaagcgccagtgcaactgcagatagaagacctgactcgtaaactgcgcacaggagacc

SEQ ID NO: 775298 - DNA, 88 bp, Homo sapiens
gcagagcctcgcctgggttctggaggctgcggggccatcgctccaggctcttgcagccaatgccggaacaggatttgctgttgctgag

SEQ ID NO: 775299 - DNA, 100 bp, Homo sapiens
tatggctcagagctcacctgcatcatccactttcccagcaagaaggtccagcagcagctgtggctccagtatcagaaagcggccctccaggcactgaagc

SEQ ID NO: 775300 - DNA, 82 bp, Homo sapiens
cgaggcaaggagctaaagcagcgtgcgttcagccctgggcggctggactctattacctggcagaactgatagaagaatacac

SEQ ID NO: 775301 - DNA, 75 bp, Homo sapiens
ggaagaaggaagtaacttgtggaatgctgagaaaggtgttggtgaaaatttgactgacccatctgtgataaaagc

SEQ ID NO: 775302 - DNA, 100 bp, Homo sapiens
ccccaggatacagggtcaaaggagagcacaaccatcgcagttggaagcccatggggcagacatagggcctgattacattccaacagaggaagaaaggaga

SEQ ID NO: 775303 - DNA, 86 bp, Homo sapiens
aagccttgaaaaagctgccctgagacggtgtcccgccgaaagattgggaaaatgaggtacgttagtgttcgcgattttaaaggcaa

SEQ ID NO: 775304 - DNA, 100 bp, Homo sapiens
cgcaaccaccgccaccagtccacggagggcatgaggaacaagcacatcatgattgacttggggactggcaacaacaacaagattaactgggccatggagg

SEQ ID NO: 775305 - DNA, 83 bp, Homo sapiens
atcgccgtataccgccgggttttctcccaacgtcaggcccgatggctcggcttccccagggatttcaaggatttggatttgga

SEQ ID NO: 775306 - DNA, 106 bp, Homo sapiens
ccgtccttctccactttcgccagcccgtgccgcgagcgcggcctgcaggagcggggatctgacgagcttttctctacttgtgtcactaacggaccgtttatcatga

SEQ ID NO: 775307 - DNA, 100 bp, Homo sapiens
agggacattatgcttatgattgtcatcgttacagccggcgaagaagaagcaggctgagactcgggctgagtttgcggagaggtcagtaactaaattggag

SEQ ID NO: 775308 - DNA, 100 bp, Homo sapiens
gaataatatagctggtattgaagagcagcggaagatgtcggacagcgaggacagcaacttttccgaggaggaggacagcgagcgcagcagtgacggcgag

SEQ ID NO: 775309 - DNA, 100 bp, Homo sapiens
tgctgcaatgacgagggcctggagtgtgtgcccactgaggagtccaacatcaccatgcaggcctccaactttaagaaggcaaacatggcatcaagttctc

SEQ ID NO: 775310 - DNA, 75 bp, Homo sapiens
attttctcacatatacaacacgattcttctaatggatgggaacatggggtgtgatgaatgcagactctgctacca

SEQ ID NO: 775311 - DNA, 100 bp, Homo sapiens
cggcccggctgcagcgagcgctggacggagaggaaagcggtgccatcatggaagaacaggcagcagaactccttggagtgaagatgtgcacgtttgttcc

SEQ ID NO: 775312 - DNA, 100 bp, Homo sapiens
tttaaaatctggaagcgattcaagccaagctgaccaagaagccaaagaactggctaggcaaataagctttaagagagcagctctaaattgggaagcaatg

SEQ ID NO: 775313 - DNA, 100 bp, Homo sapiens
caggaagcatataaatgactgggtggcagagaagactgaaggcatctctcgggacaactggcacaagcgccgcaaaaccgggggcaagagaaagccctac

SEQ ID NO: 775314 - DNA, 50 bp, Homo sapiens
acgacgtgcggacgcagcggcgggggcgtgctgctacatcctcatcctcc

SEQ ID NO: 775315 - DNA, 98 bp, Homo sapiens
gaaaaggctttgagaaattttgagtcctcgagtgaatgggcggatctcatatcttcacttggcaaactcaacaaggtgccagcgagatttcagattcc

SEQ ID NO: 775316 - DNA, 100 bp, Homo sapiens
ggcaaaacatgaatccagggaagataaaatttttcagaagtttaaaactcagatagcccttgaaccagaacaggatgctgatcctcccgctggcttccag

SEQ ID NO: 775317 - DNA, 58 bp, Homo sapiens
gactatggcatctatgttatcaaccagatggagtttgacgagaaggacttacgacggg

SEQ ID NO: 775318 - DNA, 100 bp, Homo sapiens
gggaactgtgccctacctgggcaccttcctgactgacctgaccatgcttgacactgcccttcaggactacatcgagtttcatgataaaattgagcctatg

SEQ ID NO: 775319 - DNA, 74 bp, Homo sapiens
tctgttgaggcatctggacaccacacacatcatcagtctggagtccaatgtgctgattgctgctaacagtcagg

SEQ ID NO: 775320 - DNA, 98 bp, Homo sapiens
gtcagagccccttacccgccgccgcggccaggccccccaacatggactgtctctgtatagtgacaaccaaggatagatcactgcgaccagaggaaatt

SEQ ID NO: 775321 - DNA, 98 bp, Homo sapiens
gtctcttctaagctgaataaagctgttttggaactgtcaggtacctcaaagccaattttcagaagcggcccaactgtatgaaaaaggtctctactacg

SEQ ID NO: 775322 - DNA, 83 bp, Homo sapiens
tgcccgtcaactcataatatggatgtccccaacatcaaaaggaatgacttccagttttcggctttgtgagaaaccttaccatc

SEQ ID NO: 775323 - DNA, 100 bp, Homo sapiens
caagctcggatccctgaatttgatccagatttgctcaggagtacaagaaagaccctgacaggggctatggtgctggagtagtcactgtcttcaagaagct

SEQ ID NO: 775324 - DNA, 100 bp, Homo sapiens
aaggtgatccagcaaggtcggcagagcaaggggcttacgcagaaggacctggccacgaccaaatacacgctgatcgatgagcaggacatcccgctggtgg

SEQ ID NO: 775325 - DNA, 100 bp, Homo sapiens
gacggtgtatcaccatacccaaaaacatgcattggtatagcccaccagaaaggacagacgtggacgaatgtcgcgagcgaggcccagccctgtgcgggtc

SEQ ID NO: 775326 - DNA, 100 bp, Homo sapiens
ccaggctggagaatatggtgcagaggccctccacggccattgaacacccagttcgaaccaatcagattccacgtcagattcctgaacagtcgttctacac

SEQ ID NO: 775327 - DNA, 50 bp, Homo sapiens
caatgagttcagcgaccggtgcacccccatttggaggctacttaagtgaa

SEQ ID NO: 775328 - DNA, 129 bp, Homo sapiens
agaaaggtgcgaaaaaaggtgaaaggtattcttgtggatattgggcttgacagctgcaaggagttactgaaggtggatgaagacctgatcattgaagttcaccagttatttttctcaagaatgtgaata

SEQ ID NO: 775329 - DNA, 50 bp, Homo sapiens
agactcaagctaacctacaaaggttattactgaaatcagtcagacctggg

SEQ ID NO: 775330 - DNA, 75 bp, Homo sapiens
agatctctgcagttacaggaacatcgtctgcttcatggttcgatacaagaggctgttttcctagcgtggcttgct

SEQ ID NO: 775331 - DNA, 82 bp, Homo sapiens
caagttcctgcagttcgcttacttcaagtttggcaatgaggagcagcagctggcgtgggccaagcgggagagcgagaaggcg

SEQ ID NO: 775332 - DNA, 82 bp, Homo sapiens
agacctgcacaaacccactggacaccttcgtcccctttgatccctgtgtgctgaagagattgttcagattccattctgtggg

SEQ ID NO: 775333 - DNA, 100 bp, Homo sapiens
accacctgtgacttaccagggaaacttatacaggccgcttttgagaggacaagcccagattccaaaacttatgtcaaggtgtccggtggagagctgtttg

SEQ ID NO: 775334 - DNA, 100 bp, Homo sapiens
atccgctggagcggagccggccgtacgcggtgctgcgagggcagaacctggtgagagggtccaagcctggtaagaatgtccagcttcaggagaatgaaat

SEQ ID NO: 775335 - DNA, 101 bp, Homo sapiens
gcaagatggcgcagacgcagggcacccggaggaaagtctgttactactacgacgggaaagaatatggcaaagctgatgcaagatgggtttattttgatcca

SEQ ID NO: 775336 - DNA, 75 bp, Homo sapiens
atggaaatgaagtataataccaagaaagccccacttggtacatcaggaacgtctctatcaagaatacaatttcag

SEQ ID NO: 775337 - DNA, 83 bp, Homo sapiens
gcagccgccggcgtcgccgccatggacctagatcatggaagggaagtggttgctgtgtatgttactggtgcttggaactgcta

SEQ ID NO: 775338 - DNA, 100 bp, Homo sapiens
ccttcccagaggagccttcatttataatacgcttacagatttcatacgaagtgaagtcaccctgctgagaaatgaagtggcacagctgaaacagcttctt

SEQ ID NO: 775339 - DNA, 100 bp, Homo sapiens
tgtcactcctggtgaccagcattcaaggttggtgcctgctcacccagccctcgtcaatgccattgtcctggttctgcactccgtagcaggcagtgcccca

SEQ ID NO: 775340 - DNA, 90 bp, Homo sapiens
ggtcaggagatcgagaccatcctggctaacatggtctcagtgctgtgccccccccagagcctagaggatgtttcatgggatcccagccac

SEQ ID NO: 775341 - DNA, 139 bp, Homo sapiens
ccaggtgaacaattaggtcctccacaatgaagacaggtaatgtggaggaaagagagcttgtcatggtacctggaatggaaacacaaaagtagccataaagactcttaaaccaggcacaatgtcccccgaatcattcctt

SEQ ID NO: 775342 - DNA, 100 bp, Homo sapiens
gcgagggcggcgcccggggactggagctgcgcgcaatagtctcgcccaagaacttcaaggtgaaaatgatcatgaagacatcagttctgctcagctggga

SEQ ID NO: 775343 - DNA, 90 bp, Homo sapiens
aagacactgcgactccggagacagcccaaatatcctcggaagagcgctcccaggagaaacaagatggcacatttcctagaggcagaatcc

SEQ ID NO: 775344 - DNA, 100 bp, Homo sapiens
agggagacgcacagccaggacatcctggaacctgggaaaggaaatcttcccaaggctgcagacaccgacggatttgctttgggagccagagtagctgccg

SEQ ID NO: 775345 - DNA, 100 bp, Homo sapiens
gctttttcagaaagttgctggtgaataaaagcattcggcagcgtcgtcgcttcactgtggctcatacatgatggatttgaagactatggtacagattgcg

SEQ ID NO: 775346 - DNA, 82 bp, Homo sapiens
gggcgccgcgccgcacgagcaccagcctagagccagtaagactttgaccccgacgcaggcttcagtgattgccgcggatcag

SEQ ID NO: 775347 - DNA, 50 bp, Homo sapiens
ctgtttctcatcatcaccaaacggaatctgaacctgtgatgttaagaaat

SEQ ID NO: 775348 - DNA, 82 bp, Homo sapiens
ttctggcctttggcacgtcctgctccgtggtgctctatgaccccctggttcatcatgcctagtggcgtataagaagaccccg

SEQ ID NO: 775349 - DNA, 82 bp, Homo sapiens
attgctgtgggtgctgggacttcccgtccgcggcgtggaggatttggagcaagaggtggtggtggccttcccccgaagaaat

SEQ ID NO: 775350 - DNA, 159 bp, Homo sapiens
cgagggcggtgagcagtgacaattgctaggcggagacagtgcagggaagagagaccttagaaaggatcaggactggcggaatgcctccaaagccgtccgaccggaagtgaatactgtcgcctcgtcagatgaggtgtgtgacggggaccgggagaagga

SEQ ID NO: 775351 - DNA, 83 bp, Homo sapiens
cagcagcagctccagcaggcgctggctcctgctcagaaatcatgaccaccccaggaaaagagaactttcgcctgaaaagttac

SEQ ID NO: 775352 - DNA, 82 bp, Homo sapiens
tctgcgccacttgtccgcttcacactccgccgccatcatggtgaagctcgcgaagaaatggtggagtcaatgaagaaagtag

SEQ ID NO: 775353 - DNA, 90 bp, Homo sapiens
ggccaagctctccaagttcagcatccccaagcagggggagttccgcagctctctgtacttgctcatggagaccctcaatgcgacgacgcc

SEQ ID NO: 775354 - DNA, 74 bp, Homo sapiens
ggcggacatcactttagaccctccacctaattgcagggtttctttcggagaagtattcaacaaaacatccagta

SEQ ID NO: 775355 - DNA, 75 bp, Homo sapiens
tgcacgagggtctcggcctcgcggtgcagggtgtaccttctaatgaaatacttaacatattgtccagcattcctg

SEQ ID NO: 775356 - DNA, 100 bp, Homo sapiens
atcatctctgtgcactgataataaccctgcagtataaatcaaagccattctgtgaaaaactgctttcctgggtgaaaagcagtggctgtgccagagtcat

SEQ ID NO: 775357 - DNA, 50 bp, Homo sapiens
gaatgggttgaacttttcacaggctgaccaactgactgaagagcagattg

SEQ ID NO: 775358 - DNA, 83 bp, Homo sapiens
atccagcctgcggagcctgtggggcagttctggacttcagtgaccccttcagcactgaagtgaagccgagaatcctgctcatg

SEQ ID NO: 775359 - DNA, 75 bp, Homo sapiens
ccgctctccagcccgcttgaacggattttttatcaagcagaaatgcatcgaacaacgagaatcaagatcactgag

SEQ ID NO: 775360 - DNA, 98 bp, Homo sapiens
ggaatatgaagcaacatgagatggtggatgaacccacagatacttggtgcttgaaaaactgaagaaggaagacgctgaccgaattcatatattcagtt

SEQ ID NO: 775361 - DNA, 100 bp, Homo sapiens
tggcagaactgtagcacctcttcctcaggaaatgtccaccactgtttctcatcatcaccaaacggaaagaccacagcaagattctttcattcgtctcctc

SEQ ID NO: 775362 - DNA, 98 bp, Homo sapiens
tctaaagtggactgcattttgccgtcaggttctgaacagctggtagatgggctggcttactgaaggacatgattcagactgtcccggacccagcagct

SEQ ID NO: 775363 - DNA, 100 bp, Homo sapiens
tgaaattttgtctgatgactactcaaagatcaccggcgtaatcaacccagcgttggacaaatactttccgtcagactctggagtgagaatcatagctgag

SEQ ID NO: 775364 - DNA, 74 bp, Homo sapiens
ttccagacgaccacgacgaggccggggtcacgtcccgctcccggtcccctcggaggagagcccactcccctgag

SEQ ID NO: 775365 - DNA, 82 bp, Homo sapiens
taaaatcctgctctggccggattccagactcgtgggggaaaggctggaggatttgacagctaaggatattgaagaaattatt

SEQ ID NO: 775366 - DNA, 83 bp, Homo sapiens
ccaccggagcctggcgcagcctccctctattaccagcagccagactgccttccgggtcactgccatggaggagccgcagtcag

SEQ ID NO: 775367 - DNA, 80 bp, Homo sapiens
gcgatggcgcagaaaccccgttgacaaggcactgctttttcatgacgtgtcttgggacaaggtgcgcattcctggtgtgc

SEQ ID NO: 775368 - DNA, 89 bp, Homo sapiens
gtgtttgggaatgattctgatgatgatgatgaggtggccattttatgtcagttcctcagagaaattgactacaaaacagcgtttaaatc

SEQ ID NO: 775369 - DNA, 101 bp, Homo sapiens
ccatttcacatccagcagaggaggcgggggcagccgctgagacggtttttcacaagctgacattatctctacggtagaattcaaccacacgggagaattac

SEQ ID NO: 775370 - DNA, 97 bp, Homo sapiens
tgccgcgccccatccgcaacctggaggtcaagttcaccaaggttggtgttcgaggaagagacattgttgttcttggtgtggagaagaagtcagtggc

SEQ ID NO: 775371 - DNA, 85 bp, Homo sapiens
acggtcatagacagcaccatacaatcagggtgaaaatcctatttataagagtgccgtaacaactgtggtcaatccgaagtatgag

SEQ ID NO: 775372 - DNA, 87 bp, Homo sapiens
gccactcgcccctggcctcgcgggccgtgtctccggcatcatgtgtgcatgccaatgaagatgtggaaagaatgttactaggaaaca

SEQ ID NO: 775373 - DNA, 83 bp, Homo sapiens
aatcacacgcataatggatgaaaggaaccgacagaccgcaacagatgaccaaggaagtttgggattatgttttcttcaaggag

SEQ ID NO: 775374 - DNA, 90 bp, Homo sapiens
aaaacactctttaagattccaagaaaagcagcatctgttatagcaaaatacccacacaaaataaagagtggagctgaagctaagaaattg

SEQ ID NO: 775375 - DNA, 100 bp, Homo sapiens
tgtttggctgcccaggctcgcctcgactccaaatggttgaaaacagatatacagaaaaacaggatgaagttgtctattacgatccatgtgaaagtccaga

SEQ ID NO: 775376 - DNA, 83 bp, Homo sapiens
ccgggacagctaccggcgcatccttatggcgtccgagctgggccacagcctgaacgagaacgtcctcaagcctgcgcaggaga

SEQ ID NO: 775377 - DNA, 75 bp, Homo sapiens
gctgacgtggctcttgccctggcaagtgctgcctcccaaaatgttcgaagcattcagcaaacaatggcaaggcag

SEQ ID NO: 775378 - DNA, 100 bp, Homo sapiens
ccgcaattacggccccgaggtgtgggaagacatcaagtactaggttttgacaagcttgcatcatgcgtgagtataagctagtcgttcttggctcaggagg

SEQ ID NO: 775379 - DNA, 100 bp, Homo sapiens
ccaagatccactaccggaagaagaaacagctcatggccaacgcagagagccaacagcagagagaacaactggaacgccttcgaaaagatatgggttctgt

SEQ ID NO: 775380 - DNA, 80 bp, Homo sapiens
ccaggccatgaagagtcctgaccacaatggggaggacaacttcgcccgggacttcatggcataatcaccagcaacacccg

SEQ ID NO: 775381 - DNA, 51 bp, Homo sapiens
cgagaaccgtcagtttgagccagatgttctggagagtcttggcttctggga

SEQ ID NO: 775382 - DNA, 74 bp, Homo sapiens
aaaaattggatgtggcaattttggagaattacgattagaatgaaggcaggagaccttttaaaattgataatgat

SEQ ID NO: 775383 - DNA, 100 bp, Homo sapiens
aacaacaggggtaccaacaatgtcacttcacacgcctccatctccaagcagccctgtgtgtccaaatgctgggagaacatcaccccttggatgaattgcc

SEQ ID NO: 775384 - DNA, 74 bp, Homo sapiens
gtggcatctgcctaacgttcacttcactcacggttttggcacaaataccagtgggaatagtatttttggaagta

SEQ ID NO: 775385 - DNA, 73 bp, Homo sapiens
ggaacctgctcaaagccctgggtcgcttggaagaagccaagacttcacagagaatgcagttgtcttgacttca

SEQ ID NO: 775386 - DNA, 90 bp, Homo sapiens
gatccatctgcaccacggtgctgatgagcagcaccagcagtaagagggctccgaccacggcaacccagaggctgaagcaggactaccttc

SEQ ID NO: 775387 - DNA, 100 bp, Homo sapiens
ggatatgcccttgactataatgaatacttcagggatttgaatgacacagcattgttggttttgccatgtactattttacctatgacccgtggattggcaa

SEQ ID NO: 775388 - DNA, 88 bp, Homo sapiens
cagcaccagcaacagtggcaatgagaccagtggaagcagcaccatcggggagacaagcaagacagtcattttgtttactcattcagcc

SEQ ID NO: 775389 - DNA, 80 bp, Homo sapiens
tcttccccagctctgcagccacatactatccgtttgttcaggaaccaccagtgacagacattttgaaagcgaagcagaag

SEQ ID NO: 775390 - DNA, 100 bp, Homo sapiens
tgaacgaaccctggccacactctcaggtcacgagaagagaatgccttctagatgcaaaatcacctccaaaccagaccacttttcttgacttgcctgtttt

SEQ ID NO: 775391 - DNA, 113 bp, Homo sapiens
ctgcgacgttcacagaggaacactgccggggcccaaccacaagacgactcaataggaggaagcactttcagaccatgctgaagtctaaattgaatgtcttaacactgaaaaag

SEQ ID NO: 775392 - DNA, 100 bp, Homo sapiens
ttccgagtgccaggcgccggccggctgcgaagacgcggtgggccgcccctccgtgaaatcaaatacattgcccatctcgctgcagtctataagaagtagc

SEQ ID NO: 775393 - DNA, 50 bp, Homo sapiens
cccgaactcgctggaggacaagatatacagatatggagagtgaagattac

SEQ ID NO: 775394 - DNA, 100 bp, Homo sapiens
cacagacagtgaagatgagatggagcctcgccttaagccagtcttcattcgaaaatgaggacggggacttggttgccttttccagtgacgaggaattgac

SEQ ID NO: 775395 - DNA, 82 bp, Homo sapiens
tgctggcgccgcgacctccggatgacccgggcttcggcccccaccagagactcggttatggaaacaaaggacatgctttaca

SEQ ID NO: 775396 - DNA, 75 bp, Homo sapiens
ctgccttgtacccacatctcccgccaggagcagtctcacaggtgctggacagcctggaagagattcatgcgctta

SEQ ID NO: 775397 - DNA, 75 bp, Homo sapiens
taacccttattggacagctcttccaagtaccctagaaaatgcaagtggaacagatgtgcattcagattaaagaag

SEQ ID NO: 775398 - DNA, 99 bp, Homo sapiens
aggagctcagacaatttctgtccagcaacatgacagcaagctcaggctggcctgatcacttgaacggacatatcaagcaggtgcacacttctgagcggc

SEQ ID NO: 775399 - DNA, 100 bp, Homo sapiens
aagctcctggccctggccctgatcatcctgctgggcttcgtccagatcgggaaggcgggctgacgcacgaggcacacaggaaggaggtggagcaggtgta

SEQ ID NO: 775400 - DNA, 101 bp, Homo sapiens
ggaggccggccggtgccagcacctttcggcttctgagacggcggcagcagcggcattcaggtcggagctcttaggcctgctgaaaacctacaactgctacc

SEQ ID NO: 775401 - DNA, 75 bp, Homo sapiens
ctgcatcctccctatggcactggctcgggttatgtatgattttgctgctgaacctggaaataatgaactgacggt

SEQ ID NO: 775402 - DNA, 111 bp, Homo sapiens
aagctctgctcacgtttcccttcctccatatttactggacagagtgctgtacacgaatgcagagtttgagtccagatcccaaagcccagtacacaagtatctacggagccc

SEQ ID NO: 775403 - DNA, 96 bp, Homo sapiens
attacctcttttttgctctccctcgagaagctccagatggcgtcttccgtgggcaacgtggccgacagcacagggaatctaagggaggaaattatc

SEQ ID NO: 775404 - DNA, 100 bp, Homo sapiens
ggagcccgcggccaaacggtgcctgcggtgcctgagctgagtgaggccgaggccgggaggccgtgcccggagattcgacttccacctgaagtaaatcgga

SEQ ID NO: 775405 - DNA, 75 bp, Homo sapiens
tgatggaatgcttgacagagatgagtttgcagttagaagcatgccatagggacattgtgaatttgcaagtggaga

SEQ ID NO: 775406 - DNA, 78 bp, Homo sapiens
atcaacaatgctgacttcatagtgcctatagagattgaggggaccactcaccagagatgccctgcccagagaggagga

SEQ ID NO: 775407 - DNA, 50 bp, Homo sapiens
ttgggaggtcggcggccccaaaagtgtctggggaagccaatgaaactcag

SEQ ID NO: 775408 - DNA, 82 bp, Homo sapiens
gtacggccagatgtacatcaaggcctccggcagctatgcagcacaggaagtcctggagaacctgaaggaccgctggtaccag

SEQ ID NO: 775409 - DNA, 83 bp, Homo sapiens
aagacggaggacgagctgcgggtgcggcacctggaggaggagaaccgaggtagttaaaccagagagcaatgacaaagaaacag

SEQ ID NO: 775410 - DNA, 82 bp, Homo sapiens
agctccaggccggtccgctgccaggtttggtgcacctcgatttggaggaagtagggcagggcccttatctggaaagaagttt

SEQ ID NO: 775411 - DNA, 100 bp, Homo sapiens
tatatgatttggattttcctgccttaagaaaaaacaaaaatattgacaactttttaagcagataaagactctcacaactcctgaagaaattatttgaaac

SEQ ID NO: 775412 - DNA, 74 bp, Homo sapiens
gagaggaactggagcaattgaagctgactactaaggagaataaggcctaaatgtgcacagcatgctcaagcacc

SEQ ID NO: 775413 - DNA, 75 bp, Homo sapiens
atcagctcctggttcaacgaggccattgacttcatagtttttatggcacaggcctcatcgcgggccacggcttca

SEQ ID NO: 775414 - DNA, 54 bp, Homo sapiens
gttgccgcagccccaggctgagacaggatggagtccacagagaagtgtgaagcc

SEQ ID NO: 775415 - DNA, 147 bp, Homo sapiens
tccacctacctcaacaacccgtacgtgcggaaggccctcaacatcccggagcagctgccacaatgggacatgtgcaactctagaggacaaaatcccagtccttggcacaaactcaggaaatggaagccggagtctgttttttgtggg

SEQ ID NO: 775416 - DNA, 101 bp, Homo sapiens
gctccgtggccttagctgtgctcgcgctactctctctttctggcctggaggctatccagcatccagagacaatggccccgatgggatggagcccgaaggcg

SEQ ID NO: 775417 - DNA, 80 bp, Homo sapiens
tacaaatacccctttgaattaattatggctatgcaggtttattctttccatctttcaatgggaattcctatttagaactg

SEQ ID NO: 775418 - DNA, 100 bp, Homo sapiens
tgaaagggaaaagcaggcagcattagaggaagaacaggcacgtttgaaagctttaaaggagaaggaagccaacatccttttggagccatgaatattgtcc

SEQ ID NO: 775419 - DNA, 82 bp, Homo sapiens
gtgatgtcttccagactcggtgctgtacccgccacatttgtccgactccataaccagaagactggccaggaagtggtgtttg

SEQ ID NO: 775420 - DNA, 75 bp, Homo sapiens
ccaggaagatgtggctgtcatctgctcagggctctctttacctatgaaggcaacagcaatgacatccgcgtggct

SEQ ID NO: 775421 - DNA, 100 bp, Homo sapiens
ccggactcctccaccaccatcctccacctttccgaaagcttccagcgagtcctcttatctaagtatcctaccaaaggttgggataattcttcactattcc

SEQ ID NO: 775422 - DNA, 83 bp, Homo sapiens
ccggagccgggtccccaaccgacgatggagggagacgtgctggacacactggaggcgctgggatgccgacaaaaggatcaagg

SEQ ID NO: 775423 - DNA, 100 bp, Homo sapiens
catgactatcctcatagagtggccaagtttccagaaaacagaaatcgaaacagatacagagatgtaagcccattttacaggctggtaacctacatctttg

SEQ ID NO: 775424 - DNA, 101 bp, Homo sapiens
ctgggagaatatttaatggaaaatcgcttggttaaaacctgacacttttaacaggagcgggacggtatgcgggccatcctggggtcctacgacagcgagct

SEQ ID NO: 775425 - DNA, 100 bp, Homo sapiens
gttgcttttgaccagaatgctttggttaaacgaatcaaagagagcagcggaaagagctcagtgctagaaagcctggtggggagggacctgcttcccagag

SEQ ID NO: 775426 - DNA, 100 bp, Homo sapiens
gcgcccacttggcgggccctggctggggatgtgcgaggatgggagtcccagcttctggagacggggttcctggggatcttcctgtgccctctgtggacgc

SEQ ID NO: 775427 - DNA, 78 bp, Homo sapiens
aggacgtgtgaagtcattaaggatggcaggcagccttaagtgccttgaaacaattttctgaacaaggactggatccaa

SEQ ID NO: 775428 - DNA, 75 bp, Homo sapiens
cgacgacgtgctgttcgaggatgtgtacgagctgtgcgaggtgatcggaaagtggtgaaaactattggcttgagg

SEQ ID NO: 775429 - DNA, 82 bp, Homo sapiens
aagcactgcgcctctcgatccagacggactcccctgtgtgggtgattctgagcgagttggaatcgaagcctcttaaaatggc

SEQ ID NO: 775430 - DNA, 75 bp, Homo sapiens
gaacaccgcacaggcaggaggcatggccaaggtgaaaggtgtagcagtcactcggcctacacccacagcatcgac

SEQ ID NO: 775431 - DNA, 74 bp, Homo sapiens
gacgcaatccctcaactacggctgcatcgttgagaatccacagacacacgaggactttgaagaatatcctgaac

SEQ ID NO: 775432 - DNA, 100 bp, Homo sapiens
cagatgatacctttgatccagaacttgcagcaacaataggataaaatggaccagttgctacagatgctgcaaagtacagaccccagtgatgatcagccag

SEQ ID NO: 775433 - DNA, 127 bp, Homo sapiens
atctttgctcttccatccgcctttgatcgtcttcctcttcagccatccaggacagagcgggatgccaccagcttgtccaaagggaagttccaggagctcctggtgggcatcgttgtggagaatgacg

SEQ ID NO: 775434 - DNA, 100 bp, Homo sapiens
ttccagctcatctgtgtgctggccatcatcgtacccattcccaagtcccacgaggcgctctgctgtgtgcgtgcaccagctgcctccaggccaactacac

SEQ ID NO: 775435 - DNA, 51 bp, Homo sapiens
gtacctgttaccactttcaaaaggccaaagcacgttgttgttaagtttgtg

SEQ ID NO: 775436 - DNA, 83 bp, Homo sapiens
atcagcatcatcgacacccccgggatcctgtctggagagaagcagcggatcagcagagggggatatgagactttctactcgga

SEQ ID NO: 775437 - DNA, 100 bp, Homo sapiens
tacgaatggaactgttttgtcttcctgtatgacacagacagggatacacacaaatccatgtttttaccagtcttcagagaagagtcagctcttaccattg

SEQ ID NO: 775438 - DNA, 117 bp, Homo sapiens
aaggtctccgcggcagccctcgctgtcatcctcattgctactgccctctgcgctcctgcatctgcctccccatgtgtgtagaccacactccaaaactgaaactgtggatggcagcca

SEQ ID NO: 775439 - DNA, 90 bp, Homo sapiens
ttttacataagaagttacctttttcagggattaaagcctgtggtttccacagaagcaccacctatcatatttgccacaccaactaaactg

SEQ ID NO: 775440 - DNA, 73 bp, Homo sapiens
cgacccatcaaggcttctgtcatcactcaggtgtttgagaagtcccccctgcgggtgaagaacttcgggatct

SEQ ID NO: 775441 - DNA, 75 bp, Homo sapiens
ctgacccagatcgacagcgagcccggatctcaaagatttcatgagacaagctggggaagtaacgtttgcggatgc

SEQ ID NO: 775442 - DNA, 99 bp, Homo sapiens
gcaagagcaagatcaccgtgacatccgaggtgcctttctccaaaagatcctgcaccagttcaacttatagttcagtttttggaacaggcttccaaacct

SEQ ID NO: 775443 - DNA, 90 bp, Homo sapiens
gtaagatggggttatgtcgctatgaagtttgcacaggttgtctgcattcaaaagagcattctattaaagctaccttaatttggcgcttat

SEQ ID NO: 775444 - DNA, 111 bp, Homo sapiens
atcctgccgtccttctccactttcgccagcccgtgccgcgagcgcggcctgcaggagcttgctatggcatcgttcaggtgccaacgggaccctggttctgccggaaatgtg

SEQ ID NO: 775445 - DNA, 50 bp, Homo sapiens
tgacacacttctaccccctgatggatccaaaattaacgggacaggctctt

SEQ ID NO: 775446 - DNA, 76 bp, Homo sapiens
cggcgctcggcgatggtaggcgtccctggagcggccgccttccagcgacacaactcagatgggaagttcatcgccc

SEQ ID NO: 775447 - DNA, 88 bp, Homo sapiens
ggcccgcgggggagccccgggagccgcacgattgagatagagagaagcctgtattcagaccacgagcttcgtgctctggatgaaaacc

SEQ ID NO: 775448 - DNA, 83 bp, Homo sapiens
tccacagccagtatgctcccctgctggaagtgaaggaactcctaaaggatgtaatccctgttcattactacttaatacctcca

SEQ ID NO: 775449 - DNA, 100 bp, Homo sapiens
cgccgttctcctcttgtctacgtgctggacccggatatgttcaaggaatgagtgatttactttcccctcttttatatgtgatggaaaatgaagtggatgc

SEQ ID NO: 775450 - DNA, 101 bp, Homo sapiens
gcctgggtttgaattgtgcggtttcagtatgccaccacgggctgttccctgaccctgcaccatacggagaaaccagaacatgaagacatatgtgaataccg

SEQ ID NO: 775451 - DNA, 74 bp, Homo sapiens
gagaacgacgaggacgcgttgctgcggcgtctgcgaggcccgagggtcgcaatggaagaagagatcgccgcgct

SEQ ID NO: 775452 - DNA, 75 bp, Homo sapiens
cggcctccgtaatgagagcccggaaccactctttgtgccgcagcttcgcaggttcactgctggcctataatacaa

SEQ ID NO: 775453 - DNA, 82 bp, Homo sapiens
ctttggcgtgctgggcctggacctctggcaggtgtgaagcttacactctctgctctggtagatgggaagagcattaatgctg

SEQ ID NO: 775454 - DNA, 87 bp, Homo sapiens
agatattgcagatagaagtcaagttgaaccagcagacttaaccaccaccatgtcgagcaaaagaacaaagaccaagaccaagaagcg

SEQ ID NO: 775455 - DNA, 80 bp, Homo sapiens
gtggcctccaatgcctacggtgtggcccagagtgtggtgaacctcagtgtgcacggagggccctcctggacccgggagcg

SEQ ID NO: 775456 - DNA, 82 bp, Homo sapiens
caggaagcgatccggagggcgcagattggtgctgaagacatggacggcttccaggcagacacggaggaggaggaagaggagg

SEQ ID NO: 775457 - DNA, 80 bp, Homo sapiens
gcacctcatcccctggatgggggaccacaagatcctcatcgacagggaacggcaggagcagctgatgggatatcggaaga

SEQ ID NO: 775458 - DNA, 100 bp, Homo sapiens
tgcctgtgtttccgcagcgagagcgaggaggagggagcccagtggaggcgccctcccgaagcgccactgcccatgctgaccacccagccctccggctgct

SEQ ID NO: 775459 - DNA, 74 bp, Homo sapiens
ccattccaatcccttctcttccagacaaacaagtcacagtgagattagtcgcctggacctgggtctaagtgtgg

SEQ ID NO: 775460 - DNA, 75 bp, Homo sapiens
tgacggaggagcttgtaccaccgactatgccagttactaccagggcctatgggattgccatggtgaccagccaga

SEQ ID NO: 775461 - DNA, 100 bp, Homo sapiens
caaagaacttactgattcttgagggaagtcgagacaacatgagtgtgattttgatctgttttccaaatgcacccaaagtatcgccagaagcagtgaagaa

SEQ ID NO: 775462 - DNA, 89 bp, Homo sapiens
cagactacggacctgtctgggtctcagccgccaaagaccccgtccggtaggaacaagatcactcaaggtgaaggataatctactaatac

SEQ ID NO: 775463 - DNA, 99 bp, Homo sapiens
ctgcgaccccagtcatgggccagacctcggtgtccacgctgtccccgcagcccggcagcgattgagaaaatcatgagttctattggagaagggattgac

SEQ ID NO: 775464 - DNA, 50 bp, Homo sapiens
aaaaaggattgccacagtcccgtattacaatgactatggtgatattatta

SEQ ID NO: 775465 - DNA, 73 bp, Homo sapiens
cgcacgtgtaccctgggcgcagggtaggtggcaagtgggagaaaccatcagaaattttggaaatcaaaggaca

SEQ ID NO: 775466 - DNA, 100 bp, Homo sapiens
agtaaacctaattctgcccttgatgtcacaggatctcttgaaggttataaacaacttgtgaaatgagtgatttggaagatgatgagacaccccagctttc

SEQ ID NO: 775467 - DNA, 82 bp, Homo sapiens
gcaaatgcagcatttttgataggtgcctatgcaaagctgaacatggttatgcctccatgttaccatacaataacaaggacag

SEQ ID NO: 775468 - DNA, 75 bp, Homo sapiens
gttctgccggaatttgaaaagtgcctgtgcagaccatgaattacgtggggcagttagccggccaggtgtttgtca

SEQ ID NO: 775469 - DNA, 101 bp, Homo sapiens
aacgggtcatttggtcatctgcatgcccaaggtggtgctgtgggtcggcctgggcgtcctggtggtgagcactgtcaccacactgtctgtgagcgaggagg

SEQ ID NO: 775470 - DNA, 82 bp, Homo sapiens
ccctgaaggtaccgcggacctcgccccgggacagcgaggagctgagggaccctacaatgcagatcttcgtgaagactctgac

SEQ ID NO: 775471 - DNA, 100 bp, Homo sapiens
agagtctgtgcagtggcacctgcgcgaagctggccaaagcctgcccagacggctcacctgtgcgggatggaacaaaaggaccgtgcagagagagctgctc

SEQ ID NO: 775472 - DNA, 75 bp, Homo sapiens
cctggattcaatgtcatccagagcccagagcaggttaccacattctcatctggagccaggaggaagccaggacac

SEQ ID NO: 775473 - DNA, 100 bp, Homo sapiens
agaacctctgtagccttgcttctgagagtgcaggtttgttacaggtgatgttctgcaccctgaacacccacaaagtggacatggacaagctcctgggggg

SEQ ID NO: 775474 - DNA, 75 bp, Homo sapiens
cccaagcaaaggatcatccccttcctcccagccccatctgtgacttcctagaactccagcgccgttaccgcagcc

SEQ ID NO: 775475 - DNA, 50 bp, Homo sapiens
gacccgtggccttgtgtttcagattaccttaacatccacgtggaaagaag

SEQ ID NO: 775476 - DNA, 84 bp, Homo sapiens
accgagaccgcggccgggaccgaggaattggctgtgaaaggactgaggcagccatctgggggtagcgggcactcttatcagagc

SEQ ID NO: 775477 - DNA, 100 bp, Homo sapiens
ctagactcagtcgccttcatggaatgtcttcaaagaatattaaaaaatctggagggactccaacttcaatggtgatctgcaactctttcaccatctgtaa

SEQ ID NO: 775478 - DNA, 85 bp, Homo sapiens
tgcagtatttctttggcatcactgcagctagtaatttgccttctggattgtatgatctcgtgaaaccttgagagaaactgaatga

SEQ ID NO: 775479 - DNA, 82 bp, Homo sapiens
ttcagttgctgtgaaaagggatgtcatgggaagccagtgaggtagtcagctatcatggtgaacttacttcagattgtgcggg

SEQ ID NO: 775480 - DNA, 75 bp, Homo sapiens
ggcattgtcgtgtcagcttttggactccctattgtatttgccagagcacatctgaccacagagtattcagccatg

SEQ ID NO: 775481 - DNA, 100 bp, Homo sapiens
ccaggtggagagtgataagcttcgaatggacagagccatccctgacacccggcatgaccagaaaatgtttataggaggccttagctgggacactacaaag

SEQ ID NO: 775482 - DNA, 103 bp, Homo sapiens
cgggcgtggacggtgtggggcggtcccggccccgcaggctgaaggtgatgtggccgccctcaaccgacgcatccagctcgttgaggaggagttggacagggct

SEQ ID NO: 775483 - DNA, 100 bp, Homo sapiens
ctacgtccgctgctgctgcccggctcgggcctgagcgccgagcagtttctccttggaccaagatgactgatggaaaactctccacctctacaaatggcgt

SEQ ID NO: 775484 - DNA, 89 bp, Homo sapiens
ccaccgacagagacatctggaagccggagctagtggaagagtgtcatggctgggtgaagagcctgtggctggggtgtggtcagagaagg

SEQ ID NO: 775485 - DNA, 82 bp, Homo sapiens
tcccgggtcgtctttcgtgtggccgcgaggacccggtcagcccaaggagcaggggtccagcagctctgcggaggcatctgga

SEQ ID NO: 775486 - DNA, 82 bp, Homo sapiens
aagaggagtggagtaggggggacgcggcggcggcgttgacaatgtgagaaggcaaccaaagtgcaggacatcaaaaacaacc

SEQ ID NO: 775487 - DNA, 83 bp, Homo sapiens
cttgcatgtatttggaacaaaaaaaggagatgcctggcagccccgctctctgcaaatcctcactatggatgggctcattgagg

SEQ ID NO: 775488 - DNA, 75 bp, Homo sapiens
ggagaacgcggctaaagttctgatggatacttttgtggaactctatgggaacaatgcagcagccgagagccgaaa

SEQ ID NO: 775489 - DNA, 90 bp, Homo sapiens
aaggaagagttaaaagcagagttagttcagtaataaaagactagtggccttagtgcccatgcccagtgaccctccattcaatacccgaag

SEQ ID NO: 775490 - DNA, 100 bp, Homo sapiens
tggcattcgatcctgcgcaatgggctggtcaatgcatcctacaccaaactgcagaaactcccacgttaacccacgaaaccttcaaagcactgaagccagg

SEQ ID NO: 775491 - DNA, 75 bp, Homo sapiens
gaagataaagccaggcaaggggtgatgccacactcaatcagaaactatgctactgctgaagaggtatattgagcc

SEQ ID NO: 775492 - DNA, 80 bp, Homo sapiens
ccaccatgtctgggagatggaagcgaaaactgaccgggacctgtgcaagccggtactccaaagattcaggtttactcacg

SEQ ID NO: 775493 - DNA, 100 bp, Homo sapiens
gcctgagatgatcccagctgtgctctggacagggccagaagcctgtcttagatgttcatgcagaactagacagaattacacgaaaaccagttacagtttc

SEQ ID NO: 775494 - DNA, 83 bp, Homo sapiens
ggaagctcaccccgaggaagtctctcgccacggcttcacaggctgctcaagaagccgagatcaatgccagaaaagccaaaaac

SEQ ID NO: 775495 - DNA, 50 bp, Homo sapiens
cgaggactccagcacaccgaggttatgcaaagggtgacctggacatatct

SEQ ID NO: 775496 - DNA, 56 bp, Homo sapiens
cagctgtcctaatcctcactgccgaaaggctgaacatcttcatcttgagagaggaa

SEQ ID NO: 775497 - DNA, 100 bp, Homo sapiens
cgcagatcggcgcccagcaatcacagaagccgacaaggcgttcaagcgaaaacatgaccgctgagcccatgaggttcagattcagaacaagaaagtggac

SEQ ID NO: 775498 - DNA, 100 bp, Homo sapiens
gaatccattgtaactgaaaggccacaattcagcagacaaaaagatttccagcagcaacaggacagtcattttgtttactcattcagccctgttgcaggtc

SEQ ID NO: 775499 - DNA, 98 bp, Homo sapiens
gcctggcgctcttcgacttcctgttgcaggaggaaatgagtctcaaccagacagccaggaagacccccgagaagtacttaaaaaaacattggaattct

SEQ ID NO: 775500 - DNA, 90 bp, Homo sapiens
acggcccagtgcagggcatcatcaatttcgagcagaagatgtataatttcaccagtttcactgtgagcctcaacgagctggagacaggca

SEQ ID NO: 775501 - DNA, 100 bp, Homo sapiens
tggatagaataagtgaaacacggaaactgagtatgggatctgatgatgctgcctacacacaagtactatactggcaattgctggagaagattttgcaatt

SEQ ID NO: 775502 - DNA, 83 bp, Homo sapiens
ccgggagatcccaggcggtgacagagtggagccatggctagagctacgagttccagggagctctgtcctggtgaccgtgcccg

SEQ ID NO: 775503 - DNA, 107 bp, Homo sapiens
ggctacctcgtggacaagtttgcagatcgggagcgcaaggtcgccctcaaggccatgatcaaaacgctaatgacaaactatgtgaccttcatggtgggggagattct

SEQ ID NO: 775504 - DNA, 90 bp, Homo sapiens
ttggagagagcagacgccttctggattcaagaagacgaggtccataacttagtggcaattgaactggcttatatcaacacaaaacatcca

SEQ ID NO: 775505 - DNA, 75 bp, Homo sapiens
ggagaaatggatctactactgcaatggccatgacagtgatgtgtgttctgaaattgtgaaccatgagtctagtac

SEQ ID NO: 775506 - DNA, 75 bp, Homo sapiens
ctggcatgtgccttatgaccctcccttcaaacagtggccgagctgcagaactccttgccaaagaacagggaacag

SEQ ID NO: 775507 - DNA, 75 bp, Homo sapiens
gtactgcaccactgggaggacgtggagaggacagtgaacttccagtgtctccagaacgctatagctatggcacct

SEQ ID NO: 775508 - DNA, 90 bp, Homo sapiens
cagaaagagattgggtacttaatgggcaacgggcatgaggaggtagttgcatgcgcctgggatggacagacatatatcattgatcacaac

SEQ ID NO: 775509 - DNA, 100 bp, Homo sapiens
gttgtgggaagcccctgggaggccgaatgtgcaggatcaccgaggggaaagtgagcttgacagtctgcagatgcctccaaggagtccgaaaccaagtccg

SEQ ID NO: 775510 - DNA, 90 bp, Homo sapiens
cgggacgcccgcaccaactcctgcgcgcggtgaaagaactcttttcttctttgggagtcgaatgtaatgtcttggaacttgatcaagttg

SEQ ID NO: 775511 - DNA, 75 bp, Homo sapiens
cagtgacagacactcctgcaacccagttttccagccaccagtgggatgatgtgaaactggaacgccaagctgaag

SEQ ID NO: 775512 - DNA, 96 bp, Homo sapiens
gtcgatttgtccttcactacagttctgtggctcctgatggatctgagaagatggacgtggaggatgaaaatctgtctgattattttgaactgatgt

SEQ ID NO: 775513 - DNA, 100 bp, Homo sapiens
gggcccaagggcaccatgaagatgagcctcagggaacccagccagcacagcagcagcagccttgcctctatgagatcaaacagtttctggagtgtgccca

SEQ ID NO: 775514 - DNA, 83 bp, Homo sapiens
gttccccgcgctgcggcctggcggcttccaggcgcactaccgcgggaacggcaggagcagctgatgggatatcggaagagagg

SEQ ID NO: 775515 - DNA, 120 bp, Homo sapiens
gccctgggcccgacaggagctgcacaagctgctggacaaggaccctgacctgcctgtcgtcgtggtggccaacaagcagactggatacacgtctgtttaactacgcaaaaggtaatgctg

SEQ ID NO: 775516 - DNA, 100 bp, Homo sapiens
ccaaccccagccgaccttgagctccaggagttcgtctcttacgtctgcggaagtgcagctgcctcagttcttagcgcagtgctgccaatggaggtcctga

SEQ ID NO: 775517 - DNA, 88 bp, Homo sapiens
gcagagcccggattccgcgactgccggggcaccgcaggttttggactcgctgaagcgtgccgcagaatggaattcggcattgttccta

SEQ ID NO: 775518 - DNA, 100 bp, Homo sapiens
ggcaggtgttgtttcatcgttttttctactccaaatctttcgtcaaacacagtttcgaggtacatgtcccagagcaagcacacggaggcccgggagctca

SEQ ID NO: 775519 - DNA, 75 bp, Homo sapiens
cagcttttcagcaagctgtgaggactagtcatggcagaagacctccatgtggcgtgtggaaagaagaggaaccag

SEQ ID NO: 775520 - DNA, 48 bp, Homo sapiens
gcgaggtcaagctgctgctgctcggaccagtcctgcctctgttgtaga

SEQ ID NO: 775521 - DNA, 75 bp, Homo sapiens
atcgcccttcctgcccctcgaggctcaggaactggcagcaaatatgaagtctatggaccctgcctcaggttattc

SEQ ID NO: 775522 - DNA, 117 bp, Homo sapiens
caatgccaggaggtctggagaaaacgtgtcatcagtgcatttctaaaatcgccagcaatggtgtgtacattctcacgaccggcctgatccctgtgctggagaaagaacacgaccccc

SEQ ID NO: 775523 - DNA, 100 bp, Homo sapiens
aacctgaaaacattggaccacacaaagtcttactgcctccatgatgttccagtactttgtgaaggtggtgcccactgtgtacatgaaggtggacggagag

SEQ ID NO: 775524 - DNA, 100 bp, Homo sapiens
aggaaaatttcgatattgaagtgtcaaaatccatagatggaaaagatgtgaggatgaggatgatgaccttcagtatgccgatcatgattatgaagtacca

SEQ ID NO: 775525 - DNA, 50 bp, Homo sapiens
cactcggcttcatcaaggtcctcgagtggcaaatcgccattgctcgcgag

SEQ ID NO: 775526 - DNA, 100 bp, Homo sapiens
gttaaacaagacaacgctgaaggctcggtgcagcagccctgcaaagatccatcttcggttgtgaatccggcccggaatgcagccaccccttagagcaacc

SEQ ID NO: 775527 - DNA, 75 bp, Homo sapiens
cttactactatcctcattatctccaaaccaaggacaatgaaaagcgaaccccattgcacgccgcagcttaccttg

SEQ ID NO: 775528 - DNA, 100 bp, Homo sapiens
gatccgctgtattgtggagtatcagaacaagggccgcgggaacgagtgcgtgcagtcagtttaggggctggtgcaaaggatgagttgcacattgttgaag

SEQ ID NO: 775529 - DNA, 133 bp, Homo sapiens
ctcagacaaatacgatgttccccatgacaagattgggaaaatattcaagaagtgtaaaaaggggaataagtttgtggagtttgacatgaagccagtctgtaagaagtgctatgagaaatttccattggagctg

SEQ ID NO: 775530 - DNA, 90 bp, Homo sapiens
cgagcagctcttcttcgtccgtttggctctggcacgttttgggggaggtgcctgcaggacccaacatactcaatgagcttccagcgcaat

SEQ ID NO: 775531 - DNA, 74 bp, Homo sapiens
cgggaaatctccaagtcagaaagctgctacaggagctgagagaccctaccctcactttccgtctgcttggctcc

SEQ ID NO: 775532 - DNA, 88 bp, Homo sapiens
ttttaaactccctcttcaaaactcatctcctgggtgactgtaccaaatatgccccaacagcggcaagaccagcatcatcagagtgcca

SEQ ID NO: 775533 - DNA, 100 bp, Homo sapiens
agattttgtggtttatacttacaacaaggaagggactttaatcactgaccatcccaatatacagggcccagcactagaagatttcagtcatctgccacca

SEQ ID NO: 775534 - DNA, 101 bp, Homo sapiens
catctcattgccacggctgaaccctccttctcaatcttggaacagcacccccttctttaagattactacagcccggccatgctgggcctgaagaccgacca

SEQ ID NO: 775535 - DNA, 100 bp, Homo sapiens
ctaccacccaaccttgaggcacagtgaagacatcggtggccactccaataacagcaggtacaatgactcttcttgcttttcacctaagttgaataagcac

SEQ ID NO: 775536 - DNA, 74 bp, Homo sapiens
atcggcaagccccacactgtcccttgcaaggttttcagagtagagaacccatttgactttatggagaatatttc

SEQ ID NO: 775537 - DNA, 100 bp, Homo sapiens
agccatgggtcctcgacctgcagggagcagaggggacagaggcaccaaggacctccaagacagattattgccaagcgcctccccccagaccagctcatca

SEQ ID NO: 775538 - DNA, 100 bp, Homo sapiens
gatgctccctggtttgatccagcaatattcactattggcaagcctgttcttggaatttgctatggtatgcagttggtgcttcccgtgctgctgttgatgc

SEQ ID NO: 775539 - DNA, 100 bp, Homo sapiens
atgtatggtgtaggtgtggacatgtgggctgttggctgtatattagcagagttacttctaaggtcttagagtttgaaagagtctatcttgataatctccc

SEQ ID NO: 775540 - DNA, 101 bp, Homo sapiens
tctccatccccgaccgccctcttctgtcttgggccaagaccagcttcaagtctccatggtaccagaaaacaacaacctcacagcacctgaacctcaagaag

SEQ ID NO: 775541 - DNA, 90 bp, Homo sapiens
tgaagatgaagattcattgaagacgcttcgttatgggaagataatgattatgacagatcagagggctgtgctgaagtttgctgctgccac

SEQ ID NO: 775542 - DNA, 90 bp, Homo sapiens
catccggggttcaccccagcagattgaccacgccaagcagcttatcgaggaaaagatcgagtttcaccgggagaagtcggcctcttcctg

SEQ ID NO: 775543 - DNA, 100 bp, Homo sapiens
actgggcagagcttgaaataagtgattgctgacagaactggaatctcctgcttggtggccctttagctccaagctttggaagacaccaccggaaacaaag

SEQ ID NO: 775544 - DNA, 100 bp, Homo sapiens
aagacgccaggactccctggaagcctagaaatggtcatacttacctggttgcttgcgcatctagtaatgttggatcatattctggatgttttgaatacca

SEQ ID NO: 775545 - DNA, 83 bp, Homo sapiens
ctgtgtcaattcattgaccggatacttacagatgtaaatgttggcaccatgactcctgtgaggatgcagcactccctggcagg

SEQ ID NO: 775546 - DNA, 119 bp, Homo sapiens
cacaacgaggctgcaagagagatcctcctgatgcccactccagggaagcatgggtgatggcttggacaacagtgtagcttcccccagcacaggtgacgatgatgaccctgataaggaca

SEQ ID NO: 775547 - DNA, 80 bp, Homo sapiens
gagcgcccatcagatgaggactccaagagcacagagtccatcttcctgacccaggctttaccgccagcacctgttcagaa

SEQ ID NO: 775548 - DNA, 95 bp, Homo sapiens
aagctcatcagcgtggaggacctgtggaaggcatggaagtcatcagaaggtgctggagaatctggtaaaagcaccattgtgaagcagatgaggat

SEQ ID NO: 775549 - DNA, 95 bp, Homo sapiens
agattcattcagtggtgttaaggattccaacaacaattccgatggcaaagccgttgccaagacaatgcagatcttcgtgaagactctgactggta

SEQ ID NO: 775550 - DNA, 76 bp, Homo sapiens
caggaaacatggcggcggcgggtgttgtgagcgggaaggcttactgtggatttctccgtcctggagtttcttcaga

SEQ ID NO: 775551 - DNA, 75 bp, Homo sapiens
aaccccgaaaacgcaagaagcgtgaatcagagatcattgatttcttcctgggggcctctctcaaggatgaggttt

SEQ ID NO: 775552 - DNA, 71 bp, Homo sapiens
agcaaatacaatgagaacatcacttggaccaaatggtggtgatcgtggcagaggtggccctggtggcatgc

SEQ ID NO: 775553 - DNA, 95 bp, Homo sapiens
ctgatcccaatggattgcatccacattccagagagcatcatcaagtacaggtttgcagattccgccagcagcacagcaagctctacagatgagtg

SEQ ID NO: 775554 - DNA, 83 bp, Homo sapiens
ctgggccactcccgggcatctgtgatctggcatcggacacaggtgatcgtgcagtccggccgccaccccacagtgctgcagaa

SEQ ID NO: 775555 - DNA, 82 bp, Homo sapiens
gccgagttcaacatcctcctggccaccgactcctacaaggtggcatggaatattcacatgggagagccgcatgaggccgccc

SEQ ID NO: 775556 - DNA, 51 bp, Homo sapiens
atgaagggcaagggccaaaatgatggccctcgggaccaaggatcacgtcat

SEQ ID NO: 775557 - DNA, 78 bp, Homo sapiens
ggagaggctcaagcgggacctgttccagtttaacaagtagtttatgccaacgtgacttcattcatacagatgaaccaa

SEQ ID NO: 775558 - DNA, 100 bp, Homo sapiens
gctccgggaaggggctgacggccgtgcccgaggggctcagcgccttcacccaagcgctagctccagagattatattggggttgccattttgtgaagccat

SEQ ID NO: 775559 - DNA, 88 bp, Homo sapiens
cagttctggctattgctcgaacaagattcaaaaacatgccacaggaaagaagtctccagcaaagagtcctaatcccagcacacctcgt

SEQ ID NO: 775560 - DNA, 75 bp, Homo sapiens
gatttccttgggtcttccggtaggagctgtaatcaattgtgctgacaacacagctagagttgggaagacatcact

SEQ ID NO: 775561 - DNA, 133 bp, Homo sapiens
cgccgagtggggctggaaacagacccggcgcccagcggtagccctccttgcgcctccgattcccaggtgatctgcaactctttcaccatctgtaatgcggagatgcaggaagttggtgttggcctatatccca

SEQ ID NO: 775562 - DNA, 75 bp, Homo sapiens
ctctgcagccacatactatccgtttgttcaggaaccaccagtgacagagttacaagcctgatgaagggaaacgag

SEQ ID NO: 775563 - DNA, 74 bp, Homo sapiens
ggcccggctcgacgccaatggagacgtctcagagaggctgtgcagctgctggaggactataagcatgggaccct

SEQ ID NO: 775564 - DNA, 100 bp, Homo sapiens
caacctctcccccggctccatcgacctcaaggacatcaacttccggccgcagatgtcccaggttctaaatggcttctaagaagttgggtgcagattttca

SEQ ID NO: 775565 - DNA, 75 bp, Homo sapiens
gtcaagcgaagccttgaaaaagctgccctgagacggtgtcccgccgaaagtcttcccaagggattgttgaagaaa

SEQ ID NO: 775566 - DNA, 100 bp, Homo sapiens
aggcgtcggcaggaggggaaatgtaagcagtgtggtaaggcagtggttgcaggaatccagcaggctcacgcggaacagttggccaacatgagaatccagg

SEQ ID NO: 775567 - DNA, 50 bp, Homo sapiens
aaacaattgaaggagtctataacacaaagagatcacaaaatggctcttct

SEQ ID NO: 775568 - DNA, 74 bp, Homo sapiens
cctaatggaggtctccagtttcgaagctggcagggcggagatgctggaccacgccgtcctgcttcaggtgatca

SEQ ID NO: 775569 - DNA, 74 bp, Homo sapiens
tctgtcgctcttgtgccctagcaccccgagaaccgtcagtttgagccagatggagttaaagttcctcgtaattt

SEQ ID NO: 775570 - DNA, 75 bp, Homo sapiens
ggtctacaccgaccagccgcacgccgaccggcgccgggagatcctggttactccacaggatccgctgaacatagg

SEQ ID NO: 775571 - DNA, 75 bp, Homo sapiens
cggcaggagaggtttgttccctgacaactttgtaagatactatactggcaattgctggagaagattttgcaattg

SEQ ID NO: 775572 - DNA, 100 bp, Homo sapiens
gagaacctctgaggaaaccatttctacagttcaagccgagctattgaccagtgcagagaagagagcagaaatgcagaaacagattgaagagatggagaag

SEQ ID NO: 775573 - DNA, 73 bp, Homo sapiens
agaattcacacagagccacctaggcatccgtgtcattctggaccttactcccaactaccggggtgagaactcg

SEQ ID NO: 775574 - DNA, 89 bp, Homo sapiens
agaaggagctagctgaaataacccttgatcctcctcctaattgcaggcattggaatggatacttgtgtcattcctttgaggcacggtgg

SEQ ID NO: 775575 - DNA, 75 bp, Homo sapiens
tgaccgctcctccaactaaccagatgacccctccggcgaaggtgtcctgccctcggcccgcggcccagccacctt

SEQ ID NO: 775576 - DNA, 90 bp, Homo sapiens
agcatcttgattagaagcaggaagtccaaggcttgcgagaaggtcatttccgtgggtcaaacggtcatcacgaagcatcggaacacccgg

SEQ ID NO: 775577 - DNA, 101 bp, Homo sapiens
ctggcagtaatacggactcttgtagataacagttcgacagaagtgtacagaggcttctggcaacacggattgccgtctacctgatgacctttctcatcgtg

SEQ ID NO: 775578 - DNA, 98 bp, Homo sapiens
gggacccgcactgacagcgggaggcagagggaggaacctggacgccggaagccgggaaatgattctggatgaaattgaagaacataacatcaaaatct

SEQ ID NO: 775579 - DNA, 100 bp, Homo sapiens
agccaggaaatatgcctttccgatcactggttccacctggccaggttggagtaatagatttttccctctaccttaaggatgtgcaggatcttgatggtgg

SEQ ID NO: 775580 - DNA, 75 bp, Homo sapiens
gacccccaaatcctaacatcccgatggcaagaagaggcccaaaagttttgagagtattttagaagggctttatgg

SEQ ID NO: 775581 - DNA, 75 bp, Homo sapiens
aggagaggtggcggtcccttagcacaggaggctctgaagtggagaacgaaggtacaggtttgcagattccgccag

SEQ ID NO: 775582 - DNA, 103 bp, Homo sapiens
taaggatcatgtctgcgagccaggattcccggtttggtgcacctcgatttggaggaagtagggcagggcccttatctggaaagaagtttggaaaccctgggga

SEQ ID NO: 775583 - DNA, 100 bp, Homo sapiens
ccggcctcgtcctcggcgccgccctgcgtggagccgccgccggccacccggttccagaaacgccgctggactgcgaggtctccctgtggtcgtcctgggg

SEQ ID NO: 775584 - DNA, 76 bp, Homo sapiens
aaatcccttgttaaaggaggtctgtgccggagggttcttgttcaggaaaatcctgccttgcttcgttgggcctatg

SEQ ID NO: 775585 - DNA, 82 bp, Homo sapiens
tttgccgtacccaccggagcctggcgcagcctccctctattaccagcagaaaaatatggctcaggagactaaccagaccccg

SEQ ID NO: 775586 - DNA, 74 bp, Homo sapiens
gacggcgttctggatctcaaagcgttaatagaagatgaaattgcaaccattcttaaatctacattgaaaggact

SEQ ID NO: 775587 - DNA, 83 bp, Homo sapiens
gcgagcagagaacttctttatccttcgaaggaagcctgtggagctttcaccaacaatcaccagtggtttacacaacattgcaa

SEQ ID NO: 775588 - DNA, 100 bp, Homo sapiens
ttccattattagacgttccctgccagcaacactaccacaggtattcttggctgaacagtttgagttccttcagccacatctggatgctgtgatgcctgca

SEQ ID NO: 775589 - DNA, 83 bp, Homo sapiens
tgcagcgggagctggacggcgagcgcgagcggcgcgagaaagagcggaaagaatgtcggagcgggccgcggatgacgtcaggg

SEQ ID NO: 775590 - DNA, 50 bp, Homo sapiens
aaaaatagtgatagctttgataagatcgcagtatgtggtagggaagtgat

SEQ ID NO: 775591 - DNA, 98 bp, Homo sapiens
agcaatgctgacctcggtttcctggacccattccgactcagaaaaattgtatggcgacttcttgagctggaagctagaggaaacccttgcccagttcc

SEQ ID NO: 775592 - DNA, 90 bp, Homo sapiens
gaacggcggcgggtacggcggccccgcgcagcccccggccgcagcgcaggcagcccagcagctgtgtcagcgtgttatgatgccgtcccg

SEQ ID NO: 775593 - DNA, 75 bp, Homo sapiens
ccgaactcaagctgcagtggttcgacaagctgctgatgactgtggccgccatggcatcagatgaaggcaaacttt

SEQ ID NO: 775594 - DNA, 100 bp, Homo sapiens
cttgtagggcgggagtttgtgaggcaatattatactttgctgaataaagctccggaatatttacacagatatgaagagaaggctactaaagacttggaac

SEQ ID NO: 775595 - DNA, 74 bp, Homo sapiens
caacagatgtatgctcatcagtattatatgcagtacatccgcacttccactaatagccaagtagacaagctgac

SEQ ID NO: 775596 - DNA, 90 bp, Homo sapiens
caagttcgctgacaggtccagttgcagatacaaacttggattttttccagtctgatccttttgttggcaattgcccccgaggaattagca

SEQ ID NO: 775597 - DNA, 110 bp, Homo sapiens
tggaacttcgttgcttgcttgcctgtgcgcgcgtgcgcggacatggcctcaaacgatgaaggatttgggggcagagcacttggcaggtcatgaaggggtccaacttctcg

SEQ ID NO: 775598 - DNA, 134 bp, Homo sapiens
gccggctgccaggcggcctgggctggggacctgccctcctcctccagccgcccgcttcctccttgccaggaggactcacaccacccggcaagaactgctcactacggctccctgccccagaagtcacacggccg

SEQ ID NO: 775599 - DNA, 100 bp, Homo sapiens
gggaaacgcagtggattatagctctgttttcttctttccaaaactgtgcacccctggatgaaatgggtaattccagaattgattggccataccattgtca

SEQ ID NO: 775600 - DNA, 75 bp, Homo sapiens
acaactggcatgcttacaggagtgaagttatcaggaactgttgccgttattacatcagatgggagaatgattgtg

SEQ ID NO: 775601 - DNA, 75 bp, Homo sapiens
cggggccaccctccccaagtccccatctcaggcattcccatcaagagcaccatggacaaccccaccaccacccag

SEQ ID NO: 775602 - DNA, 100 bp, Homo sapiens
ctcatgtgaatgtcaaggaaaagtgcaaaatggcaactcttaaggaaaaactcattgcaccagttgcggaagaagaggcaacagttccaaacaataagat

SEQ ID NO: 775603 - DNA, 97 bp, Homo sapiens
cgtgcacgtcacgtttgccggcgtgcccatccctcgcagcccctacactgtcactgttggccaaggctccaggaggccagagctctactgaagcggc

SEQ ID NO: 775604 - DNA, 82 bp, Homo sapiens
ttccggaaggactttggcgagggagcctcctcaacaagcccaagagtgagatgaccccagaggagctgcagaagcgagagga

SEQ ID NO: 775605 - DNA, 83 bp, Homo sapiens
gtccgacccgcgaacccctctgggatccccgccgctctgtctacaacccgagttcaaatctgaacatcaatgatgtactaggg

SEQ ID NO: 775606 - DNA, 99 bp, Homo sapiens
caaccattgacgccatgtcgggttattcgagtgaccgagaccgcggccgggaccgagggtgtcccgacccaggctaagcttgagcatggctgagcagga

SEQ ID NO: 775607 - DNA, 76 bp, Homo sapiens
cgacagcctcaagaagggcaccaaattcgtcaagtgggatgataacccagtgacttgattgtaaaaatttacagag

SEQ ID NO: 775608 - DNA, 100 bp, Homo sapiens
ctgcttggaagtgtgagtgcgcgaagatgcgaaaggtggttttgatcaccggggctagcagacctgtgcaacagacctgcagaccaaagctgaccgattg

SEQ ID NO: 775609 - DNA, 90 bp, Homo sapiens
caacgtcggtcagaaaatgaagagtttgttgaagtgggaagattggggccttctgattattttgatgttggagaagagcatcagtctcca

SEQ ID NO: 775610 - DNA, 82 bp, Homo sapiens
caatgtcaagcccgagcggaaaatgaagctagaggacttcatcaagaacctccgaggtttttagaacttcagccataaaaat

SEQ ID NO: 775611 - DNA, 82 bp, Homo sapiens
ctctcggcgccctggcgctgctcctgctgtccagcctctcccgctgctcagccgaggccagactcttggggtgaggacaact

SEQ ID NO: 775612 - DNA, 75 bp, Homo sapiens
ttaccgggttcgctaggctcacaggcattcctgcatcgcatccggcagaacgtggccgactcagtggagaagggc

SEQ ID NO: 775613 - DNA, 98 bp, Homo sapiens
aggaagatgagcaggactcagaggaggttcgggagcagattttaagagtaaaagaagatgagaatgttccatttctactggttggtaacaaatcagat

SEQ ID NO: 775614 - DNA, 100 bp, Homo sapiens
agcgacgtggctattgtgaaggagggttggctgcacaaacgaggctttatcctgtggataaacgcagagtgaacgagtttggggagtcctacgaggagaa

SEQ ID NO: 775615 - DNA, 100 bp, Homo sapiens
atgaccctcgtagtggctgcggcgcgggccgagaaggaagatgcacaaagcagggtcatcagaagcctctcgattcaaaagatgataataccgaaaaaca

SEQ ID NO: 775616 - DNA, 74 bp, Homo sapiens
gagcggacggctgcatttacggggtctcccggagggccagagtcgggagtggacatccgccataacaaggaccg

SEQ ID NO: 775617 - DNA, 74 bp, Homo sapiens
gtaaggccaaaaatgtgcatactcacagagttagagagagggatggtgcttctactggatatggttgggtcccc

SEQ ID NO: 775618 - DNA, 90 bp, Homo sapiens
gcggaacgaaagtgaacaggagccgctcttaggcgacacacctggaagcaggctttgatgcggcctggaagaattgatagaatcatctat

SEQ ID NO: 775619 - DNA, 97 bp, Homo sapiens
acggccccgagcacggccgcccggccacgcttccatgcctatggctgttctaaaattgggccaaatatatccatttcagagaggctttttctgtaaa

SEQ ID NO: 775620 - DNA, 124 bp, Homo sapiens
ctggcccagcagatggagaatagaccctctgtccaggcagcattaaaacttaagcaggaacgactgagacggctaaaccacagtgttgccaaggaaacagcccgcaggagagcaatgctggatt

SEQ ID NO: 775621 - DNA, 100 bp, Homo sapiens
catcagcttcagctccagctccgctctcttcggctgccccaatccccggcagctctctcagcttgaaggatgccaatgatgtaccaatccaatgtgaaat

SEQ ID NO: 775622 - DNA, 75 bp, Homo sapiens
cgcggctccggtcacgtcaccgtcataagctgtggccatgactactgaagtaggctctgtgtctgaagtgaagaa

SEQ ID NO: 775623 - DNA, 80 bp, Homo sapiens
ccgagccggggcgaagctggatcccctagcgagtaaccagctcataaatcacatcgaacagtttttggatactaatgaaa

SEQ ID NO: 775624 - DNA, 96 bp, Homo sapiens
gcggtgcttcttctccttggcatacagctcacaggcacatttcacattttatgcaaaacatcccttttccttcaccacaaagaccgagaatccttg

SEQ ID NO: 775625 - DNA, 82 bp, Homo sapiens
aggagcaggagcgggagcgggatccccagcaggagcaggagcgggagcggagatcctgaaggagctagacgagtgctacgag

SEQ ID NO: 775626 - DNA, 82 bp, Homo sapiens
cacagagcctcgcctttgccgatccgccgcccgtccacacccgccgccaggatattagaaatggctactccccagtcaattt

SEQ ID NO: 775627 - DNA, 101 bp, Homo sapiens
gctgccaggacctttgtccaggggctgactgtgggcagagaagttgcaaaccgagtttccaaggtctccaagctggctggtgtcttggtcaagcatggcat

SEQ ID NO: 775628 - DNA, 111 bp, Homo sapiens
atgcctccgccggggggctatgggcccatcgactacaaacggaacttgccgcgtcgaggactgtcgggcagcagcggctcccctgttgtatggacattctgcacccgaaac

SEQ ID NO: 775629 - DNA, 100 bp, Homo sapiens
aagtagcaggtgggatcgaggccattgtacaacttatcaacacaaggcagccacaggccaaaatcattgtattgactgaggctgatgtgaatccaaaggc

SEQ ID NO: 775630 - DNA, 100 bp, Homo sapiens
gccatgtagaagttgatgaatcaagaggaatgcacatctgtgaagatgctgtaaaaagattgaaagctatcatccaattatgatgggttttgaacccctt

SEQ ID NO: 775631 - DNA, 100 bp, Homo sapiens
tttggcccttgtggtctgttctgtagtcagcacaaatctgaagatggtgtcaaagagaaattctggttcacaaaaaggattctggcttttggcgagattt

SEQ ID NO: 775632 - DNA, 100 bp, Homo sapiens
catgaacaactacaaaggctatgaaaagaagccctattgtaatgcggattaaagcctgtggtttccacagaagcaccacctatcatatttgccacaccaa

SEQ ID NO: 775633 - DNA, 88 bp, Homo sapiens
tggggaacctgctcaaagccctgggtcgcttggaagaagccaaggctaaatttattgtgaagaaatcagaagatgaagaagacgccgc

SEQ ID NO: 775634 - DNA, 100 bp, Homo sapiens
gctgctgttcgctggtgggaagaaaagaggccagctctgcagccccctcggggacgcccccaccagctcaaattccgagtgcagaaaagaaaccggaccc

SEQ ID NO: 775635 - DNA, 100 bp, Homo sapiens
aaaagacggacagcccatcgtgtgaactatagagtttgtggacagatttatattgtgatggatgtaacagatataataaatggaaaagtagatgatgaag

SEQ ID NO: 775636 - DNA, 96 bp, Homo sapiens
atgtatgtctcacagttatgatgaatggtgtatctcctggatcttcctcagttgacggagtttaagagagctgtgaaagtagcaacaggacaagaa

SEQ ID NO: 775637 - DNA, 96 bp, Homo sapiens
gaaaatgtgtgatctcctgtttgttatgtttgccgtggtttttatcaccacacgactgggtatatttcctctctgtagagacggggtttcgccatg

SEQ ID NO: 775638 - DNA, 100 bp, Homo sapiens
aaaagcagttgctcgaagaactcgagcgacagagacaagctgagcttgccgcacaaaaagctagagaggttgattcctgtgttagtgaatggcatgaagt

SEQ ID NO: 775639 - DNA, 100 bp, Homo sapiens
ccttcacccagcatttcatccctcgtcgaaaggattggattggcatctttagagctaaagaattacctccaaagccattgtcaagaccacagcagtcatc

SEQ ID NO: 775640 - DNA, 96 bp, Homo sapiens
ggagaagcgcagcgacggcgtcgggagagcgcgcctagccggctcgcgagaagcaggagctggccaacagctcggatgcgaccctcccagaccggc

SEQ ID NO: 775641 - DNA, 82 bp, Homo sapiens
aggaagagctgcagtctttgtgggacaagggctgaaatctctttaatgatggagggaagcaggcagacgcgagtgtctcggc

SEQ ID NO: 775642 - DNA, 82 bp, Homo sapiens
gtgttgctgatcgcctgggtggttgttggcgtgtccctgcagcgaaggatcctgactcggtgaaatacctggagtgctcagc

SEQ ID NO: 775643 - DNA, 75 bp, Homo sapiens
gacctcctggtgcgcatcctgctgctggctgcccttgtctcctttgtcccaggtgtgacaccttcagcaggtctc

SEQ ID NO: 775644 - DNA, 95 bp, Homo sapiens
gttcgctacacagcaatgcatcgaggtcaacgctgctcttctgagccgctgtcgagtgattgttcttgagaagcttccagtagaggcaatggtga

SEQ ID NO: 775645 - DNA, 100 bp, Homo sapiens
aataacacagttattaatggactgcttggaaatataggtgttacacataatattgcattacttcgagaggtgataatcaactcacgctttgtaaaaggag

SEQ ID NO: 775646 - DNA, 100 bp, Homo sapiens
ccggcagcggtagcacgagtgcgggcagcagcagccccggggcccggagagatgttctcagtgcagctgagtcttggtgagcagacatgggaatccgaag

SEQ ID NO: 775647 - DNA, 83 bp, Homo sapiens
catcaacaagatgttgtcctgtgctggggctgacaggcatcaccccgatgctgcaggtgatccgcgccatcatgaaggaccct

SEQ ID NO: 775648 - DNA, 100 bp, Homo sapiens
caagcgagggatcctaactctcaaataccccattgaacacggcatcatcaccaactgggatgacatggagaaggctgaccaactgactgaagagcagatt

SEQ ID NO: 775649 - DNA, 82 bp, Homo sapiens
cagaacaccccgagatgagaggagaagagcccagcacaacgaaggattttttatcaagcagaaatgcatcgaacaacgagaa

SEQ ID NO: 775650 - DNA, 82 bp, Homo sapiens
agaagatcttctttgagaaccacccatatttcagcccctgcctgacttctcacgagtccctggtctgacattgcccagtgga

SEQ ID NO: 775651 - DNA, 100 bp, Homo sapiens
cctccctcagcttccgccccaaaagttgttgacctcctgtactggagagacattaagaagactggagtggtgtttggtgccagcctattcctgctgcttt

SEQ ID NO: 775652 - DNA, 78 bp, Homo sapiens
ggaattgctactgctgcctctgtcactcctggtgaccagcattcaaggctgtgtggttccaggtgctggtgccgtgga

SEQ ID NO: 775653 - DNA, 100 bp, Homo sapiens
gccctggtgtcacctatcagtaaaagccccatggctgggggttatggagtgatgggtgacgatggttctattgattatactgttcacgaagcctggaatg

SEQ ID NO: 775654 - DNA, 111 bp, Homo sapiens
cccaacagccagggccaggcgcagacctttctccaagaggaggtagcagggcgccaagcagtgacttctgaccaacagagtgtggggagaagggatgtgtattagccccgg

SEQ ID NO: 775655 - DNA, 46 bp, Homo sapiens
tctcccaccgactgcctgtttaaggaatctggaaactgttcttcag

SEQ ID NO: 775656 - DNA, 100 bp, Homo sapiens
ctcagcctcccgagtagttgagaatacaggcccagagatatgaacaaggcttctcatgtgcagttcctccaggacggctcctcaaaagtggttcctcttg

SEQ ID NO: 775657 - DNA, 88 bp, Homo sapiens
ccatcgttgctgccttcttcgtcaaggactatctgctgccaaactcttgactgaatatggcgttagtgttttggttttagaagctcgg

SEQ ID NO: 775658 - DNA, 75 bp, Homo sapiens
ggaattttgaagtacaccgtggtgacattgtatcattggtgaagcgcctcttggacgcgtgtgaccgatgcccag

SEQ ID NO: 775659 - DNA, 51 bp, Homo sapiens
gcaaaagcctttcatgattatgagcagtgaggagaatgaataccttccaag

SEQ ID NO: 775660 - DNA, 75 bp, Homo sapiens
aaagaacagatgagtgccaaaaggttttctgtctcaactggtctctgacaagcctctgactgaatgtatccgtgc

SEQ ID NO: 775661 - DNA, 73 bp, Homo sapiens
gactgcacttcttttttgagaaaggaaggaatatatcctgactgattgctgtgggtgagcgtggaggatgctc

SEQ ID NO: 775662 - DNA, 90 bp, Homo sapiens
aaggattccaagtaactcttatttggcccgccatgttcatagaggataaagcagtagacaccctggcttacctcagtgacggtgacgccc

SEQ ID NO: 775663 - DNA, 74 bp, Homo sapiens
tcagcactatcccaagactgctggcaacaggcttttattgagatggagacaagagaagatgcaatggcaatggt

SEQ ID NO: 775664 - DNA, 104 bp, Homo sapiens
cctggagcctcagttggaagcagccgatccagcctgcggagcctgtggggcaggtttaactatagatcaacacatcatcttgcatctcatgggttctatgaatt

SEQ ID NO: 775665 - DNA, 102 bp, Homo sapiens
ctcaaagccatctggcacgccttcaccgcactcgaccaggaccacagcggcaaggtctccaagtcccagctcaaggcttgcccacaggtgacgttcccatgg

SEQ ID NO: 775666 - DNA, 76 bp, Homo sapiens
tctggccttagcacatgcagatgagaagtccttagaataactgaagtgaagtgatggactccgatttggagagtag

SEQ ID NO: 775667 - DNA, 100 bp, Homo sapiens
ggaagcctggacgtgccaaggcccaacagcagggtggagatcgtggctgccatgcgccggatacgggttgaatgatcctaaaatgtctgaaacggagcgc

SEQ ID NO: 775668 - DNA, 58 bp, Homo sapiens
ccgatctactgagagctgcgagctcagagtcaagatctccactgaagttggcatcaca

SEQ ID NO: 775669 - DNA, 74 bp, Homo sapiens
tggcccggctccttagcacctctccagcccctgtccctgccttacccagcaagcttcccacgtttggagccccg

SEQ ID NO: 775670 - DNA, 100 bp, Homo sapiens
ggaggttcaggctacggtgagccgaaggtgtctcccagtctgctaaagccctaaggccatcaccatggacttccagcatcgccccgggggcaagaccggg

SEQ ID NO: 775671 - DNA, 98 bp, Homo sapiens
agaattcagaaggagctagctgaaataacccttgatcctcctcctaattgcagcctcagaaaaccaacctccagtgtccgcactttaggaagtgtccc

SEQ ID NO: 775672 - DNA, 101 bp, Homo sapiens
ctgggggctgcggcgagtggcgatgggcgagccggacttgcacgtggagaaagcgacttccaatagtagtcagacattatcatcctgtcatactatggagc

SEQ ID NO: 775673 - DNA, 96 bp, Homo sapiens
gctacctacacctgtgtgctgggctttcacgtctacgctctggccaggctgccgcacctctacaggaactttgccgcggagcagtatgccagtgtg

SEQ ID NO: 775674 - DNA, 50 bp, Homo sapiens
tgactgtcccagaagtgaatcgcaggtggcgctcgtgtttccgaatagtg

SEQ ID NO: 775675 - DNA, 82 bp, Homo sapiens
ctccctggcttttggggcaagctacggaacaggaatcatattgacaggtcatgaaaatgagaccaaaagatctctggaagcg

SEQ ID NO: 775676 - DNA, 83 bp, Homo sapiens
ggagaattttcagatgactggactcttagtggaaagggcgaggaggcttccgaggaggcagaggaggaggaggtgaccacaag

SEQ ID NO: 775677 - DNA, 100 bp, Homo sapiens
ctcttccccatccagtcacctgacaggagtggttaatgtgttgctaacaactccactctgggtggtaaacaccagactgaagcttcaaggagcaaaattt

SEQ ID NO: 775678 - DNA, 75 bp, Homo sapiens
tggtcatgagctttgtgaacctgggtaccccctgtaccggctgggtggcccacaacttcgggtgttccgaaccaa

SEQ ID NO: 775679 - DNA, 100 bp, Homo sapiens
gctccctgtatgcatggtgtggggttggtgtgattagcttcgcagtctggaaagctttaggagttcacagtatcctgtttgaccaaactcagagatcaat

SEQ ID NO: 775680 - DNA, 100 bp, Homo sapiens
attggctgtttcacgaacagatggcactgtggaaatttataacttgtcagcaaactactttcaggagaaaatgtcatgtggcctgtgttttggaccgtgg

SEQ ID NO: 775681 - DNA, 103 bp, Homo sapiens
cctccgtggtctggggcttcgcgctcttcttcttcttccagggactcagcacctggcagttatcaggaactgttgccgttattacatcagatgggagaatgat

SEQ ID NO: 775682 - DNA, 90 bp, Homo sapiens
cgcgcggaggcggaggcttggggaatattgtaatacagtccagctagattctgggatagattaccggaaaagggaacttcctgctgcagg

SEQ ID NO: 775683 - DNA, 50 bp, Homo sapiens
gaaaataattaaatattcttaccgagggggcagctggcattttatgctat

SEQ ID NO: 775684 - DNA, 75 bp, Homo sapiens
atcctctacaggacccgctttctaccattaagcaggaggccgagtctgtgctggcccagcaggacgactggagca

SEQ ID NO: 775685 - DNA, 83 bp, Homo sapiens
ctcggagcgcatgcagctgctgctgaccctggccttcaaccccgagccgctggtgctacagttcatagccctgatgaagcaag

SEQ ID NO: 775686 - DNA, 83 bp, Homo sapiens
gaggcggagaggcacggaggagccgctggggctgccgccacggccgcccggaggctcatcaacagagcagacgagcagaccgt

SEQ ID NO: 775687 - DNA, 100 bp, Homo sapiens
cacaatcaatacgattggaaccagcacaagtacaaactgaagttgctgaagatcctcaacaagtttcaactgtccatctccaactgggcttaccactggt

SEQ ID NO: 775688 - DNA, 100 bp, Homo sapiens
ttttgatagatgtcataacagtatttggagaactcactgatgaacatgacgacagagatgatggtgtggattattgggccaaaagaggaagaggtcgtgg

SEQ ID NO: 775689 - DNA, 83 bp, Homo sapiens
catcccagctccacatcaccccagggacagcatatcagagctttgaacagattgttcagattccattctgtggggaaattgac

SEQ ID NO: 775690 - DNA, 100 bp, Homo sapiens
cagccgagagcttcaagggcaagaatttcagaggcaggaaagtgtccggtcccagcataaaggtatccagttatatgacaccccttacgaacctgaaggc

SEQ ID NO: 775691 - DNA, 100 bp, Homo sapiens
ggtaactctgggctacagagtccttgctgggggttcggggagcgcttggaccccggcttctgggacgcgtcaggagcagcagccaagctggacagatgac

SEQ ID NO: 775692 - DNA, 83 bp, Homo sapiens
tcctcaagaagaagaagttgcgaaggatccccaacggggaggccaacgtgaagaaacttcccaagtaagaagcggaagaggag

SEQ ID NO: 775693 - DNA, 75 bp, Homo sapiens
ctaagatgccaggaacccctggaagcctagaaatggtgagactgccaggttctggctccttggcagcaatggctg

SEQ ID NO: 775694 - DNA, 50 bp, Homo sapiens
ggacagtgctgtatgggctcagggaccagttactctccacaagaaaattc

SEQ ID NO: 775695 - DNA, 101 bp, Homo sapiens
ccccccagtctcggagatctcagaggcaccgactgggagtctgcagatctccaggggagcccaccagcctagtcaacatggcctcggaagacattgccaag

SEQ ID NO: 775696 - DNA, 83 bp, Homo sapiens
catgtctgcgagccaggattcccggtgcccgtggttgacacgagctgtgtccccagctgttcccgtctacaatggcatcatct

SEQ ID NO: 775697 - DNA, 83 bp, Homo sapiens
gattactgtgttttgtgagagctcgctaggcgccctaagcaacagaggccttcctggatgctctgcagaaccaggctgaggcc

SEQ ID NO: 775698 - DNA, 100 bp, Homo sapiens
gccaccgtgcccagcctcaaagggtttccaggcctgaggtgcccgccctggccccaggagaatgaaccagccgcagaggatggcgcctgtgggcacagac

SEQ ID NO: 775699 - DNA, 97 bp, Homo sapiens
ggtgattgggacaaaaatgcaaaagactgctaaagtgagagtgaccaggcttgttctggatccctatttattaaagagatcgcggattcaggtgtgg

SEQ ID NO: 775700 - DNA, 74 bp, Homo sapiens
gagggccgagaaggacaggatcagtataccaacagatgttttaaagattgtgtattctgtgggtgctcagacaa

SEQ ID NO: 775701 - DNA, 98 bp, Homo sapiens
tatatcgaaggaatcatgtataaatggcttttaggaatggtagcttcctggggatggtatgctggatatacaggttgtgtgtcgcagccctgtcggtg

SEQ ID NO: 775702 - DNA, 75 bp, Homo sapiens
ctgagatagtttatgcagccaccaccagtttgcggcaagcaaatcaggagctcaaatgatacttttcccacagca

SEQ ID NO: 775703 - DNA, 75 bp, Homo sapiens
ccagttccgggaaggcccctggggaaagcatcccttttgcagtcgtgggatcatgcgaggtggtgagggatggcg

SEQ ID NO: 775704 - DNA, 78 bp, Homo sapiens
actgaggcatggagaggctgaagtcacacaatccaataatcttaaaggaattgtagtcgttgaaaaaacccggatgag

SEQ ID NO: 775705 - DNA, 75 bp, Homo sapiens
cggagcgccggccgcaccaccgccctctggccgttgcctcaccggggacattagtcatgagtgccgagtgtgcgg

SEQ ID NO: 775706 - DNA, 95 bp, Homo sapiens
tttgcagggacatgcagagcatcctctatcacgggcttatccgtgaccagcaacacagtcactcctggcggcaaaccaaacaaaaccagagtcat

SEQ ID NO: 775707 - DNA, 75 bp, Homo sapiens
cagatgtggtgaaatgtacccagttagtaagagattttgaagccagcttcataaggctattggacaaaataacga

SEQ ID NO: 775708 - DNA, 90 bp, Homo sapiens
ctgatgctctctctccagtccttgctgaagagactttccgttacatgaatcaagcttcaggagtctccggaagacatgcctgcagggcag

SEQ ID NO: 775709 - DNA, 50 bp, Homo sapiens
ttccgaaagtggctctacaaacccaaggtttgtgacccgcttcattgagc

SEQ ID NO: 775710 - DNA, 100 bp, Homo sapiens
ttcagaataatttactgtatgtggcactatcaaatctagatgcagctacttatcaggaaggcgacatgccaattcatgaacttctcagcctttatggtta

SEQ ID NO: 775711 - DNA, 76 bp, Homo sapiens
caaaaataaagctcccactccctcagcttgtggagcctcaggccagaaatgtacacacaggagagctggctgcagt

SEQ ID NO: 775712 - DNA, 99 bp, Homo sapiens
gagtcccaggactcgctcagcgaagagctggcaaagctccgagcccaggaacgtcccataccctttgatcatatgatgtacgaacatcttcagaaatgg

SEQ ID NO: 775713 - DNA, 83 bp, Homo sapiens
gacggaggctccgggcacccccgagggccccgagcccgagcgccccagcccggggacccagacatggagctgcgggaagaagc

SEQ ID NO: 775714 - DNA, 80 bp, Homo sapiens
gagtttccgatttaaagctgagctgcgaggaaaatggcggcgggaggcctgcagataaaacagctaatgaaaagaacaag

SEQ ID NO: 775715 - DNA, 51 bp, Homo sapiens
ccgccatccagccaccattccaaggtgacaaaaggtgagacactcacctag

SEQ ID NO: 775716 - DNA, 95 bp, Homo sapiens
gggcgggggcccagggcaggcgcggagccgggccggcagttctgcctcctgggggcattgctggcccccatccgagtgcttctggcctttatcgt

SEQ ID NO: 775717 - DNA, 96 bp, Homo sapiens
ccttgatgatgatggatgaggagatctcagtgattgatggagatgaagacttcacagagaatgcagttgtcttgacttcaggtctgtctgttctgt

SEQ ID NO: 775718 - DNA, 100 bp, Homo sapiens
tgttcctaaaccagaagaggaggttgcccagaagaaaaaggtacaactccaaaaggagacattggagaagaaccaagctgggtctataaggaattgcaca

SEQ ID NO: 775719 - DNA, 75 bp, Homo sapiens
ccagacgtttaaattgtgcggaaatatctagtatcaggtgacaaacagcatgtttggtgcttcaagaaagaagtt

SEQ ID NO: 775720 - DNA, 101 bp, Homo sapiens
gatgatcaaacttatagatattgcacgacagactgcacagggcatggagctgaccggttccctgatgtgttacctgcttctgctactgatccaaactgcag

SEQ ID NO: 775721 - DNA, 83 bp, Homo sapiens
ggttgagggtctccagggttctttggggcccgagggtgtccggtggagagctgtttgaccggatagtggagaaggggttttat

SEQ ID NO: 775722 - DNA, 100 bp, Homo sapiens
gtacatgaccacctgaaggatctctggaatgatggagatgccctgtatccaagcccaatatgggacaccagcaccgagtccgggaccccgtgaccacctg

SEQ ID NO: 775723 - DNA, 75 bp, Homo sapiens
gaaggagttcaggcagctggccaacagtggcaagaaagaactgacttcctctggtgggccaacaaagtttgaaat

SEQ ID NO: 775724 - DNA, 100 bp, Homo sapiens
ctccactagagtcatctctacatcaggtagcattggtgctgcagatagtcctgagaactgggagaaagtctgggacaactggaggctgctgacaatggcc

SEQ ID NO: 775725 - DNA, 96 bp, Homo sapiens
ctggcggctctagggaccccccccgcgcctgcacttagccccgcgcccgaggtgtcgtgaaaactacccctaaaagccaaaatgggaaaggaaaag

SEQ ID NO: 775726 - DNA, 100 bp, Homo sapiens
cggctgcgcgggacggctctgtaggaaggaacttggttccccctccctcagcttccgccccaaaagccttctcttggagtcaagaagcctaccaaagccc

SEQ ID NO: 775727 - DNA, 100 bp, Homo sapiens
ctggtttcacaccacgcctggcaatattacaggccaagtttcttcctaacagtggtgattctactctggccatgtgtgcccgtgacgggcaggttcgagt

SEQ ID NO: 775728 - DNA, 100 bp, Homo sapiens
atgaaggaaatcttactgaaggcagtgaagcgaagaaaaggatcccagaaagtttcaggtatccaattggtttggcaacaaacgaatcaggtacaagaag

SEQ ID NO: 775729 - DNA, 82 bp, Homo sapiens
cgcggcgcatcacggtgcgcgtggccgctgggacgatgccggagtgtgaaggagtttgagaagctgaaccgcattggagagg

SEQ ID NO: 775730 - DNA, 100 bp, Homo sapiens
ctggaagcgctgtgacggccaccaagattgccaggatggccgggacgaggccaattgcctcagtcccctcttctgcaggtctgctgcaattcgctggggg

SEQ ID NO: 775731 - DNA, 50 bp, Homo sapiens
ggctgactgagagcgtctgcttgcattcctctgaatattgatttgctgaa

SEQ ID NO: 775732 - DNA, 99 bp, Homo sapiens
agccaccagaaacgtacacctgattttcatgacaaatacgaatagcctaacatggcagaccagagacagcgctcactgtctacctctggggagtcattg

SEQ ID NO: 775733 - DNA, 113 bp, Homo sapiens
gacgttattctgatctcaccaccctggtggcctttccctccagctctgtctatcctaccaaggaccctgatgctcccataagacagaaaatgccccttgatgatctggataga

SEQ ID NO: 775734 - DNA, 75 bp, Homo sapiens
agatcttgccctggtgcagacaagacttagaatccagacgctctgcagtgtcccatcgtcttatgcggatggcgg

SEQ ID NO: 775735 - DNA, 101 bp, Homo sapiens
acatcaaagacagctttcacagtttgcgggactcagtcccatcactccaaggagagaagacccctgagccccttccagtgctgcctgaggtgccctctacc

SEQ ID NO: 775736 - DNA, 75 bp, Homo sapiens
ggagaagatgctgtcctcttctggcagcctggctggaatttgaagcctacattaatgcttctggagaacatggaa

SEQ ID NO: 775737 - DNA, 100 bp, Homo sapiens
cctacccccatcactgcttccctcagccataacagccgattcgaagacagtctcttacacctcctcctcagaacactattacatgggaagaatatatatc

SEQ ID NO: 775738 - DNA, 100 bp, Homo sapiens
atgatgattcttcagataacttctgtgaagctgatgggctgaccccacattggacaccgctgcatccatgtccatcacacaacacagctgccgtttcttc

SEQ ID NO: 775739 - DNA, 82 bp, Homo sapiens
ggaggcctctgggtgaaggcagaggctaacatggggaggccttacatcgggaacaaatgttggaacagaagttagccacgct

SEQ ID NO: 775740 - DNA, 75 bp, Homo sapiens
tggacagcaagaatgaatactccatgtcaactgtcttggggccacctacagatgctcctgcagtggacacagcag

SEQ ID NO: 775741 - DNA, 90 bp, Homo sapiens
catcacagtcccctgttccgaggtcaggaggatgcaagtcctgacagattcagcaacactgatatcaatgcttacaattgtgaagagccc

SEQ ID NO: 775742 - DNA, 75 bp, Homo sapiens
cagaggtcaatctttatgtacaggcctcattgctacgatttcagagtaccctggtaatagctgagcatgcaaatg

SEQ ID NO: 775743 - DNA, 100 bp, Homo sapiens
gacgctgcccgcgggcccggccacggcggagccaagatggcggctcagcggcagcgggcgctggccatcatgtgccgcgtctacgtgggctctatctact

SEQ ID NO: 775744 - DNA, 97 bp, Homo sapiens
ttttggccttgcaagagcagaaaatcagaagctggatttcagtactggaaacttcaatgtgttagctgttaggcaataccaagattttcttgaagat

SEQ ID NO: 775745 - DNA, 113 bp, Homo sapiens
ccgcacggttcccagctaattccccgctaccgggttgcggccggaagccgggcgccgcggctctgcttccctcgggagaaactccagaaaatcttgccaaacttctgaccagg

SEQ ID NO: 775746 - DNA, 83 bp, Homo sapiens
gcctgaatggcgggaagtgtgaagcggccaatggcacggaggcctgcgtttccagggtctccctccactgctgtagtaacccg

SEQ ID NO: 775747 - DNA, 100 bp, Homo sapiens
agtttggtgtccagatggacagagttgatcagatggtcagtaggacagaaggtaacattgatgactcgctcattggtggaaatgcctccgctgaaggccc

SEQ ID NO: 775748 - DNA, 151 bp, Homo sapiens
gctgcagtaaagaggcagctccgagtgaggaccatctacgagagcaaaatgattgaatacgatcctgaaagaagattagaataactgaagtgaagtgatggactccgatttggagagtagtaagacgtgaaaggaatacacttgtgtttaa

SEQ ID NO: 775749 - DNA, 83 bp, Homo sapiens
aggacacctacagccccgacgaacatttctgggtgacactcaacaggattcccggttttaaaatcaaagatgggaaaatcgga

SEQ ID NO: 775750 - DNA, 75 bp, Homo sapiens
cccaggtgtaagcgcagaaagcaggcgaacccgcggcgcaataacgggcaccaatgcctctgctctggaaaaaga

SEQ ID NO: 775751 - DNA, 100 bp, Homo sapiens
tgcaggatccgtgctttgcccaaggagatggtctcattaagtttcttcactagttgaagaaggagaaaaacagaacaaacgttttaggccgtcaaaaatg

SEQ ID NO: 775752 - DNA, 75 bp, Homo sapiens
cctgcagcgcggagcagaaagcagaacccgcaggtgaggtcgcaggagctggtgcagccagtgtcatgtccgccc

SEQ ID NO: 775753 - DNA, 88 bp, Homo sapiens
gggatagaagatgaagatgctctcattgctgatgtaaaggttgaagcactcaataagttaaaaactttaaatagtttaatcaaactga

SEQ ID NO: 775754 - DNA, 51 bp, Homo sapiens
tggggcagaatacagagatatggaatcagggaaatgtttcaacgtgcgcaa

SEQ ID NO: 775755 - DNA, 100 bp, Homo sapiens
aactagaaagagaagctagaatctgccgtcttttgaagcaccctaatattgagccatgggaccacaccaccaccaccacaaccaataggccaggaaccac

SEQ ID NO: 775756 - DNA, 90 bp, Homo sapiens
gccacctactccaagcccccctcgcctatgccttcagacatcaccagccagcttcgagagcatgcagaggctctgcgacaagtacaaccg

SEQ ID NO: 775757 - DNA, 96 bp, Homo sapiens
gggaaatcctgcgtttcccctgtgaaaggggggctgtcggtggcggtgcctggggagatccgaggctatgagctggcacaccagcggcatgggcgg

SEQ ID NO: 775758 - DNA, 98 bp, Homo sapiens
ggccctgaccgatacttgggcggatcacctgctggctgatgcctactctggccacgacgggtcccccgagatgcagccggccccccagaacaagcgcc

SEQ ID NO: 775759 - DNA, 100 bp, Homo sapiens
tagcacgagtgcgggcagcagcagccccggggcccggagagtgatttagaatctagaagagaagtaaaaaaagaagaaggtgaagcttttgcacgagaac

SEQ ID NO: 775760 - DNA, 75 bp, Homo sapiens
ctcagggaactggatgtcagcaagaatggcactggagatattattgctgtcatgataacagaattgaggggtaag

SEQ ID NO: 775761 - DNA, 100 bp, Homo sapiens
aatggcagtgttggagaaaaattaagagttccagtctcatcagattttccatgtcctggtggtggcagcagcctttgtccacttctatggagtctccaac

SEQ ID NO: 775762 - DNA, 50 bp, Homo sapiens
ctgagcttgagatgctaggaagacttggagtgatgatgcgggtgtgctgg

SEQ ID NO: 775763 - DNA, 75 bp, Homo sapiens
aggataagggcgacagcaacagctctgccggctggaagatgacggtccttcgctacccaccaaacagaacgagga

SEQ ID NO: 775764 - DNA, 108 bp, Homo sapiens
gtgggatacctgccttgttgcgactgttgagaaaatctattgatgcagaagtaagggagcttgttacagccttccttgaatccagaagctggcaaacagcatcagcca

SEQ ID NO: 775765 - DNA, 100 bp, Homo sapiens
ctgcgactccggagacagcccaaatatcctcggaagagcgctcccaggagaaacaattggttagtctgctgctaattggaattgctgcgtggggcattgg

SEQ ID NO: 775766 - DNA, 100 bp, Homo sapiens
acgcaaacatgtgtcgatgtctagtaacggttgattcttcaccacactgaaaccattaggaaaaatccttgtggttaacagcagaggcttcagagtgtaa

SEQ ID NO: 775767 - DNA, 76 bp, Homo sapiens
ggcagggtctgaaaaacctgctggaagagacacagtaggtcagaagagatcaattctacagaaatttccagtggtt

SEQ ID NO: 775768 - DNA, 100 bp, Homo sapiens
ctactgtgggtctggactgatctccatgtcctgttgtggggcttttacagcctttgggttggtcaaagaaaaagtgatgtatgaaaaagaggcaaaacaa

SEQ ID NO: 775769 - DNA, 81 bp, Homo sapiens
cccccggggcaagagcaggagcccggcaccccccgccgacaaggaggtgtactaatggtcacttgatgtgcgctggctgtt

SEQ ID NO: 775770 - DNA, 90 bp, Homo sapiens
ctcgtgccgctgagcctggcgcagatcgttgccttttcgggccttggcttcacgacgttctacttggcgggcaagctgcactgcttcacc

SEQ ID NO: 775771 - DNA, 83 bp, Homo sapiens
catcagggaggctttcagccggagaagcgagtttcagctgacaatgcagatcttcgtgaagactctgactggtaagaccatca

SEQ ID NO: 775772 - DNA, 130 bp, Homo sapiens
gcagtggaccacagcattcctgaaatacatccaggaaagacatggagattctcttaaaaaggccactgcagaacaaattagacttgcacagatgatttcggaccataatgatgctgactttgaggagaag

SEQ ID NO: 775773 - DNA, 50 bp, Homo sapiens
cggaggtcgataagctggaactgatggtccagctgggagctccccgacct

SEQ ID NO: 775774 - DNA, 100 bp, Homo sapiens
tcaaccacttacaagaggcaaggcaagcaaaaggatatgacaatccgtccttccttagaaagctgaaagctgataaggttcgtcaaaaaatgttgtatgc

SEQ ID NO: 775775 - DNA, 100 bp, Homo sapiens
gtctgacttccagttccagcgtacgaggatgtttcgtctgaactcactttctgctttggcagaactggctgtgggttctcgatggtaccatggaggatca

SEQ ID NO: 775776 - DNA, 75 bp, Homo sapiens
gttggagtttaatgagaggaatatactcatcatcagtctatttagaagagggtttgaacataatctttcatgtag

SEQ ID NO: 775777 - DNA, 87 bp, Homo sapiens
tgtttggccaccccctgttcctgcagaacacagaattctgcttggtcagaatcgtgatggcattgtgttcagcactgatgactattt

SEQ ID NO: 775778 - DNA, 75 bp, Homo sapiens
aaaagtgctcctgggactccaggataccagacctggagtggaagatcatttatgttggctcggctgagagtgagg

SEQ ID NO: 775779 - DNA, 77 bp, Homo sapiens
ccaggatgtgagcaacacgggaccggggagttgctgagtcagcccagaccggaaggagtggcagagatcatttgccc

SEQ ID NO: 775780 - DNA, 50 bp, Homo sapiens
aagaggtgcttttggtgaagtgcagttgaatctatgtactttcatcagcg

SEQ ID NO: 775781 - DNA, 82 bp, Homo sapiens
tgggacacccgggagtcaggaaatggtgagaagccctaccactgcaactgggacggctgcggctggaagtttgcgcgctcag

SEQ ID NO: 775782 - DNA, 98 bp, Homo sapiens
gtggagcttggtttcgggatctcggtgctgcagacggcgagacctcctgcacaggaacaagatcaccatgattgctgagcctcttgagaagggcctgg

SEQ ID NO: 775783 - DNA, 100 bp, Homo sapiens
cttcgtcctccggttgcgggggcggtgcgggcaaacctcgcgaggagaagaggacggccctgagcaaggtcatcatcagatttgaaatatttaaagtgga

SEQ ID NO: 775784 - DNA, 75 bp, Homo sapiens
agccacatactatccgtttgttcaggaaccaccagtgacagaatggagtctcgcttttttgccaggctggggtgt

SEQ ID NO: 775785 - DNA, 100 bp, Homo sapiens
ccagtttaaagctcataggaatgtgctggcctcctttacccatgcatgatgactatgacttaagacaagaacagttgaacaaagcttctcttctctcgtc

SEQ ID NO: 775786 - DNA, 82 bp, Homo sapiens
gccgccaaccctgggcagctcttcggccgcatccccatgcgcttctcggtgctgactccgtgggaaggaggcttgtttaaac

SEQ ID NO: 775787 - DNA, 100 bp, Homo sapiens
cagaaggcttatgaggatggctgcaagactgtcgacctaaagcctgactggggcaagggtgtgggccgaagatatgctcatgtggtgttgaggaaagcag

SEQ ID NO: 775788 - DNA, 99 bp, Homo sapiens
tttgctaaagttcaccagaaaggggcactaaagctccacagaacaactcttttgcaggttcaaaccttgtactactcagctgatcacaagctgcttgat

SEQ ID NO: 775789 - DNA, 87 bp, Homo sapiens
ggagcagaagtatctgtttcatcgcttgaatcaaatattgttggaacttagtgatttggcccgtgaccctccagcacaatgttctgc

SEQ ID NO: 775790 - DNA, 121 bp, Homo sapiens
cttcctggagcagctgcgtaaaacatacaggccggagcttatcaaaggaaactggagcacccatcctaactgatgatgttagcctgcaggtgttcatggaccatttgaagaagctggctgt

SEQ ID NO: 775791 - DNA, 100 bp, Homo sapiens
ggagacgttcctctgagccccgcaagaactctgcaatgaggaattagcttaccgaaaggagatggtgagagctgacctaattaacaaaaaagttggaatc

SEQ ID NO: 775792 - DNA, 100 bp, Homo sapiens
atcctggtgctacccccgatcgtcatgtccatgctggagaaatgcctgaaatgtgcagatgccccgtgtcagaagagctgtccaactaatcttgatatta

SEQ ID NO: 775793 - DNA, 82 bp, Homo sapiens
cttcggcctagtgcgccagggcctcaagtgcgatggagctctttgttcaatgcctagccacctattcctacagacacggcag

SEQ ID NO: 775794 - DNA, 97 bp, Homo sapiens
ccagctgggtcacccgcactgagtcaacagactgagcgcgtccaggcctgacagctctgcggctcgggccctgagaattcacagatggattcagtgg

SEQ ID NO: 775795 - DNA, 50 bp, Homo sapiens
gctctttgcgccgggaaccgataaagggcgtctctggccgagcctctttt

SEQ ID NO: 775796 - DNA, 100 bp, Homo sapiens
cttgcctgcctatgagaatcctccagcatggattcctcctcatgagggttccccactgaaggacttggtccagctgtctggcagggaggagagacagaag

SEQ ID NO: 775797 - DNA, 100 bp, Homo sapiens
ttctggacaaacctcagccctaacggtggtggagaacccaaagtgtctcaggatgatacataccggtttttaactttggtgtcatcaaatgcaattgcaa

SEQ ID NO: 775798 - DNA, 100 bp, Homo sapiens
agcaaaccccagcaagatgcggaggctgcctcggcggagcagaggaaccacacgctgatcatgtctgcgggccaggcatcgacatccgcaacgactatca

SEQ ID NO: 775799 - DNA, 98 bp, Homo sapiens
acggggcgcctctgcaactcacagaagaagaccagctacaaggaaatacttctgaaaaatcactctgaaccccaagctggagtgaatcttctcctgag

SEQ ID NO: 775800 - DNA, 50 bp, Homo sapiens
gcagttctggcttcctcgattctgcatacccttatagttgcctggatcaa

SEQ ID NO: 775801 - DNA, 100 bp, Homo sapiens
ctacaggcacgcgccactacactcggatgcttgtggttggtggcatcgaccgggtttatgaaattggacgccagttccggaatgaggggattgatttgac

SEQ ID NO: 775802 - DNA, 101 bp, Homo sapiens
gaccgtgggctggaggaacagaagcggaacagccacagcagcctcccaaggagtctgcaagttgtagccggatcgagctgggagatgtgacaccacacaat

SEQ ID NO: 775803 - DNA, 100 bp, Homo sapiens
tttgcacagaagcatctccggtctataatcctgaatggttccaaaaggtcccaggtgtcctctccgtgcagtcggaaaaagccccgcatgggccagcaag

SEQ ID NO: 775804 - DNA, 82 bp, Homo sapiens
aagtgcatcttctgtcaaagatcggtgccgactgatgaaggatacttgcaacacaggcactctgatggttctaaaacatccc

SEQ ID NO: 775805 - DNA, 82 bp, Homo sapiens
tggcggatggccccaggtgtaagcgcagaaagcaggcgaacccgcggcgcaataacggaaatctggcattttttaaagtttg

SEQ ID NO: 775806 - DNA, 98 bp, Homo sapiens
cgggaactcatcagccgcatcaaacagagtgaactttctgccaagatgcgaccctcctgaagtgtccatctccggctatgatgacaactggtacctcg

SEQ ID NO: 775807 - DNA, 100 bp, Homo sapiens
acaagacaatccttgggtcattaatttacatgaagtttatgagactgcatcagaaatgatcttagttctggaatagcagcatgaaaccgtgattcctggc

SEQ ID NO: 775808 - DNA, 100 bp, Homo sapiens
gcccggacccaaaacaggaagagcatttcctccctctgctatttatacacggaaagacttactacagcgatctacccatattgccaccaagactttccag

SEQ ID NO: 775809 - DNA, 75 bp, Homo sapiens
gtacttgaccctgtattttgggagtcgaacggaagatagagtttcaccatgttgtccagggtggtctcaaaactc

SEQ ID NO: 775810 - DNA, 75 bp, Homo sapiens
ctccttggagatctaaggaaacttctcacctatgagtttgtaaagcagaaacggagtttccctcttgttgcccag

SEQ ID NO: 775811 - DNA, 98 bp, Homo sapiens
gcagatacacctgaaaatcttcgcctgaagcagcaaagtgaattgcagagtcagggaccagttactctccacaagaaaattcacacaaccacagtgct

SEQ ID NO: 775812 - DNA, 90 bp, Homo sapiens
cctgtttctcacatttgtttcattgaagaaatagttaaggaacgtcaaggtcgtgggaaataaaaggcagttctacacagactgcagcaa

SEQ ID NO: 775813 - DNA, 100 bp, Homo sapiens
gtaatgtgatcagcaagagtgacgtgaagtcattggctgaagctgatgaacaggaagttgtggctgaggttcaggtccaagaggctaaatgtgagaatcc

SEQ ID NO: 775814 - DNA, 111 bp, Homo sapiens
agaaagtggtgaatcccctgtttgagaaaaggcctaagaattttggcattgttgtcgagatgtccacagaaggaggatttggtggtactagcagcagtgatgcccagcaaa

SEQ ID NO: 775815 - DNA, 98 bp, Homo sapiens
acttacatttttgacttgtttggaggtgttgatctcagagtcaagatctccactgaagttggcatcacaaatgttgatctttccaccgtggataagga

SEQ ID NO: 775816 - DNA, 90 bp, Homo sapiens
cgagacatgtgttcttttgacaacgaacagctcttcaccatgaaatggatagatgaggaagcttggatttacactgggcaacgtggttgg

SEQ ID NO: 775817 - DNA, 96 bp, Homo sapiens
gcggcagcggccggagccgggccgggcagctagcagggcgcttcgggtttttcgttggaatatacgttgcacatttatggcgattctgagtgtgag

SEQ ID NO: 775818 - DNA, 98 bp, Homo sapiens
cggtgtgtggcgcgcccagagccccgcgtttcagccctagggaagaacaagttgaaatcatcgcagaaggataaagttcgtcagtttatgatcttcac

SEQ ID NO: 775819 - DNA, 82 bp, Homo sapiens
agagcctcgcctttgccgatccgccgcccgtccacacccgccgccaggtcacaccgacaaatctgaagcgggtttgccaggg

SEQ ID NO: 775820 - DNA, 100 bp, Homo sapiens
aagtgcgcccacagcagcaaccttggagcaggcaggcctccaggcccaaggtcagcatcccactgtcagccatcattgaggtccgcaccaccatgcccct

SEQ ID NO: 775821 - DNA, 76 bp, Homo sapiens
ttacaggcatttccttcagtgcttcctacagagaacaatggagccagagtgagaaggcaaccaaagtgcaggacat

SEQ ID NO: 775822 - DNA, 74 bp, Homo sapiens
gccgcccgtccacacccgccgccagaacaccttccaccatgaccacctcagcaagttcccacttaaataaaggc

SEQ ID NO: 775823 - DNA, 82 bp, Homo sapiens
cttccggaaggactttggcgaggatgatatcatcaagttgaatcgaaaggaagggaagaagcagaattttccaagactaaat

SEQ ID NO: 775824 - DNA, 101 bp, Homo sapiens
tggcactgaaatgaggcatagatgagctgactggaaataccggcatgcaggattgatggccttatctgccattggtgaagggtgccaccagcaaatggaag

SEQ ID NO: 775825 - DNA, 95 bp, Homo sapiens
tggaaaaactcagtgagacacaatttatcattgaataagtgttttaagaaagtggacaaagagaggagtcagcttgtcttttccaggcaccctgg

SEQ ID NO: 775826 - DNA, 100 bp, Homo sapiens
gacaatgttgtctgcagccagcctgctcgaaactttagtcggcctgatggcttagaggactctgaggatagcaaaatggagtttcactcttgtctcccag

SEQ ID NO: 775827 - DNA, 88 bp, Homo sapiens
agaaaagattgtgacagatcactggacccagcacctagagatggaaaataatgtcctgcaagatgaggattgaacagttaaaacaaac

SEQ ID NO: 775828 - DNA, 97 bp, Homo sapiens
acaagcgaggaagtttctttaaggtgtatgtgctgaagcggccacatgtggacgagttcctccagaggatggggcagctttttgaatgtgtgctctt

SEQ ID NO: 775829 - DNA, 74 bp, Homo sapiens
tttaatggaaaatcgcttggttaaaacctgacacttttaacagtgctcttaaagttccgtacagataaaggaag

SEQ ID NO: 775830 - DNA, 87 bp, Homo sapiens
tctctaaaaaaactggctgtgaataatatagctggtattgaagagaagtgtatgctgacttgtaaagtgaagaagccagtggtgctg

SEQ ID NO: 775831 - DNA, 74 bp, Homo sapiens
ttagaaacctctgcacagaagtactccaaagattcaggtttactcacgtcatccagcagagaatggaaagtcaa

SEQ ID NO: 775832 - DNA, 83 bp, Homo sapiens
agaaggggaaccttggaatgaactgccagcaggcgtcataccctaatgatcccagcaagataatgtcctgtcttctaagatgt

SEQ ID NO: 775833 - DNA, 82 bp, Homo sapiens
ttaaggtcttcagcggggcgctccaggaggcactcacagccatgccttgtgttcaggcgcagtatgggtcctcgcctcaagg

SEQ ID NO: 775834 - DNA, 100 bp, Homo sapiens
aacagccccctctgcaggcatgcagccccagccttctctctgctcctcagccaacctatgaggaccagcacagcagtgaggaggaggaggaagaggaaga

SEQ ID NO: 775835 - DNA, 100 bp, Homo sapiens
atcagaaacctgaagttagaaaggctcaacgagaacaagctatcaggaattacatgaatgacagtcttcgaaccaatgtgtttgttcgatttcaaccaga

SEQ ID NO: 775836 - DNA, 97 bp, Homo sapiens
gacaggaggcagtagccaaacacccagcgccacccttgaacaagctgaagctggtgcactcaaacctggaagatgaccctgaggagatccggatgga

SEQ ID NO: 775837 - DNA, 76 bp, Homo sapiens
atacaaatcacacgcataatggatgaaaggaaccgacaggatgaccagtgtcccagtgaaggaacgagtgaaggtg

SEQ ID NO: 775838 - DNA, 83 bp, Homo sapiens
agaatcgctgtttcatgtgcaggaagaaagtgggacttactgccaaaacctattgatgtacaagtcattacacaccacatgca

SEQ ID NO: 775839 - DNA, 75 bp, Homo sapiens
gtaaggatgagcagtatttgtttctggctacagctatgagcgtgtggatggttctgtgagaggagaagagagaca

SEQ ID NO: 775840 - DNA, 84 bp, Homo sapiens
cgggcactgggcgactctgtgcctcgctgagggtgagaagccctaccactgcaactgggacggctgcggctggaagtttgcgcg

SEQ ID NO: 775841 - DNA, 73 bp, Homo sapiens
tttatgatactttttctgcttttggaaacatactgtcctgcaagcatgcgttgccagtccattttgaacatgg

SEQ ID NO: 775842 - DNA, 90 bp, Homo sapiens
ggccgcgcgaccgcccgtcctccaactacagggaccgcacggaaagaccacagcaagattctttcattcgtctcctcctagcctggggga

SEQ ID NO: 775843 - DNA, 101 bp, Homo sapiens
ctgcgagatggaggaggggcggcgctgcggccacccggcagggcatatctggaatctgaagttgctatatctgaggagttggttcagaagtacagtaattc

SEQ ID NO: 775844 - DNA, 75 bp, Homo sapiens
ctgccaatatcgctcgctcatctcagcgcatgatcagttctcagagtcaagggtccagagaaggaggagaagttg

SEQ ID NO: 775845 - DNA, 100 bp, Homo sapiens
aacgaagtcgtggaggtggcgaaacgaggaggagataacgcggccttgggctctgcccgtggaacacagagcattcctaatgacagtcctgcccggggtg

SEQ ID NO: 775846 - DNA, 90 bp, Homo sapiens
gagaagctggagctcacggagaagaaggcctccgacgcacccgagtgtacagccccccggagtggatccgctaccaccgctaccacgggc

SEQ ID NO: 775847 - DNA, 75 bp, Homo sapiens
ctgctgctggagcgccgggtcatttttgtggcagataagctcagattcgccttttacaagtccacctctcagaga

SEQ ID NO: 775848 - DNA, 100 bp, Homo sapiens
ttcggccgcatccccatgcgcttctcggtgctgaccgagtgtgtcagcagccaggactttctctctgggtccccttccaaaacgcagccaccgccgtcac

SEQ ID NO: 775849 - DNA, 98 bp, Homo sapiens
gggggaccgggagaggcaccaaatctggcctgggggcccgagaagcttcctctcagaggcagaagaggcctggaccttggcgcacacagacccaggaa

SEQ ID NO: 775850 - DNA, 82 bp, Homo sapiens
tcagttggaagcagccgatccagcctgcggagcctgtggggcagtctctctctgcagccctttgtctacccagtctgcactc

SEQ ID NO: 775851 - DNA, 100 bp, Homo sapiens
tgaaacactaccactgctggcgctgaccttcatcacagacaacagcctggtggcagcgggcctacaaatccgcactggactacaccaaacgaagtctggg

SEQ ID NO: 775852 - DNA, 100 bp, Homo sapiens
caggacagctgttccttggccatcccaaagctattctgggggcaacagaggccactcctcaggatagtcaggaaggaacctttgggtcagagcattcagc

SEQ ID NO: 775853 - DNA, 90 bp, Homo sapiens
gcaaattgcaccaccgtcgcaccaggccgaactgatcatgcggaggaatccctttggtgtggacatctgctgccggaaggggtcccgaag

SEQ ID NO: 775854 - DNA, 85 bp, Homo sapiens
actgggtggtgatcgtggcaggttcaaatggctggtataattataggcaccaggtgaggtttatacatggggcgacaatgatgag

SEQ ID NO: 775855 - DNA, 100 bp, Homo sapiens
agacttagcttttaaattaaaaaggaagctattcaccattgagcacctggccacattcatcatggacaagagcgaagccatcacgtctgtggacgacgcc

SEQ ID NO: 775856 - DNA, 50 bp, Homo sapiens
gccgagcaggctgagcgatacgacgatctgccgacaccccaggccatcga

SEQ ID NO: 775857 - DNA, 80 bp, Homo sapiens
cggtctgtcgagcttggcccccactaacacggcttctcctccatccagtcctcatgaaaacgggccttactatacatcat

SEQ ID NO: 775858 - DNA, 100 bp, Homo sapiens
ggtatgacattgaacttactcatcacgtctctatagtgtcttctgactaatagggatgccaaaggaaaaatatgatcctccagatcctcgcagaatttat

SEQ ID NO: 775859 - DNA, 75 bp, Homo sapiens
cttagctgtgctcgcgctactctctctttctggcctggaggctatccagctgttctagaacagatcagacatttt

SEQ ID NO: 775860 - DNA, 82 bp, Homo sapiens
aacaactacagcatttgaatttctttatagctccaagctctacagattcttcaaatatattgagaatagggatgttgcaaaa

SEQ ID NO: 775861 - DNA, 100 bp, Homo sapiens
gaaggaagctacgtttgtgttgcgaggaactatcttggtgaagcagtgagtcgaaatgcgtctctggaagtggcatatcttccaccacctcctgtgccgc

SEQ ID NO: 775862 - DNA, 75 bp, Homo sapiens
catggcatcaagtggcatccatcataaggttgtctgcattcaaaagagcattctattaaagctaccttaatttgg

SEQ ID NO: 775863 - DNA, 82 bp, Homo sapiens
cgggccctgccagggagcaagtctgcatcgcagaggccaggactccgccgtggtcatggaggagggaagtccgggcgaggtt

SEQ ID NO: 775864 - DNA, 74 bp, Homo sapiens
caaaatcctaatggctttgttagaagtcctgtctgggcggaatctgaaccgagctgaagctgccatggaattct

SEQ ID NO: 775865 - DNA, 75 bp, Homo sapiens
atcgcattcgcagcactgtggctgaggtctctcggctgctgggggcattccacaacccaaaacaggtgaccagag

SEQ ID NO: 775866 - DNA, 100 bp, Homo sapiens
agttaacctctgcttgctccagaggcctcgtcctaatccacctcggctgacggcgcgggatccctggctccgcgaggagctgtggctaaaggaagtggag

SEQ ID NO: 775867 - DNA, 75 bp, Homo sapiens
agaacacagccattgtcaagcgctggagcgaggacagagggtctcacggatggccccgctgccaggagcagaact

SEQ ID NO: 775868 - DNA, 100 bp, Homo sapiens
accttcaggaaaactcgtgtccatcaaaatccagatgctggatgacacccaggaggcatttgaagttccaggctggtgaattaccatatctccgtcaagt

SEQ ID NO: 775869 - DNA, 147 bp, Homo sapiens
cccgcggctgcgcttccgacggggcggccgggggctcagagatccaagtgcgcgccctggcgggtccggaccaaggtgtcatggagaaactccagctgggcccagagattctgcagcgggaaaatccaaggcttatttatgccaggc

SEQ ID NO: 775870 - DNA, 98 bp, Homo sapiens
caaatgctaaattcttgtcagattacgcacaaatccagtttgctgatgacatgcaggagttcaccaaattccccaccaaaactggccgaagatctttg

SEQ ID NO: 775871 - DNA, 90 bp, Homo sapiens
catttccatcatttcctgctaagccaaacagagaagtcatctcaactcgaactccacctccaccttcaccgttgccatttccaacacaag

SEQ ID NO: 775872 - DNA, 51 bp, Homo sapiens
aaagaatttccttaagagctggactggctggttcgatgcccagaactgaat

SEQ ID NO: 775873 - DNA, 75 bp, Homo sapiens
cctcatcacacaggatccgcccctggacatggaggagaaggtccgcttcaagagcagcagccaagctggacagat

SEQ ID NO: 775874 - DNA, 100 bp, Homo sapiens
caaaaatggtcttcaagcctcaagctgtgaagttcctttacactgggtgtgtaagaagcttaacagagcgttccaaaaagaggactctccagctactttt

SEQ ID NO: 775875 - DNA, 74 bp, Homo sapiens
gtggcatcgacaaaagaaccattgaaaaatttgagaaggaggctgctgagcaattctgtggtgttcttggtcac

SEQ ID NO: 775876 - DNA, 75 bp, Homo sapiens
acaaagagcccctcatcgagctcttcgtcaagatccacaagaaggtgctgtggtggttctccctgcagactctca

SEQ ID NO: 775877 - DNA, 98 bp, Homo sapiens
ggcgatggggaaactgcagtcgaagcacggagcgagaacccgagcagcgccatgagcaacactaccgtcgtccccagcactgcaggtccgggccccag

SEQ ID NO: 775878 - DNA, 82 bp, Homo sapiens
aggtgaaccttcgaccttggacttctcagcctccagaatggacgagattgaggagctgcgggccgagatgctggagatgcgg

SEQ ID NO: 775879 - DNA, 90 bp, Homo sapiens
ccaggaagtaactttagaggaggatctgatggaagggcgagaacgtgtccacgcacgaggtggagggcgtgttgtcgcaggtggacttct

SEQ ID NO: 775880 - DNA, 75 bp, Homo sapiens
ttgcctgtgcgcgcgtgcgcggacatggcctcaaacgaatgctatcttctttgagaagtcaaattgtcaggatca

SEQ ID NO: 775881 - DNA, 100 bp, Homo sapiens
tcgaaggttgtttggcttgtttaacagcatataccatcttcctatgcatggaaactcattatgagaaggtcctggtgttcctatggtgacggtgcacaac

SEQ ID NO: 775882 - DNA, 75 bp, Homo sapiens
aatcagtctttgacaagtgatgagaagctgtcggagcttcccaaggcaacagatcccctaatttgtggctgaaag

SEQ ID NO: 775883 - DNA, 100 bp, Homo sapiens
atctctcaccatccaaaaaaatgccatggacaatattaccaggcagaaccaattctacgatacccaagtcatcaaacaagaaaacgagtcaggctacgag

SEQ ID NO: 775884 - DNA, 50 bp, Homo sapiens
tataaaattgacttttgaagcaacaggttcaaccttaaagtgcaattgca

SEQ ID NO: 775885 - DNA, 80 bp, Homo sapiens
gagagcgtgaccgagagcgcgaatatcgtcatcgttagaagaaaagccgaaagccgtgattccgatctacgaaggcgatt

SEQ ID NO: 775886 - DNA, 100 bp, Homo sapiens
tggagaaatttcacagtacatcatccaaaagaggagtccatgatggaggcagaggtaaacttggagagctaaaggtggttatttaagtatttttaaaaat

SEQ ID NO: 775887 - DNA, 100 bp, Homo sapiens
tcatggaggctgagcatttattcagcaggaggatgcattagcacaacaggcctttgaagaggctcggagaaggacacgcgaatttgaagatagagacagg

SEQ ID NO: 775888 - DNA, 75 bp, Homo sapiens
agcccttgtcaattatctgcggtgacagtgacacactccccagacccatccaggaacgtccttgtgaagaccttt

SEQ ID NO: 775889 - DNA, 75 bp, Homo sapiens
ccggcagctggagaggtctccaacaagcttccaaaatggcctggacagtcattttgtttactcattcagccctgt

SEQ ID NO: 775890 - DNA, 100 bp, Homo sapiens
agaagataaaaaagtgaatcagcagccaaatacagcggcttacagggagaacacagttggcctccaccgtttctgccccacagaaaacgtagcaaagatc

SEQ ID NO: 775891 - DNA, 80 bp, Homo sapiens
agcagttgtatgtgtagaaagtgaaatcagaggagatgtaactatcggaagaggatcacctagcccgggtagaagaggca

SEQ ID NO: 775892 - DNA, 97 bp, Homo sapiens
tgttctcaaccacttgctatctcgagtggagactgctgcacggactctggaaccatgaacatatttgatcgaaagatcaactttgatgcgcttttaa

SEQ ID NO: 775893 - DNA, 73 bp, Homo sapiens
ggaggccttccagctgtttgaccgaacagttgaaaacaccacacactgtgagtttgcctacctgcgggacctt

SEQ ID NO: 775894 - DNA, 100 bp, Homo sapiens
tgtcagcatgaacaccttctccgacagcagcacacccgaggagttggaaactctggagagcaacctcttagcacagcagaattcactgaaagctcaaaaa

SEQ ID NO: 775895 - DNA, 82 bp, Homo sapiens
tgaggaccagcagatggccagtcacgagaacccagggtgaggtggctttgaccccgggttgcccggccagcacgaccgagga

SEQ ID NO: 775896 - DNA, 100 bp, Homo sapiens
ccaaagctacaggattctggaaccgtggagacaccgagaaaccatgagtgtaaggttaccccagagtatagacaggcattagacagaaagctggaagttg

SEQ ID NO: 775897 - DNA, 75 bp, Homo sapiens
caccaggataatattctctcattgattaatgtcaatgggaaatattagtcgtcaagaagctgttagcatgatccc

SEQ ID NO: 775898 - DNA, 100 bp, Homo sapiens
gatttctttgctcagcaaacacgatttggaaagaagaaatataatcttcatcctggtgtaacgtcagttttaggaagcagtacagtttctaagtcaagtg

SEQ ID NO: 775899 - DNA, 75 bp, Homo sapiens
ggactcagctgtgtcacccgtttcagattgtggatcccagtcaaattctggaagggatcaacctgtctaaaagga

SEQ ID NO: 775900 - DNA, 100 bp, Homo sapiens
gattttcgcaaccacccaaatatcactttctttgtttatgtcagtaatttcacctggcccatcaaaattcagtatgcctgggtggagaagtactttggcc

SEQ ID NO: 775901 - DNA, 88 bp, Homo sapiens
ccatcatccttttgggcttgatcatcgcctaccacacacgtgaagtccagcaaaatgatgcttcaacacccaggccaggtctctgcct

SEQ ID NO: 775902 - DNA, 90 bp, Homo sapiens
cagggctactttgtcctggcaggaatgaactctgctggcctttcatttggtggaggagccggaaagtgctgggtaggccaggtttcagca

SEQ ID NO: 775903 - DNA, 80 bp, Homo sapiens
ggcttcgaggagaataagtgcagtatgagctacatgtttgagtacccggagtatcaggattctgagaaacgaacccctct

SEQ ID NO: 775904 - DNA, 75 bp, Homo sapiens
cagaggaacgagctgagctggcagagtcgtctatcagatcatcaaaactctcagaaaacacagttattgttggtg

SEQ ID NO: 775905 - DNA, 83 bp, Homo sapiens
actgcaccccagagttccaggccaacgaggtgcggaaggtcaagactcaaagtcctctggctcacagcctctcagccctgcag

SEQ ID NO: 775906 - DNA, 140 bp, Homo sapiens
ttcttcagaagaaggacttcggaatgcactacaacaggaaaatcatattatagatggagtaaaggttatcaatactctggctgaccatcatcatcgtgggactgactttggtggaagtccttggttacatgtcattattg

SEQ ID NO: 775907 - DNA, 101 bp, Homo sapiens
cagctgcaaggagggcggcgggactgcactcgagtgtccagacctgctcgatggctcttactctctgtcagtccgcctcagccgccctgcatcctgggacc

SEQ ID NO: 775908 - DNA, 50 bp, Homo sapiens
ccggtgacagcgtgagaggttcgcagaagctgaggaactgcgtgtggagt

SEQ ID NO: 775909 - DNA, 100 bp, Homo sapiens
tgaagctgaatttatcctgagcaggcagagagcagaagatattcacagacatgcggaatttgagagctggagtggaccagagaaattgcttgctttagat

SEQ ID NO: 775910 - DNA, 89 bp, Homo sapiens
ggaaatcaggtcagcggagaagatgctggaaacaagtgttggaggtacttctgaaaatgatgacccttccaaaatggttatggttctgg

SEQ ID NO: 775911 - DNA, 101 bp, Homo sapiens
acagcactgccaaatagcagaagaataccatgaggtcaaaaaggaaatcaccctgcttgagcaaaggaagatgtttggaccaggaagagagtacaacttca

SEQ ID NO: 775912 - DNA, 51 bp, Homo sapiens
cagctgttttgcagattggactacaagtgggaagttgctgaggtggttttg

SEQ ID NO: 775913 - DNA, 100 bp, Homo sapiens
gatcgattttaccttggataccctgctttgggtctttatcagtaccatatgcttatcagtgctgtgcattttggggttgtgactcttatgcaaatttaaa

SEQ ID NO: 775914 - DNA, 83 bp, Homo sapiens
ctcagcgttcccctctggcgcctttgctgctcctctctctgcacggtggtgattccctgcggtgtgcaagtccgactggaaca

SEQ ID NO: 775915 - DNA, 98 bp, Homo sapiens
gaagaacctggcacagctgaacgacatccaccagcagtacaagatccttgatgtcatgctcaaggggctctttaagagttccgttctggaaaggcacc

SEQ ID NO: 775916 - DNA, 83 bp, Homo sapiens
tctaggtgatcatggagactgccagatcgagaagaagctggaaccactgtcacaggatgaagaccagcacgcggacctgaccc

SEQ ID NO: 775917 - DNA, 71 bp, Homo sapiens
ggaagccgtgctgcagctcacgcccgaggtgcagctggccatcgagcagtatacgctcaacggcaagaaag

SEQ ID NO: 775918 - DNA, 90 bp, Homo sapiens
taaaattcaacccagctttcaaagtccagtcaaaatatcaggtacatctccgttcatggatgcattaacagccaatgggacaaccaacat

SEQ ID NO: 775919 - DNA, 101 bp, Homo sapiens
catgaaccatttcttctgtatagaaatgcaagctgcgtcacctcctcctgtcgcctggccctcgccatgcagaccccgcgagcgtcccctccccgcccggc

SEQ ID NO: 775920 - DNA, 98 bp, Homo sapiens
ttatgaccggatgctgggaagcctgctggtccacaggtccatacatgaagtcaccataagatgcagaggccaggatgtgggcccagccctgtgccagg

SEQ ID NO: 775921 - DNA, 90 bp, Homo sapiens
tcgagaatacagagagaaaattgagacggagctaagagatatctgcaatgatgtactgtttttacaatgctaccaacccattggtaacct

SEQ ID NO: 775922 - DNA, 100 bp, Homo sapiens
tctccacgccgctccgactccaggggagccgtggcctcctctccgccctagcgctgagacacgtgctcccgagtcagaagggccttgcactggagccagg

SEQ ID NO: 775923 - DNA, 83 bp, Homo sapiens
cggaagcctgcgtaactttctcccttgatccgggagtctttccactggcaaattgtggctactaatttgccccctgaagatca

SEQ ID NO: 775924 - DNA, 100 bp, Homo sapiens
tgcttcctctgctcgcggttagcccgtcagtccctgctctgtgcgcgcctccatctgggccatggatgggaaaagcaggtgatattctcagtggagacca

SEQ ID NO: 775925 - DNA, 100 bp, Homo sapiens
ctcgactccaaatggttgaaaacagatatacaggtttttcgttggaatatacgttgcacatttatggcgattctgagtgtgagggcagacttctgccagg

SEQ ID NO: 775926 - DNA, 100 bp, Homo sapiens
gtggtgcaccaccacggcctcttccagattatgtttgagaccttcaacaccccggccatgtacgtggccatccaggccgtgctgtccctctacgcctctg

SEQ ID NO: 775927 - DNA, 83 bp, Homo sapiens
cgcaacaggcgttttgcaatgcagatgtagttcccagtgacctgacagcagaggagcgtcaagaactggagaacatccgacgg

SEQ ID NO: 775928 - DNA, 97 bp, Homo sapiens
tccccatcctgcacttccgagccgcccggccacccttcgtcatctgcgtgaagctggtgtaccttccggtttcccagcacggccatcaagatccagt

SEQ ID NO: 775929 - DNA, 80 bp, Homo sapiens
taacaaatgtgatgacaagaaggagagatctctgctgcctgcattgaggggatcatgttctaattgagctcacccaggct

SEQ ID NO: 775930 - DNA, 100 bp, Homo sapiens
tgacctctgcaaaattccttctctaccttggtcattctctctctacttggcatggcctgtatgagaagaaaaagacctcaagaaagcaacgaaaggaacg

SEQ ID NO: 775931 - DNA, 103 bp, Homo sapiens
agagccggctgagaacggcagcggcgagggctccacgtgcagcgtctctccggcatgtagagcgcatgaagtacaggacaataaagcttcctacacatatcac

SEQ ID NO: 775932 - DNA, 100 bp, Homo sapiens
gaggttgggagatgggagtgctgcccctcccttcctcccccaagccctgtctttccttctcctcctgccactgggtgatggaaccagccctggaaggcac

SEQ ID NO: 775933 - DNA, 75 bp, Homo sapiens
gaaaatggacgagtaatcgcctgctttgattcattgaaagtgccactgattaatgaacttgaatcagcaatacat

SEQ ID NO: 775934 - DNA, 100 bp, Homo sapiens
atcctgtccatcgtgtgcctgatgatcacgcagctggctggcttcagtggaccaggtgtccgcaatgttgccagtgtctgtctgcagattggctacccaa

SEQ ID NO: 775935 - DNA, 108 bp, Homo sapiens
ccagtgggaggtggagcgggcggagctgcaggtcccttcaccgatgttgtcaccaccaacctaaagcttggcaacccgacagaccgaaatgtgtgttttaaggtgaag

SEQ ID NO: 775936 - DNA, 76 bp, Homo sapiens
agcacctcagcagccagaacagatatttcagaacctaatccaccaatagatcaagttatacagaaaccaggagttg

SEQ ID NO: 775937 - DNA, 83 bp, Homo sapiens
gccaagaagatcatcattaaggacggaggcacggtgcgcgcggagccatggttatcatgtcggagttcagcgcggaccccgcg

SEQ ID NO: 775938 - DNA, 83 bp, Homo sapiens
agcgagagtgccaaccaggccttcctgacacgatgaggcgagtggtacgacagagcaagtttcggcatgtatttgggcaagcg

SEQ ID NO: 775939 - DNA, 75 bp, Homo sapiens
ggagaatacaaacctgacaagggtaaaggattcttctctaatacttgatgttcctctgggtgtgatctcgagaat

SEQ ID NO: 775940 - DNA, 100 bp, Homo sapiens
aaggacatcaacttccggccgcagatgtcccaggaatactcccccagttgcaagaggcgcaggaccgtggaagacttcaacaaattctgcacctttgtct

SEQ ID NO: 775941 - DNA, 101 bp, Homo sapiens
cgccaaccgcaaccattgacgccatgtcgggttattcgagtgaccgagaccgcggccgggaccgaggcctcgatgacttacgagccctcaaggggaagcat

SEQ ID NO: 775942 - DNA, 90 bp, Homo sapiens
accagcttccagttagtggatatagcacaccatccccagccagcagcctgagccgggcagggcccctgcctctgctacggcagcccccga

SEQ ID NO: 775943 - DNA, 99 bp, Homo sapiens
tacggggaggtgtacgagggcgtgtggaagaaatacagcctgacggtggccgtgaagaccttgaagtgtgtgctgtatttgtgggccttgaaaattctc

SEQ ID NO: 775944 - DNA, 82 bp, Homo sapiens
cgagaccgtcctggcgcgatgcgtcaagtacactgaaattcatcctgagatgagggtccaattctcagactgtggtgactca

SEQ ID NO: 775945 - DNA, 100 bp, Homo sapiens
atagaacagtgtgactacccacctcttccttcagatcactattcagaagaaggtgagcccatcactttctgtgaggagagttttgtaaagcaccgctcaa

SEQ ID NO: 775946 - DNA, 83 bp, Homo sapiens
gtcaccatttgatttggaacagcagtggcaagatctcatgtccatcatggaaatgcagttacatcatgctgatgacagcttcc

SEQ ID NO: 775947 - DNA, 100 bp, Homo sapiens
aatgaaatgctgactaaggaacaagggatcagtgtcatttagggatgtgactatgggcttcactcaagaggagtggcatcatctggaccctgctcagagg

SEQ ID NO: 775948 - DNA, 100 bp, Homo sapiens
gggaaggatggtgtcctccgggacggagatggagccgtggtccttcccaatgagaaaagcatcagatttttctttggaagcatctgtggctgagatgaag

SEQ ID NO: 775949 - DNA, 85 bp, Homo sapiens
taatgctggcaaagtggaaaaatgtgcggtggaggtggaggaagcgtccctgggatcgagaggatgggtcctggcattgaccgcc

SEQ ID NO: 775950 - DNA, 83 bp, Homo sapiens
caagaggaggacagttcgctacacagcaatgcatcgagataggtgatcttcagctttgcaaactggatgaactagattgcttg

SEQ ID NO: 775951 - DNA, 95 bp, Homo sapiens
atggacctctctggaagagggaatcccatcaaagtcagccgtgtggggtctgcaatggtcatgcaagacaagataatctgccttccgaaaagagt

SEQ ID NO: 775952 - DNA, 75 bp, Homo sapiens
agcggaggcctgagtgcacccgctgcaggccgaatacatcaagcaatggtaacatctttaaatgaagataatgaa

SEQ ID NO: 775953 - DNA, 100 bp, Homo sapiens
tgtcctcgtgtttgtcgtcttcttcatctgctttggcctgaccatcttcgttgggatcagagcctaaatgcgatggccaggtattactgacacaagtgtg

SEQ ID NO: 775954 - DNA, 100 bp, Homo sapiens
ggaacagccagaattggacccgaaaccatgcctcactgtcctaggcaaggagatcatgaatcagacagataaaaatcaacaagaaatcccatcatacctt

SEQ ID NO: 775955 - DNA, 100 bp, Homo sapiens
agcagctgcaacttacatactagaggcaggaaagcaccgagctgacaagtcaactctaagattctggacaatcaggaagtccaagccacaatgatcctgc

SEQ ID NO: 775956 - DNA, 101 bp, Homo sapiens
taaaatttttggtattgcagatgacttaatcagctgtgttcagcgaatacttatgaacagaaggctccagcagcagtacaatcagcagcaacagcaacaaa

SEQ ID NO: 775957 - DNA, 97 bp, Homo sapiens
ggcgatgctgagagagagcaagcgtttcagcgcctacaattacagggacggcccaggtggcaggatgtcctggtctggccttctccatggcctcaac

SEQ ID NO: 775958 - DNA, 74 bp, Homo sapiens
ctacaaagatggacttctctgtacagaaaatcctgagcgagcagctctgtactttgtttctggcgtgtgcatcg

SEQ ID NO: 775959 - DNA, 75 bp, Homo sapiens
ctagaatcaactgagagagatgcttaaaaatcaccagttactttaatgagaatgtatcctgtcaggtataatgtc

SEQ ID NO: 775960 - DNA, 100 bp, Homo sapiens
gtccgtgttcggtgaccgcagcactggggaaacgatccgctcccaaaacggaggcaagtgaggcctatctggttggcctttttgaagacaccaacctgtg

SEQ ID NO: 775961 - DNA, 90 bp, Homo sapiens
caatggttccctggtttggtgccagaatcacaagcaatgttctaaggtgtaccttgaaagacttttaacatacgcagagatagatatctg

SEQ ID NO: 775962 - DNA, 80 bp, Homo sapiens
ctttctacatgagggataatgaagatggccctcagcacacgcactgaagtcagtggatctgcatgaatctggaaaattgc

SEQ ID NO: 775963 - DNA, 100 bp, Homo sapiens
tatgtgctacagtctgcggaacggagcagtatttcaatgtggaggttcttgggtgtctctggggagtccctgggccagaccttcctccagactccagccc

SEQ ID NO: 775964 - DNA, 76 bp, Homo sapiens
cttcctgctgctgcttttcaggggttgctatcaagatcatagataagacccagctggatgaagaaaacttgaagaa

SEQ ID NO: 775965 - DNA, 100 bp, Homo sapiens
tgtggctgccgtcatcaccatcaccttcaatccgctctactggaatgtggattctgaaaccttccttgtatccctcctgagacatctttgctgcaagatc

SEQ ID NO: 775966 - DNA, 100 bp, Homo sapiens
gtttaatgtcttctcatgcccagcccctgaagctgatttcaccatgcccatattccctttcctcaggcatggaagaggagatggttcgtgttacgcagtg

SEQ ID NO: 775967 - DNA, 100 bp, Homo sapiens
aactgcgcagcctcttcgagcgccgcggacgcgtcatcgagtgtgacgtggtgaaagaccagcatgttttggaaatttgatcttcactcatcatcccaca

SEQ ID NO: 775968 - DNA, 100 bp, Homo sapiens
ggcctccgtgacgcggcctcctccgcgcctcgcggcatggcgtcggaggggccgcgggagcccgaaagcgagtttttgagatggagtttcactcttcttg

SEQ ID NO: 775969 - DNA, 85 bp, Homo sapiens
aaccttatcaaaacaagaatgctatcaataatggtgttcgaatatctggaagagatgttgatgatggagacacagtgacagattt

SEQ ID NO: 775970 - DNA, 87 bp, Homo sapiens
agcattgtgcatagttttcttcgattgttgcaacatcccttgcgagcactatcctgaggagcgacatgtggttgaacgccatggacg

SEQ ID NO: 775971 - DNA, 113 bp, Homo sapiens
cgtccgcccactccgcggcgttcggggaaatggctgcgagaccctagaggcctgcggcctgcgagtaacagttacccctcaatgagcgacccctacctgtccagctattaccc

SEQ ID NO: 775972 - DNA, 74 bp, Homo sapiens
tcatctgcagcccctgctgttgctacaactcagagcattacagcattgtgaagaactgattcagcagtacaacc

SEQ ID NO: 775973 - DNA, 59 bp, Homo sapiens
gacaaggcatctgccagcggctcaggagcccagaggcatttcatccttcatgaagccat

SEQ ID NO: 775974 - DNA, 75 bp, Homo sapiens
gccgtgttccatcaaagtccttgacaaggctacgacatcttcatttgattgtacaccatctcccagcaagacacc

SEQ ID NO: 775975 - DNA, 97 bp, Homo sapiens
cttcaccaagtacgctgcccagctggacgtcaagagggaggagtggggccagttaaaagctccccatgccaaccgattcatcttctctcacgacctc

SEQ ID NO: 775976 - DNA, 100 bp, Homo sapiens
aggcaggtgctggccactcgctccagaaagctgccgcacgagctgtgcacgctcatccgactactgttcgaagatttttggaagaatactgagaacggca

SEQ ID NO: 775977 - DNA, 73 bp, Homo sapiens
actatggatgctgggaaactgggcggcgactggcggcgcgatggacctgaccgggctcctgctggacgaagaa

SEQ ID NO: 775978 - DNA, 75 bp, Homo sapiens
gttacctatgtacctgttaccactttcaaaatccaggacatcaacatctctttgtggcgcttgccagaaaaggtg

SEQ ID NO: 775979 - DNA, 100 bp, Homo sapiens
atccggcgcgcgtcttccaccacaatgcctgagcggactgagaaattgcccatgggctccataaaaaatgtggtcagtgaacctatcgaaggacatgaag

SEQ ID NO: 775980 - DNA, 98 bp, Homo sapiens
tttgtaggagcatggcttggagcacttcctattccactggattgggaaagaccatggcagtgtgattggtccagatagctgccttatccaactgcctc

SEQ ID NO: 775981 - DNA, 100 bp, Homo sapiens
attcctcatgttgcttagcttggcttttgctggacctgcaattacgaactctcttgatagagcccaagcagccaagaataaaggcaataaatattttaaa

SEQ ID NO: 775982 - DNA, 101 bp, Homo sapiens
gaaaacatcaaatcaaaaagcacaagaagaatatgaacagatacaagccaaacgtgctgctaagaaacaaactccatggacgcagcgacgagagtgatcag

SEQ ID NO: 775983 - DNA, 83 bp, Homo sapiens
gttttagcagccttgatgaagaagattgttgaacagataaatacgaaactgccatcatcatttgtagaaaaactgtttatacc

SEQ ID NO: 775984 - DNA, 75 bp, Homo sapiens
gaaatgttcccagaacattgcacgatgcctcctgataacgaaggaggcccaacttcattcaataaggagcctgac

SEQ ID NO: 775985 - DNA, 75 bp, Homo sapiens
cttaaaacaagaacagatgtgtaatgttggtgtatccatggggcttacaagtcaccccaaaccagaaggcctggc

SEQ ID NO: 775986 - DNA, 100 bp, Homo sapiens
ctgcagtgaagatgttgcccaccttcgtcagggccattcccgatggttccgactactccaaaggattcggcgggaagtatggggtgcagaaggatcggat

SEQ ID NO: 775987 - DNA, 78 bp, Homo sapiens
aattccaagatgccatctgttattaaaaattggcagagggggtcgatttgggaggaaaggtgtggctataaactttgt

SEQ ID NO: 775988 - DNA, 82 bp, Homo sapiens
gaggaagacgaatcgttaaacatctgaaagggtcaggccatggtaggggaggagtgtgtaggtgccatcgtttgcaagttgg

SEQ ID NO: 775989 - DNA, 100 bp, Homo sapiens
cctcagaagcatgtgtcttccccagctctgcagccacatactatccgtttgttcaggaaccaccagtgacagaacgcaaacatgcagatctttgtgaaga

SEQ ID NO: 775990 - DNA, 82 bp, Homo sapiens
ggaagattcgatggacatggacatgagccccctgaggccccagaactatcttttcgcggacaaggcaaaatctcagcaagtt

SEQ ID NO: 775991 - DNA, 96 bp, Homo sapiens
gcagttctggaccagaatacctcaaacgtctaccattacagtggcgaagagaaaggcatgcaaagacaatagatatagctcaagaagaagttctga

SEQ ID NO: 775992 - DNA, 75 bp, Homo sapiens
atgggaagcaagagaaaaagaacattactgtcttgatcaaatgatgccgtttggaaaaatttcccagcagttgtg

SEQ ID NO: 775993 - DNA, 101 bp, Homo sapiens
ggggaggacaacttcgcccgggacttcatggattaacacagattcctcagatccagaagactgaaatttcctttcgtcctaatgatcccaagagctatgag

SEQ ID NO: 775994 - DNA, 82 bp, Homo sapiens
cggcttggagaggccgagggtttgatgaaggtggaggcagcgcggctctcagcaattctgtggtgttcttggtcacacattt

SEQ ID NO: 775995 - DNA, 100 bp, Homo sapiens
aagcgattccgagtgtttactaagcctgttgaccctgatgagggtgactctggggggcccctgatctgcaacgggtacttgcagggccttgtgtctttcg

SEQ ID NO: 775996 - DNA, 75 bp, Homo sapiens
tctgactctgactctcggactgagaaacgcaagaagtccattggaatattaagcccaggagttgctttggggatg

SEQ ID NO: 775997 - DNA, 104 bp, Homo sapiens
agaaaaattattatgtctgtgttcccttgggactcattggaaattgtacagtgacatcttctgggatttagtctgcctctacagctttacgttccagtccaata

SEQ ID NO: 775998 - DNA, 75 bp, Homo sapiens
cgctgcccggtccgcccgcggtgagaggttcatctgtgagtcgtctaaagggcgtgaataaagtcagagcatctt

SEQ ID NO: 775999 - DNA, 96 bp, Homo sapiens
acgcctgcccagtattctaccaggcctggtgctggcctcctgtgatgggccttcgcactcccaggtaaactgtcttgagccccaccctcacctgcc

SEQ ID NO: 776000 - DNA, 100 bp, Homo sapiens
acactttcaaatcatggaagactcaaggaaccaaatggcgagacaccatcatctttatacagagttgcagcagtacttctacaatttaatcttattgatt

SEQ ID NO: 776001 - DNA, 103 bp, Homo sapiens
cgtgccgcgtctccgcgttcccagcccgggtccccgcgttcacagccccagcgcagacctgcctagagctggaacgttacctccagagcgagccctgctatgt

SEQ ID NO: 776002 - DNA, 98 bp, Homo sapiens
tgaaaatgtcacctctatcatgtttctagtagcgcttagtgaatatgatcaagttctcgtggagtcagacaatgaggacccagatgatgtggtaccag

SEQ ID NO: 776003 - DNA, 51 bp, Homo sapiens
cagagtggaggaagtacagccagcacccagaagaatcagtgcggtttctgt

SEQ ID NO: 776004 - DNA, 83 bp, Homo sapiens
atctgcctccctgccccagcccatcctctctaaccaaggagcaggccgggctctcgccatgggtcactgtcgcctctgccacg

SEQ ID NO: 776005 - DNA, 100 bp, Homo sapiens
gtcggcatcctcctggcctacctggcagggtctccgtctctccaccgggggcttcatccttccagggaggagaagagggactccagaatggctgaggaga

SEQ ID NO: 776006 - DNA, 83 bp, Homo sapiens
atgagcgtcaaaattatccgaaaccgcctcactggaattcttccatctctatgacaacaagcccattttagctttctggagaa

SEQ ID NO: 776007 - DNA, 83 bp, Homo sapiens
ggacggcgagcgcgagcggcgcgagaaaacgcatcttctctccagactgccgatcccagaaagccaggtgatcaccattaacc

SEQ ID NO: 776008 - DNA, 98 bp, Homo sapiens
atctgagcgagcgccggggccagcggagccggagccgccgggacatgggaacaagcacatcatgattgacttggggactggcaacaacaacaagatta

SEQ ID NO: 776009 - DNA, 75 bp, Homo sapiens
cagagcctcgcctttgccgatccgccgcccgtccacacccgccgccagagctgccatcagtcatgctcttaaacg

SEQ ID NO: 776010 - DNA, 75 bp, Homo sapiens
gtgatggcaacctgtgggcctggccatctagaggtgctgcagcttttcctctttcgacgtgtagcagcagctttg

SEQ ID NO: 776011 - DNA, 101 bp, Homo sapiens
gaagttcttggctgcggggtgatggaacaacaactggtcaattcaggggacatcacccagaagggctatgaaaagaaaaggtccaaactcctatctcctta

SEQ ID NO: 776012 - DNA, 90 bp, Homo sapiens
ccgcccccagatcggccagtccgagcgtgccggacacagccaggttcctttgcccaaagactcaacaggtgcagcagatcccccccagcc

SEQ ID NO: 776013 - DNA, 80 bp, Homo sapiens
gcctcatcccaggttgccttggaaaatgccaacgccgtgtctgaaggtgcctatggttcatgcttgaagttttaatgaca

SEQ ID NO: 776014 - DNA, 82 bp, Homo sapiens
acgccctatggcgtccgcctcgacccaaccggcggccttgagcgctgagcaagcaaaggggcagcccaatggatccaatggt

SEQ ID NO: 776015 - DNA, 87 bp, Homo sapiens
gaaataaggacaaaagccaagaggaggacagttcgctacacagcaatgcatcgaggtatatgccctcattttgcttaagacctctgg

SEQ ID NO: 776016 - DNA, 100 bp, Homo sapiens
agccattgaagtatttgaagcacatttgggaagccacattttgcaggatcttatggttggtgatgaggcaagtgaattacgatcaatgttagaagttaac

SEQ ID NO: 776017 - DNA, 83 bp, Homo sapiens
gtgcccaaggctgcgccggcgaggggaagccgcgcggccggccggccgactaggaatccaggagtcctccagctgagaacgag

SEQ ID NO: 776018 - DNA, 98 bp, Homo sapiens
gaggagcgagcgctgcgaggtggcggcctgagctgcatcttcctcccgtgaggctggccgagctccacgctgatctgaagatacaggagagggacgaa

SEQ ID NO: 776019 - DNA, 75 bp, Homo sapiens
tgagctggggcaccgagctctgggaagttctacagactttgaccaagttttgtttccccttctatgtggacaggt

SEQ ID NO: 776020 - DNA, 75 bp, Homo sapiens
ctcccacctcagtctccctgggactacagactggtcttctgaggacctctgccctctacacagcggcctcttcag

SEQ ID NO: 776021 - DNA, 100 bp, Homo sapiens
gcaaaggtggctaaggacctcaacccaggagttaaaaaggacaatgaaaagcgaaccccattgcacgccgcagcttaccttggagatgcagaaatcattg

SEQ ID NO: 776022 - DNA, 96 bp, Homo sapiens
aagaaaaactgaaggagacagaagcagccatggaaaaattaatcaacagagtgggacctaatggtgagaggacccatgccccctttgtgatgaagc

SEQ ID NO: 776023 - DNA, 82 bp, Homo sapiens
caaactaagccgattttccggaaaaaggtggtattccaaacacatgactcggagtcaggctgagcaactgctaaagcaagag

SEQ ID NO: 776024 - DNA, 111 bp, Homo sapiens
tggagagctcaccagggaggagctgaggcaaattgcaggactgtgaaggccttattgttcgctctgccaccaaggtgaccgctgatgtcatcaacgcagctgagaaactcc

SEQ ID NO: 776025 - DNA, 75 bp, Homo sapiens
accatttggctttcggctgtgcagtgagtgaagatcttgtaatcaggttacgtcgaccccctctaagatacccaa

SEQ ID NO: 776026 - DNA, 75 bp, Homo sapiens
tgaaggatgaacggagaggaagaattctttgatgccgtcacagaatagcctaacatggcagaccagagacagcgc

SEQ ID NO: 776027 - DNA, 74 bp, Homo sapiens
cttccccaagtagtccgatggcagcggctgcgccgaggcgcccgactcaggtcagcccaaggccaaccccactg

SEQ ID NO: 776028 - DNA, 50 bp, Homo sapiens
tggagtattttgagattggagaattaaggcatctccttggaaacaatgcc

SEQ ID NO: 776029 - DNA, 100 bp, Homo sapiens
atccccgagcttcagctgcaggacaatgctgccagaggcctggtcctcagagctcacgagcagtatagcatcaagttctagaggaattgggagccattgc

SEQ ID NO: 776030 - DNA, 100 bp, Homo sapiens
gaaacagaaagtttacaattccaagacagggattgaccagctcgtggtgacgcctatttctcagtgacatgcaagatgattttatctctccatgtggggc

SEQ ID NO: 776031 - DNA, 119 bp, Homo sapiens
cggcccctggcgagatgccgtgtggggaggattggctcagccacccgctgggaatcgtgcagggattcttcgggctagagcaatgtatcttaggctcacttaaggaagctgtagagatg

SEQ ID NO: 776032 - DNA, 83 bp, Homo sapiens
cgggaggtgaatttccatgtcaacatagtcctgatctgaagaagacacttgaatcatgggtgacgttaaaaattttctgtatg

SEQ ID NO: 776033 - DNA, 100 bp, Homo sapiens
gagaacacagttggagaaaatcggcagctgagacggccttggccgtgaaagccctgtgtaaggaatgtgtagtagaacgttgtcgcatattgcgtctgaa

SEQ ID NO: 776034 - DNA, 98 bp, Homo sapiens
atcatcagattaatccatgtgtgaaaaaagaatatagagatgacccttttcatcagggtagtggtggtgcacgaagatccgcactacttgacagcgac

SEQ ID NO: 776035 - DNA, 98 bp, Homo sapiens
ggaaaactgcagtggaagatgaggacagcatggatgggctggagacaacagaaacagaaacgattgtggaaacaggtgatctgggctcttgggatctg

SEQ ID NO: 776036 - DNA, 90 bp, Homo sapiens
agcatgaagaccccggcggacacaggtgcccctttcggctcctccattgcccccacggccagatctgccccccaggaagcccagaaatgc

SEQ ID NO: 776037 - DNA, 80 bp, Homo sapiens
gacactttatcaatcactcattcaaagaatgacacgctggggggaatttgacgatctctatcgtattagtgagctggaca

SEQ ID NO: 776038 - DNA, 82 bp, Homo sapiens
ctgctggtgcagacgggctccagctccccgtgcctcgacctcagacaatgcagatcttcgtgaagactctgactggtaagac

SEQ ID NO: 776039 - DNA, 100 bp, Homo sapiens
ttccatggatgaactgaatcatgattttcaagcacttgctctggagggaagagcgatgggagagaccccatgccacagctggatgtgactgaggccaaca

SEQ ID NO: 776040 - DNA, 75 bp, Homo sapiens
agaagaaaacgttcaccaagtgggtcaacaagcacttaatgaaggaaaatggctttgtaaagaagtttgaaccta

SEQ ID NO: 776041 - DNA, 98 bp, Homo sapiens
gcagataaactgttgaagaaacataaggatcttcattgtgctaagatcctgaggaagtatggcgtgccaaagcccaagtttgacaagagcaagtacag

SEQ ID NO: 776042 - DNA, 88 bp, Homo sapiens
cgccctcagccagttcgtgattcacaggagcctctgtatcagcaccatgcaggtccttgaatgggcaagagggcacatgaagtacggc

SEQ ID NO: 776043 - DNA, 90 bp, Homo sapiens
cagcagaatttgtatagagatgtgatgttggagaactacagaaacctggtctccctaggacaatctctatgggaagcagaaggcaaggac

SEQ ID NO: 776044 - DNA, 98 bp, Homo sapiens
gcggccggagtgggccgcttcaagaccaaggcagcgggtggcatgagacgtgggaacatgggccacctcacacggatcgccaacgcggtggtgcagaa

SEQ ID NO: 776045 - DNA, 83 bp, Homo sapiens
gcgcctgttccgcagcccgcgtccgcgccggccccacagctctgcgtccgggtcaaaatgcagatcttcgtgaaaacccttac

SEQ ID NO: 776046 - DNA, 100 bp, Homo sapiens
ctcagatacctgttcccggccctcctgcttcacggacatgtattcctctgagaaaccttggacagcagattttggtttaatatctgattgggacaacatt

SEQ ID NO: 776047 - DNA, 100 bp, Homo sapiens
ctgctaaaaacaagactggggctgctcccatcattgatgtggtgcgatcggaaggaaaatcacctcggcagtgtttgaaggaaggatactgcaactcttt

SEQ ID NO: 776048 - DNA, 74 bp, Homo sapiens
cctagaatatctctacctcagtgtccatgatgaggaccgagatggagctgctgctcaagaggtcatcaaaataa

SEQ ID NO: 776049 - DNA, 100 bp, Homo sapiens
tcagagtccaaggtccgggtatcttaccagggcggcgactggcggcgcgatggacctgaccgggctcctgctggacgaagaaggcaccttctccctcgcc

SEQ ID NO: 776050 - DNA, 83 bp, Homo sapiens
ccacagtgcccggctcggctgcgtagctgctgctggtggtgacaatgtcaaataacggcctagacattcaagacaaaccccca

SEQ ID NO: 776051 - DNA, 54 bp, Homo sapiens
atctatgccaaagtggaccggctagaggacgaatgccttagtttccactttcca

SEQ ID NO: 776052 - DNA, 101 bp, Homo sapiens
agcaagtcagacttcgagtgccaccgcctgctggagctgagtgaggagctggtggagagctggtggtttcacaagtggtaataagctgcagtcaacaggaa

SEQ ID NO: 776053 - DNA, 90 bp, Homo sapiens
cttcctccctgtgtactttccatttgccttcctggagctcccagctcctccagcagccgacaggaggcccgtcaagatgcaggcaggcat

SEQ ID NO: 776054 - DNA, 101 bp, Homo sapiens
gagtccaggacaaacgcttgtgcgagtaaatgtagagtcattaacaaggagcatgtactggccgcagcaaagtttcttgcagaacataaattattaggaaa

SEQ ID NO: 776055 - DNA, 119 bp, Homo sapiens
gcacattgaagtgttgaaggagtccttgactgctaaggagcagagggctgccatcctgcagactgaggactcctaaatcatcagtggcttaaagaaacagatgttcctcagaaatccag

SEQ ID NO: 776056 - DNA, 75 bp, Homo sapiens
agcatcatcctcctatcagaggaggacctccaggactcagcgaatgctctctacaccaaatgcctccagcagctt

SEQ ID NO: 776057 - DNA, 74 bp, Homo sapiens
cttttccgcccgcttcgatcgcctcgcgccggctgctctttccgggattttcaaaatggctgcagctcctcaag

SEQ ID NO: 776058 - DNA, 82 bp, Homo sapiens
atccattctcctgccacccccagacctcctcagctccagacatgaagagtatttctggagaagaatcatcccatggagtgat

SEQ ID NO: 776059 - DNA, 82 bp, Homo sapiens
atcgtgcacgagaccggctacttctcggcgctgccgtctctggaggagtactggcaacagatatgagatcctgactccaaac

SEQ ID NO: 776060 - DNA, 90 bp, Homo sapiens
ggactgcgagggaaagggggccttgttgagtccgccaggacttcctccgtcaggcagctggcaggacctgaaggatcacatgcgagaagc

SEQ ID NO: 776061 - DNA, 83 bp, Homo sapiens
ccagggaaaggatgacatatttttggacctgaaacagaaattctggaacacctatatgttatctccagaagaagaagagaaaa

SEQ ID NO: 776062 - DNA, 75 bp, Homo sapiens
gccgcagttcatcttcctccctgtgtactttccatttgccttcctggggggctagagagctgaaggagagccagt

SEQ ID NO: 776063 - DNA, 82 bp, Homo sapiens
ctgctctgggaccggaggagacatcggcctctgcaggcttgccgaagaagggaggaaagatgaatgggagggctgattttcg

SEQ ID NO: 776064 - DNA, 82 bp, Homo sapiens
cagctataccagccaccctgcccccaagaaggaagtcatcatgggccggcctggaacaggctgctctttggcgtaaattgca

SEQ ID NO: 776065 - DNA, 76 bp, Homo sapiens
gtggatcagcgcctacccgagtgtgcgaagctagccaagggtatatttcagaaatcgctgggtaaagactgtccac

SEQ ID NO: 776066 - DNA, 100 bp, Homo sapiens
caatggaggagaacagtgagagtcgacctgataaaaagcaacgtatggtaaatattgaaaactccaggcatcgaaaacaagagcagaagcaccttcagcc

SEQ ID NO: 776067 - DNA, 83 bp, Homo sapiens
cggagcttgaagcaaagctgcaggttttaaagatttaatccagagactgacttcactatagaacccacagttgtatcaatggt

SEQ ID NO: 776068 - DNA, 98 bp, Homo sapiens
gggccgcggcctccgagcgcgcgggatttgcaggtgtattccagagcaaatgaaaaagagccttgctgttggtggttagctaaagtgaggatgataaa

SEQ ID NO: 776069 - DNA, 99 bp, Homo sapiens
ggaaatgacagcttggaccatgggcgcccgcggtctggacaagcgaggaagtttctttaagctgtcaaagctcgaaaaacagcagcagaggaaagaaaa

SEQ ID NO: 776070 - DNA, 75 bp, Homo sapiens
tgacccttcgcccccaaagaccagctctaaccgagcagctgatgcagctgtacagtgcgcgccagcggcggcggc

SEQ ID NO: 776071 - DNA, 136 bp, Homo sapiens
ctgccttcagcccttccaggaggaccagcaagggctctgtgtgcccaggatgcgccggcctccaggggtggcctggaggccaagcagatgtggcagttctgcagcagaagcatctgccacaaaagcggaagatgac

SEQ ID NO: 776072 - DNA, 75 bp, Homo sapiens
ggccttcctcgcttccaagaatagtcaccggcctgagaaggagtggcctattaagagtctcaaagtctacctggg

SEQ ID NO: 776073 - DNA, 74 bp, Homo sapiens
aaaagttgatggagattacctttgggaatgattatcggacactgcgccaggggattatcgacatggtcttagcc

SEQ ID NO: 776074 - DNA, 90 bp, Homo sapiens
cagtaccctgatggagtcccttgcaggttgaaatcacaaagattagacacctttttagataggtgttcttcagcaccactgacaacacgg

SEQ ID NO: 776075 - DNA, 100 bp, Homo sapiens
gaaaatctccccggtgactttcagacgagatgatgcctattggccagaaggaaagcgtgtggcaatggaggaccgatatcgtgcagactttccccggcca

SEQ ID NO: 776076 - DNA, 50 bp, Homo sapiens
agagagcgacctggagcggggatacacgaagccacagaagaagtttcttt

SEQ ID NO: 776077 - DNA, 98 bp, Homo sapiens
actcaggcgattacaagacgattcacctgtccagcatccgaccaccgaggctggagggggagaacacccagacttttgtgaatgatgtaaggattccg

SEQ ID NO: 776078 - DNA, 75 bp, Homo sapiens
aaatcctggatctgtatgctttgagcaagacatcttcatttgattgtacaccatctcccagcaagacaccagttg

SEQ ID NO: 776079 - DNA, 110 bp, Homo sapiens
ctccgattccacacttgattctcttatacgctacttttactcagagtttgaaggttgtgaccaaaagaggctccgggaatcatcatccagggacgtgccagaaaccacaa

SEQ ID NO: 776080 - DNA, 100 bp, Homo sapiens
ctttcaggaaggagccattatttatgtcatcaagaagaatgacgatggtctcggatccgcagagaactgttcattgaggaaattcaggccgggagtcagg

SEQ ID NO: 776081 - DNA, 101 bp, Homo sapiens
tcagccaccagccccgaagggaagaagctgccacgcaccttctgccagctgatcctggaccccatcttcaagacttttttgtataacgagctctatgtcta

SEQ ID NO: 776082 - DNA, 75 bp, Homo sapiens
cctatagaggataccccattggttccatctcctgggctacctgaccaagtacgactgctccagtgcggacatcaa

SEQ ID NO: 776083 - DNA, 83 bp, Homo sapiens
gctgtctgggcttcatagcattcgcctactccgtgaagagctcaggccccggggcctccagcggcaccagcggagaccacggt

SEQ ID NO: 776084 - DNA, 100 bp, Homo sapiens
cccgaattccagtcacttttcacagaaggactgaagagtctgacagtacctaggtgctgatatggaagaatttcatggcaggactttgcacgatgacgac

SEQ ID NO: 776085 - DNA, 75 bp, Homo sapiens
ggctgacgaatgcctcaacaaagttatcaaattctttattggtgaaaacatgaatccagatggcatggttgctct

SEQ ID NO: 776086 - DNA, 82 bp, Homo sapiens
gcttcatgtgcaaccttgactgccaggaagagccagattcctgcatcaggctcgattatttgatgaacctcagcttgctagt

SEQ ID NO: 776087 - DNA, 100 bp, Homo sapiens
cgtgctttcccaagcctggaagaactcgtcatgctctttgtagcgtggtgcttctgttgctcacagggaaaagaagatctcccggagcagtgccctgaaa

SEQ ID NO: 776088 - DNA, 83 bp, Homo sapiens
ctggcggccatcgtcatcctgctgctgaagatctggaagacgcgctcctgcgccggtcaaaatgcagatcttcgtgaaaaccc

SEQ ID NO: 776089 - DNA, 111 bp, Homo sapiens
cggggaccctcagctggacacggccatcgggcagtggctccgctgggataagctctttcgacgtgtagcagcagctttgccgggaatggaaagcacacaggacagaagcag

SEQ ID NO: 776090 - DNA, 75 bp, Homo sapiens
atgtagcccagtcgacccatgttctcctttctacaccagcattagacgtcttacaggtttgaaaaatattggaaa

SEQ ID NO: 776091 - DNA, 100 bp, Homo sapiens
ggtgctgggcgacctgcaggcagcaccggaggcccaggtctccgtgcagcccaacttccagcaggacaagtgctacaaggtgagctgcctggaaatccct

SEQ ID NO: 776092 - DNA, 101 bp, Homo sapiens
ggccgctcggagtggaggccgcctgggggcaggcgggctagaggagcagagtgcgtcagtttatagaaatggtgaatggtacagatagtgaagtacgatgt

SEQ ID NO: 776093 - DNA, 82 bp, Homo sapiens
cggcgcgcccgccctgcagctgcccaagcagctggacggcagtctggaaacgaccaatgagatcttggactctgcctctcac

SEQ ID NO: 776094 - DNA, 74 bp, Homo sapiens
ggagaccctcacggagctgggcgacgagctgaccctgggagacatcgacggccctcgggaccaaggatcacgtc

SEQ ID NO: 776095 - DNA, 75 bp, Homo sapiens
ctgaccctggccttcaaccccgagccgctggtgctacagttggcccgccacaataaactgttgcagcagatgctc

SEQ ID NO: 776096 - DNA, 100 bp, Homo sapiens
gggagtaggagactcagaatcgaatctcttctccctccccttcttgggccatgaagcccccaggaggagaatcgagcaatctttttggaagtccagaaga

SEQ ID NO: 776097 - DNA, 96 bp, Homo sapiens
cagtggaagatgatcacatcccaggtgctggagaatctggtaaaagcaccattgtgaagcagatgaggatcctgcatgttaatgggtttaatggag

SEQ ID NO: 776098 - DNA, 83 bp, Homo sapiens
catacttcttttctgcctcagaagaagtggttcctgagggagtgcagcctgccacaggcgaggttgtgtttgatagtttccag

SEQ ID NO: 776099 - DNA, 82 bp, Homo sapiens
gtgaccgagaccgcggccgggaccgaggactaatagggatgccaaaggaaaaatatgatcctccagatcctcgcagaattta

SEQ ID NO: 776100 - DNA, 97 bp, Homo sapiens
ctcgcccgctgtgagtgccacgtgggctatcagctagcagcggacggcaaggcctgtgaagctgactttggtgtgtctgccaagaatctgaagactc

SEQ ID NO: 776101 - DNA, 75 bp, Homo sapiens
tctgcaccaaacccggaaggaagactgagcagggggaggaacatttaagctgatggaagtggaagtggaagttgc

SEQ ID NO: 776102 - DNA, 74 bp, Homo sapiens
ggagaaccaccgcatcaagagcttcaagaacaagggccgcgatgtggaactctgcttatgataatgtcaacaaa

SEQ ID NO: 776103 - DNA, 82 bp, Homo sapiens
gcggatcccagcttcctgcagccaggtcaaaatgcagatcttcgtgaaaacccttaccggcaagaccatcacccttgaggtg

SEQ ID NO: 776104 - DNA, 80 bp, Homo sapiens
tatcgaggctataaaagcacagttttaagagagcagagtctccttggaggtgacatggatatgggcaacccaggaaccct

SEQ ID NO: 776105 - DNA, 87 bp, Homo sapiens
cgcggggcgacgctggctgcagggacccggtgacagcgtgagagtcagagcaccataacatggtgtgggaagtgaagacaaatcaga

SEQ ID NO: 776106 - DNA, 75 bp, Homo sapiens
ctggacgccgcgatcgtggggcccgcgaggcgggcagccggggcgtccagatctctgttgaggagctggcgcgga

SEQ ID NO: 776107 - DNA, 75 bp, Homo sapiens
caggcacactacagaactaaatatgcatgttcagcaaaaggatgtcactgaaattgatattttagttaagaaccg

SEQ ID NO: 776108 - DNA, 88 bp, Homo sapiens
ggaaacatctttaccctgttcattgggccagaggttgcaagaaagctcaagtagcctatggagaggatgcaaggcttccagctgatgc

SEQ ID NO: 776109 - DNA, 80 bp, Homo sapiens
cccatggctgatgcagcaggcatcatccgctatgcaattgggtggtgaagcagcgcttgcagatgtacaactcgcagcac

SEQ ID NO: 776110 - DNA, 101 bp, Homo sapiens
aggaggaagaagcagctgcggcggccacaccctggatgagatcactgtgtccactactatgatcttcgtaacactaaacagccaatcatggtattcaaagg

SEQ ID NO: 776111 - DNA, 90 bp, Homo sapiens
cgactgggtccgggaccggcgtcagggacacggggtgctgcgctgcgccgacggctccacctacaaggttcaaaccttgtactactcagc

SEQ ID NO: 776112 - DNA, 117 bp, Homo sapiens
atgaggacgagatcctcaacagggaccctgggtaaatgacggagccctcacaggtcccatctaaaatgaggagggggtgtcatgtgattctctgagggagcagctgcgtgagtggag

SEQ ID NO: 776113 - DNA, 100 bp, Homo sapiens
tcagatgatgatgaagaggtttcagggagcagcaagacaatcactgcagagataccagggaccagttactctccacaagaaaattcacacaaccacagtg

SEQ ID NO: 776114 - DNA, 75 bp, Homo sapiens
atagcatagaaggaaaggattacatagcttcattaccatttcagagtaaagccaatcccagctgaaggaatcaag

SEQ ID NO: 776115 - DNA, 101 bp, Homo sapiens
atctgagtggagatagacaaaatccaccacaagggcccgggccaccaggaagagcctgctgcatgtcccctatggagacggcgaaggggagaaagtggaca

SEQ ID NO: 776116 - DNA, 75 bp, Homo sapiens
acatcccgcagtacaagaactggagagaagtcaatgaaaggattctattttgcaaagctgtattatgaagctaaa

SEQ ID NO: 776117 - DNA, 74 bp, Homo sapiens
cgctttctcccatcgaaccttctagttgcttattgcagccatgtgaagatgtgcttgcttcccctttgccttct

SEQ ID NO: 776118 - DNA, 101 bp, Homo sapiens
aagtcacagaaataatacctaaatatggcagtataaatggagcaacaaggctgactataagaggggaaggtgctggagaatctggtaaaagcaccattgtg

SEQ ID NO: 776119 - DNA, 82 bp, Homo sapiens
aagctcttcttgaaaaatgcaaagatgtagatgagagaaatgagagactttagaagacagctttccatcgacactaggccct

SEQ ID NO: 776120 - DNA, 74 bp, Homo sapiens
aaatgtccatgagaaaaagcttggagataaagttgctttttactggccgcattgacaggaagattgagttcccc

SEQ ID NO: 776121 - DNA, 75 bp, Homo sapiens
gaggtggacagatctgagagatactgaggtaaagtcagtgataaatcttttgtttgctgcatatactggagatgt

SEQ ID NO: 776122 - DNA, 74 bp, Homo sapiens
acagatagtgaaaccagttctccaggcgagtctgcggacaccagaactgacctgggagcgagtgagatctcaag

SEQ ID NO: 776123 - DNA, 100 bp, Homo sapiens
cctctggatatctgtcattcagcatcatgagaatcgtggagatgtttaaggattacccgccagccataaaagacatggatttgattgacatactttggag

SEQ ID NO: 776124 - DNA, 75 bp, Homo sapiens
ccgggacatctgaaagccaggaaatggaccagttacagaagtggatccgcggtaatgtgagtgcatgtgcgaact

SEQ ID NO: 776125 - DNA, 83 bp, Homo sapiens
gacaggtgtgcgcatctacaacgtggagcccttgatggagaaggggcatctgggtgagaagatgacagaggaagaagtagaga

SEQ ID NO: 776126 - DNA, 75 bp, Homo sapiens
aaatgtctgccgccgccggctctcgggagcgcaacactgcaggcaccttgctgtgacaagctttatacttgccgc

SEQ ID NO: 776127 - DNA, 83 bp, Homo sapiens
catcgacaaatccagcgagatggggattgagaatgtcatcttggggatgccacacagaaccccaaggagtggaccaagaaggt

SEQ ID NO: 776128 - DNA, 101 bp, Homo sapiens
ttcctggatgcctgacatcacattgatacatgctggaggtctggctcagcctgattacatcaaccccagagccgtgcagctgggctcccttctcgtccgcg

SEQ ID NO: 776129 - DNA, 75 bp, Homo sapiens
cagttaatgcacgtattttaaactcccgggcctgcggacgctatgcacaggttggatttggtctagggagtccca

SEQ ID NO: 776130 - DNA, 100 bp, Homo sapiens
gcccaccagctccccatcgcagaggccatgctgacctacaagcagaagaggagccaagccgccatggcctaccacagcttcctggtggagcccatcagct

SEQ ID NO: 776131 - DNA, 100 bp, Homo sapiens
tcactgcagcctcaacttcttgtcctcaagtgatcctcccaccttagcctcctaagtagctgggaccacagacagggtcttggtggcgcatacctgtctt

SEQ ID NO: 776132 - DNA, 100 bp, Homo sapiens
aagaattttcttcccaggaagctcctctcgctccccggccgcccacccccagcctggcgtaaatgtatgcagcccaaagattttaattttaaaacaccag

SEQ ID NO: 776133 - DNA, 83 bp, Homo sapiens
gatatattgcccttcttcccttagaagaactgctgaaccgactctgagaaatttgacttatcagatgtagacttcctagatga

SEQ ID NO: 776134 - DNA, 98 bp, Homo sapiens
gaagaaacaaaagtgccaccgaagagatgatgccatggagagcagcaagcctggtccagtgcaggttgttttggttcagaaagatcaacattcctttg

SEQ ID NO: 776135 - DNA, 100 bp, Homo sapiens
gtttctggtgcaccacttcagggggtgtggtctggtgttcctgcagagatgccaggcaccaaaagacaccactttgacttgctggccgagctggaacatg

SEQ ID NO: 776136 - DNA, 75 bp, Homo sapiens
cttaaaactggagataaaatacttgagagaatggatcttggagaatgtctgaaagtccatgacctggctttaaga

SEQ ID NO: 776137 - DNA, 89 bp, Homo sapiens
aggggcgggggaggcgccgggaagtcgacggcgccggcggctcctggtggttctgctgggcatggacatcctgtccgccctggtgaccc

SEQ ID NO: 776138 - DNA, 90 bp, Homo sapiens
tgttctccaagaggcccagagacatgctgaaacatcgaaggacctataaatggcaccacccagcccaatggacagatgccccaggctgca

SEQ ID NO: 776139 - DNA, 80 bp, Homo sapiens
ggagcagcgcgtcgtggggcgagcggcagagtccctgcaggaagcatcacccaggctggcagatcatggtagcagcagcg

SEQ ID NO: 776140 - DNA, 89 bp, Homo sapiens
gacaagaaactagagcaaataaccgttttgaaattgtggactgggtggttatggatcaggagacagtgaagatgagaggagtgacagag

SEQ ID NO: 776141 - DNA, 100 bp, Homo sapiens
cagtggaaatggctatgtaccgaaaacatgcaaaagtttcttcgtcttatctttgggaccctagttcaaagaactgtcaagtaatccacctctggctacc

SEQ ID NO: 776142 - DNA, 100 bp, Homo sapiens
gggcattatgaacgaattctcaacccctacaacttattcctgtccggagacagcctaagggtcccagaacagttttcttctgggctccaattatgaaatg

SEQ ID NO: 776143 - DNA, 74 bp, Homo sapiens
aaaagaaagtggctgttgcatgtaatctttctggcactaaaggggagtctcacaagggacaagatatttttctt

SEQ ID NO: 776144 - DNA, 74 bp, Homo sapiens
gccgtccatgcggaagatcgtcgccacctggatgctggagattacctaaaacctcgggcagaagaggagaggag

SEQ ID NO: 776145 - DNA, 98 bp, Homo sapiens
gcgggagccggcgtgggcggcggcaacggggcactgacctgggtgcatttttgaaacgttggggttgttggagtggttggattttccctggaattgag

SEQ ID NO: 776146 - DNA, 101 bp, Homo sapiens
actgccctatgatttcttcttgaacacttccagaagctgaacctctccttgggataccttgggaaaatgcttcttcctacgagtggaaattactctccgag

SEQ ID NO: 776147 - DNA, 74 bp, Homo sapiens
ccaaaggctattggatcagctcagcaggccgtttccctggggagatggtaaccatactctattccataaccctc

SEQ ID NO: 776148 - DNA, 75 bp, Homo sapiens
tgtttacatggaactcagacatctgcaaatcatgctctaagcgaaagacatgaggcctcagcctgaaatgaggtt

SEQ ID NO: 776149 - DNA, 97 bp, Homo sapiens
gggaaatggcttcagcgcagtatattactgcaggatctatgtttcttccacctaccaccgtggctggtgccactctttactcagtggcaatgtacgg

SEQ ID NO: 776150 - DNA, 100 bp, Homo sapiens
gctgatagtctccagcgggcctggactgtgggctggtgtgtggaactggccctgtctcagcgggaccctcctcacaacaacttcttcttcttcgatggca

SEQ ID NO: 776151 - DNA, 100 bp, Homo sapiens
ctggtatccttatgcagaatgaactgaaataatcatcaatctgaaaagctactcttaaacaggcagccttaagtgccttgaaacaattttctgaacaagg

SEQ ID NO: 776152 - DNA, 75 bp, Homo sapiens
tgaaaaccaagccgaggactgcggggtccggtgtccacgcagatcaaaccggcacgatgtccaggcaccagaacc

SEQ ID NO: 776153 - DNA, 75 bp, Homo sapiens
cgagatggacatccgctatgacaacatgcacatcccagcattccgttggcagctggcaaatttgatagagaactg

SEQ ID NO: 776154 - DNA, 75 bp, Homo sapiens
ccgatcgacccggtaccaagaaggggagtgcccgcggcaggattctttgcccataaagtggagcacgaaagcagg

SEQ ID NO: 776155 - DNA, 97 bp, Homo sapiens
ctggacgcggatttttggcctcatactctgttatagataaacaagtctgtccatgtgaatgtgctgtgtggaagagttaaagggcccaactaaatgt

SEQ ID NO: 776156 - DNA, 100 bp, Homo sapiens
ttttgcttccaaatacaagctgtataggttctcatgaacagcgagaagaagtgtgaagttctgtgcagccagtccaacaagccagtgaccctgacagtgg

SEQ ID NO: 776157 - DNA, 75 bp, Homo sapiens
cggacctgcggactagcgaacccggagagccagaggccaagaagagtaagacggccgcaaagaaaaatgacaaag

SEQ ID NO: 776158 - DNA, 83 bp, Homo sapiens
agctgggcatccagggctcgtacttctgctcgcagccaggcccagacatgtccgtccttgtaagttaaaagcttccatgggag

SEQ ID NO: 776159 - DNA, 100 bp, Homo sapiens
gctcgctgggagagaggtacctctccttttccctctccctttccctaagtatctccagatgaaatggccactgcttgatgtccaggcagggagcctccag

SEQ ID NO: 776160 - DNA, 83 bp, Homo sapiens
ctcgtacttctggccactgggcgagcgtctggcagcggagcttggagattatgacccatataaacatactgcaggatatgtat

SEQ ID NO: 776161 - DNA, 74 bp, Homo sapiens
gcaaagtgaacgccgacgagcggatgaaggctaaagaattacctccaaagccattgtcaagaccacagcagtca

SEQ ID NO: 776162 - DNA, 50 bp, Homo sapiens
ctctaggccttttagaaaacatggaacagcatatgccatatatgagctgg

SEQ ID NO: 776163 - DNA, 83 bp, Homo sapiens
cgtgacccttcaggtgtaccatgggctgctgagcttcacggtgcatcccaagcccaagctccaaggctctcaggcccccgacg

SEQ ID NO: 776164 - DNA, 90 bp, Homo sapiens
gggggatggacagttttttgctgtgagtgttgtttgcccagaaacaggactccgatttcagcttgccacctggttctgcctctggtccta

SEQ ID NO: 776165 - DNA, 75 bp, Homo sapiens
tggctgaggcagctattcggtttgaagccagtgccctccctgacctccatccaggtgctggagaattcgatgtcc

SEQ ID NO: 776166 - DNA, 100 bp, Homo sapiens
atgaagataaactgacctggaaggatcgtttcccaggttacctgatgaactttgcctccatcttattcatggtctgcctgaagccaagggagaagatgtg

SEQ ID NO: 776167 - DNA, 51 bp, Homo sapiens
gtaccaagaaggggagtgcccgcggcagatagagccttactgggcccgtgc

SEQ ID NO: 776168 - DNA, 100 bp, Homo sapiens
gcagcctaaggaggaacactaaggtctattacaatggctaccatggagacacctctgaaacatttttggtgggcaatgtggacgaatgtggtaaaaagtt

SEQ ID NO: 776169 - DNA, 82 bp, Homo sapiens
agaagcttacatccgctgcctgcgcatgggctgtcgctgcattgaacttgacattttgctaaaggctgtgggagacactcct

SEQ ID NO: 776170 - DNA, 100 bp, Homo sapiens
ccaaggatttccaagtgatttcttccaaagcacaggaatctcactctgttaaagctggtctgttctaactgaggccatggttgcttgttatccgggcaat

SEQ ID NO: 776171 - DNA, 100 bp, Homo sapiens
tgaaaccaaaaggccagactgaacacgatgagggcgccatggctgcggagcggacccggccgctgcaaggctctggcggtccgagcgtgcctagtagctg

SEQ ID NO: 776172 - DNA, 98 bp, Homo sapiens
tgagcaccgtctcccagtacgaccgggacaagtactggaaccgctttcgagactgtcacatttgaagacgagcactgaggatgaggaaccaactgaag

SEQ ID NO: 776173 - DNA, 75 bp, Homo sapiens
ctgccgccgctctgaggagttaaagagaaaatattctctttggaatgggaaatcctctgcttgacatctctgctg

SEQ ID NO: 776174 - DNA, 100 bp, Homo sapiens
cggacacctaccaggtggacggcacggacgacagaagcgactttggtgagactctggttccaagttccccatcaagtggacagccccagaagctgccctc

SEQ ID NO: 776175 - DNA, 50 bp, Homo sapiens
gcgacagcaacagctctgccggctggaagcttccttgtggtcatagatgc

SEQ ID NO: 776176 - DNA, 57 bp, Homo sapiens
gaacaagaagtcggatggcggtgtcaaggttggacggcaattagaagctgagcaggc

SEQ ID NO: 776177 - DNA, 75 bp, Homo sapiens
cgatcccagcaggacattgaaaggcatctatcgagctgtgcctattcgagtcaatccaagagtgagtaatgtgaa

SEQ ID NO: 776178 - DNA, 75 bp, Homo sapiens
cctggagcggcgcagccggagtggggccgtgagggttattttggagctgttggagcactccttgagctgttgaag

SEQ ID NO: 776179 - DNA, 82 bp, Homo sapiens
ccgcgcgacgtacccgccgccgccgttggctggagattgaaaatattgaacttcccatggatacaaaaacaaatgaaagaag

SEQ ID NO: 776180 - DNA, 100 bp, Homo sapiens
tgcaagtccaagaggaggaggaggcggaggtccaagcggaaagcccggaagctgaagaaacttggtaatctgaaactacaggaggaaggagaggcttcca

SEQ ID NO: 776181 - DNA, 98 bp, Homo sapiens
ggaacagtctttggcagccttatcattggttatgccaggtcagaatggcggcagtggagcatcgtcattcttcaggattgccctactggccctacctc

SEQ ID NO: 776182 - DNA, 111 bp, Homo sapiens
ggcgagacgcgcgtgtgtgagcgcgccggaccaagcgggcccagaagcggctgggagtgtccactcgccttccaccagcatggcaacgtcttcacagtaccgccagctgct

SEQ ID NO: 776183 - DNA, 97 bp, Homo sapiens
agacaccgggacctcctggaagccaaaaatggaatacctcaatagcattctccagcatgccaaggatttcaaggaatatcacagatccgtcacaggc

SEQ ID NO: 776184 - DNA, 50 bp, Homo sapiens
ctcccaaagtgttgagattacaggcatggctttgaatttcattcgccaac

SEQ ID NO: 776185 - DNA, 90 bp, Homo sapiens
gtcatcttccttgaattctttgcgtggggccttttgacaactccaatgttgactggtggaagatgtctatggatgtgacattcctgggga

SEQ ID NO: 776186 - DNA, 101 bp, Homo sapiens
ccatcctgccgtccttctccactttcgccagcccgtgccgcgagcgcggcctgcaggaggaaccatcactgttgctggaggcacctgacaaatcctagcga

SEQ ID NO: 776187 - DNA, 110 bp, Homo sapiens
tgaggaggagtggaggcatgtgaccccagcccagatagactgctttggggagtatgtggaaccgcaggactgcagggtctctccagggaaatcctcattgacgattcaat

SEQ ID NO: 776188 - DNA, 100 bp, Homo sapiens
aggaaacaaatcaactaaaaacaaaattgccagaaaatctttcctctaaagtcaaactgatggcccactgcgtgaccttggttcagctgtccatttcctg

SEQ ID NO: 776189 - DNA, 100 bp, Homo sapiens
ctgattcttgtcactttaattacttgagaatttataatggaattggagtcagcagaactgaaataggaggatgcagcattcaaggttctatcttggaagc

SEQ ID NO: 776190 - DNA, 97 bp, Homo sapiens
gaaactaggaagaggaaattaactatctgtacttataagggccatcactgtgcatgtccccatgccctcagcaggagtcgtggacatccccattgtg

SEQ ID NO: 776191 - DNA, 83 bp, Homo sapiens
cctgggcaccggggagccggccttggacacggtttggtgcacctcgatttggaggaagtagggcagggcccttatctggaaag

SEQ ID NO: 776192 - DNA, 75 bp, Homo sapiens
ggaaacggcttcttcctcacttcgccgcctggtgctggagaatctggtaaaagcaccattgtgaagcagatgagg

SEQ ID NO: 776193 - DNA, 100 bp, Homo sapiens
ctgcttgaacatcctttgactggttagccaggtcttaaagaaagtgcagaagagatggtcaaaaacaaattggaaggaaaggataaactgaccccttggg

SEQ ID NO: 776194 - DNA, 82 bp, Homo sapiens
tgctacaggacacggtgctggccgccggttgcaagcagatactggtgcctccggaagaattaacctcgagtctgcacgcttt

SEQ ID NO: 776195 - DNA, 75 bp, Homo sapiens
gccatcaccgatgtgcctaggcgcatttcaggtccagctgggagctccccgacctccaggagggcaagatccaag

SEQ ID NO: 776196 - DNA, 100 bp, Homo sapiens
cagaccgtgctgatcttcgatgagctctcggattccttatgcagagtggccgacttggttgaagatgacagcgatgcagagacctatggagaagagaatg

SEQ ID NO: 776197 - DNA, 75 bp, Homo sapiens
gaggggccgcgggagcccgaaagcgagctactgaagtggtgactgtgtttgtatttcaagaaccatcactgctct

SEQ ID NO: 776198 - DNA, 90 bp, Homo sapiens
cggcggccgcgctgaggctcccggctcagaaaatgtgccagaggaacttcaagaaccattttacacagatcagtatgaccaggaacacat

SEQ ID NO: 776199 - DNA, 122 bp, Homo sapiens
gtgagcctagggacccatttctcctcctttgacagggacatcagtggagccttctcagacccacaggtactaggttttgacaagcttgcatcatgcgtgagtataagctagtcgttcttggc

SEQ ID NO: 776200 - DNA, 99 bp, Homo sapiens
ttcaaaaactaagcatccagaggccctgagcagctttcagcactggaggggatcctgctaaagcggagcggcaagtccctgaacaaggagtggaagaag

SEQ ID NO: 776201 - DNA, 101 bp, Homo sapiens
gctgtatctgcagcccaatgtcaaggcagcagctaccaagaaaccagcccctgaaaagaagcctgcagagaagaaacctactacagaggagaagaagcctg

SEQ ID NO: 776202 - DNA, 97 bp, Homo sapiens
cggtctgcgcgccgggagcgggggcgcgctggccgcgggtatctctgcattagccagattggacatatgtaaagggacatcagtatatctggatcat

SEQ ID NO: 776203 - DNA, 75 bp, Homo sapiens
ggtggagccgcccccagatcggccagtccgagcgtgccggacacagccagattactgacagccctgtcctaggag

SEQ ID NO: 776204 - DNA, 90 bp, Homo sapiens
gattgggctgagcagaggacgacatgttgcttttcgtggaggtgatggctcagtgttccgagacttggttattaagtacggtgcagttga

SEQ ID NO: 776205 - DNA, 99 bp, Homo sapiens
ccgggagaaatggatctactactgcaatggccatgaattctccactttaccaatacttacaggatctgggacacacagactttgaaatatgttcttctt

SEQ ID NO: 776206 - DNA, 50 bp, Homo sapiens
tcctgagtagctgggattgcagatttgatctggaagatgtgagaaacatg

SEQ ID NO: 776207 - DNA, 75 bp, Homo sapiens
gaggacgccgggacacctggaagccgagaaatgatgacgtccggttgtttgccttcgtgcgcttcaccaccgggg

SEQ ID NO: 776208 - DNA, 100 bp, Homo sapiens
atgagcttactctctcagatgacttcgtctcccaccgactgcctgtttaagctttaactgagactccgaccagctcagactggcagtcgaccgatgccac

SEQ ID NO: 776209 - DNA, 80 bp, Homo sapiens
cgggaccggccgaaaggcgaggaaccggtgtggacactgccagcggctgcagccgacttggaatgacctgggagacaaat

SEQ ID NO: 776210 - DNA, 100 bp, Homo sapiens
gttcagtcaagaatgggattctgaccatctcacatgccacagagggatttgttcgtgttgaccgagattatgtgctgaagtctgcagagctggcaaaagc

SEQ ID NO: 776211 - DNA, 87 bp, Homo sapiens
ggctgcaggccgttgttggtcgagctggcgggtcccgcgggccaggccgtggagaaagggctattgcaagacacgaagtccgagaaa

SEQ ID NO: 776212 - DNA, 82 bp, Homo sapiens
cttctgcaaggtccggctgctggatggaggggattttgtcagcttgtcgtcaagctcccggagccctgcctgttccctgtcc

SEQ ID NO: 776213 - DNA, 96 bp, Homo sapiens
gacagtggagggagcagggagcattgcagcagccactggctttgtcaaaaaggaccagttgggcaaggagatcatgaatcagacagataaaaatca

SEQ ID NO: 776214 - DNA, 101 bp, Homo sapiens
gacgaactacagaacagcacgtaccagaggtggaagtccaagtcaaacgcagaaggactgcctcactgagcaaccaagatatgtgcagaagcttataatcc

SEQ ID NO: 776215 - DNA, 50 bp, Homo sapiens
gatattaatgggagcatatatgatgagtcctattttgtaacggattatga

SEQ ID NO: 776216 - DNA, 95 bp, Homo sapiens
gtggcctcgctcgtctgcctgctgcgccacggcggccggacggtggagaacatgaggacgccaggaaagcatgtgcagatgcaactctctctcag

SEQ ID NO: 776217 - DNA, 100 bp, Homo sapiens
ctccgggagcacttcgagaagctggagaagccggagcggttgcagggcacacattactcggtgcagtcggacatctggagcatgggcctgtccctggtgg

SEQ ID NO: 776218 - DNA, 60 bp, Homo sapiens
ctcgagtcatcaggctacagcatcatcggatcgcccaggagggccacacagaagagccgg

SEQ ID NO: 776219 - DNA, 75 bp, Homo sapiens
cccaggggctcaagttacaatcgttcctgacaaagatgatggcctgtttaaagaagaaaacccgtatgctagatt

SEQ ID NO: 776220 - DNA, 97 bp, Homo sapiens
ggaccagcacaggcggcgttttctccttcggaacgggagcgtctagatgggaatttcttagccataggctcacatgacaactgcatctatatatatg

SEQ ID NO: 776221 - DNA, 100 bp, Homo sapiens
cggggttcggtggcctctagtgagatctggagaatttcagaaactgtggaggagtgtcactgtagattccatggacgaggagaaaattgaagaatatctg

SEQ ID NO: 776222 - DNA, 50 bp, Homo sapiens
cgacggtgagcttgctctgcagagacaggcacaaatatttaaacatggaa

SEQ ID NO: 776223 - DNA, 100 bp, Homo sapiens
ggagtttccagaataaaaacaggaccagttacactccatacgcaaaccgcgatacattttgctgaacaaatagcaaaggcagctgcaatatttaattcag

SEQ ID NO: 776224 - DNA, 75 bp, Homo sapiens
ataagaactggatcaaccagactgaggcccagacagggcagcgcagtctattatcctcccagtccacaacgctga

SEQ ID NO: 776225 - DNA, 90 bp, Homo sapiens
ggcgtttgtagaagaggagcatctgctccaggccggaaggtggtggtcgtacgctgtgaaggcatcaacatttctggcaatttctacaga

SEQ ID NO: 776226 - DNA, 74 bp, Homo sapiens
cggcggctctctggtccgcagcggcaacagtaacgaaaaacagggctatggcccactgcgtgaccttggttcag

SEQ ID NO: 776227 - DNA, 83 bp, Homo sapiens
gagaagttggaagtgtgaaagcattgatggaatgtgctttagaagttaaaaagctgttcatcaaagaaaaagggttcttttgg

SEQ ID NO: 776228 - DNA, 90 bp, Homo sapiens
ccccgagctcatggagggcccagaggaggacattgctgacaagcgtccagaggaccagaggttaatttattctgggaagctgttgttgga

SEQ ID NO: 776229 - DNA, 82 bp, Homo sapiens
gtaaaactgctggaccagctacacaactcactgaggatcgacctctctacatacaggggacgccagaccttccagcgttttg

SEQ ID NO: 776230 - DNA, 122 bp, Homo sapiens
cttcaatgggcagcatatgaaagtggattatgggtgcagctattgctggagtttaccgagcagcagggaaggaaatgataccatttgaagccctcacactgggcactggacagacattttgc

SEQ ID NO: 776231 - DNA, 75 bp, Homo sapiens
caggaattggatctactagtgcagttcggcggtcaggcctacagcgacgtggaacacacttcagtccagtgccat

SEQ ID NO: 776232 - DNA, 100 bp, Homo sapiens
tggtgacccatgttttaaaacgcatctccttcttgatgtcaaagtccccaggaggcatcgttaactatcgtaacgttacctgccgagcatgagatgggag

SEQ ID NO: 776233 - DNA, 100 bp, Homo sapiens
ctacgggctggcagctaccatgatccaagaggtcttgccccagaagctgcgggcacatccacgcctgaaatgcggcgctcagtcctggtcaggaacccag

SEQ ID NO: 776234 - DNA, 82 bp, Homo sapiens
tacaggacttcctcctcagtgtgcagatgtgcccagcacagagaattgccttcaaccgggaacagagaatgtttaaggtaag

SEQ ID NO: 776235 - DNA, 49 bp, Homo sapiens
ttcaacaccaccttcatctccaccatcgcgcatggatttaggagaatgt

SEQ ID NO: 776236 - DNA, 73 bp, Homo sapiens
ccaaacaggacgaaggcgtgctgaaggtcaccgacgatgagggcgcacctgctgtcctggagcttccgatctc

SEQ ID NO: 776237 - DNA, 98 bp, Homo sapiens
cagagtgtaccaggggatgctggactgcatgctctggccaggctgccgcacctctacaggaactttgccgcggagcagtatgccagtgtgttcgccat

SEQ ID NO: 776238 - DNA, 49 bp, Homo sapiens
ttaatcctcagaacatcccagggaggtgcaggcctggggtagtctcctg

SEQ ID NO: 776239 - DNA, 100 bp, Homo sapiens
gagcgcagatcggcgcccagcaatcacagaagccgacaaggcgttcaagcgaaaacatgaccgctgagcccatgaggtattatacctgaagaaccttagc

SEQ ID NO: 776240 - DNA, 100 bp, Homo sapiens
caaaccctagtgaataaagccaagagagaccttggagtaattcgtcgacaggtgaaagaactcttttcttctttgggagtcgaatgtaatgtcttggaac

SEQ ID NO: 776241 - DNA, 100 bp, Homo sapiens
attgatttagggactggcaagataatcaactttatcaaatttgatacagaacacccagtgcatcccagaaggcttggagagctactacgcggagcaagac

SEQ ID NO: 776242 - DNA, 75 bp, Homo sapiens
taagatttcaggagctgatattaactccatctgtcaggagagatggacagagacgtatgtgcgttggtctcctaa

SEQ ID NO: 776243 - DNA, 88 bp, Homo sapiens
gattcgcagtggtcgcttcttctccttgggaggcctcgtgggtctggtagattatcctgatgatgatgaagatgatgatgaggatgaa

SEQ ID NO: 776244 - DNA, 51 bp, Homo sapiens
taactgatgaggaacaagccattagcagtttggaaggcattcgggaatacc

SEQ ID NO: 776245 - DNA, 74 bp, Homo sapiens
gaaccatgtgactttgtcacagcccaagatagttaagtgggtgtacttggtgtgcaacaccaccctgtgcgcac

SEQ ID NO: 776246 - DNA, 99 bp, Homo sapiens
gtctattgacagggttctggacatccaggaagaggagccgagcatctgggccgagaccattccgtatggagagccggtttgtcctgaagaattatggag

SEQ ID NO: 776247 - DNA, 82 bp, Homo sapiens
aacccttgatcctcctcctaattgcaggatattcagtcggagctggtcattttcggagccagcatactaccgaagtagtcgg

SEQ ID NO: 776248 - DNA, 135 bp, Homo sapiens
tcggagttggggctgagcagtcctcggggagagcgcgccaagaccgctgcagccgctggctgaaacaggtgggattgttcctccagcagctcaacagcttcacagagaaaatattcaacgaatagtacaagaagc

SEQ ID NO: 776249 - DNA, 82 bp, Homo sapiens
atgaggaatgtctttcctaccatctaaaatacgaaggtttctggctgggcctaatttgtagatatcctcaagaagattatga

SEQ ID NO: 776250 - DNA, 83 bp, Homo sapiens
acagattacgccccctatcctatccgcaaacaattcacaatgacatcctttcaagaagtcccattgcagacttccaactttgc

SEQ ID NO: 776251 - DNA, 75 bp, Homo sapiens
gccggggctgttttccagagctttgccaagttcagcaaatttggagatggtgccgaggtaaacagagcatccacg

SEQ ID NO: 776252 - DNA, 100 bp, Homo sapiens
ttccaaaggcacaggaagaagcttgcaggcccagcagcaaagaaacctggataacatcgtcttgcaacaacccagaataggtagcaagaggaaatctaag

SEQ ID NO: 776253 - DNA, 75 bp, Homo sapiens
caggtgtctcttctcgccctggcggggaagcccgcggcgccatggctcacgtcggctcccgcaagcgctcgagga

SEQ ID NO: 776254 - DNA, 51 bp, Homo sapiens
gctgtacagattcatcaccacggcttatgatcagaagaacattaggcgaag

SEQ ID NO: 776255 - DNA, 75 bp, Homo sapiens
atccgcccacagacctcaaattcaaaggtgcagctaaatcaagtccagcagctaaaccaggatccacaccttctc

SEQ ID NO: 776256 - DNA, 102 bp, Homo sapiens
ttatggtcgatcgtcttcctactgtcttgttttttccctgcaacagattgctcatttagaaagtggatgtgtgggataacatgtccaatgtgtccgaggaga

SEQ ID NO: 776257 - DNA, 74 bp, Homo sapiens
atggctcgcgagcaaaaccaccatacctgggaccagggcgccaataacagtgataatatgcagcatgcatactg

SEQ ID NO: 776258 - DNA, 97 bp, Homo sapiens
agaatgtgtttcagctttttacttgtgcccttctggagtttcaaatcctgctctactcacagcttggtcctgagaaaagggtgccagcgatgcctgg

SEQ ID NO: 776259 - DNA, 91 bp, Homo sapiens
ggccgagcgggcggcttcctggcctgggcgctccggtggcggcggaggcgccatgtcagaaccggctggggatgtccgtcagaacccatgc

SEQ ID NO: 776260 - DNA, 113 bp, Homo sapiens
ctggagcctcagttggaagcagccgatccagcctgcggagcctgtggggcaggaatactcccccagttgcaagaggcgcaggaccgtggaagacttcaacaaattctgcacct

SEQ ID NO: 776261 - DNA, 98 bp, Homo sapiens
ggaatggagatccccaatttgagagattccttggttaaaattctgcaagactacaatttgcaaatttataatcgcttagatacaaattgctgtggatt

SEQ ID NO: 776262 - DNA, 96 bp, Homo sapiens
ttccaccttcagagcgtcacggcgtacgccctcatggggaaaatctccccggtgactttcagaaaggggagtgtgtttgcctacagtgtctctctg

SEQ ID NO: 776263 - DNA, 100 bp, Homo sapiens
cccggaaccgcgattcggcgtgtcagtttggacatcacatttcacagtcagaaggacagcgaactaaagaagaaatggtcaacacaaaagctgttgacca

SEQ ID NO: 776264 - DNA, 112 bp, Homo sapiens
tctgtgtcaaaagagcttctctccagagtagaaagtttttccagaaaggaggagtcaaggaagcccttagtgaacgagaactcttcaatgctgtttcaggcttaaacatcac

SEQ ID NO: 776265 - DNA, 75 bp, Homo sapiens
ggaagatatcacacagagtgcgcagtgtactaatggtcacttgatgtgcgctggctgttttatccacctactagc

SEQ ID NO: 776266 - DNA, 100 bp, Homo sapiens
gtgtcatcctctggggtgacgcggggtacaccacaagcacggacattgacaagcagtacgtgggcttcgccacactgcccaaccaggtgcaccgcaagtc

SEQ ID NO: 776267 - DNA, 119 bp, Homo sapiens
atttttggactgtgctctcaaactttactttgcctcatttgaggagtgggaacaggcttcggcgaacacaaagatccaagagttgaagattggctcctcatgtcctcgcctctgccaca

SEQ ID NO: 776268 - DNA, 83 bp, Homo sapiens
ggcgggcgccgcgggacctctccgggccatggggcaaagtgcacctggagctgcggctgagcgaggtcatcacagacactggg

SEQ ID NO: 776269 - DNA, 101 bp, Homo sapiens
ccatgaccctaatggtctttttgttcaagataaagtgattttttgcctttgttgattaactggacaaattcagctttgcccgaagtttttacatacaaatt

SEQ ID NO: 776270 - DNA, 100 bp, Homo sapiens
aacagcaacttgtgattggcggtgaccggatattcagttgcacatccccacatcaatgcactgccaatgtgtttcctgaggttataggcgggtgtttgag

SEQ ID NO: 776271 - DNA, 100 bp, Homo sapiens
aaaagccaaccatttgtggaccacgtgtttactttcaccattttggataataggatatggtttcggaactttcagggagtatatgttgctgcagtacggg

SEQ ID NO: 776272 - DNA, 51 bp, Homo sapiens
tacagaatggacccaccttcaggttatacattggctcttcaaagacgttca

SEQ ID NO: 776273 - DNA, 80 bp, Homo sapiens
ttgtccatgaccctgaaggtccaggagtacccgaccctcaagttcaaatctgaacatcaatgatgtactagggaactact

SEQ ID NO: 776274 - DNA, 100 bp, Homo sapiens
atacacaatctaaaaagaattaggaaggtccttcaggttatatttcacactatgtgctgactgtatctacagaagatatttaaaaaaaaaaaagataaac

SEQ ID NO: 776275 - DNA, 100 bp, Homo sapiens
ctaccaagtcaggattgttacccccaccacctgcgctccctccaagaccttgtccatcacagacctgaaggaaaagattatgcccttcattggctagtgc

SEQ ID NO: 776276 - DNA, 100 bp, Homo sapiens
gtggagagagcgagctgagtggttgtgtggtcgcgtctcggaaaccggtagcgcttgcagcatggtcatattgaacattccagatacctatcattactcg

SEQ ID NO: 776277 - DNA, 82 bp, Homo sapiens
gcttttgggggatcactgtcctctctcggcagcaggtcaaaatgcagatcttcgtgaaaacccttaccggcaagaccatcac

SEQ ID NO: 776278 - DNA, 98 bp, Homo sapiens
tgccgcctcgctgtccctgcggcttctgggggtgaactggcacaaaggttaatctcaagatgccgctagtgaaaagaaacatcgatcctaggcacttg

SEQ ID NO: 776279 - DNA, 100 bp, Homo sapiens
tcgctcctccccagggcccagtgcggactcgcctccgtgaagggcaaatgacacagctttgtgaactgatcaacaagagtggggaactccttgcgaagaa

SEQ ID NO: 776280 - DNA, 97 bp, Homo sapiens
atgcagaggcagaaaaatgaggggatcaacagcccaggcctcaggggcacccttcttggcccttacagacggcaccgaaagcgaaggaagctcctgc

SEQ ID NO: 776281 - DNA, 101 bp, Homo sapiens
gtgagagagaagttgtcagcaggagagatcatcaatgctgtggtactgttgattttattgagtgccctggctgatccggatcagtataacttttcaagttc

SEQ ID NO: 776282 - DNA, 51 bp, Homo sapiens
cgagagagtcattcagcagttgtattggatacaaatgaccgatttctacga

SEQ ID NO: 776283 - DNA, 80 bp, Homo sapiens
gctctgaatcttgccgccctgcactgccgcttcggtcactaccatccgcagagccatcctgtgcaaaggaaggagctagg

SEQ ID NO: 776284 - DNA, 75 bp, Homo sapiens
accactgtgcctggtgtcatcagatacaaaggtgccaagatccagcttgttggggagttcctggaagtgacttgc

SEQ ID NO: 776285 - DNA, 80 bp, Homo sapiens
attgaggccagtcctgacaaaatgcttcagaatacaaatcatattcccctgaagccctctggagatacctcacagctcgc

SEQ ID NO: 776286 - DNA, 82 bp, Homo sapiens
ctgaaacatgaaaacatcgtggccctgtacgacttccagcaaacggggattcagcgtccgatcctttggaacagggactcac

SEQ ID NO: 776287 - DNA, 90 bp, Homo sapiens
cggggccaccggctggagcggatcccacacctccggaccgagggacgcggaaatacactttcgggaaatggcctctaaatcctggctgaa

SEQ ID NO: 776288 - DNA, 83 bp, Homo sapiens
ctaagggcccttcgcgggagagcgtcgtgcacgcgggccagaggcggaaaatctctaacttccaaggtcccaccaacagttca

SEQ ID NO: 776289 - DNA, 100 bp, Homo sapiens
gttttggatggatgctaatagactgacttttattccagggatagaagagtgatggatgtcatttctcgttcacagctttacttggatgatcttttttctg

SEQ ID NO: 776290 - DNA, 73 bp, Homo sapiens
gaaatgttcccagaacattgcacgatgcctcctgagtcaatgcatgtgttgatgtggtgctctcaggggtgaa

SEQ ID NO: 776291 - DNA, 75 bp, Homo sapiens
gcccaacttccagcaggacaagatcctgtttctggaccttggcactggagccgtcctgtgtagcctagccctccc

SEQ ID NO: 776292 - DNA, 75 bp, Homo sapiens
gaccaggaggaggttttcaggaccaaaattgtggaaaagtcactctgggtcatccgagagttggctgcgagggcg

SEQ ID NO: 776293 - DNA, 90 bp, Homo sapiens
cacttaccccttctcaccgaggaagagcgggagaaaggttgctgagacaaaggaaaacccactcccttggaggagcatgaccttttcctg

SEQ ID NO: 776294 - DNA, 100 bp, Homo sapiens
acggccctgcgccccaccccggacatgctcagggctgcggccgcccgaagaggagagagcgcgggcctctaggaagattttctggcatccttaaatcttg

SEQ ID NO: 776295 - DNA, 82 bp, Homo sapiens
cgggctccgtggaagcgtggccggcagcgtcccggacgaggagagccgctcccgaggccccggcgcggcgcgagggcgcggg

SEQ ID NO: 776296 - DNA, 97 bp, Homo sapiens
cagaatcaccagcactggctgaagctccagggtttgagccacaatgtgatcttcaccttggattctttgttaaaaggagacctaaagggagtcaaag

SEQ ID NO: 776297 - DNA, 83 bp, Homo sapiens
gagagcttggttaacttgggagaaagtttcatctgtggatggagtattgggcaacaggtttgtctatgctggctctaactcgg

SEQ ID NO: 776298 - DNA, 87 bp, Homo sapiens
cagatgctgacttacctgaacttgagtaggataagttctgaacgtcgaaaagaaaagtctcgagatgcagccagatctcggcgaagt

SEQ ID NO: 776299 - DNA, 89 bp, Homo sapiens
aggctgccgttcagcacccgtcgagcgtctcctctgagcctccggcctccataagacccaaaacagatgacacctcttcccagtccccc

SEQ ID NO: 776300 - DNA, 75 bp, Homo sapiens
atcctcaccgatgtcgggaaggtcactgaacctggatgtgtttggccaaatgggagagtggttacaacacacgag

SEQ ID NO: 776301 - DNA, 108 bp, Homo sapiens
tgaagaacagcaggatcttgcactcctgtccataagcacttttcagcgagctctgaagtactgccaaatctgtcgaaagggagataatgaagaactgcttcttctttg

SEQ ID NO: 776302 - DNA, 75 bp, Homo sapiens
gcagtactgtgtagccaggatgctggttctcccatgggcaggtggtctctctggatgagctgcgccccttccagg

SEQ ID NO: 776303 - DNA, 87 bp, Homo sapiens
caagggcgatgggatgcgggggctcgcggtgttcatctccgacatccggaactaattatatccagatcgagagacagaagattctga

SEQ ID NO: 776304 - DNA, 50 bp, Homo sapiens
agattcgcagtggtcgcttcttctccttgttgatgcggatgaaattaaaa

SEQ ID NO: 776305 - DNA, 100 bp, Homo sapiens
gccggtctgggagttgggggcaaggagaagatcctggagccaaaaacctgtatatcatctccgtgaaggggatcaagggacggctgaacagacttcccgc

SEQ ID NO: 776306 - DNA, 50 bp, Homo sapiens
aaaagacaaggccttctccaagatggatgcaaggacatttttatgaaaaa

SEQ ID NO: 776307 - DNA, 90 bp, Homo sapiens
cttgatgaaggcgtggatagcctgaaggcagccattcaggttttctgtctcaactggtctctgacaagcctctgactgaatgtatccgtg

SEQ ID NO: 776308 - DNA, 75 bp, Homo sapiens
ctccatctgggccatggatggcattaacacccttgtgaagatcagcaaaagtgcaggagccatgttgaaaccgca

SEQ ID NO: 776309 - DNA, 98 bp, Homo sapiens
tcgcgccggatgcggagcgcggtgctgccggtggagcttcagtggaatgtatcctgctttcatcttggagttcacctgtgtggcttggatttatcaca

SEQ ID NO: 776310 - DNA, 100 bp, Homo sapiens
caaagctacaggattctggaaccgtggagacaccgagaaaccatgagtgtaaggttaccccagagtatagacagaaacgcttcgttaagggactcaggca

SEQ ID NO: 776311 - DNA, 100 bp, Homo sapiens
gaggctaagaaagtggtgaatcccctgtttgagaaaaggcctaagaattttggcattggcagcgtctcctccctgggccccgagcatcccggcctgacaa

SEQ ID NO: 776312 - DNA, 90 bp, Homo sapiens
agagagcagctgcccatgccaaatagttacctcttttaaactcattctactggagcaaatgtgacagctggagtatcagccttggaagta

SEQ ID NO: 776313 - DNA, 95 bp, Homo sapiens
ctctggcccccggaaaacctaaccatgaagacttgaacttaatacagcaagaaagaccatcaagtttaccatgagatggaagattttcgaggtat

SEQ ID NO: 776314 - DNA, 75 bp, Homo sapiens
gttcacctttgaatttatgaataccttacttgtaaaagctcttttgctctatgacctggctcaaacttaaacttg

SEQ ID NO: 776315 - DNA, 90 bp, Homo sapiens
ggcgtttatagagtctctgaagaggccaatgagtgccaggagcgccctgttgagtgtaagttctgcaaactggacatgcagctcagcaag

SEQ ID NO: 776316 - DNA, 100 bp, Homo sapiens
cggaacagcaggcccgagcccaccgcgccgggccccggacgccgcgcggaaaaggctgcctgctgtttcccggggagatcatgaaacgaggtcgccttcc

SEQ ID NO: 776317 - DNA, 82 bp, Homo sapiens
cctggagcctcagttggaagcagccgatccagcctgcggagcctgtggggcaggtttctgcatatgaagtgtgtaaaataga

SEQ ID NO: 776318 - DNA, 88 bp, Homo sapiens
tgcgctctgcccggcgagtcgggctctggaggaaaagaaagaggatgaaagtcctggacagacttatcacagagagagaagaaacgca

SEQ ID NO: 776319 - DNA, 90 bp, Homo sapiens
gtttcaggaaagccctgagcagaaagaccgtgtgtatgtacaacaaaataatgtggagaacgtctacaatttgggattaattatttttcg

SEQ ID NO: 776320 - DNA, 98 bp, Homo sapiens
ctttcccgggataagtagctttagcgatcgggagacagccgggcgctgcaaggagtcatactccatgggtttatgtgataaatgatcttggcatagaa

SEQ ID NO: 776321 - DNA, 82 bp, Homo sapiens
cctgcacccgtttcaccgacgactaccagctcttcgaggagcttgagctgttgcgcagccattggtacctgtattggggaaa

SEQ ID NO: 776322 - DNA, 98 bp, Homo sapiens
ccaagacctcatcaacaattaaggcgtgcaatggaattgagttttgccctggtaaatgggaataatatccgaggcatgatgaaagaattactttattt

SEQ ID NO: 776323 - DNA, 82 bp, Homo sapiens
ccggcatcgtctttccgtcctctgaggcgacggccgcggctgcacaggtgaccgggttattgatgtgggatctgaatggcga

SEQ ID NO: 776324 - DNA, 100 bp, Homo sapiens
gccctgcagtacctgcagaaggtctctggagacatcttcagcagtgctgggcctaaaggagataacatttatgaatggagatcaactatacttggtccac

SEQ ID NO: 776325 - DNA, 138 bp, Homo sapiens
cagccctcgctgtcatcctcattgctactgccctctgcgctcctgcatctgcctccccatgaggaaacaccaattggaagcctccgctcaactgtaagatttataactacctgaacaggattggatgcttcttccttc

SEQ ID NO: 776326 - DNA, 100 bp, Homo sapiens
ggggtccgcggtctggggccgcgtgagtgcatctccatccacgttggccaggctggtgtccagattggcaatgcctgctgggagctctactgcctggaac

SEQ ID NO: 776327 - DNA, 75 bp, Homo sapiens
gggggacgagctcggagcagcagccagaatagcctaacatggcagaccagagacagcgctcactgtctacctctg

SEQ ID NO: 776328 - DNA, 83 bp, Homo sapiens
gatggatctcagagcggtatccctgtctcagcgaagtggtgaaagagcatcagatgatttcacaaaagttcatcttcattgca

SEQ ID NO: 776329 - DNA, 100 bp, Homo sapiens
ctccagaaaaacagtagcagtttcctggtcctgttcctcatcaacaccaaggatctgcagtctcacactctgaggatgactgtctagctttcaaagttca

SEQ ID NO: 776330 - DNA, 100 bp, Homo sapiens
ccagtaccacggcccggcgcctgcactcgtttcctgcaggagaggcccaggctgcaagcacaaaggaagtttgctcagtctcagccgaatagtcccagca

SEQ ID NO: 776331 - DNA, 100 bp, Homo sapiens
agtggtcgcttcttctccttgctcagattccaaatgaaaatgtttgagagcgctgactctacagccacaagatctggccaggatctctgggctgaaattt

SEQ ID NO: 776332 - DNA, 75 bp, Homo sapiens
tcggatgtggagaaggccaagaagcagctcctgcatctggcggaggagaaggcttctcacggcattcagcagcag

SEQ ID NO: 776333 - DNA, 97 bp, Homo sapiens
ggagaattatggaaacctggtctcactgggtgatttgaagatattaaagctagaaattggaactagaaaatcaaaagaattcaaggcatcttaacgt

SEQ ID NO: 776334 - DNA, 75 bp, Homo sapiens
gtgcgatcagatcgatctaagatggcgactgtcgaaccgcaacgtggaaggaaccagaggctgttattctaagtg

SEQ ID NO: 776335 - DNA, 120 bp, Homo sapiens
tggaggcggagaagaaggcggtggtggcgggtggaggttcgagcgctgttctcgctccggagccgctgcacatttcgcctgcacagacaaggagttgcggaaccttgcctcccggctgaa

SEQ ID NO: 776336 - DNA, 96 bp, Homo sapiens
gtgggacaggccacgctgtccgtccgcagtaccgacgcctgcaggcttcctgtgtccagtaccggttagtggtccgggatgtgaacacccttcaga

SEQ ID NO: 776337 - DNA, 83 bp, Homo sapiens
aaaatgacccatctatggctgcttaataataccgtagcagtaggcaggacagttccaattcaacaaaaacctctttaccctgg

SEQ ID NO: 776338 - DNA, 82 bp, Homo sapiens
caagaaaactggcatctttaactccagggttttcaggcattgggatcccgtggcagttgcagcactgaagtggagaaggaga

SEQ ID NO: 776339 - DNA, 100 bp, Homo sapiens
cggagctggatgaactcattcagatggacaatctaaaatatgtaaatcagttgaagaaggaaaatgaacgtgcccaggggaaaatgaagttgttgatcaa

SEQ ID NO: 776340 - DNA, 74 bp, Homo sapiens
tcgagttcctggaccgcgagagcatcaaactggtgtccatcggcctctgcgggagaagatgaagccggaaaggt

SEQ ID NO: 776341 - DNA, 100 bp, Homo sapiens
gggcaaggcggcggacggctgcgtcgcccgaggcgaggaggagcgctggcggtcccttcaccgatgttgtcaccaccaacctaaagcttggcaacccgac

SEQ ID NO: 776342 - DNA, 100 bp, Homo sapiens
cttccaagttccaatgagttatctaacgtctatggattagctaggtggttggtggaaggtgaaaggtgtagcagtcactcggcctacacccacagcatcg

SEQ ID NO: 776343 - DNA, 82 bp, Homo sapiens
aggagcatgggcttcggaggcctatagcccgcaggtcaaaatgcagatcttcgtgaaaacccttaccggcaagaccatcacc

SEQ ID NO: 776344 - DNA, 100 bp, Homo sapiens
accagaggactgggaggagcatgtcaacagatgtggaagatgtcaagtttgtgatcaactatgactatccaaacagctcagaggattatgtgcaccgtat

SEQ ID NO: 776345 - DNA, 90 bp, Homo sapiens
tgcggcaacaccatggctgggtagttcgaggggtttttgcggaaagaccacagcaagattctttcattcgtctcctcctagcctggggga

SEQ ID NO: 776346 - DNA, 51 bp, Homo sapiens
cctccttcgcctcggagtgggatgaggaagaagctgtttgttttgattctg

SEQ ID NO: 776347 - DNA, 98 bp, Homo sapiens
tgtctcgctccgtggccttagctgtgctcgcgctactctctctttctggcctggaggctatccagcgttaaacccatccagagtaatggctgcggcct

SEQ ID NO: 776348 - DNA, 100 bp, Homo sapiens
gatctcaggatggacccaagctctgccggacatggtggtgtcccacctttttgggaagcttattaatgtggctttgggtaaatgcatttccattgaaaac

SEQ ID NO: 776349 - DNA, 100 bp, Homo sapiens
cctcatctgaccgaagggatcattgtggataatgatgtttattcgattaaactgcaaatatctcatgaagctgctgcctgtatcactggtctccgggcag

SEQ ID NO: 776350 - DNA, 100 bp, Homo sapiens
ttgaggattcgttttcctggctttgagcccctcacaccctggatccttgacctactaggaaatgtttcaacgtgcgcaagcgttgcggcggcgggcagag

SEQ ID NO: 776351 - DNA, 100 bp, Homo sapiens
gcaaaagcatttacagcaacagcagttccttcagaggcaacagcaccttctcgcggaacaggaacagatggagtcggataactgttcaggaggagatgat

SEQ ID NO: 776352 - DNA, 100 bp, Homo sapiens
agaacctcttgttcctcctgtcccaaaagaccatcctgctctcaactacaacatcgtttcagggcaaagatgctggaaggagatctggtttcaaagatgc

SEQ ID NO: 776353 - DNA, 75 bp, Homo sapiens
ctctgggctacggactatgggcgaatagctctgaccacccggcgaagagcatcactttgggtcctcaggaatgac

SEQ ID NO: 776354 - DNA, 50 bp, Homo sapiens
aagaagtctaaaaatggaagcggcagcacaacaagattcgcagcgtggag

SEQ ID NO: 776355 - DNA, 83 bp, Homo sapiens
gtcagagccgccatcttgtgggagcaaaaccaacgcctggctcggagcagcagcctctgagcattttgaaagcgaagcagaag

SEQ ID NO: 776356 - DNA, 88 bp, Homo sapiens
agcccagcccccagaaaggattgtgacatatcgttggacccagaattgagcatgtagagcgcatgaagtacaggacaataaagcttcc

SEQ ID NO: 776357 - DNA, 83 bp, Homo sapiens
tcccatcgaagctctagaaatgaatgtttccatctcttcagagatgaaccagttatacatgggaagctgttgataccaaaaat

SEQ ID NO: 776358 - DNA, 95 bp, Homo sapiens
tggcaacccagagagataactcctcaggcacgcttaaaaaggcctcttaagagccttgatggtgctctatatgatgatgaagatgatgatgacat

SEQ ID NO: 776359 - DNA, 100 bp, Homo sapiens
tacgtgtgggggggctacgtgccgtgcttcctcaaagactgggaaatgcacgtccacttcaaagtccacggcacagggaagaagaacctccatggagacg

SEQ ID NO: 776360 - DNA, 96 bp, Homo sapiens
atcttgtaccctgttatatttcataaggcacccagtcagtcagagtcagagccagagaaggctccattgtgcagtgtgcccccaccccctccttca

SEQ ID NO: 776361 - DNA, 74 bp, Homo sapiens
tctggaggaaaggtttacaagcaggccacgattgaatctctgaagcccaactatggaaaccagcaatatggacc

SEQ ID NO: 776362 - DNA, 75 bp, Homo sapiens
agccggcggaccgcgtcctgcgccggagcaggactcgggtcaagctggaaagcctggaagacgcctacattctgc

SEQ ID NO: 776363 - DNA, 75 bp, Homo sapiens
gcgagctgcagctgcgatctctgtggtaggcccaggctggagtgcagtggcgcaatctcggctctctgcaacctt

SEQ ID NO: 776364 - DNA, 100 bp, Homo sapiens
gagacaaccccactatcgtgcaggtgatcatggagctcagcttggtctccatggggctggtggtgatggaatacatgatgacacagcaggtggagaggaa

SEQ ID NO: 776365 - DNA, 108 bp, Homo sapiens
agggaaccaacccactttctcggcgccgcggctcttttctaaaagtgattgttaaaatgagtcttcggaagcaaacccctagtgacttcttaaagcaaatcatcggac

SEQ ID NO: 776366 - DNA, 100 bp, Homo sapiens
aggatccctaacaggtttttgagagacctgatggccaaaagaaaggaagaaaatttttcctctcctaaaaatgccaaaaggccaagacaagaagaattgg

SEQ ID NO: 776367 - DNA, 50 bp, Homo sapiens
tgtatgttgggggtttagagagcagacatgcgtcgggatgtccaggaaat

SEQ ID NO: 776368 - DNA, 100 bp, Homo sapiens
ccggaacgggagccaacatggcagcggggttcgggcgatgctgcagggtgtgtgcagtggcctcagggatccggaaagtctaggactgaacttctcctaa

SEQ ID NO: 776369 - DNA, 80 bp, Homo sapiens
tcgtggtctaaagcttcggcacaagggcccaactggaattccacttacgggaatgggtaccacagaccatgtcatcgtcc

SEQ ID NO: 776370 - DNA, 83 bp, Homo sapiens
ctccagaacctatgctggtggaacagcctcggccaccaagaaaggaaggaggagacctgaacagtacatccggagaatccagc

SEQ ID NO: 776371 - DNA, 101 bp, Homo sapiens
gggtgctgctggttagtgtgctctgagggagggtccgagccagccgctgttttgccggaggagcccctcaggccggcaccagcggctgtcggtgacgagcc

SEQ ID NO: 776372 - DNA, 100 bp, Homo sapiens
ccggcggctgctgctgctgctgacgctgctgctgcccggcctcgggaaaccaggcgatgcggaagaagctaatcttgtacttcaagaggaggaatcacgc

SEQ ID NO: 776373 - DNA, 75 bp, Homo sapiens
cgcggtgcagcgaatcaagcgggagttcaaggaggtgctgaagagcgaggagaatttcgctaaggagtttgtgat

SEQ ID NO: 776374 - DNA, 82 bp, Homo sapiens
ggacccaccgctgccctcagctccgagtccagggcgagcattttgaaagcgaagcagaagccgtagaatcagcggcgagcct

SEQ ID NO: 776375 - DNA, 75 bp, Homo sapiens
cagtcacacctgcggaggttctgccttcagtgttcgaggtgttggaacaggaggaattgtttctacagcattttg

SEQ ID NO: 776376 - DNA, 75 bp, Homo sapiens
ggaggaggcggtggccctgctggaggagctctgggtcatttcttcagatagctccccagctgtggaaaatgagca

SEQ ID NO: 776377 - DNA, 100 bp, Homo sapiens
tcggcttctctacgcagaacccgggagtaggagactcagaatcgaatctcttctccctccccttcttggttatgggtgctacatgtgtgctttcagagca

SEQ ID NO: 776378 - DNA, 75 bp, Homo sapiens
ccagtggagccggagtgcgggcgcgccccaccaccgccctcaccatggcgcattggagtgactgtctggcatcac

SEQ ID NO: 776379 - DNA, 50 bp, Homo sapiens
gaacactgtccttcaaaacgagcactggagatattattgctgtcatgata

SEQ ID NO: 776380 - DNA, 82 bp, Homo sapiens
cccgggaggagccttaacaagcgcacggagccctcaagatctcagccagcttttatgcaaagcagtttatcccagccatctg

SEQ ID NO: 776381 - DNA, 99 bp, Homo sapiens
aatgctgatgcttcaagtcttggaaccacacttcgagaatcactgttataatgtacagcagaactgcatgatcagagtctcgctctgtcacccaggctg

SEQ ID NO: 776382 - DNA, 136 bp, Homo sapiens
cttctatttcttgtggatattatggctaataacacaacaagtttagggagtccatggccagaaaacttttgggggacaatgactcattcttcccaggacactggttcttgtggcattcaggaagatggaaagcttt

SEQ ID NO: 776383 - DNA, 87 bp, Homo sapiens
gacccagtggatgtaaaccccttccaggtgactctcctattccatctgtttcttcgggatcatcttcacctctttcagccacttctg

SEQ ID NO: 776384 - DNA, 100 bp, Homo sapiens
aatgcagatgatttgcagtgaccattttgttgcagttgactcacgattatagtcatagggctgttttgctgcagcttctgaagtgttaaagcacttgaag

SEQ ID NO: 776385 - DNA, 100 bp, Homo sapiens
cgcatgcccagaagaggccgcacacgccctggagctccgcaagggggagctgcgctcggcggacctgcccgcgatcccaatggagatcttcgtggatgat

SEQ ID NO: 776386 - DNA, 82 bp, Homo sapiens
atcatgtctgcgagccaggattcccggaattacatgaatgacagtcttcgaaccaatgtgtttgttcgatttcaaccagaga

SEQ ID NO: 776387 - DNA, 99 bp, Homo sapiens
cctcttaaggctctgtcagtcttagggcgtagacagtcaaagaggcagctccggaatgagaaagataagccactgcctccactgctggcccgagtcggg

SEQ ID NO: 776388 - DNA, 75 bp, Homo sapiens
gaaaggcaaagaacaagagaagacctcagatgtgaagtccattaaagatcatgtttgagaccttcaacaccccag

SEQ ID NO: 776389 - DNA, 101 bp, Homo sapiens
ggtgggtacgatctgtatcttttagccatgatggactgcatgttgcaagccttgctgatgataactactgtgtgaagacattcacaggacacagagaatgg

SEQ ID NO: 776390 - DNA, 75 bp, Homo sapiens
gagggacaggatccggaggcgccagctcaacccagtccagagcgtgagtccattcacatcctgagtgttgatgag

SEQ ID NO: 776391 - DNA, 88 bp, Homo sapiens
gggcctccgcgccgcggccgttagtcatgtcggtatgacatgatgggaagaaatcagactgctgtgagagaagagatgattctcctgg

SEQ ID NO: 776392 - DNA, 80 bp, Homo sapiens
aaaacacgagaatgtggtcaacttgattgagatttgtcgaaccaaagcggacaaacataaattgcagagattcctgactg

SEQ ID NO: 776393 - DNA, 75 bp, Homo sapiens
cacaaacagagtgaaactactcagaaatgtgaagaggagaattctgcctaagccaactcgaaaaagccgtacaaa

SEQ ID NO: 776394 - DNA, 75 bp, Homo sapiens
ccaagtgcgacaagaccgtgtacttcgccccactgtgttctccttgcctcaaaagaaaactcggcacctgttaaa

SEQ ID NO: 776395 - DNA, 95 bp, Homo sapiens
ccagactcaagacacacaactcataacagttgatgaaaaattgaaaaaagcagcaagcctcggcagcagtcaatcctccagaacctatgctggtg

SEQ ID NO: 776396 - DNA, 48 bp, Homo sapiens
cgtcagcatattttagactgaaaaacaagtttatttctgatcgtgaaa

SEQ ID NO: 776397 - DNA, 100 bp, Homo sapiens
atgacagagaaagagagagagcaagaactgttcaatcgcatagagaagagggaggtgttgaaaagaaggggatggtatgaatgcatatgtagcctacaaa

SEQ ID NO: 776398 - DNA, 71 bp, Homo sapiens
gcggctcctgagggatcggtctcagccgcgcggaaatgcactcggtgatggaaagagagccactattctga

SEQ ID NO: 776399 - DNA, 75 bp, Homo sapiens
attgagcagctctatgggaaataaaaaagcacgcttagattggaatactgatgctgcgtctttgattggagaaga

SEQ ID NO: 776400 - DNA, 75 bp, Homo sapiens
ctgggccgggagcgacttccaggatatagccctggagatgttcgtggtagccgaggccgatgcgggctcctgcct

SEQ ID NO: 776401 - DNA, 115 bp, Homo sapiens
ctggatccactgtagcatctgcaatcactgtgctgttccagatcattcttggccgtccccatgttgcgttttccgacctgtttcccatccttccgggtggtgggagagaagcagc

SEQ ID NO: 776402 - DNA, 127 bp, Homo sapiens
cgagatgtctcgctccgtggccttagctgtgctcgcgctactctctctttctggcctggaggctatccagcatgccgacaaaaggatcaaggtggcgaagcccgtggtggagatggatggtgatgag

SEQ ID NO: 776403 - DNA, 82 bp, Homo sapiens
cccttgatccgggagtctttccactgggggatttgggagcagcttgtcttacacaaggacgaaggaaaaggtcagggatcga

SEQ ID NO: 776404 - DNA, 111 bp, Homo sapiens
ggccaacgagcctgcgtcccacctagaatctgctggctactacttgaagtatgtgaaagcaagaacagagctaacatgggattatggctatgaagctgggactgtgcctga

SEQ ID NO: 776405 - DNA, 75 bp, Homo sapiens
ccccgacgcagcccagcggcacggagaaaggtgcatctgcagacgcagcaggaggtgaagctgcgcatgacgggc

SEQ ID NO: 776406 - DNA, 101 bp, Homo sapiens
cccacccgcatgctctttgtcactccccggcggcagcacgaaagtaccatgtatcaaggttacattggtgcagccctagttttagggggagtagatgttac

SEQ ID NO: 776407 - DNA, 90 bp, Homo sapiens
gcgccaccatggcggcgcccccgcagcccgtcacccacctcatctttgacatggacggacttcttctggtcatccctttcaagccctgat

SEQ ID NO: 776408 - DNA, 84 bp, Homo sapiens
cccgccggcccgcgggtctacttcctcaaaggtacaagtatgagttctgcccgttccacaacgtgacccagcacgagcagacct

SEQ ID NO: 776409 - DNA, 75 bp, Homo sapiens
tcccggccaccagcaattgtccgctaatgctgcctaccttgggggccaagaaatgatggaggtggtgaagagaga

SEQ ID NO: 776410 - DNA, 101 bp, Homo sapiens
agagaagtttaagagaagaaatggacatgattgcctaaatcagccaaacacagggaaaacctcttttttgtgatggagtacctcaacggaggggacttaat

SEQ ID NO: 776411 - DNA, 75 bp, Homo sapiens
gctgagcagaggacgacatgttgcttttcgtggaggggacggcaaaacagaacagaaaggcggagataaaaagag

SEQ ID NO: 776412 - DNA, 74 bp, Homo sapiens
cgagaggaggcgttggtcagaggagtcttcatgaaggtggtgaagcccaaggaggaaatgagtctcaaccagac

SEQ ID NO: 776413 - DNA, 100 bp, Homo sapiens
aagacggtgggatcaggagatgggttatgtaccgaaggactctaccgtgtcagcgggaataaaactgaccaagacaatattcaaaagcagtttgatcaag

SEQ ID NO: 776414 - DNA, 76 bp, Homo sapiens
ggaagtcatggaattcatcgtaaacacttgccaattcatcatgggagcattttttgtcctcaagaaaatacggaag

SEQ ID NO: 776415 - DNA, 95 bp, Homo sapiens
tcaggctcaacgaggaactcaaagtggatgaggaaagccagctgcgggccgtccagcggctgtgccacttctacagcgccgtcatgcccagcgag

SEQ ID NO: 776416 - DNA, 100 bp, Homo sapiens
gcgcatcgaggatttggcgctgcagaaccagatccgggagcacgtcatctccatcgaggaatcacttgatggctgccaggaaggcatttgacagattttt

SEQ ID NO: 776417 - DNA, 83 bp, Homo sapiens
ccgagccccttcctgagaagatcccagccgcggcgagtcctttgcacatgttggcaacacacgcatccgcatcggcctccctg

SEQ ID NO: 776418 - DNA, 98 bp, Homo sapiens
ccaaagtgctagattccatggaataatccagaatggctactctgatctatgttgataaggaaaatggagaaccaggcacccgtgtggttgctaaggat

SEQ ID NO: 776419 - DNA, 100 bp, Homo sapiens
tgtggtctgttgtaccccactgctggggtggtggttccaatgagacagggcacaccaaactccatctgagttgcatgctgagaatttgaaaaatgaagat

SEQ ID NO: 776420 - DNA, 101 bp, Homo sapiens
tcttcctgctcgtgctcactgtcaccgagccgctgcggccagcaccatatgaaggcggagtatggaaagttagagtggacctacctgataaataccctttc

SEQ ID NO: 776421 - DNA, 90 bp, Homo sapiens
atcctggaactgctgaatcagcgaggccttcgagatccaggggatactgaggaagatgaggaggaagatgagaaggacaaaggaaaactg

SEQ ID NO: 776422 - DNA, 51 bp, Homo sapiens
gcagggacccggtgacagcgtgagaggttctcttaactacagtgacttcaa

SEQ ID NO: 776423 - DNA, 134 bp, Homo sapiens
tatgggcgccctttcctcatcatcaaggatcaggaccgcaagtcccgtcttatgggacttgaggccctcaagtcattagatggaaaagccatcaaggtggaacaagccaccaaaccatcatttgaaagtggtag

SEQ ID NO: 776424 - DNA, 75 bp, Homo sapiens
tttacccaagaaccattggtggagatagaaggtgaggccgcaggcggtgctctgggtccgggagcgctgtcccca

SEQ ID NO: 776425 - DNA, 76 bp, Homo sapiens
ctgcgctctgcccggcgagtcgggctctggaggaaaagaaagacacgatgaggcgagtggtacgacagagcaagtt

SEQ ID NO: 776426 - DNA, 73 bp, Homo sapiens
catgtcagccttcccagtagctgggaccacaggaatttggataaagagagggcagtgctactacaacgccgga

SEQ ID NO: 776427 - DNA, 100 bp, Homo sapiens
acgtgttcgctgcccagaagaagggaaggcgcgagtgaggaaaggaggtactgtaggtggcccgaggcagccgggatgacagctctccccaggaatcctg

SEQ ID NO: 776428 - DNA, 100 bp, Homo sapiens
ttaccgtgtgcagggccgggcagtgctgcccatccgctggatggcctgggagtgcatcctcatgttcctgattcactgtgagggcacacggttcacggag

SEQ ID NO: 776429 - DNA, 75 bp, Homo sapiens
ttacacttgtcaacttcctcttcagtcatcagtcctcacgattttgatgaatgtcgatttgatattagtgtaaat

SEQ ID NO: 776430 - DNA, 75 bp, Homo sapiens
ctcagcctccggagtagctgggattacaggtcctagcttactctgccaccactgcccggcaggaggaagttcccc

SEQ ID NO: 776431 - DNA, 73 bp, Homo sapiens
agcaattgcccaaacccaaagtgtggagcttctactggatatggttgggtcccctgaccaggatctccaggaa

SEQ ID NO: 776432 - DNA, 95 bp, Homo sapiens
gactctggtctaaaaagggtccagaagctacttttccaggtatgtgggagagaacaataacaataggaagtgctggaaagactttcagtgtaact

SEQ ID NO: 776433 - DNA, 50 bp, Homo sapiens
gttcgctacacagcaatgcatcgagacacggaatcgatttgaaggaacaa

SEQ ID NO: 776434 - DNA, 99 bp, Homo sapiens
tggaagtagtagttgttgagcagagggaaagggataggagaaggatgtggactgcagtgctgcagtgccagggggcagctggcattttatgctatgtgg

SEQ ID NO: 776435 - DNA, 75 bp, Homo sapiens
aacccagaagcctacaatgaagaactgaagaagctggagttgctcagacagatgcggttcatgctattattcagc

SEQ ID NO: 776436 - DNA, 75 bp, Homo sapiens
aaagtcttgacacagatagtcttcttattgctggagacaccgtggtgaagaggaagcctgcttctctgatggccc

SEQ ID NO: 776437 - DNA, 82 bp, Homo sapiens
gaacaaagcttattccttcaaagagcagatcatcgagctggagctgaaggaggccctcaagagtattgagtatctggaggag

SEQ ID NO: 776438 - DNA, 100 bp, Homo sapiens
cctaaggcggggaaccgcagcgcagtgacagtgcagaaccccggcgcggcccttgtgaatggtgctgggctcgccatggctacttgtgatatcattttcc

SEQ ID NO: 776439 - DNA, 98 bp, Homo sapiens
ggagccgtcatctttaacttccccgggacccgcaatgaggtcatccccatgtctcacccggataacagacgagtacctttggaaaggtcacgctctcg

SEQ ID NO: 776440 - DNA, 50 bp, Homo sapiens
cagcggaggagcccgaccgacccgggagtgcatccgccccaacccttttc

SEQ ID NO: 776441 - DNA, 100 bp, Homo sapiens
ggaacaaggagaagaaccatggagactggaggaagaattcccaagccagagctttccagcttagaccatgctcagcctccaagcagccttgtcatcgaca

SEQ ID NO: 776442 - DNA, 100 bp, Homo sapiens
agggtgaagctcctcgacaccatggtggacacttttcttcagaagctggtcgccgccggcaggactggacctacagagacatctgggattttctgcgtca

SEQ ID NO: 776443 - DNA, 119 bp, Homo sapiens
cagcctggagagtcgaagcagcagctctcgctccagaagcttcactttggtactaggttttgacaagcttgcatcatgcgtgagtataagctagtcgttcttggctcaggaggcgttgg

SEQ ID NO: 776444 - DNA, 100 bp, Homo sapiens
caggcataatgaatgatgaaaaatttaacctgaagttggtcatcaaaccagtttaattggttggggtcagataagaagaggagtgacaatcaagccaaca

SEQ ID NO: 776445 - DNA, 98 bp, Homo sapiens
ctcccacttcagcctcttcagtaactgggactacagtatgtgccaagtgctctctgctgccccagcagagccagtatcctgacaggaaagtacccaca

SEQ ID NO: 776446 - DNA, 83 bp, Homo sapiens
ccgggaccggagaggaagcggagatcagtcgcatcgaatacattcattcaaagaacttcatccaccgggatgtgaagccagac

SEQ ID NO: 776447 - DNA, 50 bp, Homo sapiens
acagaaattctggaacacctatatggttatcaagttatacccaaccagca

SEQ ID NO: 776448 - DNA, 101 bp, Homo sapiens
cttgctctgtggcccaggccggcgtgcaatgctgcgttcctttgcctgcaacaggggtcaagatgagttttgcctgacttctttgatgtcctgaactttcc

SEQ ID NO: 776449 - DNA, 75 bp, Homo sapiens
cccggagccgcgagcacccaagccaaggactacgagaacgccatcaagttctacagccaggccatcgagctgaac

SEQ ID NO: 776450 - DNA, 87 bp, Homo sapiens
ggccaactccaatgggcctttccagcccgtggtccttctccatattcgagatttggagcaagaggtggtggtggccttcccccgaag

SEQ ID NO: 776451 - DNA, 96 bp, Homo sapiens
tctcaatatctgtcttcggtggactccttcggcagtccacccaccgccgccgcctcccaggctgaaggggatgctaagggagataaagcaaaggtg

SEQ ID NO: 776452 - DNA, 74 bp, Homo sapiens
aagactgatgatgtcctggatctgatgctgacttgctcatcagttttgcacagtggcaattttgggactgattt

SEQ ID NO: 776453 - DNA, 95 bp, Homo sapiens
ccgactgcaactgctggattgctgcaaggctgagggacgagaacgagtgtttaactgctgaagagatcttttcccttcatggcttttcaaatgct

SEQ ID NO: 776454 - DNA, 75 bp, Homo sapiens
gcagtacatgacgagggggagtctcctccagtgactgctcaagaaactaccctcataccctaatgatcccagcaa

SEQ ID NO: 776455 - DNA, 75 bp, Homo sapiens
aatttaagcctgatctaacccctagaaacaggtaaattcaactggaagggaactattaaagcaattctgaaacag

SEQ ID NO: 776456 - DNA, 90 bp, Homo sapiens
tgcagtgacccagaccctctcctttccctttgagaccgtgaagagaaagatgcagatgaccgcacctcgagcaggagtggggatgccacg

SEQ ID NO: 776457 - DNA, 100 bp, Homo sapiens
gggcgctgcggcacagctggtttgagcaactgaactggaaacaagatgcagaggagaaggcagagcccccccaggctatgaatgccctgatgcggttgaa

SEQ ID NO: 776458 - DNA, 82 bp, Homo sapiens
agctatctgaagacattgacctgctgaaatccaggatagagagtgaggtatttctgggaaaagccagcttctgtttgcactg

SEQ ID NO: 776459 - DNA, 100 bp, Homo sapiens
cccagctccttggggtttccggctgcagggcggtaaggatttcaacatgcctctgacaatctctagttggcagccgattaggaggcctggttacagtgtt

SEQ ID NO: 776460 - DNA, 78 bp, Homo sapiens
tcttgggaggattaagtgaggggacatgaggtttggttgggatgttccagtaattctgagaaattcagaagagaccca

SEQ ID NO: 776461 - DNA, 115 bp, Homo sapiens
cccagagcaactttgcagttggctacaagactgatgaattccagcttcacactaatgtttgtatcacggactgattcaccgagcccaaccgtactcaactcacatatttctaccc

SEQ ID NO: 776462 - DNA, 100 bp, Homo sapiens
agcaggcagatgatgcagaggagcgagctgagcgcctccagcgagaagttgagggagaaaggcgggcccgggaacaggatggatagaatgacagaagatg

SEQ ID NO: 776463 - DNA, 100 bp, Homo sapiens
gatacagatgcggacacccggctctcacgcagagttgctgatcatctgggctgtgatccacaaacccggttctttgtccctcctaatatcaaacagtgga

SEQ ID NO: 776464 - DNA, 75 bp, Homo sapiens
tcaccctcggggagcaacatggcgcttctctgaagtagctttggaaagtagagaagaaaatccagtttgcttctt

SEQ ID NO: 776465 - DNA, 90 bp, Homo sapiens
cgattctccctctcctagaggcgccatgaatcatcttaatggacagaaaatgtatggaaaaattattcgtgttactctgtctaaacatca

SEQ ID NO: 776466 - DNA, 95 bp, Homo sapiens
ccctgactgagctgctggctaagatcaccaacacagacgtgtgtttgctttcacaaccaaagttctgggccattcagacatcagccttgatcctc

SEQ ID NO: 776467 - DNA, 90 bp, Homo sapiens
atagtcctggatcttctggggttccctatgcaaatgccaaaggaattggttatccagtccctcctcctatgtctccatcctccaaatctg

SEQ ID NO: 776468 - DNA, 100 bp, Homo sapiens
gggagaggagctgtggataacgggaggtgaatttccatgtcaacatagtcctggctcgtgctgtcttggaaagagaatttaacaaccttttggtcatggg

SEQ ID NO: 776469 - DNA, 98 bp, Homo sapiens
gtgtctcttagcagcgcgcggagaagaacggggagccagcccggaagcaggagatcattaagaccacggagcagctcatcgaggccgtcaacaacggt

SEQ ID NO: 776470 - DNA, 100 bp, Homo sapiens
gctggagaagtccccttatgaccagaaattgtatgctgctatgcatgaacctgatggagtggccggagtcagtgcaattagaaaggcagaaccatctcta

SEQ ID NO: 776471 - DNA, 90 bp, Homo sapiens
actggacagattaattctctgcctggtcaagagcaatctgaatccaaatgcaaaggagtttgttcctggggtgaagtacggaaatatttg

SEQ ID NO: 776472 - DNA, 100 bp, Homo sapiens
gaaacagaaatttcatgttgcaccctgacagtcattttgtttactcattcagccctgttgcaggtcccaataaactcttcataaggttgacagaagcacc

SEQ ID NO: 776473 - DNA, 73 bp, Homo sapiens
gtctctggagacatcttcagcagtaaatctgtaggtgtgtctaaccggcagaataagaaagtagaagaagaag

SEQ ID NO: 776474 - DNA, 71 bp, Homo sapiens
gggggctgtgtggcttttatcctggataacaccatcccagctgcagaaccttggcctgaaaatgctacatt

SEQ ID NO: 776475 - DNA, 100 bp, Homo sapiens
atgccaaggaaaaactggagagcttcatcaaaaatagtgatagctttgataagtgtactgggcattgtgcctctgcaaggccaaggagaggacaagcgac

SEQ ID NO: 776476 - DNA, 85 bp, Homo sapiens
ctagttaagtcccaaggtgtcaacgacaatgaggagtgtatccaaagtgtgtacatcagtaagatcataagcagtgatcgagatc

SEQ ID NO: 776477 - DNA, 96 bp, Homo sapiens
aggacgttcagcagcattcccgtctcacggatatgcaaggccgagacagcggctaacaggatatgtaaggttcttgctgtgaatcaagagaatgag

SEQ ID NO: 776478 - DNA, 90 bp, Homo sapiens
gagccgtgcatggggctgctccccaggacctgagcaggaacctggagttttcaggtgcagtagacattgttgcaatcatgatcggcaatc

SEQ ID NO: 776479 - DNA, 98 bp, Homo sapiens
cctcgcttggccgccagttcttctgcagccgaaggcgattcctgaatttgacaacttgtacctggatatgaatggaattatacatcagtgctcccatc

SEQ ID NO: 776480 - DNA, 49 bp, Homo sapiens
cttcctcacccgcgcctgcgacctcgcacagacgcagtcttcagcaagg

SEQ ID NO: 776481 - DNA, 100 bp, Homo sapiens
ctgaaacgactcgggtagaggctgaggaaggccgtgttgtttgtctacctgggactaattggccctgtgtactcctctgtctcgtctgaagcaagaagta

SEQ ID NO: 776482 - DNA, 73 bp, Homo sapiens
aaagagaagctcttcctgtgaggtggtcctggctctgccatatgacacccccgtgcccggctacatgaataac

SEQ ID NO: 776483 - DNA, 82 bp, Homo sapiens
tgtaagccactacggctggcctattattgctgtattctaacttattcatctcctatggagaatgaagtttctagattagaag

SEQ ID NO: 776484 - DNA, 75 bp, Homo sapiens
gaaattagaccattttcttcgtgagaaagaaatcgacgtgctgttttcatagggccctggagatgtacaaggatg

SEQ ID NO: 776485 - DNA, 90 bp, Homo sapiens
gggaaatttgagaaaaccatatctggtcacaagctggataaaaactttgaatctggtcctaggattaaaaagagcactggaattcccaga

SEQ ID NO: 776486 - DNA, 90 bp, Homo sapiens
gtgctagctcgccgcggccgcctccgggcttctagaattcctctccagagctactctcaagttatatccaggggacaggcccctttggct

SEQ ID NO: 776487 - DNA, 90 bp, Homo sapiens
atctgcttcagcaccgcctctctggtgctaagggccacggatgtccatcccctccagtaatagctcttcaagtctgcaataaaaaatggc

SEQ ID NO: 776488 - DNA, 75 bp, Homo sapiens
aattacaatctagcagacggaactgaactcagggagttgatccctgaattttattatctccctgagatgtttgtc

SEQ ID NO: 776489 - DNA, 73 bp, Homo sapiens
tggatgcaacttgtgattttgatttatcacatttctggagcaagtacagaccgtggcaaggaggtgtacagcc

SEQ ID NO: 776490 - DNA, 101 bp, Homo sapiens
actatggcagcagcgtggcctccgccaccgtgcacatccgaatggctgaaggaagaggatcaccttccaagacaaaacagtcttcatgggggaaaaatgac

SEQ ID NO: 776491 - DNA, 82 bp, Homo sapiens
ttctgctgaccgcgggccctgccctgggctggaacgaccctgccccctcggaaaaccacactgagagttgcattaaaaacca

SEQ ID NO: 776492 - DNA, 85 bp, Homo sapiens
ctttttggttggggaaactcggagtacctgcagctggcctctgtcactgactccacacagggaaatcgtggaacacatggtccag

SEQ ID NO: 776493 - DNA, 90 bp, Homo sapiens
ggatccggagctggagcccccaggtgccaaaaagctgaccaataaggccaccctgtggtatgtgcccctgtcgctgaagaatgtggacaa

SEQ ID NO: 776494 - DNA, 75 bp, Homo sapiens
ccaccatctccatcacccaccaacaacaccacaataatccacagccaaggttatatgtcaccacacccatctcca

SEQ ID NO: 776495 - DNA, 90 bp, Homo sapiens
tcctttatatagaagggagagtaggtccaggaggcccaggaggtcctgggggacccatgggtcgcatgggaggccgtggaggagatagag

SEQ ID NO: 776496 - DNA, 90 bp, Homo sapiens
agaggcaggaagcctccttaggaaagcaggggggttcatgtgtcacacaagtaggccttctggaaagcgtgtatgaaatgttcaggaagg

SEQ ID NO: 776497 - DNA, 74 bp, Homo sapiens
tccaggctctccagtttttcgtcgagagattcactatggaatcggaaatctactttcttcaatgtgttaaccaa

SEQ ID NO: 776498 - DNA, 75 bp, Homo sapiens
accaggccgggaagcccatcgggttgatgataattagaagcatgctttccactgaacttcccgacaacatttgtt

SEQ ID NO: 776499 - DNA, 90 bp, Homo sapiens
ccatggggaagcgggacaatcgggtgatatggaatatatgaacgctgtcgagaattggtggaagcaggttatgatgtacggcaaccggac

SEQ ID NO: 776500 - DNA, 82 bp, Homo sapiens
acttctagacgacaaaatgcaaaaaaggaggccaaagactttgtataatgggtctctcccaaatggcgatagaggaaggagg

SEQ ID NO: 776501 - DNA, 82 bp, Homo sapiens
tttggaaaaaccgctatgtggtgctgaaaggggaccagctctacatctctgagaaggagagtattgttacaatcacatttga

SEQ ID NO: 776502 - DNA, 98 bp, Homo sapiens
cggagcccccggcccaagggcgacttctccagccgggcccgcgaagtgcttttgcgagaattgaagcaccctaatgtgattgcattgcagaaggtgtt

SEQ ID NO: 776503 - DNA, 74 bp, Homo sapiens
ccagggaaccctggtcaccgtctcctcagtgagaaagatcagtctaaagaaaaggagaagaaagtgaaaaaaac

SEQ ID NO: 776504 - DNA, 75 bp, Homo sapiens
cgccggctatggccgtgccctggggctgagccctcagccttatgccagcctggaccatcttggaggcagtgtagg

SEQ ID NO: 776505 - DNA, 110 bp, Homo sapiens
cctggacccccccatgggagacgctgagtacttggcggccttcagggattaaagcctgtggtttccacagaagcaccacctatcatatttgccacaccaactaaactgac

SEQ ID NO: 776506 - DNA, 100 bp, Homo sapiens
cggctccccccatctggctggaacacacatcagtcacatccagctccaggtcccacaggggctcttcttccccacgaaaaagatcttattcaagttcatc

SEQ ID NO: 776507 - DNA, 75 bp, Homo sapiens
tcgaacctgaaattccgctttgacaagctcagccatgccagctctggtgcggctgaccccgcactacatctaccc

SEQ ID NO: 776508 - DNA, 85 bp, Homo sapiens
ataccctcagctgtatgtgaaaggggagctggtgggaggattggatattgtgaagtttggatttaggtggcgagtagaaaaagaa

SEQ ID NO: 776509 - DNA, 100 bp, Homo sapiens
gacccctgtgcttggacgggacagggtcgggggacacgcaggatgagccccgcgaccactggcacattcttgctgacagttggtgctagcaatcccctac

SEQ ID NO: 776510 - DNA, 95 bp, Homo sapiens
gctgaggaggccgccaagatgccgcagtccaagtcccggaagatcgcgatcctgggctaccggtctgtggatcatctctgttaatgcccatgtta

SEQ ID NO: 776511 - DNA, 100 bp, Homo sapiens
caggagcgatggccgggatcctggagcactcggtcatgtacccggtggactcggtgaagtgtgggcgaaatgctgaaaacttcgaccgatttttcacccg

SEQ ID NO: 776512 - DNA, 80 bp, Homo sapiens
ctcctcctgctccccatcgccatcccctatgcaggaaaaccagtagattcccagacatcgcgaagtgaatctgaaattgt

SEQ ID NO: 776513 - DNA, 74 bp, Homo sapiens
aaacctgtttaaactcattgtcaaagctgccaaacggaggcccgaagaaaaagaacctgaaaaagtaaatccac

SEQ ID NO: 776514 - DNA, 75 bp, Homo sapiens
ggaacttccacatcttctatcagctgctggctggagcagatgaacagctgctgaacttgaaactgcatctgcaga

SEQ ID NO: 776515 - DNA, 100 bp, Homo sapiens
attacggcggcagatccgcctactgcaggaaaaatggctacaaacttcctagcacatgagaagatctggttcgacaagttcaaatatgacgacgcagaaa

SEQ ID NO: 776516 - DNA, 98 bp, Homo sapiens
cgagcgcgccccaagcccgggcgccaccgctgccacctccgcgagatgcagattttcttttacaatccagatgactttgacagctttcaaaccgcaat

SEQ ID NO: 776517 - DNA, 75 bp, Homo sapiens
cctttgacttggtgttgaaagtgaaatgtcatgcctctgaaaatgaagggcaaagcccaacaccttcccccactg

SEQ ID NO: 776518 - DNA, 76 bp, Homo sapiens
agctcaacgactcctacgacctggaggagcacctggatatcaaccaggttcagtgtatctttgcctgcctacatca

SEQ ID NO: 776519 - DNA, 80 bp, Homo sapiens
cctgcacacccaggaagcagggcggtccctcatcaagaaggtcttacagatgcaaccccatgctgggaacgcaaaccctt

SEQ ID NO: 776520 - DNA, 100 bp, Homo sapiens
ctggtaaccaccgtggtggtgtttgtggcctcgatggtgttaggagaatgccgacagatgtcctcttcgagtcaaatcgtgtactaatggtcacttgatg

SEQ ID NO: 776521 - DNA, 90 bp, Homo sapiens
gaggcctcccgggctccgggaaaactacactggccaggtgacttaagagattaaaattaatttggttgctgttggttctgaacaaataat

SEQ ID NO: 776522 - DNA, 73 bp, Homo sapiens
agaagctgatcatgcagctcatcccccagcagctgctgtctctagtgatccctgaaaagttccagcatatttt

SEQ ID NO: 776523 - DNA, 100 bp, Homo sapiens
tggccctctagccccgctaccggactacatgtcggaggagaagctgcaggagaaagcggacaaacataaattgcagagattcctgactgctgacatggcc

SEQ ID NO: 776524 - DNA, 51 bp, Homo sapiens
ccagcactgcgggggccgcttcagatccgagagactgaggtcatcgacccc

SEQ ID NO: 776525 - DNA, 98 bp, Homo sapiens
accatgctggtcttggaaggcagtggaaacctggtgctatacacaggagtggttcgggtcagaagaggccaagtgatggaaatagtggattaatggca

SEQ ID NO: 776526 - DNA, 74 bp, Homo sapiens
ttccaacacagatgtccaagctgccaatctgactacctgcttcaagattacccagtcaccgtggcctccaacct

SEQ ID NO: 776527 - DNA, 100 bp, Homo sapiens
gaccgccagggcctcccctcaccaccaggaccaagtgtgcagttactgtaaaatggggaaaggagaaatttgaaggtgtagaattgaatacagatgaacc

SEQ ID NO: 776528 - DNA, 100 bp, Homo sapiens
tgaaagctctacaagatggcggcggtcggggccgaggcgcgaggaggctgctctttggcgtaaattgcaatcgattagggatcgtttctcagaatcaagt

SEQ ID NO: 776529 - DNA, 90 bp, Homo sapiens
cgggaacaaatactactacatcccgcagtacaagaactggagagaaatcatgaccaccccaggaaaagagaactttcgcctgaaaagtta

SEQ ID NO: 776530 - DNA, 100 bp, Homo sapiens
aagaccttgatggaccagcaatacaagtgctgggccccaagccggctctgcctgcaggtaccgaggacaccgccaaggaggatgcggccaaccgcaagct

SEQ ID NO: 776531 - DNA, 83 bp, Homo sapiens
ggccgggcgacctgggcaccagcaggacccgaggccaggagccaggggcccagaaggttgtgaccgagattcccgacgagaga

SEQ ID NO: 776532 - DNA, 90 bp, Homo sapiens
cacagctctccaaggaggaagatggtccaggctgggagcatccccttagcagcagcctctggactgaagcttcaagatggctgaccagga

SEQ ID NO: 776533 - DNA, 75 bp, Homo sapiens
cccggggtgtaataatgttaactgaggagcgggacggtatgcgggccatcctggggtcctacgacagcgagctga

SEQ ID NO: 776534 - DNA, 75 bp, Homo sapiens
agagaacaaggccaaccatggaaatggataaatggtactgaatggacaagacaatcactttgggaagcagtgaca

SEQ ID NO: 776535 - DNA, 90 bp, Homo sapiens
cggggatacagcctggaaggtgcgtgtggggctgggtctcggagtgggagacgtggagtgcagggtgaggacgcttgagcggaagttaga

SEQ ID NO: 776536 - DNA, 97 bp, Homo sapiens
tggctttgcttctggaatcttccatcttcatgagctgccagagtttaacctcatccactccctgaggaatgttttgaccgagtctgcgaggatcgcc

SEQ ID NO: 776537 - DNA, 75 bp, Homo sapiens
caagcctgtcattcctgctgctgccctagctggctacacaggggaagcaagcacttatttggctacttggtgtcc

SEQ ID NO: 776538 - DNA, 100 bp, Homo sapiens
ctggtcactccccaggattatgcgcggtctcccatccatggccggggtcttttctgtaagagaaacattgatgcaggtgagatggtgattgagtatgccg

SEQ ID NO: 776539 - DNA, 100 bp, Homo sapiens
tctattgtgcgcactggcaaacgtatgtttctggaacattgcgatttggaatgtgccacaacagaagcagattgggttcctctcgagctgtgctttggaa

SEQ ID NO: 776540 - DNA, 99 bp, Homo sapiens
gtgaaggcatttcaaaaagctatgtcttcagaggaacaaaagatttgtctgccaaacaactgcaggaacttggaaaatcgtgggaagaagttcagttgg

SEQ ID NO: 776541 - DNA, 122 bp, Homo sapiens
agggactgctgcaacctacggggtgtacttgggaacgaggggtgaagcggcccaggtgagggagtgttgaagcctggaaatcccctccccttccccctcccccctttacagtatccccctcc

SEQ ID NO: 776542 - DNA, 99 bp, Homo sapiens
aagcggaaggtgatgcccaagatggaccagaaattgataaagaaggtgtgattgaaccagacactgatgctcctcaagaaatgggagatgaaaatgcgg

SEQ ID NO: 776543 - DNA, 75 bp, Homo sapiens
cggcgcctgcttcgccagatcgtcatccagaatgagaacacgatgccacgcggccaattcctgtccccccagcag

SEQ ID NO: 776544 - DNA, 98 bp, Homo sapiens
agttataacgctacacgaagaactaagaatattattagcacaagagcaccatactttgaggggtctaaaattcccaggactccacagctttgcaccag

SEQ ID NO: 776545 - DNA, 100 bp, Homo sapiens
aagtctgccgatcatgccctgtggtgcagtcgagccagcacctgtttctggacctgcctaaggcagcctgcttctgcaaagtggtacgatcgaagggact

SEQ ID NO: 776546 - DNA, 49 bp, Homo sapiens
ttcaccccgtggtcgaggagtcgcacaacctccaagagggaaaacattt

SEQ ID NO: 776547 - DNA, 90 bp, Homo sapiens
tattgaaataagaccaaccagcaggaagattctaaaccgtattcaagaaagaattgatgaattgcaagtttgtgccccatagctgcacag

SEQ ID NO: 776548 - DNA, 100 bp, Homo sapiens
gagaaccagcacttctgggacgcacagagaccgtgaagattccaagttcaggagaactcgaccggttcagtgtacaaaacctgagtgtagaaaatggagg

SEQ ID NO: 776549 - DNA, 50 bp, Homo sapiens
agcccatcctccaagtcatcgaacttgccacatcagactcagattcccca

SEQ ID NO: 776550 - DNA, 100 bp, Homo sapiens
gcgctggagcaggagcggggccggaactggagccgaggcgcaggtggcgctggctgggagtgtccactcgccttccaccagcatggcaacgtcttcacag

SEQ ID NO: 776551 - DNA, 100 bp, Homo sapiens
aaagagaagaggagaaggaaaaacaagctgaagaaatggcatcagagactctccaacatgtgccttctgaccatacaaatgaaacttccaacagtactgt

SEQ ID NO: 776552 - DNA, 75 bp, Homo sapiens
tgcaggaaggcagtctttgctacgtacagcaaaaggaagaagccatggatttaataaatagagaaacaatgtctg

SEQ ID NO: 776553 - DNA, 100 bp, Homo sapiens
aatagtgatagctttgataagattaaagcaaggagagccaatcatgactggcaaaacacagaccagcaacgtcaccaataagaatgaccccaagtccatc

SEQ ID NO: 776554 - DNA, 132 bp, Homo sapiens
cgagctgctgatacagaagagatggatattgaaatggacagtggagatgaagcctaagaatatgatcagacgcccctgtcctggcaagagctagaaggtgagcgtgccagttcctgtgcacacaagcgctca

SEQ ID NO: 776555 - DNA, 100 bp, Homo sapiens
tctctgaagttacacccatcacagaattttcatagagctggactattggaagaaagccattgatctggtgacgaaagccacagaggaggacaaagccaag

SEQ ID NO: 776556 - DNA, 100 bp, Homo sapiens
ctcatgctcctactatccatttcaactacagatactttgaagtagaagaagctgatgagcagtctgaatgccagaatggataaccgttttgctacagcat

SEQ ID NO: 776557 - DNA, 89 bp, Homo sapiens
ccggcttctcccctacgcgctacacaagtggagctccttttcctccacctaccttcccgatgtatgcagagaatatttccaaaatggtg

SEQ ID NO: 776558 - DNA, 75 bp, Homo sapiens
gtacggcatgatgagttctgagctacggaggaaccctcatttcctcaaaagaaagtattccatgctacatgtgca

SEQ ID NO: 776559 - DNA, 75 bp, Homo sapiens
tgggtgacactcaacaggattcccgaaagatgttctcgtccgtggcgcacctggcgcgggcgaaccccttcaaca

SEQ ID NO: 776560 - DNA, 100 bp, Homo sapiens
cgggggcggcgtgcggcctagcgtctcagatctcacattcttgaaggtggcattgaagagcactaagatcggaagatgagtgagcttgaccagttacggc

SEQ ID NO: 776561 - DNA, 95 bp, Homo sapiens
attgctaatggagacatcagaagcttaaaggaagcagaaaatgtgtggcggattactgggacagatggtgatggcatcagctgagaagggaagga

SEQ ID NO: 776562 - DNA, 75 bp, Homo sapiens
aatcccgagtgctctacttgagaacctgaatatccaggtggaggacattcggattcgagccatcctctcaaccta

SEQ ID NO: 776563 - DNA, 83 bp, Homo sapiens
ccccagcccgtacagagccacccacccatcatcgcggccaccccacagcctgtgaagtcccaggggcagccactggcctccca

SEQ ID NO: 776564 - DNA, 91 bp, Homo sapiens
acaatcaaaaacttcctcgaatttcagcgtaaactgcagcatgatgttctgaagcttgaggtacaccagaggatcgcttcctggcagaatt

SEQ ID NO: 776565 - DNA, 75 bp, Homo sapiens
aatgctgggtcgttatccagaagcacagtctgtggctaggaactgtggctgcaccatctgtcttcatcttcccgc

SEQ ID NO: 776566 - DNA, 100 bp, Homo sapiens
aagatggagccctgcatatgattggctctttagctgaaatacttctgaaggaaactagcagagttgttcacatcatggattttcaacgagggaaaaactt

SEQ ID NO: 776567 - DNA, 100 bp, Homo sapiens
agaattacaacgtaccctatgaacctgactctgtggtcatgtccctcagcccgtacacctgtctgccacctcttgggggggcaccccaacctctcaaccc

SEQ ID NO: 776568 - DNA, 100 bp, Homo sapiens
tttggcattgacatttaattttagggtcctttatatagaagggagagtagctatttctagtctgctggcatcagtgacgcttgacctcagccagtatgcc

SEQ ID NO: 776569 - DNA, 74 bp, Homo sapiens
acacctctagcccaggctgtggaggggcccagtgagaatgtcaggaagctaagcactcggagttatatatgcag

SEQ ID NO: 776570 - DNA, 100 bp, Homo sapiens
gcagtgtcagagacgcagcactgggagaggaggacatcgtcaggctggcccaggaccaggaggagatgaaggctatttactgaggacccactggatgtca

SEQ ID NO: 776571 - DNA, 110 bp, Homo sapiens
cccagaccctggagcctcagttggaagcagccgatccagcctgcggagcctgtggggcagatgccatggacaatattaccaggcagaaccaattctacgatacccaagtc

SEQ ID NO: 776572 - DNA, 75 bp, Homo sapiens
gctacatgctgagatgttccctgtctcacgccatcactctggagatctattgggaaactgattataaccactcgg

SEQ ID NO: 776573 - DNA, 89 bp, Homo sapiens
gaaactaggtcgatggtcggcggcgcccggatgggcagctgaggttaatttggagtggcccctggagtcagtttcctacaccatccgag

SEQ ID NO: 776574 - DNA, 100 bp, Homo sapiens
agattttaagccaccggctaaaagctgaggagtacctgtcatttgcctttgagcattgtcaccgttctagtcagaagaacaaaaggatgattctgatcta

SEQ ID NO: 776575 - DNA, 74 bp, Homo sapiens
cgctgtgggctcctggggagatggaggggccggggctgggctcgcaggattaggaggccagaaggagatccctt

SEQ ID NO: 776576 - DNA, 75 bp, Homo sapiens
tctttcttcagccgaggccgccgccgcctctccttgctgcagccatggagaaacggggtctctgggggatccagt

SEQ ID NO: 776577 - DNA, 98 bp, Homo sapiens
acgtctacactgtacatgctttttattacaagactacggagcataggaggaaaattcatcatctgccctgggcgctgcctatggcacagccaagagcg

SEQ ID NO: 776578 - DNA, 50 bp, Homo sapiens
cctgtacagcctgcagaattgactcctagaaggaccccacccccctcccc

SEQ ID NO: 776579 - DNA, 89 bp, Homo sapiens
ggagttcttctgcagggacggcttcagccgcatccacgagatccaggttacggcctccgctgccacagggccatcatcaccatctgccg

SEQ ID NO: 776580 - DNA, 98 bp, Homo sapiens
cgagagtgggcgagaacgtccactgcgggccggcgaaagctgtccacaggtcctggctaccctgggaagagacaagaagtaaatgaagaaagaggaag

SEQ ID NO: 776581 - DNA, 99 bp, Homo sapiens
gggactatcctctggaggctgtgcgcatgcagcacctggcaacatcgaaaccaaccataacctgccaccgtcgcacaaatctcgaaacaacatccttcg

SEQ ID NO: 776582 - DNA, 83 bp, Homo sapiens
gaggcggccgcggggcccgagcgcaggtgtctgacttccagcaactgctggcctgtgccagggtgcaagctgagcactggagt

SEQ ID NO: 776583 - DNA, 100 bp, Homo sapiens
aaaccatggaattgattctgccttctgctgttcaacggttttgtgtatagcatttgaggttcttcagggcttgcagtatatgaacaaacatggtatagta

SEQ ID NO: 776584 - DNA, 82 bp, Homo sapiens
tcggcttctgcctggtgctctgcgtcctcatcgggcttatgttcgagctcaccatggatgatgatatcgccgcgctcgtcgt

SEQ ID NO: 776585 - DNA, 75 bp, Homo sapiens
aagaagtagaaggtgatgtggcagaattggaactaaaacttgataagttaatgaaattatcaggaaggagttttc

SEQ ID NO: 776586 - DNA, 75 bp, Homo sapiens
ctggagaggatggctactatttcaccaatctggcccagtttgatatctctgtggccagtgaaattatggctgtcc

SEQ ID NO: 776587 - DNA, 98 bp, Homo sapiens
tacacgatgcacttaatgaccctaaaaatggcgattctgcaaccaagcacctgaaacagcaggtaagccggatactttacagttttgccactgccttc

SEQ ID NO: 776588 - DNA, 83 bp, Homo sapiens
cgcgggggctcggagacagcgtttctcccggaagtcttcctcgggcagcagaattgaagaggagctgggcagcaaggctaagt

SEQ ID NO: 776589 - DNA, 73 bp, Homo sapiens
cgccttttctctctctcctctggcaggatgaggcgtgcaggcctgggatatagcagatccattctttgcttat

SEQ ID NO: 776590 - DNA, 83 bp, Homo sapiens
agggagcgcgggggccgcctcggtgctgctgccccgcgggtgctgaaaactgtcaagcagcccctgtcaaagggaacaggaag

SEQ ID NO: 776591 - DNA, 76 bp, Homo sapiens
aggccaatattacaacaccaagaggaacaatcctgcaccatgactcaacagccacttcgaggagtgaccagcctgc

SEQ ID NO: 776592 - DNA, 74 bp, Homo sapiens
tggagcacttcctattccactggattgggaaagaccatggcaggcaacttcagttcatttatgcagaaggaaat

SEQ ID NO: 776593 - DNA, 75 bp, Homo sapiens
cgaagccggggcggagcacgcgagctatggtctgtgcagacttttgcagacaaatcaaaacaagaagctctgaag

SEQ ID NO: 776594 - DNA, 98 bp, Homo sapiens
aactattaactgcctttcttctgtgggctgtgattttcagaggggaatgctaagaggtatcgagaaccttccctgcgaacttcagaggaacttccagc

SEQ ID NO: 776595 - DNA, 100 bp, Homo sapiens
gcaggagcagatgtgaataaaactgaccatagccagagaacagccctccatcttgcagcccagaagatctggacgttggtggttggctatgtgttgactg

SEQ ID NO: 776596 - DNA, 78 bp, Homo sapiens
ttggtgtgattagcttcgcagtctggaaagctttaggagttcacagtgcacgagatgtgcgtaccaatgaagtggtgg

SEQ ID NO: 776597 - DNA, 100 bp, Homo sapiens
cggcaagatccagatcgggatttacgtggagatcaagcgcagcgatggagatacaactcgtcaacgaatcaaattcagtgatgacagagtatgcaagagt

SEQ ID NO: 776598 - DNA, 101 bp, Homo sapiens
acaccgaggaattctatgatgcccctgaagatgtgcacctagggggcggctaccccgtggggaaaaggccaaagttgttgagcccctggactatgagaatg

SEQ ID NO: 776599 - DNA, 83 bp, Homo sapiens
ggggctggagaagagtaaggggaccctggactttggtgctgacgcagggcagtcagggcgacagcaagaatgccaagaagaag

SEQ ID NO: 776600 - DNA, 83 bp, Homo sapiens
accttctcctcgctgcgtgctatgtttgccaccaggtgctggttgccgaggagaacgtggacttccgcatccacgtggagaac

SEQ ID NO: 776601 - DNA, 98 bp, Homo sapiens
ccaggggcttacaggagccatccaggtaccacgagtggatgaaatcagaggagctgcagcgtttgacagcctcggagccgctgaccctggagcaggag

SEQ ID NO: 776602 - DNA, 100 bp, Homo sapiens
tttcacagctgattcctgggagcacatccatttcattggcaaggtccagctgcagctgctgacagccattgtgaaactctttctaaagaagccaacagag

SEQ ID NO: 776603 - DNA, 100 bp, Homo sapiens
tgtcgtgtcagcttttggactccctattgtatttgccagagcacatctgtgtttctctcctgaggcaaagcccaacacacctgtcttttgtccacttctc

SEQ ID NO: 776604 - DNA, 75 bp, Homo sapiens
tcttcaacccggaccgggagggctggctcctgaagctggtccagggaccttgacccagcccctctcagcagacgc

SEQ ID NO: 776605 - DNA, 83 bp, Homo sapiens
atcgggctgaagcgactgagtccgcgatggagaccaggtgataggtttgatcgagacagaccgttgagaggacgtggaggccc

SEQ ID NO: 776606 - DNA, 129 bp, Homo sapiens
aagctggccaaagcctgcccagacggctcacctgtgcgggatggaacaaaagaagttcaccatgtctattctcaagatccatgccagggagatctttgactctcgcgggaatcccactgttgaggttga

SEQ ID NO: 776607 - DNA, 74 bp, Homo sapiens
gatgaatcaggtcccgaaagtgctaaaaagacacgaatgcagagtttgagtccagatcccaaagcccagtacac

SEQ ID NO: 776608 - DNA, 99 bp, Homo sapiens
gataaagaacttcttcccaaaatggcttccgccacctttgaagactttcagattcgtccccacgctctctttgttcattcatacagagctccagctttc

SEQ ID NO: 776609 - DNA, 75 bp, Homo sapiens
ttgcgacgctgtcacaggttccagggtataccccgcgaatgaagcgggagatacagatgacccaccaagaattac

SEQ ID NO: 776610 - DNA, 100 bp, Homo sapiens
gacacacctggccggtgcttcagctatttggagatccaattcaggaagcaacacattggagaatggctactttctatcaagaaataaagagaaccacagt

SEQ ID NO: 776611 - DNA, 75 bp, Homo sapiens
acaggagctggagccctcaacaaactttgccactggctgtgtggtgaatgggggagacgtgcggtgctcctgcaa

SEQ ID NO: 776612 - DNA, 103 bp, Homo sapiens
atgtcacaggtccagggcagaggaccaacatgggcattttgtttatgagcaaggtgttcctgcatgaagccaccgtgcgcctgatggcaggagccagccccac

SEQ ID NO: 776613 - DNA, 100 bp, Homo sapiens
gggagattacacagaagcaaaagccttgatagcatggatttctgtgagctcactgcaaaggcagctcgagcatctcatctgacgtgagttcaagtacaga

SEQ ID NO: 776614 - DNA, 100 bp, Homo sapiens
ctcaagatggcggccaatgtgggatcgatgtttcaatattggaagcgctttgatttacagcagctgcagacctgtcgcgaaatcgcctttcagaaattcc

SEQ ID NO: 776615 - DNA, 74 bp, Homo sapiens
cgggctagagttcattcgtttcgagctggatctgatgatgccaggaaagaccaaagcagatgctgctgacccag

SEQ ID NO: 776616 - DNA, 78 bp, Homo sapiens
gccgggcgctgcggtggctccctgggccgagaaaacgccaggtcttcaagggtgtctgccaccaccatgcctgaccca

SEQ ID NO: 776617 - DNA, 95 bp, Homo sapiens
tggatgggctggagacaacagaaacagaaacgattgtggaaacaggttattcagcttctcaaggctggaaaagcgaaggaagtttcctacaatgc

SEQ ID NO: 776618 - DNA, 83 bp, Homo sapiens
gctttaagatcctcaactgccaaaaggcaatgggtgagaagccctaccactgcaactgggacggctgcggctggaagtttgcg

SEQ ID NO: 776619 - DNA, 75 bp, Homo sapiens
gacttctgcgcgcgggagttcgaggccctgcggagctgcttcgccgctgcggacctgccttgtccaccatgaaag

SEQ ID NO: 776620 - DNA, 98 bp, Homo sapiens
actccatcttcttcctctcggtcgccatgcatcagatcatgcccaaagtgattgcctcaccatcctatccatgccattctgctattcctcatgctggt

SEQ ID NO: 776621 - DNA, 100 bp, Homo sapiens
cgtggaagcaggactgcgccgcgtcttcctcaagcttgctatggcatcgttcaggtgccaacgggaccctggttctgccggaaatgtgaatctcaggagc

SEQ ID NO: 776622 - DNA, 100 bp, Homo sapiens
gtgtggagcggagagaatactcgaagggctctcctgatactaacagttttacgatttaaaacttcgccagaattttgcagtcattggagaaatcgatgaa

SEQ ID NO: 776623 - DNA, 95 bp, Homo sapiens
tatatcaacggacatatgccggggtttgactgccgatgtggaaatttgttttgtggacttcaccgttactctgacaagcacaactgtccgtatga

SEQ ID NO: 776624 - DNA, 100 bp, Homo sapiens
tgcagcggctgaccaagtaccccctgctcctgcagagcatcgggcagaacacagaaaggtggtggcgccctcctgcactcagtcaaggccaagacccaac

SEQ ID NO: 776625 - DNA, 48 bp, Homo sapiens
acgcgtcttctttcaggctgaggggtttctctccgcaagcgcgcgatg

SEQ ID NO: 776626 - DNA, 98 bp, Homo sapiens
cagccagtgcattgatttattaaatagaagaattttcattccatgtcatgataaagtcagtttcttctggaagaagctcgtctcatagaagcagctga

SEQ ID NO: 776627 - DNA, 83 bp, Homo sapiens
aagaagcaggccaaggagatggacgagacctgcctagagctggaacgttacctccagagcgagccctgctatgtttcagcctc

SEQ ID NO: 776628 - DNA, 74 bp, Homo sapiens
cccctcctgcacggaggagtcggcctgccgccgcggcggcatctgggttaatgttgaagaaggaaaatgcggaa

SEQ ID NO: 776629 - DNA, 100 bp, Homo sapiens
aggggaattttgcaaaagtaaaattggcaagacatatccttacaggcagagaggttgaaatcacaaagattagacacctttttagataggtgttcttcag

SEQ ID NO: 776630 - DNA, 83 bp, Homo sapiens
gaccctggctagagatgcagattaattccaaccaaatcccggggctcatctggattaataaaataacagcccgccgtcagtgg

SEQ ID NO: 776631 - DNA, 51 bp, Homo sapiens
aattgaccatttgtgcccaatgttcggttggatcccagagaccgtggagga

SEQ ID NO: 776632 - DNA, 97 bp, Homo sapiens
catggtcattatgcttattggaaataaaagctctgcctgcagttgaacacaaagacctggaggagactcccacctccttcagggagaagaaaggagg

SEQ ID NO: 776633 - DNA, 88 bp, Homo sapiens
gagagcaagctctataagattcttcaaggtggggttggcatcccccacatacggttttgcactgattgcaaaaataaagtcctccgag

SEQ ID NO: 776634 - DNA, 100 bp, Homo sapiens
gaaaatggtgcctgctgaccttctggagttattggctagtaagaaagttatgggagagctgttcattcccagtgttaatcttgtagtcgctgagaatgaa

SEQ ID NO: 776635 - DNA, 82 bp, Homo sapiens
ttgaagaccttcatatttcccaagatgccactggtgaagaagtgtaaacaggaacatcgataagtagtgtaaaaacttgcac

SEQ ID NO: 776636 - DNA, 100 bp, Homo sapiens
agaaaatggccaaagccctctgccacctcaacgtccctgtcactgtggtgctagatgctgctgtcggtgtaattgcttactcggtcatcgtgggagcact

SEQ ID NO: 776637 - DNA, 82 bp, Homo sapiens
gatttttttcgggtagtggaaaaccaggcatgtactggcattgaaaacattgacgaagctattacattgcttgaacaaaata

SEQ ID NO: 776638 - DNA, 102 bp, Homo sapiens
caagccgtggaataggtgtatcaagtaatggtgcaaagcctgaacagaaggtgatttactacctctgcatcttattgaaagatccagtggaaccacatggga

SEQ ID NO: 776639 - DNA, 74 bp, Homo sapiens
gcttcaatgtccgcatcgcaaccaccgccctggccatctaccatgtggcctcacagaccccaccagctactacc

SEQ ID NO: 776640 - DNA, 100 bp, Homo sapiens
ctcctgccgtgtaagaagtgccttttgcctcccaccgtgattctgaggcctccccaaccatgtgcaattgggtctgggaggacagctcatgagacaagca

SEQ ID NO: 776641 - DNA, 50 bp, Homo sapiens
ggctggccgggcccaggtcccttcctccctcagcaaagacccaaatatcg

SEQ ID NO: 776642 - DNA, 75 bp, Homo sapiens
catcaacgtgactcccatcgccgccctgctctacacacctgtgctcatcagcttcccagtgatcctgtccatcga

SEQ ID NO: 776643 - DNA, 75 bp, Homo sapiens
agcttccgcggtgtcattctgacctcgatcgcaccccctccctccctggcggagcccctgaaggagctgttcagg

SEQ ID NO: 776644 - DNA, 100 bp, Homo sapiens
tagcaggaccacttcgtcaaatgcaggatgtaaagcaggagttaataaagttggttaaggcagcaggattttcatcttccacaacttctaccagctggga

SEQ ID NO: 776645 - DNA, 82 bp, Homo sapiens
cccggagccactccccagcccagcctccagggcagctgtgcggagggtagtggcagccatgaaccggatggaccagaagaag

SEQ ID NO: 776646 - DNA, 100 bp, Homo sapiens
ctgtgatttacctgggtgagacagcttgagccccatcgtggattccaagacatccctgctgagagagccaaggactatgagagtaaattgcaggccttgc

SEQ ID NO: 776647 - DNA, 100 bp, Homo sapiens
aaccaaattcaccatagagaatgtgacacggacaaggatagttttggctgatgtggtcagtgaagatatgaaattaactgactcagagctaggaaagctg

SEQ ID NO: 776648 - DNA, 83 bp, Homo sapiens
tgaaggtggaggcagcgcggctctcaggtgcaatggatgagcttcatagtctggatccaagaaggcaagagttattggaagct

SEQ ID NO: 776649 - DNA, 75 bp, Homo sapiens
cttggactgagtcctgcaggacacagcggctggctgtcggcaattggattcttccagtacagcccgggcgctgcc

SEQ ID NO: 776650 - DNA, 101 bp, Homo sapiens
tgacagcgtgagaggttcgcagagccaagtcctgtatctgccatgtctgtggcgtccacctcaacaggctgcattcctgcctctactgtgtcttcttcggc

SEQ ID NO: 776651 - DNA, 75 bp, Homo sapiens
cagatgcgcggggcgtgcgcgtcctcctccccaggcccgccgcctccctgccaagatatgagatcctgactccaa

SEQ ID NO: 776652 - DNA, 82 bp, Homo sapiens
gaacttcatcgactttggcctcgacctgcagccctgcatcgacctcattgagaagccagtggatcagtacaagggaaagcgg

SEQ ID NO: 776653 - DNA, 75 bp, Homo sapiens
ctttttctttgtaccacttactgaggtgttggggatgtcctttgcactgaccctgaactgccagattgacaaaac

SEQ ID NO: 776654 - DNA, 75 bp, Homo sapiens
gccggtcaggctcgccgccgagctggtactccaaagattcaggtttactcacgtcatccagcagagaatggaaag

SEQ ID NO: 776655 - DNA, 98 bp, Homo sapiens
aaagccaagaggaggacagttcgctacacagcaatgcatcgaggcagtaacagagaagaattttgaaacaaaagattttcgagcctctctagaaaatg

SEQ ID NO: 776656 - DNA, 101 bp, Homo sapiens
ccgcagaaggggctaccatgatcctttcctcctgtggccccagcagatggcttctctgatcttgccatgcaagtaatgacgtctccatctaagaactacat

SEQ ID NO: 776657 - DNA, 100 bp, Homo sapiens
gccgaaggcgcccaagcagcagccgccggagcccgagtggatcggggacggagagagcacgagcccatcagtactatatgtctgcgcgccacatggcgct

SEQ ID NO: 776658 - DNA, 100 bp, Homo sapiens
tcaacctcttccagcaggggggccgggagctcgacatctacaacaacctacggcagtgacttccagaaatatcctgacccacaaggacgtaacagaaaat

SEQ ID NO: 776659 - DNA, 100 bp, Homo sapiens
tgccgagtaaatggataacccctctagaccgcctggtagcctttcctactagagtagcagagtccagcctctgatgaagcaggagagaaagaagccaagt

SEQ ID NO: 776660 - DNA, 82 bp, Homo sapiens
accatggcgaggagtctctgtccgggggcctggctaaggaaaccctattacctccaggattctgatgagatggaggatgggc

SEQ ID NO: 776661 - DNA, 80 bp, Homo sapiens
gtgaaatggagaggctggtcgcccaagtgctggagaatctggtaaaagcaccattgtgaagcagatgaggatcctgcatg

SEQ ID NO: 776662 - DNA, 97 bp, Homo sapiens
gagccaattattcctcacagcctctggatgagagttggccaaggcttaccagaactgggtgaagaagaacggggctgagcactcgctccccaccctg

SEQ ID NO: 776663 - DNA, 75 bp, Homo sapiens
caaattggcgtttgtcatcagaatcagagggtcagtttgctgagaacgaaaccaatgaggtcaattttagagaga

SEQ ID NO: 776664 - DNA, 90 bp, Homo sapiens
ctatattctttgtgtgtgacacccataggccagtcaatgtcgtcaatgtatacaacgatacccagatcatgtttgagaccttcaacaccc

SEQ ID NO: 776665 - DNA, 83 bp, Homo sapiens
cgaggaggcagccaagctcgtagcctgccactccgtgcggcatttgcacgccaaaggcaaagaagaaaaaatgtccaaatcat

SEQ ID NO: 776666 - DNA, 100 bp, Homo sapiens
agagtgtgccctttgacttgcatcgtctacctacctctgccatcctctaccagccgcaactgcgagggctggagacgactgcaagaacattgccaacatc

SEQ ID NO: 776667 - DNA, 50 bp, Homo sapiens
cctgaggccccagaactatcttttcggagctgctgctcttcctccagaac

SEQ ID NO: 776668 - DNA, 100 bp, Homo sapiens
acttctctggggactctgaacttccctggtcgaacagttttttctaatggctattcaaggtgctggtaaaccgcctatgtttggtgattatgaagctcag

SEQ ID NO: 776669 - DNA, 75 bp, Homo sapiens
cacaaggccaggttcccaagagctcaggctgttttggagtcagcggaagatcaccaaggccagggagtggttcca

SEQ ID NO: 776670 - DNA, 74 bp, Homo sapiens
cagacgacaagcacacactatggcgctgaaacggattaataaggtagttacttttggtgacgctgtccagttcc

SEQ ID NO: 776671 - DNA, 90 bp, Homo sapiens
gacagaaaaatctcctgactcgaaaacggaatattctgatacggaaagtatcgtctctttcaggtcagtgagagggcatactgggaagcc

SEQ ID NO: 776672 - DNA, 96 bp, Homo sapiens
ggagaggagacctggccatctacctgacctcgccctctggaactaggtctcagcttttggccaacaggtacatggccacctctggcctagaccacc

SEQ ID NO: 776673 - DNA, 100 bp, Homo sapiens
gagatggcggcgcgatggagcagcgaaaacgtggttgtagagttccgtgactcccaggctctggattactgccacagcaagggaatcatgcacagggatg

SEQ ID NO: 776674 - DNA, 75 bp, Homo sapiens
cagagttctactacgatgagtttggtttccgtgtgtacaaggaagggatttgtcttggctgttactatgacacgg

SEQ ID NO: 776675 - DNA, 98 bp, Homo sapiens
aacagatgataccaaacctaaaaccacatgtgcatctaaagacagttggcacggttgcctagacctggagcagtgttctcttaaggtactggagcctg

SEQ ID NO: 776676 - DNA, 90 bp, Homo sapiens
agcagagacaccaggacagaaaagacagtgttctgctttcatggagttcacagaagagtcgaggaggtgggcctcatgagagatgtggag

SEQ ID NO: 776677 - DNA, 98 bp, Homo sapiens
gggatcgtgaccgagaccgtgaccgagagcgtgaccgagagcgcgaatatcgtcatcgttagaaggtgggcgggggcaggacggaagcccggttatca

SEQ ID NO: 776678 - DNA, 75 bp, Homo sapiens
gcttcatatggacagatggacttcaaatgctgtttgtattccagagactaggcatttccctggaaatggcagctg

SEQ ID NO: 776679 - DNA, 80 bp, Homo sapiens
aagttcatctccttctgcatccttaactgagaatgagcacctgtggaatcctctcaagaggaacagtcattgtgtgaagg

SEQ ID NO: 776680 - DNA, 100 bp, Homo sapiens
tggaggcagaggtggcatggggtgaaagaacttgtcctggacaacagtcggtcgaatgaaggcaaactcgaaggcctcacagatgaatttgaagaactgg

SEQ ID NO: 776681 - DNA, 75 bp, Homo sapiens
aaatcaaagtccaccatgtgcttttgcacatccagccacggcagagacaacgtgtgtaccccaagtgcacatggc

SEQ ID NO: 776682 - DNA, 50 bp, Homo sapiens
ctctgcacctcgcgccccagcagattctgaggttgggaccaagaaggaac

SEQ ID NO: 776683 - DNA, 125 bp, Homo sapiens
tgttttccaaagtcacgctcattggccggaggaagctcaccttcgacgaggaagcttataaaaatgtgattggtgctgaagacatggacggcttccaggcagacacggaggaggaggaagaggag

SEQ ID NO: 776684 - DNA, 100 bp, Homo sapiens
ccggaaactgagggagtttccccggggagcggccaaccacgacctgacggacaccacccgggcgggccatttcataattctgaatcatgtctgataacgg

SEQ ID NO: 776685 - DNA, 90 bp, Homo sapiens
atatgtgccgccagtgtttccgtcagtacgcgaaggatatcggtttcattaagacgctgaccggaaaggagattgagattgacattgaac

SEQ ID NO: 776686 - DNA, 75 bp, Homo sapiens
aaagggtatctgatcaagccaacaacagtgacggaatgcctccatacatagaagaagaagttggatgggataccg

SEQ ID NO: 776687 - DNA, 100 bp, Homo sapiens
aatcacagcgggactcttggcctgtccctcacatccgatgcaccctttttgtcagattatcaggatgaggtacaaaattggacagctgtacatgatcagc

SEQ ID NO: 776688 - DNA, 100 bp, Homo sapiens
gcagaggctctgcgacaagtacaaccgtgccatcgacagcatccaccagctgtcgtccctggggatgagcccagggagaagatggacttggtcacctact

SEQ ID NO: 776689 - DNA, 90 bp, Homo sapiens
cggccaagatgtctgacatggaggatgatttcatgtgcgatgatgaggaggactacgacctgattctttcagtgacctgtatagttccta

SEQ ID NO: 776690 - DNA, 98 bp, Homo sapiens
cccagaagtagctgaatgtgttactccattgctgaggagtggtgggatctcatcgtgtccgtatgtcaaggggatttgaagccaatgcacctgctttt

SEQ ID NO: 776691 - DNA, 83 bp, Homo sapiens
atccaggagggcgacctggtggaggtggtgctgtcgggaattatgggcccaccgtgttagtgcaacaggaggcactcaagcgg

SEQ ID NO: 776692 - DNA, 100 bp, Homo sapiens
gatccccaccgacaattcgaccccacacaaggaggatctaagcagcaagctgctctgttaaaagcgaaaatgaaacaattgcctgcggcaacagttcgac

SEQ ID NO: 776693 - DNA, 100 bp, Homo sapiens
cttcaggaggcccaagacaccacagaagccctccgagcccagagcaattgggtgccacgccgaggggatcagggtcccaagaccattgaccagatccata

SEQ ID NO: 776694 - DNA, 75 bp, Homo sapiens
cagcctcctgagtagctggaaccatcatatgcaccagcacgcctggctaagtgccgtgagcgatgtggagatgca

SEQ ID NO: 776695 - DNA, 99 bp, Homo sapiens
tgagaagtgaggagcccctccgcccggcagctgccccgtctgagaaattaataaagaactcttcagaattcctggtgtttcatcatatatacgactaag

SEQ ID NO: 776696 - DNA, 98 bp, Homo sapiens
gctggagctctcggtcctatacaaggagtatgctgaagatgacaacatctatcaacagaagatcaagataatcagcaactgctgtgatgagatgctgc

SEQ ID NO: 776697 - DNA, 83 bp, Homo sapiens
tgctcccttcgccttcgccctttccacctcgcggcagttcggcccagagccatggctatctcctcttcctcctgcgaactgcc

SEQ ID NO: 776698 - DNA, 100 bp, Homo sapiens
aaagtttggcgataaaccttgttgttttacagaccttaaggtgtttgttgacctcttacctgctacacagtgtacaaaaacacatctgaccttcgggaag

SEQ ID NO: 776699 - DNA, 100 bp, Homo sapiens
cagcctcagagctggtggggagacagcatgccactggaaatgcaacctcaccacaagtacaaagaccatctttcatggactactttgataagcaagactt

SEQ ID NO: 776700 - DNA, 100 bp, Homo sapiens
ggagtcagacctttgtttaaagcaatgacagaagatggatttttggctgtatgttcagaagctaaagatgatgttgaatttgaagtatcatcggaccgac

SEQ ID NO: 776701 - DNA, 90 bp, Homo sapiens
gttacggtttacagcgaagtccacccagcgtttccgaggtgaaggcgccgcgccaggccggggggcgggtcctcactgagcagcgagtcg

SEQ ID NO: 776702 - DNA, 75 bp, Homo sapiens
ggcccagtatccaggtcgaggttctgcagaaggttgtgactttagtatacaattcacagaagtcttcaggagcaa

SEQ ID NO: 776703 - DNA, 75 bp, Homo sapiens
ctggagctcacggagaagaaggcctccgaccgccgtgccgtccctgcagtgacaccgaggtgctcctagccgtct

SEQ ID NO: 776704 - DNA, 74 bp, Homo sapiens
gattgaagaggcctggagtcctcctgctgaaggtgaacaaggtgtgttgcagtcactcattgaaaaacattttc

SEQ ID NO: 776705 - DNA, 100 bp, Homo sapiens
aagatgagaactcaagtgatgtagagagacgaggacttgctatgttgccagtttggtcttgaactcttggtctcaagtgattctcctgccttgggttccc

SEQ ID NO: 776706 - DNA, 75 bp, Homo sapiens
acccagagcagacaccgcagccaccgcggatgcaaactgccgcagcgggaaccgcaagagcttggtggtaggaac

SEQ ID NO: 776707 - DNA, 75 bp, Homo sapiens
cgtgggcttcaccatggacaagctggtgcagaacattgcgcggcaggggaccctcacaatgatcccaatgctcag

SEQ ID NO: 776708 - DNA, 100 bp, Homo sapiens
aatgctgtaccgatttggtcacctgaagcctcttgtcccttcattgtcatctgcttttgaggctaataataagccagagatcgaagcggccctcttccta

SEQ ID NO: 776709 - DNA, 98 bp, Homo sapiens
ggatgtatatacaacacattctcctgctggaacttctgtgcaaaacatgttacactggagccagactgctgatcttggacttgatattggtgcccagg

SEQ ID NO: 776710 - DNA, 100 bp, Homo sapiens
cagagtcagaggacgaagaggaggctttaccttgcacagactgggagaactaacaagccctagatggtcagaatatttataatgcctgctgtaccctaag

SEQ ID NO: 776711 - DNA, 102 bp, Homo sapiens
ggagcaatccaatccatctatggtattggacatagaatttacagccagttacttactcagaacctgcattttggtgttcgatagcatattatgaattaaatc

SEQ ID NO: 776712 - DNA, 75 bp, Homo sapiens
tagaagacatgtggtgtatataaagtttgtgatcgttggcggacattttggacccttcaaagttgtacaagaaag

SEQ ID NO: 776713 - DNA, 99 bp, Homo sapiens
taaaacttttccccaaaaccctgttgaactaaagatgtatcggcaagcagtgtaaacggaggacttggggaaaaaggaccacatagtccatcgaagaag

SEQ ID NO: 776714 - DNA, 75 bp, Homo sapiens
gtggttccgggtgtctttgtccccccggtgtcgctgccctggcccgcagaatgctgaccccctgaaggtgtaccc

SEQ ID NO: 776715 - DNA, 75 bp, Homo sapiens
ttcagctcttccttggaacatcacagtacattttaaggtactccaaagattcaggtttactcacgtcatccagca

SEQ ID NO: 776716 - DNA, 51 bp, Homo sapiens
gccgccgcgtcccagtcccgagcatgttgacatagcggctttattgataaa

SEQ ID NO: 776717 - DNA, 101 bp, Homo sapiens
gggagcagagctcagacatgttctcaccacccttgtctctgctggatgaaccgaatcctaacagtccagccaatagccaggcagcacagctttatcaggaa

SEQ ID NO: 776718 - DNA, 73 bp, Homo sapiens
acggccacggcgctggtcaccggggtctgcctggcctctgttggaatgctacacaaaactgcgggagagggga

SEQ ID NO: 776719 - DNA, 100 bp, Homo sapiens
aagagtatgcctgggtcccgccgggtctgaagcctgaacagaatccagactccaaaatgatgcaaatcaacctgactggatttttgaatggaaaaaatgc

SEQ ID NO: 776720 - DNA, 98 bp, Homo sapiens
aaacaacgcacaagtgacaggagcgctgctgcagagtgagagtgggactgcgccaggaaaattgcctaagaattatgacccaaaagttaccccagatc

SEQ ID NO: 776721 - DNA, 75 bp, Homo sapiens
ttctgcagtacgagaacgtggatgaagactcttcgggtgctatgacaagcgtctgtggcctcgaatggacctgag

SEQ ID NO: 776722 - DNA, 75 bp, Homo sapiens
aaatcaaagcgagagcgcctcggcctctccagctgtccgcggcacgtgtggttctcaaatataggcattctgatg

SEQ ID NO: 776723 - DNA, 100 bp, Homo sapiens
ccgggaggcgcttccacctctccaccaccgaccgcgtcatcaaagcatacaagacagtatctggagtcaatggtccactagtgatcttagatcatgttaa

SEQ ID NO: 776724 - DNA, 87 bp, Homo sapiens
ccagtgaggagctattgacagacacaagtaactcctcttcatccactggggaggaagaccagggaatttatcagagcaaagttcggg

SEQ ID NO: 776725 - DNA, 82 bp, Homo sapiens
tcacgcatcacaggccgcgtctttgacggtttggaacaaactctcccttcacttgttgccctgtagcactacagaaaccctg

SEQ ID NO: 776726 - DNA, 90 bp, Homo sapiens
cgccgagctcgttggagcttgaacccattgtcacccctccgggcactttaagagtgctgctggttcttttgcatgatttcccagagttcc

SEQ ID NO: 776727 - DNA, 101 bp, Homo sapiens
accacaattagtctgcagatgggcactaataaaggagccagccaggtaatttctcactatcagtgtaaagagcagcgtgatgcccatagatttgagaaaat

SEQ ID NO: 776728 - DNA, 100 bp, Homo sapiens
gtggaaaggccaagcagtgaccaggaagagggagaaacttctgctcaggatacttatccgctttttccccttggagtcctggcagattggcaagataggg

SEQ ID NO: 776729 - DNA, 98 bp, Homo sapiens
tccagcatcccgtcaggggttgcaggtgtgtgggagtgcctggaaaccttggctgctacaaggatcatggaaacccacctcctctaactggcaccagt

SEQ ID NO: 776730 - DNA, 90 bp, Homo sapiens
atttggatacagataccatctcaaagggtaatcttccagtaacaacatgctgtaccccaaggaagacaaggagaaccgcattctgctcta

SEQ ID NO: 776731 - DNA, 50 bp, Homo sapiens
ccgcaacgtaaaatccttggaaaaggaggctgaggggatctggcggtgga

SEQ ID NO: 776732 - DNA, 83 bp, Homo sapiens
gcggatagcgtggagtgacggtgccaccgcggcgccgtggtaccatgcgacgacgctatgaagatgatggcatttcagatgat

SEQ ID NO: 776733 - DNA, 96 bp, Homo sapiens
tacattgaccacaacaccaggaggaccagctggatcgacccccgggacagttgatttggagcatatgcgaacaataaaacctgaaaaacacttacg

SEQ ID NO: 776734 - DNA, 100 bp, Homo sapiens
ggcatagtggctgccctgctgggttatgatgtgattgctcaagcccaatctgggactgggaaaacggccacatttgccatatcgattctgcagcagattg

SEQ ID NO: 776735 - DNA, 80 bp, Homo sapiens
ctcctgtgccagagaccacactataccattgagaaagatcagtctaaagaaaaggagaagaaagtgaaaaaaacaattcc

SEQ ID NO: 776736 - DNA, 96 bp, Homo sapiens
aagactgtctgccgagttctcacgtgcccatcagtgacagcaagtccattcagaaggccacgactgcttcccggtgctgttcacctatgacgccgc

SEQ ID NO: 776737 - DNA, 100 bp, Homo sapiens
tgtctcttatttagttctggggagcgcctcgtcgacatgagtgatgtggaggaaaacaacttcgagggcagagtcctcagaatggttggaatgaccctcc

SEQ ID NO: 776738 - DNA, 83 bp, Homo sapiens
gtcacttttctatgatgtgaagttacaatacgctgttcccatcatcaaccagaaaggagaggcttctgaattcccttctgagt

SEQ ID NO: 776739 - DNA, 100 bp, Homo sapiens
acgactgcctgggacctggccaagggctccacacaccaagaccaaggttggatggcaagcatgtggtgtttggcaaagtgaaagaaggcatgaatattgt

SEQ ID NO: 776740 - DNA, 100 bp, Homo sapiens
tccagggacatccaataaacgccttcgtcaggaccccagccaggccacggggacaacaggcagcagcgtcagctgcacagaggagaaaaagcaaagcaag

SEQ ID NO: 776741 - DNA, 100 bp, Homo sapiens
gttggtggtgaccccgcccagttggcccagaggatctcttctaacatccagaagatcacacagtgttatgaacgggaccgggttcagaagaaaacgttca

SEQ ID NO: 776742 - DNA, 95 bp, Homo sapiens
gaattcagactatgagctcacctacaacctagagaaggtcctggagtacaatgccattggaggcaagtataaccggggtttgacggtggtagtag

SEQ ID NO: 776743 - DNA, 75 bp, Homo sapiens
aagaaatgccccttcactggtaatgtgtccattcgagggcggatcctctctggattcaagatgaccaacgaagaa

SEQ ID NO: 776744 - DNA, 82 bp, Homo sapiens
acgactagaaggacgactgcctggcgcgatacaaaaatacaatgcagatcttcgtgaagactctgactggtaagaccatcac

SEQ ID NO: 776745 - DNA, 90 bp, Homo sapiens
gtgattccttcctaggcctccaaccatatggccgacaggcatatcacacctgaaaaattttatgtggaagcttgtgatgatggagcagat

SEQ ID NO: 776746 - DNA, 100 bp, Homo sapiens
gcggcggaaaggataagcctcgacttagaagctaccgagttaccctaagaaagatggagatggacacatggatcatttactgccaggctgtgaagataaa

SEQ ID NO: 776747 - DNA, 75 bp, Homo sapiens
gaagataaaaaagtgaatcagcagccaaatacaagcagcaagatgggcatggaggcggtgatggcgctgctggaa

SEQ ID NO: 776748 - DNA, 101 bp, Homo sapiens
tttctcctgaatttggaaactatttctaaaaagtttgcagagacccaacctaaaaaggacacaccacggaaagagaagggttcacgggaagagaagcagaa

SEQ ID NO: 776749 - DNA, 98 bp, Homo sapiens
tgttcccaatgacatgcaagttggacagacgggaaaaatagtagcaccaatgcatcatcccattcagatgaaacctgcagatagtgaaaagtccaacg

SEQ ID NO: 776750 - DNA, 80 bp, Homo sapiens
gtcgcgggccggccccgcggggagcgcccccggcgcgatgcccttcaggaaagatgccgacaaaaggatcaaggtggcga

SEQ ID NO: 776751 - DNA, 100 bp, Homo sapiens
gtgtgaccaccatggatgcagagctggagtttgccatccagcccaacaccaccgggaagcagctatttgaccaggtgcggctctatgagtggacaacaga

SEQ ID NO: 776752 - DNA, 75 bp, Homo sapiens
gccaaagtgaaagaggaagaggaagagccattaccatcttacttatttaagtgtgaaataaaagtagccatgtcg

SEQ ID NO: 776753 - DNA, 74 bp, Homo sapiens
aggacttgatggatcactagtttttctggtattttgaccaacgtgatttagctgatgagccatcttgatgtagc

SEQ ID NO: 776754 - DNA, 90 bp, Homo sapiens
aggggccggacacgctctgcttcgacaaggacgagttcatgaagattatggaacgagctttattccacatggacaactgctataaaatcc

SEQ ID NO: 776755 - DNA, 100 bp, Homo sapiens
tacagtaatttcaacagaagagtgagagatggaacccgaagaagaaaggattcgttacagccagagattggtaaccccccgcggcctagcctggagcccg

SEQ ID NO: 776756 - DNA, 88 bp, Homo sapiens
atcggggggctgaaatccatcttcatcctaccgctccgcccgacaggaagatgtcacccaagcgcatagctaaaagaaggtccccccc

SEQ ID NO: 776757 - DNA, 100 bp, Homo sapiens
gcggcccgcaggaggcagaccgcttggatgagctggagtatgagaaacgggctgtaaaggcagaaaaccacgtcgtgaaactaaaacaggaaatcagttt

SEQ ID NO: 776758 - DNA, 100 bp, Homo sapiens
ggcaccatcttgaactcatcatcgccaaatatgtgagcaccttgatgttggacttcccaacctccagaccaattaacactgaatcctccggaaggaattg

SEQ ID NO: 776759 - DNA, 112 bp, Homo sapiens
ctggagtctgcgaaggccgggacccggttccccggcccacagtgggggtgtgcaaacccgagagaactgggaaaatgttggggcttttcaggaagcataataagattcctag

SEQ ID NO: 776760 - DNA, 74 bp, Homo sapiens
aaagtgggaaaaataaagtgttgagtaaacagaccaagttgggtgaaaggtgtagcagtcactcggcctacacc

SEQ ID NO: 776761 - DNA, 83 bp, Homo sapiens
gtctgggatggtgtgggaccgggtgagaagccctaccactgcaactgggacggctgcggctggaagtttgcgcgctcagacga

SEQ ID NO: 776762 - DNA, 76 bp, Homo sapiens
cgatgtgcgagaactgcgcagacctggtggaggtgttaaatgaaagagagcgacttgcagttgtggaggtacagtg

SEQ ID NO: 776763 - DNA, 100 bp, Homo sapiens
tcgactcgctgccacctctcggccaggatatggtgccaatgggtcatgtttggttagaaggtgacaatctacagaattctacagattccaggtgctatgg

SEQ ID NO: 776764 - DNA, 83 bp, Homo sapiens
cgcggatctcaccgccgctcagggagatggtaacctgcacctcaatgtgacggcggaggccttcagcccctcgctcctggctg

SEQ ID NO: 776765 - DNA, 75 bp, Homo sapiens
gcgaacctccggcgcgctgccccgccggaccgtgcccggtcctttggagtagaatggattgcaagttggctagtg

SEQ ID NO: 776766 - DNA, 95 bp, Homo sapiens
atgttgacgttgcagacttggctagtgcaagccttgtttattttcctcaccactgaatctacaggagttgatccctgaattttattatctccctg

SEQ ID NO: 776767 - DNA, 97 bp, Homo sapiens
agcatgggaaggaggccgagccgggatctcaggtcctcgggggcggcggccacgccaaggacggcggtcttgcgagtggctggttccctgcagaaga

SEQ ID NO: 776768 - DNA, 100 bp, Homo sapiens
gataagacagagctgagacagccacccagggggtccactccaggacagactgtgccgtactaggttttgacaagcttgcatcatgcgtgagtataagcta

SEQ ID NO: 776769 - DNA, 100 bp, Homo sapiens
cagacctgtccttcaagaaaggcgagcggctccagattgtcaacaacacggaagaaccccacagacgaatacctggagggcatgatgagcgaggccccgg

SEQ ID NO: 776770 - DNA, 100 bp, Homo sapiens
ttcaacctcttgttggaagattattcaaaaggtgcagctaaatcaagtccagcagctaaaccaggatccacaccttctcgaccctcatcagccaaaaggg

SEQ ID NO: 776771 - DNA, 100 bp, Homo sapiens
ctctacgtgcgcgaggtctaccccgtgggcatcttccagaaacgcaagaagtacaacgtgccggtccagctaaacctattcgtcccgggcaacatccagc

SEQ ID NO: 776772 - DNA, 82 bp, Homo sapiens
cagtgccttctatgacatggccagatgaagggtctcgaggagccagagatggaccccaaaagccgagaccttttagttcagc

SEQ ID NO: 776773 - DNA, 96 bp, Homo sapiens
gcgcgccgccgcccggcgccgcgggactgggagaccgggttggcctggcagtggtcaatggacagctcatggcagtaggaggttttgatggcacaa

SEQ ID NO: 776774 - DNA, 90 bp, Homo sapiens
gacgaggaaacctttgagctgcggaccccgagtccagcgggcggcgggaggctggtgcccctgggtgaactgaccaagcacagcacatca

SEQ ID NO: 776775 - DNA, 83 bp, Homo sapiens
cgcgagtgggagcaccaggatctcgggctcggaacgagactgcacgtattggctggagttggcgatgactcagcagatcaagg

SEQ ID NO: 776776 - DNA, 73 bp, Homo sapiens
ttggaataccggctctcagcggctctatatcgagaagtttactgactttcttcggctctttgtgagtgttcac

SEQ ID NO: 776777 - DNA, 101 bp, Homo sapiens
acaaggacaacaatgagatcgtggacaagatcatgggcaaaggacagatccagaatgatttggaacaagttctacgtcaaattggcgataaggaccaaaag

SEQ ID NO: 776778 - DNA, 82 bp, Homo sapiens
aaaggagatttcttccctcctgagcgtccacaacaacttcccccttcagctttagctgcagctgcctctgttcagccacttg

SEQ ID NO: 776779 - DNA, 142 bp, Homo sapiens
tcagaatggtcgagactatgttgtgaccaagcagccctccatctgcctctgttccctggaggactttctctgggtctgttcctggtttcccagatgcataaaggaagacatatccctcccctgggcagcaaggctacaatgg

SEQ ID NO: 776780 - DNA, 100 bp, Homo sapiens
cgaggaatcgccgtggcgtcttggtgttctccacgctggttcgcaggcatccagtaccctgctgactctgacatgcccccagcctcccccagctctgcag

SEQ ID NO: 776781 - DNA, 98 bp, Homo sapiens
cgccgcctggcaggccctgcgcaccagctgcggttggatttctcacgatgtccagtgttatctccatgtctgcccctttcttcctggggaagatcatt

SEQ ID NO: 776782 - DNA, 100 bp, Homo sapiens
gtttagccaacccaaattaccttaattctgaagtggcctggtccttgtcactgtgtggagacctgggactccccttggacatggtagagctgatgctgga

SEQ ID NO: 776783 - DNA, 126 bp, Homo sapiens
atgcaacccctctccttgatgccagctcactggagtatctgtttgctcagggaatctgactaagcacatgaagtcgaaggcccacagcaaaaagtgccaagagacaggggtgctggaggagctgga

SEQ ID NO: 776784 - DNA, 93 bp, Homo sapiens
ccgcctcagccgccgccgccgccgttttcgcctgcagctgctcaccgcctgcccactaaggaggaggagtcattgctgccatcattatcatcc

SEQ ID NO: 776785 - DNA, 100 bp, Homo sapiens
aagaaccttctggccaaggtgattcagattgcaacgtcatcctccacagctaagaaatgagccgtcagactgctacagcattacctaccggtacctcgaa

SEQ ID NO: 776786 - DNA, 100 bp, Homo sapiens
acttcctcggccatatggaggggtcatataatacccttgtgtcttcagtttgagacttaattcagtgcacaaatgagatgaatgtgaacatcccacagtt

SEQ ID NO: 776787 - DNA, 75 bp, Homo sapiens
gcatgccctgaaaaagtatcgtcgagaagcctatcatcgggtttactgcgaggaaatgcgtgaagagcggcaaga

SEQ ID NO: 776788 - DNA, 100 bp, Homo sapiens
ctggtcacctgtctggagcaaagaaaagagccctacaatgtgaagatacataagatcgtagccagacccccaggaaaaatatctccctggacggggcgtt

SEQ ID NO: 776789 - DNA, 82 bp, Homo sapiens
gacaatttgtagctaagactcccggataccctgaagtcgggaaatgatggactcaccctgtcacccaggttggactgcactg

SEQ ID NO: 776790 - DNA, 107 bp, Homo sapiens
tcctaatatgttgatggcattccagaatatctcagatgagcagctggtggagctgtctaaggctcaagatatagaagcaggagatggcaccacatcagtagtcatca

SEQ ID NO: 776791 - DNA, 80 bp, Homo sapiens
gtgaaaggcaaagaacaagagaagacctcagatgtgaagtccattaaaggaactgtggctgcaccatctgtcttcatctt

SEQ ID NO: 776792 - DNA, 82 bp, Homo sapiens
ggcgctgcggatccagggggtcggctgccaggtacaggctagcttgtcactttctgcaaaggtttccctcagggagcctcct

SEQ ID NO: 776793 - DNA, 100 bp, Homo sapiens
gttcgtgaaatttgcccagaccatctttaagctcatcactgggaccctcagcaaaggtcaggatggctaactggttggctccccacatggtgccctacgt

SEQ ID NO: 776794 - DNA, 100 bp, Homo sapiens
ttcggactatttgtagtcatgtacagaacatgatcaagggtgttacactgaaatgcactcggtgatggaaagagagccactattctgaagaacacttggc

SEQ ID NO: 776795 - DNA, 90 bp, Homo sapiens
aagcacctcgtaggaggagaaagagaccccatggggtcagctgctgtgctacaacgtcggtcagaaaatgaagagtttgttgaagtggga

SEQ ID NO: 776796 - DNA, 75 bp, Homo sapiens
gccaagaagaacttaagcgaggccctgggggacaacgtgaaacagggccctcctcgccaaagacagcctagagag

SEQ ID NO: 776797 - DNA, 104 bp, Homo sapiens
tggctgtgaagctggggaagacgcagaaggtgaaggtgctcacgggcacggagaagctccatgaagaaattgacagggtgattgggccaagccgaatccctgcc

SEQ ID NO: 776798 - DNA, 75 bp, Homo sapiens
cttataaaggaccagacaaatcaaattagtggttttggagtggcaaggaatttactatgccaaaaagaaaaacgg

SEQ ID NO: 776799 - DNA, 100 bp, Homo sapiens
aagagaagaaggaacggaaacaaagttattttgctcggattgctgtcacgtctaatgtggctgctgcctcgtgtcacatctgaaactcatctgtacctca

SEQ ID NO: 776800 - DNA, 100 bp, Homo sapiens
tttgagagaaaagtttgaaaattcaattgaatccctaagattatttaaaaatgatcctttgttcttcaaacctgggtgttcatttagaagaaagcaacac

SEQ ID NO: 776801 - DNA, 83 bp, Homo sapiens
ccgccgccgctgccgctgccgctgccgcacctccgtagctgactcgcgacagggtctcactgtattgcccaggttggtctcga

SEQ ID NO: 776802 - DNA, 98 bp, Homo sapiens
cggtcgcgaggaggaggaggatgtggcgcgcggaggggaaatggctgccgaaaacaagccggaaggtactccaaagattcaggtttactcacgtcatc

SEQ ID NO: 776803 - DNA, 98 bp, Homo sapiens
ccggaggcccaggtctccgtgcagcccaacttccagcaggacaagagtgttctgccagttctggataatccactgtccaagaaggttcgaggcctcat

SEQ ID NO: 776804 - DNA, 75 bp, Homo sapiens
tacagttgaaactccagcagcgccggacccgggaagaactggccatgtagggcaggaccgggtggactttggcca

SEQ ID NO: 776805 - DNA, 74 bp, Homo sapiens
ttgaacttaatacagcaagaaagaccatcaagtttaccaattgggaaaatgaggtacgttagtgttcgcgattt

SEQ ID NO: 776806 - DNA, 100 bp, Homo sapiens
atctgcctgtccagccagcatggaaccaaagcggatcagagagggctaccttgtgaagaagcctgcctagggtagttaaaagacgagtgaatgctctcaa

SEQ ID NO: 776807 - DNA, 88 bp, Homo sapiens
agctgctcagagtctcaatgaacttgcttatgtccctgatgccaaaaatgcacctactctttcctctaactctggtgaggtcattctg

SEQ ID NO: 776808 - DNA, 49 bp, Homo sapiens
aggaaattctggaccttattcacaagcatgtagatgtagcagctctact

SEQ ID NO: 776809 - DNA, 100 bp, Homo sapiens
gatgtaccgactgcttttggaataaaaagattcccaggatgtgagcaacacgggaccgctacattgtcacaggtgacattaaggggaacattaagttcta

SEQ ID NO: 776810 - DNA, 76 bp, Homo sapiens
ggaaattgccaaacaatctgtgactattaagaccatgttggaagccatcttatttgccatctctgtatttggaccg

SEQ ID NO: 776811 - DNA, 78 bp, Homo sapiens
aaagccaacggcgaggactgcctcaaccagctggtggatagcgaggtggtcatgctttctgcgcactgggagaagaaa

SEQ ID NO: 776812 - DNA, 100 bp, Homo sapiens
caaccacaagccaatcagttggatatttcattcattggtatacatatggactgtaaggtaattctgttccacaggatatctgctgtatggcagctgatgg

SEQ ID NO: 776813 - DNA, 50 bp, Homo sapiens
cgggcgcgcaggccgcggggagcacctggaatttcgctaaggagtttgtg

SEQ ID NO: 776814 - DNA, 75 bp, Homo sapiens
gagtatctggcctccatcttcggcaccgagaaagacaaagtgcacaagggaagaagatgccaagcaaaaccagct

SEQ ID NO: 776815 - DNA, 82 bp, Homo sapiens
agaaaaagcaagagtttgttatatagcaatgtggtggtacagtgggagctattctgacatgtccactggaagttgtaaaaac

SEQ ID NO: 776816 - DNA, 90 bp, Homo sapiens
gagaaggctcactcaaggatcagttggctttagcaattggtggtgaaattgcctctacctttgatcacccagaactggtgaagcttggaa

SEQ ID NO: 776817 - DNA, 75 bp, Homo sapiens
aaaagaaaggaatccgtaaagacccatttctctatgagtgggagctggtgaggtggccaacttcgctgcgtatgc

SEQ ID NO: 776818 - DNA, 97 bp, Homo sapiens
aggccgcggccggggcaggagcgcagcttcgcctcaacagcatcaagaagctgtccaccatcgccttggcccttggggttgaaaggacccgaagtga

SEQ ID NO: 776819 - DNA, 83 bp, Homo sapiens
gccgcggcggcagcagcagtgagaggatttttagactctgaggagcagttggagctaatccacattatggaaatggaaaccac

SEQ ID NO: 776820 - DNA, 75 bp, Homo sapiens
gctctgcagtgggggcgtaaaggctggcagcctccccgggtgcctccgcgatcttttatgacctagtgcggcaaa

SEQ ID NO: 776821 - DNA, 99 bp, Homo sapiens
gtgggatgaaaaacttccgtaacatccaggttgatgaagctaatttattgacttggcaagggcttattgttcctattcgacacctcttagaggctgcaa

SEQ ID NO: 776822 - DNA, 75 bp, Homo sapiens
agctggatcgacccgcgggacaggtcgtcccattccacctacatcctcgcctagtctcctcccatctgctcagct

SEQ ID NO: 776823 - DNA, 73 bp, Homo sapiens
ttgcaacgtcatcctccacagctaaggcatgaagacccccaacgcacaggaagccgaagggcaacaaaccagg

SEQ ID NO: 776824 - DNA, 50 bp, Homo sapiens
gttcttacaacatggcagacattgacaactgtgctccattgaagtgactt

SEQ ID NO: 776825 - DNA, 82 bp, Homo sapiens
cggaaactccagcgtgtctccagccgtgcaggagcgtctgcagcaggagcgtcctcagctggaccggctgaaaacccagctc

SEQ ID NO: 776826 - DNA, 82 bp, Homo sapiens
cttggccagccaggccatgattgagaagatcctgagcgaggacccccggtggcaagctggtactcctggttaatcaacagct

SEQ ID NO: 776827 - DNA, 98 bp, Homo sapiens
cggagtcctgttccaccttcagagcgtcacggcgtacgccctcatggggaaaatctccccggtgactttcagatttggagtccaggaatgagactaag

SEQ ID NO: 776828 - DNA, 100 bp, Homo sapiens
ggagctcaaagtgtgccttctcggggtgtaatggataggtaacagagaagacctcgtcccttcctagtcagggcatcagcatgactgagtgcttcctgcc

SEQ ID NO: 776829 - DNA, 98 bp, Homo sapiens
ctacctccatcaggaccccagatgtctgacagccctgtgtgacaccaagataagtaacccaccttttgtggtgacattggatgaggtagagctgatcc

SEQ ID NO: 776830 - DNA, 101 bp, Homo sapiens
ctttcctttccgtctggcggcagccatcagatgttgccgatgactatatccacaccgcagcctgcttacatagcctggctttagaagagcccacagtcatc

SEQ ID NO: 776831 - DNA, 100 bp, Homo sapiens
ttaaaaatcaccagttactttaatgattgtctgtgctgtgaatgccctcgcccaccatgtgctcaacaaggacctcaaggacattgttggtgacttcaga

SEQ ID NO: 776832 - DNA, 100 bp, Homo sapiens
acggcaaaagcttctatcatttttgttactcttcagtacaatgtcaccctcccagcaacagattttggaaccagtactagcagtggaggactctttggaa

SEQ ID NO: 776833 - DNA, 95 bp, Homo sapiens
ttttcaatgtccattccgctgtgttgattgaggacgttcccttcacggagaaagattttgagaatcctgatggggatgccaagccctggtgccac

SEQ ID NO: 776834 - DNA, 100 bp, Homo sapiens
cgcagatcagaggtagtcggacctttcccgctggcgcgcagcctcagctagtgagttattctccccacctcagaagtaccagcttttggtgtatcatgca

SEQ ID NO: 776835 - DNA, 82 bp, Homo sapiens
gagtggaaaggctctcagtgaaaaaggttgactatagtcaatggggccaatggagccaagtgtatggaaacccacaacagta

SEQ ID NO: 776836 - DNA, 106 bp, Homo sapiens
gccgtggacgccgaccgtccgggacgaggtactccaaagattcaggtttactcacgtcatccagcagagaatggaaagtcaaatttcctgaattgctatgtgtctg

SEQ ID NO: 776837 - DNA, 75 bp, Homo sapiens
atataatacccttgtgtcttcagtttgaggtacctcccataattttaagggattaatgatgttttgcagcagttt

SEQ ID NO: 776838 - DNA, 50 bp, Homo sapiens
attttcttggcaggaccccccttgtttggacccaattaaatcctttgaag

SEQ ID NO: 776839 - DNA, 100 bp, Homo sapiens
ggactacttagttgtagacatgccaccaggaactggagatgtgcagttatcagtctcacagaatattcctataacaggaagatgatccctatgatcttga

SEQ ID NO: 776840 - DNA, 90 bp, Homo sapiens
gagattcccttcaattccaccaacaaataccagtcacccacaaaagctgtatataatgccagacattggaatcatccagattcagaagaa

SEQ ID NO: 776841 - DNA, 82 bp, Homo sapiens
cgtcatctcttctgatggacataatgggcttggaaaggttacttgctggacagaagaaaagctcccccttctggacatttga

SEQ ID NO: 776842 - DNA, 103 bp, Homo sapiens
ggaggaaccaatttacgagatgacataatgaggcttgatgatacagaataatccagaatggctactctgatctatgttgataaggaaaatggagaaccaggca

SEQ ID NO: 776843 - DNA, 75 bp, Homo sapiens
ccagtgtacctacggaaatcctaactaccactggtgcccgtggttgacacgagctgtgtccccagctgttcccgt

SEQ ID NO: 776844 - DNA, 75 bp, Homo sapiens
ggatttgttaaggattccaagtaactcttatttgggtcgagctgtgcagttttagcgggtacaagatctaccccg

SEQ ID NO: 776845 - DNA, 100 bp, Homo sapiens
gctgtggtccagcctgcgcggcgggaagcggcggcggcggctccagcgtcctaagaggatgagttagatgaactccgtgctgagatggaagagatgagag

SEQ ID NO: 776846 - DNA, 74 bp, Homo sapiens
cacttcagatccaacgaggaggaggaaggcgtgtgctgtggtacgacaggacagaaaccgcgatcaacaacctc

SEQ ID NO: 776847 - DNA, 96 bp, Homo sapiens
agaactagcagagctggtgatgtttatggcacagatttgttcccgacaaggagttttctggttcagaccgtagacagagaggccgagaaggaccag

SEQ ID NO: 776848 - DNA, 50 bp, Homo sapiens
tactctgcctcggggacgaaagcaggtgaattttaccgggaaggccgaga

SEQ ID NO: 776849 - DNA, 74 bp, Homo sapiens
gccttcaacaccaccttcatctccaccatcggtataaatgaccaaggattgtacagagttgtgggggtgagttc

SEQ ID NO: 776850 - DNA, 100 bp, Homo sapiens
ggaagatgcattttctaagctgaaggagaagtttatgaatgagttgcataaaattccatggtgtgtgcagacggttgcaattataggaccaatctttggt

SEQ ID NO: 776851 - DNA, 75 bp, Homo sapiens
ccgagaagagcagagcggagggagccccagacacggctctacagattctcccctgcccctggagaaggaggagca

SEQ ID NO: 776852 - DNA, 74 bp, Homo sapiens
ccgagactctagaagaaatgccctccgggtcacaggataagttatttacagagtatggaagacttgcgatggaa

SEQ ID NO: 776853 - DNA, 83 bp, Homo sapiens
ggcggcaggaaggagaaccaccagggactttgaacatgtcggggatcgccctcagcagactcgcccaggagaggaaagcatgg

SEQ ID NO: 776854 - DNA, 75 bp, Homo sapiens
gagaaagccgttgcctccagcaccacttctaatgggacctttgacattcagggatgtagccatagaattctctca

SEQ ID NO: 776855 - DNA, 80 bp, Homo sapiens
ctcgcgctactctctctttctggcctggaggctatccagcgtttatttatgaaacagagcatcataatggcatagcagag

SEQ ID NO: 776856 - DNA, 100 bp, Homo sapiens
ttcaggagtgtagaattggcaaagttattgccagcttcctgacccttcgcaggtgttacagtcgggtgaaagaacatggtgttgggaaaagaaagagcag

SEQ ID NO: 776857 - DNA, 98 bp, Homo sapiens
cacgaccattatatgctggaatggttccttgtggggaagctgaggcaggaagccctttagtcacttgccgaaggccacgctgttacccatgggaccgg

SEQ ID NO: 776858 - DNA, 75 bp, Homo sapiens
cgccatcaggctcaacgaggaactcaaagtggatgaggaaagctgctctttggcgtaaattgcaatcgattaggg

SEQ ID NO: 776859 - DNA, 98 bp, Homo sapiens
acgagggggccgaaaccgagaggaatagccaggtctggctgggtcggcacaacctgtttgagcctgaagacacaggccagagggtccctgtcagccac

SEQ ID NO: 776860 - DNA, 50 bp, Homo sapiens
cgggacctcctggaagccaaaaatggtccctccttgtggtccatttctgg

SEQ ID NO: 776861 - DNA, 83 bp, Homo sapiens
atcgggctgaagcgactgagtccgcgatggagccctgggcgctgcctatggcacagccaagagcggtaccggcattgcggcca

SEQ ID NO: 776862 - DNA, 100 bp, Homo sapiens
tcccaatcccactgatgaggatcagcccatggtagtgggcagcagtcagtgacaggtgtaacctctgtggatgacagcaacagttactggaggatacggg

SEQ ID NO: 776863 - DNA, 100 bp, Homo sapiens
agctggtaatagatgtctgacaaactaaagaaagacttgtgttacgttgcacgttttcaaaaaatacctaatggtgaaaatgagacaatgattcctgtat

SEQ ID NO: 776864 - DNA, 100 bp, Homo sapiens
gttgtgctggcttggtgacgctcacagtgctgggaaggaatctatccaaggcacagtatgaaaacccaccacatatctatgcccttgcagataatatgta

SEQ ID NO: 776865 - DNA, 134 bp, Homo sapiens
tggagcaggagaagctctccggtgtggtgaagagcgtccaccggcggctccgcaagaagtaccgagaaggactttttttatgaagacatggagtccttgacgcagatgcttagggccttggcaacagatggaaa

SEQ ID NO: 776866 - DNA, 96 bp, Homo sapiens
cgagaggaccaacaagttcatcaaagagctcattaaggacgggaagaacctcatcgctgcgacgaaaagtctcctctgagcctccggcctccataa

SEQ ID NO: 776867 - DNA, 100 bp, Homo sapiens
aggtacttctttagaaaatctcatcatggaaatcacagcacctgattcccaaggcaagacaggtgtggaaacaggaagagaactagaactggaagtaaag

SEQ ID NO: 776868 - DNA, 89 bp, Homo sapiens
gttgccatttcactctggaagatatgctctatgctgcttcatccataaagagctcagtgcctctgatgacagctccctgtcagatgggc

SEQ ID NO: 776869 - DNA, 100 bp, Homo sapiens
cagccaacctatgttgccctgagttacataaataggacgattactgagagccaatcagattagtttcaactgggacaggcttgctagctggatcaacctt

SEQ ID NO: 776870 - DNA, 100 bp, Homo sapiens
tgcatggtgttccacatcattgacttactgctttgtgagctgatgactatcagccagttcgtctgctcagtaaacctggggaactgagaagagaatatga

SEQ ID NO: 776871 - DNA, 82 bp, Homo sapiens
tgaagacgtctgcgtgagaatagagaccaccgaggctgaccccgcactacatctacccaccagccatcgtgcagcccagcgt

SEQ ID NO: 776872 - DNA, 100 bp, Homo sapiens
aaaatggcggacgggaaggcgggagacgagaagcctgaaaagtcgcagcgagctggagccgccggagatgctctacccatggtaccccaggaccagaagg

SEQ ID NO: 776873 - DNA, 100 bp, Homo sapiens
ctattatgtccttgttggcctaactgtgctgagccaagtgccaatggatggcaggaatggctctgcagatggcatggggaggaggttgcactcagcccat

SEQ ID NO: 776874 - DNA, 73 bp, Homo sapiens
gttgacctgagagaacgttttgcctatccaatgcctttctggatcaagcatttggagagctagaaaagaatag

SEQ ID NO: 776875 - DNA, 87 bp, Homo sapiens
tcagtccacccaaggtctcctcggatcgcctggagaggcactcggacctggaccgtggcaaggaggtgtacagccctgactttcata

SEQ ID NO: 776876 - DNA, 76 bp, Homo sapiens
cagattcgcagtggtcgcttcttctccttgggaggtgttgtagcaggaaatgtggctcatattctggactcaaatc

SEQ ID NO: 776877 - DNA, 90 bp, Homo sapiens
agaatacattcctgattacctgccacccattgtgtcttctcaagaagagatgtgaaagctggaaacattcttcttggagaagatggctca

SEQ ID NO: 776878 - DNA, 75 bp, Homo sapiens
cagcaactcacccagcacacaaaatggatctcttacgcttgctgatgaccgtatggcactggtgtcaggcatcag

SEQ ID NO: 776879 - DNA, 75 bp, Homo sapiens
gaaaatttcaagcaggaacataaactccatgttctggacaggaagatgtcacccaagcgcatagctaaaagaagg

SEQ ID NO: 776880 - DNA, 101 bp, Homo sapiens
agcagctcctccgccaagtttgaagccgcactgacctggatactgagcagtaacaaggacgtgggcatctggattggatgtggtcttgatcgtctgcaatg

SEQ ID NO: 776881 - DNA, 100 bp, Homo sapiens
gtttttacccggccaaagtcactgctgttaacaaggatgctacgactaatagactggggtttggctgagttttatcatcctggccaagaatataatgtcc

SEQ ID NO: 776882 - DNA, 100 bp, Homo sapiens
tgcagcatccttcatcaacatctccaacagagaagtgccagaatgtttctccatcccagagagatgaagtaattcaatggctggccaaactcaagtacca

SEQ ID NO: 776883 - DNA, 100 bp, Homo sapiens
agcttcttcctatttgccatggggtcccagggctggtggttgctttgggtctacagctacgtcttacccgcctcctgcctcaacagcctgtgtggtggca

SEQ ID NO: 776884 - DNA, 85 bp, Homo sapiens
cctccgaaccccttcatgcccaaatcccggaaactccagcgtgtctccagccgtgtcactgcttcaaccacctgtgagaaattag

SEQ ID NO: 776885 - DNA, 80 bp, Homo sapiens
caaatccaactatcaaggcctcccagtacgttgtgtgaagagtatcattcgacagtcactcaagactgcttgcaactgat

SEQ ID NO: 776886 - DNA, 75 bp, Homo sapiens
agctcttgccaaaaacctttggacagtccaatgtcaacattgcccagcaagtgagacacgctgtgaacaagacag

SEQ ID NO: 776887 - DNA, 100 bp, Homo sapiens
atggaatccaagggggccagttcctgccgtctgctcttctgcctcttgatctccgccaccgtcttcaggccagggccgacgagattgaaatgatcatgac

SEQ ID NO: 776888 - DNA, 51 bp, Homo sapiens
ggcgccgcgccaggccgggcgggcggggatgaagattttaccaaggacata

SEQ ID NO: 776889 - DNA, 83 bp, Homo sapiens
atgctcctggcgtggacacacaagcaccccaataacctcaagtccaggaaaagcgtgatggttgcagagataccctccacggt

SEQ ID NO: 776890 - DNA, 51 bp, Homo sapiens
agaacgtgagggtgtaacttacaaaaagatcccagatgcagtgactggtta

SEQ ID NO: 776891 - DNA, 82 bp, Homo sapiens
gcccaagtgtcccaagtgcaacaaggaggtgtacttcggagcatattaatgaaaagtgccataaactgaaaaaccaaacatg

SEQ ID NO: 776892 - DNA, 98 bp, Homo sapiens
aagcacatcgaccggcgacagcagccaggagtcatgagcgacagcggcgagcagaactacggcgagcggattgtgaaccatgcctttagtgaagagga

SEQ ID NO: 776893 - DNA, 101 bp, Homo sapiens
atatggctcaacccaaacagctgaggccaaaaagagaggaggaagaagatttcataaggtgctggagaatctggtaaaagcaccattgtgaagcagatgag

SEQ ID NO: 776894 - DNA, 87 bp, Homo sapiens
tggaagcaggactgcgccgcgtcttcctcaagggatcgcttacacctgagacgaactacagaacagcacgtaccagaggtggaagtc

SEQ ID NO: 776895 - DNA, 100 bp, Homo sapiens
gatgtcgtatttataatatgtggaggagagagagctcaccatgctcaggtaaagggatggacccagatgatgtggtaccagttggccaaagaagagcctg

SEQ ID NO: 776896 - DNA, 100 bp, Homo sapiens
tctcacaaatctcatatgcagtccattattgacaaggggctttgttatgcacctaaagccatattggaagctccagaagaaagagcaccccccggaagtc

SEQ ID NO: 776897 - DNA, 100 bp, Homo sapiens
aaccgactttcctccggactcctgcacgacctgctcctacagccggcgatccactcccggctgttcccccggaggctaggcagctggaagagaaagaccg

SEQ ID NO: 776898 - DNA, 95 bp, Homo sapiens
aggaagcggagggcgcgcgagggtgaaaggtgtagcagtcactcggcctacacccacagcatcgaccttgtgaacccagcgacctgactgccttg

SEQ ID NO: 776899 - DNA, 101 bp, Homo sapiens
ctcctgcccgcggaccgcggcagcccagagcagcttagaccatgctcagcctccaagcagccttgtcatcgacaaagaatctgaagtttacaagatgcttc

SEQ ID NO: 776900 - DNA, 80 bp, Homo sapiens
ccatgtcagacgcagccgtagacaccagctccgaaatcaccaccaagggtccctcaggctccctatcagcccctccagct

SEQ ID NO: 776901 - DNA, 50 bp, Homo sapiens
ttccagttcctgtatgatgttcagagatctcggctcaccaaattccacaa

SEQ ID NO: 776902 - DNA, 100 bp, Homo sapiens
tacaccttttccacagggaattgagttggacacaactcagatgggaagttcatcgcccgggcacagcggatagagtacgactgtgaactagttccccggc

SEQ ID NO: 776903 - DNA, 100 bp, Homo sapiens
tgataattgggcctccaagagagattatttggtagcaattgaagagaaaaacaaagctacatttctacgtgcttatgtgaactggagaaataaaaggact

SEQ ID NO: 776904 - DNA, 101 bp, Homo sapiens
ccagaaacatatctattatatcacaggtgtcgtgaaaactacccctaaaagccaaaatgggaaaggaaaagactcatatcaacattgtcgtcattggacac

SEQ ID NO: 776905 - DNA, 75 bp, Homo sapiens
ggagtgctgattgattcacagtagataaagctggcagtaagaaatgctaagtctgagtactgtggaggttacatc

SEQ ID NO: 776906 - DNA, 101 bp, Homo sapiens
gcggggtcgacggtccccactttcccctgagcctcagcacctgcttgtttggaaggaaccggcagaagctgaaaggtctcagaggaggaggctgctggttc

SEQ ID NO: 776907 - DNA, 100 bp, Homo sapiens
gcgtgggcccagccagcaaggagaagtctaacaggcaggaggaggggagacacaaggagcccccgcagatttcgtattcaatttcaaaagtaagtttgaa

SEQ ID NO: 776908 - DNA, 75 bp, Homo sapiens
gcgccgcacggatcatggccgcagccgctctggggcagctctgtgacttcctggagactcacttcctagatgagg

SEQ ID NO: 776909 - DNA, 96 bp, Homo sapiens
ctcgcgcagcgccatggcccccattggcctcaaagctgttgtcggagagaataagctgtcattggaaggaatagtggtacaaagagctgaatgccg

SEQ ID NO: 776910 - DNA, 98 bp, Homo sapiens
cgggatttcaggggtctaccggctctcttatggcgaatgcaacccgaagagagagtgagtgttctaagaacggaagcatctgggctggatggaattta

SEQ ID NO: 776911 - DNA, 90 bp, Homo sapiens
ctctttcaaaggagggactgatagagagaactgaacgaatgaagaagactatggcatcacaagtgtcgactggacctacagagacatctg

SEQ ID NO: 776912 - DNA, 82 bp, Homo sapiens
ggggaccttaacaatccacctaagaaattcagagatatgcaaagcctagagaagctattgaaagatgccattgtttatggtc

SEQ ID NO: 776913 - DNA, 98 bp, Homo sapiens
cgggagctggctgaagatggctactctggagttgaggaaagatgaatgggagggctgattttcgagagccgaatgcagaggttccaagaccaattccc

SEQ ID NO: 776914 - DNA, 103 bp, Homo sapiens
cagtgacagcacaggtcacagtaaggccaaaaatgtgcatactcacagagttagagagagggatggtggtgctggagaatctggtaaaagcaccattgtgaag

SEQ ID NO: 776915 - DNA, 90 bp, Homo sapiens
gcgagggttgaagattgtgaagcaatagcctaaggtgtggatgaggtcaccattgtcaacattttgaccaaccgcagcaatgcacagaga

SEQ ID NO: 776916 - DNA, 124 bp, Homo sapiens
tgaaggtcctcagtccccattccatcacatcctgcccaagtgcaagctggccagggacctcaaggaagcttatgacagcgcatggatttaggagaatgtaccaaaatccacgacttggccctcc

SEQ ID NO: 776917 - DNA, 98 bp, Homo sapiens
gaggagactcgacaacatgtcacccgcgctccaagacctgtcgcaacccggcttcaacggaccacaccaaaatgccatctcaaatggaacacgccatg

SEQ ID NO: 776918 - DNA, 50 bp, Homo sapiens
ccatggcggagcagacctactcgtgtgttctaagaacggaagcatctggg

SEQ ID NO: 776919 - DNA, 74 bp, Homo sapiens
gccctccatcttgcagcccagaagatttctctatgaatcatcatcaagaactctgggagaacttttgaattcat

SEQ ID NO: 776920 - DNA, 74 bp, Homo sapiens
cacaacttaaaaatcttgttcgaactttcaggttgttttggaaaccgaaataacaaataagtccgctttgaaac

SEQ ID NO: 776921 - DNA, 89 bp, Homo sapiens
gattgattttctccactatcactagcaagatgaacctctctgaggaggttgacttggaagactctacgacgaggacttcaaccatgagc

SEQ ID NO: 776922 - DNA, 82 bp, Homo sapiens
ccaggagtgttcaagatgctctctctggaccgatcccactgtatttctgggaaaagccagcttctgtttgcactggtcttca

SEQ ID NO: 776923 - DNA, 101 bp, Homo sapiens
ctcttgggttttttgtggcttccttcgttattggagccaggcctacaccccaggtttggtgcacctcgatttggaggaagtagggcagggcccttatctgg

SEQ ID NO: 776924 - DNA, 74 bp, Homo sapiens
tctgtcctggatgtggtacggaaggaggcagagacccgtgctgagtttgctgagagatcggtagccaagctgga

SEQ ID NO: 776925 - DNA, 74 bp, Homo sapiens
ccatatctaagcaaaggaactgaaacctctgtagaggagcaggatgcaaccgacaggctgtggccggacagctg

SEQ ID NO: 776926 - DNA, 100 bp, Homo sapiens
aagatgaagaaacccagcttgatatgttgttacgccccatggtgtccatcctgccagcagactgattcagaatgggaggcttttgcaaagaatggtgaaa

SEQ ID NO: 776927 - DNA, 101 bp, Homo sapiens
accatcgaaaggagcaagagcaagatcaccgtgacatccgaggtgcctttctccaaaaggcccgatgagagaaagggaaagttaaggatgctggagcagaa

SEQ ID NO: 776928 - DNA, 101 bp, Homo sapiens
cttcagaagtacagagaatgtggagactgaaagcaattaatggccataaaattttgagtagaaaaatccagaaatttgaaaatcagtatcgtggtagagag

SEQ ID NO: 776929 - DNA, 100 bp, Homo sapiens
agccagagccgcctgccatgccccagccagtccccacagcataacaggtgaaagtgggagatacattggatcttctcattggagaggataaagaagcagg

SEQ ID NO: 776930 - DNA, 100 bp, Homo sapiens
ctcccgcccaaggagaatgcgctcttcaagcggatcttgctccaaaggtatgtgaagcctgcaaaaataaaaatgatgatgacaacgacataatggaaac

SEQ ID NO: 776931 - DNA, 80 bp, Homo sapiens
ggctaagcaaaaccctgcagaacggctgcctaatttacagcaaccatgagcaattctgtggtgttcttggtcacacattt

SEQ ID NO: 776932 - DNA, 82 bp, Homo sapiens
aagctcctgggcaaggggacgtctgcagctgaatatgaggccccaggattcctggcgaggtcctcctccccttttccagcag

SEQ ID NO: 776933 - DNA, 75 bp, Homo sapiens
atttacaagtttcctgcagctatgcctggcaggagatcgcagatgctgcggatgcttctgagccccggtggtgtg

SEQ ID NO: 776934 - DNA, 98 bp, Homo sapiens
gtgaagaaaacctcatgaatagcaatcacagagactcggagagcatcactgtttgtgaatagcacaatggaagaagctggactttgtgggttaagaga

SEQ ID NO: 776935 - DNA, 75 bp, Homo sapiens
cagatggcaagatatggacaactaagtgagaagctagcaattgactatgggattaaattcttggagacaagcgca

SEQ ID NO: 776936 - DNA, 90 bp, Homo sapiens
catcgacaagacgatccgggtaaagttccagggaggccgcgaagagtacaggggctcaggtccaggtggcaggggatatgctacccaact

SEQ ID NO: 776937 - DNA, 75 bp, Homo sapiens
atgctgggtccagagcattgtccagactgggccgttgctccagggagaactgcaaatatcttcatccacccccac

SEQ ID NO: 776938 - DNA, 97 bp, Homo sapiens
ggccgtgctgcttatggcggcgctggagagggggcgctgagctgttggggatagattcccagaagtgggataactggatcagagggtgattaccctg

SEQ ID NO: 776939 - DNA, 75 bp, Homo sapiens
cttgcatgtatttggaacaaaaaaaggagatgcctggcagccccgctctctgcaccctgggcgctgcctatggca

SEQ ID NO: 776940 - DNA, 85 bp, Homo sapiens
gaactaatgtcacagcatggatgtaatgcctggaaagtatacaatgaaactttccatgactggatcacagggaaaaaccgaccga

SEQ ID NO: 776941 - DNA, 83 bp, Homo sapiens
ttcatgtgtctcttctaagctgaataaagctgttttggaactgtcaggtacctcaaagcgtttcgacacagccccaactgctg

SEQ ID NO: 776942 - DNA, 101 bp, Homo sapiens
tggtgatacgagccggagatgccttctgcagatgaagaaaccaaggctttgtgactaactcaacccctcaagaaggacaaaactagcatcagagccccttg

SEQ ID NO: 776943 - DNA, 85 bp, Homo sapiens
gaagccattgtgaacagctgtgtgtttgttcatcagactcttcaccaggcagcctggcatcctcgctacaacctcattgttgtgg

SEQ ID NO: 776944 - DNA, 100 bp, Homo sapiens
tgcgcgccttgtcactggagtgcaagaagaaattcccacctgtcaaagaggatgttgttctctactgcctccagaaagacagtgaagatgtgaatcaccg

SEQ ID NO: 776945 - DNA, 100 bp, Homo sapiens
atcgtctcctgtggctgggacaagctggtcaagaatcagcatgattcttcagaggctcttcaggttctcctctgtcattcggtcagccgtctcagtccat

SEQ ID NO: 776946 - DNA, 100 bp, Homo sapiens
aaaatggcagaataatctgcttccatcccgccagtttggatggtgtcggacggcatgacaggcagcaatcctgtgtcccctgcctcatccagttccccag

SEQ ID NO: 776947 - DNA, 96 bp, Homo sapiens
cgtgagtcgtgagctggcaggacacacagagcaggacaggctgctttggtttgtgacctccaggcaggacggccatcctctccagaatgaagatct

SEQ ID NO: 776948 - DNA, 100 bp, Homo sapiens
gtgttggcccagaaactacaggctgaaaagcatgacgtaccaaacaggcacgagataaggctcagcaacagcctcaccaaggactccatgaatatcaaag

SEQ ID NO: 776949 - DNA, 75 bp, Homo sapiens
accggctactacttcggggcctccgccggcaccggcgacctgtctgaagctggaggatcaggagcagcgggcccg

SEQ ID NO: 776950 - DNA, 100 bp, Homo sapiens
cttgtttaaaatgcaaagaaaaatgtgaaggattcgaactgcacttctggagatattatcagacgcgacacagcctcttgaaagtcagaatttttctcct

SEQ ID NO: 776951 - DNA, 85 bp, Homo sapiens
atccagcctgcggagcctgtggggcagatggcagaaacggtggacacaagcgaaatggtcaacggcgctacagaacaaaggacga

SEQ ID NO: 776952 - DNA, 100 bp, Homo sapiens
ctcgaacccgtgccagaacgacgccacctgcctggaccagattggggagttccagtgcatctgcatgcccggtcaagggattggttccaaaataatcaaa

SEQ ID NO: 776953 - DNA, 100 bp, Homo sapiens
cgccgaggcccggaagcggatcctgggcagcgccagccccgaggaggagcaggagaaacccatcctcgacaggatcatgcggccagatgatgccaacgtg

SEQ ID NO: 776954 - DNA, 88 bp, Homo sapiens
ggtttcagacaagaaagccaaacgaggagaggaattgacagaccagagatttgttttatgaaaggtgcttacgaacaagtaattaagt

SEQ ID NO: 776955 - DNA, 100 bp, Homo sapiens
cccccggaccaggggcgagggctacccgctctttgccgtgacaacaccgttcccccagccgggctgtcagattctgaggaagatgaacccacaaagaaga

SEQ ID NO: 776956 - DNA, 75 bp, Homo sapiens
gaatccacacacaaacatggtgtgcctgctgaaaaaagttcctcatgccatgcacctgctgtcacccagcatgca

SEQ ID NO: 776957 - DNA, 73 bp, Homo sapiens
ttaacatcgtttggatcagctccttcatcagaggattatggcttcattaaatttattgaggtatttggttatc

SEQ ID NO: 776958 - DNA, 100 bp, Homo sapiens
ccaatatgttatctccagatgccgcgcaactgtctgatctcagttcatggtgattttctatgatagcgactggaaccccactgtggaccagcaggccatg

SEQ ID NO: 776959 - DNA, 100 bp, Homo sapiens
aaaagatgcctctttaaacaagtgctcctttcttcacccagaacctgttgtggggagtaaggctatggagttactagtagagaaagcaatcagcagtgct

SEQ ID NO: 776960 - DNA, 75 bp, Homo sapiens
gaagatgagagagggtcctgcaaaggttggaagtgtgaatcctgctgaaaacttccgtgttctagtgaaacagaa

SEQ ID NO: 776961 - DNA, 100 bp, Homo sapiens
tttgagtcatttccttcgtacccacagtgcttcatgagagattctgaagggagtggtaatggaagtgaagatgcttcaaaggacagtggagaaggttcct

SEQ ID NO: 776962 - DNA, 89 bp, Homo sapiens
cagtacctgcagaaggtctctggagacatcttcagcagatttggtcgtattgggcgcctggtcaccagggctgcttttaactctggtaa

SEQ ID NO: 776963 - DNA, 100 bp, Homo sapiens
agtctgaacccctgaagggatcaccagagcaccactgccggaactgtggccacatcttctgcaacacctgctccagcaacgagctggccctgccctccta

SEQ ID NO: 776964 - DNA, 96 bp, Homo sapiens
gaggatgatgatgatgacgaagctcccaaaaggcagactcgtcgaagagcggctaaaaacgttaggctgcagttcatggagctcgtttcaaagggc

SEQ ID NO: 776965 - DNA, 98 bp, Homo sapiens
tgaagctgaggacacacccaggaaaagactcaggacggacaagcacagtcttcggaaggtgttacagcacatgaaggccgtgcaggcagatcaggagc

SEQ ID NO: 776966 - DNA, 100 bp, Homo sapiens
gaagagagcactagactaaaggaggagggaaatgaacagtttaagaaaggaggcgtcgcagaatagaggtcaatgtggagctgaggaaagctaagaagga

SEQ ID NO: 776967 - DNA, 95 bp, Homo sapiens
gatttgactgagcaggactattttggtttacagttggctgatgattccacagataacccagttgctgaaaagccaggagtcaaaatgactgagcg

SEQ ID NO: 776968 - DNA, 100 bp, Homo sapiens
ggagcggcggccacggaggcaccatgaagaagtcttactcagaacatacatatgatagttgagaaagacacatattctgatcatgaagaaataaacacaa

SEQ ID NO: 776969 - DNA, 100 bp, Homo sapiens
cagctttggccggagccattcccctgaatggtgactctgagtgatcttccattgtttgaagcactggacctttaatccactgtaggtatggacagggaag

SEQ ID NO: 776970 - DNA, 83 bp, Homo sapiens
cggcagcatgtcggtggcggggctgaagaagcagttctacaaggcgagccagatgcgagccacccctctggctgctcctgcgg

SEQ ID NO: 776971 - DNA, 90 bp, Homo sapiens
cgcaaacatgctccgccagatcatcggtcaggccaagaagcatccgagctgagaaagatcagtctaaagaaaaggagaagaaagtgaaaa

SEQ ID NO: 776972 - DNA, 82 bp, Homo sapiens
gtctctctcatcgaggcccaaaccgccaagatgaggctgccagccttgagagcaccaccgttacctggttgaagaggggagg

SEQ ID NO: 776973 - DNA, 75 bp, Homo sapiens
tccagtgttcaccatcctggccccggaagggctttttggtggtgctggagttggcaagactgtactgatcatgga

SEQ ID NO: 776974 - DNA, 50 bp, Homo sapiens
gtacatatgatttcagctgcaatggcagaattgccaagaagatgctttta

SEQ ID NO: 776975 - DNA, 83 bp, Homo sapiens
ctggaatcgcccaagtccctctactcgcgagcaaattgtggctactaatttgccccctgaagatcaagatggctctggggatg

SEQ ID NO: 776976 - DNA, 101 bp, Homo sapiens
agcagcctgtcgcttgccgggcagctggtgagtcggtgacctggcctgtgagataacggcaaaagcttctatcatttttgttactcttcagtacaatgtca

SEQ ID NO: 776977 - DNA, 50 bp, Homo sapiens
aaaaatgtggcagcgcctgaaaggaatcaaggagtaaataatgctgaaaa

SEQ ID NO: 776978 - DNA, 99 bp, Homo sapiens
tcttgcatgcgagggaccattgcgctccagatggaccctgggaaggacaaagagggggtgccccagccctcagggccgccagcaaggaagaaatttgtg

SEQ ID NO: 776979 - DNA, 100 bp, Homo sapiens
accttcgtgggcatcgtccctcttgccatggtgctgtaccctgtgtgccatgtgcgtaacctgatgctgtggagtgcagtgtacctgccctgcccatccc

SEQ ID NO: 776980 - DNA, 82 bp, Homo sapiens
ttggcacctcttcaataggtgacattcaatgaggttacacatcattttggaatgactgtatatcatctggattacgtggctg

SEQ ID NO: 776981 - DNA, 75 bp, Homo sapiens
aaagaggaaggcctgtaagaactgtaatctatgccagcaattatgacaatgttagcagaccatgcagctcgtcag

SEQ ID NO: 776982 - DNA, 75 bp, Homo sapiens
gacgcccggcgcgagctcaagctgctgctgctcgaggtggggctggtgtccgagcacttctcgcaggccccgcag

SEQ ID NO: 776983 - DNA, 100 bp, Homo sapiens
gtggccagtagaggaggaggtgaacaaggaggagatgctgtccttcatgcacgcccagtccagcttcttccagcagggctacagcctcctgcaccagctg

SEQ ID NO: 776984 - DNA, 100 bp, Homo sapiens
ctccgcgcggctgttggggccgttgcagggtgcgggcgagcgtcgacccgggccgctcctggaggaggaggtgggagatcatgcaacagatgagtgacca

SEQ ID NO: 776985 - DNA, 75 bp, Homo sapiens
gggaatgtacacgataattaaagagtaaagttgtgctcaacggtattctttaggtgatgctagaaggcctcttca

SEQ ID NO: 776986 - DNA, 83 bp, Homo sapiens
tgcagagactcttcagtcgccaagtcaaaatgcagatcttcgtgaaaacccttaccggcaagaccatcacccttgaggtggag

SEQ ID NO: 776987 - DNA, 100 bp, Homo sapiens
gacgggcctgcgagggttgaagattgtgaagcaatagcctaagatcatggaagggaagtggttgctgtgtatgttactggtgcttggaactgctattgtt

SEQ ID NO: 776988 - DNA, 100 bp, Homo sapiens
ggtctctcggacaccattttctgccgctggacgcaaggtatctgctgtgcgtttcagtcaacaatacagcttgtgttcgacaatattccttgatgacagc

SEQ ID NO: 776989 - DNA, 75 bp, Homo sapiens
agagctcttgtgtcacctgatcttgttgccgccaatgttttcagttgcaccaagcttagccaccaatgcatcagc

SEQ ID NO: 776990 - DNA, 140 bp, Homo sapiens
agagaaatcgtttgtcagaggaagagatccgaaaaattcctatgttttcttcatataatccaggggaaccaaacaagataatgctgtagatccagatgtatctgccaggacggtctttatagatgttgaggaggtcaaga

SEQ ID NO: 776991 - DNA, 114 bp, Homo sapiens
aagcgctggcagtcctgcctggcccccagccagttccctgctgaagatggccagatccccttgtctgacttaattcagtgcacaaatgagatgaatgtgaacatcccacagttg

SEQ ID NO: 776992 - DNA, 51 bp, Homo sapiens
atggaatgatattaccagtgaccaaaagtctcagaccagtatccttcaggg

SEQ ID NO: 776993 - DNA, 90 bp, Homo sapiens
aataagaaatatttcaaatacagtaatgaaagtaaagcagatcctgggcagaagggtcagtatagaccttctgatttgctgtgccctgag

SEQ ID NO: 776994 - DNA, 90 bp, Homo sapiens
gttgataaggaaagtactgtccaaatgaattatgtcagcaacgtatccaagtctcaggaggaggtctgcgatttgctccatgccgcaccc

SEQ ID NO: 776995 - DNA, 74 bp, Homo sapiens
ttctggaattcctctgcaatttcttttctactttattaatagttccgattgtcatggagactggcaataccaag

SEQ ID NO: 776996 - DNA, 100 bp, Homo sapiens
tcccctttggtcatggggttcgcagctgcatagggcggagaattgcagaactggagattcacctcgtcgtgatccaggttttgctgttactgctcagtgt

SEQ ID NO: 776997 - DNA, 100 bp, Homo sapiens
tgagaagctgcaagccgccataaacttgagtctactgaaagcatcctgcaggaagctacatcatccatgtctttgatgacccagtttgagcaggaagtat

SEQ ID NO: 776998 - DNA, 97 bp, Homo sapiens
attttgtgatacctgtgaagctgttgcccgcctgcatcagtgcaaaactcctattatccaccgggacctgaaggtggagattctggacgcaaagaca

SEQ ID NO: 776999 - DNA, 75 bp, Homo sapiens
caaagacctggttgtgcaacaggcaggcacaaacaagactgatgttgtctgtggaccgccgggagagcctgccca

SEQ ID NO: 777000 - DNA, 73 bp, Homo sapiens
taagaaccttaaggaacaaggagttacgttcccagctattggctctcagggaaaccacctttgctttgacata

SEQ ID NO: 777001 - DNA, 98 bp, Homo sapiens
cagagagcagcatttcagaaccaggttctccttcgaggaacagagaaaatgaaaccagcagacagaatttgtcagaaaacatagctctgctggcagaa

SEQ ID NO: 777002 - DNA, 83 bp, Homo sapiens
gtggagaggggccgaaccgtgaagggctggaggccccggcggctagagcctggcagagagcaggtgtgtgatacacgtcgtca

SEQ ID NO: 777003 - DNA, 90 bp, Homo sapiens
ctgagcgcactctggagggattctggcatcagggaggctttcagccggagaagcgagtttcagctggctcagctgtcgcaggccctggag

SEQ ID NO: 777004 - DNA, 82 bp, Homo sapiens
gccgcggccctgggagctggaggaaccgcgatgcttcaggactgccccaaggcccgcagggaggtggagctgcactggcggg

SEQ ID NO: 777005 - DNA, 75 bp, Homo sapiens
gtggagtgttcaggatgggggaagtggaagtgaaattgcatttacacagatgtggaagacatgaaagagcaagaa

SEQ ID NO: 777006 - DNA, 100 bp, Homo sapiens
aagttctgcagccagtgcggagagaggctgcctcctgcagcccccatagcaggacccagccttgatgcccacttgggaggcagaaagcaccggcacctgg

SEQ ID NO: 777007 - DNA, 83 bp, Homo sapiens
actggaggctgaaggagtgtgaagacgcctccgaggagcccgaggagaaagacgccaaccaagacaagaggagcagcagcggc

SEQ ID NO: 777008 - DNA, 100 bp, Homo sapiens
tcgtaggacctggcttgggtagagatgatgcgcttctcagaaatgtccagaccatcatggagcagttcaaccctagcctccggaacttcatcgccatggg

SEQ ID NO: 777009 - DNA, 100 bp, Homo sapiens
cgaaaccctgaccggatcccataaacactgtcgcaacttgagttggtggaaccaagtggctggattcatgttcccttaactgacaatcataagaagccaa

SEQ ID NO: 777010 - DNA, 75 bp, Homo sapiens
gtcttggagcagctgaacgtcattaacggcatcctcttcattcctctcagggatgaagactggaatgaattcaat

SEQ ID NO: 777011 - DNA, 75 bp, Homo sapiens
gagcagcttcgggagcagagccggcgcccgccgagtcaggccaaacgtaccaagaaagtcgggatcgtcggtaaa

SEQ ID NO: 777012 - DNA, 74 bp, Homo sapiens
gcgatatggtacccaaactggattatgaccaagaatcgccttcagccctgtctggtgcatccttggcagaaagt

SEQ ID NO: 777013 - DNA, 100 bp, Homo sapiens
ctcgagactctgaaggcagggaccctctgaccatcgccatggaaacagccaacgctgacatcgtcacccttagagacggggtttcacgatgttggccagg

SEQ ID NO: 777014 - DNA, 75 bp, Homo sapiens
gattcgcagtggtcgcttcttctccttgagctaaaaaagtccctgtacgccatcttctcccagtttggccagatc

SEQ ID NO: 777015 - DNA, 75 bp, Homo sapiens
ttcctctcgggcatgaccggaaaggccaaggtgttacacataatattgcattacttcgagaggtgataatcaact

SEQ ID NO: 777016 - DNA, 100 bp, Homo sapiens
ttgacatttaattttagggtcctttatatagaagggagagtagacatttctcttgggaagttgtgcatctgacaggaatatagtactgtacgatatgagg

SEQ ID NO: 777017 - DNA, 82 bp, Homo sapiens
taccgtgacaagaagtacgaggaagtgagtcaccttcaggccattcagaggaggaaagagaggggaatatgaagtcagccaa

SEQ ID NO: 777018 - DNA, 75 bp, Homo sapiens
cagaaagccgcctcttggtttgcgtcctgcactgaaaggaaatgacggattttgcctgtcatctttacttcagag

SEQ ID NO: 777019 - DNA, 82 bp, Homo sapiens
cggcgccgagaggccgtgcgggacgcgggcgccaggaccggccgaacgcagagttggtgtctcacctttaactctccttatg

SEQ ID NO: 777020 - DNA, 75 bp, Homo sapiens
ctcgtcatgctctttgtagcgtggtgcttctgttgctcacaggacgtcttcctcatctgcttctccctcgtcagc

SEQ ID NO: 777021 - DNA, 75 bp, Homo sapiens
ccatacagcagaagcaacctatttctgtgaaggtgatttcagaagaaaaagtcagcactttttgaagtgtctgag

SEQ ID NO: 777022 - DNA, 83 bp, Homo sapiens
gggacagattctatgatgacctccactgcattgatataagaagcaaaaggagggtaattttgatattgtctctggaactcgct

SEQ ID NO: 777023 - DNA, 100 bp, Homo sapiens
tcctgcaggtggagctccggcagccgccctgccgagttcctgttctgggcttcgctgtgcatgacccatctcagcaggatggccgaggacctcatcctct

SEQ ID NO: 777024 - DNA, 80 bp, Homo sapiens
ttctcagatgttggatatttgcttggaaaaacgtgtgggtacgaccttgtttggtgccctggttgtcagatgttggaaag

SEQ ID NO: 777025 - DNA, 126 bp, Homo sapiens
atcagcattgcttcgcagtgccctaccgcggggaactcttgcctcgtttctggctggggtctgctggcgaacggaacactgtgatcaactagccagcaccatagttctccgaagtcagactatcat

SEQ ID NO: 777026 - DNA, 101 bp, Homo sapiens
gctgattggattcgttactgctttgcaacgcgcacctaactccaggaattaaccgacttgcagagggatcctcctgcccagtgttctgcaggacctgtcgg

SEQ ID NO: 777027 - DNA, 97 bp, Homo sapiens
tgatccggttcttggtgcccctgggcatcaccaacatagccatcgacttcggggagcagttattcgacaacgaagagaagcagatgctgcattattt

SEQ ID NO: 777028 - DNA, 75 bp, Homo sapiens
gtctgcgagccaggattcccggctgaaggtgatgtggccgccctcaaccgacgcatccagctcgttgaggaggag

SEQ ID NO: 777029 - DNA, 74 bp, Homo sapiens
ctttaaataataccctggacctttcaaatgtcagagaacagaaaatgcttggacagaagagatgagtactattt

SEQ ID NO: 777030 - DNA, 100 bp, Homo sapiens
tgaaacagattggaaattaattgctatcaatgcgaatgatcctgaagcctcaaagtttcatgctccttcccatttatgagagagccacatgacatcagcc

SEQ ID NO: 777031 - DNA, 141 bp, Homo sapiens
caccttttaacactcctttgtccttggattacttaagagttcccagaaatacatttgccaccaacagagtaggaacatgacatcgatacaagtgaaacagcattccagaacaatttctgaagaccatgcctcttgaagctt

SEQ ID NO: 777032 - DNA, 82 bp, Homo sapiens
cagtacgagaactggcagccaaggcaactgaagcagcagcgggacaagctgaggcagtaccagaagaggatcgcccagcagc

SEQ ID NO: 777033 - DNA, 121 bp, Homo sapiens
gtttcccgacctgaagaggcgccgtcttcccgggtcccgagcactctgtgccggaggagagcttgtttcatatccatatcccactgtattcctgctaatctgctaatgcagtaaattggag

SEQ ID NO: 777034 - DNA, 98 bp, Homo sapiens
gaagcttgcagccctgtgccttgacaagagcctcatccacaccgtgttgctgcaaaaggactatcaggaattgaatgatctggcacgggaccctccag

SEQ ID NO: 777035 - DNA, 100 bp, Homo sapiens
ggaagccgtgcggagcgagttacgagaattcccggccgctgcaaggggtgccacacctccctggatgatccaagatgaagaatacattgctgggaaccaa

SEQ ID NO: 777036 - DNA, 101 bp, Homo sapiens
aacgagtgcatcgcccagctgaaggatctcctacccgaacatctcaaacttacatggtcccaggctgcacccatggcagaaggaggagggcagaatcatca

SEQ ID NO: 777037 - DNA, 100 bp, Homo sapiens
gcctggctgccggcttgttcttactggccctgagtctttgggggcagcctgcagaggctgcgggcccacaaggagcacccggatttcctggagctgtagg

SEQ ID NO: 777038 - DNA, 74 bp, Homo sapiens
acaatgaaatgagttgttcaccttaacccattacggagcaggtgccgagaggttgccctgatgggctctgcccg

SEQ ID NO: 777039 - DNA, 100 bp, Homo sapiens
cagctgcctacagaaccgtcccaaaatatggcaaagaaacctattctgaggcaacaagaatgggtgaatcagcaaagggaagatattgaaaggcaaagga

SEQ ID NO: 777040 - DNA, 75 bp, Homo sapiens
cgatgactcttgtgaagcagcaggcgccaagtgatgaaggacatatttgacagtgattggtacacttctcgaaat

SEQ ID NO: 777041 - DNA, 82 bp, Homo sapiens
cttgtacagcgccggtcaacatcgcggtcatcaagtactgatgcagcagtctcggccctggctgctctatgcagtgaatatt

SEQ ID NO: 777042 - DNA, 74 bp, Homo sapiens
agaaatcagctggtgccgaggtgaaaggacacattcagctaacgtattttagcaggtggagtgaggttgaagat

SEQ ID NO: 777043 - DNA, 90 bp, Homo sapiens
cggggagccccagagcacttctgcttccagaacctcggaggcggggtgccccctttcaaaggtctcagcatcctcacgctacctcctgcc

SEQ ID NO: 777044 - DNA, 100 bp, Homo sapiens
ggcagctgctgcaggtgaagagtaggcggcggggcagagagcggcctccgaggtgtctttggtgcaacactaacaaggcttgtctggactacccagttac

SEQ ID NO: 777045 - DNA, 100 bp, Homo sapiens
taaaaaagcaatttttagtccagagctctatgaaaacattgctgaatggattgtggtaaagagaaatgtgtatgaccttacaagtatccccgttcgccac

SEQ ID NO: 777046 - DNA, 90 bp, Homo sapiens
aagatgtgcctttcctcttctgccatgattgtgaggcttccctggccatgtggaactgcatttataagacgctgtttggcatatcgaaaa

SEQ ID NO: 777047 - DNA, 75 bp, Homo sapiens
gatgcgggccctgctggaccagctcatgggcacggctcgggacggtcctagcagaagatgtgactcagactgcct

SEQ ID NO: 777048 - DNA, 75 bp, Homo sapiens
aagccctcacaatctgcttcagcgactctcgttggggagatagagattcagaaggcacctggagaaaaggacctg

SEQ ID NO: 777049 - DNA, 98 bp, Homo sapiens
ttccacagccaagtgcgggagtccacgtttcctgatgaagatgaggaaacaaggttatatcgcttaaagatagaagaacagaaacgcctaagagaaga

SEQ ID NO: 777050 - DNA, 75 bp, Homo sapiens
gtggatcgctgtgatcgtcacttggaagttgaagatttgtccaggagcagatagctgaagagagagagagagaag

SEQ ID NO: 777051 - DNA, 98 bp, Homo sapiens
ctctacctcctgcgaggcctcccgggctccgggaaaactacactggccaggcttcttccccgggagctcgcagggctgcgacgccttcctgcggcata

SEQ ID NO: 777052 - DNA, 101 bp, Homo sapiens
tatcatactacaacatgaatcggatccgactacagtggtctcgaatatggcatgtgattggagatcacttcaataagcctgggttactaggtgtctttcag

SEQ ID NO: 777053 - DNA, 83 bp, Homo sapiens
catgtctgagactcctgctcagtgtagcattaagccatcactggtgcaagctatatttaacggagatcctgatgaagttcgag

SEQ ID NO: 777054 - DNA, 88 bp, Homo sapiens
cgccaggatcttataaaacaaatgctgctgctatgaatatgggtcgaccattccaaaaaaatcgcggaatggccaaagactatgacgg

SEQ ID NO: 777055 - DNA, 97 bp, Homo sapiens
cacagtatcagttaaggagcttgatttgtttttggcatactacgtgcaggagcaagagaggtgagagacttcagaggctgccctttcttttcatctg

SEQ ID NO: 777056 - DNA, 74 bp, Homo sapiens
gtggatgagcctcggggacactgtgccgaatgaagatgccgaggaatgtgacagggctgggagtgtggccacct

SEQ ID NO: 777057 - DNA, 100 bp, Homo sapiens
cgtgtgctacatacgggctgaatgtggagagggtcttccaggacgaaatgcactcggtgatggaaagagagccactattctgaagaacacttggccaaag

SEQ ID NO: 777058 - DNA, 98 bp, Homo sapiens
ttgctggacggaccgcccaaccccaaaagagccaaactcagctcgcccggtttctcggcgaatgacagcacagccatggtctgaaaaagttcttttct

SEQ ID NO: 777059 - DNA, 73 bp, Homo sapiens
agttgcaccactgagaaggacagcacctgtgagaatatgaacttctcttggaggaatgaatgcaaccagtgta

SEQ ID NO: 777060 - DNA, 98 bp, Homo sapiens
acgtctgcaagtccacagagaagcagtctgtgaagcagcgatacagagacggtaaagaacaggtccaagaaaagctcaaagaaagcaaataccagcag

SEQ ID NO: 777061 - DNA, 71 bp, Homo sapiens
ccagagccctggcggatgatgtggtcgggtctgtgctggactgcttcagcgccgtgccgtccctgcagtga

SEQ ID NO: 777062 - DNA, 100 bp, Homo sapiens
gatcctgcgcatcactggctactatggctaccagccctgggcagcgagctgcaaaaatctttgtagaatttgatggctgtaactggaagcaacactcctg

SEQ ID NO: 777063 - DNA, 82 bp, Homo sapiens
cccccctcagtttctgaaatgattctccagaatttctcctcataaaaaagttggaaaatggatataccttatttgattatga

SEQ ID NO: 777064 - DNA, 75 bp, Homo sapiens
caaggagaatgcgctcttcaagcggatcttggcttggacttaaggatcagcaggagagagaaatcattcacgttc

SEQ ID NO: 777065 - DNA, 90 bp, Homo sapiens
acctctacttagctcagcaattcttacctttattgcctaagtgtaatcttgaacatgggcggtgctgtgagtgctggtgaagacaatgat

SEQ ID NO: 777066 - DNA, 51 bp, Homo sapiens
gccatgagagaccgaaatgcgttacagccacccgtgggaaactgttacaac

SEQ ID NO: 777067 - DNA, 82 bp, Homo sapiens
cctcgacgtcttgcctgtgtcccacttgttcgcggcctataggtggagccatcgaagcccccacccacaggctgacagaggc

SEQ ID NO: 777068 - DNA, 100 bp, Homo sapiens
cctcccaaagtgctggggttacaggtatcgaaggatgatcgcagtgatgtggagagcagctcagaggaagaagatgtgaccacctgcacaaaaagtccct

SEQ ID NO: 777069 - DNA, 101 bp, Homo sapiens
ggagtcagaaccctccgcagagtaaaggacgattactgagagccaatcagattagtttcaactgggacaggcttgctagctggatcaaccttactgagcag

SEQ ID NO: 777070 - DNA, 101 bp, Homo sapiens
cttggaaatccaagatctgccatcccaggtccgcaacccggagaagcaagcctctgcaatcccagataatggaagaaggtcctgtctaaagctcaaagtct

SEQ ID NO: 777071 - DNA, 98 bp, Homo sapiens
tcttctaagctgaataaagctgttttggaactgtcaggtacctcaaagcgttccagcaacagatagaaatgctttaagttcactctggggaaagctgg

SEQ ID NO: 777072 - DNA, 100 bp, Homo sapiens
catgggttctctgaggatgggatataaaccacagtacttcaggatcccattatgaaaattcccagcggggacctgtgtcttctacaagtgattctagcac

SEQ ID NO: 777073 - DNA, 75 bp, Homo sapiens
gcagcaagccgcacctggagaagctgaccctgggcatcacgcgcatcctaggttcaagggcagcaggaaagacga

SEQ ID NO: 777074 - DNA, 82 bp, Homo sapiens
gactccttcggcagtccacccaccgccgccgcctcccagaattcagtttgcctgttctgtatgcaagttccgtagctttgat

SEQ ID NO: 777075 - DNA, 78 bp, Homo sapiens
ttgggagtcctcagcagggggatcattcacagtgaggacagacacaggtgttttaaggatttccaactgcagcgggct

SEQ ID NO: 777076 - DNA, 100 bp, Homo sapiens
cccaggtctccgtgcagcccaacttccagcaggacaagactgtgcaggtgcctgtgtactcggagcaggagtaccagctttatctccacgatgatgcttg

SEQ ID NO: 777077 - DNA, 100 bp, Homo sapiens
tttttcaccctcacgctgatgaacttgtacttcacgcagaggcggggtttcaccatgttgcccagactggtcttgaactcctgagcttaagcaatccacc

SEQ ID NO: 777078 - DNA, 88 bp, Homo sapiens
ggagccagtggccctgagcaatagcacgaggcctgttgtctaccaagtgcagtttaaatatctgatctgaaatgtgtccaggatgcca

SEQ ID NO: 777079 - DNA, 82 bp, Homo sapiens
caaaacagaaaccaaaaactccattttgctttggggctccatgggccttaccccttcggccagtcttaaacgggtgtcagca

SEQ ID NO: 777080 - DNA, 76 bp, Homo sapiens
gtttgtcttctgctttggcccaggcccctccagccagcgtcaggtgcagaatggcccctctcctgatgagatggac

SEQ ID NO: 777081 - DNA, 100 bp, Homo sapiens
tttgttgccataatcatagaggcaagtgggggaggagcgttccttgtcctccctctgcacaagctcattcttggaatcccagaacaggccttaagtcttc

SEQ ID NO: 777082 - DNA, 100 bp, Homo sapiens
caacccgctgcaggagcgcatcgaggactggaagaaggcggccaaccagctggacaaggaccacgcgaaagtgttttaactcaaatgggtgatgaaaagg

SEQ ID NO: 777083 - DNA, 100 bp, Homo sapiens
gtttttagaacaaaccctggctcctccaagcccttgccctgttggatgaataggcacctctggaagagccaactgtgtgagatggtgcagcccagtggtg

SEQ ID NO: 777084 - DNA, 98 bp, Homo sapiens
gatttggggatctctagcctacaggatggcttggccttgcacataaggaggatttgacagctaaggatattgaagaaattattgatgagctcaaggct

SEQ ID NO: 777085 - DNA, 100 bp, Homo sapiens
aatggactggcccccttgagcctgtcccaagccctggtgccaggtgtccatccccgtgctgaggccggcatttgtaaatccactcatccctgaaagccca

SEQ ID NO: 777086 - DNA, 100 bp, Homo sapiens
ccgtcgagatggttttgaaagtcatcgcatttaagcctaaggtaggaatgaattgatagccagatacatcaaactcaggacaggcaagacgaggaccaga

SEQ ID NO: 777087 - DNA, 90 bp, Homo sapiens
ccgggaagcaggcagagagcggccaggaagcggagtgtgaacatggctacgcctcttcattcccgtccatgccgagcccccgactgcagc

SEQ ID NO: 777088 - DNA, 71 bp, Homo sapiens
gattaaaaagaccactgaggagcaggtgcaggggatggactgaacggacagttccagaagtgtgactggct

SEQ ID NO: 777089 - DNA, 105 bp, Homo sapiens
caggaacaagtgtgggagaggaagcggcggcggcggcgccgggcccgggggtggtgacagcaggtctgaggagttgcgggagcttcaggacgagaaggcagagct

SEQ ID NO: 777090 - DNA, 75 bp, Homo sapiens
cagggtccctgaagagggaagacacgcggaaacaggtggattcaccaatgaacttgaagcatcctcatgacctag

SEQ ID NO: 777091 - DNA, 50 bp, Homo sapiens
agatgagattcagaagatgcactgttaaacgtttaatgaaagaagcggca

SEQ ID NO: 777092 - DNA, 100 bp, Homo sapiens
ctcttgggttttttgtggcttccttcgttattggagccaggcctacaccccaggagcaggccgggctctcgccatgggtcactgtcgcctctgccacggg

SEQ ID NO: 777093 - DNA, 100 bp, Homo sapiens
ttcgcctttcccgagccctggaggtggggagaaaaggtgaaaggtgtagcagtcactcggcctacacccacagcatcgaccttgtgaacccagcgacctg

SEQ ID NO: 777094 - DNA, 75 bp, Homo sapiens
cggaggtggaagttggggagctttgagatggagacccagacgcagaggcggggctggcccctggggagctgcagc

SEQ ID NO: 777095 - DNA, 101 bp, Homo sapiens
ccgaggtgttgcggacgctggccggaatatgatgaagaatgggctaagaaaattcagagtgaaaagtttcgctggcataactctcagtggctggagatggt

SEQ ID NO: 777096 - DNA, 101 bp, Homo sapiens
aagctaccgagttaccctaagaaagcatcaacaacagcaacttgtgattggcggtgaccggatattcagttgcacatccccacatcaatgcactgccaatg

SEQ ID NO: 777097 - DNA, 75 bp, Homo sapiens
ccggatcaatccagatggcagccagtcagtggtggaggttgcccccaagtttcctggcagtgtgtgatactgagg

SEQ ID NO: 777098 - DNA, 90 bp, Homo sapiens
attttatgatttactggatgaactgataaaacccaccagtctagcctccaccaggcggtgtgaagatgcctaatgtacccaatacacaac

SEQ ID NO: 777099 - DNA, 74 bp, Homo sapiens
tttattcccctcctgaatccgaagcagaggagaaggcagagcccccccaggctatgaatgccctgatgcggttg

SEQ ID NO: 777100 - DNA, 73 bp, Homo sapiens
tggaatgtgaagagacaggaggcagcagacggacatccagagtttgccagatccggcccggtgcctgggttcc

SEQ ID NO: 777101 - DNA, 90 bp, Homo sapiens
ctctcaatgaaagtgttgaaacaggatgggaaatattttacacaggtggtttacaaatccgacgactgtcaatgccttctacagtgcatc

SEQ ID NO: 777102 - DNA, 139 bp, Homo sapiens
gggggtgggggggcggccctgggataggggctgtggcagtacgcggggacccggctgcggtggctgcgggactgacgaaccactaaggcttttcttcctacgatgctggagattaatcatggtcatattgtgacagttg

SEQ ID NO: 777103 - DNA, 100 bp, Homo sapiens
aggacacttctgattaagacggttgaaactagagatggacaggtagagtacgtgtttacagataaaactggtacactgacagaaaatgagatgcagtttc

SEQ ID NO: 777104 - DNA, 100 bp, Homo sapiens
aggagcggccgcgtttcggcctcagaaattacagagtcacgggagacaccgttctgtgttactgctgtggcctgcgcagcttccgtgagctgacctatca

SEQ ID NO: 777105 - DNA, 75 bp, Homo sapiens
gcactactggcatcgatggagccatgacaatttgggatttcaagcctggtccgacccccagtggcactaacgtgg

SEQ ID NO: 777106 - DNA, 82 bp, Homo sapiens
acgagtgccgccagcatgtctgacaaactgccctacaaagtcggtcaacgtattgaaacttactgttgaagacttggagaaa

SEQ ID NO: 777107 - DNA, 83 bp, Homo sapiens
catcggcctggcccccctcatggccatgtgctctgtgtaccagtctggaggagtcaacatgtccacaggtcctggctaccctg

SEQ ID NO: 777108 - DNA, 50 bp, Homo sapiens
cgcgcccgccagctgctccggagatacgaaaaactgttcttgaaaaccac

SEQ ID NO: 777109 - DNA, 82 bp, Homo sapiens
tcatcgcctttctggtgggaggcttgattgggagtgcatccgccccaacccttttccccctcgtctcctgtgagaattcccc

SEQ ID NO: 777110 - DNA, 98 bp, Homo sapiens
gaaattgcagccagggatattgagaaacttctgagcaacagatctaaagccctggtgatctggcagtgtggtggggttctggaaacacacccatgttc

SEQ ID NO: 777111 - DNA, 100 bp, Homo sapiens
tgagaaaggaaagacttctgtgctcccgagaacttcctatcaggaaatatgagctgtacagcatggactgggacctgaaggaggaactcagggattgcct

SEQ ID NO: 777112 - DNA, 74 bp, Homo sapiens
taagacgccaggtcctcctggaagcctagaaatgattgagctaagagaacgagagatagaacgactgtcagttg

SEQ ID NO: 777113 - DNA, 100 bp, Homo sapiens
atttcttaagaaagagacccattgttcctgagcataagaagcaaccatgtccttatgggaccagttactctccacaagaaaattcacacaaccacagtgc

SEQ ID NO: 777114 - DNA, 100 bp, Homo sapiens
aaaacaccaaactctctagcaaaaccactgctaagttatccactagtgctaaaaggtcagaaagcaacattgaatgcagaagaaatggcggacttctaca

SEQ ID NO: 777115 - DNA, 74 bp, Homo sapiens
ccaaatatggtgacctggctaactggatgatacctttggcaaacatgaattgactgggcataaagtagctgtga

SEQ ID NO: 777116 - DNA, 50 bp, Homo sapiens
ggccactcagagtcgcccgagaaccagaagatcagctgccatgttacttg

SEQ ID NO: 777117 - DNA, 75 bp, Homo sapiens
ttccagaaggttatgattttggtgtcaccaccagagaaggatgatggccagaaaggtgaagaagctgtcggtagc

SEQ ID NO: 777118 - DNA, 91 bp, Homo sapiens
cctccccagtagctgatcctacaggatgaccggaaagaagggatgaccgcgtttgtggaaaagagaaaggccaacttcaaagaccagtgag

SEQ ID NO: 777119 - DNA, 75 bp, Homo sapiens
gtggagatatggcgcaactgcggcgcgcagatcgggagcggtgccgagaaaaatttccttactagatgacatttc

SEQ ID NO: 777120 - DNA, 100 bp, Homo sapiens
caccaccttcttccaaagagcggtgtacttgccccgggaaatggatacaagtagaagaaaattccatttataaagtactgagagaatgatattggatttt

SEQ ID NO: 777121 - DNA, 90 bp, Homo sapiens
ttcctgacccagctcaccttcacgctggtgcccttctttgaggagggaatgggtactgttcaaaaaggaatgccccacaagtgttaccat

SEQ ID NO: 777122 - DNA, 98 bp, Homo sapiens
ccgcagccgccggcgctgtggaggattgtgcagactggtgcttaaaatggaagtcgatattaatggagagtctagaagtaccctgaccaccttgccct

SEQ ID NO: 777123 - DNA, 78 bp, Homo sapiens
tgacttcttcgtagacattgtctcccaagacaacttcctcaccagcaccttacagcacctgggctgtcccccatgcag

SEQ ID NO: 777124 - DNA, 83 bp, Homo sapiens
ctctaaaccttatagcctgcttatgggggaaggagggtgtgaagacagagaatgaccacatcaacctgaaggtggccgggcag

SEQ ID NO: 777125 - DNA, 75 bp, Homo sapiens
ccaacacctatcaccgaaatggagatctctgtcaaaaggttgcatccttaatgtccagtcaaggagtggtgacac

SEQ ID NO: 777126 - DNA, 100 bp, Homo sapiens
acaccggctacttctcagctttaccatccctggaggagacctggcagcaggttgatcttcactcgaaaaggggtactccgtgtggaggggtttttaagcc

SEQ ID NO: 777127 - DNA, 75 bp, Homo sapiens
cacattcaagctgataggctgcgctaccggaatgtcatccagcgagtgattagtggaatgcagtagccctctggg

SEQ ID NO: 777128 - DNA, 98 bp, Homo sapiens
tgggacacctcactcaccagcaggcccggcagccatggcggtggaaggaggaatgaaatgtgtgaagttcttgctctacgtcctcctgctggcctttt

SEQ ID NO: 777129 - DNA, 82 bp, Homo sapiens
gggactaaggcgagccggagaccgagcccgaacagcaggcaatagccctctggaacaagacaattcatgtgagataagaaag

SEQ ID NO: 777130 - DNA, 100 bp, Homo sapiens
ttccgcagccaggccgggggcgcctgcgactgcggggacagcaacgtgatgcgggagagcgggattcgcccgtccttccagttggagagttctcggagcc

SEQ ID NO: 777131 - DNA, 82 bp, Homo sapiens
ccgggatttgggtcgcagttcttgtttgtggatcgctgtgatcgtcacttgtgagtccattcttgcacaccgagaaaatatg

SEQ ID NO: 777132 - DNA, 95 bp, Homo sapiens
gtggaggcaggctgcggcagacggcgacagtggcggcggcgccatggcagggcttgcaggggtcgggccccggctcagtggtcccaggcagctcg

SEQ ID NO: 777133 - DNA, 90 bp, Homo sapiens
catggagctggctggggccgcacctgagaaggagcaggggaaagagattaatctaatagctcctcctcggtatgtaatgactacgacaac

SEQ ID NO: 777134 - DNA, 74 bp, Homo sapiens
tccatatagggagaactgctcagattggccatgtctatcctgcagtgagatcggactggaactgttcggctgcg

SEQ ID NO: 777135 - DNA, 90 bp, Homo sapiens
ggttttgagaagccttccgctattcagcagagagctattattccctgtattaaagatccaagagctcctgtctccccaggagccccccag

SEQ ID NO: 777136 - DNA, 98 bp, Homo sapiens
ggaaatggagtattactactgccccagcctgctgaagctcttgcgctacctctggtgatccgggccaaggtggtggggaagaagctggtaaaggaggg

SEQ ID NO: 777137 - DNA, 60 bp, Homo sapiens
tgatctcgatgttgctgacaggaccaaatttgataagggaggcttgtggatcagaatctg

SEQ ID NO: 777138 - DNA, 97 bp, Homo sapiens
agaggcctgcaaagctgtacaagagatcatgcaggtatctagaagagcagaagacagagaatggaaaagataaggaacagaaacaaacaaataccga

SEQ ID NO: 777139 - DNA, 98 bp, Homo sapiens
cagagaagagaagctttactggtgttccagccctaagccgtggtccttcagcatatctctgtgctgcagacaacacaccttcctgatggaggtgcccg

SEQ ID NO: 777140 - DNA, 82 bp, Homo sapiens
tcagaaggatatcgacgtcgtgatccagaagtccagagctgaggactgcctgtttgcagagcctggcagagagcaggtgtgt

SEQ ID NO: 777141 - DNA, 102 bp, Homo sapiens
ccaggctgaccacgagcttttcctccaggcctttgagagacagagcgggatgccaccagcttgtccaaagggaagttccaggagctcctggtgggcatcgtt

SEQ ID NO: 777142 - DNA, 100 bp, Homo sapiens
agcagcccagccaagcactgtcaggataacgaaggaggcccaacttcattcaataaggagcctgacggatttatcccagacggtagaacaaaaggaagaa

SEQ ID NO: 777143 - DNA, 100 bp, Homo sapiens
ctcaaaatgaagatggcacatggcccaggcagaccttgcagtcaaagctcacagcctttgtcctgaagtccttcgcacaggctcgcagctttatcttcgt

SEQ ID NO: 777144 - DNA, 99 bp, Homo sapiens
cgctgcccgggccgcgaggacgaggcggcgccgccgggctgtggaggttggtgttcgaggaagagacattgttgttcttggtgtggagaagaagtcagt

SEQ ID NO: 777145 - DNA, 83 bp, Homo sapiens
caggagctggccccgccgcccgccctaccccccaagcagcggcagctgacctgcaatgcttcttttgccacccgagaccgtct

SEQ ID NO: 777146 - DNA, 82 bp, Homo sapiens
cttctagacgacaaaatgcaaaaaaggaggccaaagactttataacgaaggaggcccaacttcattcaataaggagcctgac

SEQ ID NO: 777147 - DNA, 74 bp, Homo sapiens
aactacagatactttgaagtagaagaagctgatgacggtatccaactgttgaaaaacgagccagagtcttcaat

SEQ ID NO: 777148 - DNA, 50 bp, Homo sapiens
ttgcatccggagagtggacaagaaaatcaatgtccgagttaccaccatgg

SEQ ID NO: 777149 - DNA, 90 bp, Homo sapiens
catcatggattaacccaaaagatgatctcagagacatgttctgtaaggttggatggcaagcatgtggtgtttggcaaagtgaaagaaggc

SEQ ID NO: 777150 - DNA, 75 bp, Homo sapiens
aagaaattcccacctgtcaaagagccatggaatgtcttacccaatttcaggtttagtgaagatgtataaagcaaa

SEQ ID NO: 777151 - DNA, 101 bp, Homo sapiens
ctcaagaaggtgaagatgatacctttctaacagcccaagctcattggtgggcagtattacttatgggaattgctctgatcatgctaatggctggatttatt
